United States Patent Application Publication US 2015/0240253 A1 - sequence listing, part 34

SEQ ID NO: 160776 - DNA, 483 bp, Zea Mays
ctgaagaagatccctggtgcagtgcaccttgccgctgacaaccccgcgcctggattcacgccgccgcggtgattcatgctcactgatgcccggataacgcttcagggtgaaaagatcttcgccatggatgagactcggggctggccgccgtacccccttgccttgcgaccggtctagataagttcgccagagatgggcgcctgccgatcgggcgccacatgccttgaagcttcaccacgtcgcagtaagccgctctagatagctggttcgtcgtcggtaagcctgtcaccgtgaaagccacggagctcttgcgccagtgctctcccctctctccggccgccagcgtgccattccaaattcaagagccaccgccctcgggccctataaatggagtgtgccatcagctccgctaggtaatcatacacccaacgcaccagcccatgcctcagattatccaccagagtgctccagttttgaatttcc

SEQ ID NO: 160777 - DNA, 521 bp, Zea Mays
gttggatcagaaatcgtgggcacagattagatcatgaagcggtatgcaccacggaccgtcggatcagacatcagcggccacgattttattagactggatcaacctacacccgcccgatcacaaatctacgttccacgtgaatcccgactgaagcgttgcgcgcgatctaatcgcatccgcacgatccagatcgaacggcgcccgatcagcacaggacacaatctaatcacatccactagccacagatcggacggctgacgcgctgtcatcctcctcccgctccccacacacggcggtggcgctgacccgaggcccagacctcgccggagcggccaaaccccgttctagcgcctcgttactcgagcgattaggtgctacgcgaagccaaaggaagggtgaacttgattgtggtttcggtaccttgaattgagatggcaatgtcccccaatcacgcaccgcagcggcaccacggcgttacatgacgaccgacgagcaatcaagcgtgattccgccaccatcgc

SEQ ID NO: 160778 - DNA, 423 bp, Zea Mays
gcctgtgatcatagacagatgagcagaagaaagataattcgctaatatgaacaacataaagcaagaggccaactcacctaaagcttggagaggaacagtggtagacccagggcaggaggagttgagtcatggctcgacgagggaagatcaataggaacgatctacagggcactatccagggtaacctcagccccaccagcagacagcaaactccttgcatctagctcgacgacctctaaggtgacttgtccggttgaaactgtggaagcacgaatcaccgtcgccccatctgaccgaggtggggatgacccaatgtggacgtccatggaggcgtgggaaagagagcccacctaaacaccctcgagggctgggttgtagcttgcactacccaccagagctagatcactaccagaaacaccctct

SEQ ID NO: 160779 - DNA, 389 bp, Zea Mays
gtggttgtgtaagatatttgattgaggtgtgcgggtatattccgtaatatggttatactcgcaacgaggaaagatgtatgtattgtgtaacacgacgtttaggttgctattgtataatcgtgtgaaggatgctcatgatggtcatgtgactaaagggtggtgtagtggcgaagcgagagataagtttagtattttaaacggttagttgatagcacctatcggtgtcgtcatgatttttgttgtatggtggatcgatgcttcgctttataaattattacattccatgcccatcggataaataaatgtctggttgatcgattagaggtcttatatgagtgttatcgcagcccaataattattggaagcgagtagcgttcataagttggtcc

SEQ ID NO: 160780 - DNA, 467 bp, Zea Mays
gtttgcaaggaagtagcagcagctaaacttacaaccaaacaaaacccaagtctcaaatggtggctggtggtggtttatataggtgggggagaggcgtggaggggtgtaaaccctaacttagaatgggcccctattggtatgaactagatacaagggcctcagcccaagactggaagactgaacgtcattttggcaattctgtttagctcctttggaatttcatcttgaggttgaatccatctaaaagtagacttcaggagctttccaacaagtactcatgggcttcaagcaatatttggagctaagagttatggctttccaaagttgccccctcctggaggtctgaactggtatggtccgatcagatcatccacactcgctttcttgtcgtgatttctctccctccaatctggttcacgtcctaagttcctatgaataataaaagtatcacaagaatttagtagtac

SEQ ID NO: 160781 - DNA, 876 bp, Zea Mays
ccacgacggtggacacgaattcactgcgccaaggttcttcttcatctccggccgccagcacggctcggccgaattgatcaccaccactcgctctccctataaattgagccctccaccagctccacaaggtcatcagctacccagtctccgagaatcgttagcaatcattcgccagagctcgcgaattttgaattcgccccaaatcagttctccgccaccccgaaacccacctcaccgtggccagccccattccggtcagttcatcctcccctctccctcgtttaagctttctcatatgtctacgatgcttgccgacccacacaattgcgctaggagccctatggtcaccgggaacgcactcatctgtccgccacccattcggttcacgcggacagagcttgatagctcaccaactgtgtaattaacttaggggaaatgctcggggtaggtctgatttgatgtccgccgctcgggaaccctagtcgttgccctattcgtccagtccaggagctcgccggagcctccccgcgttcaccgtcgtcgtggacttcaccctgcgaagaaatagaagttcaaggacatttttgcaaagtgtcagcgactgtgttaaatagtgccttggactctgtcgggatattcaagaagacaaggacccttctgcaaggttgccaacgcgggcgtgggcgccccccgtttctctgtgtagctgggccgcctgggctaaaaccagcccaacactattcaatctttttccttttctttttcaatagaactttagaaatccatagaaaattgtagaaaaatcctaaaattgtgaaaccaattttcctagacttcttattttccatagaattaaataaaaatagttgactgatt

SEQ ID NO: 160782 - DNA, 1103 bp, Zea Mays
ttcgggttggggtgtgggtgtgtccgatgggttcggcggtcaagctagggttatgcgctggtgtaggtggcgcgtggggtcaaaattcaaattagtgggaatgacaattggttgtggctggtaaatattctttcttgcgtgtcccgtttgtgctaggctgcaaattttgttctggagaggagaaccatttcgtcttgtggattcccccaattgtttggtttcctaggaaagggcccatctttcaggcaaatgagacggctttcagtttcgtggctctttcctatgtgtgcaggcttcggttgttggttgtggcatgttttgtttggtgcttgactgcgtgcagcactgctataatctgctggatagaataggggtcattgtggatttggctttaggctgtttggtctgggtgtctgtaatttaaactaatgcttgtaaaatgataaatgtgaaatgacctgcattgaacatttcaggtctgtacgcattaccattttttattgcatacctatgctttattgtctgtattttattcgccacgtttgatgttctgtaaacgcctatcatggtttggatcaagttgttcttgagattgtggagatattcaaatcgaataggattggatattgaggtctgacaattcctaatgctcccttaatttgaatcggaggcttggtatagtggtttagactggacctttaaaactactgtagatgtagatactatgggctgtaaatttgctgtatataaattgttggttgagctagttatcctccactccctgtatatatccttcctattcctttgtactgttttataattggtatgattcatgtgatccttgtcacacgaatccaaggaaaaacagtagcatttctgatttcaggtgattgagccattgaggtgccttaatgctgactcctggtttatgtttatatctttgttcaattgtgtgcttgttagaagatctcaattgactgtgtacttgatttttgggtgaaaaatgtgggtggaggtgcagcatctatggacattgacactattccatacatgtgttgagttagttaaaaagttggattagttgttccttttgccatgaactg

SEQ ID NO: 160783 - DNA, 398 bp, Zea Mays
gtcaccttagccgaggagaggcccggtacgtcgactgcggtggtacccgatgcatcgactgcagggggacccgacgcctcagtggaggggcgcgcagaaccgtggcctgtcttggggagcagcggccttatccccacacagctcaatctcaatgagtggtgtgggcagccgctcctgttcttgagccgcgacacctcggagcccctcctctccctcaacgatgagttggaggagcagtctcggaataatttccgtgaatataccgaggcggcgatgaggtcgcttcggtcgaccatggaaatcctttccagggatgtccccagggtcttccaggtaaggattttgatggacaccttacgtgatcagggcattctttgtgatatcctgttttccttcct

SEQ ID NO: 160784 - DNA, 975 bp, Zea Mays
cccggatcaatctcgcgaaacggtaagatgtggtttaatctagaccgtcgatggccatctaacggctgagcggtcgtcttctacatcgcccatcacccgaccgaacacctagccacggcgttcaccagacacggccaagccattgccggccgcacctaaagctcgagtcccgcctgtaaacttcactctggcaaccgcaaaacgaagagcagtggattgcgagactggtacatgagttctcaccacggttggtagcgcggacagccctggccacaggaacctgtggattcaccaacaccggcaagggatttcgcgatctctggtgatcttccccttcgattgcgcccacgcccgacttcaacgcgaccagcactcccaactcgattgaccctaaccacccagcagatcgcgaccgacgacgagggtggggaacggtgttgtcagcggatcttctatctcccgctctcggtggacatggcagcagagaatgggcagcacgaaattcatgcggtaggaaggagggggtcgcggcctagctttgtagtcacaggagaaagtccgagggagagaaatgatcggcgtgggatgcggaggtgggcgacggaagacccggaggagcccaacgcactcgtctagaagaagcagctgacccctaggccccacctggcggtgagcagcgcgcggcgcggtagccatgtagttgggcgggccccgcaagtcggcgtgagcgagaatagcgggcagtggctgtcagctgggcctcgcgcgcaagtgacgggcgcgacagttttgggctggcgggagagagagtgtggagtgggccgagtgcaggggggaaacgcgcaggtgaatccagcccaggtgggtcttgcaacctgacttttcctttttatttttattccttttcctttttctctattttcaaatccaaatttgaattcaaatttaagttcatcactacaacttatgtttgtg

SEQ ID NO: 160785 - DNA, 849 bp, Zea Mays
attatttctcgttattctttatagcttcgtcagctaattctcagtcgcctttcatccaaacgtcggagtataatttcctgcccatcagagtagcctcagccaaaggatccttcatgttttctacagtgaagactacctccgtctggattgcagctttaacatgttcacagccagatttttccaaaattgctgcaacccctcttgcaccggcaaaggcgcagaaatcaccacggtcgctaaggatctcgtcaaaggcttcagctttttcgccaatccattcgatgattccttcgggatcgcctctaataaatttttgcctagatgagtatgcacccaccttcgcaaaactttctttcaacttcttagcgcaatccaaggatttttcataatacctctccttcgattcctgaagctcatctacattcttttgcaatcttgcgctggtccattcgcttatttcttgttttgctttagccacttcaaaatcttcatccttctcggcaagctttttctttaagttttcaatttcggctttatgagcttcgaactacgcagcaagattggcttcgctagccttaactctatctaccaaggaaagcagaattttatctttctctacggcttcattcctcagtttgataacttctgaccgaaggttactaagagctatttggcagctttcatcctcagcattcttttgtgcccttaaagcgttgcttagaattaagccctaaaaaggggggaaggatcagcataagggtaaaagatacaaaaataatctgctcataagtcaacaacttctgtacctttagactattgtaagcgaggttgtctgcgaggtcatccttc

SEQ ID NO: 160786 - DNA, 544 bp, Zea Mays
tggtgtcctaaatgttgatgcttgtggcagagacggtggattagaaagagaatgaggagcagcatgggaagattgtggaggtgatgatggatgtaaaggtactaaagtttgaggaggcggagatggttggggatgagatgatgatggcgttggtggatgaaccaatttgacatcccttcgaggccaaaggatgaaatttttgatggcttgtccaagtgtctcgattccttcgggcccagggatgtctagcatgtcgtcctcagatccttggatgaccattgccacttctaccctgcaataatcatctggtatgtcgcttccatgaaacttatgtcctgggatcgcaatgctcgttcctactttcttcgtgcgattattgttaataccttatcttataactaatgtgcacgtcactggccttgttatgtcatcaactggataacggaccttatttcctgttgacgcgacagagccttgggatggttgtacaatcggtgcaagctggtggttgagctactggaattatttgcagctatggagtggt

SEQ ID NO: 160787 - DNA, 463 bp, Zea Mays
catatggtaagctcttatcccaactaccaccatgtttaagggcacacgctcttaacatatcctccagcacttggttagtcctctcggtctgcccatcagtttgaggatggtaggccgaactaaaattcaactgtgtgtccatgcactcgtgcaacttcttccaaaaccgagaagtaaactatgatcctcggtctgacacgatcttcttaggcaccccaagtaaacatactatccgagtcatatacaattctgctagcttggatcccgtgtaattagtcctcacaggtatgaagtgagccacttttgtcagtctgtccacaatcacccaaatggagtcataccctccaggagtgcggggtagtccaacaatgaaatccatgccaatttattcccatttccacttgggtatcttaagcaggtgcaatagtccagctggtctttgatgtttggccttgactctttg

SEQ ID NO: 160788 - DNA, 521 bp, Zea Mays
gtcctcaattaatgtgaaacgcagggggctcggggtaagtatccagagacacagtgcatagtgactaatggacggcgggttctatttcaatgaaaccgagaggctctttaataaaactgacccgcgaaggggtacggtgcactctgggccgtccgattagatccgaacggagaggattagatccataatccagcgaaccggtacgcgctcgatgccgtcggatcgaacaccagcgcctacgatttaatgagacctaggttgaatcagagccgtaggatcaccgatctacgaccgcgaaggatttgacgaaggggtactccaatctctaatcccggccgtccgattaaaatcggacgacacccgcgattctccccaaccccctttctcacaccggcgtccacccgacggcggacagtagcacgtcggtagaatcagtgcttcgaggggaaattcaagtggtgcagaacgccaacccgcccaggcaaagccccgccgtcgagcaccctgaccaggcgcccagg

SEQ ID NO: 160789 - DNA, 675 bp, Zea Mays
cgacacatcagcgagggcacgaggtccctggagccacggcccatcggctcgaactggctccctggagtcatattcctcaccttgaccctgtgtcgatgcattttcttctactttatcctctttaactcattctcccctaactgttcacaatggtggctgctggatctgaggacgacgacaatctgtcatcacctagaccacaagtattcccttcgtatggagcttcagtgctattgcccattcaattccggtaccatctcagaacagaaaactgaatattgtttcctgcatatttttgggactacgcagattctttgtatggagtttcaagtgcatgttggagtgaaatttgatggtagtgtagatggttattctggtggaagggttggttaaatgagatttatggagccacaaggggttgattggtttataatgcaggaaaatcttgtgtataatggctacgaaggaaatgccaccttatactatttaaaacctggccatacggcaccacaaggtcttgttttgatggatagtgcagaacatgtacaacagttgatgaaggaccatgagggccttaaggtgtgcaaattgttcattttgggaactgaagaagaagatggtgatgtatgtgaaggtgaagaaagggatgtatgggaagatgatgaagaatatgtc

SEQ ID NO: 160790 - DNA, 784 bp, Zea Mays
attttttcagaagtgagaaagattggcgagttaagtcccttagggacaccgtccttagggacacacaggtggggatctcacttaccaaagcctatagagcaaagagatacgcagtgcagaagattggtggtgagtaccatccgacaaaagtctacaatttatgtgtgattctttctttgctttatgtgtgattctttctttgctttatgcagggtctaaaagacggtgttagggccattttcccacatgtagagcatatatattgtttgaggcacttgtatgctaacttttcaaaggctgggttcaagggtccccgactaaaagagctaatggatagggctgcctatgcgtacaaggagtttgatttcaaacaagctatggatgatattaagaaagaaaacactagagcatggaaatggttgtttgacattgatagtaagcattggtcaaggcataggttcagcccccatgctaaaactgacttggtcgttaataacattagtgagtcatacaattcttggattttggaggcaagagaagaacctgtgtgcacgatggtggagcacattaggactaagttgatggagtctattaatattaaaatagatgatgcaaagaaggacacatggttcataactccaaattatcagaaaaagcttgagtttgagaagaaaaatgcttcatattgtagggccgtctgtgctaggcatgggatatggcaagtcacaagtggagacagtcaatatgttgttgatctcaacaatcacaaatgtggatgctacaa

SEQ ID NO: 160791 - DNA, 823 bp, Zea Mays
aactaaccccactctcaaccacgagtggtccactatcccagcggcccggctccccatcccccgtcacacgcagtcgagcgcctcacatgttcctgtaccacgggcctgcacgtcagggacactattcatcttccaaaccatctcctacccacgtcacatggatctcggcaaccgcctgtcctcgacaccccttcaaacgccagcgcacccgcttgaccctcctccaaactagccccgctcttctctcccacagcccacgcagcacatcgccttcgtcgccccgctcatgtcgacgaccgcattgcaccagaacacgtccctcccggtcttcagcgagatacccatcctggtgagcctcttctcttcccttttcttctcagtttatcattcacgtcatctccttccgttccatcgtcgagccacagcgccgccggcgagcaacccagctcatgcccgcttcgcgccgtcatgcttgttgagcgtctagcgcgttcgagctcgctcggtcgagtttccctttggtcgcgtcttgtgcccctgcgtatgccacagcgaagtcgcgactgcgcagccctgctgtacgcgctcatcgcgtgccggcgagccatcctacacctccggcgctcgggtgaggccgcgccaccctggcctgctccttgccacaactcgccacgccctaagccaccggtgtcgctgctcctggcccgccggcgtgtgcaccccttcccccagcgcggctagctccccatccgagcccccctgccatggctgctagccgctacgaagaagaaagccccgatgtgcaaccgtccgtgcgtgcatg

SEQ ID NO: 160792 - DNA, 384 bp, Zea Mays
agatcattgactaagcccagccaattctgtcattcgtggggtgacagggatctcctaaaatcaacatcccagccatcagtggtccaacaacctctaacagaacaactagaatctctaaccatcctgtagagaccttcatatagaatctttaaaggaacttcatgaagccaacagtcatccgaaaacttacaagttctcccattacgaatatgaaagactgctcccacttgaagagatgtttgactttatgtaccccactacagaatcgtgacccccctttagcattagaagggaataaattttccccttcaacaattaatagcgtgtttggtttgaggattgaggaagtgtatcatcttgtcactcctcactttatagtttggt

SEQ ID NO: 160793 - DNA, 302 bp, Zea Mays
tatctctcttttatacaacacaaacatacatgagttacagtagtaaaacccaagcactttacaccaagcgagcagagattatcaagcagttcatcattagctactctattaaatccagcaagatgtagcagcctaccacaatctatctatacctctatacaacccaccaatttaaactttgcagaatctacccaaacaaatcacgctcacactcataatcttctctaaatccaccaaacaaattacacccatacataacacgttctcaaaaccaattattcagcttgctgaataaccctctc

SEQ ID NO: 160794 - DNA, 391 bp, Zea Mays
ctattaattcatttacatgaattacctcattctgcacactctgtaaaatttgggtcgaaatttttggcacttttccttgatttttagcggaccatactagttatcaaggcacaaattaaagaaaatcagggagctggaatgggctgacaaccaccatagcgtcccactgtccatcagaaaactgcgcccacgaataagctctacggtcgacgtctccattttgaaataaacaccctataatttaaactaactacacccgaacttctgctactactcctatgtgtcgtaggcattagcatcaatgcccctccctttccttgaatctacaataggaagtcctcgacacagtccggtaccagcaccagcgaactgtggtcaaggcgaccgaaac

SEQ ID NO: 160795 - DNA, 720 bp, Zea Mays
agtgtcacctagggttcttctcagtactagctcaagtaccatcatttcatgtaagccaaattgagcaagaagcaccaaataaacttaagaataaaagatacactaagtttgcatctaaagaatcaagtccaaaacaaatgaggttttcaaaaagggaaaaatgttgaaaccctaataccaaccctaaataaagaaaagggatgaaagaccaggaaaaacatgagatcatggcttaggccaattataaaaattgaaatataccaactaagctacaataaagattataaaagtttggccaaaatagtttgttaaaaactccaaacaagccattcaagtgaaggtttaatggggaaatctgaaattcagatttctgaattttcagcctttgaaccaaaaccgagcacgttcaccttgatccttagctctaatcctaaagctcccattaacaaaaatgtgtctaactaacccctctaccccatgtctgaagatggcatcgggacgcgagccctagacacgacaaaaccgaagatttgccttggggctcgggctgagagatagaccgacttgggagctccatatctttgaaaccagtagaccaaatcctatgacccccacataagatcggtagcttatagggaggagaagaggttttgtgcactgaccaaggcaagagcaggctcggatgaatgaccacacacgccagaactcgggcagaatgaa

SEQ ID NO: 160796 - DNA, 720 bp, Zea Mays
attcaacacaaatccaagttcaaccatagccacacgtaccctaaccttttaactgctcccgcaaaggcacatagccgacgccgattcgtcttcctcgcaggctcgtagcacggcgctccatattctgctcccctccccgactcacgctcgtcacgtaagctcggctgcggcgtcagcggctccccatcccgccagtagcctcgcgccctcgcctctagtcctccacacaccggccagcgcgccccaagcacggcccatacgcctgctccgccgccgcgccttacattcgtgggcaaggcgagcaagacgccttgccatctaagcatgccttaacacttaagtgtcgcataagcgacaccttaataagcacggttgttctacattaagttgttgctttattcgattgttgtatttactttcttcccttcatatagggcgataggagggtgtgtaggcccacccctagtcatcgaagggtgaggggactggtccgtggaggacgcgccatagagcgtcgtggtggacataggggactcggcgtccatggtgagctcctcaaaaagtagctcgttctgaacgtcgtggaaggtggggaacggcacaggtcgcttgatgagggccttcaggtggtcataccgtcgactaaggaaggcgccgaggtggaaggcgcaggcttcccggttgctgaggaactgggcctcgagggcaacccaggtttgg

SEQ ID NO: 160797 - DNA, 591 bp, Zea Mays
gaaataattccaaagccgaaggatgatgaggtggtggtttttaagagtttcttccatgtcgggcttcgattcccgttgtacgagatgattagcgaagtgctaaagaggtttgagatatatcttcatcagctaacaccaaatgctattgtcagactcagtgtctacatatgggcttttcgaagccagggaaagagtgataatgctgaaggattctgcagagttcatgaactccattaacagaccaaggcgagagcagatggtctgcacaagaacttcagatgctacaattttgcataccgaaagggtacgaaggcccatgtgattgcataccacaccaagtggcccaccggctggacaaatgaatggttttatgtgaaagctgatgagaagagaagggagaagcttatgagtatggtgatgagtcccttgaaactaagctttggcatgacgaggccattatgcaacatgcaactcggctccccatgtcgactagccgaagtcgaattcacggttgtggccgagcatatcagtactcggggcctagttcaagaatacctagtctacaagacttttctcacatcaggtgggtga

SEQ ID NO: 160798 - DNA, 932 bp, Zea Mays
atgaagcttctggtattcgtgaatggtggcttgctatgcaaaaggagttggacgctcttgatcgaacgggtacttgggttcctttaccatcatatgtagtccctataacatgtaaatgggtctttaagattaagaccaaatctgatggttcagttgagcgatataaagctcgtcttgtggccagaggttttcaacagacttagggactagcttatgatgaaacctttgcaccgattgcacatatgatggctattcgtactttgattgttgttgtagcatcttcttcatggactatctttcagatggatgtcaaaaatgtttttcttcatggtgatttacataaagaagtttatatgcacccaccaccaggagttgatattcctttcggacatgtctgtcgtctgcgtaaagctttatatggattgaaacaggcccctcgtgcttggtttcaaaggttcttcgttgtcataagggctgctggttttacccctagtgaccatgatcccgctttatttctttattcctcttcacgagggcgcaccttgcttctattatatgttgatgacatgttgattacgggtgatgatccagaacatatttctcaagtaaaacaacatcttagtgagcagtttaagatgtttgatttaggccctcttggatatttcctgggtattgaggtattacaatctacaaagggctattatctctcacagtataaatacatccaataccttattgctcgctctagtctgactgataatcgtacggctgcaacacccatagatattcacttacaactttgtctgaatgatggttcaccactacaggatccatctagatatcgacatatagttggcaatctagtctacctcactatcactcgaccggatattgcacatgttgttcatattctgagtcagtttatctctgcg

SEQ ID NO: 160799 - DNA, 773 bp, Zea Mays
agccgttggatctcagatctacggccaggattagatcctgcgggcgggcgcgcgggcgcgcggcggcgggagcggctgacaggcggggccgggcggacagcgcgggcgcgggcgactggcaggcgggaccgggcgggcagcgcgggcgcgcgggcgactggcaagtggggcctaacgggcagagggacggggtgagggggcagtgggcctgggccgctggatctctggcggacggccaggattaggtccgggcgagttgaatcatggccgcccgatctgggctgaacggcggagatcggatgggcggcctgggtcttccctacggctagctgggcggcggcgctcgtccccgcggcggagggctcgccggagacgaggggcgcgggcgattggcggggctctggggcaatccgagtggtcgaggaggctagggagggcacggggactccattggtggggtctgggtcagggcagaggcaccggagggggcggttcacggcggggcggctcggcggcggggttactctactccggcgagcaatcaaacgcaacagagagcaaaacaaagggcgataggggcgggagaggtcccttacctcaaggcgggctccggggactcctcggcggcgatagagacgcgacggggacccgggtcgacggtggcggctgcacggcggacgacgggtgagcgcgggcagagagaaatagggaggggaagagggaattggggtgcgttccgggttgcggacgtcggggcggagctcaccggggct

SEQ ID NO: 160800 - DNA, 840 bp, Zea Mays
gacaaaccgaggtgttcccggtaatctagcgcggtctagttcaattggccgggtcaagaagcatcaagagcatacaagagtgctaaaacaagagctaggagggtgtgatcggacctgtgaagagctgaccgcggcgagctcacacactacgatgttcttgaccaatttgagggaaatctcaatttagagctctctggtgtgcaatccgagacatgagtgggtgcgctggatgcttaactacgtagcggagctgatggcatgctcaatttatagggcccgagggcggtggctcctaatttgggcatggcacgctagcggccagagagaggggagagcactggcgcaagaaatgcgtggctttcactgtggtatgaccaccggcgatgaccggacatgctagagcgagtcaccacgacaaagtactacgtctaggcatgtggcatccgagcggcaggcagctaactccggtgagcttatctgaaccggccgtgagtcaagtggacacggcggccggggcggaacagtgccttaagctcatccttagtgcccgatttttcaccgaggagcattatccatgttcgacggtgcgtgaatcgcgacgccgacatgaatctaggcgtgaggtcaccaacggtgaggggggctgaacctgtgatcttattcagtcactgtaccatgggaaacccattcagagtctctgtccgagtactttgcagagctttgatttctaatttctatatagaaactagctaatccttctgtaacaaaattgttaatctacaatccagctacaaatcgactatagtaaccatccccaatcgatcactagatcctactcca

SEQ ID NO: 160801 - DNA, 451 bp, Zea Mays
ccctaaccactagaagttggatatgttctgttttataagtactcttgcactaagtccctagtactgatgtgcccagccaccactctaaattctacttcggccaattggcaaggggaccctaactgcatgttgcacaagggtcgagtcatgccgaagttcagcttcaagggactcattaccatactcatgagtttttccctcttcttctcatcatatttcatgtaaaaccattcattagtccacccagttggccacttgatgcgatagccaataactggggccttcgtatcctttcgatacgcaaaattataacaaccaaagttcttgtgaagggcatctgctctatccttcgtctggtagtgtagctcgtgcacccgacaaaaagcttcggcattagcatccattccttggcttcggagagcccatatgaagacgctaagtctaacaatag

SEQ ID NO: 160802 - DNA, 469 bp, Zea Mays
tgggtctcttacaagaccacttgaaccatcacattcaccacatattatttcaatagtgcccataatgtccaaacttcaagctcgcgactttcactttgtgatttttggttcagccttgattgcatttatcaatgacccgataagagagcttaaagtgctcgtgcctaggattttgtcttggatccatttgcaatctagagaggcaatataggtgtcgacatatttgtctcccacatttaataatgatctccatcatttcccaaaatgaaaaattcattgttacgtattcccaacacattgatattgcgcgcattgctaggaatttcatcatcaagatgaacctcttcgtgaggcaaatcaccatcagagtgaattaatcggaggagagttatcacagaccacgtgaatctgtaatcaaaacatatgctttgactagggccgatggatcatattcgtaggcgtccccgag

SEQ ID NO: 160803 - DNA, 503 bp, Zea Mays
caggggagggggagggagagtgtccgaggctagtgcgaggagaaagggagctctggtggtctttttataagcgcccaagggaggggagcgactgaagcgggctggcgccggtgaggtgtacaacaatggtggtaatggcgcacaacgtcggggacgggatggttcggggggtgccgtgtgagggtgcgagcacagtgggcgggggacgaagcggtgcctaacttcactggcgcaggagtaatggcggggcgaggaaaggacgacgaccgatggggttcacgacgaggctgtgcgcgggcgaggaagaaggggttgacaaccggggcccacctgctagaggaagagcgggcgcgagagagcgagagctgagtgcggctggcaagtggggccgagtggtcaatgagagagagagagggggagagagagtgcggcgcgagagcgcgtgtgctgatgggccggttgggccgagggagagcatgggccagaataggcccagccggggg

SEQ ID NO: 160804 - DNA, 635 bp, Zea Mays
tgactgaagagtgccaacccccacgaggtcgtgctcctccaacagcaacaagaagaaggaaagaccactggcgttgccacgggcgcgagctctctggtggtgaggtcgccagaaaacactggcacacctcatctggaggcccggaaggcggaggggcacgatgaagacgagaggagcaaggcatggttagtgcccgggagatcagtccctttttataggcagatctccccacttatgccctgaaacgtcgcgggcaaagtctcccccgacgtgctccaggattctcgccccgcgacacgggggctaggtcccacatgtcatacaaacttacccgcaacgcgaaaatggtgaaccgctgcagacgaagcatgcagccgccccgcgggtaagcgctccctcattctcgccgaatccagcggtcgaaagggcgggccgcctcgccagaagcgtgcaaccgcaccacggctgtacaccctttcagcttcgtcacaactggcggtccaacatggaggcccaggcccgcatatcatgtaaccgatgcaccggttaccgcgtgcaaagaaatcgcaccgccattcgcgccaatgccgcgtcctcttaggactgcagaactgtaacacccctggtgttactgc

SEQ ID NO: 160805 - DNA, 480 bp, Zea Mays
agcaagctctttcctagcaatttcttgatcaaatacatatttttccactgctactgacccatccgtattttttcccaacttcaaagttgattgctttagtccttttctaacctgcctagattgacaagttctcagatgaccacgtagatgatttgtaccagatctactatctccgactagtgccttcttacaccaattacactcagctttcaatttgccagccactgtaacttgtttaaattctaaccatacatctgacttgagctttcttttgaccccaacttgaagattatcatcatcatctatgactacattttcattaccttcttctgttggaggttgaacttgtgcacttgagcatggagtagcattagcagcacttgacgaatgggcatttggtgtaggtgtagcagctgcaacaacatttgaagaagctgcaacattggtcggtgtagcacttgacctgtttgaggagggcct

SEQ ID NO: 160806 - DNA, 425 bp, Zea Mays
ggatcctggagataaggctgaaaaatatcctcccatcattctgccatgtctccatgggcttccttatgggagctctgatgtaatgcttgaggatccaatatcaaaatgtcatctcagaaagctaggcccattcttcattggctctcagctcgctatggtgacaatagtcctaaaaccgtgttattttgcaattaaaaaatgatgaagtgaacttgctataatcctgtaaggattatatgggttatggatcttttggagataagggtggaaatatcctcccttcattctgccatgtcataaagggcttcctaatgggagcttccagaagatgctttaggatccaatatcaaaatgtcgtctcagaaagctgtggccattctgcattggttctcagctcgctatggtgacaatagtcctgtatcgtc

SEQ ID NO: 160807 - DNA, 780 bp, Zea Mays
cttcaaccaactcgtctgacgcaggcaggggaagcgaggactccacagcggccgcgcgagattccagttgacccagggttgttaccccaaaccaacagctagcgatcataaatggcggagtcaaatctcgtcctcctcctttcgcttcgccgtgcgataacgaatactaggtcactgtgtagccgtgagggagagaaaatccgcagccggcgaaaccacgaatcgtgggcgctcgggcgtcagttggccattccagaccaacgccatagttccagggagctttgacgaccatcaattctgccattggaccctctgtgtccgagcgattgctcgtcgtcgcttgtggttcgccgcgaactcgcataacttcatggccagctcatcaggccacttcaacattgataaggtttcccttaactacttcacctggtctcgtagttcatgtagcactcatccttgtatggaatacagccctggagacccagttttgcgtgctccgatggaggcgccgtcgtggccggtgacttctccggtggcctgttaagtcgataggagcataaggaaggggtgtcatgtcagccgtagatctgccttcgtgcggccacgattaagggtggggaaagttcctctcgtcgtgatcctgaccactggatgaggatcggtgggtgcgggatcggtcataacttagatgcatcgcggcccgtgcgattgagatccgacgactcatgtagcgtaccgcttcaggcgggtgtgggatctgatctggcatgtccgtttcta

SEQ ID NO: 160808 - DNA, 502 bp, Zea Mays
ccgagccagaggctccctgttctccttctctgccagcgtcttctctaccactggcgatttcttctcccccgccggcgatctccgaccaccggcggccaccgtctccgtctgtgcttcggctacctcgggcccctctccttccctcctcggtgagctgccctgttctcctccctctcggttctgtgagcagaggctcccttatcctccccatttgcatcaattccaaattcttcaaattcttgtcaaatccaatgaatccagttggtggaatgtgttcaattgtccccattatgtatccctgcaggttcttggctccttcgggaaggttttcacttctcatatggccatttctccgaaaccctaatatctcgcccaccacgtgttcggtaaaatgcccaaaccagccaaaaatgctccaattaaacccaaatttttcaggcaccttcacaacacttccagtaacctacttgccaaatttcacgccaatccgagattccaggct

SEQ ID NO: 160809 - DNA, 997 bp, Zea Mays
atgcgcagcctctgtttgatgagcattctgtggcaccagctaactttttatagtcatattgccatgtataactagtgtgtgtagatttcatatagcctgtccgtcacaacttttgggtagagtttgccctttcatttgtaacgaagttatttgctgaatttgttcatttagaccataacgtgacattaagtattaataattcagaatacgatcttaatttaatagtttgggcatgcatgtattttgagctattgcatatatatgccgatcagaataatttaatttgggtgtatgtatgcatggtgccaagcaacattttttattttctcgcagggaaacaggcgacgatggcctgcttccgtatcaaatcagaggaacttgattttttttatttgacaccccatgacacagaatttcaacttccaccgtttaactcaccgttttatacatatgtgcggattacaattgtatttatcatgatgccgacttcaacagcatgaatggaagaacatagctcttccaatatacgaggtcgtgtatgcgcgtggaggttatcaaactcgacggtaaagaagacaaggaacagtgcagcgatataaggggcttttcttaccttgcagtagacctttccgttaggccacaacgacgtatatgtcattgcagtgtgatctctctcaagggtatgcccttgagattgtgtataatccggcgacgcgatcttcctcaagggtatgcccttgaagtctttggaaccagtttctctctaaggtatgccttagagagaggtgattgctgaagaatttgttgttgatgaaacgctacagcaggttgatggagctcttctcgcgatgtgacaatgccctttttttgtagctggagaacgcagtagcctgagcggaaatgatgtgagcagcagactagtctatcagcctgacgtcgattcctgatctcagcagcctggcggtcctttttttatctacccctgtagcctgacggt

SEQ ID NO: 160810 - DNA, 598 bp, Zea Mays
ggaaaggatgagatggatgtttgggtgcgagaatacaataagcgtaaccgaccccaggcaccttcccattctatttatacacaaaaacaaggaagccaagcggcatctaaaaggtgggcccccacgaacaacatcggaggatctgctgtttcggttcataaccgcttcaggcatcgggcgagaaacagtgcattttgtagatcctgtgccgcctcggacagagcgccagaggggcacatggcaagataggcatcggtaacgggtgggacggttaaccaccctatcacgccacctgcgcatgatacaatgaaatggtcattttgtgtcccatcaagtcatccacgccaagtggtgtcatgatagccccctcttttaccacgctgtcgctataactaccccatgctgaccaggtaaaaaactgaaactcaccccgactcctcatgtagagcgaggggtttaccgagcaagctcctagagagttgcatgctaggtgaccggcccataggtcatttgctcgtctccacgtccaaggtcgcacctcacattctcctgcagaaacttgattgatggggtggccacgaggcctctcattggtcag

SEQ ID NO: 160811 - DNA, 518 bp, Zea Mays
caagtttggctgtcaggttcatctaactgaaactcgcgatggtacagtagcctagattggatcaggctgccagcgcggaactctcaccgccgacgatacctccgccgtgattcgtgtcactggtgtttgggttcgtgcgggtggcaagtagataacgtcgcggggtgaaagtgaatcaccgtcgatgagctggactccactccggctagccgccgtgcccctcccctgcatactgatctttcggatagaattctcaccgccgtcgtgctgtcaccgtcgcgcaccacgtgccttagcgctggctctcgtcgcggtgaatcatgcggtgcatgtccggtgatcaccggagttactgccacgccataggacacgtaacctcgcgcgccaggcttcttcctcacctccggccgccagctcgccgtgggcaaattgagagccaccgctcccggagtctttaaattgagcccaccgttagctccgcaacctcatcacgtaccccatcgtccagtatcaccccc

SEQ ID NO: 160812 - DNA, 461 bp, Zea Mays
gctacttatcatcgactgaagaaattgttcatttggaaaggtatgaaggtggatgtgcagtcttacattcagcagtgcatcatttgttagaaagctaaatgtgaaagacttcatccagccggtttattacagcctctaccagtacctcagggtgcatggcaagatcttactatggacttcatcgagaaactatctaagtcagaaggttatgacacaatcatggtggtggttgatcgtttctcgaagtatgcacactttatgcctttgaaacatcctttctcggctccatctattgctcaaatatttttggatcaggtggtgaaattacatggccttcccaagtctattgtgagtgatagagacaagatcttcactagttctttttggactcaactcttcaagttgatgggtactcaactcaatctgagtacagcttatcatccacagacggatgagcaaag

SEQ ID NO: 160813 - DNA, 438 bp, Zea Mays
aaatgaatcaagatatgtagttagagggaaattacccaccaatgccatcagttacataaaaacggttcgttgtctatttatcctcccgtaacccttcaacatctctaggcgcgtcttctctctgtgacaccttcgtaggcgtgtcttctctccacgacggcgcgaggcagcatgccaccatcctccaggctgcggagccacgaccccaaggcctacctccgccatctccgcgacaccgcatgccgccatcctccaggctacgtagccatgaacacacggcatgtctccgccatctccatgacgtcgttcatcccgccggtgtacgccatccccaaggtcacaacgccctcttgaccctgccccttggtctacagatcgtggcgacgacccgccctcttcttgtccgacaagaaggttcacctcgctctcttccctctc

SEQ ID NO: 160814 - DNA, 625 bp, Zea Mays
ggttgattccataattattagaatatgcatgcatcatgttaagaatatactaataaatcttcccctcttatggagatatggcacgtacaaggaaaacaacacgcaatgacccaattggtgtgcctcgtcatcagctagcccccagacatgaaggaagtagtagtggcagcaatgacccaattggagacctggaagccaaggtagaacaacttcggtcagagctacatcaccggaatagggcatgagagcaggacagccagcatatagctgaattgttagctgacatcagccgcttgcaatatgagatttcagaacgggattcggccattgattgggccgtcaactcacgttcgatcgcttgggactgcgaagcaaaagctcgagctcgtgtggcagagcttagtgcggctctccacagcctgcaggtgtactataatactttacatgaagaagtacatgtattatgtgctcgactgcacccgaatgtgccttccgacgttgctgcaatgggagctggaccctcgagaacagcaaatgaaggacctgatggggagttggacctttttaggccccctccttccatgaacctagctgacgaacggtctcctgcagtaggaaatgaagc

SEQ ID NO: 160815 - DNA, 527 bp, Zea Mays
cgtggataactccggccagtaaacaattccggccaccgtaccgcactcaccacagcggatttggataagctcgccggcgacagctgcctcatggcttggcaccacgtgccctggcacctccaccgcgtcaccgtgaccgcgtcgccggggagatggccacggtaaccggacactaatcgcgcgccagtaactccttgtcccttcggccgccgcgcgtcgtcgctcaaattcctggccaccgctcatgcttactataaattgaagccaccatgagctccgtaggatcatcacgcacccagccaccgagtattgctctcaatcgatcatcagtgagctccaattttgaacttcccccaattcggttttcgccaccgcagacaccctcatcgcggccagtctactccaggttagttcaagcttctcagttgtttgttctagcatccttaggttctcctcaagctcctcgacccctcgtattgaactagaccgtcatggatcgccgggaacacgttgttcctctgattgtc

SEQ ID NO: 160816 - DNA, 822 bp, Zea Mays
acggtcgcgtccatccccacgacccgcacaacaaagagtgccctcgcgcgactcgctcacatcgatctattctcaggcacaagcaacaaactagcccacgaccttctacccaccatgcacttggctccacagctcatgcatggggcctaactgaaaacccaactaaatgggctcaagattatccactaacaattctccctctatgcttgtggccctaataaaactatgtaacatatctcgtagttcctgaaatcgtgctcttggcagcgccttagtcagaagatcagggagttgccctgttgtgctaatgctaaccaacctaatgtccccgatatccattgtatctctgatgaaatgatacttgatttgaatatgttttctttgatcatgatgcactgggtttttcatgagtgccacaacaaatttgttgtccaccatgagttcaacgacatgaggtggtgtccccaaaagatttcccagcagtcgtcctagccatatgccctaacatgcaccagaagcatctgcaatgtatttagcttcacatgttgagagagccaccaccttctacttcaaagattgccaactggtagtattgttgccgagagtatacaacacttcactttatcttgtcaacatctccagtccactcgttgtcattgtaacccttcaacctccaatcgtcacccatcacataccgacacccatagtcaattgtgtctggtatgtaccatacaatgcgcctcacaatagcaccctcatagtagcatgacaatccttagttagtctctccatgaatcagtggctcatataacccactacata

SEQ ID NO: 160817 - DNA, 774 bp, Zea Mays
ccggcgagctagaccgaccgtatgacgctacggcaggagctccaaagctacagggaccaaaatcagatgcctaccgcacctttccccccaatcaatttcgctagaggtggtctatcaagctctgtccacggtgacagtgcgggtgatcaagtgaactaaggtgttccgaataaccgaaggcttggctggctaaattgaagctagggaaaggtttctgggttcaccagagatgacacacacgctaagttttgggctaggcacgagcagaaaggtggggcgacggaaagggtgtcatggcggcattttacagcgcacgggtgcgttccggtgatgggcttcggccaaatttcaatttgccacatccaagagcaataagagatcaaatactaactgaaacatggagcgatttgataattactgacccgaggagcgctggccatgaaggagttcttcacggcagagcaagaacagaggagagagggatttgtgggttctttggtgaaattgagccgagtgctcgatcacggaggtgcgggatgtgataaagaagtggaacccgggcgcaatttataggccaacggccggaattggatgaggaccgcggactttaggttgtgcaggcgagctcaccgcgcggcggaactcggtgatggcacggtggccgccgtttaaccggagcctgccacctcagtgatttgctgccacgttgccgaggatatttaccacggccgccagcccatcccgaccgctgtggcgttcttatcgccggcaagg

SEQ ID NO: 160818 - DNA, 408 bp, Zea Mays
cttctcaccactgcgccacacatgatgttaaagaactaacattttttatccttgcttttccacctcctcctagctaccggacagtggagagtttcaactgtcttgtttttttacttctcaaactgcatttagtatatctcgtatgtgacatgtactcattaaggctaaaacaactcgtatcaattgataaggagtccgattccaagacataccgggtcacgccttatgtatctcgtatatatgattaggactcatgaatatacaagctaaaaaagaactcgcgtctgtagagtccgaatctgttctaatatatattgggttctattgcaacgcacgagcatgtttcccaataaaacaaatgatttttagttaaaaagaacgaatcactaggctgaaactgaaggggtg

SEQ ID NO: 160819 - DNA, 718 bp, Zea Mays
gttttaggtttagcgctgtcagcgactgtatttccgtttcacatcatggttctagcgtactgaaacaaatacaaagctgtcaaagaagacgtctatatttttgccttcacctttgttcaaatcacgagtgtttgaatagactgtgaagccgtatgtattctcttttccagaattattttatttgctatgggactagatgcttactcaattgatatagatgggcctttgatcaccacctttcctgccttgaactctgaacccaaattattctcaagtagatgctagggttcttgtttttcttcttttgcttccaaaaaaaaaaaccgcaatggagagtattccttcacagaatcacagttcacattcgctattcagttgccatgggaatgaaatttgaggaccgagggagcaattctgttgaaaatgctacgaaataatggtggaacaaaattttaagaatccaaattagcatatgcagctgtcatgcataggtcttgctgggggaacccacgagaaaggttctagaaatggcttgtagagttacagatcacagacacggacacggcaaccaatccttctctgtggtctctactcgccttctcctccatatctttttgataagactactatgtattaatgttatgaagccgtaagatgcatgatatcgagaaccatatctacttttagagaacgagaattcttctggagcatttattct

SEQ ID NO: 160820 - DNA, 752 bp, Zea Mays
cccatctggtctcgcttcggccttcgaaggccgaccgtggcgattgataatgatgccgaagcatgtcaaaaggctttcagcaatgtctgtgctttcattggcacaagagacctgatccaagagcacatagcctacagggtatggccatttgtggaaaacttggagatgccgaaggagactgctgccgggtccagccaaggtggattagttcgcttgaaatacaccttcagatacagagaccattttgacaaaccaaacgacgagtggctgaaatgtattgaagctactagcgacaagttacttggggcatataccagagccgaagatgatgctttatccttagccttcgaaggtcggggcaagaaaaggttgaaccaagtttttgatgcgattggttttgtataccctgattattattacccctcctgaaagcagggaaaaaagaggaaaactgccacttcggccatctttgttgtgccaaagggcaagaaaatcaaggttttgacccaccggccaagatatattaaaacggccatagtgccaaaatttggtgaagaaacattttctgctgctgaagcagaacaagctgctcccgctgcccgaagcactgaggaatcgactatagtgccgaaggtgcctatagttgagccagtcgaagccgtagatggggcggccaaaaagctagagttagaaaaaacaatagtgctaccagaaattcttagcacaccggcagaagcagaattgccgaaggt

SEQ ID NO: 160821 - DNA, 741 bp, Zea Mays
gcaccaactcgtggatggtgcgagtctggagatgcgccgcggaaggaaaacgaaatatcttgatattccgcttaaggacaacattaaggggtggcgtcttgagtggtttattgtggaaaaccatggcaagtccctcccccctcggtcgggaagacaaccagatgtgcacactccaagttggattgagtctcctactgccttggaagtgtcagaagctagggttctgcttgctgaagtctgtctgctgaaggaaagaggtctgaccgtcgaagctgtggttgctgactttgtttttaagaacatccagccctgaaggacagagcatacccagcttacttgtacagtggtgttaccgactcaactcgggttactaataggagaattcttgctgaggatttagtgagccggctagacatgatcttgagaggcaaagtatcaaatgttggtgctcctgttgcctactctgcttggaatttgccacctcctaagtcctttttcaatttcgtgtccaatcctcctgctggtgacagtggtctgggtcttagagtgtgaccctctcccgaatatattgaggtcttggttgcttctctttgtgatcttctcaatgatgagaggcaagttcattttgagatgccaatgagtctagatgatgtagaaatgaacgttgtgctcgacatgttggctggagaatcttctgattcggacccttctaaaacaatggttgttgtggttataccaaag

SEQ ID NO: 160822 - DNA, 619 bp, Zea Mays
cagacgcgatctaaccaccgaactattttttgcccgatctaatcatgttcgtaccctgcaatcaatggactatgatgcatgtcccccatctgagctcgagcaatggcgacgtgctccacgccatggcggcggtctcgccgacgatcaccaaaccgttgacctagtgctcaaatgctacttcggccgagtgctacgggaagcagagacgaaagcgaacttcagagagggtttattagcggtgatcacgcaacagtaacctctatccatgatgcaatgtgctcagcaacattcttcgaactctagcaaggaatgcacgcggctccaagatctcgcacgctcagtaactccctcctacgcaacccacactctctagtgatctccctcatatgcaccatggacaccaaacattgttgtaggcgagaggcaatggtggtggctcctggcgacggcgctctctcggcaagaacatgattgtgaggcttacataaaggtatgtctagttttgatggctcaaggggatcacagggtaagtatttgtatgaccatataagatcttaggtggtgcagctagctcatctacatgatccgactcgatcatggtggtggtgttcgaattagg

SEQ ID NO: 160823 - DNA, 664 bp, Zea Mays
gcgagatcaacgagtttcactatttttttcgttttcgccactgaccgagaaacatatttcggtccagttttaaatagattttgatttaaaatacaaaaaatacagaagtcaaattttagtcaacaaaacgaaatttagatcacccaaaacgaaattgtgaacgctgttgcaaccacatgatgcaaaggacggagggcgggacccgagatagtagagcaactgacacaagaccacgtgcgtcatcgtatgatgcgggctaaagaatctggaagtcagaggtgcgtacaatgctacaacacgtccttgccttgctacatgtggttatgagaaaactctgagctggctcggaccgcgacagcaaatgatataggtaaaaactaagtacgtcagcacagatcactgtacgttttttaatcttattccgaaggtggtgaaccgtgaaaacccactagcccagtaactaaacaagatccttttggacaaaactgtacattttatcaggatcagtagaccttttctatccggaggagaattgatggtgcatgtttttgttattctagcatgtaccatgtattccccagctccagtgccttttgtcgtgttctacccgacgctgcgttcaacagggcatctgtctcctgaatttggctagcctctattaaac

SEQ ID NO: 160824 - DNA, 1260 bp, Zea Mays
ctcggccggtcccaattgcacgcgtgcgcagggcactgcccggtggggtccactggtcggactcacgaaatgtgcgctcgactccgatgactgtttagtggtcccgtgttgtcatccctttccccgtttcctcgcgtagatcgggtacgatctcaacggagaccgcgtgattcccggactcggttgccagctgccatgatctacggaccttgtgcggagctataagattgggcgcctgggctgtcgtctcttcctcctatcaacgcgtgctacccgcgaccgaccgtgagagagaaccagagaccggaagagggattgctgccgccgccataagtcgacccgtgcgctcatcgccaccgcgtcctcgatgtcgtgcctgggggtttcactggaccacgaggatggtgttcgcggcttcatcaggcgggattagcaatcgggcgacctgggagttcagattgttcgtcgacgttggttctgcccgccggacccgccgcacgacctcgctgggactcgctgcttcgtaacccacggtaagattacccttgatcgactcccctcggtatgcgcactccgtaggcgtggcggattaggaattttgggcgtgaatgcggggcattgtgggctctggcattgtgcgccgccgcggtgtgttttccgctgtcgtgggcgaggttcttcgcttcaccaatcgcgctaggacctagcgggatctatctctctgtgcacactcgacataaatcctcgcgcgtaggatcggagcgggcattctgggggctcccccgctctgcgccggcgatgcgccgccgtattgggcgggctctatcgtggacctgcttggggaaagaagagaaggccctgtccgtctatttcctgatgaacggcttggatcgggccaacgattcaatcaccgggtgatcgattctgaaccgtaggatacgatcctatggatccgattggatctcacctatttaaatcatcaccgttgatccttgtgttgacggtcgagattagaatcgtataccccttcgatttacgaaagcgatcgggccgttgatcatgaatcgtgcgggtcagggtggatcaggacagttttaaatccgcaccgttgatcgctgatcaaacggctatagtatcgtaccgcttcactttagataggatctaatctgggccctcggttttggatcgagcggccagtagtattccataccccttcgcccatagcactttgcataagaaccctccgaaaattaaataatc

SEQ ID NO: 160825 - DNA, 497 bp, Zea Mays
acgagatccgtcctttaacaagctagcttccgcattttttctttattagtggccgcaactttagcagatgggcacttgatggctgcatgcatgcttgtcttttatccttgcatgcagtagcagcagaaacgtcttctcacttctggggaggaaacggtcaaaaaaaaggcactaccagatcccaagtaaccggaacggtggaatggacatgcaagccacttcccggtgcatgcgctgcatttgaccatatcacgtcacttgaccatagagcaggagcaagcagagccgccatgcaagcaaggaacgggttggctggttgctgccgcctgggctcagatgaccgagtcgcagcttgggctctatgccagaccacagatttgtgttgatcgccgcctctcgcggacgcgcagactccgctatggccacgcgctagcacgcttctccggcacgagcgtgacctcagcgcggcacgacttctagcgcagcgcggctgcgtg

SEQ ID NO: 160826 - DNA, 759 bp, Zea Mays
caagcactccacctctaaatgcatgctcatacctccgctccgctccaaaaagatcacctgccaaggaaaaggaatcatctggtgctgttcatgaggagaccatgggtgggggtgggtatgccttttgtccctaatgttatctttgtcttgtctatgcaatgagctacgttcctgtcgcaggacattcgccagaggtcatacaaaccatcaaaacatggaagatatcgtctgcaaaaccgagcacttcgctattcatagaatgccacgataggaagggcaacaaaaaatagagtctgcaacggcataataattttgtcaacatgattgtgagcgatggtgtagcaacagggtatggtaattacctatactgtttttttcagaatgccgatgtaatgaatgataggttgatatataaggggccaacattcatgtttgtgctgatatatctctactttaattctttttaccagaccacaatcaatgcctatgtgttgatgggaacaacgactactcgtatatatgcttctgttcatggtggtgtgttggtattgtcgatccgaagtttaccagaaaacaagaatctcgttagtcgttagcggttccttgctttgtctaaatggttttttaagttggtttttgactctaataaagtagttacatctcactttaaacttaactgctatggtagaggaggcccgttccattttctcttttagattttaataataatgtagttgtgaaccatattaatcatttggg

SEQ ID NO: 160827 - DNA, 543 bp, Zea Mays
ggagctctctctgcggtgaggtgcttgctcggatagggtgtcttcagaacaagcagcaggactcgccaagacgggcagatgaggggaggcacaggggctcgtatatatgctcaacgccgagagccctaacagaaaccactaggaggtaatctcggcggtagactcggtctacggtttgttttggtgccagtgttatttagcatccggttcggcgaaggagatacggctggaacgtgggtctcgcgtggcagttacgagcgattcaacctcaacttcggctctgtttgttacgcaggtggtggtaggaattagcttgcttatgtcacccatgatgatgtggtgatgtcattttctgcaaggaaataaagaaaggggaaaatcatgtatggcaaggacgtgtgggctagtttgagccaaggagatggcccaacggatggagattttttttctcatttctattctatttgctaattctattttcatatttgaactcaaaagttaaatcccttttaatctaagttggagttttaacttcaatccaaa

SEQ ID NO: 160828 - DNA, 600 bp, Zea Mays
agtaggctagtagcgcctgggcaaccaaaaagaacattacacagagtattctcctaagatccatttgttattccacattgacttgcaatggtgctcgcaaaagaatctatgattagtcgaaataaggattatagacagaaaatcaaacaggattgctgactttacctgctctaacaccacacgagtgaattttgatgcaaccatgcttaggataggttttacaacaacccaaataatcctgacaaaatcaagagcgacgggagcatatcgatagctccacaagcaggggccttggcatggccacttgcaccaatatagtcgatctccaaggcacgaaggcgatgaaacaaatctgacaaggctgctagcgagagaaagatggtgctgactacagaggtgcaaaatagtcaaccagcgaaaacatcaatggagattgattaactctaggatagcataaaggtaccctggtgctattccaccctagctgaatctaactcaccgcaacccaaatcttcagcactgtagcgcatttgttcctagcaccacttggcatggtgcactgggtcgctgcaatcagcatggtagctgctctcctgcctg

SEQ ID NO: 160829 - DNA, 902 bp, Zea Mays
ttttcctccctcatcatcgctggtagcctcccaggcctgtggattcaccgtgggacgagaccgaccggagggattccgggtcgttcgtccgcgagctccatgagaccagaggcatcaccacctggcaggacattgccagatccgcgcccgcgcttggatctggaccgaggaggagtgtcttcacgaatttctggggcgtcgtcatctgagtcggactcaacaacagatggatttctacgacgcaccatccttaagattaaacaaagaagaacacatggtgagagagatatttaatgtccaaggagttttaacgaacacgtttgaggaaagacacgtatgatattgagcatgcacttcaaccgttcatatgagcggtttagctacaatgaacaataccaacctacttaactcaaacaatgttcgagacaatgataacagtttaagtgtgccatacacctaaactacacaatatccttgaaaagatacttaagataatcaagaacggtattggatcgagtcaaaaatagggaaatgagacaatacctcaatctgagaaatcgaccacgaaaatcccaacgaagagtggagagatggtggaggagcccgagggtatcaaatctccaacaatctccacaaagatttgatagtgtttgaagggatttggagtgtaggatgagagagagggagagagaaaggtgagggcgtcggtggctgcaacaaatgagagagtgaagatagaaagtggggagtagaggacagaaaaggggcagtggcagctggtcaaactgaccaaaaccggtccacgagagctggcacgagaactgactcaaccggttttgctgcagtacgcacagtaatttcacagaaaacgagggttgactgcgcagaaaaactgacgcgct

SEQ ID NO: 160830 - DNA, 803 bp, Zea Mays
gcgttggtttcaacagaaatggcgaaaaactcgcccggatcctcatccattctgccgtgtccttggggaggtggactccgcctgcggggggggggggggcataaaacccgcagcgacctcttgcctcgcctctctgattccctagtcgagccatcatcctccccctttgcgaattttgaggaagagacgccgccgccatggaaattgttttccgtcttcgcttaaggcgcaagctcgggtcagtgggcttccttggggtacgacggtgatcattgtggcgctcgcgggtggaagaagcctttggtgctgccccaatttctcaccagcaccaacaattgccacggaaccacacttcgtcgtggcctggggactgcaccgcataaccaccggtaagattgcccccattgagttcgccgtaatctccactaccgattgatcatcaccgtgttcggggtagctcgccaaatcgttgatccgtcgttcgccggcgcgctcacaacagtggattggcccggcagcgccaccgcgtctggttgcggcttggggaagacgggggttcggccgttggatgatgaaggaacgacgtggattacaataggtgtacccatccgctcagttggctctcgaccgttgatttgcgcttgaatgcttcagattagatctcgcacaccggttcgggtggttggatcctgatcgtaggatctgatcggacgatcgggggtgagcgcggatgtgtaggtcgcccggatctaatcaggcgcgtctgtttctgatcgggcggccctgattgcaggatacctttt

SEQ ID NO: 160831 - DNA, 369 bp, Zea Mays
tcagtttatttgtgttgctgtctaggagttccgtcatgagtttataaggcatacatattcactttatttacacattactacatggcttcttcctccttggaataaaatagaatttcccttgctaggctctataatgtttcaaatattttctctatgcagagctttttatatgaattgggatgaatgtacttctgcaaaattaagaaggtgcaacattatatttgctttccatttcccttctacccccgtgttttctaacttgatctatttgtatagctgtcatatcatatctattatgcagacagttacaaattcgttttctcgctgctacacatgcaagggaggaacctgcttatagatctgtttcct

SEQ ID NO: 160832 - DNA, 633 bp, Zea Mays
ctaacaaaatagaggggctctttagcgattatgccgagccgaaggggtaccgggtgactaaagtcgttggatctggattccacgattaggattagatccaatcccccctgaaccaggatgcaatgatagctgctggatcctatatctacggcccggatcctaaataaccgagatcgaatcgtattcatcggttcactgatctacggtcagggttctcctaaatgaaggggtaagccatggacaaatccgcaccgttaatcacccaaatcaacggcccactggttgtcttcttccccaaagccgtcccgtcgcgcagaaacgcggtggcgcccactgtttggccttgacgccccgccggggaacgtcgccctggtgccctagtgcaccatccgcaaccccgggtggttcaacacgaagctactacaacgacgatcatgagcaggtaggttttatcggcgatcagacctcgctgaacccccgcgaccgaacgcagcggcatcaccaagcctcggaaactccagcgacgaaatcatctatcctcgcccacccattcctccccgcgacagcaagtccaccatccgcgtagctcggtggatcccttaggcccaactccgaggatgaattggcagcgtg

SEQ ID NO: 160833 - DNA, 665 bp, Zea Mays
aagcgagaagagaaaccagagtgagtgaagaagaaggtcgttggcacacggtctatttaaagaagccaagggacgacccttcggctcccgtccgtacaacgaacagtcgcaaagacttcaagagccttgtaaatttccaagatgatgagcaagtcactgacactcattggcgtaagatgacaccggggaagagtaataccaaccactcaagcgcattactacactctgtcgcgtcatgttactattttgagacaagacaacatacacacccaatgggtgtacagaccggatttttagggatttttgaagcagcctgatccatgagatatccgcaaaagttacaaaacaacaaactcaagattggtcaaactagagtcaaccagacttctatcggctggaacctagtcagcggtcacattaaaaaccctagtcgaatgccgtccagccagatttctatcagctcgaacccagttggttaggtctcaatcggctagatcttagtcagcacgggctcagttgggcaaatcttagtcgggcacgattgttatagtaaatcagaattttctaaaggtagattgtgaagacctttgagttgattgatactcaaatcaattcaaagcttgggggctatggtgcacccaatggatacaaggacaaaagaaaac

SEQ ID NO: 160834 - DNA, 390 bp, Zea Mays
cgcgggcagcggagcgtggagggaggggatgctgggcgtgccacgtggaagccatctgaggactggtcgagctgtgcgaaatgctacgaggacgcaggcggtttgtgtggtggttgaaagcttgaaacttgggacggaccagatgacgtgtgtgttagggagtcgtgggccccggaagcagtggaagtgggtgcacaaagtgcgcgtatgctgagtgagcgtgagagttttaggtcgagcttctcgcgcgagtttggaccacacaaattgtgtgcgtctcacgagcagtccgacttctgcgatcattttggtgtatttattcagagtttcagacacagccctgaaagttcttaagaagaccacggtgaattcagccttttttcctaatta

SEQ ID NO: 160835 - DNA, 717 bp, Zea Mays
gtgaattcgttgagcatggcacatagaagtgtgtcgtgactgtatacattggatccagtctgcaccatgtggaatggagtgtcactgctgctaggcacagattcagagacacctgccaagttgtcgcccacaaggcattgaggaccctgtgtcagatctatgaagaagaagtggccgacaccccgctcagattctttccacccttttagagagaccgtctagtttgtatggccaggatgcgtgcattggaagggaagcaattgcttgaggatgacccctcagtcgtgtacctcactgcatacctgctcaccctggatgcgcaatatgacttcttggctcggcaccaccgtcagatgattgcccgagcagaagatgcagagaagcacaaccgtaagctccatgtggatctcaccatagctcaagcccgtgtagctgccttggaaagtcgtgatgtcattgttgttgaagccctgaagcaagccaaggatgagcacgtccagaaattgatggaggcctacttggtaacccataaccaacgtagagccctgcggatccaagaacccgcttcatccaacccagttcaacccaggagagttgaagatcaccagattcttgaaggtcacccggtctctatcagaggagagaagaaggcttgggaactaccggaaggagccatagtcttggaaggaattccagtctcccctaaggctatggata

SEQ ID NO: 160836 - DNA, 865 bp, Zea Mays
catcgttcggtttaaagagtgaattttatttatttcatcggatttagagccaacacataactcatctatctctcttacgactagaccctctacgctcatcattaatcctctctctgaccaagttcttttagagaagctcaaaaaagcaatcatgctctctgtaaaatataagtttttgcgatcatccgataagttaagctagacgactatctcaccggtagcgcaatagcctcgatgcccatcatcaagggaaaagaagacaatggcaaggagacgaacattcctaatctagtcttctaggtgtggtcaacaatagatcaataggttgtagctcttactttcatctatgaccaaagatgatctgtcttaggtcatgatatgtcgaactactgctaaacatgtaaggttgtacaagggaactacacagcatcaataagggcacactccatcaattcaaggattgcactttctattaccaaaaaggagacatctccatcaccaaatacattagcaagatgcactccttgtgtgacgagctagcatccaccagcaagctaatcgacgatgacgaattgatctccaacaaccccatcgacctcgactacaagtgcaacctagtcatcaccacacttgcaaaggatcatctcaccatcaacgaggtgtattcacaactagtcagctttgagaaatgcatggaacccccacatcaactaccacacaaaaactaatgttgctagtcatgcgtgaggatgcacacacgcaatagaggaaacactcgagaaggtgatcgcggtccaagagttcacaagcaaaatgttgggtgtgtcccagaagcgacaaacaataggagaacaaccttgatgcc

SEQ ID NO: 160837 - DNA, 445 bp, Zea Mays
tcgccaacaagaagagagccctattatcttgactcttgagaagcgccatggatgcgagattgatgttgtttgactgctcaacgtatggccatgtttatatatagaggtaggtggcctaagcaaacatggcaaagaattaattctggccattacacctctttactgctgctatatatattgttttcctggtttatataactcgattccaatgcaataaaaacttgcctcttagtaccggatccttaccataacccatacgcctcatcattacgggtcatttatcaactccaaaatctcgaaacttacctttagcagtaattatttgcccctggtctttaccatgagatcaccgattggttggggtttattttaggcatcgttgttaaggtgttaagcatccgtttttattctgttcaagttgtgttaacttctcattaaagttgtc

SEQ ID NO: 160838 - DNA, 975 bp, Zea Mays
gcactacttaaccttccaaactaacatctccttcctcatgtgtagtgtcgaaagctgttatgaccggcatcccctacaccaggtgcatggacattagtggctaggagggctaaggcccacgaccaggccacaagccacatgtggccaagagatcaactaggatagattagataaggattagctaataaaaaggagagattatctgtagttagttggataaggattagaagagatctcatagctcttatccttagatcagataagcatcagctcggatataaatacttgtaagaggtcatctgtggaattaagcagaatcagattattctggcttccctgagggatccaggagttggaatcaatctctcttacccgcgcagcctaggtcaaccacggcgccccagcgcaaccgcccccatctccctcgcgcagttgttcatccttataggctaagggagatccctggtaggatcagcaatcctaccaatttggtaccagagcccttcgatcctccggccaccatgagttcttcgtcgcaatccccaccggcctccatggccgccacgcctccagccaccacgccgcacactacgccaccctccaccaccgccacgctcgccctgacctccacgctgggccttcccaccgccggttcgtcgtcatacaatctgcccacgacgacgaagtgaccataggttccaggcgctgacggaggccctcaccacgggaccggtcctttagatgcccgacttcaacaaactctttatggtggactgcgatgtgtcgggcacaagcttcggcgttgtgctccaccagggggcagggcccctagcgtacttcagtcggcccttcgcagcccgtcatctcaagctcgcggcctacgagcgtgagctaatcgggttggttcaggtcgttcaacattggcgcccgtatcaatgggggcgcgccttcttggtgtgtaccgatcactatagt

SEQ ID NO: 160839 - DNA, 572 bp, Zea Mays
aatttacatatggttcgtcatcaggctcactattttgaccagattctatcacagttatacacaatttcacaaactaacaaaattgttgtaaaatcatctgcttgtttaagtcagaatcacctgttttccgtgagttttactcagttcgtaattaaagttgtttcatttatgacaatcttctccctaattttttgtgtgaaatttagacagagattaatcccaaattagtcactgctagtcaagtgagtttagaagtacttgcttatatttaatttctctacttataacagagtgctgctctagctttggatgattcagttctggatgctgatcaaattgaaaatctcattaaattttgcccaacaaaagaggagatggaacttctaaaggtcgctttttaattaatatcatatttttccacatgtttgaaccattttcttccctgaatcttgcaaaaataagatcaattatttgcacattttccttcagaactacagtggggacaaggaagctcttggaaagtgtgagcatgtaagcatccatatttgttttacagataaatctcgatgtga

SEQ ID NO: 160840 - DNA, 451 bp, Zea Mays
catcgccggaagcttgctttatgccaacttcaaggtaacaaatatttttgttattttattgctattattattatcttttgggtcgtgttctgacgaaggtcatttcgacagagtatattattaagcaaggttctgaagatgcaacaagatctggaggaagagaaaaacaaagctgtcattcaagacttggctgaaaaagttgagaatcacgaagccaatctgaaaaagaaagacttcgcaattcaagatcttgaactcatggtcaaagagcacgaaggtgtattagaaaagaaggattttgttattcagaccatggaaggctctttggctgaagcccaacttgaaaatgacaaattaaagaatgaactgctccttcagtcagaaaaattcgagcaagaaaagaaatatttcgaagcaagcctgaaggctgaagtggataaatacgcaaatt

SEQ ID NO: 160841 - DNA, 450 bp, Zea Mays
gtgattcagtcagccaggtatcagcaaactctgaggcactatcatgataaggccatacggcatcgatcctttgcagtgggagatcttgtcctccgatgaattctagcgggggagggacaacacaaattgtcaccactatgggaaggaccattcatagtagcagaagtcactcgacctggatcatatcgtcttactcaaatggaaggcacagaaataggaaactcatggaatatagagcatctcaggaaattttacccctagctagatttcaaaagctattgggacaacattgtattctgtaattgggaagtacaccatcaataaaaagacttcattctcaagggcacttgaactgtttattgtcaatctgcatgcttactcgactcaggatgaccactataccctacaaacagagcaatcgacttaagtcggcaacgacttaaggcggtg

SEQ ID NO: 160842 - DNA, 470 bp, Zea Mays
atatgatgctcaccataccccacaaaaccaccttctagattgaccatgagatcatatatctattgatgaactttgacaccagtcatcatcatagatgcaagtctgtcactacaacacctttcgtacagttcttgatgtgtcgtctgaatgcatggtcaagaggtaggaattgttgatgtttgttgaacgacgaatacttgccacccttctacaaccaaatgaacataagaccttcttttcatactgggcttggaaacttactatgaacacaccaggtagagaatagcccatatgtcgatagttcatacatgcagtagtggtaccaaacatgcattttgaagtttttatttgtagcttggttgttgtacataccccttccgaccaagcacagaccaattcatcaatcacatgctctatgaacacacccattttgttccttaggtgtccaagaattatcaacgacaagaata

SEQ ID NO: 160843 - DNA, 510 bp, Zea Mays
ccactgtgaaggatcgatgccgtatggccttatcatgacagcgcctcagagcttgttggtatcacgctgattgaatcaccgtatttagtcgctcttcttcgagtacgtcaacgtcttccagcctagtagcttcagcttctgctatgttatcaaagattaaccttggtgccccgaacttgagatcggcaggtagcactgcctccgaaccataaaccataaagaagggggtatttccatgtagagctcggctgggttgagttctcaggctccaaactacatatggcaactctctgatccattttcctgcgaacttttcattcttatcaaagactttctttctgagtgcttctaatatcatcccgttggctctttctacttgcccgttgggtcttgggtgcgctaccgaggcatatttgatctgaatgcccttttgctcgcagaaatcgaagaattctgaactggtgaagttggatcctaggttatgatgctattcggtatcccgaacctgaa

SEQ ID NO: 160844 - DNA, 344 bp, Zea Mays
aaacacaagagaaaatatggtattgaagaaaaagcatgcctcttttaaaggagatagacagtcgcatcgagtcaggccacaaaagaagctaaaatgtgagtatttcctacattcagtacaagagtaaaatgctagtatttatttgttttgagttttatgaggagtttttccacatgtcttgcagccatgaaccatgaagttgacaccttaaccagatctaataatgaagaggggagggagaactctgaaggtgcttttgaagaagaaaacacaagagaaaatatggtattgaagaaaaagcatgcatcgtttaaaggagatagacagtcgcatcgagtcaggcc

SEQ ID NO: 160845 - DNA, 466 bp, Zea Mays
gggagttcgattgtgtggacagaggggtcttcggatgaagacttagactattttgcagcattggatgtggctgcagcggagacttctctgcgtgtgacgggtgaggatattccttgtgcgagtgctgggcgtaggcgtcgaagggcggtggcgaagcggagagtgagtgagttgtcacaaagtgatagacgtcatggtgaggtggagggtggtcgtcttcgagtggacgggactaccaaacgggaattgttgtcttcgccggctggggcgagtgtaggtgagggagagctgtgaaatctttttgagggtgaggaattgaggataatgttgttcaactacagggagatgggtatcatcccgaaggttgagccgttgtaatgtgtgatgccctcgctgtgtgtgtaactatgatttgtatgatgaggttgcgtgccttcgttgatccggccgcgcccgtaggcggctt

SEQ ID NO: 160846 - DNA, 1125 bp, Zea Mays
gaggcgtctccgacgtgggctagctgtgggaaccgggaaggagaggagccttatccagccttatccatcacccatggctgaaggacacgaagcttctggaggctggctctccgtcaagattcaatcgtgcggttgaagaaaaaatagatgacgtggatacagcgagagctgttgttttgaaccagctttgttatatagtgtaaaagtaaatattcaagattcaatcatgcggtggaagaaaaaatagatgacgtggatatagcgagagctgttgttttgaaccagctttgttatatttccttatctttaaagcaggacagaaacggcacatatgagtgtatccacgtcgactgaaaacattatagtcgttggatcgtcgatcgttggttcattttccctcgcctgatttctcgtgccctcctcgttctcgtcagctctggagacttccacacgcggcttacgctcctcgtcagccctcggctctcgtcctcggagaacgcgcgctcgtccgactacggagatggagctgcagcacctcgtcatggaccagaacaactaagcctcggacaacgcctcgtggtccaactccctcaccgacgccttcctcggcaagtcctccaagatgcagcctcaagtaagcctccgtagcctcctcagtgtcgtcatcagttcagcagtctcaagcctagaggcttagccgatgccgcgttgagtctcagtggtggttgtggattcacagagctattgaactgaaccggccctgttgtttacacgcgctcaagagaattactgatttcacacttgagtgcattccaagcttccagattctagttagtatcaaattagaagtcattgtctcctgtgaaattccctgtagttcagagtagcagtgggacaaaaaaagttttttgcttcatttggcaccatgcttaattagttaatttccaacaattcagttgctcattgtttagcgatcccaattgagaatgacctgatcggtactaatcctaccatatatgtttccgtgatggagtgatctatatatctctcaatggttgatatttaaatgctttatatgttgcagtaaacaccaacgtatatttctataactacacctttttattt

SEQ ID NO: 160847 - DNA, 571 bp, Zea Mays
cagggatccgcccaagaacctacaggagttgtatcagctgtttgaaaaatacgccaaatccgaagagctccaccagcgcaaagttgagtctcagaggaaacccaaagatgctccacagtccagccgcacgtggacaaggactctacagccagactccggtcgggacggccgcaatcagtagcaggtgcacaacatcgccaaccagcaccccgctggtgaggcccctcgccgccaggaatatccccccccagggccgcggaaatggaactcgcggtcggggccggggacgtgcgcaaccgtcgtgccgtttttactacctgtttcacggcgaagactgcgcccaccaaaccagagactgcccagagacgaaggccaccagagacaggatggcacgggcgcaaccagccgacaaccctagagttgtcgcgcacacatatcagcaaccccctccaccatacatccacgcccccgctccgcaccacgcataccaacaccaccaggaggtacaaattgtacctcccccacacccacctccacaccagcaacagcaaaacatccaccacccccaagc

SEQ ID NO: 160848 - DNA, 497 bp, Zea Mays
aaggcctcttttgcacccctctattgctactatattttttaggaaatccacagttcttaactcaatagtttgtattcattatgatctattctcttttaactgatcttcagatcaaatcttcatacaggtgccttcttttttcacccgcaagctagtaactcaagttttttccttcattaatgtgcagctgttcaataggtcgggatgtacaagtcaattatattcttgataaaaacattctggtcaacaaacttttgatttagtttttctttttctaatctgcagtatgctcctacgacgagaatgttgcacattttcaaatggagaatatgtgaaatctgggctttgtgtgctggagaaatggattgtggacactgaagaggttcgcagcaggcctttctctttttgtatcttgatcggcattcgacagtgcacctattcttttctacgttgtagcatgcaggtgcagcttgggatgagctgcagttcattaggca

SEQ ID NO: 160849 - DNA, 470 bp, Zea Mays
ttcaccgccggttgtgccgtcgcgggtgcgtattgtgctgcctgtggccagccggagaggacaaactccctagcgcccgatcctaaccgtccagtcttgatcggatggcccggatgcgtggataacgatttgcatggtccgtgtagccataaccattgatccgtgatctagcggccaacgcgccccgcgctctcagcacaccgctgacccgtgggccccgtgcgccagtgcctcaacccttccctaccccacctatgagctgcactcgcatgccggcgcccgcaggatctgatctcatccgttcgcttgtgatcgtgcggtcaaggttgcctgataccccttcgcgtgtaaatttgctaaagagacccttgggtttctgagaatcaacccgccgttttgtagtttagcgagcagaccactgttttcttttaaacagacccctggcctttttagtaatcacagatttggac

SEQ ID NO: 160850 - DNA, 674 bp, Zea Mays
gtgcttggacacacagttaaatttcagttcagcctaccatcctcaaactgatgggcagaccgagagaaccaaccaagtgctagaggatatgttgagagcttgtgcccttaaacatggtggtagatgggattagagcttaccatatgcagagttctcttacaataattgctaccaggctagtttgaagatgtcaccgtttgaggctctatatggcagaaaatgcaggactccactatattgggatcaaactggtgaacgacagctctttgggcctgaaattatacaagaggcagaagaacaagtgcgaatgataagggagaatttgagaactgcgcagtcaaggcagaaaagctatgcggatacccggagaagactgctaaagtttaaggagggtgatcacgtgtatctgaaggtgtcaccaatccggggtatgaggagatttaaagttaaagggaagttgtcccctcactttattggacctttcttgatcttaaagcgagtgggagaagttgcatatcaactagaactacccgatcatcttgcggatgtacatgatgtcttccttgtgtcacaactgaagaagtgcctcagggtacctgaagagcagctatcgatggaggaccttagtgttcaagatgatctgacgtatacgaaatatcctatcaagattcttg

SEQ ID NO: 160851 - DNA, 529 bp, Zea Mays
gatgaggtattgaaggaatactagatttatatgcaccaactaacaccagatgcaatagttagacttagtgtctacatatggtttgtgcatagccaaggtgcgtgcgtagatgccgaagcgttctgcaggattcatgagctacactatcaaatgaaggctacacattcggacaatctgcataacaattttgggtgatatagcttcgcccagcgaaaaaaattctaagtttctagtgttagcataccggaccaagtggccgagtgagtgggccaaggatggttttatgtgaaggccgatacaaagaagagggatgaattcaaagatattgtgttgagtccactgaaagtgagcttcggctacaagagaccactttgcaacgtgtgtgtagccgctcagatggcttacatcaccttcaatactgtagcgaacaagactggcacctgagactttatgtaggagtttctttgcaatagggttttccacactcagtctggctagaggatgccaaagccgaagaagggtgatgaag

SEQ ID NO: 160852 - DNA, 1100 bp, Zea Mays
gtccaaacatagggcattacgataccagtactacttatgcgaagtatggctatgacgagcagaaaaggcaattactagatgctcctataatcttctatttgtcaggtagctatttagaaagaccatcatgtttttgcctttttgttttagactataccagtctcctacacacaattgagttatataaagtactaagtggaaaatatatagttgtttcctgtacacctcattgtatttgtatttgtaagaatggtgcagttggaattgttgatatgtgcaatttcttttattggttcctttttgttctcgaaattgtgatgaaaacagacaacatatacctacagtgcacttaattttagtatggtttgccgtttttgaatgttctttgcaacagctgacctgcgtgcttttgtcacaaaaaacatattcgttgtctgctattggggttgttaacccttgcagtttgcaaggccaatatgtttcagcattgatgcaccacaacatatgctcccttagtctcttttacctattatatgttgtgaggcagttagtcaacttgtttaattgtaggatgttaccatttaactgattcacctcacacggtactaggagtgggtgtcaaacatagcagttagctaaatctcgtctttatcaatactacatatagttttggtcgactttgatgctactatgctcagctgctgtgaacacttgttttttctttattaagagaaagaatcaaagatggatgcttctcaggcatctgatggggagctccacactagcgtgctcaaccactatgctatcaacgtttgcaccatagtaggtagtagataatactaagctttctaaaacatcagatacttagtaatgaaaagaggagtggataacatatttttttatcatgagcataatataaaaattggattcacttaaattggattctcttgtctgttatatataacttctgtaatatatatggaggacctcagtaccattttatggaggaggagctggcaggaacaagacctcaagcccaagcaggtatttctagcttcattcttcgtgatatctaattaaaaacattatttggtgcaatt

SEQ ID NO: 160853 - DNA, 566 bp, Zea Mays
gtcattcctcaaaaaaagaaatcattgtgctaaaacttgacttcgaaaaggcgtttgatactttagaacatgaactgattctgcaggttatgactcataaaggttttggtacaaagtggattaactgggttcgaaatatactacattctgacacttcttcggtgttactcaaaggagtcccagggaaatccttccactgcaagctaggagttaaacaaggagatcctctttcgccactgttgtttgtcttggcggctgaccttcttcagagcattataaataaggccagacacctgaatctgctccagcttcctctaccagatatttgtgaacaagattttcctattgtacaatatgtcgatgatactctcttgataatggaggcctgcccgaagcaattattctttcttaaggcaattctcaattcctttgcaacctcaactggtcttagggtcaactataacaaatcaaatatgtatccgataaatgttaaccctgagaagatggagatcctttcaagaactctcaattgccagataggtgcaatgccgttcacttaccttgga

SEQ ID NO: 160854 - DNA, 554 bp, Zea Mays
ggaaatacagtattgttgctcgggtagaagttaaattcccgattgaaccacgttttcgtgacagacaacatttcgtttatctgacatcaatgtaagccaacaattctttaagtttcattttcaaggttacacgatctccataccatcgcctcttctcttactgaaatacatttagggagcctacagcctagatcgaggttacatttagggattgctacaaggttatcgctccctcccacgaccgcgcatggatgccctcaccccccagatctcgcgcacgccctcgcgttaacccagtcccaccggcatcaccacgcctccgccctcttcctccccccagcaatctcgcatcggcgcccgccccagccccgcagaggtcgcgtacgtccagatccccaccatccccagcgagctcttgtcctcttccatcgtgtcgtaccaagacgatgtagatctgtagcatttcctagcgccggatctcggagaggcgaaggacgagtcggtgttctagatgatctgtagtcctcccgatcgcccctcgctctcgcccccac

SEQ ID NO: 160855 - DNA, 663 bp, Zea Mays
actaaggtcacccatgtaaaaaaactcgtgaaaataacaggtgcccgaggatctaaagacaagcaggatatccccgtgtgtacgacgaagacgagagggtctcaggcgaggcgagcaaggcggccattggttgtccaggcttttggccagcagctcagaaaggacttcacagttttcttgagcacacgggctcgagaactggtctctaagggccaaatggtgcattccatggcaggcaggcctggagatggcactacataccaatccatccaaccatgggactttgcgtttgtgcccttaaatgacatggcatcgagggtacggtaaatatattctcccacttggttgagtttcttgcttcgacggaccaactcgttagttttcatttgaatttgaatgcataatacatattcagacactggatttttcacacacacttatgcttctgatttgatagggtgtgatcagtacagagatgctagattcgttttacatgccgctgtatgggccttctgataaggagttgatggagatcatacaaaacaaagggtccttcgagatcaacgatgttcaggtgcacgaacagatgagtggcgtagacaagagcctgcagaccccaaagatcacggcgctctgcgttcgagacaacgatcgtccagcatt

SEQ ID NO: 160856 - DNA, 408 bp, Zea Mays
gcacaaaccctatcaaggccatgtttctttccatagatcctgtcccgaatcttcatagcatttctgctgctcatcctagcagatcttgttttcctacctctcctttgtctgaatctggtaatcattttccttgtgaatcatgttgtgaccttatccatcgaatctctagatcattcatcgagatctaccatgtcatcttgttatctgctataacccactctcaagtattaaatgtggatcagtctgatatctcattcatggtcgttctcatactctttcctccaaggatcatgacgctgttttatcgattttatctataaacagtgtatccattcggttcaatggatgttgttgttgtctttggttctctaatgtctctaaaagctcatcaatcctgatctcatggtt

SEQ ID NO: 160857 - DNA, 781 bp, Zea Mays
gggctgcgtccaccgccccagtgccttgcccaggtgcaaataagtaggaccctgcgaccttccctattgcattggcgagcagaggcaccagagtgcggatcgcacatcaccgtcagggcccttcggcgattgtcctctctgttgtggggtgggtcgtcggtgacgggtgctcgcgctcccagtgtttgaagccgtgcgtggtgaagcgggttttgcaacgtgggccttagcgataccttgccgatgtcgagttccgccgtggatcggcctccacagcggtcaggttagagcgccgccggactcactgtatgggctactccctgtagatccaccttcgtcaagcatcgcgttgcatcatagtgcactgggtgggttgcgtcagggccggcgaagcttctcaccagtcgccaatggggtcgtcgtagtccgtccgttgggaggtagatgataaggttcgcgaacctcagattttgaggcaacggtggagattaggtctggggaacgctcggccagggagtgttgttggccgttggatctcgatctaatggctaacacggagtaccagttggctttggttctcagtcgtcggatacgaaatgtgcgggtgagattagatcttgtgttttaaaatcacggccgtcgatcaccgatcggagggcccgtagcgcgtaccggttcgataaagtgaggattttatctgggcccttggtttctaatgcaacggctcagagagaaacataccccttcgtggctacaaatttccatataaaccccatgggaa

SEQ ID NO: 160858 - DNA, 500 bp, Zea Mays
gatttagtacctctaatttcacaaatataaaattgtaatgaagggccaaaaaggtttgaattaaatctgaattcaaattgaatttgaaaagggagaaaaggaaatgggaaataaaagaaaaaggaaaaaatcttacaactgggcctggtccgcgcaatttggcccaactctggattacttccgcgcagcccaacagaccactcccgccgttcttgcttgagtcgctgtcaagtgggtcccgtgcgcgagccgcgagcagacagcttgcatccgcacccgcacagttcactggcatgtggggcctaacggtcagaaccatcatcctcgcgagaattttgggcgcgtcagccgtgctccgggagaattgctccatctggtagccggccgcactggggaaagtcgtcttcctctccgcagactagggcgtggctccgttcgcctcgcgcgcgcacaacaacaacctgcgcgtggcgtgcggaatccgtggtctcctctgccga

SEQ ID NO: 160859 - DNA, 414 bp, Zea Mays
gccttgtgccattgcctgaatgctccactccgcgctcgccattggaagagagggggaagttgcggggtgcacgccggggggaatttcctccaccgtacgtcctctggcgggtgctctggcacttttggccgggtgtgtggatccaagcgggggcaggattggtgcctccgaggccatagcgcggcgggaattgctcaccagagccaggagttcgcgccgtgaagctccccaccacggtccgacctccacgcgacacctctgccggtgagcccctctccgcaagatttgccttcatccctgctatgtgatgctgcgctcacattcgatgattagactcgtgcgcgcccaatgcacctcgcgccagcgtgaaaccaccgtgtcaatggattgcgcccgccgcttggcgcgccgggc

SEQ ID NO: 160860 - DNA, 603 bp, Zea Mays
taaaaataaggggggttaggagattagggttccaaaccttgggttgaaattttgggatgttacaaacctaccccacttaaaggaatctcgccctcgagatttagactggatttgagaaaagataagggtattccctcctcaaagagtcctcactttcccaggtagcttcctcttctccttctctgctccactgaactttacagagcctcacttctaagttgcgggtcttccggaatgttgagtcaagaatctttattggcttctctcggtactgaagatctttctgaatctggattgcctcttcctcgatgagactttctggtacttgcaggcatttgcggagctgggacacatgaaacacattgtgaatatcggacatggattctggtaattccagatggtacgctgtgggtcccactctgccaatgatgggataggggccgacgaatcgcgatgctagctttcctttcacttggaaccttctgacaccacgcatcggggagaccttgaggtagacgaagtctccttcctcaaaccagagttctctccgccggttgtccgcataactcttctgccgactctgagctttaagtaatcttctgt

SEQ ID NO: 160861 - DNA, 360 bp, Zea Mays
ctcggagcaaacctagcttctttggagttccgttcagacgcgttcagctcaacgcgacctgaattttcgcattcagagtctcagacggatgcgtatccgatacatgcagcattcaggtagccctgtttaggcgaggcgagcgagacacgctcgtctttacaggtccctgccaatgatcgccgcacgccggcgtgctgctaagcgccgacgctggcgcgtcgtgcttgtggctgtcatgtgcccaaaggaggacaggatcgtactatgcaagaccgaggaagcgaaaaaaaggaaaaccgatcggctgaacggggaagcagcagatccgaggaaccagagcaggaacagcatcattgccat

SEQ ID NO: 160862 - DNA, 430 bp, Zea Mays
gaccccgggctgcaggtgtcccgtctcctgtgtgctcggtgtggaccgaggcctcgcgcatgtgtcgggaggacgctgcgtgatgctccgaggggcatcctcgccttcgggaggcagagctctcggctcgtcgggctacgacattttctaggaggtccttgagttcgccctggatacgtcgcccctcggtggtggatggctccggcattgtttgaagtaacatcgccgttgcagctaggctctggccggccccgttgaaggccgggggcagccctgccctggcgtcgtcaattatacgtcgctggacgtcccgggcccgatgtcgcgctcctccggcgagtgctcgacctgcccactcttgctcgatgttttttcggagctgcacaagtcgccccgtttcttcgtcgagcttggcctgcatctcgcggag

SEQ ID NO: 160863 - DNA, 400 bp, Zea Mays
ctccgagacaggcgcatccagggcaacgaggtcaaaagatggcatccctagagcatccagatcaactgtaacatctcttacttctgcagttccaagtaacccttgataaaaattaaagaaggctgctgcctttccttcatgggcagtccagatttgcccatcctctgagtgtattgctgcaatgaaattctttttcttatggaaacatagaaacaaatgcgtttttgatgactgcaaccctagtgttaccatgagtcttagagttgttgatgaggaaaggacgcaatgggagattgctggtgccaaggggccctgccatttagctgtacctttagctgagaattaaggagggtctaatggattcatttatgtatgcttcttactggccttctttggccac

SEQ ID NO: 160864 - DNA, 768 bp, Zea Mays
gcaagggtacgttccactgctagggttacacgcgacggagaagaagtcaaagctgctgaaactgctccgatttctgaagtgatgaaacggtcggggctagtagcgtcggagggtgtttctgacgaaggtgtacctgccgccgaagctgagcaggttggtgctgaggaaggtgaatctgaagatgattatagtgtcgtgccatctaaacccagccacctggagtttgggaggtccactgttgccgaagatgacatgcctaagttgatgaagttaggctatttcagtgaagccaaaaaggaactaattcgatttggcggagaggaaattactccgaagccagaaaaggatgaggtggtagtctttaaaagcttctttatagcaggattaagatttcctttaaatgagatgattgcggatgttttggggaagtttgggatttatctccatcagctaactcctaacgccatcgttaggcttagcgtttacatctgggctctccaaagccaaggggcagaactgcttgccgaaggcttctgccgggcacatgagcttcattatcagacaaaagctagagaagatgggctgcatgagaacttcggatgctataattttgcttatagcaaagatgcgaagactccagttatcagttatcgtaccaaatggccagctggctggaagaccgaatggttttatgtcaaagttgatgagaaaaaggagaagctggttcaaagcccattagaattaatcttcggagagactaggccccaa

SEQ ID NO: 160865 - DNA, 880 bp, Zea Mays
tgtgcctagaaataatgatctggttggaagaccgatcaaggcaacaataacccttatgattagtggagtaatcggggaaaacatacagggaggagcggtggcggaaatgttgggatagcatcgtcggtcgaaaacatagtgatgagtatatatgagggtggggatccgaagatagcacgatgggatgtgaagttaagtgtcttagtcggtagaatattgaggagcgtaacagtgctaagcgcctcgacccaatatgcgagaaggacactatcctgaatcaacaaggagtgaacgacattattgatggtgagaagcatgtgttcggctttactgttttgaggcaaagtttaggggcaagacatacgaagttgaatgttgtgggagtggaagatagtgtgggtgatgtgtttgtcgaatctgtgaccattattgcacttgatgccctaaatggaaacgtcgaactgtgtggcagcagaggcaagggtggaaaatgtgtgagatttcagtcacaggtggaatgtccaaagttaatgcaaaaaatcaaggatggccagatagtacttaatagctagagacgttgacacttggtgacgtccatagctcacaatatataagctgaaaaatgcgagttgtatgtgacaaggatgcataaaagggaacacatgtatggcgacccaactgacaagtgtgacacaaaatgtgatcaacacgcttattacaaggaatagcagacaattgtgttagtttggacacaatgtcgtggctaggatgaccaagacaccggtgctaaagggaagtgttggtggatgcaaggagagcggacgccgaaaggtgcaacatgtagaggtgacttgagctgtcacatcggacgatctctcat

SEQ ID NO: 160866 - DNA, 369 bp, Zea Mays
gcaagaatagcgtagggtgagaaagtttacggtgagaaagaacttgttgggtggtaatgcctttgaagatcgagtttgacttctctccttccttgatgaggttgatcttgtccttttctggtcttggtttcattgattcggggtcagtgtatatcctcgtaattggggaatatggttaagatagatatggatgagatagactacatgatgtgggtcaaaagtttgtttgacgttaggtgtggatagacagattatgcaatccatcatgactggtctaatgtgctaagttaaggtaacgcctagctagtagggtctaatctcttctaccagtatcaccaatctgtttaggtagatcacatcagattaaat

SEQ ID NO: 160867 - DNA, 336 bp, Zea Mays
gtttttgacgccatcggcttcgtctaccctgattacagctacccgctgcggggacaagggaaaaagaggaaatatgctgctttggccaccccagttgaacctgtgccgaaggggaaaaaggtgaaggttcttacccaccagccgcgttacattgaaccggtcgtggtgcctgagtttggcgcagggtcctcttcagcggccaaaacaatacaaactgcttcgactgcacatggcgctgaagaaccagctgtgatgccaaagatgcatatagctgagccaactgaagataaggatgacaaggctgaagagccaaagattgacgagataacaaaaacg

SEQ ID NO: 160868 - DNA, 287 bp, Zea Mays
ttgaaacaggtatccaatgggttgagcgaacattggagagtagtgacgactgtttcgacatgtttcgcatgcggcgaactgtgttccgacgtttgcatgatacgttggtggaaagttatggtctgcttccaagccgaggtgtcaatacaacagaagctttaggtattttcttgtgggcatgtgggggtccacagtcatttaggcagataaggaataagtttggtcactctttggaaactattagtcgcaagtatagtgaagtccttaatgcactatataagatgtct

SEQ ID NO: 160869 - DNA, 731 bp, Zea Mays
gtcgccaacgccggcgatagggatggcaattttacccgcgtgttcggatattctgacggacatccgatccgacaggttcggattcgggcatggaatttggtccgtggggctcgcccgtacccaacccgcgataaaatcaggtcgggtacgagttttatctcctacccgcgggtatccggtggatacccgaaactaatgaaactatttttagcttactaaaaaaacggcccaacggcccaagctccatcgttcatctaacctagcgcaaaatcccctcccctgatccctacttggcggcggctacagctcccaggtaacgtccacacccaatctcccacccctatgagcccagctccctcctcctagtctcctccagaccaccatgttatcccactggtcaccggccacatgcctggatgccccacatgctaagagttcggctccactgctctatgcatcgacgtaggcgtggaccccgacaccgcggcgtcggtactagccctcgtcgtggcggcgtgggtgttggcctcgtctcggctgcgcgggcatgtcccctggcatgggcgcgggtccctggcatggcggcataggcaatgaccctcgatgcaggtgtgtcccttgacgtagacagcaagccacccagacaacaggcaacatcaccgaagcaaggaagctttgagcttcagaaaaatcttcaggtaagagaacatgattctttatgtttgtatcct

SEQ ID NO: 160870 - DNA, 545 bp, Zea Mays
ggcggagggtcttaccggcggcgagactgctccggtgaagtggtcgagggtgtaggggaggtcttgatggtcacgccgatgtgcggatcatctccggcgatggtcggagtaggtcggtccacatgcgcaggactccggcctatccagggcggtatagttcaattgaacgggtcagagagcttcactggatgctagggaagatgtaggcgcgaggaattggaaaatggcttaccggttagccgtggccatgtgcgccagcggggattacaactccagcgagggtggaacggcttctccggtgaagtagcgtccggtttcttacttcggggagctctatggggctctagggaagctaacgtggcacggacttgagtggggatgccttggaggggtctggccatggtggccgagcgctcaggttgcttggtaggcggcgcagagctcgccggagcaaagcgctgggcttgagacgtaaagtgaggcgcggagggagtacagccgaggcatgcctgttcttatagacgtggcacggtgcacgggcgggc

SEQ ID NO: 160871 - DNA, 351 bp, Zea Mays
ctcacatatatagaaattgcttaacccaattaaaggctacatctattttattgtctagaacacaaatacttcacctaatcttgcattttaaatccgaatcccacatcacaccacatttggtaatcacaagagcattatcaacacaaacacctagcacgcatcgcacggctgtcctctttacgaaaaacctagagttctgcttcctcacacaagcacacacatatccacatatcatcgcattagcataacaccaacaaaaatcatttcatcatatatacatcgaacacaactacaacgataattatctaaccaaaccattcattaactaaatagccagagaaacgacttggc

SEQ ID NO: 160872 - DNA, 459 bp, Zea Mays
ttcagaaaaggagtttggaagtacctcagaaagcgctcgcgtgtagtgcgacttgtagtagctatatgcttgtaatgaactggtgtaatgaataaaatgacttggttgaaaaaaaattggcatatgcataatagtaactctctccccctggcagatggcttcggataaaaccacgcctaccgcctccaggattggagcagggtttcccctaagagctgaaagagaagccggaggagaagggagtgagacccacctccccgcacctccagaactacccttagatttagcccaagttctagccaaccaaacccgactcattgaggtcctcactagaagtctggagaatcaacgcccaaatggtggaagaccacaagacaggatgggagattttctgaggctcaagcctcccacattcgctggatctagcaatcccctcgatgctgatgattggctgcgcac

SEQ ID NO: 160873 - DNA, 507 bp, Zea Mays
gtggctgagcgcttccagcgagatcctgccgatgattagtagctagatctgcagaaaatagggcaagggttccgctggggtgcgacttgtaatattttctggttttgtaagatacttttgggaagtattaatctaatagtgacagaacttatctgtatgctatttgtctttgctgtgtgcgtcgttaccaacttctccctggtacttggcccccctgggatgtaggctcgacgtgtcgaggctggatgccaatatacttaagaaagaattggtgacctggcccccaggaggtagtcttgactaggacctggacttacacacaaccttggctaggaagctttagtagtgcacccatagggcccactaactggtatattttatcctttgattcacgcaacaggacctgcaggatttagtccgggaagccaatctgtgtgtcaggaccccctggatcacagctcccaatactagggcacccgtcgcagagtggtggagcgtgtaggctta

SEQ ID NO: 160874 - DNA, 851 bp, Zea Mays
tttgtaaagcccaaaatctgtgtaaaaaaactagataaataaataagtagtaaaacattgaattttcaaatgtacctttaatcagaccatacatttaaaagagtattatcttaaattgaatcttattgaaaggtatgcattaagttccttcaaactaaatggttgatggatattcatttttgaagaaactcacaattttatcacacactcaaaatactatttcctataaagaataatatatagatcatacttgaagcatggcctaataaattaataaagtaattaataaatacatttaaaacattagcatctcatgctgagatttatttttgtatttttaattctgtttgaaatttgaatttgatttgaatgattgaaatttgaaatagaaaagaaataggaaaaacagaaaatagaaaactgaaaaaaaagaaaacatacctgttgggcacctgggccaaaatccctagaactcggcccagtccactccaagcgcgcgcgccagcccacctcctgtgcgcagcttccttactgttggccggatggctcaccgacttgtggggccgacttgtcagaaattccttccccaaatcgctcgcaatagccgtgatctctacgtgaatatcgcgggcgcctgacctgttcgtcgcgagatcatcgggttccgcttccgcccagggtataaaacctaagctccacggtcgccttgcccataccatggctggttgccgggcgccccttttcccctcggcactcgacgctcctccccgttgaccgcacaccctgggcgtggtcacggatcccatccatggcgccctcggatgttgggctttgtcgcggctgggtatctg

SEQ ID NO: 160875 - DNA, 274 bp, Zea Mays
gacgcggtctccgtcgatgaggtctttagatgttggttcgtcgacgtcggggactgctgatgtgcttgttcggggcgagccatgttttatctcctgcggcgtcatggcctccgatccatataatagacgaaaaggtgtgaatccggttgcccgacattcggtcgtgtttagggcccagactacttcaggtagttggtcggcccatttgcccttcttgtcgtcgagaagtcttttcttgatggcagtgaaaatcttgccgttggcgtgctcgacg

SEQ ID NO: 160876 - DNA, 294 bp, Zea Mays
aaaggatgctgcagaacctaatccattaacgtttgctgccacccagcatttgctgctcagttaggcaggcaggactcgaggtgattcgctaggagctgaaatttcaaatttcaataaagcagaggaaccatgtcagataggcggtaactcgggatagggtcctcacggttcccgggcaatggcgatgaagaaagaaataacatgggccgaaagattttgttaggctgagaagaaattggatgtcatagtttccggcgaattttggaagaggcacatcgtcctcgaccatccaac

SEQ ID NO: 160877 - DNA, 657 bp, Zea Mays
cagccaactcacccctatcgtacacaagcagaccatgactcccacctctcccaggcccacgcacgctcgccaacacccgcgtcgcctcccgcaccctccgcacgacacgccccagccaacccccgcttcacgtttttgcgcggattggctctcgcaacaaactgcctccgctagcaaaccatgaccttcgcgcgagtcgccagtctacacaccatccgcaacctccatgccatgtcagttgttgtgtcccacccgcccactccacaacagactcccgcgccgcttctcacgtcgtggtactccacccgtaagaaggagggcgcccgcctagataaggttgcatcggcttctcccgtagccgccactgttgaatggcgattgattccaataattggtgggagctttcctcactaacctaaccgaccaacaactcacgatagagtgtcatcccgccagacactcgtccacaagcttgacggcgtctagatgaagctgaccctgaggttccacctcgctgccacccccgcaacgttgacatcggcctcaggtccggatttggacccgcagcagtagcagcagccaccgccgttcccgaccacgaggcaccatcacaagcgatggcgtcgcagaccgacggtaagtctccccgtgacgcca

SEQ ID NO: 160878 - DNA, 367 bp, Zea Mays
gtcagcgactacaccgaggaagaaaagcaagacaaaggtaccagagacgtcggccaagaggtgggccaagaagatggcgctcgtgggctgagaggagaacaactcaggagaagccatagagtgtcgcggcccaacaagcgcttcactagtgaggaatggcgactgtgagggaaggcccatggggcagtgcgagacgtagcctgtaaataaccctggcaattgtgtggggaggggcagacgatatacgaactaggaaccagctgtgtccggaggctggcggctggcggcgcgccgtgtaaagaacctatagctaccttcaatactgagaacttcgagagaggcgacgggtgccgggagcggcgcccaa

SEQ ID NO: 160879 - DNA, 483 bp, Zea Mays
attgtttgccgattcggagtcccgtccgagctcacagttaacaacggcaaacaatttgacagccaggacttcaaagacttatgcttctcaatttgcaccaagcttgccttcgcctcagtatatcacccacaatccaacggcatcgtggagcgcgccaatggtaaaattttcacagccatcaagaaaatgctcctcgacgacaagaagggcaaatgggccgacctgttacctgaagcagtctgggcgctgaacacgaccgagtgtcgggcgactgggttcactcctttccgcctgctatatggatcggaggccatgaccccgcaagaaataaaacatgggtcaccacggacaagcacttcaaccgtccccgacgtagacgagccaacttcgaaggacctcatcgacggagaccgtgtcttcgccctacaggccctcaacaaataccaagctcaaacaaaagcatggcacgaccacacagtcgtc

SEQ ID NO: 160880 - DNA, 441 bp, Zea Mays
gtccggtggtgcgctcgtcagtggtcacggtgcggcaaggagcggagcagtgttcgtcggcgtgcaatggagatagaggcttcctcactcgatccgatagggatcggcgagaagccacggttcatacaagggccgagggcccgaggcgaggcgacgaagacgtcttcacaaaaaatataaaataatctacgtggcagtatatggacgttgtgctaaagtcaaagtgacgaaatgtcatccaggcctggttgggggttgcgaaacaaccaaagcaagctgtttgtcgattgctatcggtggctacttcatccattggaaattcgaccgatcagagatgtcgtttagtgggggcggcatatgcagattttttttacgtgcacgactgttctgcgctatggtctgatgtctccggttgttaacatgattagggggtgattttac

SEQ ID NO: 160881 - DNA, 401 bp, Zea Mays
aaaaaaattccgctgtcctagaacccttgtttagcctttgcaatttcgttttcagtttggctttgttcagttcgtgtccgtggtcgagttgtgttgctggtttagggtgtatctttgtcgtagatcaactaccctcgctaggcgctatcccatccatcattacccagatcacaagtcgatccacccattaatcgacttgccctcgctagccgccgccgcgccagccctagatagattgcagatacgctgctatccaatccaccattacccagatcacaagtcgatccaccccattaatcgctgtgattgctgtgattgcagatagggaatttttgccctaaccgccgctttctagtcttgcctccaaaaacgtaacttgaggtaccttccttaaaccgggc

SEQ ID NO: 160882 - DNA, 600 bp, Zea Mays
cgaagctgggatccagtcggactcaggtcccgtctggagttttagttcaagaagtactacacccgagcatttcattagatcgggcgcaggagtgcaatattctgagccaaccagagtcaaattctgatgactggagggaaccaatcaatagatatataaagaatgaggaggagacggatgacaaaaatgcggcagaacgcattgcaaggcagtcaactcactatactctcattggggaaacactgtacagaagaggcgcgacaggagtcctcatgaaatgcattctttcggctactggaaagcaactgctagatgaagtctacgccgggcaatgcggggtgcacgcaacatccagaactttggttgggaaggtcttcaggtctggtttctactggccaacggcaaagagtgacgcagccgagttagtccagagatgtgaagcttgtcagtacttatcaaaacagcagcatttaccagcgcagcagctgcaatccatacctataacatggccattcgcgtgctggggactggatatgattggatccttcaagaaagctcaagggggatacactcatatactggttgctattgacaaattca

SEQ ID NO: 160883 - DNA, 405 bp, Zea Mays
ttaggacatcctactgctcagaggtagaaggattccctcatcttttatggagttgcgcgcttcgcatggggatccgcaagaagccggagtacgtttggaaagaataccgcgagaatggaactgagaaatgctctatggcagtctacctgggagaaagccgaaactacccaaaccaccctcccttccaagtcaacaccactagacaccacttcccagacacttgccaaagtgttgcccgaaaagccctccgccagctatgccaaaactacagcagggaagtctttgagactccccttcgttactttccacccagcaacaaaaatacccctacctggaggaaaaggctttaggccctgtcaggaagagatcctactgaagatgaccccaccatagtctatatggccg

SEQ ID NO: 160884 - DNA, 684 bp, Zea Mays
gtagtcgtcgaccaggtcgacgcgggcggctcccggtggtgtcggtgttcccggcggtgatgcgcgcacaggagaggatgagggcccgaggtgggcgatggaggccgcgaggcgcgccggtgctcgtgacttggggaagaaccagggccagtccgcggtcgcagtgccggagggaggaggaaggagtgagcagtggagtcgccgaacctgggcgccattgaagagcagcgcggcgagcagggagctgctgccccggggaaagggcttggtcgtgggagaagaatggagaggagagagaggtagccggcacggtacttaaccacaggagccacggatttcgcggagatttggttggaactaccccgcggagttcgcgcaggagacatgttctgttttcggagcttgcgatacggggaagaggggtctgacgccgaggccccacgcagcagtggcgcatgcgcgttcaaggagtacctagactggcagagcccacatgcaagtggcgggtgtcggtttgcgcgtggttgggccatcaaaatgggaaaggagcagagagagatgggccgagcgactccgaattcggcccgggtatacagggtgagccgtgcccccctttttctgatttctattttatttcctattaccatttaagcttcaagttttaaattccaaatttcaaattta

SEQ ID NO: 160885 - DNA, 310 bp, Zea Mays
ggattttcctcctcgtctaactcattaccacaatcctcaatctgccttacctcattgtcttctgcctccatttcttctacgatcctatgtatcctctccccctcatctgcaagaccttgtggttcagtttgatgcccttctatgccttttgtagcaccatcatgtccttctgcctcatctccatcactgccttctgcctcccatgaagcaacattggtaacatcatcttcatcagtcacatgtgcaccctgtggctgaggataggtctaaacaagaatggcaagatcccacccacgctcaaaaattactt

SEQ ID NO: 160886 - DNA, 689 bp, Zea Mays
acaggaccggagacgggataatggcggaggaagatgcttcgggcgggttgggtaactccggcgaggaatcccggacgtggggagggggtttcgggcgcgctaaggcctggactggcttcggcagggtaaggggaactctactgaccaacgcagtggcacgacgtgaggctaaatcggccagtcttcgtgcgagcgtggcgaaccagtgcaaccaattctggcgaggccgaaaatactaaagcagggcgcaattatggtaaaccaggcacaggagcgagttcctcacgtcgagacagagctcgggatggcttggcgcggcttctgccaggctacacgaccggcaacgcggccgtggatctccagcgagcgcgagcggcaatggcagggcgggagtgtgtgaaatgaggcagggagagagagcgggtgcgagctgggcacaaaaagagctggggcgagtgggcaggcgatgtgtgcggtctccatgttgcacgcgtggaagtgggtcaacggtggttccggggaagacagaacagacatggctggcccaccgcgcagtgagagagagcgaacgcacgggcgaacggtccacgacgctgacgagatgggcccaaagcgtagagagagggcaggcgcacacatgtaagggaaaaggcgccaacagatcggccccaccaggaagagggagggag

SEQ ID NO: 160887 - DNA, 507 bp, Zea Mays
ggcttgagctacccttatttggaatagtgagaaaagtggggctaaacaaaggggttcagacatacttgagcagttctgtgcacatcagaaaaatctgaagaaaatatcgtcgtagctgtagaatctaggggaagatgagagataagtgagaatcttggggggtataacttggacggattcactgctgtgatgtggtgtcaaacatgcccgacggataacccccagcagtgtccatccggtgtctgtctgtctaccttcgtgtcctcacgccatgttcatcacctcactgtggcgttaaccttgcgtggtgtccatgcgttgtggtgtattctggtaccagcagatggccaaccaggatcattttgtccatatccacaataaagagcaagcttgcgtggtcggatgtccctctgcatgaccaaaacgttctaggaaagcattataaattcgtcgtgcccctcactcctttgttcaaattagtcgtgcaccatggtctgccatcccctt

SEQ ID NO: 160888 - DNA, 321 bp, Zea Mays
ggaagagctggggagggcaggaaaacgagtaccaggggcactcggctgattggtaggagcaagggcagtagtgggacgaataaagacaggctgcttgaatggatatgaaggtgggcgaggcgaagaacgattttgattgaaaggtcagattaccaaccttgttctcttctcaggtccttgatttgatctctcacccgcatatccctttgattttccgtgtcctgcatttttgtcttcaactgccaacgctgtactgacaaccctgctgtaggtaaggtccaaacatgttgccattttttgctgaagcctgtcattaagtcc

SEQ ID NO: 160889 - DNA, 636 bp, Zea Mays
ctttggtttcgttctgcctcgcaagaaatattgggatttagtttgtcatgttagactctaggctgagcagtgacatacacataggtttgtgttggcttgctgctagaaggaaacaattgtatgcaaatgcaggggttaatggctccattgttggactctgcagagagttacatgatcagaacccccctcgatctgagctagattatcacatcacacattttcctcacagtaggggatattaatttttctggagacaattggtttgagagctcgttattcttagcaaagaatagttaatgggagcttgccatgaccataggtagctcggatctttgccattactgtatttccgaaggatcaatatgtattatgaaccaactgcgttcttctaggttccatatgatccaaactttgttctctgtgattttgtaaaatatcttagttgcctttggaaacttaggaacgccaatctctcacagactaatcaacaactttgatgtccatgttttttatgcatgtggcatgagtaatgactgaaatatgtaaaaatgaagagctatggaatggcatgatgtgaatgtggcattactacatatctattaaactactcaacccaagttagtaactatcttcgaa

SEQ ID NO: 160890 - DNA, 951 bp, Zea Mays
cgtcgggtaacagagtgcaatatatgtaggaattgggggatcaacgaaggttgattccataactattagattatgcatgcatcatgtttaaaactatactaataaatcttcccctcttatggagatatggcgcgcatttagactacccagcacaaatcgactggacctcatggtgtgtcgcgacatcagctagcctccagacatgaaggatgtagcagtggcagtaatgacccaattggagacctagaagtcagggtggagcaacttcggtcagaactacaccataagaatagggagcgtgagcgggatagccaccatattgtggagctgtcagccgaagtgagtcgcctgctatacgaaatttcagaacacgatacgaccattgattgggccgtcaactcgcgctctttcgcttgggactgtgaagcgaaagatctagcccatgtggcagaacttagcacgtctctcgagaacctgcaagcgtactgtaataccttacatgaagtgtatgtattgtatgatcggctgcacccagacatgccaccatacgttgctgcaatgggagccggaccttcaggaacaacaaatgaaggacctgatggggagctggacctttttaggccccctccttctatgaaccttgctgacgaacggtctcctaaagtaagcaatggagcaacgaaggatgaagaagactagaatagtatagtctaagtattgtacttatgtaaaataagtaaaaaagttgagttgtataatgagtctgtataattattacattttcgcaatgtaaaatgatggtgtatgttggcatgtaatattatcgaatgttcttttgcctcagatgccatcatggactcgcgcacatgatggtgcagggacatcccacggtaggaaggatactcccaacccgccaccggtaccaccgactttggccgaggctatcgctgc

SEQ ID NO: 160891 - DNA, 370 bp, Zea Mays
cagccaccgaggaattgaagccaacccggagaaaatcgaggctatcatgaggatggaagcaccacgatcacaaaagaaagtgcaaaggcttactggatgcatggcagctttaagcaggttcatatcaaggttaggagaaaaaggcctaccattttacaaattgctcaagaaggtggacaagttccaatggacctcagaagctcaggaagcccttgatgcactgaagaagttcttgaccacaccgccaatgctaaagccaccacgtcgagccatgccaaaccagccggcagaagatctactgttgtacatctcctgcacgactcacgtggtgagcaccgcattagtagtcgagcgggcagaggaaggacac

SEQ ID NO: 160892 - DNA, 798 bp, Zea Mays
atgaaaatttaatgtcatttttagattttttttgtttgacctcatagcatataacaccaaagtaacacagttcgtcgccataaattatgacgccgaggtatatgttgtgctggtacaacccggacgccgtggcgcctacgtgtcaccgaactcagcgtcatagattgtagcaccgatatttgaccggtggaaaggagacgccattgccgctccgtgctgtccagctgcctggggccgaaagaagtttaaaagcgatggccgttggctgtcaagcgtcgagcgatctccaagcgagcaagccattcaggatcaggagacatgacttttcgtttcaggaatcacgcgagagccttttcgggatctccctgcgaggccgcggctgccggccctggtttcctccgcatggacaggagatttgcccggcaggcggcagcggcatctctgcgcaaaggcgacaagcggactgcggcgcgcctgtgcctgctggctgctgcgagatgaaaacagtgaggctcaggccctgcgccatcacgtgcacaggacgttaatgcttttatttatatatcgttgcagccagcaaactccattccagcattcccggcacacgtacagacccgacgagtactcagtagaaaagtgctaactaatcgatctcggcgcaagatggtggtggctattgcctactagggctgtacgggcggccactatcgcatggagcagcaacacagttgtgctaccgccatgttcaatccgccattccgcctggccccactatagagacgtagggatagaggtgac

SEQ ID NO: 160893 - DNA, 301 bp, Zea Mays
cgctctgtctctcatgatgcagcaaactgtcagttaggctgaaacagacaagtgtagccaagctcccaaatcaaatggtccaggtccagggtatcgaatggccagcaaacccttggaataattgaagctggtcctcgtgttgccacccaactgatggattaagatggcggtaccagctctgctaccaccagtgtcgctgcaaccaacggcaaaacaggcgtgtctgatagaactgatgacgcaaactcttgtttgggaccgggaccaggaaccgtaattgacaccggacaaaaaccctgaa

SEQ ID NO: 160894 - DNA, 742 bp, Zea Mays
aaccaatatggttactcctcaacgatttctggcagactccatatacacaggagtacacaccgaacgacaggttcagtttagcttttgtgcgtttaatagaatattgaggcattacactagatggacatttatctccccctaatgccgagatgttctaaaagcatacagataatatccccaaccacaatcatccagttgtggccattgtatgctattgtggtgatttatttgggaaatcttacgcacattacagataggggttttatgcagtgagctttggacttagattagtgtagtggcatgaatactacatatttgtccttcaacatgaagggttagtctcaacatccagcgagacacgcaacaacaagttgcttcatggttacaattctgcaaacttattgttattactaccaaatgcatagtcaatcattaagatttagactgatatacgcaacactattttatccatgagggtccttcaggggctcatgcataccattcgtcgtttggagctattagtttacttcagatcaacaagtaaaatgaccatcagggtctagcgctcacaaggacattcactggttgtattgtgctttgaggcacataggaaaaatatgtgtgcttatattggtagtaaagtgcatggcatcaggccaatgctgccaagcaaagatttttatacacagagatgtatagtccagctcgtttttatcacactgcccatggtttacccaattac

SEQ ID NO: 160895 - DNA, 378 bp, Zea Mays
tttctattttttgacgttaaagactttgaaattgggggtcattggatgtcccggaggtgaggggtgagtgcggagaccccgcacgtatcctcctgtcgatgatcatgtcgtcaatcctagggaggggagcgagtattaggtcgtctcgatcgtccccagactggactgttagtagaggctgctgctgactcgatcctggttgtgcggctgtgtgctggtacaccatgatctctatcgtattcctctcggcgccttatttcattttcgtgtcgacgatcgcgcaaagcattgatgttgttccgcgcgtctcgtcggctgttgatggcatgacgcagatcgttcagtggatgggcgagaagtagaagatgattggtcgcc

SEQ ID NO: 160896 - DNA, 447 bp, Zea Mays
gggaggatcatcttgcattggcaaagtttgcttataacaacatctaccaggctagcatcaagatggcaccatttgaggctttatatggcaggcgttgtatctcccctctatgctgggagactttgggagagagctccctggttggtcctgattgggtttagcagacttctgagaaggttcaggaaattcgtcagaatattttggccgctcagagccgtcagaagagttatgctgatgtgaggaggcgggatttggaatttgcagtgggtgaccaagtccttctcagggtatcacctactaaaggagttgttcggtacggtgtcaccagaaagcttagcccgagatacattggaccattcactatcttggcccgggtgggcaacttggcttatcacttgcaattgtcggactccatggcaggggtacacccggtttttcatgtctcta

SEQ ID NO: 160897 - DNA, 468 bp, Zea Mays
atcgaggaaccggagcacctgcgcctgcgtcgtcgtcaggccccggacatttcttaagccgacgggtccggggatggggggaccaatcgtatttatccagacggactgcccaaaaggcaaaaggcagcgcgagctggaacgaatggttggttgcccggagcagatgcggaggtccaggtccagccgggtttgatcggatcggatcggatccgtccctttcctagttcccattgccttcgcagtggcctggaatcgtagcatttctgattttctggtacttcaaaaaaaaaatggtggaaaatgtaggagtatacgtacgtgactgtcacaatcctatgactctcaagagcgcaatcttggcctccccttcttcgcccaataaatagccgctccacctcacctccgctctcggcccgtgtccaccgcgtcctctcctgcccgtcgctcacgccgccaacactaccaggc

SEQ ID NO: 160898 - DNA, 767 bp, Zea Mays
tgggagttcggttgtgtggatggaagagtcttcagatgaggacttggattattttgcggcattggatgtggctgcggcagaggcttcttcgcgtgtgatggatgctgaagttcttcctggtccgagtgctgggcataggcggcgaagggcgatggcaaagcgtagagtgagtgaggtggagggtggtcgtcttcgtgtggacagggctggcaagcgggaattgttgtccttgccggttggggcgagtgtgggtgagggggagttgcgaagtctttgagggtgaggagctgaggataatgctatttaactacagggagatgggtatcatcccgaaggttgaaccaatgtaaggtgtgatgccctcgttgtatgtgtgtaactataatttgtatgatgatttgtatgatgaggctgtgtgcctttgctgatccggtcgtgcccgtgggggacttgtgcgcttgatctagtgggcttattatgtcggtccggctgcacctgtagtcggtttttgcacggatagtcttttgagggagacttcgattttgcgcacttgttgtgctagtccggctgcacccttaggcgacttttgcccggatagtcttgtggggaagacttcggtttagcgcacttgttgtgctagtccggctgcacccttaggcaacttttgcatggagtgtcgcacgcgagggtggccagtgctgcccctcgcggtgacttcgttgtggtcgaatgccgaagaccgttgatgcggtcttttttcgacgttg

SEQ ID NO: 160899 - DNA, 653 bp, Zea Mays
cattccagtgaagactacctttggaggagccaccctcgcccgaatatatctcaaagaaatagtcagacttcatggcattccatgaagaatagtgtcagacagggggacgcaattcacctcaaaattttagttgagccttcagcaagctataggcaccaagctagacttcaccaccgcctaccacccccagtcagatggacagatagaaagagtcaacaaagtcctcgaagatttcttgagagcctgtgtgttgactttcgatagaaactaggagtccagtttgacgtatgcagaattgtcgtacaacaacagttaccaggccaacatcaagatgtcaccttttgaagccttgtatggaaggaggtgccaaacccctctgatgtggtcaaacgtaggggaaaagaccctagaaggacctgccttcatcaaggaggcagaagagaaagttgccctgatccacaggagactactcgaagaccagagtcggcaaaagagttacgcagacaacagaaggagagaactcagtttcgaggaatgagatttttctacctcaaggtctccccaatgcgtggagtcaaaagattacaagcaaaagggaagctagctccgcgattcgttggcccctatcctatcatcggcagaatagggctagc

SEQ ID NO: 160900 - DNA, 346 bp, Zea Mays
tagacagatggaaaccgtacaggtgggttagctgaaaggtattatctgaaagactgcaaggtgggaccatggagcagcaagatggaactatcacaagagcacgactaaggggggtagtttcttcttcataacttgtcgtgcatgtgtgcagactaatagtccgggttcatgggggcagacccaaccgggttatcatacacgtatgcgtcatttagttacaaaaaaggaaacagactcgaccccttagtcttgctctatggatagaacttacagagatatttggcatcggggtaaggtactcctccaatcgtagctagatggttgcccctgggtcggtgcactcccg

SEQ ID NO: 160901 - DNA, 554 bp, Zea Mays
gaaaaacaaagaattattcatgtagttgaagttatcgagcagacgccgccgctggcatcgatgtcaaagactccagctgttgagagcactgttgctgccgaagctgcacccaccgaagccgaaagtgccgaagctggaaccgctgaagatgtgaatctagacgccacactctctgaaattgataccatgcttctgactgcgaccacggaagaagctgctgcagccgctgaagagatcccgggcatagtggctggaaaaggaaaggagaaagccgaggatatttcggaagaagaggacttcaattttcaagatatacttgggcaagagttgtcgaaggctgaaaaagaagaattgaaagaatatgctatatcttgcgggtacagaccaggtgcgttactctttgggggagtcaacgaagaaagcttaggatgccttcgggaccacattggggcgaaggttgtcggcactttatcgaagagtgttggcttcccgaaggttgaggcagaccttagcaggtaccggcgacagcatatcgccggtagcctattttatgc

SEQ ID NO: 160902 - DNA, 2030 bp, Zea Mays
aacatatcattacactattagatagtacatgactaacattagaactataaggtttcatatcttagtgcacatatcttagctagaaccaacatcatgtcatttaggtagactcttacatatgtttacatacaactcactctttctaatttaacagttgcaggaaactcccactgataaaggtaaaaagtttgagcttcatcttcagtctcctccaaggaggtgagcctcatttaatgttcacctggaaactgggttaagatggtggtcaatcactttagtttttttgcaaaacaataaaatcttgtactgtcatcaatcgccaatccctatcatactattatgtacaatcttttattgagcgcgaaagagtagaaagagctaacatagtaagccaatgcacaagaaagtctcactaggaattcataataaaaaatacccaaaactaaaagaaaccaatactatgtagcgtatatgaattcattataaaaaaatataaatgaatccatcttagaaaataccaaataacaatgattcctctgacctttcaataatagcatagaaactacacctttcagaccattgccttgattgtttcatatgttttgcctaaaaatgatacaacttacatctagaatttttgtgtggattttatttgtcatatctatggtctgcaggcttccagctattccagatcagaatcttgtgtgttcaaattggtgccttcctattctgtgtacaaaaataattgctaaatactgattacatgacaaaaccactttgtcaagactctacatagttcttgtgtacgtacttggcttcctattttgtgtgtctagcagtgtgttttctgtgttttcagttatgactattgttagtgtatttcaaaattaatatacttcttacattcttagacatataaagtcacattggggcactagatatttcacacatggaaaacaagcagatgaatgtaactgatctaataagagtaacttcctatatgtgcttgtagtttccagttaatacttaatttagtgtctttctatggaaacgggaaattaaccttgcaagttgtaacaccatttggttaacatggatgtggtttgtagcacgtgaggggtagaacgatgtccgcctctttcatttatggttcatggtacaagtctatgagagatgtctgttaattgaaaatcatgatggttcatatatgaaacagaataccaatctctctagaaatataaaagtatcaggggtcagagattaatctcgttggggactgcaactagacatcactcggttctagatcaaagtagatttattagggttttaattttttggctgagatgtgtcaagttactcttattcatatgttccatttttacctaatttgggatctcatgatctttgctggttctttcaatatgttaaactgaaataacaagcacttagcagctagcaacatcaagatgcaaggaatctcattgtcctagatgttaaactaaaatagcagttagattttcctagatgttaaactgcagtagcagttagattttccatgcaagatccttaaactgatcacttaatgttcacctggaaactggtttaattgttccgagttgagagttattgtattcatcattagtgatgtctctatctttctatataggctcaagtaacctgtttctatttgattttggtgcccgaggatcctactccgtgagaccacatcagtcgtaaaggaggtaccctattccaatactgcattaggatcgtttttgtaccaacctagaatgtttgcaaattttattcttgtctatagtaagtagtttatatccatgattttagtgttttagggttgaacactacgaaaataaaagtggtagagaagcagtactgcaagtacctattttttcccatttcacttgtgctcttcgatagaatcctgtgcttcatagaaaaattctagagcttcatgacataaaatcaatcgtgtaggtggtaacctattttacttgactgcattgggatgt

SEQ ID NO: 160903 - DNA, 596 bp, Zea Mays
gagcctaggactaatgctagttattagttcagattcaacaattagtacatagaaaatacctttggtcccgattggtagttctaagggctataactaaaggtaccacgtaccctttagttctggttggaagctcttttggaaacttaaatctactccggtatttccggagattgagagaaaaaagttaatttttcattcaatctccggaaaccccgaagaagatctaagtttttaaactagccctaaaatgtttgaattgaggggaggtggtgatattttttcggtttttttttctttgcagctattgaatgcggttggctgtactttttttttcctgttagcatatgcatatgagacaacacaatgtgtttctgttagcatatctatattgttggttttaaaaataccttcctcttcacctgcagagctgcagttgtttctacacaacagttggccgattccctgtaccatcagattgtggcggctgtgccatctttgagctgctctgccgtctgccgtctctactgaaagttagaaggtagccatgagagctgccctctcgtagtgcaaacaacggcagaggatatgcatcgatt

SEQ ID NO: 160904 - DNA, 843 bp, Zea Mays
tgaagaggtgaaggcggctatgtcgaatagccaagcggatgctcttgctgcccgtgcgaagtcggtgaggctatcttctgaactagaaaaactaaaagctaagtcgactgagggtaatgctgaagtacgtggcagggtcagcagagccacacactctaatgtgaggcttatggcgagtttggagcatgtactgcttcacttgatgaagaaggggctgagcttggcaagttattaattggatggattgaagaagaacttggcagccttactacaatggttagtagcatgtactgcttcacttgatgaatgatgggcataacccatgaaggcaccttaaatcttcgtgtgtgaaaaggctaccgacactttgagccgcttgggtacatcgacaatgacttcgatcgtagtgtgtacaatattgaggttgatcacatggtgggattttctgtagacatgttgctagaccgcatgtggggaccacacggtatatctgtggtgagaggtcttgccgggacatcgaacatgtgaccgggacatcaaacatgtgattaagaccggtttccacttttatactagtttcccttgatgatggtattgtgtggtctaaagttttgtatttgttagataggcgcgattggaagcagaggctggcgggttggatgactcagacacggagtccgacctactgggggcaatggctggtgcaggggcagctgcgcaagcatcaagttcaaaggcgcctgagtcttcgcaccgcagtgcagatgtctcgaaagatttagagcaggttcgggtaacttcaggttggggaaagtttcttttgaggacttttgctgagagggc

SEQ ID NO: 160905 - DNA, 690 bp, Zea Mays
gtccgtgttcgctgcccacctccgcgtgcacctcgcaccctctgagcgtccaccgcgcgaacaaccctacatgttgtctctcgttactccctttgcagccgccgcagcaccgcctccccatgcgcgagccgtagccactcctccgttcgccgcgcgcgggtcgtagcccccctaagggttcgttcgcaaccagacgccgctgccaccacctccaggttcgtcagccggatggtgacccttgctgatggctccctgaggcgttcaggaatccatgcggcttggctcggcggagaccaagcctgatggtcagccgacgcgtggggttctcaacctgcattgcctaatgctgtcatgccgaggtgcatggggatttgggaccatggtgagcagaggtgaatttccctccaatcgcttagttctgtgcaactctttggttattaagaattggggaacttcttttggacgtgggggatgactttgcagcggcactcaaggcccttcctttttctcgaatctcaactcatttcctcctcttctagcttatcatctgggaggcgaaggggtgacttgtcgaagagcattttatgtcaaagatgccctgctttactcacagagatagaaattattgaagacagagatagaccaccatacaaccaccttcggtggacgcgggggataactttgcttgac

SEQ ID NO: 160906 - DNA, 649 bp, Zea Mays
ggggagtgagcaagatgctgcacggcgtggcacatagtgctgccgtaaccgatgagcatgatgagcgccatcgtcacaaacatcgtgtcggagaagagatacgaagcgtcacaagtcacgcaccgtgtggcacgtagtgctgccataatcgatgagcatgatgagcgccatcgccacaaacgtcgtggcggagaagagagacgaagcgtcacaagtcattgctagcggctaggagaagtgcttcctcgggagtgaggagctacaaagccgtcgcgtgcttgcgacgggtccttggcgagcattttattgtagcctattcaaagctgagcgtgtactgtttcgccagagctaggccagttgggaacgagatagagatggttggtggccttccgatgcaaaacatggacgacaaatatgtaatggatggctgttgttcgaggcatttggttcattagctcatatgttttttgtagctggatcggaattaaccacccctcatgcatgacgcaagacaatactagacaccgctcaactcatgcatggcctatgcttgataattgatgaggcatgttttcttctctattagattattgtgtccatgaattatgtgtttaatgtgtgtgtctaagagaaaataaaagggcatagg

SEQ ID NO: 160907 - DNA, 556 bp, Zea Mays
ttctattttacacatctttggtgacctcgttgtccctttataacttctctcgataatgaattcttacttcaaccattctattgaaacctcacctatcttacccttgattgttttccccacttcgtcactttgtgaggcttgccttaactctatccttggttatgcttttcacgattatcatctttacccttgtcacctctatatcttaccttgatgcttatattatacctgtcctaaaaaacccttttctcctccgtctcaatcttatagttgtaggttacctatttttccttagttgtatcctattcatcatcgcttgcgagtttttaactccaccctttgttgtttgttactacctttaccttcatcgtctctccatcttaccttgatgactatcatatgtctgttatttaaaattccctctcccatctcgattcgatagaagtgtttcacttatcccgcccttggtccaaacctcatctttgctaggtgtgagtcttatcttaactccattctttgttgtactcataccactggctcttctatgtcttcatct

SEQ ID NO: 160908 - DNA, 747 bp, Zea Mays
ctgctttgttgacagaagtatgatacatacatcaatatattatgccataaacatcttgctgttcaatttgggtcagctcacacgaaataaccaggttatacattaattggatgtcgcatatgagcagattttttttgatccatttagtctcacacgtttattcaatttacaattttgtgttatgctgctttgttgatagaattatgcaatttacaatttagtagtgatgctgcatgatatgttgggatctaatggaatgcatggtcatgaactgaactgaattgacttgcgcttacctttttttgatcctttacgtattttatgtatatgtgttgtttcatttggcaggaacatcagacatgaagaacgtagaccgacctccttctaatccaaaacggattgtaatccagtctactcaggagtgcttcagcgttgacataccccgtgttccgacggagactgttagacccgaaacaaggcaggctgctgatgaggatgatgactttatgccattatccaagaagcgtaacttggacgacagtcctgggaaagttttgaagaaggtagtcacaaagcggaggaaagtagtgccccccgacaggttagagatttatggtctatgacaatatatcattttatgcgtgaaatcatgttgtgttgatgtttgagttaaacattgagttgcgattatgcagatgtaaatgtttacgatattcattgtatactttttttcagcagaggcttaac

SEQ ID NO: 160909 - DNA, 663 bp, Zea Mays
tatccttcaggtgctgtttcatagaggatttggacctaaatggcttagctggattcgaaatatcctacaaactggcacgtcatcagttttacttaatggaataccagggaaaacatttcattgcaagcgaggggtcaggcagggagatcctctctcacctttgttgtttgtcttggcggcagatttacttcaaagtattatcaataaagcaagacaccagaattcgctccagttacccttgactgaaaattgtggccaagattttctgattgttcaatatgctgatgacacactactgataatggaagcctgcccaaagcaattattttttcgaaaagcagttctcaattcctatgcaacttcgacggggctcagggtgaattataataaatcaagtctgtatccaatcaatgttaacccggagaaaatggagattctttcaagaacgtttaactgtcagataagatcaatgcctttcacctaccctggacttcctctgggattatccaaacctcgaattcaacattttttaccccttatccaaagaattgaaaagtgattgtcttgtacctctaatttcgtctctcaagctgggagattggagttggtcaactcggttttctcagctctaccgacattccttatgtgcacgcttaaaatccc

SEQ ID NO: 160910 - DNA, 751 bp, Zea Mays
ggagcttatgcccctagggtgatacgaggacaatgcttgcacctcttccaatcttgaggtaggacccattgaagtacatggtccagtagtccgggtcctcaaccaggggaggttcttgcgtctcagtccactctacgatgaagtcgacaagagcttgggacttgatcgcattcctggggacatagctgatatcgagcctgttgagctcaagggaccatttggcgatgcatctagacgcatccggattgtggacgatctcgcctaggggtgtcgtggacaccactgacatagggtgtcagtcgaaataatggattaacttttgcttggcgatgaggaccacatagagtagttttaggatctaagggtaccgaaccttggactcggctagcacctcactgatgaagtaaacaggcttttggactttgagtatgtgcccctcatttttcctttccactaccagtgcagcgctgaccacctgagtggtggctacaatgtagaggaagagcgtctctcctgggttaggagagtccaaggttggtggcgaggtcaagaatacatttattcgatcgagtgcctcctaggcttccgctgtccaagagaactggtcgttttttctgagaagcttgtaaaggggcatgtccttctctctgagcctagaaactaaccaattgagtgcgatgacgcacccaacctaccgctggacctcattgaggtttgtatggggcccatgcgccggatggccttaattttg

SEQ ID NO: 160911 - DNA, 516 bp, Zea Mays
ttgatgtttcttgggacaaaaatgtaaaggaaaaaaatgaaattacaatagatattttgaatagctttggttgtttgatccagtccctcaggcatttcagtagatgcgctttgattctggcacagtactattgactatgcttgcctcatattgttcccttatgtcttgttgtggagtgttttgcacagaaaattgctgctggatctgaagtggccctggatgttgttgctcatatgacgaaggcgctggtgtaaatggctgaggcaaaatccaaagagccaaagagtgacttgccgaagcaactgagcctgagggttgtggacttggttgttggttatgaacatattctagaatgtatggggaatagtatgaagtggtgtgaaagacttgctttggttaattctgtcgtgcttcagcttcggcaatttctttctacttttggattgtgacttgacaggttcttactgtatgccccttgtcttctccacaggaaaggaagaacgttttccttcattg

SEQ ID NO: 160912 - DNA, 727 bp, Zea Mays
caccggtgaatcccctcccctccttccatgtctggccatgtgctgagcacttcatcacctgatgcaaagaaccacgccaccgatccgcgcccaatgtagccgagtttgttcaccagggcagaagaaatcgtacttagggtctctacaaccgggggtcgacttgcttgtcggggattcctcacctgcaacatgctgatctgccaaatcacgatgtcgtgcggtctgcgtacttcaatgcccaatctcaggtataaaccctcctattttgaacgcattgtccccctctgcgcgtaggtttatcgggttcggtgtgtggtgcgccggcatgacgaggcgattgtcgccggtggggcgtcacgaccgactagtgggcaccgctgtggtttgggtcggctggttagctagggaaagaagatgcgcccggtgccgtcagatcttggagagatggctaggattagaatgtgtgggcatcgatttagtggtgaatctgagccgttgattgagcagtgtgtggtcaggtttataacggtgacgacgatgtgacctgggtgctccaccaccgtagatcctagatcttgcggccattatcacataccagttcgatgtggcgccagatctaatctgggccctggctttctaatccagcggccagaaatctcccataccccttcagccgagcctttatgcattagagccctcggattttctaggattttaacccgccacc

SEQ ID NO: 160913 - DNA, 552 bp, Zea Mays
cgcgctctgccctcgccgccagccgccgtcggagattcgcgtccgcgttcccggccatccagctcgccggagactgcttcaagcctccccgagctccgccctgaggtgagacacccgtccccgtgcccaatttcctttattgtgccctgtgttcgtccaattttgccttcgccggtgctcgaccgcggcggtccgccgtgctcgcgtggtggccggccgatttagctaggtatagttcactagagtagttccctgtgtcacccctgtctctgctaaagctagcccaggccttagcgtgccttaagtcccctccccagggccggaatcgctcaccggagtttttccggcccgcccgagtccttctcaccgccgccctcccctctctactcgtggattcgtggccccttccccgccattgagttcgccatggcaccctctccctctctgcccaactccgacaacctcggagccaccctagctcgcgcctgcctcaacaccggcgacttcaccgccacagagaggagcggcgccgcccgcagctgtttgtttccc

SEQ ID NO: 160914 - DNA, 298 bp, Zea Mays
agccccgtcgctgtggctctatgcctctattgattctgcgcagtgcgtatgtggctccgctctactactgattttcccgccggcgacagacactcgaaaacaaagcgcgaggtgcagttgcgccatcggagcggtgctttcaagctgtcatgacacatctccgtcgaagtgagcagagagagcttggactgacgcgctgctctaaactctggttcgtttcacacccagacccggcagcgttctaacttctaaggcgatctggacgacagagggcatggctactactgacgtaccgaac

SEQ ID NO: 160915 - DNA, 534 bp, Zea Mays
gtcatattgtttgatacttaatcatgttcatgtccatcttgaatttttttgataaactgatgagagcgactacagatccattccatgtaatatgtagccatttagaaaggtagaattatctagccctagatttatgtgtagttacaacaatttttgtgttaattctctccattagatataatactcccaggcatagcctgtgcctatattagttcatattgacgatctagactcttaaataatctatgaacaaaacaagaacatggcaaggtccatgccaaatatatttccagaacctcttgcacaacagatcccatgtcaagaagtattttgtatggaccttcattacaatacacataccatactttctacaagagataggcttatattagtgggtcaatagatttttttttcacacgctcagcaattgactctatttttatgacgttgcaagcactgtttcaaaggcgtcgcttagacgtccaggcgcccaacactcctaggcgtccccgtcgcctagctaaatcagcaaga

SEQ ID NO: 160916 - DNA, 869 bp, Zea Mays
atgaacgaatcggtacgctacgctaaccgttagatcagagatctacggtgagtactcaatgatgcgtggtctaattcaagccgccagatcccgatcgtgcggctcccaaagactcagatcgatcgaaacctgagatctaatcctaaccataggtttgggatcctacggccaaggtactttccccaccttgacgccgcaggacggcggcatcaccggccaaacacgatggcaaccccaccagtgcgcgtgaactaagcaaaataatacccaatccgaccccccgaacgacgctatacgtacagcagaaagtagtgaaggcgatgaggtactacttaccggcggtcaagcggtgaagaaagcaggccacggcgcgagtggttctgaggcggagctacgacttccgacgaggaattccgctagcgcagcgacaccaacggagaaattagtggctgccaaagtgtctaggggtcacgacgcaacactagagtgctccacggatgtcccagtgcccgtggttcacgtcttctatggcagcggtcccgtgcttccccgacgagctctcggtgtgttggcggcgcgaggtttgactcgggatgggtaggtcaggaacagagaataggtcgcggcggctcggcctttatggtcaggaggtgggtgctgccaggtagacgatcgcaacggtagccgcgaactgcgggaggtcatggagctcgtggagaagatctacagggttgccagatgtgtgggcccagcatgccagtcaacggtggccacgcgcgggcgagagactgaccgggaggtcccaccggtaagtacccgagagagatggcgccacggtgcggctgtgcggtggccccgcggtgtcggcg

SEQ ID NO: 160917 - DNA, 1383 bp, Zea Mays
gcacgatttgtggatgggttgagagatgagattaaaatggtggtgatcatacaacgtcctgtggacttggatacagcttgttcactagcactgttgcaggaggaggtgatgaccagtacagtacgcaaagatcaaagaaagtttgacgccggattgttcaatcgtgcttcctccaaatcgggaccattaccactgcctttgcctcctggtctaggcaatcgttcagcaggctttcctgtcaaaggggaggacagcaagatggctgcgctgaaagcttacagaaaagccaagggactatgctttaagtgtggtgaacgttggggccaactccatcgttgttcaaacacagttccgttacaggtagtggaagaaatgtgggcattagctggttctgctgaggagcacatggtggaaatggaggagtctgctctagaagccaaccaggaaagcgttgaggctatctctgtcgcagctgccacaggaagtgaaggaaataaaaccattcgactctgggcttctatacattgccaacaagtacttgtattagttgactctggtagtactgctagttttatggacagcaacctgtcaggagtgatgactgaggttagaccactacaacatcccttgcaggtgaaagtggcagatggaaggaaattgtggagcactcatatggtacctaagtgccagtggctatgtgagggaaccacctttgtcactgatttcaagatattaccgttaagtggatatgacttaatagtgggcatggactggttagagcaacatagtcccatggccattcactggggacacaaatggttatcctttgtgtacaaggggaaacagatcaaattacaaggagtaaaaccaaagacccaatcatgccccctcatcagtggcacccaattcgaatccttggttcgacaagaggccattgagcagctgttggagttacatactgaatttcaacgtggtcgagttgaaacacctgcagtgattactgagttggttaacaagttcagtcatctatttgaagagcccaatggtctacctccaaagagatggattgaccatgccataccactgcttcctggggtccaaccattcaggctacgtccctataggtatacaccccagcaaaaggacgaaatagaaaaacaagtaacagagatgttgaacagtggtattattcaacacagctccagtccatttgcatccccaattctgttggtaaagaaaaaagacggagagtggcggttgtgtgtggactatcgaaggttaaatgcttatactgtaaagaacagatatcccatgcctatttttgatgagatcaccgatgaattgagtggagctgcagtgttctctaaattggatcaccgttcc

SEQ ID NO: 160918 - DNA, 503 bp, Zea Mays
attttgggagttcgattgtgtggacagaggagtcttcggatgaggatttggattactttgcagcattggatgtggctgcggcggaggcttctccacgtgtaatgggtggtgaggatctgccgggtgcgagtactaggcataggtgacgaagggcggtggcgaaacggagagtgagtgagttgtcacgaagtgataggcgtcattgtggcgaggtggagggtagtcctcttcgtgtggacgggactggcaagcgggaattgctggcctcgtcggctggggcgagtgtaggtgagggagagctgcgaagtctgtttgagggcgatgaattgaggataatgctgttcaactatagggagatgggtatcatcccgaaggttgagccgatgtaatgtgtggtgccctcgctgcatgtatgtaactataatttgtatgataagactgcgtgccttcgctgatgaggccgcgctcgtaggcgacttgtgcacttgatcttgcgcatttat

SEQ ID NO: 160919 - DNA, 833 bp, Zea Mays
gaagaaagagatcgcaacgtatattgcgagatgtgataactgttgcagagtcaaggctatgcatatgaagctagctagcctattgcaatcgttatctatgcctaattggaaataagaggagatcagtatgcattttgttactggacatccgattactccaaagggcaatgactcaatataggtcatatggatcgactccacaaatcagctcgctttatgcctatcaagacgacaaatcgaccacccaagtatgcggatatttacattaaggaaattttttagttgcatggagttccaagaaccattgtgtttgaccgtgggacacaattcaccgatcacttttgggaacaattgcagaaaggtttgggaactaagcttgtgcatagctcggcttaccaccctcaaacatcgaggcagactgaaaggctaatcagatcctcgaagacatgctaagagcatgtgtgctatcatcaaaaggatcgtgggaatcatggctgctaccattggccgagttttcctacaacaatagctaccaaaacaacatcatgatggctccattcgaagcgttgtatggaagaagatgtagaatacctctcaattggtcaaagctggagaacaaaggttctatggcaacgacttaattgttgaagccgaagaaaaggttcgagttattcatcataatatggaaacagcgcaatatcgttagaagagttatgctgaccaaagatgaagaccacttacgtttcaagtcggagattttgtgtatcttaaggtatcaccaatgaaaggcgtgcaaaggtttggggtaaagaagaagcttgctccaagatatg

SEQ ID NO: 160920 - DNA, 349 bp, Zea Mays
cttgaggatgatgcggtggtcgtgcacgcgcttgggaggtagtcctgtaggctcgacgaagatgtcctcgaaggtggccaagagcccatccagaaggggctcgctggctgtggtgacactgagagtcggtggacctggtgtcgggacgctggaccagcaaacggtgcgcccttggtgctggaatgtcatcctgcggtttgccaagtcccagatgatgggtcccagtgcgcccagccaccatgtgcccagcaccacatcgtagcccgccagcggcatcacgaagaggtcggctgggaacgatgcgccgtcgatgaagagaggtgctgccttgatgacgcccgcgcatgta

SEQ ID NO: 160921 - DNA, 1083 bp, Zea Mays
gttgatttaaaataagacgaggggttcttttgaataatttagcacccgaaagggtaacttcaatcctgagccgtccgatcaaactcgcacgacccagattagatcaagtacccttccgaaccggtactcacaggtgatcgtgagatgggcgatcgatggtagagattttaaacaacgctgccagccgcacgaccaaacgatccaggatcgacggcccacgcacgaagggtataacgtttataatcacagctgccaaccgcgagatctacggtctggatcccaccccatcaaagcggtacgtttctcataatcctggctgttaagtatccgatcgacggctgagcgcccttcttctacctaacgctgggcacggcggagtcctggcctgaccagcagcaaacacgccggtgaacagccatcccgcccaacaggcattcatccctaaatccgaaaggtgttacgcaaagtggaagaagatatgagttcactagaggtgcccttaccagcaatcgcgtagccgaagccctgctctattttctctcttcttgcatctctctcctccacggcggcttgttcgcccacacggtaccggcgaccaagcacccaaggtggcggcgcggaagaacgcagggcagtcgcagcgtcgagccggaacaggggttctccagctctcggttcgtggtgaagtatctcgcttgcttccatggactcaacgaatgatacgacacgaccctggctggtttatatatcctggaggcgaactggcaaagcatgaaccagggaatcagcggggaagtttgttacagaggtagttatggtcgcgtttgttgcagtagcggattacggcgagctctatccaatctcgggtagaaggacctggcaactcggtctatcctatccacgtgaatcgtaaccacccccagctggcatgggcctggtggatgcaacgtcctagcgtggctaagaagataaactgtggcaacatagtcccagaggctagcggcatgcaccggtgaacacagtcgtgcaccagtggatgaccgtgattaaatttgtgctaatgataacatagcgacgtcttcc

SEQ ID NO: 160922 - DNA, 640 bp, Zea Mays
tgggggaaaggagtctgccttgcctcgcgtcacggtgttttgcgccgtcattgagccgtgcatcgagggagagttggtccctgcagagaacccgaactaccgccatcaccaaggaagttcacgccgcggaagcccccacgcgaagaccttgcttgcgccggtgagggaccgaggggcatcgtaagcgtgtaccgcacccgagagttacctcctctggtaccgtggctgtgcggcgtgaccagaatttcttgccgaggatgaatcgtcgccgtggatccgcctgatgccgtgggcaggggtgctgcgtcctgcgattaccggtaagggcttgccttgttaattcgtcaccgtctcccttacgtttatcatccttcgtgatggagtttcgtgcacggaatcaggggattgggtgctcaccagagcatcgtcgccttgcgggcgtcgcaccactgcggcgggcgatcgggtgaacggatggatgggaagagatgaagtttgtgccgctggattctcatccaacgaataccattagaaactggggacagtttgggttgaaccatcgatcagccatccaacgggcgaggcgcgtgtgtggttatttaaaataaggagcatcagatctggatcgaacggtcctaag

SEQ ID NO: 160923 - DNA, 846 bp, Zea Mays
caccaccaaatcaaccgtaggtagaggtaaaaattccagctcagaaataaactaataaccatctgtataccattcaaccttgggtaaataatggctacaagatatcacctgaccatcagctaacttagctgacatctgtcgtggaaactattgcacacccgacaataaggattttcagtaatcactgataaacgtacgggaggatcccgattcaagcaagatgacaagctgctggtgttgtatagaaccaataacatggaaggtggtatttgtgtcggatcctatctaggatgccatagacaaggccattaaggttggttcaggtacttcctctatagtctccactggtgtctcctcttccagcatatcccaaacctcttcaatcacttgcaactgcactgtaggttggcatttgtgtccaggaacccatttttcagcacaaagttcgcatagccccctaacaatccgataactcctcagagatgccactcgatctactgaagagatgccatgccgattgttagggaaatttttctctggcagtcctggtgctcctacagaacgagggactgaagttggagcagaagattgtggccaagccatctagttggagataggctcaccacgttgacggcacgttaagtccagggcctcctcctgcacaagggcttaagaccatctacaaatctcattttgtagtaaagaggatcaatgcgagactcataagccgccaactcatcgactagataagcaaactactcaacgtaattcaagattgaacccagttgtctaatatggaacaactgacggatgagggactcttgttgttctcttccaaaacactcg

SEQ ID NO: 160924 - DNA, 615 bp, Zea Mays
gtaacgcggcagcagacgcgttgtcgaaactaggatccagtcgaacccaggtcccacctggagttttcgtccaagaagtaccacgcccgagtatttccttagatcgggcagaagagtgcaatgttctgagccagccagggtcagactctaatgactggagggagccaatcatcagatatataaagaatgaagaggaaccgaatgacaaagctacagcagaatgcatcgcaaggcagccagctcactacaccctcattggggaggcactatacagaaggggcgcaacaggtgtcctcatgaagtgcattctttcggctactgggaagcaactgctagatgagatccacgccggacagtgtgggatacacgcagcatccaggactctggttgggaaggtcttcaggtctggtttctactggccgacagcaaagagtgatgcaaccgagttagtccagaggtgtgaagtttgccaatacttatcaaagcagcagcatttaccagcacaacaactgcagaccatacccgtaacatggccatttgcgtgctggggactggacatgattggacctttcaagaaagctcagggaggatacactcacgtgctggttgccattg

SEQ ID NO: 160925 - DNA, 336 bp, Zea Mays
cgtcgaccagacctccaaggtcctcgacgtcctcggcatgctccatctgcagcaacaacacattcactcagcaaaaactacacatacccacacgcaaccaaccacacaaaaataataaccttcacctgctctctcgcccggtcggattgctccttgacaacctcccgaccatgcgccccccacatcctatcaaaaagtgcccccgctgactgcttcacaacagggtcttcggtcttgaagatctcgcgttcaaagctctcgtctgattggtcgaagacctcgtagtgtctgcagccctcgcgggacaacgcattcatggccccctcgcaggtgacg

SEQ ID NO: 160926 - DNA, 343 bp, Zea Mays
accaccaccaatgtttcagcaggagcggcatcagaggaatcctcagctaacatatcaagcatggcacttatctctgcatcactgggatccaaaggcacctcaaagtgaacctgccgttcatcatcaggaatttcttcaagcgaagcaaccaaagcactaacttcttcgacagagggtcgcactctaaggcccaaaccgccatcaccagcaggaggatttgacacaaaatgggtaaaggccttggaaggaggcaggttccaggccgagtatgcaacaggggcgccaacatttgacaccttgcctctgagtatcatttcgagccggctcaccaagtccacagcag

SEQ ID NO: 160927 - DNA, 325 bp, Zea Mays
aggttagagcaagaatagccaggggtaagaaagtttatggtgaggaagaactccgtgttaggtggtaatgcatctgaagattgagtttgacttctctccttccttgatgaggttgatcttttatttcctggccttgagctcattgattcgcggtgagtgcatatcatcggggtgggggaatgtggttaagatagatttggatgagataggctacatgatgtaggtctaaagttcatttgatgttaggtgggaatagacagattatgcaatccatcatgacactattggttgggttagctcttatgttcacggttgagttggtcta

SEQ ID NO: 160928 - DNA, 645 bp, Zea Mays
ctctcccgcaacacctctgctctaccgctccgatgaggcgggactttagggcctcctctcgcgcacgcactacgcggtggaggaatcccttctggttaggcatgcagaagagggacccaaaaaggaaaatctctcccgcggtgaaacagtgaacggcgttaaagacgacgaccatggagttgtcggaattcgacgtcgcacccgcgcgctagctgtcggtgttaagtaccgtcaacacgctacgggggtggacgcgtagcgcttttcttaggaaggccaaagacgccgacaaccgcaactcgatggtacgtgcaaagcacatcggagatacaagcgattgctcaggttcgggccgctcggtggcgtaataccctatgtcctgtggtttttgtctgcgtgcggtcgatttatctctagagtacaaattgatgtctagaggaagaagatgggttctatgggtgtctatctcatttttcgtagggtcctcttttcaactttattgccgactgaattggggttacagaaaaactaccacgagtccacgatcttcatgttccatttgttctgcctctcgtcgcgctgggctatggtcaaacaagtcggccaccgatttctgcgcgctgcacgtacaagacgcgactgata

SEQ ID NO: 160929 - DNA, 440 bp, Zea Mays
caagagagagggcgagggtgttcggctgagggcacaactgagcgggggggagtgagtgtgtgcgggctctaaaaaagggctcaggtgcgtgggggcgtggccgggaattgtgcggtcatgggcgcgtccacggcggagagcacatgcgatttggggggacggttccgacatgcggggcccacataacagagagagcgggcgagcgaacgatgtaacaccccaggtgttaccctggctaaaacccactttggcactagaagctgtgatcacaaggggtaaaggcttagggcaacacataagaacttggagatcaagtgctaataaagttgccaatgacataagaagcattactctaatccttgcacacttactaccttggatcaggggggagaagaaccctagacctctcctaaaccctatcttccaaaaccctaagtaag

SEQ ID NO: 160930 - DNA, 706 bp, Zea Mays
gcaggagaaggagatggtatgaagctttggggtgcttgagagagtcaattcaatttttattaactcaagctatcaatcttcaattatctatatccaagattgacctaaagttattttgaattgttatatctaaaactcatatcatctcgaggaagatattgatgttgtaggaaataaagaattaatcatatgccgaaaaatcaagacctacaacatggaggaaagccaaaggatggtaacaattatgtttttaagtgcaagtatattaaattatcatttcttatgtgtcttgtgtagtcacatagaaaaagaaagcacttcaaatgtttttaaattatgtcaccattctttgaagaaattcctttctcatttggtagattgtatattcatcatttctataccgtggcaatctacatgctttaaattgttaaaagtaccccatggcatgttttacactaattatcatattattgccatgttctagatatagagagatattccaagttcttaaaggaataaggtgtcataaaaggaattcaaatcctttggacacttataaagggaatctctctctataacttgaaaagtgagactaatgtttttatctaagtaacttaattagtctcacatgtagagaatgtgtttctctatggagatgcacaatctaacatgaaaagaaaagtcaatccaatgatttatgttgtct

SEQ ID NO: 160931 - DNA, 278 bp, Zea Mays
ataattaattacttaagatccgcgacataccaaaataatgttactaatacgaaattgaagttattacgaagttaacgcgactggaacgagtcgtgatgggtttacgacgcaatttatattgaatagatatcatctctagaatttaaattacgtcgctcggttctattggtcaaagcgaagccatacgaagggccacatggatctcagccacaactagccaaaatgagtgggatcaaatgtggctagcatctcctccaccgctcatgaacacacgcacg

SEQ ID NO: 160932 - DNA, 1190 bp, Zea Mays
aattactagaagtggaattaaaaccctaaatttgaaaatagggttttgaaaataagaagaagaggaatgatacaaaaatataaataatattaatatccttaaacttattacttttaactgcacaaatatagtgtaaatgatgagccataaagtttgaatttaaacttgaattcaaattggatttgaaaatagagaaagagggaatcagaaaaagaaaaagaaaaagaaagccacatgggctgactacctcctttccagcccaattcacgttttcacccgcgcggcccaactcctaatcctccacgcgcgcgcgctggacacccactgacatccggaccccgcgcccagcctcacatggtatagtcattcagcgctagtgttgagtcactagcaggtgggacccacttgtcgggttcatccccttcgcgtaacagaacccgcgcgggagcttcggctgccgttgcggacctcgctgaccgagctcgaccggggtataaaaccaaatcacgtctcgcctcctcctcaacccaccgcgccgcactcctctgccctttcgcattacctagaccatcttgggcgacacgagaagggcgccgccatcgacgtctgggacgacagctgcctcaactgtgctctcccctgtgatccttgacggtaactccctcctctcgcttgcagaatcttctctggatgataggagtttataccgcgccatgttcgaaccataggaccatagtaattgctcgccgtcgcgtgtgtccccgccgtggattggactacgccatgggtcgggggtctacgctgttttgcggctgaaattgatgggcaacataggttcgggccgtcgtaaatctcacgagggctgagtgaattagagtttggggctcggggtggcaggaatttgtgcgctccggcgaagctccgccgtgggggtgctgtgcggcgccgtcggcgcagtgtttgtttgggggaaaggagaaattgggtcctggccataggatttggatggacggtggagattagtttggggtgtaccgctttaggcgattggatccgtgccgtcggatcggtatcctgcggattagaacagatcatgtttcattaagttgtagccgtcgatccctgatctagcggccaccagcgataccggttcatgtataggaatggtctaatccgcgccactgattcta

SEQ ID NO: 160933 - DNA, 606 bp, Zea Mays
gtcagccacatcaacgacgcagtgagcaagagggagaagacgagggattccgccgccatggaagtcgcacagggaccaactgaggggcctctgtgttagcctaggggcttcaccatgtggcggggcaagtttctgtggtcccttctggcggaattggctgttgttgactcaggaattgctcaccagagcaaatggttcgtgacggagccgccatgcgtcgtgactggggcttacgactgcgcgattcacggtatgatcctctccacatcttttgccttggcctgctcatagggtagcactcgttagatcgcaaaatggggtatcggggcgtcaggccatggccgtaccggcgggctacgtcgctgcgggcagttcgtctcgccgcagcctgggttcggggttgaagacgctcgcgcgccgtcggatcttgacagacggtctgaattacaagtggtgataccccttcgccccatcatgtaacggccgtggatctctgatctaagggcttctttgcataccagttcggtaagggctggatctaatcccgtgtgtccatctcagatcgcacagcttagattgagcgatacctcttcgacgcggcgtttt

SEQ ID NO: 160934 - DNA, 655 bp, Zea Mays
ccatgaattttttgtcttctgaaatcccttcttattccgttgttaagtcgttatcctttggctttttctattcccttgtcttggtatgcccgtatccttgggatattgcatactctcatctttttatatttgcttatctttatacactaatgtttgtttataaacatttcagttacatgcccttgaccacccttgtttcttgacgatccatgagcaatcatttcattttgcatatccttggtgatctcgttgttttcttataacttccctaggtaataatttcttttacttcaaccattctgttgggaccttacctatctcacccttgattgtcttatccacttcgccacttcgggagtcttgccttaactctatccttggttacgctttcacgattatcatctttacccttatcgcctctatatcttactttgatgcttatattataccctgtcctttaaaaccttctctcttccatctcaattttatagttgtattttacctattttcctttggtcatattctattccttgccgcttgcgagttttaactccatcctttgtcgtgctccagttgggtcttacctttacctttctcatctcttaatcttaccttggtgattacaccatgtccgttctctaaaatctccaatatc

SEQ ID NO: 160935 - DNA, 517 bp, Zea Mays
cgtaatggcggtgacgtagacctgcaagaattccgacgggtttgacgtaccgtcgtacttctccggtaggtgtggccggaacttaggtggccaagttgctgtgcggagatgatccgctagtgcggcacagcccacgccgaccaatgggacacccgcctggattcgggcaccccttggagtttgtggtgcaactagagcgatgtcttggtcgaggttgcgaccctcgaagttttgccagcgctcacgcgccctctccagagagactcgagcatcctcgcctgcacgcctacggttgagctctgcccgcaggtcgtcagccctctccagagagattcgagcatcctcgcccgcacgcctatggttgagctctactcgcagttcgtcagtccgtgcacccctcactgagggtgagcgcaaagatgctgacgcctcgcattgatgccggaatgatcgaggcctagacctggccgagccaggatgggccatgccgaggagacggtcaacatcttcgcgccac

SEQ ID NO: 160936 - DNA, 462 bp, Zea Mays
gtcaagaatcttgatagggtattccatgtaggtcaaatcaccctgaacactgagctcttccattggtaactgttcctcagggacacaaagacacttcttaagttgagacacgtggaacacattatgcacatccgatagattatcaggtagctcgagttgataggccatctctccaactcgccaaaacaactttaaagggtccaataaagcgggggaacaatttgcccttgactttaaatcttctcattccatgaagtggtgacaccttgaggtacacatgatcttcttcctcaaattccagtggtcttcttctattatcatcatagctcttttgcctggtttgagctaccctcaaattctcccgaattatacagacttgttcttccgcctcttgaataagttcaggtccaaagaattgtcttcctctagtctggtccaaaaatagaggagtcctgcatttcc

SEQ ID NO: 160937 - DNA, 846 bp, Zea Mays
atacaaaaaggtctaataaaattgtgtggggacaacatcaattcaagataacagcggacatagaagctggggagtatacatgcgagtgcaaacagtgggaacatacaggtttgtacgtattatgttgattagcataataaatttgcatactaaagaatttgatgattgtagtacaaattaatgtatatctttgaaaaaatggttcgttttcatgttttcaggtctattgtgtgttcatcttttaagagccttcatgcatctttaagttgaaaagataccttcaaaatatatattgcaaaggtacactgtctcatcaagaaaagatgttccgtttgaaagaattgataaaagcttcagggggaaggatggagttactaaatcatacagacataaaatgttgttaacgaaaacaatgaaagtagttcgccaggcgtgtatgtcaaaagcagggtacgataaggcgatggatgtgttggatgagctcgatgtcgttctaagccgattagagccagatattggatgtaatgagtcaacagatgttagtgatgatgaggaagacaaggtaataatattccagatgtttttagtgttatactatttgtaacataaattatgcatagtaacatgttatttgtaccaggaagaagagttgaataaaaataatgctggcgatgggatggaagatgacaatacaattacataccataataaggtatgtaaaagataaatatataagcttgcatgaagtattgtacataatgaatatattaaatcaatgtaataagcaaataatattttgtaggatgagcataacaccatgactggatgtgaacatgcgttaacaat

SEQ ID NO: 160938 - DNA, 458 bp, Zea Mays
aaacaataaaaaagttaagggaagaattttaccttaaagttagaataaaacaagctaccggcgatatgctgccgtcggtatctgatgagatcggcttcgagcttcgggaaaccaacacttttcgataaagtgctaacaactttctccccagtctggtctcgaaggcaacctaagctctcttcgtctataccaccgaagagcagtgcccctggctggtaccagcaagatatagcatagtccctcagcccttctttttcagccttagacaactcttgcccaattatgttttgaaagttgaaatttctttctttcgaagcatcttcggcaagctccttctcttttccaggcatcttctcccttttttcaggctctgcagcagggtttcctcagcagctgcagcagtttcttcctcagccatattcaaaatcatttcatcaatgtcagaaagtgtgttttcc

SEQ ID NO: 160939 - DNA, 659 bp, Zea Mays
cctggctattagatgcggtagtcagcattaggcgggtgtctaggtgggaggacaaccatggcatagtcgatgccaagttacatgaactcaagactcccgaaccagatcactgcgtcgagccgcaagggggtgctgggggttggccatctagagccttgatgggaacatggtatctgcacgcaacgagcccctacctgtcgtgccaactgtcagtgttttgacctgaggatcctaccgactagtgaattagtgttgtgtgccatgcgccagatgggtgatacaatgagacataagcctttatcctggttcgggcaagagaaggccctactttcagcagaggggatgagacttatattacttgcacctaagtgcttgcagtgtggaatacaggttggtcgggagaggtaaaaggataccaagtccttagggttgattgaggcatgtgccaatatccacgtgaaggtgaaaaccgtgaagtgtttcctcccccgcctgaatctctcggctcctctatttatagcctcaaggagagctatcaggagcgtcagggcttgtcgcatatgagaggaggtgcgtccgagcccctgtagccagcatggccatcaacatggtccacgtacttgctgatgacttgaactgggaaggggatgtcaggttcc

SEQ ID NO: 160940 - DNA, 2582 bp, Zea Mays
ctagcagacctcatcacttctgaattattgctcagcttacttgcggaatagctggttatgattaccagtctgttaggagatggacaacattcaagaggctgggttatggacttgtcgagtgtgagaaagtaaaattatattttgtccttttcaaattattggacttttccccgtttcatgctgatgacctatatccaacttaccatcagaatttatgacacagatctttgttccagtgcatagaaatgcacattggtgtttggcactaataaacatgaaggataaaacattgcagtatcttgaatctcttgttggttggggccgtgatgtactggacatactggtaggcttatctgaccaaactgaaagttacactattcttagactagagtgcctgaattgcatggggttgcctttgcaaattattcatgtaatacttgtatatgttttttttgaaaggtatatataattgatattcattatcaagaaagcaaaattacaaagtacgatgttcttcataaaaggacccagcacaaaattaaagggcctgcaagatttctctattgttggattgaagcactacagttaaattttctgtctggcaggctagatacatcgtggatgaattgaaggacaagagtaacatagaggtagaacctagttcgtggactgtagtgtcagagtctttgcccttgcagcagaacgggtatgccttccttctagtactaatcaccataaaatccagcatgtggcgctgattgatttgattaaggaaggaattcatataaagtattaaattccagtcaacgcattactatttttcaacgtccaagtgttttctattttgaatccgtgttgtgcacattaatgggcaagcatgagactatctttgacattattctctcgttataggtgggactgtggcatgtttatgcttaaatacattgatttccatagcagaggtatcaaaccatctttcagtcaggtataagttgacatgtgaaaaacatacatacatatctgtaatttcagttgactagaaatacttagattgaggggcttgagttttgccatacttaaaaaaaaagaactttaacttgctgctatgaagcttaacctctgatgtaggagtacaatcatacactggtgtgcaacgtattaagaagtttctgtttagcatgatgtttgtcttaatgttgttcgcaggaacacatgatgtattttaggaaacgaatagcaaaagagatcatggcattaagagccgactgaagaacaccattctgacattgtctcaagtcaggtatttgctttcaaatagcagagatgtgattcttctaaggctgttggtgtgaattcaagtccatgtcgccacaccttttgtaggcttgtatttttttaggacctgattttggtagggaaaagaggggtaaggtaaaacaatgaaaaacgtaggagttcggaaatagttcggcaaaatggccacacctatgtaattgcattgaaactgactaaagctagtgcaaggaactgacacttagttttgttttgtgtttatttcaactcatatgttgtcgtggaaactaaagctagtgattgcacgactccccagtattaacatttcgtgagcgttttatgtatttgggaagtttttggttgcagatggataaacaactgtgaacctaggagcaacttcaaacttttcaggttcaaatcataaagctgtaccgagctggacacatgtctgcacttgaacaacaaaccaccaaccactacagtttctctatttctctagttagctaggagcacaaggcagaacattgaatgctgatagagggtagatcaccccatttcacaaaaacttgtggcaaaccaatagcaatcttaacaaatcgaatcatcttcccaccagtagaaatgtgactgactggctacttagatgcctaaaaatgctctgcacagtgactcccaatgctccttagccaggcgaacacgttcaactcgctccaaccgcgttctcttctaagggcttgtgcttacctgtgtctcagcagcatgttgagtgcatccaggtgcatagcgtcagaaaagaccccttgctgaacatcaactggtgtgacggatgcagcagaacagcagcataggtagcagaatatgtggccacatgaaagagagaccggatcaaacattgtgtcctgtaaataaataaaacatggaaggatgaagagtttggttatggattttaaatagagaggacagagaaggatgcattgtgctcttaatccaagtctgtctacagagcactgtactcgtcagaagtgcaaactcaccaggcatatggattatggaacatgtaaggctaatatcaacacgcatgaagtccaagaggttggacgagagcgttggcctgtcgtcgtcgccgtcgccaaagagctccattgcaccattattcagctacacagccatggggattggaggatctcgatgtggagactctgggcttgagctttgaactcttgcccttgctttgagcagtggatctcatcatcttcttggctaaaaacagtcacctttttgcatgccaa

SEQ ID NO: 160941 - DNA, 344 bp, Zea Mays
gaggagaagaaggtgtctgaggagaagaaggttgcggaccctgctcttgctggattttacgaagcgatggaaaaaacaaacatagagaaaatcacaaatgagataatggcagatttgtaaagattctgacgatagtgatgaatacgatgtggaaagtggggatgaggattccgaagatcggccctggcggccaagccataccatcttcggaaagtcgtctatcaaacagagccatattgatgccatgaagggaagatactttcgtgacatgtctattgtgagggttggaggggacaacaccgcccctgctcctgaagaaaatgaggttgttgtctacagaagct

SEQ ID NO: 160942 - DNA, 684 bp, Zea Mays
agagcaattcatgggctctggtgagtaattgagggcacaagcggttggattggatgccggattacctaacagagccgagggtgtgctcaatttatagcatgcttgagcggtggctagtgaatttgatggagacgcgcggcggtcggagaggaggaggggcactggcgcaaacgattagtggctttcaccgtggcggacttacctgcgatgagccagtgatatagagcggcttacggcgacgtggtgaagccataaggcacatggcatccgatcgacgggcggccaactccgatgaacttatctgagccactcgcaaagcaaaaggagtacggcggccagcctccggtgttatcctgtggcgaagagctttttcccataagcgttatctggtcaccggtgagcacgaatcacaacggcggcgtgaatccgggcgcacggttcaccggcggcgaggttctctgaacctgaccctatccattcactgtaccattggaaacgttcaacagagcgcctgacagagcaacttgtaacgcctagatctcggatttttgtgccagaacatgccaatccgtctgcagcaaacttgtagcccattatttcaactataattctgctatagcaactaccctcaatcgagcaatgaatctaactctaaatcgagctctaagttcatcctactttact

SEQ ID NO: 160943 - DNA, 450 bp, Zea Mays
gtgcagtgcaaatttcttgccgtagctgccgcaccgccgtgcaatcgcctcgctccgcggactgcccccttcgccctcaggcgtcgcaccaggggcctcgcacagcagcacggagggtgtgctaagcttcgccttgggcgggttgcgctcaaagccgctgggatttctcatcggagctcccctcgcccattcatccgtcgcgctttgccgcggtaaggactccctacgccaccctctctgttctgaccctatgtcatcgtttcgcttccctctgcacttcgtttagcgcctgtctgattgggatgtcgaacaccagagcgtggggcgcgtgcttcgccgacgaagctccgccatggctctgggcggcgccacccctgttgtggcccaaggttggggaaagccatgatccgttggatctgttgagagcggataggattagaccacgacatt

SEQ ID NO: 160944 - DNA, 835 bp, Zea Mays
tcacgagggaatggatttgatcgtggattgaagtttatcaccgtgcctgtagccgttgcgacgtggccggaccgccagcatcgccgttgaagctccggtgacctcggttgcgccacgccgtagcttgttactgtgcggtagtaatcgtggcacccttaggagtataatccttgagcctttgcaccggtgaacgccacggtcatagccacccgtgttcttccctatctccggccgccagcacgccgtggccaaattgagagccaccgaccccgaatcctataaattgagcgtgcccttggctccaccatgtagtcaagcactcaacgcacccacccgtgcctccgattagtcaccagagaactccaatttgggattctccccaaatcggtcaagaacaccgcagaagtgagctcaccgtggccagctctccacaggtccgatcgtgttcccctcgctcttgttctagcattcctgtgtgatcttaaagctcattggcctgaccaattgctctaaaccagagtagatcgatgggaacactttgatttgtccccggattgcgcggtcaccgtggacagagtgattaggaattagaatcttgcaattaggtgaggggaaatgattgccaggggtagaattaggtgccagccgagcctagggtccggtccttgcgtatctcggccggcacaagctcgccggaagctctgcgcgtcgccgtacaccgtcgtggacctcgtagtgtgaagggatagaaacgcaggggtttatttgcaaatgtcagcgactgcagcaaatagtgtcttggactcttttgagatattcaaaaagacagggtcct

SEQ ID NO: 160945 - DNA, 433 bp, Zea Mays
ggtggctcactcggcggggacgctttgggcaggcaccttcgggtctccgagtttccacctcttcaccaagttcttgcccagctgtgatggccattggctcggtgtgggttgagtcagatgattccccagccagcaagctaagcacagcatctatctccgcgtcatcagtgctagccagcatatcaaaatgagtctgcttctcatcctctggaagactccaaagtggagcaatcaaagcctcaatgtcctcagaagaaggtagcactctaagacctaggctactgtcacgagcaggagcattggacacaaactcagagaatggcctacgtggtggcaggttccatgcggaataggcaacaggagcaccagcatttgaaactctacccctcaggatcatgtccagttgactcattagatcttcagtgggaatttt

SEQ ID NO: 160946 - DNA, 1054 bp, Zea Mays
atttgccactagaatggaattttaaatttgaaatctaaaagaataaaaagaaaagaaaacaggaaaaagaaaagagaaagaaaaacagaaaacattgtcttgggctcaatccacaggagccggtccactagcattccctgcgtagcccactaacccgcgcgcaccagccaacacggatcttcgtgtgcgcgtcgaaccgagcacttacaggtgggccctccttgccagtctgcgtagcagctccttcaacagaatcgctcgcatcctcggacctccaccgaccgcggcgctgttcaaccatgccgctaattccggccgcacgcagcgtatctcgcacggagaccagattcgtgggctatacaaaccaagcgttcgcccaattcccttgccctgccctattgagtccgcgccaacccagtcacaacgccgccaccatcgccgagaggtggaagaaccaccagggtagggctgtgatcacgccattcgtcgggtctgcggggtcatcatcgttggcgaaatctattcgttgcatcctcgaacgggattaggatcggctcgtgtggcgatttcgcgtcagagttggcgctccgccgtgaaccctgcctgcaccgcggacggactgctccacgacgttatcaccgatatgatgcccttcatgttgttcgtcgtgttcgtgtttacgtgtagaccttattgtaccgaggtatgggggcacctaggccttgatcaccctcgccacggcgatggtccgtcgaggaagggagcggcgccgccgtgtgccgctggtgtggagaagaacctgcgttagccgttgatctccgtagggacggcctggattagagcctgcgtaacctttcgtgcgtggtgcatctggaccgtggatcctagatcctgtggctacgactagatctttctatttgaaacctaggtcatcagatccaaaaccgagggcctagattgcatattgattcgtaaagtctgggatctaatatgtcgcatcgattgccgatcggacggcccacatagacggataccccttcggcttgcgcgtatt

SEQ ID NO: 160947 - DNA, 465 bp, Zea Mays
tcactaggtgcactgttggctatcctcaaccatgcgccaaacaacagaacactcgggattctacaggttggttgacgacgccactgtttactactaacccattaccattaatcaattgcatgcccacaggaattaagtcacaataaatccaacatatattattttgcagggctttgctactgggctcatgctcagcatgtctttctttgacttggcttacgatgctgtcaacgccatcggctttctgagagggaacctctgggtaagctagctaaggtattctgttgggcgtttaatttgtaagatcttctcagccagcgtgcattattttgtttttttgacatgtgcagtttttcgctggagcgctgctgttctcaacaatcgcggacgttttccctgagccagactgcagtgcggcagatgaaaatgggaagcagcaggtggtatagcttaattagcttccat

SEQ ID NO: 160948 - DNA, 1048 bp, Zea Mays
tggaaaagtttggctaaggcaagccaaacttgcaccaacctacggtgcaccggacaatgtccggtgcctaggctggcatcccagtgaactgaccgctctcggaaaaagctgagggcgccgcgactaaaattcaccggactgtttggtgtgccagtcgcgtgcccagccaacgatcggctgcgtgatcaacgggagacacgtggactttaccaatggtcaccagaccgcaccggactttctggtgtgccgtggggccggtggatgcaacagtcggcttcgccaaacaaggaagggcatcgcgcgctgttcactgtctggtggtgcaccggatagaaggcaaattggattttttttgttgttttcgcttgtcctctggcacacttgtgggcatacaattattattgatgtttcacgagaaaatctaacttccccctttttccattttttatgaattaattgaattatcttgctctcagtgcaaaaaaaagaaaaataccaaatgaggtccgaaaggtgtgaaacttggcatggtgtcataataccatgattgtagccctacaaaaatgtgaacccaaggttttgaggaatttggagagaaagtgtccacaagtagcacacatcggagtagagttttatgaactttgaagcccaacaactcacctccttggcatgtcgacacattttttgtcgttttcgcttgtcctttggcacacttgtgggaatagagttattattgatgcttcacgagaaaatctaatttccccccttttccaattttctacgaattgatagaattatcttgctctcggtgcaaagaaaaagaaaaataccaaacggggcccgaaaggcgtgaaacttagcatggtgtcataataccatgattgcagccctacaaaaatgtgaacccaaggtttcgaggaatttggagagaaagtgttcacaagtagcacacatcggagtagagtttcatgagctttgaagcacaacaactcacctcattgcacgttgacatttttttcgtttccgcttgtcctttggcacacttgtg

SEQ ID NO: 160949 - DNA, 556 bp, Zea Mays
ttgcaatctagtggcgatgagcgagagaggtggcgacaacgacgacagttggtgacagcgcagaggcgaggacaagagagacaacaacctgggggcggtgagtgagagatgttacgacgacggcccatcagaggagtggaaccctagcccatcgaaaccacgggtacactgggcccagcaaacctgcggatatgcctccaaatgcggatatggagatctcgtgtagtgtttgctcgtgggccgcttgtcccgtgaaaatcggtcggttttgagtgtcctcaaacgaggcctaaaagtaaagagagtaccaattgacagatgaattagcaaatttaactagacaaattatcagtttttgcggtttggttgaggtatacgcatttagggtccatcaatattaattgcacatcactttgactagttaagagcaactccaaaagaacgtgtaaactaactccaaaacagatattagtcaagaatagtggtttttcttactccaacagctctctcattcttctcccaaaaaattagcgtcccggatccatagcctcctctc

SEQ ID NO: 160950 - DNA, 477 bp, Zea Mays
tttctgagaaattcagggtgtactctataaaattatgggcttcagcgtaattatcttataacagaccaggactgtgggttaatatcttagatcctcaaggttttttagtaaaattctcggtcgaaaggggtaccggggataatagtcgtctgatccggaatcaaagggtcagattagatcccggttcacgtggaccggtacccatccgcaacccacagatctaaatctgacggcggtgattttaaagaggcgtgataggctctggtccgtcagatcggatccgatgccccactgtcaaccctgaaggggtatcctctgcgtctaatcccagtcatcaatccccgatccaacggttgggaatctaatgcaaggcacgacggtgccgctggtgagccacggtggtgcattgccggtgatcggctagctgactaccgagtgtacgaaattgcaaactaacccttacgacatggagtagga

SEQ ID NO: 160951 - DNA, 2841 bp, Zea Mays
gatctgagaagctcgcaagtaattgccttgcttaatacaagtttgacacctgccattttgaagaggccatgccacatgtggctagtgagattcggtcgcgatcgctggcgatggaggtaggaaagctgtgaagacggatgacaccctcgaagaaggcgcgagcgatcgagcatctgagtacaggtagttgagggcgatgaagtgtgcgtacttggagaagcggtcgacaacggtaagtatgatagacttcttgtggaccttgtggaggccctcaatgaagtccatcgagatattgactcacctaggacgacacgtcgaggggttgtaggaggctagctggctatagggtctctgccttgttgcactcagcactagcatgtgaggcaagtgggcatgtagtcctgaatgagcgtccggtcgtgggaatgtagaagtttgctcgtagccgcttgagtgtcctcatggtcggttgtatgggccaatgcaagtacctggtggtgtaggtcctcttgtgtcggcataatgatggcaagccatgaaagaggacgtcggtcacgtgccacaactcccaaagggttgcatcctagaactgctaacagagctggcctacctccgtgtcgtctgttgttgttgtgcaaatctcatcgaggaggtggaacaagggcctcaagatggcgtgtatagcctggcgatgtcggcgtcgtggtgcgagagggtgtttgttgtcttattgaggcgaccggggtgatactccatggtgaagtcaaagtcgaacaacttgttactaaactgatgctgggggactatggataatcgctgatccagaaggaagttgaggtttttgtgtttggtgtggatgaggaagcgacaaccctataagtacgaccgctagtatcggatggcctgcttgaggtggcgggcgacgaatggcttcctaaagaactccagggggtggttccctagttaaggattggatcgaagctgacacccgacgcgtcgcagttgacgatgatttgtcgatcgaagtctagcatccacgggactagtccaatgggcagggagtgcttcagtgcttggtcgccaccatgacctcaagtgtataggcaaatgaatcttcacataggagctgtgtcaggggcaccacgatcatctcgaagtcttggatgaacttccggtagtagccgatgagtcccaggaagccacacacgccctaggccgagcgtggcttgggccaggaggagactacatccaccttgttgttcatggtgacaccgttggttgagatgatgttgtcgaggtaggcgaccgatggctccccgaaggagcatttggaccacttcaattgaggtcgtggatgcacaatgcgtcaaggatgtggtgtatgagttgtaggtgcttggaccacaacaagctagagataaggatgttgtggaacaatacgagcacagacctacgtaggaaggacataggatgtcgttcatgaggccctagaatgttgttggtgtgttggagaggtcgatggacatgacgaggaacttgaagtggtcgtggtgggtgtgaaacaccgtattatcaatattccttgagtgcatccgtgcctaggggtagctagactgtatgtcaagtttgttgaagtatcgtgtgccatggagctcgaagtggccgtggtgggtgtggaacaccatcctcaatatcttttaggtgtatccctgcctaggggtagccagaccgtaggtcaagtttgttgaagtaccgtgcacgatggagcttgtccaggcgctcgtcaaccaataggatcgagaacatgtctttagacggcaacgtcatacagaggcccttgaagtccaaagtatggccccagagtccggaggaagtcaacgccgaggacgagatcgaagccatggcaacagacggagaagtcctcaaggctggtgcacagacaacattgtgggtcatgccttcataggggacctggccgccatttggcgctgtacgatatcgctagtctaatgcgacgcatgaccctgcactgatgaagttgtgggtcgtgttactatctaggagcgccaagatgcgatggccgtggatgtagatgtggaggtgcacggtgtcctttgggtggacgttggcgatcgcgtggagggagacaatcggtgcgtcgagcacctcctcgacagccaccccaacacctatgttgttggtgacctcattgtccaggtaatcaacggccttgaggaagaacaagtgttgacactggtgtcgctggacgtgtggctcatcgcagttataggaaagcccttgccgtggcgctcgaccatctcggtcggggtgggctaaggggtgcaggcagtgttggggtaggcgctgccagcgcgcgtgggactcctgagttcgcgtggtggagggggcagcaccaaggccgtgcgctgagtaggccaggctgggcgctgcacaggtgctggaagggtcgccgcggtgtggtgtggtggtggacgggcgtcacagtgagggtggcgaatggggcttccaaacacgctgtcctcccataccccaacagtccgtaagggaacccgggcggcatggtggaggcgaaggtgacgaatgttgtccctcttgggttgtccagcgggcggagagggctgccagctgctgcatgaggtctatcaggggcctcagggccttggcggtggcgtttgttggcggtgctggtggcaccggcggctgcttattgccgtcgtcggaacccgccatatctgatactagattggaagagccttgggaccggcgaagactccaaaatgcatagctgtgggcaatgggcggccaggctttgaacccccg

SEQ ID NO: 160952 - DNA, 483 bp, Zea Mays
agtcaccgacatggtgattcttggccttcaccgtggtggcctccccgacgatcatcggacgtgtatagcactggtgattgcaatgtggtaattgctgaggcaagtggcattcggtcgacgggcagccaactccggtgacttatccggactggtcgcaaaacataaaggagcacggtggctagctggattagtgcccatagcccaacagcggtgacgatctttttaacccgcggcgttatccgggcttaagtgggcacgaatcacctcatcgacgcgaatctacgcgcgaggtcgccggcggcgagggggatctgcttctgttgatattttggtactgtaccattggaagcttttttcagttagcctgacagccgaggtttagggtaggttttctccaaattttccatggcaacatcatcatccttctgcaccaaagttgtagacctatagatcatcttcatctttgttatagcagtcctagtc

SEQ ID NO: 160953 - DNA, 977 bp, Zea Mays
ctcgaatagtggtcaaagcagagggtggctcgagcgacaagaggctatattgtcaatgaaagcgggggagggaaataagaggaaattacgaggcgtagtcaaatgcggcatggtggtaagggaacaatcatgtcaacaacggagggacaagccaccaccggtcaaataaatgtggaccgaatgcagagagaaggcgagggagcgatcgaaggagatcgaggagaagccaaaggaggatggagaaatagggaaaagctagatcagggcagagcgatgagccaccaccagtcgaatgcaagcaggatgtaggggtagagaagaagggggaaatggggaggaggcaagaccgaatgtggcatggtggtggggcgtggcccaattaagagtggagcgacgagccatcgtcgatcaaatatagaggatgcatgggcacaaaaggagagatgaaatcaaggagacaagactgaatgtggcatggtggtggggatgtggccaaatcggaaatggagcagtgggccaccactggccaaatacgaagagaagaaaagggagcaaatgaatgctcttgcttgtcactataggtgggcccaaagagaaagggtgcagtggagaggagttgacaaatgcaacgctgcgggtgggctagggaaacaaggacgtcgcctaaggacccgattggtttctggatgaggcatcctagctagcatcttcgtgacctggctaaactgaagtagactcatgtgagcgaggctcttgagaaacgcaatctcatgagccaggctcgctggtcacttttgtaccattcgagccaagttgagttatagatgcagccatccaaacaagcacagattgcatccctagaaccaggctggtgaaccaaacacgcgggcatacaaagatgctgcactttaggagccgagttcagtctcatcaggggaaccaatcatcacgccctaaaggagcaggtagaatcaaag

SEQ ID NO: 160954 - DNA, 958 bp, Zea Mays
gcgtcgtaaccgccattccgtagctctagctggcataaccgccgggtgagatcccctcatcgttggcttcgcccgcaggataagtggacgaccctctcttctcttctccccatttcaccattagctccgtgaggatggattgagagaagcagagtgtcgatgccactgtcgctgcgctcaggtctcgccgtgattgcgacctcgaatccagccaacgacgtccgccgcagcatgcagatcaagattatatcggtgttgggcgcggggtagtacccatcaagtgccaattcctcaccggcgtcgaagcaaatccctcgaccgcacgtggcccgacttcccctccacctgggattcctggtatgggcctctactcgattcgtcgtgtacctaggaatcaaatggcgcttctcgccctcgtgcactgtaccgacatagctgcgaccaccgagctgattggcgtcgtgaactaggcgtcatccgccattgggggttgagtcccctgcattaaaccctgcagtagaagtctagctgtgggagttcaccatacttccctcgccatgaattgcctcgcggggtggagaaatagggacccggggtgccggacgtgatctccggccatggccccaccgttcgctagtgtgcgccgccgcctgggttcggttggctatgaggatttggggtgggttttgcgctggaccatgatctggattcgggtggccacgattagatctcaggttaccccttcgtcattttaaatcgggatcattgattagtgatcatgcggtcgggagggagttgatgtcgtgagcaatcctcgaccgttgatcttggatcgggcgctcggtgtgatgaaccagttcgtagagagggatagatttaatctcgccgtcgagtttcaatcggtcggctagggttccaggataccccttcggccaattattttgctaaagagcccctc

SEQ ID NO: 160955 - DNA, 332 bp, Zea Mays
ctgccgacaatatgctgccgactgtagcggctgatgtccgcttcaagcttcgggaagccgatactcttcgataaagtaccgacaaccttcgcaccagtttggtctcgtatacagcctaacccttcatcatcaataccaccaaagagaagcgcccccggccgatatccacaagatatagcatactctttcaattcctctttttcagcttcagtcagctcctggccaactaagtttcggaagtcaaaagtttcatcttccgaggtatcttcggttattcctcctttctcgggtttggcagtcgtggtctcttcggtggctgcagcagtttcttc

SEQ ID NO: 160956 - DNA, 344 bp, Zea Mays
ctttggtggcctatttccccagtggcggcactcgtctcctcgagtttccccagtttgggtggccaggagggatccttggggcccgtattatatagccccggtcatggaggagtcggccaagcgagcgtgaccaccggaggtgcccaacgtggaggactcgttgtgtttgttatggtgcaggggataaacctgatgcctgggcccacgatgtcagtgctctagaacttcatccgcacacaagtggagggattgggtagtgggcctgttctatcaccgcaacagagaagcgtgcgcccttggtttggagggatgagaggctaacgcccaaggcccccatgttggcg

SEQ ID NO: 160957 - DNA, 686 bp, Zea Mays
aggtactcccttttggaagttagttctgaagcagtttgatgatttactcgtcaaaatattgatagcagctgctgtgatctcgttccttttggcccggatgaatggtgaaactggattatcagcatttttggaaccttcggtaaattggatacatcctattggttgaaaattacctgcaagaaacaaatgacctggtgctttgatgtttgcaatgcaggttatctttatgatactggcagcaaatgcagctgtgggtgtgattacagaaacgaatgctgaaaaagctcttgaggttctcacttctaaacaatgccctaatgttgtgtttagctctgaggatattgttcctgctgtatgattgtttatttcctggcacatgttacaagatattttgtacaaatgagattgatcagtggattaatctttggcctcccatgtgtcttcatatcagcataaacatagctatattaaatataggtggaactatgaggtgatctataacctttttctggccaccgggggtgtgtttttattgtttttttggcactgggaactataggcagaacaatttgtccctaattattaatgtcctatgcttattaccgcataactgattcttttatgaatgctgtatctcaacgtcacatgctacaatttgtaaatcaccttccatagcattctctgat

SEQ ID NO: 160958 - DNA, 812 bp, Zea Mays
accagttttaattcgaagcgaacaacttactatttatcaaagagaagatggttatgagatttagttgatatccgactgtgtaatcttcttcatctcggtatttatcaatccaccaaatatagaaaatatagagtactacacatttacggtctaaccctctataaatctcttgtgttagtagttagacagtaaccaagatcatcgtggctccgtctgtgcttctcgctctatcttggtcctggtgtctttaggcgatgacacattactaggactgtactaatgtttccttgctcaaagcattcgtatctgagtactggtatagtagtatctgttcatatatctacgtagtcaggacactgtatgcaatactgaaaagcctgtgcacctcaaccaatgcccatttctatggcaatccacacctgcatacgttctctggattcaattcacagctataaaagttgcctgcaatttcacagagtttatgcaacagttcatattgatggtggattgtagcatccgctgttcccagctcttcctcccccaccaaactttggccaaattcataaccaaccaatttatgtcagcagaaaacaatttaaaaccatgcaaaccaagcctaccccacacactgacacacaagtcacaaaaagcacggaaaggtgccaaaagggaacttttttattgacgataagaaagaaagaagtatgaaaataaaaagtaaaaaatcaacttcaatcaaatatactgtagaaaaaagttaatgaaacgttaaaaaaaagaagcaacagaggcaggaggagagagaaaggctg

SEQ ID NO: 160959 - DNA, 436 bp, Zea Mays
cctctcctcgacgaatccatctagaagttggccgcataaaacgacgtaggttcgttgcgattagcttgaatcgcgtaactacctggccaggttccgccgcgttataagatagcacagggcccttgctccatcctatggccgacgtgttcacatggtgatgaagccgagcgagaagcgtcgagttaggagagagagggcagtgagatctgtcgtgggctagatgagagccatgtcggtgataggcccgtggcgggctcaaggttaatcccgggcgtcctcggcgctgctccaatcgctcaccggagcgcggcagtcgccgtgggagcgctcctcgttgttggtagacctactcgctacacggtaagtcttccctcaaacggttcaccttcatctctagctcgcgtagcagcggtgggagtcgtggtatggtgttggg

SEQ ID NO: 160960 - DNA, 305 bp, Zea Mays
ataagattacatacaaaaacttgaacaacaataaaagggttctctctatccatgagattcagctcaaagggtacccacagctaacaaagtgcaaaacaagtgtaccccaacccaagctacacagctcagttgatcgactcgagtgggcgcgggctaggttcccttgagagttcatgtagttgtattccacatatttatttccctccaaacaactggttttgtagctatatttttctcctttcttaatacaattctgagcaccttcctgcatgcagatccaagaaacatttccaattagtgtaaat

SEQ ID NO: 160961 - DNA, 450 bp, Zea Mays
ctagcctccctcaagttctctggtactcatagaccttttggattgaactagatcaccctggataacccagaacacgtcggtgtgttctcagtttccgccgttgtcgtggacagtgagttcccaacccgaaattgtgcaattaattgaggggttaatgtcgtcaggggttgaattaaatgttagccgagtcaggggcctggtcttggcatattccggccggttcatgctcgccggagggcgcgctcaccactgttcgacgtcggggacttgggtctgtaaaggaatagaaagggaggtgcctcggcgcaaatgtcagtgacacatagaaatagtgcgcaggactcttaaccagtttttcaaatggccagggtcctctgtgcaaacctggcaatgcgggcatgcgtgggcgcgtttcgcctgtcgtggccggctcgggctagattgagcccg

SEQ ID NO: 160962 - DNA, 370 bp, Zea Mays
gatattcaaaattcaatgcatccatcacccgattcaaccttcgcttcggtcgggtgccgaaggccgcagtcatcagctgatcttttcttttagtgtaattacccaaaattttgttgcacatggtttctatcatttctaaccattcttggcatggccctttaaactgtttctcaaacttgaaccgataaggcagtcgcacaagttctttcttctcctttgtcccctttagctttggcatgttccattcactcagcgtcgggaacaccttataggccagatattcttggactagatctcttgtgctgatctgctcggctaccacccggaattctaccacagcttcttggcacagtgaccccgtcgacatacg

SEQ ID NO: 160963 - DNA, 756 bp, Zea Mays
cttccgttcatgtacctaccactacatcaatgaaagcacaaatttatttctttttagtttttcaagtataaatttacaaaatgttcagatctgaaccaatagagtatagtataataaacatttgtagaacaagcctcacaagcaaaataaaaaaatgatgatccaaaaaaataagtcaagtgtccgtgcggttttcaaggctcgattaattaggaatttcatggcaaggaacttaaagatgtggttttttatgacctggagaacataaaccaaagatatgacattaactactacacattatcaaagtataaccccttgttaaggctacaacaacacaatacacacaggtacatgataaggaagtacataacacattatatgtctaaagtttgggtcacttatcctcgattcaccatatcatctaactatggaaagaaaaagagcaaacaatcacacatccatacatgagaacaactttaatctgctattgttttttaaccatgggaaatctttttggtatatatgagctgaaacatccatcggaaaaggacaataaacctgcagatacttctactgacaagactgtcacaagtatgtttctgttttttatagataaatataaattaatagctggatacctcaaatctccacacccttttggccagaaggtcggcatcatccaagcagtccattatggcatagcaacagagcatatgggcttcaatgacaaaaaatacaagtgtcaagaagtatctc

SEQ ID NO: 160964 - DNA, 363 bp, Zea Mays
caacatgtttacgctagcatgaaaaaacccatttataggcacgaaaaagcttatattcattaacctcggctcagactctcgatacctaggctacatcgtcgcatccctcacactgtcatagaccaccaccgaaagtccaacaccgtcgcaaccctcactcagagtcactccctcagcactaaccttaatccctaaatcaccaattccccattggcgcaaccttctataggcgtcgccgcagcctcctctagacgtcttcctattctccatccccagtcctcagtctctagccattcacaactcggcacggccagaggagattgtccatgcctccacacccaacgtccgccgatcgacgcccag

SEQ ID NO: 160965 - DNA, 834 bp, Zea Mays
aaacaattgactcacctgaagattggagaagaacaatggtaaacccaagtcagagggagcgagatcatggctcgacggaggagtatcagcaggaacaatttgaagaacgttgtcaggagtaagctcagccccatcagcagatactagacctcttgcgtctagctcgccgacctccaaggcgacttgtttgttcgaagttacagaagcatgcatccccgtcgccccatcggactgtggtggagatgacccaacatggacgtccatggaggtgtgggaaggagagctcacctgaacaccctcgggggctgggttgcagctcgcgccacccaccagagccggatcattaccggcaacacctctaggggctgggttgcagcttgcgctacccaccagagccggatcactaccggcgacaccctcgggggctatgtaactgccaacaccatcttcgaggactaggttttctgcagcagccacctctaaggctgaaggatcctcagtcacctccatgtgagtcgggcaatcctgaccaacgtcttgacattgaagacggccttccaaagtcgatgatgcatgagacactgctcgagatacctctaatcccatgcctggaatttcagaacaaacagccatcatgtcatcagcagtcggctccgatagcatatccttagggacgacctcctcaagggcttgatcaaaatctgatattgacagttcttgaaggctaacaagagcggacagagctggagaaggaatatcactataccccctactacctttgtaatgccggctattcttacgaatcagcgggacttcttcctcttcttcgttctc

SEQ ID NO: 160966 - DNA, 965 bp, Zea Mays
cttgttccagccgggatgcgcaacgactgacgccataatttggttgacacctgctcctacccctggcgaccccaagccctccattaattgcacaaatccggcccggagcttgtctgcccacgacgacggcgaacgctaaggacaaaccgaggtgttcccggtgattgggtgcggtctagctcaattgatcaggtcgacaagcatgccaagcgtgcctaagtgctaaaacaagggtgaggagggcgagaacggacctggagactgcggtccacgacgcggtggctcatggcagcgtagagaaccgaattgggggaagaaaggaattgaggcgctacggtggttaatcggaggcgagggctggtgctctggcttcgtaacaacctagcgaagctcactgtggcatcaatttatagagtgcgatcaggaatacgacgaatttaggcggggaaggacaggcagtgagaaaggggaggagtcaccggatctatctatcgtggcattcaccggggcactatcataggcgatggatatactacctacggcggtctactgcgacgtggtaacaccactgactacgtggcacatgggcggcaagcggccaatgccggtgaggatcatctcggccggccgcagagcaagtgggtacggtgaaccatccagtgaccgggtccgagcatatcctagcgccaagaccttttactccccgcagttatccactttgcgccgagcacgaatcgtggcggccggcgcaaatccaagcgcagggatcaccggtggcaaggttcagtgaactcaagatcttcttcagtctactgtaccattgaaaccttccttcagggtgccagacagagcgaattagagggcctagttcttcaatttttatgtgacaacttgatcatctgtctgcagagaaattgttgtcctataatccatctttgtatttgttatagcatccacaattgaac

SEQ ID NO: 160967 - DNA, 285 bp, Zea Mays
gcaagagctccaactgttccttcctctcctgctcggacgagcagccgttcatctgagagagcctattccacacgcaacgacccctcgctagcacatcatgtctctacactcgatcacttcgagtgcgtggcgccagcaggagcccaaggtcgccgcagcacaagaacacgagcgagcagcgacagcggcgagggtggcacgactagcggttgcggaactggcagcaacgagagcggaagtagaagcagcagaggcagagacagagctcgaggctgagtagcgccg

SEQ ID NO: 160968 - DNA, 528 bp, Zea Mays
gggcatcacacattacatctgctcaacctttgggatgatacccatctccctataattaaacaacattatcctcaattcctcaccctcaaaaagcttccgaagatccccctcgcctatgctcgccccagtcggcgaggacaacaattctcgtttaccaacccggtttacatggagacggccacgctacatccccatacgatggcgcctgccactccacaaaaattcacccacactatgttttcccaccacccttcgccgcctacacccagcactcgcactaggaagatccccagcaccctccatacgcggcgaagtctcagccgcagccacatccaacccaacaaaataatccaagccttcatccgaggactcctccgtccaaggaaacgaactcccagattcaccatcggactcaaaacactcagacatagaaccaaacaaattatcatcggcaggcactacggttgaggccgccacaaaatcagtatagtcagcagtggttgcttgtgcaggcccaaacgtcggaac

SEQ ID NO: 160969 - DNA, 730 bp, Zea Mays
caaccccctttaatatgattaacattaacgagttggtctatctttaaagtaaagtaaataattctccaaacagttttagctaggtaacagtcaaagaaaaggtgttgtatgctcttgttctggttacagaagctacacttcagatttccttgccatctacatttggctaagttgtctttggtgagggtcactcccctacctagataccaaagaaagatttttatcttaaggggtagttttagttacaaagcacatcgttacgattataattggggcatttattaaaatatagtacctggatctggttgagaaatcccgtccttatgagctccccacacgaaagtgtccctcaccggattcaggttaactggagtgagcaagtgtaccaagttctaccattccacgagtttaattccaacaatggatctgcggaaagaaagatttagatttgcatgtgacaacacttctgcaaccagcgaggtcttattacgcactatattaaaaatgttcgggaattgctctctaagaggagtattattaagccatttatcctcccaaaatcttgttgtttgaccattccccacctgacagcatccccacctaaggaattgatccttgacgttcattaggcccgcctagaaatgagaatcacccgttttttggtcacttgggtgagggatttgcctcctaggtatttgtttcttaggagtcgttaccacataacatcttc

SEQ ID NO: 160970 - DNA, 553 bp, Zea Mays
ctgtgccataacactctgtgtatgtatttattcacatttcatatacttatgactatgtgactaatacgtgctcacctcttctgtcatttcagtgaccttgcctgcccgtgagccgtctcctgtcctgcctggattctctccctctcgtgtgagatttccaggtagctattcgttcttttgtcatcctatcggctgttatcgacttgtgcttagcttctctctctcatttgcagtcgttaggtcaggatgccatgcacaaagaatgtgtcggcgccagggggaggagatgacgaggaccctcctcgccccttcaggcaggtcaaggggaagaaggtctacttagagtagaaggaaggccgcaagaagcggcgtttggatagagcagcccgagcggctcttgcagcagcggcagctgctgagcaggctgagagaggagctcagctacatattccttctgatcagattgcttactgagttcgtcgcctcgcctctcggcctcgctcctccacacctattactcccaccactgctaccattccagcacccacttcgc

SEQ ID NO: 160971 - DNA, 663 bp, Zea Mays
catggctttgattttcctgcttctcttacctctctggttcgtagtactcttcagtggaggaagctgtggccacgaggaatgctgtctacgacctccagtggccctcaaacaacaacaattatctgatcgctgaatttgtcgatccagaagaggtaaagctcaaacttgaaactccaccatctcaaattcctcctatcagtctgagcacagctacagcacagcagacagcaaccttccaacaggcaatggctaaccaaactctagtacctccccatgttcctgctacttcgagaggtttattgcccactccagcacggtttgccaaggtgcctcccacctctgaccctggaccagcaagggagagccttcctccccctccactgagcctggaacctgcccggacactggatgagctcttcaagaagacacagacgtacccaaggatttactacatgccactgtcagaagaggaggtatctgctaaacgtgcagctcacgacaaaggtagaaggggatagtgggctttagtttgtcgctcaagctggtattttggtaagtatcttgtacttgtcacagctgttttcagatgcaaccatacttgtcacggcacagcgatcgacaggctctcttctccgcagctgactccaccagaccagcagctgc

SEQ ID NO: 160972 - DNA, 901 bp, Zea Mays
gtagagggggagcaaggagcgcaatgaggtccaatgagcgcctgggagatcacttgagaggctggccaaacaggcgcgacggcggacccagtcaccccaccccaagaggaacatgacgaagtgtggaggcggtggatgagtttaaagtggaggcaggtgttgaaccactcgtgatctcggacgcctaggccaccagcatttttgctctcaagcaccatgtcccaagggacaaggcatcgcgacccacatgcaacatccttgcccgactagaggaaattgcggcgacgttgatccagtttcttgatggccccttttgggagctagacgactctcatgatgtagtttaggtgactgtcaatggcaataccaagcgtcccatggggttcaggagagacgactgccaccccgcgagatatttatcaattttagctatggtgggggagaaaaggtgcaggcagagcatggtgggggagagggggaggtcaaggtatgtttgagggaagccttccaaccgaaagccgatagaggaagtgatttgctggatgtggtcagagctcaagtgcatggggacggctacgctcttgctgaagttgatttttagctgcgtcagggggctgaataggtcgagagttgtttttaagtgagaggcatccttggggtggcctttgaggaggatgagggtgtcgtcagcgtattgcaggaccgtgcaaggttcaccggcggtgagcgggcgcttgatgttaggctcccatttcatgatcgcctatagcacatcagtgacaaggatgaaaaggtagggggacagagggtccccttggcgcaaccctcgtttacaggagaaccatgggcctagggccgcattcacaaggatagaggtttttgaggaggcgagaattttttt

SEQ ID NO: 160973 - DNA, 785 bp, Zea Mays
tcttaatctcgtgttcgtcgcacaacaagcagttgcagcttcggtcgtaagggagtagaaggtcttgacgtggaactcgtacatggcttcgacgagctagatgctaggcaccagcaggcacacgggtgacaacgaggcatggcagatttcgacgaggcgaagaatgacgaccaagcgagcaacagcacgactgacgctggcgtaggagatcggcacagcactggcaaactgcgaaatctggcgagggttgacagtgctcgacgtgagcagagcggtggacacggcggtgtagcagcacgtcgtagatgcggaggaataccagcaacgcggtaggaagacgacggtgagatggctgcacagtgttggtcttcggtacaggggcactgagtattagtggagaggtgtgagcaggggcatcggcgaacttcggtgagcaggggtatagactccggcgaggcaccataacgaaccgagagcaatgcaaaggacggtgcagcagcacgcgtgtaccaacaccacgcggcgagcagcacaacagggaggcatggaggagtcttcgagaatcggttcgcagggatacgacgtcgagctttataggagcagggaagggagaacgtcgctagaatgaagtaacggagaggaaactgtcgccattaatgggggagaaacggctgcaataaactccataacgtggggagaagaacggtcggtcgcagggttgcgcggggctcggtcctggcgctgcttggcgcgggcgtgtcgggctcggccgtgtcctggcgctg

SEQ ID NO: 160974 - DNA, 870 bp, Zea Mays
aggatcgagttctctggtgccggtcttgctgctgagctcggaggacttggaatttcctcttgaggtgacttttttcttcttcccttgctctttccacttgtatggctttgtttgagaggtgcgagaagctgaggaaatcttggctggcaaggatggtcttgagttctggtcttagccctttcagaaaatgggccatcttcttggcttctgtgctgacgtcgtcaggcacgtagcgagccaattctgtgaatttgtgcacgtactcactgacagatcttccaccttgagttagttaccgaaattcatcttccttgagctgaacaatcccttggggcacatgatgctctcggaaagcagtttcaaattctgcccaggtagcatctctgacgacagcgctgaaggtatcccaccatgatagggccatctcggaaagttgatgagcagccaattgaacacgctgattctcagggcatccgatggcttctaacttcctttttatcgtgtgcagccagtcatcggcatcgaggggattgctggatccagcgaatgcgggaggcttgagcctcagaaaatctcccatcttgtcttgtggtcttccaccattcgtgcgctgattctccagacttctagtgaggacttcaatgagtcgggtttggttggctagaacttgggctaaatctaatggcagctccagaggtgcggagaggtgggtctcactcccttctccaccggcttttccttcagctcctaggggaaaccctgctccaatcccggaggcggtaggcgtggttttatccgaagccatctgccagggggagagaattactactatgcatatgccaattttttttcaaccatgttattttattc

SEQ ID NO: 160975 - DNA, 694 bp, Zea Mays
cggcgatgagcgcgccctccggtgaacttgtactggccgggatgcgcaacgaccggtgccctcacttggttaacacctaattccaattctggcgatcctaatccaaccctcaattgcacgaatccggcccggagttcatctattcacgacgacgacgagacccgagggaaaactgaggtgttctaggtgactcaacgcggtctagttcaatcaatggggtctacgagcaacagaagacttaagggatgctaaaacaccaagcagagaggcatgaaccaacctgtagatagctggccacggtgagaagctcacagcggcgcggaaaaccgatttgggtgaaatcccaaattaaggcgctacagtggacgattggaggcgaggagcgatgcactgggcgcataacaacctagcggagctagctatgcactccatttataaagatcaacagcggtggtgtccaatttggggaaggcacgctagcggccggagagagggggtaagttactggcgcgagctaccgtggcggtcactggctaatgagctacggcggtcactggttactctccacgactcgcgacgacgtggtaaaacagcctaaggcgtggcgcgaccgaggtaaacggcggcacgacgacagcggtcgcatggacacgtcgccggtgcaagtgggtacggtgaagccggctcaatccac

SEQ ID NO: 160976 - DNA, 735 bp, Zea Mays
atgatttatggtttcagcctcttggtcgcacaaggggcactgctctggtcggtctagtcctctttttctgagcctgtcagcagtccagcacctattatgttccacaagccagataaagaacttgcacttcccaggagcccaagatttccacacacgctctgctggttcgaactcaactgaaccaaggaagagagctttataagcagagctagttgtataatcctctgaagcactgaatttccatatatgtcgatcccttattccaggctgaagcacaactgcatcaagcacttcacaaagttccaggaattcagcaatgactctgactgaaattgctccatttacatcggagatccaatggaaattagggagagcatctttgaccaaccgtttattggcaagacgcaagggcaccatatcaaacattgcaggagctatgtccttaatacatctcccatccaaccatctgtccttccaaaaaagggtattggctccatcaccgagcttagtaataactgctgcagcaatcagattttgtaccaccttacaaacatgagtggggaagtcggtccaaggcctactgggatctgttttctgcagccatggccaacgagctctcagagcccaacaaaggctctttaactcactaatcccaagaccacccagctccttgggacgggtaaccttaggccaagccaagaggcaatgaccaccacagaactctttcctgcccct

SEQ ID NO: 160977 - DNA, 1266 bp, Zea Mays
gcatattacagagaagaaaattttagaaccctaattctaatcacttgggccatgtgagacaaaacagaaatttggtaaacagacatgaagcattcagtatcctgagttgggctaaatatagaagttgaagatcataaaatatatattaaagattttaaggaaatttccccaaaataaatctaaaactgccccaaatcgatcactcaactagaagaaccctagggagaagtcagcttttctctaagtctccctcaacccgaattcaaaaatctatcgtgttcacctagttcctagactcaaacccaagtggtcgaatggacaaagtggcacctaattacctcagacaagccctggtgaagtttgacaccaaaccaaaatcgtttaacacgccttggcatggtttttgtcgcgacccgaacagggtgaatgacccgacttgacactagtgtttatcctcaccctaagcatatctcagctcgggactcacatggaaaagaaaggatttggagcagggaagaaactctacatgggaaccttgccgagatatgcacgtaagggcagctaaacagacgcttggacaggggcggaagcaatcctccacgtgtttgaccgcggctggcactcgggagcacgctctgaccgcgcccgcgcacgccacgagctctgattggcttgaccatgtgcctagcaccgcgcccaagctcgagcctcgcctaaaagaagccccagccccttagctttccctcccgcatgccccatactttttgttggtgactagatgtcggtaatcgccaaaacaccatatcccggccactctagcctatcaccatccagtctagctccccggtcagcttccctagagactagcaaagcttcccagccactcagaccgaacactacctcgttggagaagccaattcacctcgccggacatgtcccttccaccggttccctcggtctaggtaatctagccacacattcgtcgattccctagacacacacactccctgtcacttagtgaagctccctgtgcggtccaattgaactataccgtcgtggtatggctggtacaaacatcaccgacaagctctgacgcctgagtccatggccagaccagctccgggcaccatagacgccgacccgtacctcgacgtgaccgctagaggctccccatcctcacccgacccttcgtcggaaccctaccaacgccggtaagctgctctgccgtctctttcactatggatactgttaaacctagctagggac

SEQ ID NO: 160978 - DNA, 277 bp, Zea Mays
tggggaggtgaagatggatttgtggttgcggggcggtgggacaacacgaaatagtggtaggagtaggcttttgtgatggactttaggagtcccaatgaggttggtaaatgtagagatgaaattaaattttatagtgagtgtcggtgtttggaccgcgggtccttaaccaaccattaaatgtgttgcgtggccaactctagatggtgtgcgagtagacacaagcgattatcctgattcgggctactcaaggccctatttccagtagagaggatgaggc

SEQ ID NO: 160979 - DNA, 420 bp, Zea Mays
ggcaaggcaaaggttgcaagggagacccctcatgcttagaggctccttctttatcggcttgtgctctgcacaagcatggtcgccatgcgcctacagaggcactgatacaacacccattgagagggttgtgtactcttagacgagcatgattagaggaagaatctaccgtgtagtgttgtttgctctagtcaatgcacgatcccctataggatgcagattttggagaagtctgggctaagcttcgatggcattgatgtttgggctcactgttagagttactagagctagtgtacaaatgctccatcttaggaaatgaaatgtaggagatgccatgtaggcaaaacctagcttcaggtatcaaactcccaacggatgacactaaatgtcatagcaaagacaccagggtaccaagagcaccag

SEQ ID NO: 160980 - DNA, 344 bp, Zea Mays
agcccaagctcgacagaagagttatgtagacaaacgacgtcaacccttgtactttctagttggggattatgtctacctcaaagtttcaccgatgaagggtatatcacgtttcggcgtaaaggggaagcttgcaccccaatacattggtccttttcctatccttgaaagatatgaaccagtggcataccgactccagttacccgaaaccttgtttgcaatacataatgtgttccacgtgtctcaattgaagaagtgtcttcgggttcccgatcgaaccattgaagtaacggatgttgccttagaaccagacttgacatattcagaacatcctattcgagtcttgg

SEQ ID NO: 160981 - DNA, 549 bp, Zea Mays
cttaattcctggtgacacgagtcagggtatcgatgatcttgatgggatattccatgtaggttagatcaccctacactctgagttcctccataggtatttgttcatctggcacgctgaggcacttcttcaactaggacacgtggaatacataatgtacatctgctagatggttgtgtaactctagttgataagcccacttccccaactcgctttagggttttgaagggtccaacaaagccacgagataactttcctttaacttttaaatcttctcatgccccatattggtgacaccttcaggtacacgtgatcacctacctcgaactctagctgtcttttttgggtctccgcatagatttgctgtcttgaatgtgcagttctcatgttctcccttattatccgaacttgtttctctgcctcttgaataatttttagtccaaagaactgtctttcaccggtctgatcctaatacggcggggttctacacttccttccatataatgctttgaatggggatatcttcaaactggtctgataactgttattgta

SEQ ID NO: 160982 - DNA, 460 bp, Zea Mays
gcgctgggactcatggttaatcatgggcagagaaagatctcaactcggggataagagagcaagctatctccagactgttcaccgcgacacctgtcgcgcagtggacgctagtgtcctcgtcggagttcactggtgactataaccgcgccacgtgcttagaagatgtaccatgtcgccgtagctcgtggtaggtagacagttcatcgccggagtaagtacccccggggcgcgccacgattgttcgcaccaatgactcatccttcgtctcggccgccgatcttgctgcgccaaattggacaccaccacttaacctctctataaattgaaggccgggtcagctgcgctatgttatcacgaagccgaagcacccgctcccaccctcaatcgaacaccaaagctcacgaatttctgatttcccccaaaccgggtttccgccactgtgaaaacgacctcgtcgtgg

SEQ ID NO: 160983 - DNA, 893 bp, Zea Mays
gatgcttttgaagatcccgacaatattttcgtctacattattcgccaccgcgtgtaactctttattaactataaaggactttatgcttattatattttaattccagacactaatagcaggtaacacgtatgtgattaatactttagataatctattaattcggctaaaataccttataatttaggataaattttggatgcttctgtacggaatatctaagacgcccttcttcatccgcatttgcagttctgtactcatgcacttgtcagtgtcaaggcttgccaatgttcagccgaaaagaaaaacagctcacggtccacggaaaaaataaatctgtcgctgggtagcccacgatcgcataaatgaagatggttggcgatcgacatgcagcccgccagcggtccgacggaatggatgattggggcatccccacattggttctgtaaaagtggctgatcacttatcctttagaggccgttgcctagtttgttaggggaccgagtccgccgcatttaccagcgcgctgtgcccgcgtagtggccgcgacgcccgcccaaagcagcatgcgtggagccatctcctgtatttatacaccagagatgatcaatacaatacgagttgcatctctcatactctttcatggtatcattcgtctactgatccttccgtctctttcgctgcctatcccttcctctcctcgtctatcgtcatgtcagccagctcgagctcgtcgggcaccaatccgttcgccgctgctaccgcagtagcgatctcggttgccaccgctcaactaatcaacatcaagtcccacgttcccgtgatgcttgatctcggcgactccaacttcggcacatggcgcaccttcttcctcatcgcgttccgcaagttcagtg

SEQ ID NO: 160984 - DNA, 1035 bp, Zea Mays
tcctaatgagttatgaagcaacaatatcttcatacggaggccatacacttgtcatggccaaatgcttcgtcatgtcggtaaggagtgttgctcaaacatggtaggtattcttctcttcgactaggaacaataacctcttggtagaaattaaaggacatgttaatcacaagttttcaaggattctagacgaagcagtcaccgcccaggcccttttccaatgcacacaagaccacgatgaatacttgcaagcctatgcccggagattcctttggcttcaggctcaagcaacaacagtaccaaatgagatagttactgaggccatgatgaagggggcttcctctaggaccactggcacaatacttcgctagaaaacccctcataccctagaaaaaattctccagaagatggatgaatatatcggagcagataatgattttcggcaagggaagaggaggccttcaggtattccaagatgaccaggggcttcgacggacgtttcaacccaaggcatgtcaggaccatacataatccaaatcagaataaagacaaaaacaatcacacctagggacaacaaagtcactcccaatccacaggaacctagcaaacaccttcaaaccactggccccaagaggtggggaggggaggtaggagttttggaggaagattcaacctaaaccaaggaaactattctaccttttttgtggagaggacatggggcatacaacaagaacctgttaagtcacgatccaaaaagcagaaggaaatcgctaaagtcgaagcacaacagaatcagtcaaagcaggtcctccacaccgcatcatactattctccatacattctagagtatgttcgcaaccaacaaccttcagcttcagttgcttcgacaagtcactcttctgctcaatggatcccacctcagccgtttacacaagcaccaccttcgccatatgagcagcaacatccaggacaactcaaggtctaaccgttgttttctgcacaagacgtaccacagtgggacacaagggaacaatccga

SEQ ID NO: 160985 - DNA, 404 bp, Zea Mays
gagaagccttacagtgggggcccttctgtgtcgaagagacagagtgaccgagagagtagagagagagggagggagagagagggagccttgtccgtgtgggtcaacgaactgggcccctttcctgtatttctgacatggcttcgttctccacactagctcctgtagtgagtctattgctgacgtctagtggaagtgcatggtgggtcccacgattctgtcactagacatggttataagcggcgtggctccacccaccgcacgctttgtgtctcttcccgtccttcacagtacacctgctcagtatgacgtgttgttccgtcctttccaatgtgcgcgctactgttgggactcatatgctgaggtctcccccgaggcttgtctcatgcagtgtgcgtacattccgc

SEQ ID NO: 160986 - DNA, 586 bp, Zea Mays
tcggcaagggcgtctcgggcgagcactggcaggcttctgaatatccaatgttataccagcttctgggagaggcgccaccaccaatgtctcggcaggagcagcattagaagagtcctcagccagcaagtcaagcatagcacttatttctgcttcactaggatccaaaggcacctcaaagtggacctgccgttcatcatcaggaatttccccgagcgaggcaaccaaagtgttaacttcttcggcagagggtcgcactctaaggcccaaaccgccatcagcgacaggtggatttgacacaaaaagagtgaaggccttgggaggaggcagattccatgctgagtatgccactggggcaccaacatttgataccttgcctctaagaatcatctcaagtcggttcaccaagtctacagaaggaattcttctgttggtaacccgagttgaatcagctaggcctcggtacagataagccgggtatgccctgtctttcaacagctgaatattcttgaaaacaaaatcagcaaccacagcctcagcagtcagacccctctctttcagcagtccaacttcagctagcaaagccccc

SEQ ID NO: 160987 - DNA, 464 bp, Zea Mays
accctgctaacggagcaatcggcttaagtcggcgatgacttaagacggtgcgacatgctcacgcttacttaactcggggtgaccactataccccgctaatagagcaatcggcttaagttggcaatgacttaaggcggtgcgacatgctcacgcttacttaactcggggtgaccactataccctgctaacggagcaatcggcttaagtcggcgatgacttaagacggtgcgacatgctcacgcttacttaactcggggtgaccactataccctgctaacggagcaataggcttaagtcggcgatgacttaagacggtgcgacatgctcacgcttacttaactcgaggtgaccactataccccgctaacggagcaatcggcttaagtcggcgatgacttaagatggtgcgacatgctcacgcctacttgactcggggtgatcactatacccctaataacggagcga

SEQ ID NO: 160988 - DNA, 845 bp, Zea Mays
catggtgaaggggtacagatcgatcttggccgcacaattggcaatccaaggtctggattagatctgcaaccatctgaaacatggtgcaacataggcccttggatatggatcaaacagctatggctcctaagtcgcgtggattgcatggtgaccgctcgattaaggatctacggcttggactaaatcgcccccaagccgaacatccatatgtgataaatgccacacgctggtcatccaacggtcgacgctaaccaaagctttcccagctggccccgacggcgccgcccacaaactacggcggagcttcaccggcgaaccatgcgccccatgctctagtgctcggtttctcaatcttttaggtgctaaacgatgtgcgaggtgaaaccaatcgacgaggcagggtctaaccgagggtggcggcgcagagaacccccaacacgaccgactacggatccgcggcggcgctaaggttcccgcgagcgattcacgtagctagggcgagcatctacctatgattctcggtgttgtgtaacaaggggtaacgagcgggaggtaggacagtttcttactggcaacggcgcggcacagagctccaattgcggaacaatggcgttagtggcggaatcgcacggcggcggatgagatccacacggaattccgcccagtcctcactgcaacgaacgctcccgcaccgcgcacaacctccacccacgcaaattgaaccgcgaccgagagttccgtggcccgaatcgaagtctcctcgccggtcgacggtggcggcagaatcgtccctccccacgagcgcccggagcgatggcggatgaggctaagcggtgaggtgaaag

SEQ ID NO: 160989 - DNA, 617 bp, Zea Mays
gacaggtgaatgacagtctcagggctatttaggctgttgacccggatatggtggaggtgggatcagtggatgccccggctctctcggtagctccggttgaggagctggaggcgcccggtcaccctccagggttggcgttggatctgacagaagatttgggtggttcgacgcaggatgtcatctcaccggttaggccatgcttggaggttcctttggaggtggtccatgtgaatgatttggaggtggatgtctcagctgggcagcatggattcgggtgctcccatttggtggttgatggtagttccgttattggctctgtcagggcgagaaggcttgggtcttgtcagtcttccagggctgatagatggaaatctaagccacctgtgtttaaagtttattccagaagaagattatctcaggctcagattgttcaagaagaccttttgttgcaatatgtggtggaaatgattccacctttggaagagttcaagtctgcggtcactaagccttctgatggcctgttaccaccacctcccccccgaagtaccaaaagaagaaaaaaagcaatgccaagtgattttcgaccaaggaggagtaggagagtggctaaattcccc

SEQ ID NO: 160990 - DNA, 614 bp, Zea Mays
gtgggtgatggtgatagagtgtcgatcgggcgaggatagtgtggggtaggtgcagcggccacctcacactcttctccaaggcgagtgatagcgacggaggtggccgtgccgggggaccaggcactaggcggggatggtgcggggtcgatgcagcacccgccttcctctcttctatgaggcgagcgacgacgacggaggtgcttgtgtcggggggaccaggcggggatggcgcgacaacagcgaggattcgggggatggcgcgaggtggatctgagggaggggaggttaacgagaggaagcgaggagtcgggcgacgtggattgcgacattcagtgagcttgcgtggcccatggtgcaaagcagaagaggagaggagtgcgagcaaggatggtttgggcgcacatgtggatcggtggagcacagacggggatggaagggatgcggggaggaatatggaaggggcgagctaggatggaagggaggcgggggaggaggatgacggtcggttttgccggtggggatcacagtcgaggggcgagggaagggggtcacggaggcaggggcgggcgtggagaggcagaaccgtgcaccgtgtgaatgcctacactattgtc

SEQ ID NO: 160991 - DNA, 821 bp, Zea Mays
gattaggtagaaatctaccctctcgacctgggtataaggacctcgggtgcagccgcctgctccgatctatcctcgcgtgaaaatcgttgaccgccaccacgattagggagggaatttggaggtcgccgccgccgtggggctctgtcacgccgctgcagttgacctccacgttgtgctgtcgtacgggcgagtaagggcggtgcttgagctgcagcatcgcgtggcgttgctacgcgcaacgttggccaacgaattacgacctcgtccgcgcggtattgctcgccggagcttggcatccaccgcttaccgtgggcggggctctctgcacttcgattccaggtaaggaaaccctagaccatttcgccttgatctcagtaccgtgtagcgcgtttcaacttgcgagttggggcactggttcgccggttggatgaccacggcggagcgccgccgtggggatcgcggcgccgcgggagtcctgtgtccagaggtgggggaaggatctggggccgtcgatgcatttatgctcggccaagatcagatcgggataggattgtcgtgcaccgtcggatccacggttgaccgctaggatttaaagctgcgtatcattttgctcgggcagtctgagaccgtagatgtgagatcctgcggtagaaagcgattctgggttgcattaaacgcctaccgttagatcgggatcggagggggcctggtgccgtaccgattcataaggctcggttctaatcgtggccgttcatgcatgatctggcggccagattcagaccataccccttcgccatacacatttcacagaaaagaccccc

SEQ ID NO: 160992 - DNA, 716 bp, Zea Mays
taggctccaccaaatcgaactcagcagtggaggcgacgaactcagcagtggaggcagaggtcgaagggagggggagacgccatctagccatggagacgccatctagcttgaccttctcgacttgttcttcggaggtggcttttgcgaaggaagaaattagaaccattaagtagattgaagggcgaggaaaaacaatgaagcaagaagagacggtcgtacagtacctgggggcggagacggtggcggattggggctagggttagggttttgggcggggcgctggaggctgcgggtgaagcggaggaggtggtcgttgaggccgttcgacataggggcggcggcagggagacgacgatccttggggacgggttcatcgatgtcgtcgtcgtcgagatcgccgcagaggtcgaagggaggggagacgccatctagccacggagacgccaaagaggcaagaggcaaggggacagaatcaaatcgaggatgcacagtggggatgggtgctcttcctcgtcagttcacacctctctcacttgccgaggagaggaaggagagggcgagaggcagcagcgagcgtgtgtgacccatgctccttaggcgctagacatgcgggggtggcagcgaggatcccgcatggttgttgggatggaggcggctacgcgcatggaggggatgggggaggctgtgtgcatggcggtgatggggatggctgcgcg

SEQ ID NO: 160993 - DNA, 871 bp, Zea Mays
gccggagctaaggaggggcgtctggccagcgaaggtgagtacggggtgaggtgaggcgcgcctgggaaggctttataggcgcgggcgagcacggccgagggcggggctctgacaagtgctcggggcgtgtgcgggcgaacgccagtgcgcgctctggcgcctggcacggcgtcgagcacgaagcagcgcagagagaggtcgagttcaagagcggattggctccaaaaatctttgagataatggccatgatcccgttgagagatctcttcctctaacattcctttgtcgtttgtgtgtggaggcttgcaggttttgctgactggatcaagagatagagaggggagaaatcaggtttgtctcactgccgcacacagagagaaggtctcgggtttgacgtgtccaaggcacgcgtcccgatgccatcttctgatatgaggtagaggggttagttaggcacaattttgtcaatggggtgattaggaattaagctaggaatcaaggtgaacacgctcggtctttggctcaagggctgaaattcagaattctgaatttcagaaatccctattgaaccctcacttgagaagcttgtttggagtttttattaaactattttggccaagcttccataatctttatttaagtttatttagtatatttcaatgtttataattggcctaagccatgattttatgtttttcatggtcttttaccccttttctttatttctacttagatagcttgattagggttggtgttagggtttcaacatttttccctttttgaaaatcttatttgtttgtaacatgattctttagatatacacttagtagatcttctattattaagtcaatttgatgtttcatgctcaatt

SEQ ID NO: 160994 - DNA, 628 bp, Zea Mays
gcgagatccttcttcttcctcggaatagagagagaaagagagatacgagcgcgttcggtcatcggcttaccggcggtgaagttggccaggcgaggtggcggacaggtgtggttgacggaggggaactcgatggtggtcttggctcgacaggtcacagacggagacatccggtccacgcgcgccgacggagaccgacgaacggcgacatcgacggtgatgctccggttgtctttcggctcaggaaaaagggtgccgagatgacgcatgagacggggatgcgggtgcggggcttggttttggcaaaggcaggaggtgagagctcgggagtgagctagtgagtgatggccatggcggttggtgtggtgctggtgagaggtggaagaagagagcgaggtgagtgatagcgagacgagagtgagtgggagagagcgaggcttgtccactttggccaagtgaagccaggcgcggcacgaacgaggcgcacgtgaggagaagcagcgcgtgctcgggcgcgagctccacgcgtccccgcggctgccacatggcgcttgccatctgcaagggctgcaggcgagctagagacaaaacagagagctcgaaacgtcgcctactccacccgatttgctct

SEQ ID NO: 160995 - DNA, 729 bp, Zea Mays
gtcagaagaatcttcagccaacatgtccagcatagcacttatctctacatcgctcgggtttataggcatctcaaagtgaacttgcctctcatcattgggaagatcaccaagcgaagcaaccaaagccttgacttcttcgggagagggtcgcactctaagacccaaaccactgttgccagtaggaggattggacacaaaatcgaaaaaaggcttgaaaggtggcagattccaggcagaatatgcaacaggagcaccaatatttgatactttgcctctaagaatcatctccagtcggcttaccaaatccatagcaggaatcctcttgttggtaacccaggttgaatcagtgacaccactatacaaataagccgggtacgctctgtccttcagtggctgaatattcttaaaaacgaagtctgcaaccacagcttcagcagtcagacctctctccttcaacaaacaaatctcagcaagcagaatcctggcttctgttatctccaagtccgtgggggattcaatccaacttggagcatgaatatctggctgtctccctgaccgagggggagggacttgccatgattttctacaatgaaccactccaagcgccatcctttgatgctatccttgagtgggatgtcaaggtattctatcttcctcccatggcacatctccaaactcgcaccacccacgagctggtgctgccccccggccatcccaggccgacaatga

SEQ ID NO: 160996 - DNA, 1654 bp, Zea Mays
ggcgacctttttataggcgcccgagggaaggggagcggcggagctcggcgggcaccggtgaggtgcacagcgccggcattaatgccgcatagcgccgccgatgagactccacggcggggcggtaccgggcaaggacgttggtcaaggggggggaggacggggcggtgccgaactcttcctgtgcggcgaggggacggtgatggaggggacggcggtgaagggacggcggtgaagggacgacagagcgttgtatgcggggaagacgacgcggctgaccggtggagccggtctgccagagagggaaaacgcgcgagcgagagggctggcgggtggggctggcgtgtcagcgagagcgggtgaggggagcgcacgggcggcttcgcgcgtgagtaggccggctaatgggccgagggagaggaatgcgcgggcgcgcgggaggggaggcggttgcgccatgggccagaattggcccagcagtggggggattcttttcctttttctttttaccttctcaactcatttcttatttgtttctttttctttttgcacaaaattatttggtggatattctaggtgttggaaaataaaatctaagtgaggtgcttgtgatcaaacaaagtgtatgcatatgatgaaagaaaatctaagggagtttttggaattagaggatgaaaagaggggaggggtagattagggtttcaaacctaggttaggattttgggatgttacaaacctaccccacttaaaggaatctcgccctcgagattcagacggggctcgagaaaagataagggtattccttcctcagagagtcctcactttccgaggtggcttcctcttctccatctctgctccactgaaccttacagagtctcacttccgagttgcgggtccttctgactgcttagtcaagaatcttcactggcttttcccggtactggagatccttttgaatctgaattgtatctgcctcgatgtggttttctggtacctttaggcatttgcggagttgagacacatggaacacattgtgaatatctgacatgggttctggtagctcaagacggtatgttgcgggtcctattcgggcaatgacggggtagggaccgacgaaacgtggtgctagctttcctttcatttgaaaccttttgacaccacacatcggggagaccttgatataaacgaaatctccttcctcaaatcgagttcccttcgtctgttgtctgcgtaactcttctgtcgactttgagcttcaagtaatctcttgcggatcaaggcaactttctcttcggcttccttaacaaagtcgggtccttctagtgtcctttcccctacattggaccacattaggggagtctggcattttcttccgtacagtgcttcgaacggtgacattttgatgctggcctgatggctgttgttgtacgagaattcggcgtacggcaaactggactcccaatccctatcgaatgttagcacacaggctcttagcaaatcttcgaggatcttgttgactctttccgtttgaccatctgactgggggtggtaagcggtgctgaaatctagcttggtgcccattgcttgctggaggcccttccaaaattttgaagtgaactgtgttcctctatctgatactatcttccgcgggatgcca

SEQ ID NO: 160997 - DNA, 413 bp, Zea Mays
ggataatgagcgatcggcagcacgatgttgtcgctaggttgggattttctagtatatttgatttgcgaactgatgccttagagagcagatcactcatcaggtagttgatggataaattggatccacatgacatgaccatacgcccaggggctggcaaggaactgaagataacaaaagatacggttcatctgattttgggtttgccatgtgctggaggaggcagggagtttactgattggtacggttaagtggatgctgctgcaaaactgagacgtgatctcaatgttggtaaagaagaatttgatgttgtcaagcttcaagacaagatagtgcttggcaatgatgatgagctatcaattagatgcttttttctgattctattcaatcgacttctttttccttctgcttcttgg

SEQ ID NO: 160998 - DNA, 672 bp, Zea Mays
atttcattaagaaatagaacgatagagtttttacaaccaacacaggtcacgaagcccgccattcaacaaggatggcacatggctacatcccaccagagcaacgccaaaaaagggatcagggacacaggaatccaaacttacaaccttatttagatcaactaagtcttaccaaacacttacttaattgtctacaaccgaccactctcagctgcctgaaaccaaccataaccgatcaaaggcaaggtaacagacaatgcacacctagcaaatcagaagaccaagcagtttgtaagacagaacacaatcaccaattcaccatgtgatacttcttgtcaccggagcccacccatgcgtgcgattaaacacctctcttgccgtctctctgattcgcttgcttcctgcctccaacatcttttttgttctccctgtctgcattagtgcccagtaatccaaaagagaacaacacatgaagattacatcagtggggtcattatggagtttttttattaaagcaaacggaatttctggacttccagatcgcccatagaacagctccgcacccaactacaacagattttctgtaccccttatcaaagtttctaagccacaccccagttagatgttccacatctgacggagtagtaggcaaataaagtgcaatctgaatcagac

SEQ ID NO: 160999 - DNA, 1360 bp, Zea Mays
ccatatgtgaggccatctagcgtattttggagttcgacattcattttagaatacctgtggttgaacgtcttgttgtccatttgcccaacaataactatgttcagtatgaaccaggtgctaccttaacgtctctcctagagtcccccgtagtaaaaagttccatgctaactgagtggtttaacaccaatgcaagaaatcctggataccgacacctaacatactgtgatttccctactgagtggtcctggcactcttcggatcgactgtggcgaaaaagaaccccttgtcacaaaattggacggatgtactacgttcatccaacggccggtgaattgtactacttgtgcatgctattgatgatagttaaaggtgcaacgagttatgttgatctaaggacatttagtggcacagtatatgctacctttcgcgaggcatgtgaggcaaggggccttcttgagagcgataacgaatggagccttctctttgacgaggccatcgtctctgcctcatcgcaccagctacgccaactctttgtaacagttgccctccattgctcgattggcaatgtccatgctttatttgataagtactggctctatttcacggatgacattcaccgctcactcacccacgcactggccaatccgcgctacgttgtgccaccggaacaacttatgccgctgctgataaagaagctgacacaactgttttctaatagcggagggaatattgaagacttcaacttgcccaaactgtctgcacgaaatgatcccatgtacgaaaataggctgcttaacgatgaacttgacgttgaaccgttggtgttgtccatgcaaggccaatctcttctgtcccaactaaatactgatcagagacatgtctatgataccattatcggtagagttctatcttccttacccggatttttctttgtctctggccatggcggcacagggaaaaccttcctatggaatactctgattgcgaacatcagatcgaaaggaaagatagtacttgttgttgcttcctcaggtgttgcttctttgctaatgcctaaaggacgaaccgcacattcacgtttcaagatacctttcgacatgaacgaaacaaccatgtgtattattaggcgagggaccatgcttgctgaactcatacaggtatcatcattgattgtatgggacgaagagccaatgacgcatcgacattgctttgaggccttagacagaaccatgcgtgatatcctcttggaggacgaacctgcgaacgcgattatcccatttggtggcaaagtcgttgtcttgggcggcgattttcgtcagattgtaccagttgttcgtaagggttcacgatctgcgattgt

SEQ ID NO: 161000 - DNA, 845 bp, Zea Mays
ctggaataaaaagaaaaagagaaacttgtgtatagtactgggcaacatctggcccagacggcccagcaacacagggaacaggggagcgcccgtgctcgcggtggaaattttgcagaaaggccctcggggttttaactaactggagatgggtttggttactgttccaccgtgtcgctgacaacttgcagataagcccctcgatttctatttcttctccaaaaacacccctgacgtcgaacggcgttgcgcagagctccagcgagctcgcataccggccgatccacgcaacgactggcgtccaggttgggccgaagtcaaattcaagacctaaggactgtttctcccaaactaatttcataaacggtaatctaccctgctctgtccacggtgacagtggttaacgcggacactcaaccgcgttcccggtgaccaatggagttctagcttaattggatgggtcagtgattatcaagagcaaacaagagtgccgaaacaagaacgcagagggcgagattggacctgatttgggctggccgcggcgagcttggttctatggtggcggaaacagatttggggagaattccaaattcgtggattctagtgaatgaccgaggttgattcgtggtggctggacagcttactaccctacggagctggtggcacatgcaatttataggcgcatcgagggtcggtgacgaattcggccgaggggtgctggcggccggagaggggaggcgagctcagtgcgggagaaaaaggtagctttcaccgtggcagtgactccggtgatcgccggacatgcaaccagtgagtcaccgcgaggaagtcccacgctgagacacgtg

SEQ ID NO: 161001 - DNA, 280 bp, Zea Mays
gactaatcgaaggcacgggtgggtgcattgagtgcttgactacatggtgaagccgagggcgcgctcaatttatatgatttagggtcggtggctctcaatttggtcacggcgtactggcggccggagatagggaagaacacaggtggctgtgaccgtggcgttcgccggtgcaacggcccaaagactatactcctaagggtgccaccattactaccgcatagtaacaagctacggcgtggcgcaaccaaggtcaccggagcttccacggcgacgctggcgg

SEQ ID NO: 161002 - DNA, 492 bp, Zea Mays
gtcattccgaagtataaggacaacgggcacatgaccatcgtcatctgtttccccctcttcttctcatcagctttgatgtaaaaccattcacctttccaatcggttggccatttggtgcgataactgagaactagagcctttgtatccttgcgatacgcaaaattgtagcaaccaaaattttcatgaagaccgtctgccctggccttcgtctggtagtgcaactcgtgcactcggcagaatgcttcggcatctgggctcatcccttggcttcggagggcccagatgaagacactaagcctaacaatggcgttaggggtcagctgattaagatatatttcaaaaaaattcaagacttcccctatcatctcattcagaggaagtcgcagtcctcctctgaaaaagctcttgaaaaccactacttcatcattcttcggtgctggggtggtctcttctccggcaaatcggacaagtttcctttcagcttccccaaag

SEQ ID NO: 161003 - DNA, 1061 bp, Zea Mays
atcccaaccacgatgaagtggtgggcgtgcgtgtgccatggcgcgagacgtttgctgatgcattattggaggtgatacttttgtccttccctcggcaagccagaacatcacggtcacgacagctctccttgacaagcttccacaagccaacatgccagacgagcacataacccaatgtgagatacaaggtctgcttggtcttgtcgcccagcagcaagccaaaagctccatgtcacggtgacatgggcccaaaactagccaatctactacaactacatagccaggggtgacactccattagtgcagtggcccgagcacaacgctggagatgtgattcggtcccaaccccaccaacaccttgggtcgggaagggatgcgcgaagcatcccagacacaagacgaggtgggagggggcccaaaagacccgactacggtaattggtacaaccaacgctgcagtggtcgttttgacccggatcaagaccaaagcctaagcctgcccccatcgagccctcgagcctttggtcaccatatccttcgagcaccagtgcctcaatgatatcgggtgccacaaacatcgcaaaatattcaggagagtcgaaaccccaatctatggctctaggactaccgattggtgtgtcaagctagaggagcagatcatgactacttcataattcacaactgccccttatatttagccaactcgaatccggcatagttagagaacttgaggcctagctgcatctagggctgtgccaatctcgtagacatcttcgtcgagaacattcaaggcacgcatgtgagtcctggcaacccatgggatctcaagatttgccgacagaagtcagaagagacctttcgggattatatatggtgtttttcgtggcaatgtaaagatttgtccaaccttgccgacacggacgtcattagtgctttcatctcaggaacgatgagtgagactctagtgcacaagctagggcacaaaagccctcgcaccatgaaggaggtcctagaaattgtgacaaataatgcgttgggagaagacagtcatagcgatctttg

SEQ ID NO: 161004 - DNA, 445 bp, Zea Mays
gcgctcgtcaccttcctccgggcaaatgccaacgtattcgcctgggagccgtcgcagatgcctgggatccccagggaggtgattgagcactatctgaagatctatccagacgccaagccagtaagccagaagccccggagacagtccgtggagcggcaggacttcatccgagaggaggttcggaagctgttgcatgccgacttcatagaagaggttcaccaccccatgtggctagccaacccagtcatcgtgccaaaagcaaacgggaaactccggatgtgcatcgactacaccagcctgaataaggcatgccccaaggacccgtacccacttccacgcatagatcagatcgtggactctacctcggggtgcgactttttgtccttcctggatgcctactccggttttcatcaaatccggatgtccagggaagatatgaaacaca

SEQ ID NO: 161005 - DNA, 662 bp, Zea Mays
gtctgacagggtatttggttaagccgactggtggatggtttattaggaacaaaggaggcgccagtgaagttactcatggacaacatgtccgcaatctctctaagaaagaatttggtgcaacacgaacatagcaagcatattgacatgaagtaccacttcattcgttagtgcatccaggaagggaaggtggagttggatcatgttagaactgtaggtcaacttgctaacatcttcacaaaggcactagggtgggtgaggtttctagaactaaggagggcgtcatcgaggtgcaacaggtttaggcggtgtttgttgaaacaaactgtaattttttcattcaatcacttgcatgtggttaggttaggggagacacgtggcaagaggcatccttggtccacatcgtttctcggttcttttgctcttgagcgccatggagggcatccttgcatgcagcacacgtcgtgcggaaatgtcatcgcacatggtgtgtggcatggtgtagtactcggggccaaggtcgggcatgtatccatgcattgtgtactatacatatgcatcaatgataaaccgaaaaggatgcgacatttgtgcagcaccaatcatccctctcgtgtgagtgtgtatcgtcctttcgttcgtgctcgtcacggccttctcccacg

SEQ ID NO: 161006 - DNA, 616 bp, Zea Mays
attaacacatgatttatccacaaaaagttccacaaccaaatttgcaattttactatttacttttattttcctaaggaattagtcatttaatcttttaatccatatacacaaattaatccagtaagggagtcggggcggcgaaatggagacatcatcacaaaccgctctcgagacacgggttgcccgaccgagaaaggctatagaaacaacgaagtaagcttgttaggcctgtgtgataagggtaaaacacccaaagggcgacgaaaggttgcttacgaattcgatgaagcttgacttaggacgcatcggggacactcgagggctacagtcaggggtgaccgtgtcgcccctacacccacttttgaacctcctgggcctggcttacccaccaagcgacatctgagttgcttgggaggaccccatcagtcaggggcgaggaatccgtccccatctgatatagggacacatatagggcctttagaggagccacctcatgccaaaggtaggcttcgatgacgctcgcgcctgtgacacctttctctcaaaggaagagcacccccgctaggtggctttgaacttgagctctctcctcgggcgtaacattgtagctccaatt

SEQ ID NO: 161007 - DNA, 866 bp, Zea Mays
cgcgcggcaacggagccccgacggcgcgccggctcgggcgcgctagcaacagcgtctggtcgggcgctgcggccccgctttctgtgcaggacgcacagcccagcggcggtgcaggcagccgcggggcagggttgccacgcgcattgcacatggagtttgcaggcaccgccgtggggttccgggcccacacacgtacacgaacattgtccacgcgcattgcatgtagattgcatgtagacgtaggtaataacatcctgaaatacttacgatgttcatgcttttgatcctttctttttttttcatttggttctgatggccgacgctatcattttctcctgttctcgcgcgctgcacgcatacgagggcagatatgttctggaaccgctcgttcatggcagtgtcacggccttctcctctcgctcggtggaaagcaggtgctgataacgtgttggaataagtgttggaataagtgtaaacgagacacagagagtagaaaggaaatgacagttgtaagtctttattgtagtgaaacattgattatatacagactgcaggggtactttcccaaggggtgcgacccttgggttagtaacccatcggatgagtttgatcacatgtgcatatttcgtaacagtgtgcatagctcaggccagaccttattcggcacgggacaacatggcacgctagacatgttttgccacatagattagactaattaataatttcattatcgtcttactggagtttattcgtgtgggagtaatacatggcagataatatctgccaacaaggaagtaacacatgatcactccttgattattcctttcagtaatcaccaccacatattgttatttgtttctccatta

SEQ ID NO: 161008 - DNA, 1064 bp, Zea Mays
aaattccaggttctaatttattttgtgttcggttaagcccatcaggattcttgcccataggtttggaatattttttgggcagaggaggccctggattgcaaccaggactcgaggggccaggaacgaatcccatgcgagcgatgagaagacgtgctgcggcggcgaaagcgagaagacaaggtgtcgatgagcggggatcgcgacgacgacatcctccccaccgccggcaacctccactacgctgtcaagcttctatccagttggtctctctcttttgttagctagggttcttgagttgagtcatttctcggtcctagtgttcatggtagtggacttgtggcggtggctccagatccactgacggacttgcagagaaatctgatgtgtgatatactttttttgtttgtttcgcaagcaggcacacaccatgatgagatctagcaaggaatgatttggctagcagttggtatgcttgcatgattggtcagatagagtacaccatgattcctgaaaacatgctgtagtgtgatttaggctgctcgagggggcgagggactcaaatttctgcaggcatgcacgtgttacaactattgagctactgaagatgcagatattgtcctactggaacaaacctttgtccactagaaaagggctagcttcttgcgtttgcatcatacaattatttcttattggtgtgagccctcttgatagaaggtaaacctctgtactacgcctcaaaagaaggtgtttgggaggaaatgacagtcgtctttcgccttctttttgccaaacaacaaccgtctgaaaagtatatcagagtttctgattgtagtttgtttaatatgatagcacattattctgcactttagtttgctaacagttagcgccagtttaattagctaacaacctgtagatttttagttagctatactctgtcagtaaaaaaaatcttagagtgagagttagcaaaaactatgttcatataggtctgagaaggcctgcttttatttacctgtggctttgtgaggagcaactttacgtttgccctcctctgaaggaggtag

SEQ ID NO: 161009 - DNA, 731 bp, Zea Mays
gccgtggagtttttttgctattatggtacttgttttaataggcttctcccttatggtacttttaaaataaccttctctataatagtatttataattgatgttactcttcaaaatagtattctaaccttttttaatatttatttttcctttcatttttcatcatcttctaaactccccgtaatgcccctggtttaatttctccattcattgccgaggaacaaatcttgtgcatcgtagttgatgtgtttggctcaacgacgtcgcctgccttcatccaacaaactggttgtgcagaggcattccaggcaacaatactatttttctgtgcctgtatagtgggttgccagcttcgtcaacaaacaatttcagatttaaatgacctagacctttttgaacactaaccatctatcatgcaagggctatttttctgcacctgttttgctgaacgtgcatgtcggctattcgatcaccacccagtcactggtgtactaaaatcaaagtctggttggtgcagaggcatgaggccaattaaaagcttctcaggttgtttgcaattctagagcagcacaaatattaggttgcttgcagctcataaacaggttgctggataatagtttccatctagtcacaattgtgatagtgcttggcatcaagttgcggcgctggagaaagaatcaggttgcgacattgctgctgaattgtgatagtgctttgcgtcctcactaaaacgt

SEQ ID NO: 161010 - DNA, 985 bp, Zea Mays
aatatttatagctattctctaaagaattttataaactagagattttaattcttaaaatacctattctctatcctagcgtgtatgaattttatatttaaaatcatttgtgtaaatagtataataaataaaataaattaaaacaaagcatactcatgctagaatacttttgtttgtacatttgtttttaaggatgtaactcagacctaaattcaaattgtaatttggatttgaaatagaaaagggaagaacaactaaatagaaaagaataaaaccaaacctgggccgattttacccccctggcccaactcccagcagcttaccagcccaaccgcgcactcgctactcacgacaactgacttgtgggacccgtgctccagccgctcaacctgggagctcttggttcctcgcccgacgttgcttacatgtggggtcccggccacctgcccctcttcctcctctgttcaccgcagctggtgctgttgggatcgaacgagatctccgctaccagattctacgaaatcatcggcttcctcactcagcgcgcgctcatccggtggatccgcctcgtcgggcacaacgtcttccaccccgcacctaggcgctcgcaggttgcaataaatcgctggatctgcggagttcgttggatcctggcaaaatctccgctcggagctcttatccccaatgtataaatgtgggtaccgcacccatatcgctccaagccaaagcccctctccccttcttatcccctcagctgcgactccaaatcggagaaactattgccgccagaggacatcaagcacgggcggtgctcggggtgccgctgtggggggatcctcatcgtagtcgtcgtccgcgccttcggtggtgtcgtgggtcttccttaggccgtggagaaggcaatcgtgttcgtgtttcgcgagttcggccaccagcgtcgtcagaatccttcgccgccaccacggtgccgcacgtcatcgcgattctg

SEQ ID NO: 161011 - DNA, 418 bp, Zea Mays
ataatatagttgcaggaatagcattaacgtaaaacataccaagtatgatgtcagcaccatccggagtagcatcaatgctgacttgattaaccttggcaatagagtatcccttgcgagatcctggagtttgctgcctattctgaactggagtagtagcaatcctctgtgggcagagatttgcatagtgtccagtcttcccacacttgaaacaagtagtgcctgcactctgccctgaaaacttcatcggggtgctagtgggggtagcctgacgaggaggtggagtcctctaaggtgattgctgaactgggcactggcctccgccagtgcgaactggtgtaccctggggtgaactgtagcgaggacgaacactgctgctcccttgtccttgagatatagctttcctcttcaaatctcccag

SEQ ID NO: 161012 - DNA, 1051 bp, Zea Mays
tctcaagtgattggatcaagaaatacatggtcgtgctaggttaaatgttaacctataaagaattccacacaatattgagaaagagaggtcagcttagaatcagaccaaatatcgtgagacaaagggaacaacacatacataatgttgtgatggtttgcctgatatgatctttatgtatatataggagttgacatgttttgctagaggtcgttgttattggaccatgtaggagcattcgggccatgtttatgtgtacgtgaacctatatggtcacacacttaaagggttggaagcttaattcggatgggatttggattagactaggtttaggattactaataggcctttgattcgtgagcccaacagggacgcctatatattgaggggtggagacgcagcaaggggtgaaccctaatcagccaccagctatcgcgccctcctcgctctcgccacgtcgcgtttgcggacctagcagtctggtgcacgacgcttactccttgcacgtgtggatacctcggaggtgttgcaattgcaaggatgtgatggacgtcgggattgcacgtcaatgctcgacgcgatcgtctacatcgagacaattttcagtatgactgcgcgtctagtggtaatcccgtgagttataactgcagttgttcctgtttattatggggtcaaattttttgttttacgctagtgtagtctacccataatcctacgctgaggtacctagagcccctggccttgtatcccaagggcggtccggacctaggccatctggggctcagagtcagagcccctaaatgtgctaaggacccatggcagttatgtgtaatgttgtctcatgaccaaaggatgtgtcaggtccactagggatagtacgaccctgaaagattggccccacatctaagtgctcgaggataagtacatagcaaaagcttaatggataagtcttgtgtaaaacacattaatttgtgatgggcgacattacaggcctaatagtcgtgttggtgtgctattgccacgacttaggttgtagggcacttgaaattactat

SEQ ID NO: 161013 - DNA, 662 bp, Zea Mays
ggctcatacacaatgcaagtgacaatacagatcattgaaacctcatgaaagcagcaccttcacttcactgaggcatgaagcaagttgtgcaaacttttgttatgttgacagggaacacgcttcaggcatgcagccaacggcccaagacactgctccaaatgtatttccaaaatggtaatttgccagcttgggcaaaaccagcgtacgcaatattatcagaacaaatatatgttggcacgatggcatcagaagggtaagcaggtagttgggctgcatgcagcaaacaaacgtccgcgttccacacctgagattctgagaccagcatcttgtccacttgccatgtttcaggggttacctgaactaccgatctgtgatgtcagtgctcacatttaatatcgccatggaatcaaattatgagtaccaacaaatctctagccatggttcaaaagatgctccaaccataggttatctacatgtgttaatgattagggattagcaatgatcggtttggtttagacaatagttgcaacaaataggcaaccatatattatattttaccactgtccaaaataagcataatactgaaattgttctagttgtacaagtccctttaggtatatcacacacttgacaggtactactacctccgcccccaaatcgaa

SEQ ID NO: 161014 - DNA, 416 bp, Zea Mays
atgaaacacaatcaaaagcacaagatcttgcaacaactcaagaccgaaactctcacaaggcgttatctctttgctagctctatttgcttgaatatggcatttttctgatgtaatgagcgaacttaccacagcagtagtaaaccctcttcgattgaggcttgtagtcttttcccttttgtgtcttgaggatttgctggaagctcttgatgacgagatccatctcatcattaagcttgtaggggtcgattgggagtcctgcttgcaactcccttctttttccttttgttgccttgaatgcaactgtttgaggctcggatgtggtcatgttcccataagccatgttctcaacatgatgcttggaatccttaaccaacatgtcatgcctaaggaactttccaagaatctcctccagtttg

SEQ ID NO: 161015 - DNA, 587 bp, Zea Mays
cgacacctgggtcttctcttactccatcgtggtcgcgatccatgggattggcccagtgggggtttcatgaaatcctctatgctactcgatctcctcctgatatagtaaacaacaacctccgctatttccttctccctcgtacaacacccactatacgcagaaaaacctcgattcgatcttgcctcccccatgtcaggtcgaccgatgacggccgcaccttctctctccttcccagtcctcctgctcgcctctacctacacctttctcttacaggagggggtggagcccttacatgaggaacttattgataaagaaagcattatagggagttctggtctgtttgcgggtgatgtttgtgctaatgtagctgattcaagtttcgttttctatgcagtctctatggttttcagggagagattttgtgttccttggtattacggtttgatggtagatagtagtactatttctccaagaaagcaggtgcagagcgatctcaaggtccgcctagcgatgctaaagccggcaaaggtggagaggatggtggtgattacgacttgcagccacatctgcacaccgcaaaaaaaatc

SEQ ID NO: 161016 - DNA, 603 bp, Zea Mays
ggagagtcggttctcctcccactaatgacctacggggccaaggcctacaacccactcttgacctatcaaccctaggcttgagtgcactgaccgtctatagggcccacaacatgacgagcatcgccaagacctaggctatggaggccaagggttggtgtggcatagagacgataacgatgatgtcgaagctcttcgccacccatgtcgtcatccataaagagcgcaaccaggaagcccagacgactgaggcacctgcggataaccatgactttaccagggtagaacaccccattttaccacggcatcgtagatccttccttgatcggtagtcgacccccaccttggccaataaaaagggagaggtcggccagaagacacatgaagacatagaaaaacacccatatacgaccacactagaagacccagaggactacagaggccgaagccatggagcgaaccaccatgaagcccaaggcttagcagagagcaccagattcatagtccttaggtctaaccacgcataagagacctaggaggtcctccctctctcgcccacttgtaacccctaatacgagcattgagcaacaaaggtgccagtagcgc

SEQ ID NO: 161017 - DNA, 287 bp, Zea Mays
gcccaggtcctacaacaaggaggatggcatcaatctcacctgggggaattaatcgaaggctcattattagctagatatgttacatgtccttctctattttgtgtgagcatggctgtgcaagagtgggcgcttttgtgtgtaaatattttgccgctgtgcaacactgatagattgtgtttgtggtacttctgttgtcaaaattgcaagaactgtaagctgcaatttaggtactgaaatgacaacaaagttcagttatatatgtactgaaatgttatgttatatcctgg

SEQ ID NO: 161018 - DNA, 595 bp, Zea Mays
atttggtctcgcttcggcctccgaaggccgaaggttgagattgacgaagccgccaaagcttgccagaaggcatttggcactgtctgctttttcattggtacaagagatttattccaagagcatatagccttcagagtatggccgcttgtagagaactgggacatgccgaaggaaactgtcgccgaatctagcgaaggtgagctggtccggctgaagtacaccttcagatatggggataagttcgacgaaccaaacgatgactggttaaaatgcatcgaagtgacaagtgatgaactgcttggatcatattccaaggcagaagataatgcattgtccacaaccttcagaggtcgaggaaaaaagagattgaacagagtttttgacgctattggcttcgtctatcccgactaccgttacccgctgtgggggcaagggaagaaaaggaaagctactgctgtggccgcctcggccgaacctgtgccgaaggctacaagcaaaaagatgaaggtccttacccaccggccacgctatattgaaccagccgtggtgcctaagtttggcggggaggcttcttcagttgctgaaccaagagaac

SEQ ID NO: 161019 - DNA, 370 bp, Zea Mays
ccaaaatgatcttctttggtacatcgcgttgagacacaatctgagccatatatactctatcaattgagatcagttataagtagtcttgaccggaatgaaatgagccactttggccagtctatccacaataacccatatagaatcatatcctttcgaggtgtgaggcaatccagtaatgaaatccataccaatctcttcccactttcactcgggtatcttaattgggtgcagtagtccagctgggcctctggtgttcagccttaactcttcgacacacatcgcacatagccacatgtgcagccacatctctcttcaatccatatcaccagtacttctgcttcaaatcctgatacatcttgataatcccagg

SEQ ID NO: 161020 - DNA, 731 bp, Zea Mays
tgccgaagagcaaaaaggtgaaggttatgacccaccggccacgttacattgaaccggtcgtagtgcctgaatttggcggggtcctcctcagcagccgaagcaacagaaactgctctgattgcacagagcactgaagaggcagccgtaatgctgaaggtacccatagccgagctagtcaaagataaggttgataaggctgaagagtcaaaggttgaaaaaaataatgcaaatgccaaaaattctgagtcctccgatagaggcaacactatcgaagatgcaaaaggcttctgctgcaactcccaagagaaggagaatggccaacgtactcgatgttgtgctggaaactacaaaggtgctaagccctgctcctgcaaagaaaatttcccaagctgaagccaaatcacaggccgaagctgaaactgggcaagcagaatccgaagctacgcaggctcaaggtaaaaccgaagctgggccttcagtgcccaccgagacgaagcttgtcgcgcctgaagaaaagacggcagagcaaattgctcttgaaaaaatcgagactcctactcccgaagatttgatcgaaaacattgacttcatcattcgacatgcttcggggaagaagttgtccgaagaagaaattctggaagccaagcattatgcgcgaaaactgaaatatctgaagggggccttggtttttaacgggagtaatgaagatgatttcttatactgtctcccgg

SEQ ID NO: 161021 - DNA, 878 bp, Zea Mays
agagaatcagctataaatagactgacctccttccgtgacatgccggctcatggaaacagcgtccggcagtaagggaaggtggttatcgtgattggaactctccaagaatattggcatgcaagcctgacgcaagggaaagaatcagactaattatagtaatccaacaagggaaagtaatcaggctaattatagtaatccaacaccccccgcagtctgaacgtggtcagctacagggaaaaacattcagactggacctgaactccgtgaacaccgacgaaggcaatcctttagtgaagatatcagcatactgagaggaagtgggaacatgcaatacgcgaactgcaccggccgcaacacgttcccgaacgaagtgtagatcaatctcaatatgcttcgtacgctgatggttcactgggttcgaggagaggtagactgcactaacattatcacagaaaacaacagtggcgcgcttcaggggaagatgcatttcctgaaggagctgtcgtagccaggtagtctcagcaactgtatttgccactgcacgatactctgcttcagcactggaacgggacacagtaggctgacgcttggatgaccaggagacgagattatcaccaagaaaaacagcaaaccccgaggtcgaccgacgggtgtcaggacaaccggcccaatcagcatcagagtaggcaaccaatgtggagacatccgtgggacgaagatgtaggccatgatccagtgtcccatgcagatagcgaagaatccgtttgatcaacatgtaatgtggttccctaggatcatgcatgtgaagacaaacttgctgaacagcatatgaaatgtcagggcgagtgaaagtgagatactgtagtgcgccggccaga

SEQ ID NO: 161022 - DNA, 775 bp, Zea Mays
gtaaaagttatgggttaaacaagttttaggttatttttaatatttattttgcacttaaataagactccaggggtattattgcaattcccagggacctatctgtaacttgtttcaaactgtgcggggatggcgggtttattttaagggaaggcggggtctcttttgcaaagtggcggccgaggggtacagccaagccccaaccgcccgatcaagtttcaagggtcgagattagaagccgaaggggtacacgatttccgctgatgggttcgtgaccaatggctcggattcaatttacacgagatcaaaccctaggcgttggatactcgatcaacggtccacggtgattgcttccccagatctaatcccatccactcaatctaaatcggacgatgatcgcatcatcttctctctcacgcgctccagccattcttccctctctcatctcacgcggtgcctgctccagcggagcccatccacccgacgacgcaggcgggccatcgcccagctttgttgttctcctctgctaccgccgacgtgagcaaaaactgcgcttagcaaagcgaactacaagaacttggtcttaccggtgattgagacataggccggccgagcgacggtgcaccttcatcaccgccggcgaggttctgcttcttcgtctccatgatgtcgcagacgattccccccatggtggtcgcgatggaagccatggcttgcggtggatagacagaagggcctgcatagcaagattcttataaccagcggcggagtccgatcg

SEQ ID NO: 161023 - DNA, 564 bp, Zea Mays
aaaccctatatgtaaaaaaagagggggttggtataagaataaaagaatgagttacgaattataaaatttgtaaacatccaattcccataccttcaggctattgtacgcaagactatccgcaagatcctccttcgtcatagcacataatccagcttcgagcttcggaaaccccatacttctagacatctcccgacagacggataattctttattgtctgggaggcagtataggaaatcttcttcgtttgtcccattgaacactagtgcccccttcggatatttcaattctttggcatagtgattagcttcaaaaacttcttcttccgataattttttcccgaagcatgacgcacgatataatcgtataatttggaagatgcttcggggacagcagtatcaatttcttcgaccaaagtaggctctgacattttcatttcttcagtcgcccttgcaatttttgcttcttctgcttccaaaggtattaccttggttggttctgaaggcccggtttcaacttcagtctgttgcttcggagacttagcaacggatacttcagcaagcgcc

SEQ ID NO: 161024 - DNA, 461 bp, Zea Mays
gcggaagcagaggcaaacgaccgtgcgtgaatcaaaacaagagctctagggcaatggagttccacgcatgaagacgaccggtgtcgcacggaagtagaggtagacgcccgcgcgcgaatcgaaacataagtgttgggccgatggagttcccacgcaaaggctgacggcaggtgtcgtgcgaagggagacagtcacgaggcccattgaggtcaggaggccttagcaataggatggtcctaatgggccttaacaatgtctacactatgcagtgctcgaggaggaattatcggtgatcaaaaatcttctgccatgtgaggtgtcaaccttccagccaattgtggacagaattgcaaaccacctcccaagctagaaagttgacttaatgacaagggcaggcagaagaattcaagtgtagcacatccttacaggcatgattatctacttggcaatgactattcaca

SEQ ID NO: 161025 - DNA, 522 bp, Zea Mays
aattctgtgaatttgtgcacgtactcactgacagttcttccgccttgagttagttcccgaaattcatcttccttgagctgaacgatcccttggggcacatgatattctcggaaagcagtttcaaattctgcccaggtagcatctctgacggcagcgctgaaggtatcccaccaggttagggccatcccggaaagttgatgagcagccaattgaacacgctgattctcagggcatccgatggcttctaacttcctttttgtcgtgcgcagccagtcatcagcatcaaagggattgctggatccaacgaatgtgggaggcttgagccttagaaaatctcccatcctgtcctgtggtcttccaccattcgggcgctgattctccagacttctagtgaggacttcaatgagtcgggtttggttggctagaaattgggctaaatctaatggcagctccggaggtgcggggaggtgggtctcactcccttctccaccggcttctccttcagctcctaggggaaaccct

SEQ ID NO: 161026 - DNA, 792 bp, Zea Mays
gtttctcccacgtcgtgagcttcgtaacaaacccgagctccacgacacccacccgcgcggaatcactgggttccgttgcaactaccatgaaccaacctccgctggaaactataaatatgtgttgcgggcgcctcctcccccatctctgctccatggaccgatcatcaccgccgggtggctccaccgcgcaaaagagggtcgccatcacgagagagagaatgtgtggtgccgctgcgggtgattcgagctaatggtagggtcgggtctttagaatcggaccagtgagcctcatcatgtcgcacgaaatatagtcattgcttcgtctgggtggattcgctctcttcgtcgctggaattgctcgtcggcgatgcctcgttgacactgaccgcgctccaccgtggccggcatcgactgctaccccaaatgtgtggtatgaccctcgaatagcttctccttttcctcagcttcaaataacaccaaataggctcaggtcttgggcgccggaacaccgttcgtcgggtcttcggtggagtctcaacggtggttatgggcggcgccgccactgtggtggcccaaggttggggaaaagccatgatccgttggatctgatgagaacggataggattagagcatgggatgatgttgtgtgtttcattgatctcagcataagcggctgcaattaaatcggtcgtaccggtttgggtgaggcctgtgtgaaccatgcgatcttgatcctacgcgctgtattggttttcgctactttaaatccacgacgtcgatctaggatctgat

SEQ ID NO: 161027 - DNA, 540 bp, Zea Mays
gctctgcgcaaaattccaggcctgttttataattcctttacatgtatcaggacggcgggtttattgcatagaaacataaagggttcttttgcaaaacgcgctaaccgaaggggtatcggttaattctggccattggattaaaaagtgtacggtccagattagactgttttataaatctaaccggtacgcagtgagggccgcaggatgaaccatcaatggcccagatcagcccggcactcataagttgaattcacctcctaaccgcatgatgtcgatcggatggtcacgaagtgacgaggcgaagggggtaagtttgcatctaatccagcccgttcccatgagatcgacggtccaaagaccatcgtctccactcggcatcccagaacggtggcgccaccagaacacacgccggggagtatgccggagacagccaattcgacgactcccagagctatcacacatgtggtttagagcaatgcaaagagtcgagtaaagcgaagctaacagtggtatctcacaagagcaatagaccacgaaggt

SEQ ID NO: 161028 - DNA, 1075 bp, Zea Mays
cgatgatcacccaacaatttgcgttttaaattagacatcacatgagtactactactttttacccgcgaccataatcatgcgtatctagaccaaaacaagcaaatcaccgggattacgagcttaactaaggccatctaacaagttgattaaccagagcaacaacctaggacgctatacaacatactcgccggctagcctattattatcgaaatccgagacacaacatatatttaacaatcacttaacgaaatcgactcctacttaacatgagttggttaatcgcagtattggacttagcgaaccattttagacatcacaactcaaaaacatggattggagcagattaatcagcttttcctaatcattgctcaacttaaagttgttaatacacaggtcacttaaaatggcacatttttgggatctaacatagaggcaattacacatggcgtaaaactccataagactacatttgctactgaaggacctaaagcacttatgtgcatatcttagcggattgttcttcaattttaacaaggaccgacttatgaatgctactcgcctctaataattatcgggctgcgataacgctcatacaagatttctaattgatcaacaagacatgtatttatcatgtgggcatggaatgtgatgattgacaaagtgaagcatcacattgccatacaacaaaaatcatgacaacaccgatggatactatccactaaccgtttgaaaaactgaacttactcctcgcttgccactacatcactcctcaatcacacgaccatcatgcatatacttcacacgactatataatagcaacctaagcgttgtgttacacaagacatacatcttccttcgttgcgagtataaccatattacggcatatacccgcacacctcaatcagttatcttacgccaccactattataatacaccacggcacatacacgcatacgtgtctccactgcattctcatgaccaattttagcacaattatttatgacaatgtttattgactacacaagtgaaacactaaccgatcattcgcacatctcatcttaaaaacactaatcac

SEQ ID NO: 161029 - DNA, 658 bp, Zea Mays
gcaatagagacagaattgctctcactttcaaagaggcaagtatttgggcatgtcgcccgcacgccccccaatattaccctagtcgggttcaaatgagtgttcgtccgaaagagggatgcgaacaatgaggtggtgagatacaaagcgagacttgtagcacaagggttcacgcagatacctacaatcgattacgatgaaacttactccccggtaatgagtggcacaacgttccgatatttgatatcgctggcagtaggtttaaacttaaaaatgtagatgatggacgtagtgaccgcatacttgtatgggtcactggattcggaaatttatatgaaggtcccggatgggctgagagttccgaatgtcaagtcaaatcgcaacatgtacatcgttaagttgctgagggcgttgtatgggcttaaacaatctaggcggatgtggtacaatcggctcagcaaattcctcctgaagaagggatacgtaaataatccagattctccttgcgtattcattagaaaatcctagaagggttttttgcatagtttcggtctatgttagtgacttgaatatcattggatatgctgaggatattgaggaggccagtgcctacctcaagatagagtttgaaatgaaagacttgggagaaaccaagttttgc

SEQ ID NO: 161030 - DNA, 287 bp, Zea Mays
cttcaggacattctagctaatcttcagttgcatgatcacaatgatatttggcgctgcagtgcctcttccaatctgttttcatctcagaaggtttattttcacttggttggcacccatcagtcgcaccccctcttctcttggttatggaaatctaaatgccaacctaaacacaaggtgtttttctggttattgctcaaaaatagattgaatactcgctccttcctcaggcgacgttcaatgcctttggactctttcacgtgcgataactgcattcttcagattgaaga

SEQ ID NO: 161031 - DNA, 736 bp, Zea Mays
tggtctggaagaattatccatagcaaattttgatcaggctctcgaggatgttgttcctgaagatctgctgtctgagccaactgatggtgatatgatggacgtttgctctaacattccagatgtgggattggaggtatctcgggtagcttcttgtgcatcgtcgaccttgtaaggtggtcttcagagctaagaggttggtcaaggttgttcaattcccatggaggtgactgagagtccttcagccttagaggtggctgttgcagagaacccagtcctcaaggatggtgccagcggttgcctagcccccgagggtgttgccggtaatgatccggattgggtgggtagcgcaagctgcaacccagcccccgagggtgttgccggtgatgatccggctctgatgggcagtgcgggctgcaacccagcccccgagggtgtccgagcgggctccccttctcatacctccatggatgtccacgtcgggtcttctccaccacattctggtggtgtactagcaacgcatgcttcaagtgagggagtcgccttagaggtcggcgcaccggatgctggagttctgatgcctgttagtggtgttgaattaatccctggtgatgttcttcagattgccccggttgatattctttcatcgagccaccacctagcttctcgtgacttgggatttccgtcattcttctctaatcttcaggtaatttggcttttcctgttctggcaatactcc

SEQ ID NO: 161032 - DNA, 544 bp, Zea Mays
gaagtatcccatggtacagtaccgggatcggatcagaacgccagcgtcagaaagatctcgccgccgacgactccccgccgtgattcgtgtcactggcgtcgggattcgtgtctgcgcggatggatagcagcacggggtaaggggatcctcgccgccggtgacctggaagccactccggctagccgtaatcccttccccttgctcaccgcccgtggataaagcttttcaccgccgtcaagccttcgccattgcccgtcgcgtggctctgcctttacaccacgtcgtcgtgactctctggggccgtcccatcgtcgccggtgaggtcgccacgacgttagccacgggttcatgcacactagaacctccctgcccctttccgaccaccgcgcatcgtcatccaaattcctggccaccgtctaagccgcctataaattgagccctctcctagctccgcagcatcatcacccaccccgtcaccaagaatcgttagcaaccgtgcatccgagagcttgaattttggtttctccccaattcgggtttccgc

SEQ ID NO: 161033 - DNA, 472 bp, Zea Mays
gcacctcactctcaaaacctaggctgaaagaggagggaggccctcccttataagggcaccatgacccccttgactaggcgaggtggtactaacccagggcgtgcataccggtctctcacatcccaccccctaaaaggcctaaagctctcccaggcagcagcgacaatgtgagctccgataccaattgtaacgcaccctctaggccagtccgcccaaagcccaccatcgccaccgtcggacgttcatgcgctcgcggcagcctattcagacaggcacctcgctctcaaaacctagactgagagaggagggaggccccccttataagggcaccacgtcccccttggctaggcgaggtggtactaacctagggcgtgcataccggtctctcacatcccgccccctaagaggcccaaaactctcctagacagtagcggcaatgtgggctccgataccaattataacgcaccccttg

SEQ ID NO: 161034 - DNA, 832 bp, Zea Mays
tagaccatcatcagtttttatttactataacgctttagtacaacatacaaccgcttcagtattttctcacattttcttttacaaacccttatttaaaatggaacatgtcatttggttcattaaatatatgatacaataatgctcatcatcctcctcctacacatcttccttattttctttctcatctagttttaaatgtttaatgatttttacgaccaacctgtggattcttttcatatcatcgtccatgttagcagtacaatgttccaaaaattggtaaagtgctaaaataatcttgattaagttgtcctctagcttgccttgtagagcttgttcatcgtgctattctcccatgtcagggcactcgttgttggcaaattttcttcgtgttgtgctcttgtcgtactatggccaatacgtcgtgttggtctgatactatttgatgatgcggagctataatcattgttcatgttgtgatgggatcgttttctcccatcactagagtcatcgttactgtgacgtgcacatcacttgtgttgatggcgaagagcacaccagatgtactccaacttgaagtctgtttcatcgagcctgttgtggaagctctcctttgtcgctttaagaagcatagcattatttgatcttctgagttggacttatgcaatcagttgtagatgtcgttgaagagggtgaccttacgactgctcgtggaccaacaatcctttagttgtttgggggtacagtggcgaggaggttcggtggtgtagttgtaccacgtgtggatctataaatttatgaactcaaaaattgttctcgactcaaaattgtgtcc

SEQ ID NO: 161035 - DNA, 532 bp, Zea Mays
ctacgacattcactagaagcttggaacgctaaactggactccaccctcaagcgaatggggttccagcattgtgcttatgaggctattgtccactggcgaggcaaggtctacatcgacaacttcatgattaatgacaccaaggaaggagaggtggagccgttcaaggctgagatgaaggtcactttatagatgagcatcctatgccactctcctacctagggatcgaagtccactaggacaactccgacatcttacaatgccagaccgcctatgccaagcacatcgtcgagcttgggaggctcgccgactacaacctatcttacactcccgtcccgtggaggagaggctgaagttgagccacaacacgagagtggaggtgggcatggcgcaataccatgtattgtgagcagccttcactaactcgtccagacaagaccgagcttggcgttcaccgctggctatgtaagtcagttcatacagcaactgacgagtgacgacaaaacaccagttgaccgtcaagagggtcatacac

SEQ ID NO: 161036 - DNA, 321 bp, Zea Mays
cacgttcaaagggggtatccgggcttctgtgtggcctgtgttcttcggtcatagcgcctgccgttggagcggacaggtatatgtcttgtccgaagttaatgctaaggcgtgtcgtactctgaaggtcgataccgggtttcccaatggtccttgttatgcgtcgtggaacacgcgacagcgctagtccttaccttgtgaggggggcaacggtcaacactactcttccttgggatagcccctttccatctcctcgcctggtgatctggaaaaaaggcgtccctgcacagcgtatctatgggtccttgttccgaacgctttcaa

SEQ ID NO: 161037 - DNA, 713 bp, Zea Mays
tagtgtgtccactctaacaattcctttctacatgcttccccactactgccgtcatgtatcagtgccgctatggtgctaccaacctctccttcgagccaccagaccagagcctccccctgcgaatgatcagcacagtgagccatgtcagtcgctggctgccgtagcgggcgacatcaccgacagagtgcagccatcgtcaatctgtttgaccaacctgttctcaatgctcaagtttcagcgcaacgaccacagagcaaaaccattcccttatccatcagctcaaaatggagtgaagaacagcatgtagtcttgtgggcggtaaccgagtgctagaatttgaaatggactcattttgtgccttgtatttttacagagcaccaatattctgatggcaatatccaaagtgattatcttttgatgctatggaaccaattttcccattcccattcctagattcacgcaagttatctcattagttggggaaagtgatctagccagggattttacttttatattacggattattaggattttagtcaagaccgtgccttcaagttaggggctttggaggtcaaggactttcgcccaatcagcctgatctatagttttgcaaaaaaatgtcacaaaagtattggctaataggcttgctatcaggttacttgagttggtgtcaccaaatcagagtgcttttgtgaaaggaataagtattcatg

SEQ ID NO: 161038 - DNA, 625 bp, Zea Mays
ttcaaataggtattcagtgtgaacagtggaatttagaagatctccaggtttagagaactgccgccggtgacatcccacaccatgatacgagccctagtaagattcatgcatgaggtgaattggataactcagggagggtaaaagatcggcaaagggaagaacttaggctctaggtcagcttgtctgctatgcccacttgtgtcgcaacgtggccgagcggccgtcaccacagtgttgttgtctctctctgttgtgccatgctaagattggtttcaccacaccgcggtaagtgtgggaagcgtagaaacatgcctccgaactgttaaaccccatgtgcgccatgaagcgcaagtctagtgaaatatctcgtcgccgaccatctcagtcttagccaaaattcacggtgagcttggccaggttctttaaattgaaagatccctctattccacccaagaattgcatgctctctctacccttaaccgcctcccatcatcctctatagcccacagtcaccggaattgcccaaagctggtcaccagcgctgcgtggtacaccccgccgtggctagaactatctaggttagtttgtgcctttttggttcccattctaacttcctttggccctc

SEQ ID NO: 161039 - DNA, 611 bp, Zea Mays
tctcaacatgtcctcgagaatctgattcactctttcggtttgaccatcagtttgaggatgatatgctgagcttctaatcacggttgttctaagtgactttggtagctgctcctagaaacgtgctacgagcggtgctgctctatctgacacgatagttactgggattccatgcaagcgcactatttggtcaatatagatttccgcgtacttttctgtcttgtgggtgctatgcacggacaagaaatgagttgtcttggttagcctatccacaatgacccaaatagaatcatggtgccgggaggtgttgggcaatcccacaataaaatccatgcaaatgtcctcccatttccaagatggtatggggagaggttgtaaggtacctgctacctttaaatgactagctttgattctttggcaagtgtcgcactcagatatgtacttagcaatctctctcttcaacctggtccaccaatataaggatctgaggtcatgatacatcttgttacttccggggtgcatggaaaatttggagagatgagctttgtccaaaattttcttcttgagttttggattcttgggaacaaccagtcggtcttcgaaccataaaatac

SEQ ID NO: 161040 - DNA, 719 bp, Zea Mays
gtgaccgtatggacaacggatgaacatgggcgttcttggtgacccaggacggtctagttcaaacagaggggtcgaggagctgaggaggacttaaggatgctagaacaaacgaccagagcgcttgaacgaacctggagcaagctggccacggcgagggcaaaccgagcggtgttcttgagtgggttgggggaaatgcgaaattggagctctctggtggaggatctgaggtgcgggtgggtgcgctagctgcttgaatacataacgaagtcgatgatgcacttaatttataggcttcgggggcggtggctctcaatttgatcacagcgtgctggcggccggagatagggaagaatacgagtggttgtgaccgtggcgttcaccggtgcaacgacgcaaggataacactcctaagggagccatgattagtatcgcatagtaataagttatggcgtggcacaaccggggtaactggagcatccacggcgacgctggtggtccagccacgtcgcgacggctatcggcacagtgataaacttcaattcgcgatcaaatccattcccccgtgagatcttttaccttcccgtggatatcctctgcgccaagcacgaatcacggcgaccaacgcaaattcggacgcgcggatcgccggcggcgagggactgagctggcggcctgatccaatcactgtaccatcacgaagtgtatttagtcggtctgac

SEQ ID NO: 161041 - DNA, 640 bp, Zea Mays
ctcgtacttggtgataaatgcggtcttcggtatgtctgaaggcctgatcctgagttgatggtaacctgaccttagatctatcttcgagaacacactgactcctctcaactgatcgaacagatcttcaattctaggtagggggtatttgttcttgatagtgacttcattcaaagatctgtaatcaatgcacattctctttgtcccatctttcttctccacgaacaaaactggagcggcccaaggcaaggtacatggtctgatgtagcctttctccaacaactcgtctatctgcttcttgagttccaccaattctagtccggacactacataggctctcttggaaataggggcggtgcccggtataagctctatggcaaactcaactttacgctcgggtggcatgcctggtaactcctcaaggaacacgtcggggaattctgacacaattctaatatcctcaagcaggttggcctccttgccatctacagacaaatggtaacaggctccttctaggtcatgcatgaacagttcagttactacttctttcctgggtggggacactaactttaccgtcctcttgtcacaactgaaagtggcttggtttctgtgcagccaattcatccttaggatggcatctaac

SEQ ID NO: 161042 - DNA, 639 bp, Zea Mays
ctgatgggcaaataaattttgattcagcttaaaatataccgcgatgcatgctttagttagttaatctcacgtccatgcatgccaagaggagaaacatcacatgggtttactagaactggcatgccaatgccacctctccatcatgcagtgcaggaactgaggtagatcacggacagtacgtgagccacaccagttcggcgcagtccactccatttaatagggtgtgtgcccacatcagaaatacgtgctctgaacagcgggaaaagatcaaaggtttaatgcaacgtgtgatcagggaaacacaggtcacggatagtgcatgagccgacacggatggtgcatgagccgccagttctactggccatgtatttgatattctgtgccaactgcatgactgcaagctgccacatgtgtacggtaacacagagttcatcaacaatttaatattcgtcgtcccgaaaagaacgcaagtagatgcatcctacgtacgaccattatttcagagcatgaagtccctcaaatcaagtagccctcttctttttttcgtgtcctttttacaggctcagattggccgaaagaaaatgcaattattgataactagctaggctcgagaacggcactatgcgttgtgtgccttca

SEQ ID NO: 161043 - DNA, 819 bp, Zea Mays
taggagttcatcgacattccataaaggggctaggattgggcatgctcatttgcagccgatgaggcctataggttttctttagtttgggcatcgtgtgacggaaaactagtaataacagatttatcaaacacacgttctagcctcctataatccccttgtggtaggaactcttggcctatcatgatattagaggcagttgcgtcatacgacccatggatttggcatgcatttttcgaaatgtctgggagtaacaacaacatcaatgttttacacaggtcgcctgttttcgacccactacaaaatggtattatgcccctggtacaatacacgattaacagtcacccatacaactttagatactatttagttgatgttatttacctagattggccaacttttgtgaaagctattcaacacccatggaaggagaaaaaatgcacttcactaggatgaaagacggttgtcgtaaagacatcgagagggcatttggtgcactattgcgaggtgggcagtgctatgaggtctagcatatgggtgggatcacagtcccctagttgaaatgatgactgcttgcatcataatgcataacatggtcgttaagggtgaaggggatcaagtagccaatgttgacttcatcgacgccggagtccctaacaatctatttattgatgttccaaaggactgtaatgaatggatgcataaccacctaaacatcactagaagggagacatacacgatattgtagcacgatcttgttgagcatctgtgggccaaacacagttctatggcctgaatgttgtggtcaatgtttgatcattg

SEQ ID NO: 161044 - DNA, 580 bp, Zea Mays
atccggggacaattcaaagtgttcccggtgatctaatgggttctagcttaattgttcgggtcgagaagcatcaagggcacataagggtactgaaacaagagagcagaggacctgaacggacctgtagcacgatggccacggcgaggtgctcacgcggcggtatgtagaccgatttggggataatgggcaattaggcagctctggtggacaattagaggcaagtgctggtgcgttggacgcgtaattacctagcggagttccctgaggcttcaatttatagcacgcaaaggtggtggtgctcaattcggaggagaagtgccggtgaccgaggagaggggtgagtcactacggcgatcaaccgtggcgatcgcagggcaaagagctatggcggtcactaggcagtcactacagctcacgatgacgcgataaatgtcctaaggcatggcgtccccatggtgaatggcgaacatgccggtgatggccgctcggccatgtcaccggtgcgaacagatgaataatcgagcgcatagtacttccaagctcatccgcggcaagatcttttacccggggatcgttatcc

SEQ ID NO: 161045 - DNA, 756 bp, Zea Mays
ttgttgattattttggctctgctacaaatccctgctcgagccatggtagtatttgtcgtgtgtgtgcgtgcgcagcatgacactgtttaagttctcgatctcatggataaagctactacggaatcagtgggagctgcagctgcgccatcctcgtggtcggccaggagcccccaccacatggatcaaggtacactcgttgtgaagggatatgcttggatcagagtaggggtgggtgagggtgaggactgtccatttatcaccttcaatttcttttatattttctttggattttgacactctcctttcttttgcttgcttttctcgtcggatctgacttgaggatgtgatgacaaaaaatacctacctatttttagatccctgacaagagaaaccaatgaatacttctgagcctttctaagatttgtcttctttgtttggtttatgttctctatgcttaaaaaaggaaaggaaggtaggatttcagccatgctcttatagagtgactggtgctcaaatctagaaattgatatcacctcaggtttcggttttgagtgctcacttctctaaatctgtagtatggcagtttgattaaagtcttagtataaaatgtcttccaaatttcacgcactaaataaagcagcattgggagggccatttcttgaattttttgtctgcacttcattcaggtgaaccaaaattttctcctaggtctttgaactgaaatacagtagtactttagaaccacaacactacaac

SEQ ID NO: 161046 - DNA, 427 bp, Zea Mays
agacacgcgcccgagtggatgacacaaactaggtttggagagaatcacaggcttccttggatgttgtggccgaaatcacatcatgtagcatgtcttctggtatggatgagagcaacccagtaaggagttgctgatcttgatcataccaccgagaatattcggggttgacgatctgctcagcaccagataaggtagacgtagcaaccttctctggtggtgctggtcttgtgccatcaatataaccgatcaatttggtgccctcaaatatgggaggagttgagcacgccagagaagataattgttcctggtaagacgaatagttactgcatgatgcaatgggatcatggggttggtgggttgggaatttgccatggcggccattggagcggtgggtaaggagaaggagatagaagaatatgtggagggc

SEQ ID NO: 161047 - DNA, 1089 bp, Zea Mays
gtcatttctgaaatctgtgacgatgagcttgtgagcttggtgtgaaatttgagactgttaataagtgatttctttagagatgcattattattcccgtttagtttgttttgccagtatggctagagatgtgaagactaaaaggtgctttctatttttttcagaatgcaagtagacacgacgacattctggagcattatggtgctggactgctgatgctaaaaaaccggatgctttgtatgctccaaggtcaagctggagacacctgatcagtatactgttactttggaggaggaactatcttttctagggcatgtgtaatgagccactgacatattaatgatcaggtgattatgctctctttaatcatgcatacacgatcatagatagatatcaatagtaattttaccattgaacacttggctaccgttacaccacactatgactaatttgtgatttgatatgttaaccacactatatcacttctttttaattttcatatctccctggcttctcagttctcacctttgtggccaagctttcagttgctcatgtatcaaatttagtagtcatcatctgaataacaggatctcagttcattatctgttccaaactatttttagatccctactactaaagttgaggttcgtgccggtggcgccctagccgcggagacaaaacaacaaacttccctctctcccccacctgctggaatccgcggccatagtctttgtgacacattatataactatgatggttaaaccatggtggtgtacctggaagcagcagttttggatggtcaaattactaattttctggatgataacactgaccggtctttctcactagcctaggggttcgggtgtaaatcttaccagttttcatcataggtgcatgttttcatattctttgcggactatgggatctaggataacatcgttgtgtttattcttatattgtgcatattggttcagtttgggctcttgcaaccggtcatgtatacaaaggtgtaagggaccaatctgtgagtttaattttttgttgcattattgaatagtcattttacatctttctaaacttactatgtattcc

SEQ ID NO: 161048 - DNA, 807 bp, Zea Mays
accggcatatgaaggcaagtattgaatgatgcctctccaatataacgttcggttgggtcaaaaatgtccatatcacctgccatgtttagtaaatacaagaaacaataaaaaatatctttgattctataaactactaggaatcattgttgtaatctctcactctcaaactggttaaacaagttcttacaagttctcaccacgcaaagcaggaggcgctggcaaacagcacaaacaacaacaacagtggctgctagcacaacctggtggtgttgtagaaaaatttgtggatttataggtggctgctaaaacaatagttccaaggaatagctagtaccacgttagccacaacaagttgaataaacgttccacaatggtgttgtgctcgtcctagtccaaaccgtaatagagacgcgagccgttacacaaatgatatcaccaaatactcaaaacagcaagctgacttataaaattgtgaaacgatggcacacaaactgtctttgttttgttgcacatggaattttatctaccaatattcttactgcgattttttctcttttttgtacgtgcttttttttatgatcagcgcgactttttttgtgcacttgccttttcctttcccttgttttttaaactacagccagagaacagctagcgaactaaaaatggtgatctaaacaaggtggcacgaactcgaaactctagcagcaagaaactttggaccagcaactcgacacaaatgcagcaactgtaaattcaacaagtcgaaaactaagtagtaaagcaaaggctcaaaatgtttttaggtga

SEQ ID NO: 161049 - DNA, 940 bp, Zea Mays
gcaacaggggcaaaggtttcctcataatcaataccctctttctagaaaaaaactgttggaaaaccaaccttgccttgtttctcactatcaacccatcctcactttgtttgtttttgaaatcccattttgtgccgatgggatggcaattcgaaggaggtggcaccaaaaccctctcaaatttgcaagctcctaatgcatagcattgacccaattaggatcacacaaagattttccaaaatctcggggctcaaaagaggcaacaaaagctgactgaaaaaaataagaaaaatgttatgacctagagcgagtgactcacacgtgaagttccccgatcataagttgcacgccggaccgccgcgcctccacatcacccgtcttttgcagccccacttcgtgcccaattcccgaccaccggtgctcccgacccctcactgaagctcacatgggtctcagtagccggatcaacccttatcgcgccctggattgctcgctggagcacatcccaccccatctagatcacctcaccatcgttcactcacctctagtctctctctaatggccagagcaccaccataagattccttgagtcgccccaatgtttgtggcacaccttgtctctggcgatttccccgctgcaggcatgagtggtgtcacccaaactggccggaggcgttgaccacccctaggtagtcaactcaattcgcccgtccctgattcaatggcttggatcgtctgatactcattcgcatcagcccattagaccggaaccctcgatcccccatccaacagctcatgcttgggcaagcgctcgcgcctctgtcctggggccccacccgttcgtcgccagtgttcagtacgcatgcctgccccgcaccgatctaatcatggtcgtggatcggagatccgacggcccacgtggcccgataacccttcgccacgc

SEQ ID NO: 161050 - DNA, 346 bp, Zea Mays
tgatttgctacgggaaggggatatgacagggggagacgaaacgggatggagatcggtcgttcaagggccggagtggcccggccggtcgaacggtcactgtcgtgcgctagctgctcatgcgtggtcgagggagtaaccgcatatgtatggcttgtgaggaacgcgtgctgcttgctgatcatgtacattgctttccccattgatcacctcatcggcgtgttaatcactccaagtaaaaacacggtataattgtcagaataattgtcttgggcgcatgcatgtcaacgtcttcaggaaactagaatggaccagcacggttagcttcttgggcaatcctctcctggca

SEQ ID NO: 161051 - DNA, 805 bp, Zea Mays
gcaagtctcctaatagttaagtttcatgccttgctcaaaaatcagtttattagttatgggatctactatggattttaggatgactatcaccagtcaatggcaatcatatggggcacatgtttattggcatatgggtttaagatatagaactagaacctatatttccagtgcatcaagccctccacaatccatggaatttgttgagcctgtttggatcagattcatattgtttctatgggcaagcttgtggaacattgagcattatctcatattctcatccaatgtctattaggatatcactctgtactataatcgcaccttgaagttagcatccagctatctgcattggatcactaaatatctattctccaatgtgtagatgaccattttacaaaccattagcacaatgcagctctctttatgcaatttgtcacttctatttccaccgttaatcatagtcaataatgatacatccattgggctctgtctgcaaaactgctccattgattgtgtctcactacataagcttagattttctttagtttttagtcacaagtttcgtataatacggcaacgatgatgactgtgaaaatcatggttattaaggcgtcgctaaagcggtaaggcgagcatagccacgtaaggcgtcctatcgccttgccgcgggagtaatgcgaggacagagggcgctgcggcagcgcgcgcagggcgcagtggtgacggcggcgtgcatggggctgctgcggcagcgcacagggcgcagcggcgagggtttacagcccaagccggcaagtcagaggaaggg

SEQ ID NO: 161052 - DNA, 873 bp, Zea Mays
attcaagagatgcctcacgacttgggaatactcctccaccccaaattttgcattgacatctctagagaattgcatccaatttcccaatccatgcttcatcttgtgcacttgtagccacatcacaacattgccttccatgtacatggctgcagatattgcccaaactgccttaacaacttggtagatggtgaagtagtcttgacatttctctaaccaaattctaggatccgcccttggaacttggggaaagagtacttgggttgtgctggttatccatgtcctcctgcaccctgatctccaacatctctgaaccagttggaatttgctcttctttctcctctttttgatcaccctgatcaggcccctcctaatgacctagagcctatttcttccaactctctagccatcacctccaactataaacgcgccaccaccttaccaggttcctctatctggctggccaggatggtgtgttcctcctctgccttttttgccaccgttgctgcaagttcagcttgaccttccagacattgttgaccagcttccaccccttccaacttcttccccaaatggtccagcaccttcatcatctgctcccacttctcctcccctcgctgctctatagacaccattgcctccagcattaaccgggtttgagcagatggtttgaaatttggcatcgtcttgatgacttccagggatcaaagactttgatactacttgttatggcccttggcccacggtatcaccaaccgaggtgtgagctctcttctcctgatctaggtggatctactcaggtaaacctcatcagaggtgaggaagaacacaggtatgtggctaatccttttaatgattcgattcccttttctgtta

SEQ ID NO: 161053 - DNA, 354 bp, Zea Mays
atccttagcatcatcttgctagaaacaagtgaaactagataccacatgagatcataataaatagggttctagttactcctttcacactaagactaggcttataaatatcactaaatcaatcatcatccaagtcttagttctagcaaccacttacacacaagtatgtaggaatataagacaaatgtgatgcaagcaagcaatgtagtgcacaaacaaatgcatcaaacatatattcacgaccttgctccccctacttttgtgcatctcttgttcaataaaatctcataccattatactttgctcttgatccattcgtattcattctaactcaattgatcagtagctcccccagag

SEQ ID NO: 161054 - DNA, 567 bp, Zea Mays
gtgctggctctacgtccttggtcgaggtggagcagccataagaggacctcggcgccagcgaagtgggtaaggagaggcatggctgagccgagaaccagtggcgatgggtgctggtggagatcagggcaaggtcgacagctgtggggtgaggtgaataggtagagggcaagggcgcgcgtccggcatcctgacagcggcataatgacgatctaggaggtgggcatggccgatgagcataggcgagctcaatagggccgagcttgacctggtagggggagaacgtgatggggagggaggaggtcgatgtgcgagcagagagacgatgctaggagagggtggcatccattaaggagatggggaggagatgagcttagcacgaggggcagcagccaagaattccatgaagaagagagcatgtgtgtggggagaggattagggactcatcgaaacagcggtggcagataagggagagagatgattggtggggataatatcaaggagattttttccacttttcctctctttaatttagtaaatataaatacatttcctggttccaaaattagg

SEQ ID NO: 161055 - DNA, 413 bp, Zea Mays
ttagcactatgtgtgccttcattggcacaagggatttgattcaagagcatatatccttcagggtatggccacttgtggagagctgggatatgccaaaggagaccaccgccaattctagtgagggtggtctagtccgactaaagtataccttcagatttagggagaagtttggtgagccaaacgacgactggctgaagtgtatcgaagttactagtgatgagctacttggagcatactccaaggccgaagataatgctttgtccgcagcctttgggggtcggggcaagaaaagattaaacagggtatttgatgctattggcttcatataccctgattaccgctacccgctgcgagggcaagagaaaaagaggaagactgccgcttcggtcaccccagctgagcctgagccgaag

SEQ ID NO: 161056 - DNA, 360 bp, Zea Mays
accgaatgcatttgtgaactatatgtgtgcgtgatcagagcgcttgggtactcggtggataggatattagaatgtgttcttggcgctgaaagctatgacattttgtatctgttgttagaattcaaccgtcgtcatgaacgattgcagaagtaagcgtggcgtgctggttttggagtcttttcctaatttatgccaattgatcagctggtaaggcatagaggttgccctatgacgagtagttgcgagcatgttacaccgtcttaagtcattgctgacttaggccgattgctctgttagtagggtatagtggtcaccctaagtcgagtaagcgcgagcatgttgcaccgtcttaagtcattg

SEQ ID NO: 161057 - DNA, 1181 bp, Zea Mays
cggccgcctacgcccgtgcggtgcgcttggcagagagacccctgccgatttggttaacttgttaagaggtcaagcactattcccccttctcactaacagtagcataaaggcccttcggttttctttcatttacaaactctggtccttgacttaatcccgacgaacgctggctatcagccgtctagacccatcgatagtgaccatctctggtgaagtcgagctcaccaacgtgatccccaaagcttacttactatttcccctaagttaatcgatctcaaacaacctaaagcctttcaagccacaacgatgacggacaaccgagctccggtgaggtggaccgaggcgtcaagcctggtagagttcaatctgaggccatgacaagtaccagcgacccttcaaacatacggtgctcacacgggttagcccaggaaaggcatggttcagtccaacaacgtgagaagggtccacagcggcagtcactactgacacaatagtgttccagtcaaacggtggcggtagtgcttaaatcaaaaggcgtgtgagcatcaccatgacataaagaccaagaaacatgagccaaacaaacatgactaatcttagaaagtgttggccatggtgaggaaccactcggtggcactggtgataaccgacgggaaaaactcggtgttcttggctacatacggtcaaacgaagaaaacaaagtgtggcctgggtgcgtaatggagaggtgggactgagggcaagctcaatttaaagggcgctaccatgatagtggctaatttggccgagatagaatggcgatggtgatagaccactgacctccacgttcgcttccacggtgtcctatgaccggtaatgtggcgaatttaccgcaagcaggtttacatcagcttaaacaatttatgcacccaaccagctgcatggatggctggagtgcttggcggttgccacggtggcgataaacggagtatgatgaaggcacgtggtgtcgatgtctagagcggtgactcggtcattgaatccgaacccaagatcttttaccacatcgtcgatccacatctcacaacaccaatcgtggcgcgagctcgaatcacgacggagggacatcggtggtaggtgcattgaactcaatcttgttcagttattacttcagtcagaatcccccctcccttttatctttg

SEQ ID NO: 161058 - DNA, 516 bp, Zea Mays
ggccgagttcgcttataacaacagctaccaggctagcatcaagatggcaccatatgaggccttatatggcaggcgatgtatctcccctttgtgctgggagactttgggagagagatctctagttggtcatgattgggttaagcagacatctgagaaggttcgggaatttcgtcagaatattttggccactaagagccgtcagaagagttatgctgatgtgaggaggcgggacatggaatttgcagtgggtgatcatgtccttctcagggtatcccctactaaaggagttgttcggttcggtgtctccggaaagcttagctcgagatacattggaccgttcactatcttggtctgggttggcagcttggcttatcgcttgcaattgtcggattccatggcaggggtacacccagtatttgatgtatctacgttgaggaagtttttgcgggatctgtaccatcaaatcgagttggaaccgattgttgtgcagcaggatctgactctagagtgtcgtcc

SEQ ID NO: 161059 - DNA, 568 bp, Zea Mays
tgatcaggtccccgaaagtcttactcatcacccgcacaaatgttggcaaggcgttcttcagaccgtaaggcattacgacatagcagtaaagctcatccactgttacaaaagcagtatgcttcctatcttccctagacatctggatttgatggaaaccagagtaagcatctaagaaggacaagaggtcgcacctggaggtagagtgcacgatttgatctatacgtggaagtggatacaggtccttgggacaagccttattaaggctggtgtagtcgatgcacatccgaagcttcccattcgccttggggacgatgactaggttggccagccacactgggtgatgaacctcttcgatgaagccggcgtctagcagcttccggacctcctttcggatgaagtcctaccgctcaacggactgtcttcgaggcttctgactcaccggtctagcatcagggttgatcttcagatggtgctcgatcacctccctggggatcccaggcatctgcgacggctcccatgcgaacacgtcggcatttacctagaggaaggcgacgagcgcgagttccta

SEQ ID NO: 161060 - DNA, 577 bp, Zea Mays
gggttatcttctccctcgcgcgtcgtcgcgaacgcagccgaactatggctactgcgcgcacctgccggagaccgacagtgccccattcgctcgccctcacgaccacctctggcatgtgggcctcgctccaccggaagcttctccgggttgttacacttttgtagccgtcgcacgctctgcgtaacaaactccgccgcttgcggaggggatcgttgtgacttcggctcggcatccacatatctaggtccctccgcgcacctcgtcccatttgagccagcgtgaacgaccctaggtttatccatcgccgagagaggagccgagtgtccatcatcggagagcaaggacaggcttgtggccgccatcgtgcgttttcaccttcagtgtcgaccggagaccgtgatcggctcaaagtggcgcacaatatcttggggacgtaatccagtgggtaattgtgcatgggaagccgagggtctcacgcaattggtcgccggagttagggcgcattcgcgaagccagggaacgctgtgggcagcaccgtattctccacggccgtcggtaacgacactttcctctagtc

SEQ ID NO: 161061 - DNA, 914 bp, Zea Mays
tctggatagttggatagcgtcgtggggttaaaaatcttcgccgccggtgagctggaagccactccggctagccgtagttcatctcccctggctcaccgcccgcgagtaaagttggtcaccgtcgtcgtgccatctccgtcgtccaccgcgtgtcctaaccgcgccatcgtgtcgccgtgactccctaccactgtcctgtcaacgccggtgagcttgccacggcgttagccacgaattcaccgcgccgccttcttcttcatctccggccgccagcacggctcggccaaattgatcaccaccgctcgcgggctctataaattgaccgtgcccctagctccgccatgtatccaagcacctactgcacccacctgcatctcaaatccctcactagcaagcacgaatttcggattctccccaatccggttctaaaacaccgtgaactcaaccccgccgtggtcagcccaactccggttagctcttcccctctgctcccttgtttaagcattcttatgcgtctgtgatgcttgccgacccacacaatcgagctaggagcccttttgtcgccgggaacgtgactgtcttgccgcgatgttcacggccaccgtggccagagctccgtagttgatcataagcgcaattaagttagggaaaatgatcaagatagccccgatttcatgtctgctgctcgggaaccctagccgttgccccaatcgtccagtttacgagctcgtcggagctcgaccgcacgtgaacgtcgtcgaggtcgtgtcgtgtgaaggaatagaagttggaggactcttctgtaaagcgtcagtgactcaagaaaacagtatctgaacccattcccaattaatgaaaaccccgagggcttttcggcaaagccgccagcgcgcgcgggcgcgggcgcctttccc

SEQ ID NO: 161062 - DNA, 413 bp, Zea Mays
gcggagcagccgcatcgacgcgtcgttctggtgagtcatcgaatttaacgtgagatggcgttggtgagacgacgacgggtgggaggagcgagtgcaggaggcgaggtagcaatagatgacggtgacggcaagcgacaaccattgtcgtgttgtgacgacgcggtggaaccctaatgagttagtgaggtacatgtgacgacatgatcccaccaacagcttgttcatctgctggtgcggactaggaggcaaaatatcaatgttgtgtgcaggatcccgacgagtcgatgagctgatgagtaatgagaaggcaaggtacgctgcagcgggcgggttaggtcaccgacttactggtcagtcgatgaccgaagaagcgagtgagccacgagtgggagtgagcttgctctagggaagag

SEQ ID NO: 161063 - DNA, 623 bp, Zea Mays
gcccagattagattggatcacatctgaaccggtatctaacctccaccattcgatctaaaatctacggcgctaggtgtaccactccaacttctaatctggagcacccggacacgatccaacggtcgaaacgaatcggtcagccacttctaatcacgtccgcacagttcaagatcggtggctagcgcgcatcttcctcactaggacacacacccggcggcgccgtacacccggctcgacagagcgccatcgccggcaactcccaaatcggtgcccgaacgcataatacacgaattaaataggtgctacgcagggagaaggtaagtgcaaacgctagggacgatctcttaccggctaatgatgcgctaaaattcccgtccgcggtgacccgtggatctacgacggtgatggagctacggtgagtaatttctgctccacccgttgcccatagctctaggaaccgaagctcgcgcatcaggtactcctcgccgacctccccgaagcgccctggtcaagctccgcggtcaccaaccggaatcgcacgatgcagatggtccaaaatatctccctcacggtgacgagcacactgttgtatcaatggtcaccagccctagcatgcatttgcg

SEQ ID NO: 161064 - DNA, 753 bp, Zea Mays
taaacattaaaccccaaaccctaaccctcaaatcaaaacccgaaatctcgaatcccaaaagcctaatctctaaaccccgagccccaaaccctaaagcctgaacattgaaccccaaaccctaatttgtgaaccctatacctcgaaccctaaaacaaagacccgaccaccaaaacacaaaactctaaaccccaaactccaaaccctaaaaagtaaagtaaggctgttttggcctcgcgtgagctacaacacatgttttcatggccgaacaaccaatttagtgtccaaaccatagtacactagtgtccgaaccattgtacacgcatttggccccggaggccggtaaggctatttttggcctcccgcgacacatgttttcatcgtcgaacaacaatttcattcctcccgtccaccacccatgttttggccactgaaacaggtaaggatgtttttagcatccagtgagctatagcacactaaacctcgaaccccaaaatcctaaaccccgagacccaaaccctaaaccatgaatccggaaccccgaaccctaaaactaaaacccaacccccaaaacacaaaacctcaaatcctaaactccaaatcctaaactccatatcctaaacaccaaacttcaaatcctaaaactcaaattgaaatcctaaacctcgaaccccaaaagcctaaactctaaacacagagccccaaaccctaaagcccgaaccctgaaccctgaaccctaaattgtgaaccctatac

SEQ ID NO: 161065 - DNA, 414 bp, Zea Mays
ggtaggcaaaacacaaaaaagtctccttgcaggcgcttaaacctaggagctcggtcttatagttagcaggtcaaaccattgagctatgcacgtgttgtcgatacatacccagcgctagtatacttaaacgcattagactccgcattgccaaacacattgggcgccaaaaacattttcgccatcgtcactaaaacagactctgctctcatcctctatctcccgcactcctcttatttctcccccacttctcctaacctaatcgccgccgccgggacacgacggctgtcgacgacctgccccctcgaccaggtacctcaccgccgtcgctgggacacatccgccgtcgacgacctgccccctcgaccaggtacctcaccgccgcccccttacctctcatcgcgtcgatgagctgcg

SEQ ID NO: 161066 - DNA, 657 bp, Zea Mays
gcagcagatggagcacccccattgaggtcagtagcaggtggagcacacccattggggttaacgtcagtaaattcaggcacaggcacttcttcagcagcaagaactgaaggaccaacgtcccgatccaaactagatactcgccgaaggcgtctctttttctttttctgctcatcagcagaaggatcaggttgattggctcggcaagggcgttttggacgaacactgacaggcctctgaatatccaaggttgtatcagtttctgagagaggcgccaccaccaatgtcccagaaggagcagcatcagaagagtcctcagccagcaaatcaagcatagcacttatctccgcgtcactaggatccaaaggcacctcaaagtggacctgccgttcatcatcaggaattccctcgagcgaggtaatcaaggcgttaacttcttcagcagagggtcgaactctaaggcccaaactgccatcagcaacaggtggattcgaagcaaaatgagtgaaggctttggaaggaggcaggttctaggccgagtatgccactggggcaccaacatttgataccttgcctctaagaatcatctcaagtcggttcaccaagtctacagagggaattcttctactggtaacccgagttgaatcagctaggcctcgg

SEQ ID NO: 161067 - DNA, 382 bp, Zea Mays
ctttgctcgaatcggtacgcaagatctaatccagaccgtctaccaaggatccaatggctagaaacctatcttcccgacatccactacgcgacggtgaacaggcaaccgaggcggtgcggcgcaacagcgaagtgccaaattcgatggccatctccaccccgcaacaatactaatcgattctattcgcgtactaaacagaggcgaaatcatggagggttttctcaccggaggatgacagtgcgcgctcccaaatctacttgccgatggcgagtctagtgttgtgtcagaggggaaaactccaaataccccagccgcgtgaccaccccggtactgctacggcagcacgcccacggatgcagtgcagttcgctggccgatccttc

SEQ ID NO: 161068 - DNA, 468 bp, Zea Mays
cgcgactataaatagccctgtgattcccggcgaggcacgaccatcacacacaccgtgggttgcatcgaagccaaattcgcgctgactctgccccctcctctcaaattgattgtgcgcagtaaaactagaacctcttgcggccgtgtagccccaagctccgtcctcaattccacctgagcacgccgcgacgccattttccccaaatcggtccgccgcgccgccgagaacagctcgtccgtggctagcccgctctggtaagactctgtccaattcaagcgttgttttagtagctctgcatgcttgtgaagcttgtcgtcgcaaccgttagctcaattcggccatggttaagcgggaacgcgagctcgtgatcacggtctccgccatgcacatggccagaccattcccaaattattcaagctaagattagtgagtgttcttgagtcaccttaggtcggttatgcctccccg

SEQ ID NO: 161069 - DNA, 558 bp, Zea Mays
aggcaccttcacaacacttccagtaacatatttgccaaatttcacgccaatccgagattccaggctttaatttcaccaaattccccgtttcgagcgatcgtttccgagccgagtgcccaaatctctttttcttcgcctaaattcaaaccaagcacacacttcactcatattcacctatataaacctattcgtgaagtatcggctcaattccatgtcgtttcgtgcctccattcaaattccaaacctcctatggcactgtttatcgttcaaacgtcgttttcacgtcgtttgacctctcgattgtctcatctcgtgttttctgtgccatatttctctgtgtatgtatttattcacatttcatatacttatgactatgtgactaatacgtgctcacctcttctgtcatttcagtgaccttgattgcccgtgtgccgtctcctgtcctgcctggatcgtcacctctcgtgtgagctttccaggtagtcatctcatcctttgctattctatttggatattatcgatctgtgcttagtcactctctctcatttgtagtcatca

SEQ ID NO: 161070 - DNA, 1144 bp, Zea Mays
gaaagtagatgggaccgcgatcccatcatcctttgttgactgcggtgtcacatggagcagatatctgtatcattgcatttaatgcgcacgtcttcatggttcctgagatctttggctgaggctaggctcgaggctgtccttcgttcgagatgagctcgagtgagacagaaattgctttccgtgaagggggccttcaggcgagtcaaggatttctcacgggtgcagccttcgccggtggatgggcttgagcgagacatagttttgagcgaccattgagcggggcctcgggcgcatcgtgatttaaccctgctcgatctcggggaacacattttctgttaggtatgcttaagggcacaatccgtgtacccctaattatgataccgacacctggtttagtggaactttggatatgcttatttttggtcaacgatttttggctagacccactgcagttaggtctaacctggcttaggctcatctttggtcatggagtcgagtacaagcttaccatggtcaggatttggtcgggttctacctggtcaagatgataggtcgaaattgattttctctagggattcttttgggtttatgtgatcttttttgctctctaagagcgatttttgtgatgttcctagggttccccatgtatgggtacatgacaatagccccaagccatcgatcgagtcatgagatttagtcgatggttttttcgtactatcaactcagtatttgggaactcatatgctaggcctttggtcatccttcttatctagtcacacacagcgtgtctagtggacatagcccctgagtccccaagtgattttgtatgaatcgatcaggggttcaaaaagcgacaatgcatgtagtttgtggagaaagtgaattctattggtcacacgacgtaaccctcaagcctagagtgattttgtaagaattggttaggggttcagaggaacgaatccatttgttttggaaaagacaaggtggtattttagtcttcatgtcttgcttgattatttggtcatatctggtgtgttgacacggatgtgggccttaagcccctaagtggttttttgattaaataggtgttcttctggtcatctagtgaacatcctctagttctatccctactatatgattggac

SEQ ID NO: 161071 - DNA, 376 bp, Zea Mays
ccaacagttgtcgtaaggggaggacgagatcaaagtggtgcggcgacacgggaaggaagaaggaataaatatcccattcaattttgtgaggaggacttgctagaggtggagaatctactgccatatgagatatcaacctatttgtgtcagtatttggggattcctctatccttgcacaaagtaactaggcaggagtttcagccatttttggaacggatttggtatctctagttttccagagctatgttgggctctccgcatgagatggctatggcttcaaaaggctgactcaaggcgcccctggtcaggtctccccatccaggttccaggcaaggctcgagatctctttgttgcggtcttggtaagcgaaataggg

SEQ ID NO: 161072 - DNA, 371 bp, Zea Mays
atcccttttttcttgctgggactggattctcacccactttcagtcgtcttcctgtgctgggattcttctggttctgttgcgggatcccatatgaggtacggggatatctcaaatggattatttggattcaattctccgggagctgcatttcggcatgacttgaatcagttcgcgctgcgaccaagcgcaatctgagctactttgcttgcgattctcgtgatttggagttggttatctcggatcgaacgattttcctgacaatctttaccaaatccatttggtgttccttggttattccgtcagacaaggaagcagagtttgaagttgttcaggttggttgctggttgtggtttggatctcctccgttttcc

SEQ ID NO: 161073 - DNA, 1454 bp, Zea Mays
ctattaggttagatctattagatcgacctcaaatggccagttccaaagatcacactaaagtttccccaagcaacaccatgaagtcgactctagagagtctatcgatttaagatcaatagcgatttgaagattacataaaacaacgacaagcctaagaatgcgaggaggcaaaggaaaaatatctagtacacttaaaggtgcatcgacatcaaaggatcatccagcaaggaaagtacgagatgacatctcttgtacctgctacacgtgctcctaatgtaagtaaacccatgaacatctaatcacttagtcattatatagatgagcagcgggatcaattaaaacaatacatggggggtatgaaagagtcctttagaaaattgacatatgcatatgaaaaatccaccgtttctaattttccattgcacgagattgatgctaaggatgtcacacataatttatcagctacaaatgggcatttacaaacccagccattttatggtatatgccaatgaactcatacaccagacaaccacaacctcctccatcaatttggaataaacctaatgtcctgcccatggccagaccgtctgggcctgagctcggactatccacacctctggtcgatggccccgtcctttacggtggacaacccaaaatcatgccaggacccctatactctttgcaaggcttaactaacacgctcagaccgtctggttacacacgcaccattcgaatatctcgaaccatctacatttcataccagtccatccgaatttaacaccggacagtctgtgttccacaccggaccatccagagatgagtacacagaataggatgcggattattacccacaattctttcacccgccacaacaacacttacccctctctacgactcatcggggttgtagtatggctctaccctcatatgggaatgaacactttttggcctccaggagggcgaaaagaattaatacacaatatggagcgactagggtagtatgagcatgccacaaaatgacatagctcatcatccatgggcaagaggtcggcatatgaagcccggccacccacaccttcaggcccaagggctagagggctaccacccgtcactattgatacaatgagagaggaaatagcttaagcagttcgagataaaacttggagttagcatgagcaacatttctagcacaattaggagaattgaccgatagagaagcttttcacattcacttgttttcattatacctaaccggtactgcatttgcatgctatgccgccttgccacctaactctatctattcatggggagatctagagcataaatttcatggacattttttctctagagaatatgagttagagtaagtcgatttagcagcactgtgacaagggcgcgatgagccatttaatgattttatccagaggtttagggacactagaaaccgatgcttc

SEQ ID NO: 161074 - DNA, 1807 bp, Zea Mays
ggaattcatcccccacttgtttatctttagatggtgatatgtgcatgatatatgtgcaattgtggtagaggttttttaaagctgcaattgccttttatgaaggggctaatcttgaaccagagaaccaaaaatatctcagcacctagtactatttcttgtccaaagaacatggcttccattagagtggatagggtcatgctttgatgctctactcattaatcctttcttttttccactattaaacaatagggatgctgttgaggagggaatgaagtcgcaagccaaacctaaccagtcttccaccgcagccaggagtcttttcggcccaaatttgatgtgatgatgacgtgacaaatgattgagtgttttgcaccagaatccaaaacagttgcaacacaatttgtattttagggaaagtgttaaactgtaatttgacaaattgtgatgttttgccacgtttgatgatgtaggtctggggcttcacgaccagtaggttaagcgcataggacagatgcactgtttggtgctggtttagcatatctactaatagcgaaatatctctgcaccatgagctctcgaacctggccactacacgtcgttccaaaatcaggacctttggatggatcttaagcttgatctcaaccgtcatttcttttgccttccgcgccgtcattccacaggtcgcgagcgctcgcgtttttccttgagcgtcgttcttgctaatgctagctctccatttttttatttttatatttaaattaattttgtttgtaaaaatattgtatgaactttaaaatttgtagaaatatggtcctcgtcctttgagaggatgattttttgtcttttttattgaacgaattgcaacggctagtagcagatacatgtgtacgttcgcaggaatgatgtgctgcacaggcaatgacgaggcctggaacaacccaaactagcagaggacccggtacacaacgtgctcctccacgaagatgtcgaagacgagtggtttcctagtcggccaatagtccctgtcttaaaagcatagggacaaaaggccgtagggagcacgccgttgcacgacgttgtcggtgtacggggtctagtggacctggtcatccttcaggttttttggcgacctataacacatgtttttctggccgaacaaccatttttcatgactccggtctggcatccacgttttcggactcgggagccggtaaggctgtttttggtctcccgtgacaattagcacacgtttttctggccgaacaaccatttttcatgactccggtccgacacccaagtttttggccttaggagaccgcaaggcaatttttggtctccggtgacagcacacggttttctggccgagcaaccatatttcatgactccgatcaggcacccacgttttcagcctcgggagccggtaaggcagtttttggtctcccgtgacctatagcacacgttttcctagccgaacaaccatttttcaagattttagtctggcacccacgttttcggcctcgagagccggcaaggcagtttttggtctctggtgacctatagcactcggttttctcgccgaacaaccatttttcatgacttcagtccgacacccacattttcggcctcgggagccagtaaggcagtttttggtctcccatgacctatagcacatgttttctggccgaatagccattttcatgactccagtccagtacccacgttatcggcctcaggagccggtaaggctttttggtctcccgtgacctataacacacattttactaaccgaaaaggcatttttcatgac

SEQ ID NO: 161075 - DNA, 1383 bp, Zea Mays
gtcgtgattgagcgtgtggtcagggagtctggcaactctcgcaaatggccgcaattagcgaggaccaactaccacttgtggtctctgtttatgaagctgaatctccaagctcatcatctacgggacgccatcaagcatggtgatgtcgagttccacgatgatcggatggcgctagaggcaatctatagtggggttcccccaaagatgattttcaccctagcgaccaagccattggccaagggggcatgggaggccgtcaagaacccttgcagttgcgatgaccgggtgcaaaaggcagccgcacagaacgtcgcacttacgagttgatcgcgatccaggatggtgaattgattgaggactacactatatgactatgtctgaccaacatcgtccaacatctagcaactcttagtgacctagagccagacgagaaggtggttgcaaagtacctacacatcacacgcccaaggtataagcaacttgtcatctccggtgaaactctcctcaacatctccacgccctcgatcgaggtgactagaaggctcaaggcaacagatgacaacgaacctgcactggcgtaatccgtcggtggcaagttgttgctcacggaggagcagtacattgagcactacaagaagcaggactagaggtctagccgtggcaggtcaaactccagcgatggggccgaggacacggcactgacagcaacaacggttcatagatcgggacgaatgcgggccatgccaaccccaacgaggcaacgatgtgtgcaaaatttatgccaagaaagacaattgggccaaggattgccaaggtaaggaggagcaagctacaagcccatgtggcccaggatgatgagcccactctacttcttgccctaggtgtcgtgggagggaacttttccccaatttgaagcgcggtgttggcttcgattgcagcgatatcgtcgtcggtctgtggcgatgggcagctccacttcctcggaaaaaaggtattcacccgccttcgacaattctagagtttgtgactcgaagcgatggatctaggacaatgacacatccaaccacatgccaggcccgcagatggtattctcaagtctcgacgccagcgtcactggctcagtgtgattcgacaatggctccaatgcccacatcgaggggatcggcactgtgctattctcctacaagaccggcgagcaccgcgccatctccaacgtctactacctatcgcgcctcacaaccaacatctccattggccaactcaacgagatcgggtgctaagtgctggtggaatacggggtgatgtggatccataacgaggagcactgcctgcttgccaaggtccaccacaaccgaggctagctctacatgcttgacatcgtca

SEQ ID NO: 161076 - DNA, 764 bp, Zea Mays
gaccatgaagaagggagtatttccatgcaaagctcagctaggttgagttcttaagctccaaaccacatacgacaactctctgatccacttccctgcgaacttttcattcttgtcgaagactttcttcctgagtgcttccaatatcattctattagccctttctacctgaccgttggctcttaggtgtgctactgatgcatatttgatctggatgcttctttgttcacagaaatcaaagaattccgagctagtgaaattggatcccaggtcagttataatgctattcagtattccaaacctgaatattatatcttgtatgaattccactgccttagctgaagtcagagaagcgatgggtttgtactctatccatttagtgaatttgtcaatagcaactagcacgtgagtgtatcctccttgagctttcttgaatggtccaatcatgtccagtccccagcacgcaaatggccatgttacgggtatggtctgcagttgctgtgctggtaaatgttgctgctttgataagtattagcaaacttcacacctctggactagctcgactgcatcactctttgatgttggctagtagaaaccagacctgaagaccttcccaactagagtcctggatgctgcgtgtatcccgcattgcccagcgtggatctcatctagtagttgcttcccggtagccgaaagaatgcacttcatgaggactcctgttgtgccccttctgtacactgcttccccaatgagagtgtagtgggttt

SEQ ID NO: 161077 - DNA, 362 bp, Zea Mays
ggattgggaacgacccggcgatgccccgccgtggtgtgctctgcgccgccggtgggtcagccgatggggagaagaagctgggttggctatcgaatcggcgatggacggctaaaaatagaagcaggataccccttcgcgtaattgaatccaagccatttgtttgcaattgaacggatgcgggttgatctcggtcatattaaatctgatccgttgatgggggatctgatggtcgagattgcgtaccgcttcataaagaccgtggtttgatcggaggcgcaggattttgatcctacggttcatatcagccgatacctctttagcatgggcaagtttctaaaaacgtcctcagactttgagtaaac

SEQ ID NO: 161078 - DNA, 280 bp, Zea Mays
taggggcagcgctgtcccctccagctctcacaatgaaaatatcacggaaatatctccctttcatagcatcaatctgactctgcttgatggatgacttgccgaagatggtatgactcgaccgctagggccgattttcggcatcttcgtcttcactttccacatcaaagccttcgctatcgccagaatcttcagataaaccagctagcatttcatttgtaatcttctctgtgtttgtcttctccatagcctcgtaaaaaccagctagagcaggatcaacaac

SEQ ID NO: 161079 - DNA, 435 bp, Zea Mays
ttgagttgttcacctccagaggcaatgaagaggattcctgcgcctgctccctgcagtttcagcgagccatcgaaatacattcgccatacttctgtagcctccaggttgtcaggtatttgttgctcggtccattctgatacgaagtcaaccagtgcttgagtctttattgttgtgcgaggccgaaactcgatgtcgtgagctcccagctcgcaggcccacttggctattctctcgatggcttctttgctgtgaagaatatcctctattagaaacccggtgactactatgactttgtggtcgtcaaagtagtgacggagcttacgagcagttagaagtactgcgtataataatttttgaacttgaggatacttttctttgagggccccagaacttcactgatgaagtagaccggatgttgtactggatatgtgtgcc

SEQ ID NO: 161080 - DNA, 595 bp, Zea Mays
ggaaaagaccctagaaggacctgccttcatcaaggaggtagaagagaaagttgccctaatccgcaggagactactcgaagcccagagtcggcaaaagagttatgtagacaacagaaggagataactcggtttcgaggaaggagattttgtctacctcaaggtctccccaatgtgtggagtcaaaagattccaagcaaaagggaagctagctccacgattcgttggcccctatcctatcatcggcagaataggaccagcagcttactgccttcagttaccagagtctatgtcagatatccacaatgtatttcatgtatcttagctctggaaatgcataaaagtaccagagagtcacatcgcagaggagtcagttcagattcaaaaaagatctacagtaccgagaaaagccagtgaaaattcttgattcagccattcaaaagacccgaaactcaaaagtaaggctctgtaaagtccagtggagcagagaaggagaagaggaggctacctgggagagtgaggactcattgaggagggaatacccttaccttttctcaaacccagcctaaatctcgagggcgagattcctttaagtggg

SEQ ID NO: 161081 - DNA, 382 bp, Zea Mays
aagtggtgcgcgggagtggggggaatccgctgaccaggggaaatgcggtcgtgggtgagcggttgctccgattgtgactggttctgcggcacggggtggttggatgggcagtgaaggtcgtgcaagccgccagctagggagagagacggtggaggtcgctggacgggggatagggttgtggaagccgccggctagggggagaggcggaggaggccgccgtcggtggaggtatggaggagggtgcgttctaccctctggagaacgaagaccgtggttctatcatctggtaaacgaagaccgtggctcaggagagaaatcctaggttaaaagtacttgtttgctgaacatcttaaaaatacaagaacgcgagattggatgtaat

SEQ ID NO: 161082 - DNA, 615 bp, Zea Mays
cgggtgggtcccctgtgtcagccacgccagcatctcactcgcccgcgcgctctcaaccgaagtcgtgtctctgcccagctgacccccttggcagttactcgtgtgcgcttggtcactgaccggtgggccatgcatgtcagctccacctcttccaccaaatccccaacagaacgctccgaaatcctctcaacgccgtccgcggattccggcttggctttgtgcccacgcctctgggttataagccgagcacccatgacctcccatcctcctcgcgacttcgttaggcactttagccaagatcggggatggggacacctcgttgtcgtgcgggatccatggcggatcgttgtcgccagcgactctgtgcaagtaccgatgacagggcacccatgaccatccagggagcttcgttccgtcctggaaatggcgtcgatagtctctggtggcgctggtggcctcgctggtatgcgtcgcgcgtagggtagacgcgcggtggaggctccgggcctgggaagctccgtcgccatggtcggaccacgcgctatgcgtcgtggaaggcttgtggaacgtctcggctagtcttcgggtcatgccgaagtcgattgaagctcgtaa

SEQ ID NO: 161083 - DNA, 467 bp, Zea Mays
gcttcaccaccgcctcggatctgccacgcaccgtggtcacgtttacgcgatccagaaacgcaggtgagaactccactcctaccttcaccatgtcggtctcgtggtgtagagcggtccaattttgggtatggggtagtgattagccggattgtgtgccgccggtgagctatccgccgcggcaccagtgcgccaccgccaccgtgctcactgtatattggtatgcgcgatctcggctgtcgatccccggttagatggtcgggattagaaaccaaataacgtttcggccatggcgtatagagatcgttggatgagaatccagtggcggggaatgggtccacggatcattagatctagaccgtgggatctaaatccggtggtcatcgtggcgtaccggttcggcgcacatgggatctaatcctgtgcgcccatctttgaacgaatggccgtgatccaaacttaccccttcg

SEQ ID NO: 161084 - DNA, 790 bp, Zea Mays
gtgcggccgcgcggacgaggcactggcactgttcgggcagtgcccggagctagacgtggttgcgtgcaacagcgtgatcgtggcgctcgcgagggccgggcgcgtcgacgaggcgcgctcagtgttcgacgccatgccggagcggaccgtcgcgacgtggagcgccatggtgagcgcgtacgcgcgcgccgcgaggtgcagcgaggccctggcgctcttctccgcgatgcaggcggacggcatggagccgaacgccaacgtgctcgtcagcgtgctgggctgctgcgccagcctcggcgcgctggtccagggcgcgtgggtgcacgagtacatagaccgccacggcgtcgccatgaatgcgctcgtcgtcaccgccttggtggacatgtactgcaagtgcggctccgtagacgatgcccgccaggtgttcgatgccgcaaggtcgcaaggcttggccaagctatcgtcttggaactccatgatgcaggggttagcggtgcacgggcagtggcgagaagcggtcgccttgttctcggagctgaaatcctacgggctgagccccgacaacgtcaccttcatcgcggtcctgacggcctacggccactccggcatgcccgacgaggctcaggccgcgttcgcgtccatgtccagtgaacacggagtggagccggggatcgagcattacggctgcctcgtggatgccctcgcccgcgccgggcggctccgggaggccgaggacgcgatccgggcaatgccgatggcgccggacgcggccatctggggcgcgctg

SEQ ID NO: 161085 - DNA, 777 bp, Zea Mays
ttcctcttttcctccattgcagcccgcagctccttgccttccccccataggaacgcgtacagcagtaccattcccccatgcacatacatcttatcatctcagttgtctgatttgttacagctacagtgcatcaggcctgaactgaaaaggtgcaggctcgctcattctcaaagatggtcacccatcacagtggttttatcggaggactgttaggacacatcgactgacaagtgggactagaggatctggtattcctattaccattagagggcgctagttgatcggttcaacagccatattgaggaaaaactgtccaacgaccatattgactatttgagacaacttcaggcgtagagtagttaaaactcggttagggctgattcccatgaattccctctaatttcttggtcactaaatcagtccttggaggggtactacttttatttccgcttaagactgaagcgctggatgtcgtatatctcgctcgatctcaacgaaaggtgataacattagggtgagatatggatgtacatcattgttgccccctgaagcccacatggaaatgccaaaggaggagacaataggtgaaaatatgtggtgggaggacctagtggagatggacgcagtgtgagaactagtccttacgaaaatcgaccaactcgtcaacactaagtaggctggtggcatccatcgtgctcgcacaccatgcaacacagtggatcaattgcaggagcatgggagggtgacatggagctacttcaatgtcgacgacctatg

SEQ ID NO: 161086 - DNA, 838 bp, Zea Mays
gtcttcatcttatactttagaaatcagcattctatcatcatcttatgctttagagatcagcattttgtcttcctcttatgttcttgcgaattcaaacaacgttatctgtccatgccttgttaggtctgaaattaatttgatcgatgacagattggacgtctggctggtggaggcagatggctctcggctagacatcacccgctctatgcttcaatgcctctgctgattagacttgcggttcagtagctatatttggacttcctcccatctcagccgatctcttccttttgtcgtagtacattcattgcgtatactgtgtggatatgacttcttcagaaaatattttgaaaattcttggcaacacacccaatgggcgtgcccaaggggtgtcttggtacgtagagcgtttagcacactgtcctagagtagtaacttgatgtgactgtggggtgtaatcatattgcctgagcagttaaccttggtccaaacggtgtcatgttacgcgaagcggcgtctgttgcctgactcattttcaggcggcttgaattgcttattgaatacttgcgactgttcggcgagcgtggtaggaagtggacggtcacccccggcctctataaatagcctgcttgcaccgttgttctcttcactcatccttcgatcatctgttgctttcttcttctttctcttcttctccaaccaaccatgggtagaggcaggaggggtcgtggctggcctcgtcgtgttgacggcaagcgtaagcgtgccccgagtcccccctcgaaggactttggggactcagagtactcggaggaggcatcctccaagtcagaccgttcac

SEQ ID NO: 161087 - DNA, 564 bp, Zea Mays
atctttaatcaattcgagccaccgacgcagcctcaaattcagctccttctgagtgaaaatatacttgagacttttatgatcggtgtaaatgtcacaagcctcgccataaagataatgcctccacgactttagagcaaaaaccaccgcgtccaattcgagatcatgagttggataattcccctcatgcttcctcaactgccttgagccataagcaatcactctgccttcctgcatcaacacacagccaaatccaatttgcgaagcatccgtataaactgtgaaatgcttaccactctcaggcaaagctaggataggggcgtccaccaacttgctcttcaatgtctgataactgacctcgcaatcgctggaccagacgaagagaacacctttctccaaaagtctagtcaaaggcttagcaatgctggaaaaatttggtacaaagcgccgataatatccagcgagccccaagaaacttcgaatttcagagacactagagggtctcttccactccaccacagccgcaacattcttgggatcaaccgcaatgccctgttgattaatcac

SEQ ID NO: 161088 - DNA, 415 bp, Zea Mays
gtctgtcggcatggcaatgatcttacgattgaacaatcgttcaacgagtttttggaactcatgaaagacttggaacatctcagaattgtgacgcaacaattaaatccaagtaaatttgctataatcatcaataaaactaatataatattttttgtttccaaaggaatcagtggctggaccccacacatcagagaagatgaggtcgagaggagcactagatttgctaatagaaacatgatagggaagctgacatgctttagcacgtaggcaagcatcacacacagatgtcttattttcttgagccgaacataaaagattattttgatgaatgacacgaagaacgatctcatgagcaggatgacctaggtgagcatgccagcggagcatggtgggctttatggcggagagaagatgc

SEQ ID NO: 161089 - DNA, 313 bp, Zea Mays
tattcttggagagagcaaggtcttgctctcattcatgaagcccaacagttcagagagcatcaacatttttgatatgatctggcaggagattatccatgctgcctgctttccacttaagggatgtctacatgcacatttcatcatgaagatgattgaagtggtgacgcaattccgctatgagaaaggtactagacatctatcttatacccccttctggattgatccaaacaatccagcagggcatttgaggaaagccccttccagctcccgtgcacatacttctgctggtcctgctgctgctgctgccggtgcc

SEQ ID NO: 161090 - DNA, 711 bp, Zea Mays
taaaactttgatgtagagcattgatctagtcaccatacaaaatctggaggaaattcgccccaaacatgatctgtcagaccgactgaagaagttcctgatggtacagtgaccagaaagatctgttggtttagtgaatcggccgctggagaccccacatgtggattcacgccggtgaggtgattcgtgctcacttaggcccggataacgcctcggggtagaaagatcttcaccgctattgagccatgggcactattccgtccggccgccgtgtccgcttagccccggtcgcttcgaatctaccctcgccggagttggacacctcgcggtcttgtgccacatgcctcggcactttaaccacgccgccatgactcatactaacctatcaaatgatcgccggtgaggttgccacggttatggccaccaatcgtgtgcgctagtgcacctcctcctctccggtcgccgcgcgtccccatcaaattcactagccaccgctcaaacacactataaattgagcacaccctcggctccgttaggtaatccagcatccaatccaaccgcatgtgccctcaattactcaccagagcccgcgaattgctcttttcccccaaatcggtttccgccaccgtgaaagagccctcgccgtgactagcttgttccaggtctgttcatactctctgctcttccgttttagcatccttaggatctcctaat

SEQ ID NO: 161091 - DNA, 683 bp, Zea Mays
cattccaggcccaggcaaaattctagggatcggtcagtcactgacttcactccctgtcttttctcccgacattcaccccgagtgcgcgcgcgctctcttccctcgctcgcccgctcgttcgcgacggcaactaggcgatcaacctcgccgcccgccgccctaatttacgtgcccaggtcttcgtccgtcccctctctaggacttcgccgatcctttctcaggcgacgggagccaaccaggtatgtgcaccccgtctcgccccttcctggagtgagaaaccgggcacccgaaccctaacttaagatatttggatactcacattcgaatctgatctagttaaaactgtatgcgtctattattgctactacattcgattttcctgctataattattagagtgtctccaccctgtggatcgtggttgaggaagacgatcactgtgcgctgctacctcatacagctacgttattgtggtatgctactgtaatatatgcttgtaagggactagtcaattatttcaccgagtaggtaagggcttctatgcttttaatgctcgtgggtagtgtgaaatggtctagtaagaatctctggtcttactgcagaggtcaggtcaaatctagctgtgatatgtgatttgcataatttggaccaagagcagttattcgagtgaaaaaaaaacaaaat

SEQ ID NO: 161092 - DNA, 833 bp, Zea Mays
ggaaggcacgctatgggccgaatcgaactagcggtgacacgcaagggagaagggccggattggccggaggtgtaggggaagggggggcgaccgggcacgggctcgcccactacagcgtcggcggctgctgagtaggggagaaggcccgatgtcctgggagcaggtggcgccgactaggagaggaggggagggtgaccgtcagtgagggagagggaggggaggggcggtcaacagtgagggagaagggtcgtccccgggagggaaggaggagcctcctggggcagcgatgcagaagtcggtaggtaggtgttggcggcagctgtgggggtgggtggcggttgatgtgggtgtgtaacactaatcctatgataccatgtaggaaactgtagtacttgatgtattgataggagatgtggtacaatatatagactcacaaccctaaccctaataggccggcaacccaactatggtgttggcccagtcacacacacagtctaacacttagtcatatgataataatatgttagctcttacaataaccaacttgatccatgtcatcgtcatccatgcaacatattgatattcattcggtccaaatgtctaccaaacacaaactagtcactggtccgtgaaccaagcatacacaagtgcattatatacctacaaaataatgtcagccaatgttgtccatcaagttcccaacttggctagcacagatccatcaactacggatttaacttgcattatatatgtaatggccataacttgtggtagaccacaaaaatagagatcataaagtaaccacaacttatagcaggccacataaaataaga

SEQ ID NO: 161093 - DNA, 442 bp, Zea Mays
ccttgactgggcccaagactcacctttcggcccaagtcatctagccgcgcgtgcatttaagctctccactggctgccagccaggccccgcttgccagccttggtccatccgtgtgggaagggagcggtcactgcatgtgggccatccccgtcagtatctccttcccctcgctcgacgcggacagcccttcttcctcgcaaggatcggatcgcgctgaccggctcggccgtgatcccaggaacgcgcctacttgcttggactctacggattggtccgcgtctctgcatagctgatctcccggttgtcatcgcgttcctcaacggtctacccaaccgcgcggttcgcgcggaggtcctcccgggcggagctgaccaaacccgttccctatcgcctcggcccttatatgggaagaattgacgtcaccacctccttcccttgccct

SEQ ID NO: 161094 - DNA, 404 bp, Zea Mays
gtcccggtcttcaccgccggcggccacggggcgtgacatttgggcgggcaggtggttggagacagaaaatcagaaacgaaagacatgttctcgccgtcttcctcatggaggcatggttcaggtgattctcgatctcctcacgtcccggtcttcaccgccggcggccacggggcgtgacagttggtatcagaggctttcgatccttggtgtcgcgtgtagcaggtcgcgttcttcctttacagcgtttccgctttggtgaccagggtttcgggcgtgatttttttctctctcctctaatgactctcggcgtcggcatcgcgtcatcaacgttcgtcgatctccagcgggcgttcaacttggtggtattggcggtggtggttggaattccggtggcgtgtggcggc

SEQ ID NO: 161095 - DNA, 290 bp, Zea Mays
cgtgggtcaccggcaatggtgccgccgtagtgcaagggcggcggcgctgccgtgtttggtgacggggggagaaggcgagctcgccgccatccgattctcctcggacggtagagattagatgtgctcacccgttcagcttggacgactactatccgtctgatcgtgatcgggtgatggacatcgctttagaatttattaaatccggggcgctagtgtttgatccaacggcacagatcgtgtaccggttcgctgagtgagtagtctaatcctagccgcgagatcaagatcca

SEQ ID NO: 161096 - DNA, 534 bp, Zea Mays
gtttgtttggactcagcatcatgatcaggcattccaagccctcaaacaggcgctgtgtgcagcaccagttgttgccttgcccgacttccgtcgcccatttgtggtggaaaccgatgcatcagcaacccgtattggagtagttctcatacaaaatggccatcctctcgcttatcttagtaaggcattgggtccccgctctcaaggtctctcaacatatgaaaaagaatatctagcaattcttgctgcagtggaccactggaaacattacctccaacatgctgaattccacattctcaccgatcatcagagcctcgctcagttaaatgaacagagattgcatacagtgtggtagcaaaaagtgttcaccaggctgttgggtctcaactataagattatttataagaaaggctgcggcaacaaggcagccgatgcactgtccagggtggagatgtctaggccagtgtgcgctgctatctcatcagtttcacctcgttggctggacgcagtagtaaagacctatgaggccgactctca

SEQ ID NO: 161097 - DNA, 463 bp, Zea Mays
tttgcctcaaatgccatccaagactcgtgcacaggatagcgcaggaacctcccgtgggagggaagcaactcctaatccacccccagtacctccaacattagctgaggccatcgctgccttagttaatgccacagccgacaacacccattttctgcgggaaatggcgggacaacaaatgcaatagcaaggcgggcgagcatatccacaaggaccccgcaaaaacttcatatttggacttctcggagacacgtcccccattatttgtcaaggctgaagatcctcttgaagcggatgagtggatccgggttatcgaacaaaacttcgggcttctccgatgcacggagattcaaaagcccttatttgcggcacaacagttgcgaggccctgccagtacctggtggggaaattatgtggctatccagcctgctggtcatcaaattacttgggatgaattcaaattggc

SEQ ID NO: 161098 - DNA, 275 bp, Zea Mays
tatggccttgtcgtgatagcgcctcagagtttgctgataccgtgctgactgaatcaccgtgttcaatcgttcttcttctagtatatcaatatcctccagtctggtagcctcagcttctgctatgttttcaaatatcaacctcggtgccccaaacttgagatcagctggtaccactgcctccaaactgtagaccatgaagaaaggagtatttccatgcagagctcggctaggttgagttctcaggctccaaacaacataaggcaactctctaattc

SEQ ID NO: 161099 - DNA, 504 bp, Zea Mays
cgaccctctgctgaagaagttagcgtcttggttgcttcgctcggggaaattcctgatgatgaacggcgggtccatttcgaggtgcctttggatcctagtgacgcagaaataagtgctatgcttgatttgctggctgaggactcttctgatgctgctcctgctagaacattggtggtggcgcttcccccagaaactgatataaccttggatattcagaagcctgtcagtactcgcccaagacgcccttcccgggcccatcaatttgatcctcctgctgacgagcagaaaaagaaaaagagacgtctccggcgggtatctagtttggatcgggatgctggtcctttggctcctgctgctgaagaagttcccgcgcctgagcttactgacgctgaccttaatgagggtgctccacccgctgctgaccccaatgggtgtgctccacctgctgctgaccccaatgggtgtgttgtctgtgttgctgatgaggacgatggggaggaagag

SEQ ID NO: 161100 - DNA, 387 bp, Zea Mays
aaaatatctcagattgttcattttcatgtaattaagtattactggcaatggtacaccagtatctatggaagttgaccacctaggtaataggatccattggagtacgagctctaattacttcggcgtggagagaagcgaatcgttgacttcgtaggatcagttttgtaatttttctgacacatgatgctgaagaattatatagtttccaggtcctcttctgtagcgatgttgttcacagatgcctagttctgctgggatccaatccaacagaaggcagcatgacaggcaagctattgcccggtgaagagaagaccatacaaatctatcagctatttgcacaacccacatcagcatttgcagtgattccatcgacagtagcaatcaaat

SEQ ID NO: 161101 - DNA, 555 bp, Zea Mays
gtcgatagcagtgaagcagacccaattgagagtatcaaggttgtgtctgagtttccagatgtgtttccaaaggacttgccagtgatgccaccagagcggaaagttgaatttgccatagagcttcttcctggaaccgcccccatctttaagagagcttacagaatatctgggccagagttggtcgagcttaagaagcagatcgatgagttgtcagagaaaggttacatccgaccaagcacctcgccttgggccgcccctgtcctatttgtggaaaagaaagatgacaccaaaaggatgtgtatcgattatcgagctctaaatgaggtcaccatcaagaacagataccccttgcccagaatagaagatctgttcgaccagttgagaggagccagtgtgttctccaagatagatctgaggtcaggttatcatcagctcaggatccgaccttcagacattccgaagacggcattcattaccaagtatgggttgtatgagttcactgtgatgtctttcggtttgacaaatgcaccggccttctttatgaatatgatgaac

SEQ ID NO: 161102 - DNA, 672 bp, Zea Mays
ttactagaaatccttcagagatgcccaaaatagcccatgggcttcaaagccatctcacatacatgggctcccccacccacccaccctgcaatatttacaggaaccaagcaactagcagctcacgagtcacgagccaagcaggacagaaacagacagtcaaaaaactacgtacatagcgaactcgtcatcaggctcaggccccaacatttggcaccatcagggcatcgcagtaaaagattatcctcgggctgcatagacgtcagctgcgatacttacagactgtattcgcctattcagtggatcatgtaaaactgtttgtaaactggatcgtgtaaaatatgggacagggtagcggctggagacagccaagtcacagacatgagctgaagcattcttcttcctgtcaacagaaaatcaaacaattcccttcttgtgtattgctgataaagatggatcccctccatttggcttcgcttcatcccggttttccaaattcatcggtggctttgaaggctccaatattatattacgctgagtattgccaaaaccaaacccgggtgattcctccagatcaccatcttctgcctcgaccgtaactgtcattgctgttttcgttggcaaaacatgttcatctttgccttcccgcttcagcttcttggaagaagtctcggg

SEQ ID NO: 161103 - DNA, 613 bp, Zea Mays
caagggttcatggttcaagggctgatttgggaatttaaaaaaacaaatggccaaactctcttactatgatttgttagttatttgatgaactaaactttgtaatttgatcatatctaaaatttgcatttttcccccatgacttctcccaattaccctttatgcttaacttggcttacttagaatttattagggtttgagagtctttctctctcaaggttcataacaagattaaggagagtttaagaagattcattataaacctttgctctaaattttcttttgatgttcacccttttactaaatttacatgtgataataggttgggttagcttagggaagaaccctaggtgacactagggtgtcacaggccagtgaccccgtaagcttctggacgtccttgattcgggccagaggtctcattgcctcaatttctttgatcttctccgggtttgcttcaatgccccggtgcgaaaccaggaatcccagcaacttccctgcggagacaccaaagacgcacttttccgggttcagcttcatgtgtgttgcccgcagcttgtcaaagaccagggttaagtcttccactagggtcgaccctctcttagtcttgaccacg

SEQ ID NO: 161104 - DNA, 546 bp, Zea Mays
aaagcctgacccaagtgggagcgctgaacactcctaatctgaacatgtctaatctccaaaaggtactctcggacaatgccagcaaaaaattggaaattgacctcatgctcaggtagcggttggaccaggacaattccccaatcatcatgagcggacggttgcgggcgagtgatagtacgtaccataatctcccgatgatcaatgggttgcgccgtgaagccatgagggagaaaagggcccggatcaacacgatggaaagccattccctccgagaatccagaggtcgagtccttttggctcgccgcacactcaccacgcaggcaagggcaaagcaatggtgggattgaccgcggaggaggggtggaagagggttttgcgcacagtgcaagttcggtggaaggcgaagagccacctcttggaagaaccgcctgagcaaactcaccaaagttattaaaaaaaggcgggtgagagggcccacctgcagacgaggggcggacggacctgaaccacagctgcggggggaattcccaaacgacgccctcaaac

SEQ ID NO: 161105 - DNA, 311 bp, Zea Mays
ctgcgatcccgaccggtatatcccccgtatttcacggcggtgatagcttaacggcccagcgcccatggggaggtggttgtgagcaaggggatagagctgaccttgcggccccaccagtcagttggtgaacgtgtttggggcacgcctagggtgactggccgggcgggcccgcgcgtcattgacccaaagaaagggagcagagcgcggtcgtaatgggctggcgcggggagtttccagtgggccgcgaaaaccgaaatccggcctagacacactgttattccctttttcttttcttttctggttctatttcc

SEQ ID NO: 161106 - DNA, 823 bp, Zea Mays
gtccatgattatggcagaaaccgagctcaggaacacgcgttcccgccaactcatggccgaactaggtaaacgagtgccaccgtgagcttcacaagcatacagagacatgaaaacaatgtttgatttggacggtgtcttaccagaatggattggccacggttgagctgctcttcgtgatggcggagaccagtttgggggaagtttgaaattcaagagttcaggtgaatgattaagggtgggagcgggtgctatggcttcacaaagaactctagttttacttcgcacacttaaattgagagaagggggcagaggtagcgtgaattcttggttcggttcaactcactgtgtgcgggatgttcatacctcgcagtggatcacgggctatttatagccgcgacggtccggcgatcacttcccagccatggataacttctttagtgcatgcctagcacgtagaggagaggtacaatgaggtaaatcgaagcatgtgtgacagcgcggcgagagctcactgagtcacggtggccaccggtgaataactccagctggactcggggtatggtgccacgtacgcgttatctaactccggtgttatccgttccttaccgagcccaaattggaacagcgtcggcacgaatcgcggcggtgagatttttttggcgctggcggtctgatccatttcgggacactgtaccatggcgagctccatttcagttaacctgacagagcgacttcagggcatattttctctcagatttctatagcaacgtgaccaacactctacagcaaaattatagcttaatagaccagatccaactttgat

SEQ ID NO: 161107 - DNA, 593 bp, Zea Mays
gtgatggcatggatcatgcacgtgggatggtggattgtatggcttcctgggttggcgtgaattgctcatcagagcatttctttgccattgattcgccgctacatcgtggactgcatcacctgtgtgacaaccagtggtgaggacccttccacccagctcgtcttcatcttctccacatgtagcactcttcgaatcagagcttggcgcggtgtgccggaatttgtggtggtacagccatggtgccaccgtgcaactaccccccgtctgtcgtctggacggctaggggcgggttgaagtgcggggaccgttggatggcgtttgatcggtcctgattagaagtcagtaccccttcgagtttgtttaaatcacggttgtgcgttccggattgggtgaccgatattagagtacaatgttgacgtatctcgagccgccagtcccggatctaatggtgtgggttgcataccaattcattattaattcaaaaattaattatggaaattgattttaatacaaaaataattgcaggaacttgtaaaattcatataaaatttattttaactcctttttgacccattccagttcctgtaattttg

SEQ ID NO: 161108 - DNA, 507 bp, Zea Mays
gaggaaaatgaagatgaactgggctgtattatacccctcttaagcatgtcgcccacttgagcctcaatctcatcttttagagcaggaggatatcgatagggacgaacacacacaggtcgggctccagcgaccaagggaatagagtgatcacactgccggacaggaggtaatgaatctggcaccgtgaacaattgtgagtaggtgtcgagcagggtggctactgccggatgcaccaccgtatcctaggactgtttaaccactgcaacatgaaggaacaaatcatcaggcataccctgtccgcatccttgcaaaagcaccggagtcccatgaaactgaatgagcagccatttagctttccaatccactctcatcgggctaaattgctccagccagtccattccaagaattaaatcataagaaggcagagacaacaccttgagatcttgaatgaaagtgcaatgttgaattgtccattcagctcgaggtaagacagccatacactgtaac

SEQ ID NO: 161109 - DNA, 1453 bp, Zea Mays
attaaataatagggaaaataataccaataaaaataaaataataagtttaagatttggtttgaaacctaaatttgaaaatggaaaatgagaaaaaggagggaaaagataagaaaaggagtataaaatataaatataaatatatccctaaactggtatttttttattttgtgcacttgacctgtgaaatctgcaaaccaattttaaattcaaatagcaagtttgaatttagaaaagggaattcaaaataaaacaaaatggaaaatagaaaagggtctgaatttaattgggccacggcgaccaattcggcccagctagacctcaccgcgcgtaccagcccaacttcccatcatgcccacgcgcaccgacatcctggccctacgtgtcagctacatcatcccacgaactaaaccagctctccgtggatctggtgcttcactggcgggtggacccacgacatcgggcggattcgcttcctggtgcgcactcgctgcgatggggccccattttcagcaaccattcttgcgcagggtgtacctgtgaggtggggccgccatagcagagatagttggaccaagccagctccgcacaggtgtaacgaaccccgcgcgcgccgcatcgacctcgctggggattttaggcggattccgttgtgtgttggctatttccgcgcgtataagaagatcaacccggccgtggcatcctgcgtccacccaaacctagccactaactagaattcggccgacattggtgtgtgagttgagggagggaatactgctccgccattctcggccagggcaacgtcttggcgtcggctttgggtttgagagcttcgtcgtgggattgcgctcgccgtggtgtcaaccggagggtccaggggtgatcgaaccgtcggcaattgcacgccgttgtccgcgctcggccgcaaattcaaccggtgcgtgggctgctgcaaacggcggctaatcgccagtgaggtaacttccatccaacctgtttcctccttgcgagcgcgtagaacctggtaattgaggaatagcatagtagcgggctcgattgacatcgccggcgacgtttgttcctcggcggcgcgccgtgccgttgggaggagagtgaagcgatgggggagatggggtcggcgccgtccgatctggtacgaacgacatatattagactagaagataccccttcgtagcatagatctgaaccgttgatcctccatctgatggatgtggacgcataccggttcgggtgaggttgttttaatctggaccgtccacgcgagatccagcggctagatctttccgataacccttccctagcacatttaacacataagcccctggatttattaagaataaacctgcagtccgtgatggctgtgcgctgagtcttgtgattcttgcgcagggacccctgctcttccctgtactagtgcgcccagtccatgaagtta

SEQ ID NO: 161110 - DNA, 877 bp, Zea Mays
ttgtatgaatctaattaaaattataatttgggatggagggagtagattggaacaagctgaaatggccctatctaatggatacaactatacccccttgatgaggcgttaaagtccgatccaatcaaatacaattgtatgagctcaaccaatgtgaaatgagcctagctattactcaacaggtggcttcatatttcaacaggtggcttcatatttcaacaggtggcaaagctgatacgagcaaggctatgttgatgcgttcattagaaaataaataagaagacacaaatcacatatccccaagcactcttcaacaggtggctattcatattcaagtcaaggcgaaagcaagcgctgaaagacagtctaggattgggagcttctcggatggctcccatcgcgagcgacagccccgccgccaactccccagccagcccgccggccgccactccggccccggcggccaccttcccgtcgcagccctcccccggtaagtccctctcctccctcccccccgccgcggccccgttctaccctgcccgcaccggtccctccgggcgctccaagcccctgcggtgggctgacgtggtggaggagggggagatctctccgccgtgcgcccccgcctcgtaccggggcgccctgcttcgcgctcctgccaagaacgaccggggggccgggacttccgcggcgcagagtcgctcctcatctctagctgcggcgcctaggctacgctccatcgtcgtccgtcctcgtgagccgacccggccgcgctccgctgcgcgccgcaagatgcgtcgtccaagcgcggccgctccacgtgggcaccgtcgccgcggccgtgtctcccctcctgaccacgatggttggcggcgcgtgc

SEQ ID NO: 161111 - DNA, 431 bp, Zea Mays
aattattaaagtcgcgaggatatatacatgatagacacaagcgcgagtgctggactaactggagagtcgtgtgtgcctatctctcctctactcgtataaatcattttttttgaccgtcgtaagtttattcctctccctcactttcgcataacaatcaagaacctagataaaataaaataaattttatctctttcttacatgtttaaccaaccatacaacaaccaaagtgcattattctcgtcgtattattcccaactttccatctctttatctatatgtattattcccaacttttcatctctttatccgtctctgtctccctcatctagattttttcgcaccaccatatagaggacattctattgggcgagttgccatagaggacatcaaatatgccatcctgctgcctttcgactcgccatgcgtcgtct

SEQ ID NO: 161112 - DNA, 669 bp, Zea Mays
gatgtgatcggattttttatcctgattactgctttcatgttcgaaaataggggttaaatagaaaagggcagcttcatcctcttctgccacgcctaagccgaaaggagctaaggttttgactcacatgccaaagcaacatcctttagagaggacagctgcagtgcttgatacagaaaagatggagattatggaacatgtcgaagctatccccttagctttagagatgattcctgctgcaacagtcgaagctagtatcggttcggtagaagagcatccaaagctgctgagtcccccaaccgcaactgagttgtcgaagctaacaactgtcataaccacaacaacgactcgtaagaaaaggagaatggccagtgttttggatgctgttttgaagtctacgaatattccaactcctgcttctaccgaaactcccaaagataatgttgaagagtcgagaaaagtacccattgcaagtgcttccccctcccacgctgaggctgaaactttgggggctaagccaacagaattagagaaggaaaagtcaacattgcctactcctaaagcaccttcccaagcagatttagaatatattgttcaccgtgcttcgggaaagcaactatccgaagagcaagttgctgaagtgcaacattatgcaagagatctgaaataccc

SEQ ID NO: 161113 - DNA, 414 bp, Zea Mays
attggctcttgggtgcgctactgatgcatacttaatctggatgctccactgctagcagaaatcgaagaattcagagctggtgaagttggatcccatgtcagtaatgatgctatttggtatcccaaacctgaatattatgtcttgtatgaattccactgccttggctgaggtcaaagaggcaatgggcttgtactctatccattttgtaaatttttcactggcaaccagtacatgagtatagcctccctgagctttcttgaaaggtccgatcatgtccagcccccagcatgcaaatggccatgttacaggaatggtctgcagctgctgtgcgggtatatgttgttgctttgataagaattggcaagcttcacatctctggactaactcggcagcatcactcttcgttgttggcca

SEQ ID NO: 161114 - DNA, 1669 bp, Zea Mays
cacctccgcaactacccttagacctagcccaagttctagccaatcaaacccgactcatcgaggtcctcactcgaagtctggaaaatcaacgaccaaatggtggaagaccgcaagacagaatgggggatttcctgagactcaagcctcccacgttcgccggatcaagcaaccccctcgatgcagacgattggatgcgcacgattaaaagaaaactggaagccattggttgcccagaaaatcagcgtgttcaactagctgcccaccaactttccgggatggccttagcctggtgggacaccttcaacgtcaccatcagagatgctacctgggcggaatttgaagcagctttccgggagcaccatgtgccccaaggactcgtacagcttaaggaggacgagttccgagaactgactcaagacggaagatctgtcagcgaatatgtgcacaagttcacagagttagcccgctacgcgccagaggacgtcagtaccaaaggcaagaagatggtccgtttcctgaagggactcaggccagaactcaagacaattctagctagccaagacttcctcagtttctctcacctttccaacaaggccatgcaagttgaaagggcaaaggaggaagaaaaagggcatctcaaaagaaagttccaggttctctgggcacagcaacaggaccggcaccagaagactcgatcatttggattcccacccaaggggccaaacttcagtagaccagctggacccaccccgtcacggttcagccaccagagtcagagctctttccattccccctcagtggcaagcaaccaacccccggcgaatgcatgttggcactacggcgatcccagtcacttcaagaacaattgtccacagctgaagccaccaggacccgcctactccaactcggtgaatggccccaagaatacctcggcatccgcccccaaggcgccctcctccgtcagccagcagaacaagatcccgtaccaaggaagggcacgagtgaatcacgtcgatgcccaggaggctcagcaagctccgggagtagtgctcggtgagttccttgttgaatttactcccgctaccgtacttttcaattctggagcatcccactcattcaaagccactagttttgtggaaaagcatggcattccctccactcccctagagattcccttggtcacccgaaccccagggtcagaccttctatgccagctcaaatgctcccaagtcagaatccttttaagtggggtagtattcttggcagacttaaccgtcttgccatccaaaggaattgatgtgatcttagggatggattggctaactaaacacaaaggcatcatcagttgcgcagacaagacagtccacctcaccgaccatcagggaaagtcagtctcttgtcaggcccagccacccgccaatgacccaatgatgttcagtctagcaacaggaagtataacagtggtagaggaattcatggatgtgtttccagaagaattaccaggaatgccaccggaaagagaagtggagttctacatagatctgatccctgggacggcacccatcgcaaagagaccataccggatggctcccaccgagttagcagaactgaagcttcaaatcgcagatcttcagcaaaagggatacattcgtcccagctcatccccttg

SEQ ID NO: 161115 - DNA, 571 bp, Zea Mays
gacgaggcgacgatcgtgacggtgaagaggccggtcgcggggaagaggagcaaggcggagaaggactccaaggaggaggttctcgtcatcgacggcatcgaggtggacagggacgtggccgccaagttcgacgtgttcgtgaacaccgaggaccacggcgcggtgggatcgggcgggcgggagctcgcggggagcttcgtgaacgtgccgcaccggcacgggcacgggcacgggcacgccaagaaggggagagggatcaagaccaagctgcggctcgcgttgaacgagcagctcgaggacctcgaggccgaaggcgacgagagcgtggtggtgaccctcgtgccgcggcaaggcaagggtagggtgaagatcggaggcgtcaagattgagctgatgcattgaagaattcgttgaccatgcaaaaataaagcagtttatttccgcgagagatcgcaataaatggattggcagcagacgttgcttgtgagtttgcatcgcgtgttgcatctgttctaggcgttactagaattttgttccttggtttacacgggactgtccaagtgcatgctgt

SEQ ID NO: 161116 - DNA, 944 bp, Zea Mays
atcctatgtcgagatcaatgcagtagttcatgtaccgatttggtgagttagttaaaatgattaccaactcggtacttgatagttgatactgcaaagtactggtccagatgctttgtaaattggaacaaatctccatgatcagaggggtaccttcaaatgctttctccttgaagaaaatccagacacctgtacatccgaattacacgagaaaggcatgtttttttatgaataatgttgtatattagaagaacatttccaagctgacaattgcagaatgcaacagggctttgggaataaagtggaactggaagttaagagacaagcataaagcaatacgatcttctttatctgtgagtgagattctgatttgcattatactatttgtcaccagggtgtggctcaagagatcagactgttacgttacagctgctgacaacttctgaacagaaaatgctaacacataataccaaaggactaagtattcactcggaatatgatcatacaaaactaatcaaggatgacaggtgttctatagctgatatcgttcagctcacgaattctgttctatagcagatatggaccacaggtgttgtgtcaagtgtcaaccatgctcaaagatgacagcttgagtagtgcagtccctatcttttcctcggggaggaggaaatacatatcacgacagtgttagattctttgtttttgagtggataagcgagtagtttgtacaacaatcttttccatggggaatttgtttgcatgacagtagctagggggagaattgacatctacctagctgtttatcctgacagaatttctggctgctgcaacatggaccaaatcctgcttgttctgatgaggatgcagggaatggcaatcagaatgtaaagtggatgtgcttttacctcagtggtagcagcatctaaccgtctcatcatcagcatttt

SEQ ID NO: 161117 - DNA, 651 bp, Zea Mays
ggagagaccattgattctatgttctccaggttccattcaagtgtgaacaagatgcatgccaacaaggcacacctaccctatagtgatcatgagagagcgctgaaattactacatgctctagatcggagggtttgggaggtgaaggtctcaacgatcatcgtgtcgcccaactacaagactctcaccatggacgagctcttcagtaagctcaagtccacagagattgatcaccagactcgggcaagattgagaaccctagtgcacccaccatggccctagtctctggaggtggttctgcttctaactcctcacctgctatgtttgccctatcttctttgttgtctattacagaggagtaggtggagagctttggggatgaggagttggcacttgtggccagccggttcatgcggttccacaacaaccgtacaagtcgatggcatggcgtgtccaaggacggatgctacaactgtggtgatcccgaccacttcactgccagctgccccaagaagggcaaatcgaagtctggcccgtgcgaccatcactctggtcggtgcaagggcaagtactcctcatgcaagtataagtacaatggaggattcgacaaggaggcgctcaagaagaagtaccttcagaaggcaaagatcaagg

SEQ ID NO: 161118 - DNA, 417 bp, Zea Mays
gccgccgccgtttatctctccgccagtctgccgtggatcgtagttttcactaatcctacgcataaattgattcgtgggatcgattcgccgtgacccgggctcggtgtaggaagttttaatcgggctattgctccctggtcggctcgggcggtcgtcaccggcgtgtcctccgccgcgctcaggatagagcgccaccgcggtccagggcgcaccaccgtggtgatgccatcggtgggtgagcttagggccgccgttcgatactcatcgcacggtcgtgatgagacctgggaataccgattcggacgcgttcgatctgagccgtagattcgaaatcgtggggatcgggttagatttaggttgctgttgatcgcggctgtcgatctgtggatatgtggtcgtgatcacgtaccgtttcgc

SEQ ID NO: 161119 - DNA, 352 bp, Zea Mays
agggccaaacttcgtatgaaacgtcaagcggacaaaggtcgttccgagcggcactttgtagtaggcgattgggtgttcctcaagcttcggccatatattcagtccactatcattgtttgtgccagtcagaagttatcattcatattttttgggccttttcaagtgatacaacgtgttgggctggtagcgtataaacttcagctacctccgtcttctcgtgtgcatccagtttttcacgtatctcaattaaagaaggctgtgggcactagaatggtggtttctccttctcttccatctgataatttcatgttcagtgtgcctgaaaagtttttgcagcgacgtcaaattttca

SEQ ID NO: 161120 - DNA, 534 bp, Zea Mays
ccaaaagtatgtacttatgtaagataataaacaaacaaataaataaaatagtacttcatcacatgttggatttggattgtgcttgttattttgaagattaaatgtgaaaccagagtcaaatttgaatttgaaaatttcaaataaatagagataggaataaaacaaaaattcaaatgaaaaaaatagaaaaagggaaagatgaatcgctacctgggccgaggtccttgttttcggcccattcctagcctaaaccctgcgtagcccaccctcccatttcattcgcgcgggcccaacgatactctctttttccccctgcactcggcttgggccaatgtgggctcattttcctcagccgcatggtccatctgcaagctcagccgcacctatctaactatccccgtgggaccttcttgtcagagttatcgtcttcaatagattgggggcggaatccgtggccggggatgtagcgacccaacacgtgctcggctaaatcgctagcgcgcatgccgcaatactcgcgggtcgtcgcggatc

SEQ ID NO: 161121 - DNA, 621 bp, Zea Mays
tctagaactgttgaacataatcctttaaagaaagaagctaaatctacaactattttcatgacatctttgctgggataacaagaacgtagtgcgataggaagaatttcctcaattagtacatggcaatcatgacttttaaggccagataacttgcactccttaacatccacacatctagatagatttgatgcaaaaccatcgggtgtcctaagattttgaataacagagcaaagaatctccttttgatctctagacatggtaaagggtgcatcatgcattactttgtttcctttgttatccaattgtggatgtagttcaggtcgaattccgagctcctccaagtcaagccttgcttttagattgtcctttgttttaccacttacatttagtaatgtcccaacaaaattatcgcatacatttttctctatatgcatcacatcaagattgtgtcgtaacagattgtgttcccagtatggaagtttaagaatatagacctcttctttatccaatccttaggtttcttctctttcttaccttgttgtttttccctttggacccgtttcctctttttgccttgtttcttaccgtttcctttctttttggctttagctttgtgccctg

SEQ ID NO: 161122 - DNA, 567 bp, Zea Mays
ccattgtgaaggcttaacttttctgaagtagagagtggtgtagtggtaggcttgcaatttatcataccaactcgactaagaacatctgaggtatactttctctgcgagaggtgaataccattatctacattctgcacttctattccaagaaaataatgtaatgggccaaggtcttttagtgcaaaatcagttttcagatccttgagcaaagctgagacaacatcctgagatgaacttgcttcaattatgtcatcgacatatacaagcaagaagatggtgatacctttcttgatgtaaaagaatagagaggtgtctcctttggatgcttgaaaacctagctgcaatagtttgtcactgagtctagaataccaggctctaggtgcctgcttcagaccataaatgaccttgtcaagcttgcaaatgtgtgtggctgcagcttgtcttcgtaacctggtggttgcttcatatatacatcctcctcaagaatgccatgaagaaatgcattctgaacatcaagttgtcatagtgaccacccttgtgaaacagctagagagagaataacccgaa

SEQ ID NO: 161123 - DNA, 505 bp, Zea Mays
gttcatgtttgtgttatttgattgtgaatggtttgatcctcaacaaacgcgagaggatgaatttggaattgtggaggtaaagcatgaatcacggtttaaaggcagcgagtatagcaatgtttggtttgcacatcaagcgcaacaggtgtactatctaacacatcctcatgaaaacttgaagtcttgttgggttgtatacaaaattaatcctgatgtccatctattatgatattattattacaacacaaataacgaagatgatgattctgttaatatttatcaagaagaaggcgatcagtcaaaaaatagagaatttactatatccgaggatttagggctcaatgaagtagctaggctcgccatagatttgatggcagaagaacaaggtccttctagggcaaggactcgtaagtcacagagaattcttgaaaaacaacaaagacttgaaataattgagcagcgcgttgctgaagcagattctgatgccgatgatttttgaaaagta

SEQ ID NO: 161124 - DNA, 540 bp, Zea Mays
atttccttggatctctggactgcgcaccaaaattagggaagtgcaggggcaaacttataaactttcctagacacagtccaaccccgcagtggaccgcgggttgagaaactattaatacaaggtctcttttgcaaaataggcacgacgaaggggtacggtgcattatgggccgtcagatcgtccatcaagcacccagattagatcattcatcttaaatgctcccacgctctctaccggccgttggatcataaatcgatggcaccgattaggtcttcttctaagtgaaccggtacgaaaccaggtccaaccgatccccatcccacggttcacattagattgagtgaataggtatgctttagcttgatgcccatcgtctggtgatagatcgacgggccaggaccctcatccccccaaaccagtcagacgcggcggtgctgccgagcgctcacggtggatgcacaccggcgttaggtgatccggcagcccgaccttcccacgcggatacagacaagggctaaacgaagcggggagatcaacgat

SEQ ID NO: 161125 - DNA, 767 bp, Zea Mays
ctgggaaaggactccattgtggcgacgacggcagtcagaactctaggaggactaggttcatgtcgaaactctgggacgactaggtttatgccctattgcttaatgatgcctattaaacaaatgtgttagtattgcagaggttgttttcaaatctacaaatgaagagttaacatcaattatacttacttgaagcatcgcatgttgttgttgcatgaaagagaagtattccttttgctatctcagctcctcacgtagcctagccatctctaactcctgcttggttgaccgacgagaggaaacatccgagctttgggacgatgatcatgtcctttgatctctcaccttacatgaatcaatcattccaacgagaagtgtgtacctacaagtgttttgaaaaatgagtttagggcatggtcatgttagtagcactctggacataaacttagaatcaactggacacaaaagcatccaaagcctgtccacagtcgctcatactgctcaactaaagatgactcccagtcaataattttttaaaaaactttgatatggttttgagtttttctcccaaaattcaccatgttgaaaactgttggtcctatatttatactaggaggtccattttactcaatattttgttagcctttctctagttgtttcacttctcgattctagacttttttcgctatgttctttgaacatttttggtacatctaaccactagttggcatgtgtagtcatcaagagattttttgttccatatatgatcg

SEQ ID NO: 161126 - DNA, 373 bp, Zea Mays
ggcgtagacagtggatctccaagacgatgaggatgacaaggtggtggagccctaaatagcgatgcttgtggcggagacggtgggtcagaaacaggatgaggagtagcatgtgaagattgatgaggtgatgatgaatgtacaataggaactaaagtttgaggaggcggaaatggttggggatgcaatgacgatggtggtggtggatcaaccaattcgagatcccttcgaggccaaaggatgacatttttgatggcttgtccaagtgtctcgatacctttgggcccagggatgtctagcatgtcgtcctcggatccttggacgaccgtcgtcacttctaccctacaataatcatctggaatgttgcttccatgaa

SEQ ID NO: 161127 - DNA, 392 bp, Zea Mays
gccaggtataagctctatggcaaattcaactttcctttcagggggcatacctggtaactcctcgggaaacacatctgggaattctgatactacattgatagcttttgatggttcgattccctcaatatgggcagtgacttggtgatggcttcctttccttggtctagacaagaccaactccactaaaacttcctctcctgataaggacactaacttcactgttccgttgtcacagctaagactaacttgatacttggttagccaattcatccctaggatgacatctatagtagcatcctggttacccataactattagatcagcagggaactctatcccccctatttgaactcttgcactagggcaaaatttatcagtttgggttctcccac

SEQ ID NO: 161128 - DNA, 607 bp, Zea Mays
tggccaccgtggccgagtcgtcgtcgtcgttcattgcgccgaagtcttcgccagtagttcgtcgtgttctccgtccatgccccaatgtcatccgtctgttccccgtcgttcaccgtcgtctgaggtgagcccatcgaggcgaagctcatctagccgcgtccacccgccctgcgtgtccatagtttcgccatcgcacccattgtttgttcacgcgtctttcgcgcgtgtcgagcgtgttgtccatccgcgtgatcgtgtgcgctatctagcacgcagtgcgcacatcgccctcaggcattgcgcgtctcgtcacgctttagtaaaccactccacctagaattgctcgtgctaattaatatttcacctagaattgctcacgttaactagtttacgtaattaaaagatgactaaccgaatagtaagccaatcagaactaagtgttaagtctatcgatgcaagcgataatacttggttatgtggttaatgccgacttagatgttttcgactaatattcgtttaatgtaagcgtggcgcctgtttagttttttctcgcgtgtcgtgaggatcgcgcgcgtagtcgcgcgttgtcctctcgcgagattaaacc

SEQ ID NO: 161129 - DNA, 863 bp, Zea Mays
ttcgtgtggcacactactcggggaaacctggatatatgggagagagggaagccttggctgtgcccatagtcccccccaagaaccaccaccgttccgcctcgtgtgtgcttcctcgtcgccggttcgtcacggttcgccacgtctggcggaggagcttttcctagtatcggcgggggtgtgcacaccggattagtgaagggcgggtgtagtccacgcgggggaattcctcaccggaagtccgcaccgccgcgggaggaacgtggcgtcgtggtcagcacggtgtttaccaccaccctcggtgagttctctttcccatgttacgcttgaatctctaccacgtctagggtagcacggatttggcttaggtgcgttagttcgtgagaccatgccgatggcaatggcgccgccgcggcgcgccgggggccgggttctgcgctcgatttcggctggaattggatggagtaaagagttcagtgagtcgttaacttcgcgtggaccgattgaattggggtatggcgctctggagggccgaattcgctatctccggcaaacccgccgccgtgaggtgacctgcgcgccgtgaatcaacgccgaaggatggtgacggtcttctgaccatagattgaagaggggaggcgcagattagatattaggatagcgtttcgcccgagtagtggggtccgttcgataccgatctcgcgtatgtgggtcgatcgcgatattcttaatggtctgggccgttgacctggcatcctacgcctgcgggtgagtgcaggaggtattgatggaccaatctaatccgggccggtcatcgctgatctagtgaccgagatcaaaccgtacccttcgccgagagattttca

SEQ ID NO: 161130 - DNA, 893 bp, Zea Mays
gatcttttgttaaataacgtagtacaaaaatattagaaatattgttttatatttgcacaacccaagccaatccaagggattagtgcggtcgtcatattacatgaccggaggggtttgaagttattgggctaactgactcggcttatcatgcctatgaaaaacttatgacattcatcaatactatgtatacttgtcctgaaatctgggcatggcatatatcttacgtaacttatggcaataatcaataccatgtatttctgccacacaacacctagccaagtacaagatacatcaagtgttgccttcgtcaacttggacttatctctctctatgttagaactaatttgattaacttaccattacccaaggctcgactttcagttataacacatcttcaatttaaatcaaggagtttcactaacgaatcatactcgcatataatgaaaatatcatggaacatgtcactaaaacatgtaaatcacaaacattgacataatgtcatcatcctatgataaccattattgtacacatcatcataagcctcccactcacattaaagttatttgtgccaacatttgatgcccattattcttgcgtgtgcctcatgctttgcttatggtagtgacttaggcaataaatctaccatgttcaagttagtgtgcaccttgcatatcttcacatctcctcgacaaataatctctcagattaggtgatatcaccatagtatatgctgggatttttggtgtgaccttggctcctttgcttgtgctctatagcactattattgtcagaaatagaggtctatcactcgagcagctagggatcatgaccgtattttgcttggaactcttcgagctcaccaccctaccattgaggtagatggcatatcctga

SEQ ID NO: 161131 - DNA, 789 bp, Zea Mays
attatggtgtttatttttctgcttttatatttctcataacagatatttagcagaaaaatattaaaatgcatgtaaagtttataatgcacatacttaaatcgctagacatatttgtgtcgcgttgagctttcagactcacaccgagcgattaaattatatagtgggtacccgaacatgccgatcaggctgcgttgttaatcggttgagttatggcattagctgagcattggttgcgccctggcaacacgacgcaatatttgtgtcgtatgaacttggctgcgtcatgtgattgctatgtagcactctcgtttaatcggacaactcctgttgagttggaccgacgtcgccgagtcacgtatttttcgcatgccctgtaggcactgttcgtctgtcgttatcatcgagccacaattgcgtctgttgcgcacgttgtgtggacttgtcgcgtaccccaattactgagccacaactgcgcctgttgcgcttgtcatagaggcttgttgcgttgtcgtagcctagctggccacacacgcattgacgcaagatacgatagagcttgtattcgcgtggattgtggtgggtcgttcaagccctaaagtcagattatgtgcaaccttcataaataattttgtttagctctatattttatttgattgtgttgtgtggcatcatatatttatatatatcgccaagtggccataacaactatatcaagctctatagtgcttggaaatctgggaaattaaattgaattacaataaaacacacataagttaattccgtgctctc

SEQ ID NO: 161132 - DNA, 381 bp, Zea Mays
agtactggagaacaattcctttcctatatgcatttgcatttatacttgaccctagagctaaaatgagaggttttcaataatgtgcatgtgctgatgtctcaacttactcattctgattactttggttatctaacttctgtgagggctgagttgtctgaattatttaataaatatgatgacaattttggttctacgagattgcagaggacttcaaatgctacccctagtgaaggtaagagcaaatatgcttggggtttggtgtttgatggtggtgcatatggcattgatactagtccttcaatgggagttggtgctgatcttggtggctttggtgccatttcttccatgggttttggtgttggttttgggcttggtcatgaa

SEQ ID NO: 161133 - DNA, 372 bp, Zea Mays
atagcaatgagattaaaaatcccagttaacaagagcataaccagattcacattgaggattagacaaaggatgcaacgacacaaccataagacagaagtgcctatacgccggtacagagctaactattaggcatggaactggagcagtttcttgcgaggctcgtataatacgcccatttcaagtgatgtgcaagcctattaccacactaccatcacataggagtagaacagtagaacattcgtaagccatgttgctccaggaattaaaatcaatggggcactagtggcactcataacctcatatagcacagcggttagccatccaaaaggaattcataaaattctccaaacaacatgaccaaagcatcaaatg

SEQ ID NO: 161134 - DNA, 593 bp, Zea Mays
ggaggagccaaccacgcaattagacaggcccgagcaggattggagctccggtgagcaatctacggtgacccatcactctaaatcatcctaggtttgttgcacatcacaacagagacggggcgaacgtgcgagtggggtccatacccgaattggtggggcgaaacttccggtccacagcggtgggcgacacacggcggagcttttcctccggcgagcgattactggcgcgcagagctccgattgcgcccagttgagcaacgtgcgcactccagagaccgcgtagagacattgcagccaactaccgcggccacaccggtgttatcgacacgggaccatggcggcagtgagttccacccgtgagaatcgcggcgacgaattggtggctggcgagaggttgagaataaaggagggagaagaagaaagaagtgcacgggtcgccctttgtacccagtttggggggtcagcccggtcagcccatgcccaccaacttcgtggcagagctgtcgcatcggccgatctccacggcgatggactcggtggcgttctgttggaggggatcgagctgacatattaggcccacacggcagtggcac

SEQ ID NO: 161135 - DNA, 623 bp, Zea Mays
gtgatagcatgtgttatggtgaaggcatttctataatgtaatgtatcactgccatccctttcttagatgagtgacatactgactacgggtaaggtatgatagcctacgcctatggatgccagggcctgggctaccttgcttaaggtgattgacaaccactatagccctttatactttattatatttcatggtacactctacgtgcgcacacgtgggttaggactgatgcatgtactgtgtagtggtcttgagtgctctttagcctaagtcgtgtgtcatcacacctagtgtggcctataatgcctcccatcacatatttattgcattgtacctaaaacttatgcattaagcttttgctaaggaatagtcacatgtgcctcgatgtggggtctatgccctagggttgtactgcctatgatgggcctagcacacccttgtgtcgtaagacagggttagacctagtttccctaagcccctcaactcccccgggattcccatgatctctcaagggcataggtcctagccatccttgaagtaagaggttgagaactttagaggcctagagatcaccgaatggccccatgcggctaagtgctccaagtgttatagggggttggttttcc

SEQ ID NO: 161136 - DNA, 432 bp, Zea Mays
ggaacgaggaaggcgaactggctctagctgcatctacagcggaggttggagatgcagcaggatggtgaaaattcaggttcattcttactcttcttatgctttctttatttttgttcatttctgaatttaaaatttatcgcaaagatttgataggcaatgaattcttgctttctttctttctaattccccgtgtaaagaacttccatggttctatgaaattgtactgcgctggagcctgaaatagagtgttcttatctgttgggttgggtgaataagtgaaagtgcatacttcgttgtcatctttggtgttacgataatattatgactgttttagtaattccttgatgaatgtgtttactttgttgtcatctttttgtgatgattgtgttatcaatgacaccgaactgtttagctgtttatgagaagtgtaaa

SEQ ID NO: 161137 - DNA, 665 bp, Zea Mays
gcctgattaatctgtgaagattttcggtatgatctttataccaaaatgaaagaccattagtccaggtacaactttgatgcagactcgattgcatgtagtcgcataaaatttggagcaatagtcgtttgaattcggcctggcaggcgtactgttcaccagaattcagaaaaatctcgccggggataagatcaccaccgcggctgaggattggactgcggtcgtggtaaaaatcttgcgcgacgtggcacataaacactgaggtggtgcttcccagttaatcgacgatcaccggacgctcgccgtgactctgccagcgcgggtgagctcgctagcgcacatgcagatccttgaatctcatccaccaccggccatcttcctataaattgagcccgaccgctgcttcttcaccacatcacacagacacgagtgcttgcgcaatcgacccaattccaccgaagaactcagataggccataaatctcctcctcactgttcttagcgccgccgtgaaggacctcttcgtgggcagcccttctcgggtcagtactcgcccaattgtctcttgttctagcatttctttagcttcctattgctctcgatgccgtccaattgaattttaccagagccccaccaccagaacacccgttgttccatagaacgccgccg

SEQ ID NO: 161138 - DNA, 737 bp, Zea Mays
ggggtattactcaccgatggtcgagcggtgaagaggcccatccacgaggtagtgcggcccagcggtgaaattgttgtgccgacgagcaattaccggttcccggatcgccaccagagcccggagaccccacgcagaccaccagtgcaccgaaacgattccccagatacacccgtcgaggccccgtcggtggtggttgtgtgttgcggcgttggcggaacaagtggccatggcggcggccgaagtcttctccgaggcggctatggagggcacgactgcgcggctagtgctaaacgagagggcaagggaaggaggtggtgacgtcaattcttcccatataagggccgaggcgatagggaacgggtttggtcagctccgcccgggaggacttccgcgcgaaccgcgcggttgggtagaccgttgaggaacgcgatggcaaccgggagatcaactatgcagagacgcggaccaatccgtagagtccaagcaagtaggcgcgttcctgggatcacggccgagccggtcagcgcgatccgatccttgcgaggaagaagggttgtccgcgtcgagcgaggggaaggagatattgacggggatggcccacaggcagtgatcgctcccttcccacacggatggaccaaggctggcaagcggggcctggctggcagccagtggagagcttaaatgcacgcgcggctagatgacttgggccgaaaggtgagtcttgggcccagtcaagg

SEQ ID NO: 161139 - DNA, 419 bp, Zea Mays
tcctaattcacttgcgcctaaattggtgacttagatcaactcgaccctacccaacaacttgacctacaaaacaggttacacaactaattccatctagcatatagctattgaaccctctacccatcttgtcacaaacccggatgaagacaccaaaggtcgaggaggaaaggatcaactgcgttaaggaaggataagagtcaagccaaatatggtcttcagccccaactcaagccttcaaagatcaagctagatcatcagatgaatcaagatccacaaatcttggatggagtcttcccttaccctactctgtcttacccaaacctatctatgctttatagacatcttttatcctacatgataaagtggatatacatatatatacccatgccttcataatcacctgctaatttgtgttataa

SEQ ID NO: 161140 - DNA, 340 bp, Zea Mays
cggctatctccttgaccgagggggagggacttgccatggttttccacaatgaaccactctaaacgccatcctttaatgctatccttaagtgggatgtcaaggtattctgttttcctcccacggtgcatctccagacttgcaccacccatgagctggtgctgcccccaaccatcccaggacgacaatgatacaagtacttccacaaaccgaagtgaggaagaattccaaggtaggcttcgcacagatgaacaaagacagaaatttgcagaatagagttggaatttaggtgagtcagattcaaattgtaaaagtcaaggagaccgcgaaagaagggagaaat

SEQ ID NO: 161141 - DNA, 540 bp, Zea Mays
ctataacaaagttagaaagggattatagggcaacaatttccctgctggccgaagatcaagttgttacacaaaaattgacgaacgaagcactacaaatcgctctgtcagaaccactaatgactagcgcgatggtacagtgattggatcagatcgccaagtttggtgtacctcgttgccggtgacctccgcactgcgattcacgccgatgccacgattcatgccgataaagagtagataaccgtgagggttaaaaagatctcggggaagaaggtcttagccggggctgagtcaccgccatacccacttgcccgcgcggtcggtaaaatatcgccgctggtgctcgccatgattgcagcaagggacatgtagtcgcctgattcaccacattgccgtgatcgtggcatccccgagatagtggcagtcgcaaggtgaacgcatgcgctccacggtgaggttcggtgattgcctcactagggagataagcttctctctcctcccaaattcggagccgccgcctaaagcttctataaattgatgccc

SEQ ID NO: 161142 - DNA, 549 bp, Zea Mays
atggttcgcttggcgtgactgcttgcgatgagcaccttcaggttttcaaatttcttcgtcttcaccaaggttctgcccaattgcaactgccatcggcctagtgcgggcagagtcagatgattccccagccagcatgttgagaacaacgttcatctcagcctcatcagtactggttggcatctcgaagtaggtctgcctctcagcctcgggaagaccctggaatggggcgatgaaagtctcgacgtcatctaatgagggccgcactctatggctcggattgccatctcgaacaggaggattggaaatgaaatcagaaaaggtactctgtgggggtagattccaagcagaataagacaaggggcaccagcatttgaaaccttgccccttagcatcaagtcaatttgactcagcaggtcatcatcagaaatttgtctattagtaattcgggtagggtcgttgaccccggtgtacagataagctgggtaaactctatccttcaggggctggatgttcttgaaaacaaagtcagcgaccacagcttcaacagtc

SEQ ID NO: 161143 - DNA, 1052 bp, Zea Mays
catctacctcccccgactatctggctcattgaattgaagcccaactgccgggtgccggcccactcgctcatgtccgctctcgtcccgttgctgcaggcccaatcgctggttcgatgggaaacaataatgatctttgtgcatcactatccactgatctctcactcgtctatttaaattcttccagttatgctcagtgggaaacaggtcagtgccacttgcagcaagtcttaaatacctgaaaatttaatagatcatattacatgactgcgaaggaatctatttgccaaacacattgtaaatccaatattataccggagttatctacctataattacaatgaagcctaccttgcactggtactttcctcaggctggaggctggatgacaaacaagagattgctgcataaagccaaatcaacatgcttttccccagaaaatcagcgcatgaagaatcttcattcaatttctctgccaggggttttataagggcacccatgacaaaggggagctcaagcattttctgtttacagttgggcccataaaaagattgagaataagtagtaatgtttatgtcattgtattggttaatcttcagattggtcgccattatcattgtgttggtcctcctaaatcctaatcttgtgtccaagctaaataaagtagtaatgggcatgcatcataactggtacattgactgacaaactataagggaactgccatttcacaatttcgagggacaattcagatagctgatacaacaatacgaattaaataacacactttaattttaggataaatacgttgcatgacagataatccacacacttagctaagaactagaaaggaatttcataaagatgcaactcatcatttcaaagaatatgctagtcgagtcgaatatttgttgtgctaattaaaagcataaagtccggcctctcaggggaattaacaagagaaagaacacttacgatttcatcagtaatagctggatccaaactggagctccacaaatgcatgcccattttgtcgagatggcttccaccagagcggcc

SEQ ID NO: 161144 - DNA, 505 bp, Zea Mays
attaaatctattttcgacgcgaatcggtatgttattatggccgtcagattggagatccatggcccatattaaaatacccgatcatcccatccgatccatccatagaaaatccaacggcacggattcgatcaccaaagggtatgcacgcagtctaatctggatcgcttgttctgaaatcaacggtcatcagttcagcaatcgagatccgtccgatcccggatcaatggtcacgcgcccttcttcatcccccaaccccagccacggtgatagagaaaacaccccggcggcgcgcccaccggtgacacggtcggtcagcccccaatgccccaaacccgcatacggcaccatggagaacggagaggagagcgaggaggatctgatggtggtcgacttaagggtgcttgtgctacggtggacggcggtgatttctcctcccttcttcttcccattattattttatctttgttcatatcattattatgcacaaacaaaaatccaagattat

SEQ ID NO: 161145 - DNA, 914 bp, Zea Mays
aaattagagaaaagtacacccaaaaattgactgtcaggatgtgtggaaactgaatttggcctgacagtgaggtggcatgaagttagggctcgaatataagcatgatctagtaggaatttggctatagttgttatggcaacattgtagctgaatcattggtctacaactttgttgcagagctttgggtgggatgccaaagaaaattgagagaaaattcgccctaaacatagactaacagactgtctgaatgagcctcgcgatggtacagtactgaaacagatcgactgcccagccgttcaccgtcgacgatctctccgccatgattccagctgtcgctacgattcgtgttgcgggaaaggggataagcacgatggagtgaaaatctcggcactggattagctcgggctcagacacagataagattcgtcgtacccccttgctcatcgatcactcgggataggatctcgccgtcgttgagccatcactgccgtctgccgcgtgtccagacactttaccacgtcgcggctaaccgtgctacgcatatccggtgatcaccggaggagccgccacggtaaaggccacgttgcgtggccaccagtgactcatcctgtttttaccgatcacgctccgccgctcaaattcgttgtgctcgcgatcggtctctataaattgaagccaccgtgagcttcgcaagatcatcgcgtacccagccacccagtattgccctcagttgatcactagcaagctccaatttcggatttcccccaaaaccttcaagaacaccgtgtgagttgatctcgccgtggtcacccacttccaggtctgttcatgctctctgctgccttgtttcagcattagtgtgcttccctgatgctcctcgaccaacccaattacgctaagtcccccttaatcac

SEQ ID NO: 161146 - DNA, 388 bp, Zea Mays
gttgttccgggcttccggcgagttttcgccgcgttggtgggcggcgccgccgtccgctcgaccggaaggttatgggagagccctgggccgttgatctgtcaacgtacgccccggattagtggtggatatcatggcttcatttaattaaatgggagccatcgatttccaatccaacgtataccatctcataccgattcgtaaaccgcgacgatctaattgtggccattcatttcgatctgatggctagtattacgttgtatcccttaggtcgtactgttttacaaaagaaaccctagttttattaaaaatgaacccgcagtcctctgctgctatgcactgagtctagggaatcttgcgctgaggcccctgcactttccagatttctcgc

SEQ ID NO: 161147 - DNA, 399 bp, Zea Mays
gggagaaataggtgtctaattaagtaggccccgtgggccagtacttagacttttaaggatgccttaagagcaccctattatctggagaggagacgttacttctagcatgcatgcattatgaacacaaaagggaattaaaacttgagctgaccaacttcctttaaaaaccatccgggctctttttttccttccaccataatctttacctttgatacccttccgcagatgaattcacccacccccgccagtggaggagacacccgtttcagttctgacttcctttctcacgatggctttccttccatcttgtgggaagtgctcaactccgctggttaccctacgccccctttgtacacggtgcagctgtatgaggagcatcgggtaccttgttgtcgggtc

SEQ ID NO: 161148 - DNA, 328 bp, Zea Mays
gaagtgtttggaggggaaagtgcgggcactggaggagcaggtctgccagttccaggcagtgcaaaccgctcaggcgacacagacggcctcgggcccctaggcggtggaggtgatgaggaagacaatcgacgacctccgggctgagccacgtgccggggcccagcgcatcgcggcctaggctggcgaggcaagtacggcgttggtgccgttgtgggtgagtcccatcccggcgttggtgcgaccggtgtctatctccgacgcgctcccagtactagattccgctgctgaccgcctccgacgtctggatcagattcttggcgcccgcttg

SEQ ID NO: 161149 - DNA, 323 bp, Zea Mays
ttgcatcttgtgttacatattatatgtctaacatcttctttctcctaatgtgtagcaatacaaaggaattgccaagtttaaagatgggcctctgttgcatgaggaagaaaaagccatcatgtatgaagatattaggaacacaggagatgatcattgggctccgtctagtggtactacaccacaaagtctagagggtgaaaccactgagaacactgatgacaaggatggagactatgaggccaatgatgagaaggatgaagactatgaagaatgtgaagaggtttcacctacaactgctaaaggaaagcgtcatgtttttgttg

SEQ ID NO: 161150 - DNA, 627 bp, Zea Mays
atgaaaaatagcagcagcaaaagaaagtgaagggaaaacaaaaaatcgatctctgtttagttttgtgtcacacacaattcacggttagcaagacattcaatcaactattggtggcacatgtttgaagtttgaacgctattcatctgtcctaaaagtgtagaagcttttaaagcttggctttatgatttttcttgtgcttattttatttttaggttcttacttcttataggctgcttttgtagagccaagtttagactgatccttgttatggtggtagaaagtatttgtatcaaagtcacgacatggaattttatcagcattacaaaatcacaaatgattgtgaacttggcatgatgtgcttatttaggattccaaacatttgaaaatccactccactatggtggacagtttgcatctgatttccatttgtccaaggtggcaatagataaactgtgagctactacctcgtgatctcaattccctgctaccccattgttaagccttgcttggtactgcacaatcacttaatctttttgtgtgctaccaaagaaaaacatcctacgaccttacatgcttacgagacaaccacgtcaaaggctcaaactctccttcgttcatcgactgctg

SEQ ID NO: 161151 - DNA, 365 bp, Zea Mays
cacaaaaccaccttctgtattggccacgagtccatctatctgttgacaaatttcggcaccagtcatcattgcaggtgggcagtctgtcactacgacaccttacgtaaagttcttgatgtctaggcggaatggatggtcaggagggagaaattgtcgatgtttatcgaaggacgaatatttgccaccctttttcaaccaaatgaacctgagagcttccttgcaaactaggcatgggaacttatcgtgaacacaccagacacagaatagcccatacgcggtaagtcatgcatggagtactggtaccaaacatgcattctgaagtttgtcttcgtagctcgatcatacgtccataccccttcctccca

SEQ ID NO: 161152 - DNA, 606 bp, Zea Mays
gcagatctcatcctcagcattcttttgtgcccttaaggcattgctcaagattaagccctacaaaaaggggggatcaacacaatggtagaagatacaaaaataatctaattatgtcaaaacatctttacctttagactattgtaagcgaggctgtctgcgaggtcatccttcgacatagcagagaggccaacttcgagctttggaaatccaatatttctagccatctctcggcaaacagatatttccttgttgtctgggaggcagtacagaaagtcatcttcatcagtaccattgtacaccaaggatcccttcggatacttcagctcccgggcatagtgtttagctttggcaatttcctcttctgacaattttttacccgaagtgtgtcgaatgataaagtttagctcttcagtagacgattcgggagtaagagatcaaccttcttgggtgcgtcttcttccaagattagggaggcacccaaaggtccttgttcaatactctgtctcgtttcagtgggccctgtttcaatgggcactgaaggcccagctttgactttagcacgaattgtggtagctgcggcggcctcctttgcaggtgcaggagttg

SEQ ID NO: 161153 - DNA, 521 bp, Zea Mays
ggtggacacgagctcgtccctataggcgacacgatcccgccacgagagccacgggcctccccacatgttaggattgcccccaatggaaataattgcctcgcccgagctcagcgtcggccaactgccccagtagacacgcattaaatgccacctactctcccgtgaatctcgcagaagaccatgccaagcactatttcaactactccaactcgacacttttgtgcccatgtacacgctagggatcaagcacatgcccatgcttccgagcctagcgtcggctctctaccccatcaagagaaatggctatagggatcgagtgtccttctcctaaccaaaagacaacacaagaatgagagccatcccgtgcagctatgccgctacatggcttggacacatcttctctgatcacaacaacagcataaccacccctatactcctggacctcctccttgtcactataaaaggaggagcatggggccttctattggggggcgacaggacttcactgctcacaactcacc

SEQ ID NO: 161154 - DNA, 874 bp, Zea Mays
gtgcattaatcgaagtcttttatttaaaagacactccgcgcgaaagtcgcctaagggtgcagccgaaatagcacaacaagtgcgttaagcgaagtctctcattaaaaagacacttcgcgcaaaatcgcccacgggcgcagccggaaccaacacaggcgtaggaatacggccaacaggccacattaccatacaaattacagttacatacacacggcgagggcatcacatattacatcggctcaaccttcgggatgatactcatctccctgtaattgaacagcattatcctctcaccatcaaaaagattccgaagatccccctcgcctatgctcgccccaatcggcgaggacaacaattctcgtttaccaacctggtctactcggagacggtcacactccatccccatacgacggcgcctaccacttcgcgaaaattcacccacactatgttttcccaccacccttcgccgcctatacccagtactcgcactaggaagatccccggcaccctccacacgtggcgaagtctctgctgcacccacatccaacgcaacaaaataatccaagccttcatccgaggactcctccatccaaggaaacgaacttccagattcaccatcagactcaaaacactcagacacagaaccaaacaaactatcatcggcaggcactatggttgaggccgccacaaaatctgtattgacagcagcggttgcttgcgcaggcccaaacgtcggaacctgcgcagcaaccgaggttcagtatcacacagacaaaagtttacacttaaaatccctaacccctattccgccacctacgaaggcccggccgccgccgcggggtcttcggtagctggttcgcccaccgccttcgag

SEQ ID NO: 161155 - DNA, 843 bp, Zea Mays
agcctaaccagctgagctggtcaggctggtctcgctctttgctcccaatctttggctgttatcgaccttccaaactgcagagctgagcggctaaattgtagagaggatgggaagacagcctgggccattctctgtctgcgtcctggatgtcgacatccccatgggtggtgttgctcactgttcagtgtaacaacaccatagggcacctcaagtcttgttgtacaaagattttcttttatctctatataaggctgcttgcattcctggagagaaagacatgctcttcttcctgccacctcctgctgaagggcttgagcataggtgacattgctattaatcaaggtatgtgaagtacagcttcaacgcttgctcttcatgtccaagctatattagccattatacatgcatcctgcagcccagaaaagagagaaaattaggagcatccattctgccgcaagaaacgttgtgaatgagtctttcatgtgtggcactgatgccaacaagaagactcttaataggcaaataaagctagcacttattttcttttctaacatcatcgatccatcacagtacatgggtcgatcatatctgtttgttgaagcaagaccacattcctgcccagctaaaaacatgttttgctagtgacagtataacctagctgatgcaaataacctattatctaaaagcatttattaacaaaactttgaatattaagtgcatggattataacggattaatccagcatacgagtaagatggacctaatttttgttatctttgcagaaaatccattcaaatacaaactagttttcctctcagagacaagctgaacacttctgttcta

SEQ ID NO: 161156 - DNA, 661 bp, Zea Mays
ccgcactcacttccccgcctcatttcgcacagctccgccctctctcgcgctctgcccacgccgccagacaccgtcggagacccgcgctcgcttccccagccatccagctcgccggagacctcgctaagccaccccgagctccgccccgaggtgagacacctttgcccgtgcctaatttccccgatttcactctgtgctcggccgtggcggtttgtcgcgcccgtgcggtggccgaccaatttagcccggtctagtgccctggtgtaggtccttgtgtcacccctgcctcttttgaagccttcccaggccttagcacgcctcaagccccctccccatggtcggaatccctcactggagttcctccggtctgcccgaggccttctcctcgctgttctcccctctgtaccctcggattcgtggccttttccccgccactgagtttgccgtggcattctctccctctctgcccaatcccagcaaccccggaaccaccctagcacgcgtctgccctaacttctgcgacttcaccgccgcggagagcagcggcgccacccgcagccattcacccccccggtctgatctcccccgtccgatattgatcgcacggcccagatcacgtgataccgcttcgcgcacgcgcgccctgcgtccgggcccgtct

SEQ ID NO: 161157 - DNA, 865 bp, Zea Mays
aaaacactgctctcacattgagataggagattggagattttagagaacggacatagtgcaattaccaaggtaagatcaagaggtgagaaaggtaaaggtaatacccaactggagcacgacaagggatggagttaaaaactcgcaagcgacaaggaagagaatacgaccaagggaaaataggtaaaatacaactataaaattgagatggaagagagaaggttttaaaggacgggtataatataaaaatcaagttaagatatagaggcgacaagggtaaagatgatgatcgtgaaatcataaccaaggatagagttaaggcaagactctcgaagtggcaaagttgataagacaatcaagggtgagataggtaaggtcccaacataatggttgaagtaacagaaattattaccgagggaagttatgaggaaacggtgagatcaccaaggatgtgcgaaatagaatggtcgctcatggaccatcaagaagcaagggtgatcaagggcatattaactgaaaggttttgaacagtcattgggatatgaaggtaagaatatataaaaatattagtatgcaagattccagtagtacgagtgtaccaagaccaagggaatagaataggctaaaaaataacggcttcacaacggaataggaaggggtctcagaagacaagaagttcacgggcatataaactgaaatgtctaagttggcagtagaaattcagatgtaagtatttgaaacaagagtattaaagaattcagggatatgagtatgtcaataacaaaggaataaggattgccaaatggtagaaatttaatgatggaagaagaataaatccaaaaggaaagaaggttatggtcaggggcat

SEQ ID NO: 161158 - DNA, 356 bp, Zea Mays
ccgcctgccatataaggcctcatatggtgccatcttgatgctagcctggtagctgttgttataagcgaactcagccaaggcgagatgatcctcccagctacccttccaagacagaacacaagcacacaacatatcttccaaggtttggatagttcgctccgacggaccatcagtctgagggtgaaaagcaacactaagagagagcttggtacccaaagcactgtgaagactctcccagaatttggatacaaatttggagtctcgatctaaaacaatggacttaggcaccctgtgaagcctgattacttctttcatatacaagggaaccaactttgaagctgaatttgtggtcttca

SEQ ID NO: 161159 - DNA, 482 bp, Zea Mays
gccattaagcaatgccctaaccgactcgctgcctccaccaggtggcaaataggggaagcaccatctccgacatccgaggctgccaccaaccgtcagcaaacaaatggcaggaagcactgtcacgagtctagcagccatgaggtatacgccacagatccctccagcctgacgtgtccctcgtggctagatgtcccattcacgttcgaccaacgtgaccatccgagcaagatcccacatcgcgggacctaccctctcatcattgggccaatcatcggcccaaaacatctatccaaagtcctcatggacaggggaagcggtctcaacgtcatgtacgctgaggcttttgatgccttgggaatcgcatgctccgcgctacgccccaatatagcaccgatccatggcatcacgcgtggcgatgatgtccgcccactcgggtgaatcgttctccctattacattaggagaagcctctaatttccacat

SEQ ID NO: 161160 - DNA, 464 bp, Zea Mays
agcaatctagcctgttggacatcagattacctaggaggagttcaagttggcattccgggagcattatgttccagagggagtacttaagatgaaactataagagtttatccggttaaggcaaggaggagatacgatgatgcaatatctcaacaaattcaaccacctctctcagtatgccattaaccaggtggatacagacttgaagaaaaagaattgttttatgagggggcttaatgacaggcttcagcggaaaaaggcaacatgcttggacctcacctacaataaggctgtcagtacagcactggcagtggaagccaaaaatgtgggacatggaaaatcaaaggggtttggaggtgaaaggtcaaatcaagggcctgaaaagagaaccaggttggtgatccgaccttttaatcaaaatcgttcttcgcctcgcccaccttcatatccattcaagcatcccgtct

SEQ ID NO: 161161 - DNA, 562 bp, Zea Mays
gaaagttcaactgcatcataaaatatgtttgttacttctaaagctaaaaaaggattacgaagctaaacctcaataaaggtacctataagtctcgcacgctcagtagcttcttcagctcttttggcttcttcctgagcgtcgtgagattctttttcattctttctaatagcttcatcagctatctcacggctgcttcggctgaaggatttttaatgtcgttggctgaagggtttttaatgtcgtcggcagaagctttggctaaagggtttttaatgtcgtcggctgagaaaacaaattatggctgaactacagccttggcatgttcgcaaccagctttctccaagatagatgtgcccccccgcgcaccagcaaaggcgcagaaatctcctcgatcactcagaatttcgtcaaaagcttcggtttccccgctaatccactggacaactccagggtcgccacggatgaatctctgctcaaaggaatatgccccaaccctagcaaagttgtcctttaatttcttggcgcattccaaggatatttcatgacacctctctttggaagc

SEQ ID NO: 161162 - DNA, 968 bp, Zea Mays
aaatctcgctggagatccaaccaacgggtgcgggtacttgggtataaagccttggtggccgtggactcgttcgcccatccactattccgcccttcccctacctcgttgagcgcgatcgccgtgggccatgggaaccgagcgggcggatagccgccctcaccgtcggcggtcgtgctcggcaccaaattggaaccccgtgtgcggcccgaaagcttcgcccgagtccctggtccgcttcggtggagattccggggcaggtggccgaccagtgggtgctcaatttgtctccgccgtcacagggtccgcgggtcgccgtggactgactggagcagtgccggattcaatgtaaggacttgctccccatgttttcccccttcccaattccatttcgcgcttagtttgcctagcaatcgtgcaccgtaggatgaggtgagaactccggccatggcgcagccggctgtgcttgggcgccgccgcacgtggccgatgaagtgggaagatgtcgtgcgccgtccgatctgaatcgtgaggatgagattggatctagtagtgggcgggtctctggccgttagattaggatcgtgtggatcagggtgcataccagtagggtgatgtggccttctgatctgggccgtaaatcttagagcgggcggttgagttcgcataccggttcggggatgatcgatctgatccggggcgtccagatctaatcctgcggccgaaatcatccataccccttcgccttggcatttatgctaaagagaccttggcaaacacctgaatcaacccatcgtcccccgcgattgtgctttgagtcttgcggattcttgcgccagtgaccctaccttttctagtatttgacgcccagtccagaaaattagaaattcagtaaaaggaattagaaaatgatttttaatgcaaaaataaatgctaacaatttgtttaattcataggaaattcatgttaag

SEQ ID NO: 161163 - DNA, 435 bp, Zea Mays
ctgaaaaccaaaatttaaaacaacttacaatttagaaagtagagtctctcttggaacgtagtctcttggaaatagacattagttgtatcgtttattgttaggattaggtttttctagattaatgtgaaaccaaagttagaaacattgtgaacatttcaggtaacttggaagaccctattcatttgaccaagatgattatgggtgcaacgatcttcctggttgcttattatgagacacgcaagacaacatgagtcagtaatatggaattgcatttgtgtctgtaatggccaacttgaggaaaccccccaaaaatggtactctcgtcaaggaaaacaactagattctagatggagattgattttcagataacttagttttcataaaaaatcagataacttctaggtccacatcccaaaaataaatcacaccttcctc

SEQ ID NO: 161164 - DNA, 475 bp, Zea Mays
cggggacgctacggccgttggattagattggaacggccgggattaaaacaattctatctgaatcggtacgcaatcgcaaccatccgatccccagcgaatgcaccagattgaatcgtgtttgccagatccgaaacggacgtacaagatcaagacaccgcgaatcggtattccgccgccgatcccagacgttggctaaacatctaacggctgtggcgcttcccccaattcgcgaccctcgaaaccaacgacggcgagccgaggcgcagtggcgccattgccggactttcgggtttcggtgatttagcgccctaaacatgcttctgttgggtgctacgcctaccaggaacgaaaacaagtatgcgcaagtgatttataccgacgattgccgcacaggggtcactggcaccagagacgcgcggacgacggtggcggtgaatcgacggcgacgaattgcggcacgaacggctgatctccg

SEQ ID NO: 161165 - DNA, 805 bp, Zea Mays
aaagtatcactctgagccttggagagtcgttcacactgaaccaaaggaagcacatcctcctcctcttcatcaacatcttcctccacctccttcgctatgtacctggtccttttcaccacacctccaccatccacgacatcctccaaaccagtatccaccacatcatccctgaagttcggctcagcctaggcaatcactggttgtaggtccgacaaacactggagtttccttttcttcttaacctctatggactcgtcctgggcatctgactgacaggaccgcttgcgttatggactcacaatattatccaccctcttcccgccaatgctcgattgcttgggggctccacaccccgactcaagtcatgctaactcagaggattccccagccagcatgccgagaacaacttcgatatcaaagtcactggcaggcgaccatatcacaatgtgagtctgcttatcctcctcaggaagatcttggtatgtgaaaattatggcccctatctcattcgaggaaagtcgagctctatggctagaactgctaccctcttcttggatgggagggatggacataaactcagaaaaatgtactttgcaacaatgaaacaacacggtcatcatgaatcatacaataattcagcaagcgttgaataagaaatcaagtggttagaacttattaatggaggaagattccatgcaaagtacgaacgaggagcactgacattcacagcggcacccctcaacatcatctcgacctgactcaagatgtcttcctctgaaattattttgtctgacacccgagaaag

SEQ ID NO: 161166 - DNA, 881 bp, Zea Mays
ccgtcggattgagggtggaaggcgaacgacatgtgcagcttggtgcccatcaatcgcatcaactcgcgccaaaacagcaaggtgaacacctggtcacggtcggagacgatggactgcggcatgtcgtgcaggcgcacgatgtcggaggccatggtatcggcggtgtatggatgcgccagggggatgaagtgacaatatttgctgaagcggtcaacgacggagaggatcaccgatttgttgttcaccctcggcatagcttccacggaatcgaggccaatgacggcctagacctcggtaggtattggcagcggtaagaggagaccggcggggtggaggtgctctgttttgtaccgctggcaagtgaggaattcccgcacccagtcctgcacacacctacgcatattgggaaagttaaagtcacggtgaaggcgatgcagtctgcgctggaccccttcgtgtccgtcgtcatgaatggccgccatgatttcctgcagcagcggtgacgacggcggtatgtataactgaccatcgaaagtgacgaggccatcggtgatagcccacggcgcagttcaggtgcctgcggtgagctcgtcgtgcacagtcgctagggccgggtttgtagcttgtgcgtggcggaggcggctgatgaagtcaaaccgggggcccaagaccgccaggactacgcccacaacggtgtcatcggtgtcgcgtcgcgagagggcgtcagccaccgtgttcgtcgcgccgggcttgtactccatggtgcagtcgaaacccagcagcttgccgaccctagtgatgttgtgggatcgtggcgaggcgctggtcgaggaggtacttgaggctgtagttgtccgtctttacgaagaaacggcgctgaa

SEQ ID NO: 161167 - DNA, 459 bp, Zea Mays
ctgggatcctcggaggagcaacatcctgtgtgcttcttctcctgcacggtccggcaaggcttcctttgaccgactgtcgttctgatctcgtcaacaacaacctgcgtgcttcttctccttccatctctctatcttttcccattcaacgctccaggggagaagttcaaacaggtgccacatcctgcttggtgctgtgcatccaccatcaccggggagaagtttctttcccctttttttatcccattaattgggggtcacaatctacatgaatgaatttgatgacgcgtggaatcatcagagcaagaatcatgaatgtacattcaccatgaacaaaacgtgtgacagaatcacacacctcgcaacgaggaatgaagaatgaacggccatggcggggcggtccttgccctccagctggacgcagtgcacggcggtgtacgccaccagctccaccgcctcggc

SEQ ID NO: 161168 - DNA, 851 bp, Zea Mays
gaaccctagagcgcagccgggcgatggttcgctctaaggaagaaaaactgaggcaatgcatcttgactttttcctcggccattgctcactatcagacaggaccctagaatctctagcaaactccaacctatgtaggatttcttttgccatctctaactagagcttgatgttcccaacctttctttgcccccattttgaagatctttactaagtcgttgtaacttgaggaataggcgcacaacaacacaaatagattgcacaggagcacaccaattttggtggacatcctcgacgaaccctggcaccttggtctagaaactctcaaagtggaagcagtgctttcctttagtttggattttaaggccaaggagcaaaggacagtggttcgagacagcagaagcagtgctttgcagcaccgaattagggaagatgttttccagtcctgacaacaaaacctctatcccaacggacaaacgtgggggatctacattcatttcaccaagtgtactttcggcccaaaagtggaacttccttgatttccatgtcatctaagaatcgatgaaatctgcccatcatagctctgtccacattgcaattattcttgtctggcgcctaatatatcatgttaaatctctggcgatcaaccacgacccatacacaatcctctaatgtcccttaattcctacaagagcatcactttctcctcatggaccataaactcctgtaaatcacaaattccgacctttaggtttagcaaagacaaccgaggccgataaattatccactctagaagccactgtcaggcaaatactactcttccatgcaatcagaacaccaccccaagtgccaat

SEQ ID NO: 161169 - DNA, 1099 bp, Zea Mays
agcgttattcgaagtcttttctctacaagacattccgagcaaaagtcgcctaagggtgcagccggaatagcacgacaggagcattaatcgaagtcttttattcaaaagacagcgcacccggaataacgttaatcgaagtctatcattacaaagacactccgcacaaagccgcccacgtacgcagccggaacaatacaagtgtacgaatacggccaacaagccacaacaccattacaattacacacacacggcgagggcatcgcctatcacatcggctcaaccttcggaatgatacccatctccctgtaattaaacaacattatcctcaattcctcaccctcaaaaaactcccgaagatccccttcgcctatgcccgccccattcggcgaagacaataattctcgcctaccaaccccgtctactcgaagtcggccatgctccatccccatgcgacggcgcctgccactccgcgaaaattcaccctcacactgttttcccaccacccttcgccgcctacacccagtactcgtaccaggaagatcctcggcaccctccacacgcggtgaagtctccaccgcagccacatccaacgcaacaaaataatctaagccttcatccgaggactcctccgtccaaggaaacgaactcccagactcacgtcggactcaaaacattcaaacatagagctaggcgcactatcatcggcgggcactacaactgaagtctccgccgcaaaatcagtattgtcagtagtggttgcttgcgcaggcccaaacgtcggaacctgcgcagcaatcgaggttcagtatcacacacacaaaagttcacatgcaatccctaacccctattcctacacctgcgaaggctcggccgtcggcgtggggtcttcggtagctggttcgaccaccgccctcgaggcgtcctcacacgtcggtgcaggggctggtgcgaggtctttgccggttgcagtcggtgcgagggtcaacgaggggccctcgtcggcatcagatggcggcgccggatccacctccgcggcctcgggtagcgcgccgtctagaccaccaaggtcctcgacgccttcggcatgcgccatctgcag

SEQ ID NO: 161170 - DNA, 661 bp, Zea Mays
gcttgacattttttgcacaaacacaagcccacgaatcgggaggtcgcacctacaacgccttcggcgtcggcttcttctgcatgcatacaggtgccatgggtagagccagaattacggctcatggggcatgtaattcgttgatactatattgtaaaaaatattgtatgatatatacagttatgtatactaaaagttggtcggggagggccggatcataacggcactcccgcgatccccgccaacgctggtcgagggcaacgcggtagggtcgacggttgaggtgttcgtgcgtatattcgtgtacttgcataggtgattcgcgtagagctagagtggatgcacgccgcggaggtgcgactcgacagaggtcgttggatcccagcaagcaaatggcacacgtcagtgccatgtgcgccgcgagggtgtggacgcgaggttgctctgatcactatcaacgaggcaaggccgcaaggagcgaacagggagcataggggccgctactagggctattgtgtgacctacatggacagcgacattgtctcgctcgtggaagcgctagagcacaagacaacgacaccgttaagtacccaacatctggggcatgcgatgacattggtcacgtactaaactttagtccttggaaccaaacacccataaggcc

SEQ ID NO: 161171 - DNA, 740 bp, Zea Mays
caataccctactaacagagtaatcgacttaagtcagaaaaaccttaagctgatgcagcatgctcacatatacatgactcaatcgtgcgccatctcgataaaaaataccaacttaatgaaaagtgttttctgttcgaatgaatcaaaatttgttttcaccacaaaactactgtgcaggagcgttttcacaagaaaccttgccagcaggatcaccagaaggagaaggtttactcgtaccaacggatgcaacaagcatgtcagcaacaatgtcctcaggcaccacgacgccgggtcttttcattaggattcaaccggcatgaatagctttgtccatcgctttgtcacacattgctttcataataccatagtcatcctctaataccttgatgtcgcgacgagcaatttccaactcttgcgaaacaagtttcttcgaagcacgcaaccctttgatgacagaatctcatgaagacagtaacttattaagtcgtgacactttagtctgagaaaccctcaactcatccctatgacggtcaagcttcgaaatagtaaagcgatgactcctctccaaagtagtaagggagttgctagcatcacggtacagtttgtctagactgtcatgagaatcaagaagtctttgcatctcctcctgcagacaagaagagtactaaacatccaaccaaaagcgcaaaacaaaggcattgtgaacaatcagaaaagtctacctcatgggctctcttctct

SEQ ID NO: 161172 - DNA, 527 bp, Zea Mays
gctgaagtgcatcgaagctaccagtgatgagctacttggagcatactccaaggccgaagataatgctctgtccgcagcttttggaggtcgagggaagaaaagattaaacacggtatttgatgctattggcttcgtataccctaattaccgctactcgctgcgagggcaagagaaaaagaggaagattgccgcttcggtcaccccagctgagcctgagccgaagagcagaaaggtgaaggttctgacccaccgatcgtgttatattgaaccggccgtagtgcctgaacttggcgcaagatccacttcagcagccgaagcaacaaaaactgctttgattacacagagcgctgaagagccgaccgtaatgcccaaggcgcatacagtcgagccagttgaagataaggttgataaggctgaagaaataataagaatgccaaaaattctgagccctccaacagaggcaaaactgccgaaggtgcaaaagacttctgtcgcaactcccaagaggaggaggatggccaacgtgc

SEQ ID NO: 161173 - DNA, 410 bp, Zea Mays
gttaggttcacggaatggcaccgtgaggagtcatccaatcctgcgtccaaacctcgatagattgtttggtttgctaaagggaaccaacctgtctgccataagattacaccctcctccagtatattcacggcatccactcattcctctagaaataatcggacgaacacatgccggacgcactgatgctagacggggtgtgtactccccaaaccaaacagctcggtaaagattactgtaacggtagtcctaaatgggatgaatacttgatacctcgaactgtctttgtccgaacaaccatttttcatgactccgatcaagcacccacgtttttggcctcgggagccggtaaggtagtttttggtctcccgtgacctatagcacacatttttctagccgaacaaccatttttc

SEQ ID NO: 161174 - DNA, 389 bp, Zea Mays
gcttaccatgtgagtcgtgcaggagatatataacagtaggtcctcagctggctggtcaactgtagctcgacgtggtggcttgagtactggcggtgtggtcagaaacttctttagtgcttctagggcttcctgaacttctgtggtccactagaatttatctaccttcttgagcagtttatagaatggcattcctctttcgccaagccttgaaatgaaatgactcagcgctgccatgcacccagtgagcctctgtactttcttctgtgaccatggtggatccatcctcattatggcttcaatgttttctaggtttgcctctattcctcgatggctgacgataaacccaagtagattttcggcccgtactccaaacacgcatttctctggat

SEQ ID NO: 161175 - DNA, 865 bp, Zea Mays
gacgatcttcaccagctccacctggaacgatgctggtctggcttcctccactcagacgcagaggaagatgcctgaacctcgtgtcatgcagctgctaccggtaggtgtggctaagagaccacaaagttggtctggcagcatcgctgaccgaagcagcgtaggtggatagcggtgtcagggactcatgggcagacagagtcctgaatcccctatcccctgcatccatcaccctgacgtggatgcgagtgatgtagtagcaagcccggggaggctcgctcactcgccttgtttcgtacaaggggcagacataggttcctagcacgtgcagcacatcttgcagcaggttggggaagtgccctgtctcgaacattgatgtgtaatgtttgacgacaggcccaaaccccatgaagtagtcctgctgggcgtagttggcttcttcgttgacatgttcctcttcgtcagcgtcatcgccatcctcgtcatcatcgtccccagagtcatctaggttgtcgcctccgggtgcaggagcttgaacggctggtgcaggcggtgctgatgtcgatgacctagttgcgaagggcagtgattctgccaacggggtgggcgtcggcagctgttcctccgagctgtcctccaggatgactccattctctactcgaatgtgagggagatccaccggaacttcctcgactaccactgggtagacagggatttgtcggggcggaggggcatagttggtgttgacccgggtagtttggagagtacgaaccatctacaagagaaatgtcaacttagttgaaattttatataggtaaggctgataaaataattttataagaatgaaattagcaagttttgaacaaac

SEQ ID NO: 161176 - DNA, 485 bp, Zea Mays
tcgaacctggaacgtaaaggtaagccaggcatctaatgtgttcatgttttaatttttcagctgtatttgttcaaacttctagttctcaaagcaggtgcatggtagcctgaatgcaggggacatgaactcttgagcgcctgcctacttgtaagccaatttcttgctagcatatttttcccctgttgatcctttgctattatttaggttctgcagttgcaaccctcccatagtgcagctcatcatttgtttcttgccgctttcttcgttcctttgcattttagtttcattgatgattagtagctcagtgctttggtttatatgcaggccaagcccctggcgccggcatatttgcatttaggcccctagcgcgcgtggccgccattgctgtgaagctttgcccccataccttcttccacacctacaacctatgggtggccgccgttgcgtccaatcgccattcctctccgtcgctcacaacagccgcc

SEQ ID NO: 161177 - DNA, 364 bp, Zea Mays
ctgagattcattccgatccgatcgatcaaatcaaacggtcaggattaccatgccaaaagggtatgctagggatttaatctcatccactggctcgccgatcaatggtcaagtacccatcttcttcatccaagaaaaacacagtggtgcgagcaacccccacgacggaagccaccacgccggcgtttaggtgatccggcaacccaaccctccaacgcacaaacggacaagagctagacgtagtgaggaagtcaacgaagcaagcgagggaacccttaccggacatggtggcagcagtggcctcgcccatgagttcttgccgccagatggcaggttccatgctccggtgagcaattgggtcaaaagc

SEQ ID NO: 161178 - DNA, 502 bp, Zea Mays
cccaagtagcatcatcttctccatggtgactccattgtactttgcacattttaatcactttgctccttgtgacacgagttagtgtatcaagaatcttgataggatattccatatacattagatcatcttgaacactaagatcctccatcggtagctgctcttcaggtaccctgaggcacttcttcagttgtgacacgtggaagacatcatgtacatccgcaagctgatcgggtagttctagttgatatgcaacttctcccacttgctttaagatcaagaaaggtccaataaagcgaggggacaactttcctttaactttaaatctcctcataccccggatcggtgacgccttcagatacacgtgatcaccctcattaaattctagcagtcttcttctattatcatcgtagctcttttgccttgtttgagctaccctcaaattctcccgaattatacggacttgttcttctgcctcttgaataagttcaggcccaaagaactg

SEQ ID NO: 161179 - DNA, 732 bp, Zea Mays
cttctagttgcccttgcctacgaaatggagtgaacaccaagggcccctttctttggtgagaccccaaaaccagggtctcactcgaattacccatttttatctcaccaagcgccattgataacccatcgaggaaagtgtggtatggctcacctcccctcatcccaacagagaggatgcatgggaggagagtaaactgaaaatacaagatgacccccaaacagatctctgcatcgagtagagactcgggggctcgccccgcaggtgcatggcggatgggtgaaagccgcatgaaaagcgccccctcaaaaaaacctgggacaagccgggatctggggaccccaaacccacacacatcaataatccaaacggttcgtgataacaaaatgtctaggccaaagggatatcgagtgaagatatggaaggttgtggattatctgttccacaaacacatccccaagtacaacattcgcaacgacatcgaattcactcgtcaaacgatttagttctttcaccgacaaacccttcagaaggctgatggcactatgtaggtcgctaccaatatgcagctgcacaatagccaatgccacgaggacgcggtcaggaatgtcgagaagacgtaagtcgcgattcctgccctgggcatctaggaatcttgtgtcttggtcagcgcacttggagaggctcagggtctcgagctccaactatgaaaacacggagaacttagtaacttgg

SEQ ID NO: 161180 - DNA, 385 bp, Zea Mays
agcgcagacgtggtcatcagtcattcaaacgttaattctaaaacgctgatgtggcttcgtcatcatttggacgctacttcagaagcgtaaatgttgacaataataactcggccatcacccctaaaagcgacgatatgatgcccgagtgactcagctactactccataggaattaacttcacagataaggcaaacagaggaatgattcgaaaactccaagttacgacacaagcataacagacagagagcattacagacaataaatatcgcgacaatcatcaactgaccatgaggcaaaataatcaacataggaggagacaaaatcattcttcattaagggaagcaacagaacttacaaatcaactcgtcatgagttgatacttccc

SEQ ID NO: 161181 - DNA, 624 bp, Zea Mays
aatggattggcaaagaagctgaagcttttgatgaaatactcagcgatcgcagagatttctgcgctttcgccggtgctcgagaggttgcagccattttggagaaaaccggctgcgaacatgttaaggtcgtagccttggcagaagctaacttgtcagctgacaacaccaaaaacccttcggccgaagcctctttgttgggcgggaaattctactatgatgtttcgatgaagggcggccatgaaatggctgatgaagctattaaaaagaatgaaaaagaatctcacgacgcccgaaaagaggcaaagcaagctgaagaagctgttgaatgagccatgattataggtacttctatttaaagttttgcttcatcgttcgtttctagctttgaatttcactattacattctttgttgtagctgggctttcaccaccaccagagccgtacaaccctgaggccgacccggttatgaaagaagctttggatgtaatgaagattgccaacgaagtcgttgacgaagtcatcgaaagactattgcatgaaactgcttagaaaatactaaaggaagattaaattcttgtatgctggaaaatgtaatgcttgtgtatggttgccgccatgtgtacg

SEQ ID NO: 161182 - DNA, 558 bp, Zea Mays
caaatagtggtctcgggtgccttactacctaagtcgtggcaatagtgcgcttgtgggactataatatcacacatcacaaatttaatatggtgtgtgggagacttattcgatatgccaccattatggacatgtcagtgggcccgaccctagacgtggggtctctattctcggtgcgtaatgccgatgggtccatgcacatccttctatcttgtagataggtttacacttagctataacaagtttattgttcccactggaggcctcaggtcccgagagtttggggttcatcagttcatataacgtgaggacaggaaccttagaccccgaggccaatatagggccccaagcaactaagtgcttactgttgagtgccgcaaggatgggatccaggcacctaattttttatgagcgctctaaagcacaaggggcctcaagggattaaatcaaacatgaggggacatagaacttaaatccttcgtgagcgtcccggagcactagagggctttaatgcatccttgtaggcttggcactgtgagtgggactgcccgggactcaaag

SEQ ID NO: 161183 - DNA, 416 bp, Zea Mays
ccccttgtcaccccttcaaacttttcctctcctctgccgagtctagaacacagggtgcggctctagaacaccagcagcagctccagaacaccggcggcggctccaaaacactagcgacgagatgagctcctcatctcaacgttcccccttctccccattctccccctttcctattgtctgaattctgatgaatctgaatctgttggagaagctgctgctgctttttgcttggatgatgatacgcaggtagtaggtactgcattactgcttgtagccttgtattcaatatttcagtttcagttctgctatagtgctatatgcctatattgcctttcagtctgttactcagtttcaatttcagactttcagacttatataatgcctattgcagtattgcttatatatacatatatcat

SEQ ID NO: 161184 - DNA, 521 bp, Zea Mays
cgacaccggctagatggaggagtagagggaggtgctcacagaggaagagctcctcacgacaacgatagaatgtaggagcagaggtaggtgctcatagaggaggagctcctcacggtggcgacgagatggaggagcagagggaggtgctcacagaggatgggttcgattttgcgagagagggaagaacgggagcgctcgtgcttgattttggcgagcgggctcatcccgatttttgcgctataccggaacggagagattccaggagccgcttcactcttcctccatagctaaccaaacacccgaaaaataggaatagaacagttccattctcatccactcaccaaccaaatacacccttactttctttaagttgtcatgaacacaactgagaatgtagaacagaaaatttagataataaaatgttagcacacaaagtggttgcatgattggtcgtgtatgcaagagataaaactcatcttattttgttgttaggtgagacatgaggataaaaacacatatgt

SEQ ID NO: 161185 - DNA, 472 bp, Zea Mays
ccacgacaaaggtggacgacatgctctatcggaggatctgcaggaggatcattgggcacagtgaagcagctactgcgctacatcaaggggacgattgaccatagcatggtcttccccaagatcggcgaaattgacccgcaattcaaagtctttaacgacatggacatggtggacgatgttgatgggcggaatagaacctcccttgtgctcgccttccttggcctgtaatgtttgagtaatctggaccgtgccatgatgggtcgctttcgtcgtctcataaacgaccttgaacttaaagagctggagttgcttggtagaagatacacttggtccaatgaaagggcttcacctactctggttaggctggacaggttgttctacaccactgattgggagatctacttccctaactgtattctccagagttcggccaccatgatctcagatcattgtgctcttctcctcgccctgc

SEQ ID NO: 161186 - DNA, 974 bp, Zea Mays
ctatgttgggtactttggtggcttagtgagccatagtatagtaggcttatgcttgtagaacccatagctagtgacgttaacgttgtcttctgcctcataaggcttggggcccataaccataaatccctagtcgaggtgactcttctaccatggggttcgagattagttccctaggcaaggatccttgagtgtgtcatggcatagccttggttatggcattcccctaggggctaaaaatactattgatctttccaaccaaacttccattgctttcaaaggcaacataagtgataggtttgtaaccttcagacatgttctcgtagcttttaagctcttgagccctctacatcacaaattttccatccttaggggacatgcatggtcttggaatcctctaagtaggaccccattgcttcttcctttcctgtttcttcttgtcttgtacttcctagcaatgcaacctcctcctccatgatatacatcaaaactagctccctccaaggatatcattacctcttgttatatcacctattcttcctcatcataatcttgcaattccatcatttttagtagatgagagcattcctcaccaacactctcggacttagccaactatctgaactcttctcatttagagtggtgggactcatcatttagtaaattgttcaatttgtttcccacaatatgactgtctaaatgttgagtatggctgattttatgagtttgccaactacctaaattttcacatttaatcagcacaaccccacttgattcctggaacatcaacttagtagcattaggcaaaggagcatcctagatttaggccccatcaacatttccccatccttagtcataagtttaggcacaagcccttgctttattgaagtgacaaaatatggcccatagttagaaataatgccacttgagccattcttgttagatagagcagcaattgttaacgactagggatgaaa

SEQ ID NO: 161187 - DNA, 603 bp, Zea Mays
aacactaaaagtggtacttgattgaatcgagctaatccaccttccaattatccagctaactccaattctatcggtccacaaggtttagctagctgtactaataatttgctagctagctatatagccatcctagctccattgattaacataaatatatatacataacactaatatatatgttgcccactataataatggtggcaggtcaatattgcataccaattccttaatttggaggtttctaaactaatgcatcaaaatatataatcatttcagctaatgtgtgtagacatgagttaattattatgtttttttatttgttgctatcttcgtagtggtcccagaacgtaacacctaactatcagagcattttagctagcatgcttgaataagaagtttccattacgcatgccaaagtttaatcagttcacataagcacattgtattttcttccccttattagtgttagtgaaataataatactgtagtcaagcaagaacaaatatacactgagtgaaatatatatacgcccgggtagatcacacatgcatgcgtctaagtaataatgcaacattcaactttttggactaaataaacctgatg

SEQ ID NO: 161188 - DNA, 1356 bp, Zea Mays
ggaagcagtggacccaagcactcggggacaatgtgataggtggcaagtgggtagcacgacaaaacggatggctgggagcacaaatgtcttgtaagcgtgtcccatcctgctataggacaagagtatttatagggtaacagaggaactgaggcctaaaataccgtagtgcactcgattacctactacatgtcccgaatatactgtccaacagggtaattgtggatcaccttggcactattctttgttacaccatttattacacccacctcgaggactaacaggtgggccatatgggtccacacccacaaacgtgtatccacttggtggagtccaacactcttcgtcttgtggcctttgagtgggcttcctgagaagggttgccttgcgaagacttgttaagggagggaggagacctctcgcgcttggtaatgactggtggcgcctcgtccttcgtttgatgctcctaggccctcgatgcgtcctaccccccttgccttcatcgatcgtgtggtccctcgtcgatgtgttgctccgatccctatgcaatcaaatagcctttgcagtttttaggagggatcgaggtcaagatcattctctgtcccaatagtagcccccaaggtagtggttcaacttggtgagctggtcccaaagtccttttgaaatgatgatcgaacgctgccctcgatcacaagttgagatgatccccaagaggtttgaaaaatgattgttgtgttgcgattgatgtgaccggtgtcgtggtttgttgtgcgatgttttcaaatttcgaagcttcgggtggctataaatcatcgtccacgtgtggctagggttacttttctgctcaccaccttttgactccacacgtgggcattgcttttgcacctgctctcgatcgtcgatagtcgctcacgccgtcgctagtgctggctcgtatgaagcagttcgcccttgttgccgctggtagatgatgacgtcctcttctttggtatcgtctagcgtggctgcgttgacaggctcaccatcgacgaaggatacgttagcgagttgtcgctcgccacccttgtttcataagctaaaacggtagaaattgggtggtcgtatatttcctcgaggcgtgtgcaggagctatagcagttggggtataggacgtgccctaaggcctgagagagtgttggtgccgaagggggagcttgtggtgttcaaggtcatttttgcggcacacattcacattctggcccactaattcatggatgaagtcctggaccgcttcaaggttcagttgcattagcttaagccaaacacggtggttgctatggccaagtatgtttaggcaactgtaacttaaggaggccagcc

SEQ ID NO: 161189 - DNA, 1218 bp, Zea Mays
caagtgttgcaagtattatatgtagtatttatgcaaatcactatattggttttgatacttacaaagtaatccctccatcccgatttatagatcgtttgattttttgaacaccaagtttgacttactcaccttattcaaaaaaatcataattactacttcccataattctcaggtctgcttcctttgcctcgccaccccaacctagaattcgaccccaccacaatcggacgctgctgtcgagcgttgccatcgcaagcactgcttccacatggagctccctctctcccaaagcaccacaccacagcgggcgtcggggtctctccacctccccgttctcctcctccacccttcccatacatagctaaaccctaaccctacctgtcgcagccaccattgtcgacaccgctgcctcctcgccttcctgatgccctaatccgaggcgtccccgccgcctactccggccgccgcagagcccacggtaccaacgaatacctccttgtccccgacggtcggtagcgcacgtcccctgttcctctaatctctcctgtgctaaatctaatttatgtttttgttccatgccagcctcctcccgatcccaaattctagtgcaggattgaggaggttgcgatgccattcgttttgacgtggagctgatatcaaaaataggtaaactgcttgagctcgaccccaacccctgcctcctccatgccctcaccaccaagtgcgcgctacgccaagctaggtcaatgttgtgctaggttagtgctgctatgcctcaccagtcacccatccgctcctacctctctgcatcactttattcgtcttcctcctgagagattaattaaattttgttctattcatgtgagcccttctcctccgtgtgcttcttcttgcctcacttgattgttgcttccaacttaatagcattgactagattgagataaccttatactaaacaaaaaggctgacaggaaggtatctgttgtccagcagtttttgcttctgaggctccatgccaataatcaattttgctcctaatgcttcatgcaaataattagttctactttaccacatggatgcatagttctagacttatttcatacaattttgcatgtgtagctaccccaacgtttaatatcatgaacacaagaatttatagaattgtttctttgattacatcctaaccatttgtttccctgtgcagaccgcttcagttat

SEQ ID NO: 161190 - DNA, 781 bp, Zea Mays
aaggccacgcgtgagcaggcaaaggcaatggggccaggggtggaacaaacaaacacaatgtggttgcatggggcacatgcgatgtggtcgcatgcggcatgaaagagagcagtagaagaagaacatcgacgcaagcaaagagggaatcaaggtcgaaaggtggggaggagtcagcaagagggaaaacatcctcatctatgacaacatgacgagaaataaaaacgcgatgggtaagaagatcgaggcatcagtaccctttgtgatcaggggagtacccgagaaaaagacaacgagaagatcaaggggcaagtttgtgaggagagatggcagaggtgttgggatacaggcacacccaaagaacttaaggtgctcataagagggggtggtgccaaagagggtgaaaacagagtgggatgggatactaccttggagggaagacagttgaggaggtaggtggccgtgttaaggtcctccacccaatagcgggtgggaagagaagcctaaaagaggaggcaacacaacatgttggtggtggtgcgaatcatacgctcggcctagccattctaaggtgaggtgtgagggcacgacatccacacttgcatgcgatgagagagaaaaaggtgcaagatgtggagttatcaaactcacgtccattatcacactaaacaacaagaatggtgtagccaaactgagtcaacattcataagcagaagtgagatagactaggaaaggtgtgggaattttagagaaggcgaaaggtccacaatagtgagagaagtca

SEQ ID NO: 161191 - DNA, 639 bp, Zea Mays
atcatgagccatgggccgttggattaaatctggacgacccagattacatcgcgcgaagggttagactcgctctgatccgtaccacacgatccgcaatacacgactcggatttaaaacatcggaatcacatcatggccacccatcatccgatcgatggctggggcacactctgcccaaacggcaagctagaactaatccggacagtccatttccggatcaacgctcaaaacctcatctcccccacggtgcccagcagaggcggcgcccggtgtcgtgcccgcgatggtcgccatggccggcaaccagaggccctgtgtactagcctgaccaagtcgcgcaaaacggaatgaagaaggtagcagcgcagtaactaagatactcaccggctacagagacgacgacaaaggctacaggcgacgctcagacgacagctagcgaagaaccatggagagcgtcaatccgccaatgagtctaggaagctgctcgagcatgactttcccccttttcttggcccagcgaagcacccgagcaatctaactgcgatatcagcacgatagcccgccccgacgacaatccctcaacgatgacgcttggttccggccaccatctagctcgtccttcggggtagcttcatcggaa

SEQ ID NO: 161192 - DNA, 644 bp, Zea Mays
tttggcaaagccgccagtgcttaaagcatccaaggcgggagtgcctttcaaattgtatattgcagcacaagagaaggtaatcggtgctgttttaatacaagaacatggtgggaaagagagtgtggtggcctatttaagccgtcgtctgctggacagcgagagcaggtatgtgttcattgaaaaactctgtttatccttgtactttgcatgcactaggtttcgacattatttgctctcaagtacttgtactgtagtatgtcaaacggatgtggttaaatatatgttgcaaaagccgattcttagtggtcgagtcgggaagtgggcatatgctttgatagagtatgatctaatttatgagtctttatgttctatgaaagggcaagttatagccgattttataactgatcatagggttgatgtagagcataaaatctcatgtcttaatattcgtccttggcaattattttttgatggttctgtgtgcaaagaagggcagggaatcggctatgttttagtgtcactaaatggtttatggcatgaaacatcaattaggattgaatattgctgcactaacaatcagattgagtatgaggctttgttgtttgggttaatgcatttagatggtatgggaataaaagatatag

SEQ ID NO: 161193 - DNA, 336 bp, Zea Mays
gtttacctcgactaccgctacccgctgcgaggacggggaaagaagaggaaaactgctgcttcggccaaaactgctgcttcggccactccagatgagcctgcgccgaagagcaaaaagttgaaggtccttacccaccggccacgctatattgaaccggcggtggtaccagagtttggcggggaggcttcttcagctgctgaaccgaaagaacctgctcctcccacgcagaaaattgaagagccgactgtaatgccaaaggcaccttcgactgagctaattgaaacaaaggttgacaaagataaggctgaaaggtcaaaaactgaagaagtaacaaag

SEQ ID NO: 161194 - DNA, 425 bp, Zea Mays
ctccaaaacaacacactcaacacggaaactccactcagttcactattcaccatctgaaattccatgagtctgtcaacacttctttggaccaccttttctgctggtagcatatacttttaaggccaagttgcttaacaaagtctatacttcaatagttcctctacaagttctatatagtgacccttagctaaacccttttggattccactctaccacagcccaaagtttgcacaaaatactgaaattcagactctgaattttattaagtctgaactccacactttccagcagctctactttagaccagttcttctccaaattcaatatagatttaaggctaggttactgaatcaaagtcacactcctcacatagctttataactttgttacaatgaccacctttaaaatgtttatagatcagaagt

SEQ ID NO: 161195 - DNA, 364 bp, Zea Mays
gcctaacatacacctctttctctatatacccattcaaaaaggcacttttgaaatccatttgaaaagcttaaaaccctttgaagcagcaaaggctaaaagaatcctaatggcctctaaacaggcaataggggcaaagatctcctcataatcaattgcctcattttggcaacaccctgcggcaaccaacctcgccttgtttctcactaccaacccatcctcactctgtttgttttttaaaacccatttggtaccgatgggatggcagttagaaggaggtggcactaaaacccaaacctgatttctttcaaaattttcaagatcctcatgcataccattaacccagttaggatcagataaagcgtgt

SEQ ID NO: 161196 - DNA, 291 bp, Zea Mays
ggcgaagtcctggtcttgctcacgtgccctgtgcttgaatttctcccctaatatacttattaagccaataaatgcacgataattttgtagatcgacggttaggttatgtccagtggcagccacatgggcaatggaaaacacgaagtgtgaatgcgcgtgcgtaaacaagaggacgcctctatctaataaaaacgcgtatgcagatggcacatatagacttgtggagaagagataaaccgtggatttgaagtatgggaaggagggcactcatttttcgcatcctcgttcacg

SEQ ID NO: 161197 - DNA, 582 bp, Zea Mays
gtcaagtaccccctcggcctgcctccgctcctcggattgggaccttggtgtcctggccccaggcactgatggtgccatcccacttggaggttggctcggcgacccctagcctagcctcggttccaggctgaggccaagtcgggccgccatgtcgtcgtcttcgtcgtcgtcatcatcatcatcatcatcatcgtcaggcgtctccggcgacgactccctcgggatcccatccctcacctgcctccaacgacgcttctccaaagcttcccgagctagcatcctctcgtgagctcgagccttttccacgtccttcttctccttctccttctctgtggcaagcctccgcgcggctcggtccaccgcgtcctctgaaaccggtggcctgacgggtttataaatcctcaacccctagggacgaacaaaaatcccaacagtaagaatcaaaggcgtagagaactcggcgcaaaacagaaggaggatcggacacttaccagggacacatacccacggtcgggatgcatcgcaggctggctaagggcgccggcatccgacctctctaccatacttgttactcgcttgagg

SEQ ID NO: 161198 - DNA, 573 bp, Zea Mays
aggtgaagcacactagcctggacataccacaaaatataccccatagaggggcttacaaatgggcctagatggtgatgcggcagaggctagaccccacggtaatctgttacaaccttcgctagcatattgcacccttgatcctgcgaagtcatgacccctgactccgtggacacttggacttcgctgtgtgaggaggagttcgagcctttgggatgcgtgagtggggctacagcgagccccctcccttaactatcgtggtccttcgcttcatcccctctgaaggccgtggtcgtagacctcgatgttgttacaagtcgatgtatccttcgtgacatgtgtctctgcactaaaacctgtttaatcgtagccggattagactgatggaggaagagctcggccttcgctccaacattgggcgtgtgcgttttccgcaatatataagacctaaaaccaaaatacgtatgcatacatgtggtttgatttcgagctgcaacggccatatccactgctcatgtttgattgcttgcatctcacctcgaacgcttcttgcctttggactgaattgctctacca

SEQ ID NO: 161199 - DNA, 386 bp, Zea Mays
ttagggttgagggcgtgtggtggcggaggaacgaagaatcgccctggcaacgcccggtgaatcgtggtgagtcggccaggtaagttgaccacgacgggagttagggtatagaagtatttgacagcgtggaaagtgggcctaagccggtatttctggaacgtgggttcggatgaggtatttactccaaatcgattttgttgcataaacattgaagggaattggcattaacatgttttgactatggcagggatagttgaccacgtggaaagtgggcctaacccggtttccctggaacgtgggttcggaggtggtgctctgtttacgctaaattggttctctgtttacgctaaattggtttggttgcataaatagtgaacggaagtggg

SEQ ID NO: 161200 - DNA, 549 bp, Zea Mays
gtgaactaacaggaggcggcggcgtctggttttatacagggagagacgaagctgggtgcagaatttacgcaaagcccgcggaatctggtagctacaattccgcgcgcggcaatcggaggttccaacagatctcacggactcaacatttccagccataggtgggagaaggttctgacgaggcgggcccacctgtaggtgactgggacggagtccacgcgggtagacagtggctgacctggtagggtcctcctgtcggcgcatggagttaggtgggcgagggattgggccgaggagtgcagattcggcccaagaagctaacaggtttcatcttttccttttcctgttttctattttgtttgctaattcaaaacaaattcaaatataatttgaattctcaattcaattagaatgcatagtcaataaattccatcatggcttgaggttattcattctatttatattatttattcatttgtttaggcaaatgcaacatacatatatttcctctcaagcatatattttaaaggtgcggctagttttagaggttta

SEQ ID NO: 161201 - DNA, 727 bp, Zea Mays
aaagcccgaaattcgcatagggtccacaattcatatcaaagcccgaaattcacatcaaagctcgaaattcccaacagagcccgaaattcaaaatagatatatcatttagtagatattaacatttcaagctttataattaaaaaaccaaagaacatgaaaccaatgggtggatgacacctcatctccatgattaaacatgtggttagctaaattggagtggatgatttccatgttcagaacggatgaccaaatgaatatgggccttttcgtgcctgtaaatgggctatttcgtgcctctgtaaacggaccgtgctcatgcccgcccgtgggccatgacctctgcccaagccctgcacgatgcataatttcgggatggcctggcttaaaattattttaggtcgtgtcgtgcttggtgcgtgcttttttcgtgctttgggccagcccaccagaccgagcctaaatgtacacctctaccgaccatcaatagatgctcttctttatcacaataaaaatcttaccaatgacgctccttctgctaccattgaaactcctgtcgttgacgctcctcctccttggccttttacttatccatatccttctctatgtggatcatgtgatgctcctccatatgatgctccatatactgctcgtctgctccaccttcggaccctcactcgtttggtgcacttcacctatatgttgcacttgctctatttcttcattccac

SEQ ID NO: 161202 - DNA, 322 bp, Zea Mays
attgaagtcatggtcaaggggctcaggccagggtcagcagcccagtactttgcaaataagcctccacattctcttgagaagttgttgcaagagtacataagggccaacaacgacttctgccaaagaagggaggagttacaaagatacaccgaagccgccaggggctttggccaaagatttcatccaaggcatgtccaaagcatccataacccggtgcagagtgaagaaaatatggtccagtcttatggtcaatcaggacagcaacaagcagtctcttagcagcaaccttctcatagcacattccgaccgcctgctgtgagag

SEQ ID NO: 161203 - DNA, 1206 bp, Zea Mays
ccatcacatactagtgtgttgccacggctgatttgcaattttgccactattcacattaaagttcgctaatttgccaccgaacccataaattatagatataaacgacccacaaatcatgataaaacagcaaagtgtcaacacatggcgaaattacaaatatttttgccctaaacctagccgattcattcccagcggcaacaaccgcatccatcctcttcgttgtcatcgccccatccagccagcgcccccgtccggtcgccttgcttcaccatgtagcccttgccagccgtgccaccacagcaagcgcccccgccttcgcctggcagccggtcgcaatcggccagccggttagcgcctgcgcccgaacgcctcgctccagccaccagcccacgcccgctgcccaccgcccacgtcatggcggcgccagtcgttgccccactgtgttccagtagatggtagtctcttctccctgtgttgcttccatcttgcttttctgaagctgatagccacatccttgtcagtttgtagaactcaagttgtttgcttggtctggtctagttgggttaccgcagttgacctgacatgcctttaaatcataaatccattgaatttcgatcctgattttgtaagccagtaagttatagataggtgtatcctttgttgttctattcatagctatttgatccggtgctcgtgaaatagagcaccaaaaagaccctttttctgacatgttgctcctgatcacacgcatgctttgtatttttgtggctggttgactgatgcactattttagtatgtcgtggaaactgtaggatgcaataggatgcttatttcatatgtttatcatccacgtgtacaatttctatatctcttttgttggtaattcgttaggcttggacagatagaatcgtacccaatcgctgggcaataactgactcatgatgactgttatgatttgttcaatttcgcataactgactcaatcgctacctcatacttcgtttcgatcattgtacttttatgatcctgtgatcccaagcatggttctaagactaagtatattctttttgagtttttgcttgctgttcgtgaggaagatatgcaaaattagagagggacaatatggtcactgcaggagatgtgggaaaaataaagaaaaaaataaaaattaataagaggttatagtactattcttatgacactagca

SEQ ID NO: 161204 - DNA, 791 bp, Zea Mays
atgatcctttgggttccctcccaaagggccaaatttcagcaagctagcaggatctgctccatcacgtttcaactatccatgttagagttccttctgcactcaatctgtagcaagcagtcaacctccagccaatgcttgttggcactgtggtgaccccagtcacttcaagaacaattgctcgcagctgaaaacaaactgcacctaccttctccaactcaatgaatggccccaagagtgtcgcagcacccacctccaaggcaccttcctccaacagccaattaagcaagaagtagttccacaatcgagcccgggtgaaccacatcgacgcccaggaagctcagtaggcacctggagtagtactcgatgagttcctagtcaaatttacccctgtcgcagtactttttgattctagagcatctcatactttcatcgccactagttttgtggaaaggcatggcattcccactgcaccgttagaagtccccttggttaccgcagaccttctgtgccacctcaagtgctctcaagtcagaattcttttaagtggggtagtattcctagcagacctagctgtactaccgtcccacagaattaatgtaatcctaggaatggattggctgtcctagcacaatggcatcataggctgtgcagataagatagttcttctcatcgatcacaggggaaagtcagcctcatgtaacacccaaccattcgcccaagagccgacaatattcagtctagcagtagaaagcatatctatggtggagtaattcatggatgtctttccaaaa

SEQ ID NO: 161205 - DNA, 468 bp, Zea Mays
gcggcttcgaccgtggttgctgaaggcgattctgatgattctgtgtctaagttttttgagtctgatgattctgggagttcgattgtgtggttggaggggtcttcggaagaggacttggattattttgcagtgttggatgtggctgcggcggagactcctccgcgtgtgatgggtgctgaggatcatccgggtgcgagtgctgggcgtaggcggcgaagagcggtggcgaaacggagagtgggtgagttgtcacgaggtgaaaggcgtcatcgtggtgagatggagggtggtcgtcttcgtgtggatgggactggcaaacgggaattgttgtgctcgccggctggggcgagtgtgggtgagggggagctgcaaagtctgtttgtgggtgaggaattgaggataatgttgttcaactatagggaggtgggtatcatcccgaaggttgagccgatgtaatatgtgatgccc

SEQ ID NO: 161206 - DNA, 532 bp, Zea Mays
ggtgattcgtgctcactagtgcttggataacgctcggggtcacataaatatcgccgccgttgacaagtccggccagtaaacaactccggccaccgtacaggttgccacggtcgctttggataagctcgctggtgactgccgccttccggtcttgtgccacgtgccctggcacctccatcgcgtcgccgtgacccgctgtaaccttctgtccatcgccggggagatggccacggtaaccggacactaatcgcgtgctagtaactcctggtccctccggccgccagcacttctctgccaaatggagcgccaccgctgttgtgctctataaattgagtgcacccgcagctccgtagggtaatcacacatctattgcaccaaaccttgccccggattatccactagggaccgagaattgctcttttcccccaatcacggtttccgccaccataaaacacacctcgccgtggccagcgcgatacaggttagctcgtcccctctgctctctcgtttgagtgatctcacatacccgtga

SEQ ID NO: 161207 - DNA, 504 bp, Zea Mays
aattggagacctggaagccagggtggaacaactttggtcagagttacgccacaggaatagggcacgtgagtaggacagtcaccgtattgcggaattgttagccgaagtcagtcgtctgcagtacgaaatctcggaacgggatatagccattgattgggccgtcaactcgctctctttcgtgtgggattgcgaagcgaaagctctagctcgtgtggcatagcttagtgcatccctgaaaagcctgcaagtgtactgtaatactttacatgaagaagtgcatgtattgtatgctcgactgcacccggacgtgcctccagacattgttgcaatgggagtcggtccatcgggagcagcaaatgaaggacctaatggggagctagacctttttaggccccctccttccatgaaccttgctgacgaacggtctcctgcagcaggaaatggagcaacaaaggatgaagaagactagaatagtatagtctaagtgttatacttatgtaaaat

SEQ ID NO: 161208 - DNA, 373 bp, Zea Mays
accataacctttttgtctattgggattcttccctcttccgtcacgaaattgctaccctttgactgtcttttttccccttagtattgacatgttcgtactcctagattcttcagtacttttgtttcaaatacttacatctgaatttctcctgcctacttaaacactctagtttatatgtccatgaacttctggtcttccgagatccctccctgttccgctgttaagtcattatcctctgcctttttgtattcccttgtctgggtacgcttgtatcattggaatattgcatattcttaattttatatatgcttacctttatatcccaatgactattcaagacatttcagttaacatatccttgaccacccttgta

SEQ ID NO: 161209 - DNA, 661 bp, Zea Mays
gaggaacagtaaaggtcataatgtagggcacccaagcagcacattgagtcaatggtcttgtctcagtaacgcgtgagtaacaatatatcccacatgttgcagactgggcgcgccgcatacatttaatgcgagggatacgctaccttcccttggcttgtgctggcgtgcattcctcctacagctagtgctgatggcccgcatgttagaggtcagacgtcaggcgccgcccaggcttacctagccacgtgtcgggatcggacctcttcctggaaagggggtaggcttgggaacgtgtggtgatgtggtacccctggaccatatctgaccagggatccgaaacatgctttgtgggggggggggtccgagccccagccatagcggtccggacacacggcggctccggacctcactaggcttgaggtccaggtggcatacgtgggattcagaactgatcttgtagttgaagagtacctttatttctgggtcctagagccttccggaccccctccctctggacctaatggtcccacgtgaaggtccgagccttgcccgtgggggctcagacctatagtcgaggttgttgattactctagggcttgtggaaactgtaacccaacctaagagatgagcctagctgactcgtggccacatacggtgggcc

SEQ ID NO: 161210 - DNA, 962 bp, Zea Mays
gacgaatggcttaccgtggagctcggtctacgtgcgacgacggctggttgaagtccggcgacgtcgatccagtgtctctagtgagttagagtctaatccccggctctaggagctccactgaggtccgtagaagctaacccaagggtcgaacgggatggggagtggctggtttggccggtccacggtggctgtggcttgcgcggctgctggcacttcgctctcagggcaaactccggcgaactcaagctcgggctgggtcagggacgcgagggggtgtacggtcgagggccgggggtggcttttatagccgtgggcacgggcatgggcatggggttggcacggtgcggggctgcgcacgtgggcggagcgccgagggcgtgctctggcgcgccaggacgcgtcgaacacgtggccgtgttcatctgcccaagttcttgcgccagcagagctccaaaacgtgcgaatcttaccaaatgccttgtgcaagatatcttcctggcacctagggctagctagtttgtgtaagttccaatggaagatctaccctagatcacaagatatgtgggccccaagtcttgtctgtctgcactgttcaccagtgacaaaactaatgtcaaaccatgtcaaacgacctcggtttgaattcaaatttttcagggatgtgccttgagtaatttggccactttttgctatttggtccaagtggttttggcgccagcacaaaggtgaacaccttcgatctttggactaggggtggttttgggacttagagaaattttgatggctctagtgtgctttccacttagtgaactgatttggggtttttgttgggccttcttgtaataccttccttaatacattttgtagatttactactatacttcatctttggtaaaagtttccttttatgatttggccatttgcacaatcttttccctttaataccatggttagggtttaat

SEQ ID NO: 161211 - DNA, 677 bp, Zea Mays
gcactatcaggaggtggatcccaacgaccaaatggagaacgaaacaaaaattcatgcgtaccattgggcaggaggtgagtgtgggtaaatacatgcccaaacccattctcccaacgattgttgacaaggcggtgcccattggggccatcattccgaaacgcggcagccggtggacgctctgcaactgaaggtgaggggtcgagcacaccgaccacaggatgtactggaccaggcattggacagaaggttggagacgaccacttggcaaaatccgtgtgaagggactccactgagtacttggtgtcgtcgacggcggcctccatgaagggtgaggacaaacaatcttccataattggacgtttggggggtattgatttctgggcaggcaacactggtgtgaccatattggtgataggtggcggtggaagaggaagaggacctcaagaataactcctacctgttgaagtaacatcaaatttcttgaattcttagttcttggatacctccacattctcctcctacaattgggtaagcacaaaggcagtatcgagatccttggggcgttgtatcattacaatggatttaatatcatgtcttagaccatctaggaacaatgtagtgtaatataatggatcgttcatctcctggtaactattaagctggtcgacaagttgggc

SEQ ID NO: 161212 - DNA, 1026 bp, Zea Mays
atttcttgaccctataagcaaagccgttggctacttgtctcaactcggcactcatagacagatctctttggccctgcaagtattcgcaagttaaaagacgctaaattgagtttaacgacatatctcttttacaaactaagcatgtaccttacgtttgaaccaagaaatgaaatcaggcaacccatttctcgcaccctttctaagaagagcgtcatattcctgtggagtgtggggtcccttgatcgacgccagaattcatgaagaaattgttccacgtatggcgtcacctcttcaaggttggtcaatacatatagcatgatatgccgccactcttcatgtgtcagggtcttggtggtcgagccactcgcgcttctgagttggcctcaaaatatgctaaggtttgattcattgtcgccatcattgtaacgagggggtggattatgcacgctcggcagtttgtcaccataataagttgttgtgaagtttgagacctcctctagaatgtatgcctctgcaatggaagcctcgattttgcatttatttctacatttctttcgaatagtctttagacatctctcgattggatagcaccaacgtccctgcacgggccccccatttgtgcctcataggggagatgaagaatcaaatgctgcattggattgaagaagccgggtggaaatatcttctcaagcttacacagtaacatgggtgccaatctttccaagtctgcaaccacggtccgagataactcttttgcacaaagctgacggaagaaatagctcaactctgaaagcgctagccagacatgctcagggacatagcctcgaaccatcacaggaagaatccgttcaatccatatgtggaagtcatgactcttcatccctaagactcgcatagtagatatgttcaccccccctactcaggttagctacatacccatcagggaacatcaacatcttgatccactgaagtacttccttcctctaggccctgcttaggacgaaatcggccttaggccttctccac

SEQ ID NO: 161213 - DNA, 635 bp, Zea Mays
cttttacacaaagctgacgaaacaaataactcaactctgaaagcgctagccaaacatgctcagggacatagcctcgaaccatcgcaggaagaatccattcaatccatatgtggaagtcatgactcttcatccctaagactcgcatagtagataagttcaccccctactcaggttagctgcatacccatcagggaacatcaacatcttgatccactgaagtacttccttcctctaggccctgcttaggacgaaatcgggcttaggccttctccacgtctttccgccacttggcggcttcatctctaggttccccctcccaccataacgctgccggatccactcttgccttcacgttatcctttgacttatcaggaatgtccataattgtttcccacagtgcctcgacaacattcttttcagtgtgcatcacgtcaatgttgtgtggaaggagcaggtcatcataataggggagccgagtcaagccagacttatgtgtccacatatgatgctcaccatatcccacaaaaccaccttttgtattggccacgagcccatctatctgttgacgaatttcggcaccagtcatcattgcaggtgtgcggtctgtcacttcgacacctttcataaagttcttg

SEQ ID NO: 161214 - DNA, 978 bp, Zea Mays
ggcgcgctcagttttttcggtgtgtctctgctaggtgggcctgtggcgtcaggcacaacccgaactgcctcgcccgggcatggcggaagcacgccgtggatgggggaaggtttgttacctctttccagaccttgaagcccttataaactgtgacggggtcctgggtctccacctttcccatctccgtgatcctatcagcacgaacgcaaccgagtggggagattttcgtgagagtgcgggtcggcggcgtcgggagtttgaggtcgtcgatctcggccgtacctgcggagtccggtggtggctggggagcttcgcgcgaccgcgcggaacgtgtacgactcgtccttgggattgattagccgctggcgttgggggaattgctcaccgtcgacttcggacagccgtggaatcgtcggacgccgtgggcggagctcggcgcgccaccaacgtcggtaagatttcccccaacggactcgcgattattccttctgcgttttagagtcattggataggtcgggaaaggtcggggtgccgctgcatccggtcgccggcgagaggccatcacggctgcttttgcgcgggcgctcgttcaccagggaggaagaagacgactccctggccgtccatctgggtttggacgctagggattcggttgtgggaaaacgattgagttaatgcaccagagccgtccgatccgatcatgcggctaggattagtttcaaacacctttactgcagaatagaatcggtgcgtagatctagcgattgacggctctgaccgtgtctgtggtcgcgattgttgggaaccgttgatccgcgatctgatgactctcgaggcataccgcttcgtcgcacttacaaatagatctgagccacccatgtgagatcggacgatcgaagcgcccacggaatcataacactcaccgatttaatcgtggccgtctactcgcgatctggcggccagaaaccaggaataccc

SEQ ID NO: 161215 - DNA, 892 bp, Zea Mays
tggcatctcaaagtgagtttgcctctcatcctcgggaagactctgaagtggagcaatcaaggcctcaatgtcctcaagagagggtcgcactctatgagccgggctactgtcacgagcaggaggattggagacaaactcagaaaaaggcctatttggcggcaggttccacgcagaatatgccacaggagcaccagcatttgatactctacccctcaaaatcatgtccaatcgaatcagcaaatcttcattgggaatccttctgttcgaaacccaggaggaatcactgacgccgctatataagtaagcggggtaaatcatgtccttcaagggttgaatgttttttaaaacaaagtcagcaactatagcttcaacaggcagacccccatccttcagcgagcagatctcaacaagtaatactttggcctctgctatctctgaaaaagtaggagattctatccaactaggtgtgtgaacatctgggtgcctccccgatcgagggggagagatttgcagtggttttccacgatgaacaactcaaggcaccaccctttgatactgtccttaagaggaatatcgagatactccactttccttccccgacgaagctctagacttgcgccgccaactagctggtgttgtcccccagccatcccgggccgacagtgataaagatatttccaaagcccgaagtggggaagaatcccaagaaaagcctcgcacagatgtacgaaaatggcaacttgcataattgagttcgggttcagatgcgtcagattcaactcatagaatcaaggaggccacaaaaaagggggatatggtaagagcaagcccgcgaatgagaaatggaacgtaaacgacagattcatgagtgtcctctgtaggaacagtgaca

SEQ ID NO: 161216 - DNA, 528 bp, Zea Mays
agctgcatgaggaaacagtgcatcatgcactattaaataacttaacaaaaatactttgagtttagcatttttttagagaggctgcaatgcaatcacaattgtgaaaattaccttgacaatatctgaggaaaacatgcaacaatgccaatagctcgacatgcagctgatcttacactaggaaccatatcatttaacgccgcatgaacctaaacaagaatatttcaatacaaatatacatacaacgtttctgggtaagaaaacacaatggaatattgaaatagactaatgagattcccgacttacagaagaagaggtcacatagtctctcttattttcaggcagggagaagaatacatcagaagtcatgccagcaaagcatgtgagggatgctgtcctgacctagaaataaacagatactttattcaaaccagggaaaacacaaacaaattggtcctagttctagctactccctccatcccagaaagggtgcacatatcgttttctaagaaggcaattaatcttaaactt

SEQ ID NO: 161217 - DNA, 555 bp, Zea Mays
cagctaggtatagtacgtgaactggagagctaagactgtaaattgaactcgttcacttctgattatctgaagcacgcatcaacctacacggaccaattaatcatgcatgcatgtgtgtagtttgctatatgccacctgcatctgaattggtctgggacaccaacaaaaaggaaatacggctgctagctagctagctgtaggtctcccacacactgccgggccgggccgagctatatgccatcagtggttccactatatatatgatgtggatagatgtgtcgtatatgtggcgactttaatttatttaggctccttttgattttgttgggtacgcgtacgttgtgatatttgtctacttggctaacttgcacaggtaccggggctcaatgcaaatgcgcatgttttaaattccctcacaatctggtggatgccatcatttggtcatgatgaagtgtgatgagtttactcctttttttcatgcactgatgacgatgattcatggcactgatgatttgatcaacaagtccttcgctctaaagttctgtttgatgcatg

SEQ ID NO: 161218 - DNA, 505 bp, Zea Mays
atcgaaggctgcaaggaatacttaaagagactttgcttcttggaacatagaccccaacatgggacaattctatcgatcaccatccttccatcaaagtctatggagacattagcgcaggcctcacaaagggcatccacgggtgaagggtccatcgtagtccatgaggacggccaaaagagacattgtcccctgcaaggccgaacccttcgatgtgggccaacacccacggccaccacccctcctaggtggacaacaaaggccccgacaaagacctcggtgtgagtaaagacggtcatccgccagtaaagcaggcaagagtctaagcagggacgacaagagcactatcaaagacatcgccttgaagacatccccacacttagcagcatccatggtagtatggacaaatgggctacatgttgtctatagcatgcccatctgccaatattgagcacatcgtcattatcgcgtgggtacataatcgtgtgcatataatacttggttgtaa

SEQ ID NO: 161219 - DNA, 296 bp, Zea Mays
gccatacatccagtaagtcgctgaaccttcttttgtgatcgaggagcttccatcttcatgatagcttcgattttatccggattagcctcaatcccccggtggctgacgataaacccgagtaacttcccagctggtaccccgaaaacacatttttcaggattaagcttccatctataccgtctcagactgttgaaaaaccagctgtaagtcttcgatgaagtcttccgaattctccgttttgattaccacatcatctacgtaggcttccacacgcttgccccagtgatcggctaagc

SEQ ID NO: 161220 - DNA, 1343 bp, Zea Mays
agggtctactgcacaaatgtttccaagactcagcttcctacgctctggacggcgggttaatttgtaaacatcatggggtctctttagcaaataggccacggcgaaggggtatcgatcactttcagccgccagattagaatcctgcggctacgataggtcatatcgatgccatcgacctgcgcgagccatggccatccgattgaggatcaatgtctttgagtttaagacgctgcaagccaacctggtacgcgcgatcctgatccaagggtgaagatcaattcgttgaaccggtatctgctatctaatcccagacgttcgcgaatagatcgacggtggcagctccttcttctctcccttaaccaacccgacgacggcggagtagcctccccggcggcgcgccccctggcaacacgaccgaccggtccccgatcccgaatccgacgaccgcggcatgaaaacgaaagcggaagcgagcggattagggaaggatttaacaagcaggggtgaaagcgaagccgaccgacgatgcggtacagcaaggttccacaatggcggcgcccgcacgcgatggtgccaagtcagtgatccacccacgcgctccgacatcgacccgcccatgcggtccgctggttccccgaactccgaccaaacgcaccagcaacaaaccgaaggtcaccggcgagctcgatcctttctctctcttcgatggagctcggtgtggattccccaatagtggcctcgtctgctcatagcgcgcggtaccggcgcgcaaggattcccaacgcgccccgacgccccgccaagtacaccgcgctgcggcgactcctttcgaccgcactgcaaggacctgacagcagtccttgcaaaagtacccgacggcggcggtgctcgggatttccccgcggtggcgagcgctagttccctcgcatggtcctggaggcaaggaaccccgcagcagatttatatagatgtaggatggagtccgcagggttgttgcaacgatcttagcgaatcatccggagaaatcccatggcgctagtatggggttgttaccgcccgccatgcgtgagtccgtttttgggagaagaagacatgtcaagcggggcccacctggcggtgaaggttaccgagtgtgaggctgagctgcggtgcgcgcgcggctacacgcgaagttgggctggcggctagggttggggtaagtgcggcgtatttgggccgagcaggtataatcggcccacgcgggggtgtaaggttctttctctttttttcagttcttttctatataaattcctattttgaattcaagtctagattgaggttcaaatctttaatatgcacaaaca

SEQ ID NO: 161221 - DNA, 462 bp, Zea Mays
tcaattgtcaggaccgtgcatttaggcaattagcggtccaccacctgacgacgggaggcgagcagctgaaaacgatgacagactagactcggactggtggtggggactagtcagggagaggaatcactgattgtgcaaaagccaagcgttttgacttttgaggtccagctgtgctagtgctgcatgtccacgtctgggcttgccgcttgcctttggcccttgtatcttgtgtagtgcgttgcaaggttggcggcaagaccctgccgcgctgggctgctgggcgcttgtcatctggctgtgctcgactgggaccagggtcaagctattttgttgtcagtgtcttggctggccaaaattcatatggtacaagaggtggtcgctgagtcgtcggggtcagccaatcctgatcatataacatagcattgcccttggtggggaattgttttgcaagaggcataggcg

SEQ ID NO: 161222 - DNA, 370 bp, Zea Mays
gttcatgaaggaaaactatgaaaatgaaaatggttttagtgtttaccgtccgttttcatccctacttttggccccagtctccacgcacttgtcctactcccctgtactgaagctcgatggttagcaacacgtcgctatcctctctgctctctactgccgttgcctgaaggtgttgctattgccatgtgtcgcgccatgtgggtcatctccctctccctttgcgccaagtgcgatctctccttccgtggtgtgtgcagctgctacacgacatatgacacacagtcgacaccgttcgtgccacccctcttcgtccgcgtcacctctctccctttgcatcgcccctctccctccatgcctctgtttgctagca

SEQ ID NO: 161223 - DNA, 880 bp, Zea Mays
gtttaattcaattcatcaaaatgaagggaaacaaacgggcccttacggatcttgctagagccggcaatgattaaattgcaatatgggttcacaaagcctaggatctagaaagttttagtgatttttaacctgatagtgaaggcacctgtcactgctagttcagaccaccacccaacattggtacaatataccactaggttcaagcgacaaacgcaagtagagctagcaaacaataaatgaggtagcaaacaataaacaaacaataaatgaggttctatcagattgcatggtcctgaaacaaacaataaacaagcgcaagtagagctagcagtgtgtgctctgatcacacactaataaatgagcgagccaaccaaacagcgtgtagatatgtggtatcgatagcagggtgaagagtaatataggagacgcagcacgatagcatggtgtgtgatcaacaatggtatggcaaccgactattgaaaacaggttcattgcaacactgatggacattttccgcacttatggtatttccatggtgaactacaacagaccattagaaaagtagagcgcagacatgctgaacttatggcctggcactagcacgcacaaacagtagcaagatgtgcaacatattatgcatggacgactcgaatcctaattagaatgttgcacgacgcatcaacgcctttacaatgtaggatatgcatgattcattctgcctcctattcctaaccactatatatttttttgttatcgtctttgttccggctgaaaatcatcacaaccacttatatacttcttatgtttgtgcaatgttacattgtaaagagtccttttatagctaagtcttatgctacctctagcaaactttctatcccac

SEQ ID NO: 161224 - DNA, 553 bp, Zea Mays
tgcagagataagtgctatgctggacatgttggctggggattcttctgactcggtccctgctgaaacaatggctgttgcaactatcccagagcttgaaaaaaccgtggatactcaacggcctgagggtactcgtccgaaacgtctccgccaggtcagtcatccaactgcacctgccgaggggaagaaaaagaaaaagagacagcttcggcgagtgtcgtgcttggaccaggatgttggcccttctgctcctgctgctgaagaagtaccggtggaactctttactggagctgatcccaatgggtgtgaccctgctgatgttgatcccaatggatgtgaccctgccagagctgatcccaatgggtgtgaccctgctagagccgatcctaatgggtgtgaccctgccataactgatcctaatgggcgtgaccctgcgtcgtttattgtccgcattgttgacgaggacgaagaagaagaagaagtcccattaattcggaagaacagttggcattatagagtcagtggggggagtagcgatattccttctccagctctg

SEQ ID NO: 161225 - DNA, 1030 bp, Zea Mays
ctgtgagtccatctaattacatgtgtgtacatgcacatgccaacttcgatccctttcaaagattattatgcgtacatgagcacacccatgtcctttactggatatgcgcctgcagtcaggtgtgctttgcattgaatctttgtagcccttctattcttcatcctccccacagtggtggcatttggataggcagtgcaagtgggatcaggatatgtgatgctgagacagttaaagttatgatgaagaatcaacagaattgcagtatgattcggaaactagtttcagaagttagactatgggttagcctctcaataacttagttttaaatggtctacgttgacatgtctttgtctaaaattttattggtacttgcattatcaacctaccaagaaataaagtttgttctgttttttctgctcctttgatctctttgctaaaattcatgcggtgatctgtgttccaggccaatcaagaggttgaacagagctgtgcaggtgagcatgcattcattatattcccacagttcatattctttgcggtactacatctatggtagatttagtcgctgctgccatacatcagatgcccagatcttcttcaggcccttcgtcggcgaggagtatcacaaggtacgccaatcgcttggtcttatcttcctgctctgcaaaaacaagcacgcaaacccaatttactatgttacaccccttggcttccgatgaggtggccgaggtgtgaggctgacggtggcgctggtagtccgcaaggaaccggattggatgtgctctcccttgtcacttggtaagagacccaggtaaggaacatataagtggttgttctaatttctgatattagccaatttcccccctccaatctgttactgatttatatgcccttctagggaccagcagatcccacacctattacatgatctatccttctagaatagaatctgctctctatcttctgaaccggtactgccttcttcaatatcgaccaccgaccggtccacctcttcaataatcgtccttca

SEQ ID NO: 161226 - DNA, 666 bp, Zea Mays
gcgacacttgaagcaattccaaggaaggactcgtagatgcagagatatatagatcgccaatggaactaggattggaatggttgagggtgatagagtaacaaccctcgcaagacattagaggcaggtagcctgaaaccttgataagaggaagaagtctaaactactatttcacatatcattggagaagggaaaagatggtccctatgctctttccactcgccattggccttgtcacggagtattatgttagatgcttgggcaagcatatctagtcccttcatccttggtggctcttaggcaatgaaaaggttaggcgacgctaacccgacccccgtctttgttagctttgactttgttgctcgaccgtcttcatcgttgtgctgatgtatgcaggaatcttcactcacattcaacagggcgatcacaagttagggcttatgtgtttatggcacaaaagatatgggaacaagagatcgaggagtgcaaaggctagaaagcatatataaaaagggtgaaaatcatttaccccatcgtctatttataaatatactcaagaggtgtcttctcatggaggctacctttatgatctcaatggatggaacttttatagttgcataaatagccagcatgcatttttttaccatgtgtataattgaggggctcgtt

SEQ ID NO: 161227 - DNA, 479 bp, Zea Mays
aaaatgtggtggttgctaatatcttccaaaccatttcgctgaatatttattttcgtcggggtctagtggggcaactatgtgaacaatggatggatttagtggctcaccttgttcatattcgattaaacacaacgagtgacacattccgttgggacttgtcggcagatggatcctttagtgttcattcgatgtacaaggggctaataactaatgtcaatgtggcgtggcacaaagacatttggaaggctaagatgcctttgaagattaaaatcttcatgtgatatttacatagtggtgttgtacttaccaaagataatttactcaagcgtaattggaagggaaatgcaaaatgttctttttgtacccagaatgagacaattgaccatctttttttttccactgccaacttgctaaatttatttggcgtttagttcgaatcagatgtggtgttcgtccaccaaacaatattagacatatct

SEQ ID NO: 161228 - DNA, 837 bp, Zea Mays
atcatgatgctacgcttatcacgcttttgatagactgttgaccaacgtgaatgcatcgcacttagaatcgtgcctgttacctttcctcccctgatgttcatccttagcgacttgtactatgtagtggcagaagaaaaacctactcttttgtatatatcgactgcccgttgttaaaccttttactacatcgcatagctgcaaactgtgttctacttatttgtatggctaaagtcttttgccaacccagaaatgcattttattccgtgactcacttatatgttgccagtgtcgatttattgcctgttgctacattttacaactcatatgcctcccgttctacctgttgtgcttcagtgctcagcacgagcacttgttttctttgcagtgcttctgttcttgtgctagatatttattttatagagtagctctggttgacaagtgccagtcaatgccttcctgttttctgattggtgcacattaactttctaatcagtcataatctctattcacatggttgctttaatttgttctgctgaataacttcaaattgtgtgaggctgattttggtccaggccatgctgtgtttaaagaggaaggaataataactgttgttcgctttaatgtcggcatgtcagatcgtagtgagatgcagaaatgtacgacctgatcactgtcttatcacttttacataaggtttatgcaaacgatagcttaagcattttccattaactcattgtgaaacttgtgccgcacaaggaatttgtatggcgcccgatagggcgctgctggttctagtataatatataaccacccactgtcccgctcgctcgtaggctc

SEQ ID NO: 161229 - DNA, 908 bp, Zea Mays
aaaacttcctgagatgttctatgttccatgagttcccaatttctgtgccatccatttgagtgagacgatatgatccaggccgagtgacttctgctactatgaatggtccttcccatagtggtgacagtttatgccgcccttctcctgtaagaattcaccggaggacgaggtctcccactgcgaaggatcgatgtcgtatggccttgtcatgataacgcctcagagtttgctgataccgtgctgactgaatcactgtgttcaatcgttcttcttctagtatatcaatatcctctagtctggtagcctcagcttctgctatgttttcaaagatcaaccttggtgccccaaacttgagatcagcgggtagcactgcctccgaaccatagaccataaagaaaggtgtgttcccatgcagagctcgactaggttgagttctcaggctccaaacaacatatggcagctctctgatccactttcctgcgaacttttcattcttgtcgaagactttctttctgagcgcctccagtatcatcctgttggctctttctacctgcccgttggctcttgggtgcgccaccgaggcatatttgatctgaatgctcttttgctcgcagaaatcgaagaactctgaacttgtgaagttggatcccaggtcgattatgatgttgttcggtattccaaacctgaatattatgtcttgtatgaattccactgccttagctgaagttagagaagcaatgggtttgaactctatccatttagtaaatttgtcgatagcaaccagtacatgagtgtatcctccttgagctttcttgaaaggtccaatcatatccagtccccagcatgcgaacggccaggttacaggtatggtttgcagttgctgtgctggtagatgctgctgttttgac

SEQ ID NO: 161230 - DNA, 1160 bp, Zea Mays
ctaaagtcttcgctcaaatataatttgggatttgaacattgaaattggaattgaaaaataaaaacataaaatagagaaataataaaaagaaaaacaaacaagaaattaaaaaggctacctcgacatgcatgatcccatgaccgctcttgctcagccaatctgattatctgaaaccaagcccacgtctctttcttcctttttttattctcttgctgcaaatgacatcatcttgaggtaagaatgacatcaagctagcaaggaaatccagcacgccgtgatcctctttgtaaaaaaacacaccaaactgaacgccatagctgtcgtcaagtttgttgggattttggctccaattgacccggactcgttcccctctcacagtataaataggtaccaactataaccctagcccatcgatattgctgtgattcctatgatgccaaagcctcatcaccaagcgtgagcaacccaggggacagaccgagggagaaagaaagcacgaagcgacaatggcgcctgggagtttggcttgctccaccgcttctgtgcctgaccggctggtgccggggcggccgaattacttcaatcgtgaagctggcggactgcaagggcgtggcgctttcgttagggtctgcgcggacggcgggtcatcgctcgacgtcgacggtcagcgcaggacgccatcgctggtgagccgctcttcctctgcgataatccgagtatgcatcggtgttctaggcgggtgttgatggcatggttggggcggtcctgggtggccggtgaaccatcaggatatctctgtccgcgcataggcgagcgccggttgggcgggctggtgtgcatgcgtcgcttgggtgaacaccagctcggtctagcgttgggaggttgaagacgttcatctgccgtcggatgtcgtggatggttcagattccacatcgatcctagggtagtgggttataattagggtcgttcggttgagatctaacggctctggtggacggatacccccttcaacactggaaaattataaatgagacccctggaattttggaattagaacccagcgtccatctatgggttagtctgagtgtgagaaagtttatgatttagcccctgaccttcctggatttaggtgctcagctcaggagatagaaaaatcagaa

SEQ ID NO: 161231 - DNA, 538 bp, Zea Mays
tgctgatggcggtttgggccttagagtgcgaccctctgccgaagaagttagtgctttggttgcttcgcttggagaaattcctgatgatgaacagcaggtccactttgaggtgcctttggatcctagtgatgcaaagataagtgctatgcttgatatgctggctgaggactcttctgatgctgctcctgctaggacattggtggtggcgcctctcccggaagctggtactaccttggatattcagaggcctgtcagtgttcgcccaaaacgcccttgccgagccaatcaacttgattctcctgctgatgagcagaaaaagaaaaagaggcctcttcgacgagtatgtagcttggatcgggatgttggtccttcggttcctgctgctgaggaagtgcctgtgcctgaagttgccgacgctgaccccaatagatgtgatccatctgtcgctgatcccaatgggtgtgatccatctgtcgctgatcccaatgggtgtgatccatctgtcgctgatcccaatgggtgtgctgtctgtgttgct

SEQ ID NO: 161232 - DNA, 920 bp, Zea Mays
cccgacccggaaagtgtgcttcgctcgacagccatctaagcccgttgggctggcctgggcatgacccggtgggtgatgagcttggaaactggctcgatacaaatccagcaggagaccggcccccagccccccactcgaccactccccactcatctcgttgggctggcttcgccttgataactcataagccatccataagccccctgccccctggtaacccgtaaccctaacacgtcgcgcggtcgtgcttcactcacgcctctcgccctctcggtctctccgctgctctcgtagtctctagaacatccgatgcccgacggtacgacgatgactccgacctccgacgaccgctgactagcgctccgacgtctccgtggacctgccctcctccctatcggtcttagtacatggtaccctcaccaacacacatatcttggtgccacccaccaaaggggaacccctcttgctctacgtcgccgcaaccacttaggtggtcagcgtcgtggttgtagttgaaaggcgagaggagggacataccttgcctgtttagaggtcggtgtactttatcagtgaggtattgttagaaatgaagacttgctacccaaaagtccagaaattgatgtacgcggtagtcttggctcggcgcaaactatgacattacttttagtctcacccagtgacagtagtgtcatccttccctctagggagatcattcaggacagggaggccttgggaagggtagccaaatgggtggtcgaactcatgggagaaacactcacgttcgccccaagaaaggctatcaagtctcaaatcttggctgacttcctggctgaatggaccgacactcagttgtcgacggctccaatacagaccgagctatggactatgtacttcgacaggtcgctgatgaaaataggagt

SEQ ID NO: 161233 - DNA, 728 bp, Zea Mays
gcaactccaaggagttacatgaaggcttggggttgttgtcgggtacctaggaaccgggtgctcagtataggcccaagattcttgatggcccacttgtcgaccaagtctctgctgagcaaccctgcgaggtggagcagacgaccaagtctctatcgagcaaccctgtgaggcagagctaccgaccaagtcctcatcaagcaactcagcgaggcggaggcctcgacccggtactattgacccacgtcagccacgacgggacgcttagtcaccaaactacgtctagaccagtgacgtggcatactgaagggatatagagaagtctctatcgatgtgatggtacaccaccgcatacgatttctaccttgtgggatcggacaaccataatcgttgagtacctaagcatcagagtcgccacagtaactcgcataccaggaaagacgggagaatgcaccatattgggtgtatgcctacgcacaccagggggtgatgcggggtccattacgaaaggcgagaccgggccacatacaactataccatgagactaccccatgggacccaccaagctccactacaaggacaataacatcagactcactatagggacccgtatgacggacgaacaaagcggtatgccacgttaggggtacgactacacatgaccctacagatgctgtcagaggcacaacgtcaaccggaggcaacaactcacgctcttactagtaggaaac

SEQ ID NO: 161234 - DNA, 1126 bp, Zea Mays
gggtgcagccggacaagcacaataagtgcgcgacatcacccatagggtgcaaagtcttcgtagaaagacacatccgagaaaaagccgcctaagggtgcagccggacaagcgcaataagtgtgcaacatcacccatagggtgtgaagacgtcaaagaaacacacgtccaagcgaaaaaccgcctaacgatgcagcagggaaaagcgtaagtgcacgtcactacctattaaaagtgtcacgcaaacacgatcgcaaatcaaagcaatctcgcaataagcacatcatgcaacgcgccatcatagatcacatacgtaaaacaaagggctcaacggcaacatcgtacaataatacaaatcacgactattaccctcacaattctattgcgaagagggggagggcagcattttcactcactattgcaacaagagcagtgaggctagcaaaaatgtcacataggctccacctttggaataagacccgcctcccaaaaattaaataacatcatccttagctcttcacccttaaacagatcccgcaagtccccctccccaatacacgtttcggacgttgaagacagtagctcatgttgactacccccatctagtcgaagacgggaccgctccatacccattcggcgatgtctcccacttcgtgacaactcatcgatgctctgtttcgacaccactcctcggtcctcgccccggccgaggtggccggcgcttcgcgcgtatcaggtcgcagcggagactccgacgtagccaaatccaacgcagcgaagtagtctaagtccttagaagattccttgatccatgaaaaaggactcccaaattcatccccgcccgaagaccacgacccagtgtcagacccctcaaacatattttcattaaaaggcattgctttcgcagccgtcaaggagttagtatcaacatcatcgaggtttgcctacgcaggcccagacatcggaacctgcacagcaaatgacttttagtaccacaaaaagagagacccaaaacgcaaaatccctaacgtatcccttccacctgcgccagagcagacgccgccgcagggtcctcaccagaaccagcctaaggcgctgagcacttcagctcccacctcctccgcgccac

SEQ ID NO: 161235 - DNA, 849 bp, Zea Mays
aggcttgggctatcgccatgcaaccagaatgtggaggagaagaccctacgtgaacatccatggaagtgtgggagggagaacccactcggacaccctcgggggctgggtaacagctcacgctacctatccgagccggatcatctccggcaacaccctcgggggctgggtaagcgccagcaccatccttgagggccgagttctctgcaacaaccacctctaaggctgaaggaccctcagtcacttccgtgggagcaatgcaatccagaccagcctcctggcccttaagaccgcgctccaaggtcgatgaggcgcgggacgccacctaggataactccagcccagcatcaggcacatcagtgcaaacatccatcatgccaccgtctgctggctccgacaacagatcttctgggaccatgtcttcaagagtttgatcaaagttcgccagagacaattcttgcagaccaatgagggcagataaagctggaaaaggaacaccactgcttttcccgctggctaggtaacgccgactgttctttcgaattagagggatttcatcctcctcttcctcaccttcatcaacaacgtggacagtacacccattggggtcagttttggccagatcacacctgtcaggttcaatatcatccaggtcacacccattgggatccacagcagtcgggtcacacccattggggtcagcttcagcaaattcaggcactggcacttcctcagcagcaggaacagaaggaccggcatcctgatccaagctagacactcgacgaagacgcatcttcttctttttcttcccctcagcaggagaagtgggctgattggctcggcgagaatgct

SEQ ID NO: 161236 - DNA, 347 bp, Zea Mays
gtggaacttcatcaggaaacacatcctcatattcctgtaatgcatcaaagacaatacttggcaaagtagagggtaagttgttagtagaaagaagggtgtccttgtacaggagcacaaagaacatggcattagtctcactcaattcttttagatcccccttcctagtcatcatgactaatccctcttttcccggtgtcttggacattgaaagttgtggtgttttatttggctttggaaactcttctttactatttttgtggatcactctcaagtggttctcgctctctcgctgtttctttagatcatccttcaaaatttccttcggtgtcaaaggaagcaaagatatt

SEQ ID NO: 161237 - DNA, 470 bp, Zea Mays
gtcgtcacagagctccgggccaagctgagtgccatgaacgaaatcctggaagagtagtggatccagcagaccgcggctgtggagaggatccaaaaatgggagcgggagctggaggacaaggccagcaacattgccctggtcgaggagaacctcaaggagaaggatgcgtccctggataggcgggaggcggatctcgcctggcgggagaaggatctcgccttcagggaggaaatgtttgaaaggcgggataagttgctagccaagcatgagctcgaggcggaggataaggagaaaaagctggaagagcggatccggcagttccaggcgacgcaggtggcaccgggcccccagacagtggaggcgacaaataaagcacttgaagatctccagacggagcatcgcgccggggtccagcgcattgccgcatgggccggcgagtcgagcacgactctggtgccgctagggatgag

SEQ ID NO: 161238 - DNA, 444 bp, Zea Mays
tttataaattattttctcgggttttataatactctggattaggcctcatttactgaaaagtgcaggggtctcggggtaaaaatctgtagactcagagtactatgcagtaggacggcgggttgattcaaacattttccagggtctcttttgcaattatggctcggtgaaggggtacggtgcgcggaaggacgtccgatcaagtgttgacggcccagattagaaccgaagtggtacgagacagtgaccgtgagatcacagatcgacggcagaggttttaaagaggtaaggagggttctggaccgcccgattagagattaacggcccagatcggccccagccgaaggggtatcctatttctaatcgtagccgtccacgcgatgatcaacgggcgcgaccctatcttctcccttcgactaaccgagacggcggcgccaccgtttctca

SEQ ID NO: 161239 - DNA, 947 bp, Zea Mays
cgagcgtggccagcaagcccatcagtcgcggctagagggtactcgtcgttgtcgcgccacacctagcgttcgtgtgcttgccctcaccagccgtcgtgtcgcgtgcccactgagcctcacacagcagtcgccgtcgcgcagcctgcatgcctcaccgtcgcctagccgaagcctcgacgccgtcgcacgccagagtcctcgcctgccccaggcccattgtcgagcagggagtcgcgccccatcatcaccgtcacgcccatcaacatcgtcgggcccaaagctacctacgtcaagcccatctcacgccgaggtgagaacattgtctacccgtcgtcgtctacccctaaacgtctaccaactcccgcgcctcgcctttgcgtcgtgccttcgcatgaaatctgaaattattaactaagcattagctttcgcattatgtatttgttttgatctatttgtgtggcgttaacttcataataatggtgtatacacgttaaacatgttattttgtcatgatgtatgtttgttttatttacttaattgtcagtctatccgttggttattagcgtagcaatgtagtcaaaactagtttatgattttaagttgcgcgtctagtaaaatcgtttcgccacttcgtgtatgttgaataattaattagtaattagttgtttagtggtcggctattaaaataacaattcaaccgaaaacgaactggtaattttaattatacacttcgtcaatagctattaaggtagttgtgtcaatccgaagcgttttcatttatgtttggttagtgtagacacgatatcgattagcgctgcggcaataccgtgttcgttctaaattaattgttcagtcgcatcgattttgtattagtaatgtatttcatcatgtcccaagtctatattatttaattagctattcattcgatacttattaaaatgaccttc

SEQ ID NO: 161240 - DNA, 1009 bp, Zea Mays
ctagcacacaaatggccatgtcacgggtatggtctgcagttgctgtgctggtaaatgctgctgctttgataagaattagcaagcttcacacctctggactaactcggttgcatcactttttgctgtcggccagtagaaaccagacctgaagaccttcccaaccagggtcctggatgctacatgtatcccgcactgtccggcgtggatctcatctaacagttgcttcccagtagctgaaagaatgcacttcatgaggactcctgttgcgccccttctgtacagtgcatcccaatgagggtgtagtgggctgactgccttgcgatgcgttctgctgcatctttgtcatccggttcctcttcattctttatatatctgatgatgggctccctccagtcattagagtctgactctggctggctcaaaacgttgcactcttctgcttgatctgaggaaatacttgggcatggcacctcttggacgaaaactccaggtggaacctgggtccgactggatcctagtttcgacaacgcgtctgtcgccacattgcgatctctttccacatgatgaaattccagcccttcaaatttgtcttccagtttttggattgctgtgcagtacttgcccatagagtcattcgagcaatcccattctttatttatctgacttatgaccaccagtgaatctccgtataccattaacctcttaatgcccagtgatatggcaatgtttaatctgtggatcaaagcttcatattctgctgcattattggatgctgagaataacaactgaagagcatatttgagttgctcacctccaggtgcaatgaaaaggatccctgcacctgccccctgcagctttagcgagccatcgaaatacatccaccatacttctacagtctctgggttgtctggtacttgttgctcggtccattctgatacgaagtcaactagtgcatgagtctttattgcagtacgaggccgaaactcgatgtcgtgagctcccagcttgc

SEQ ID NO: 161241 - DNA, 404 bp, Zea Mays
tgaaaaggaagagctgaagaaatatgctatatcctgtgggtacaaaccaggggctctgctgtttggtggagtcaatgaagggaaactgagatgccttcagaatcgaaccgaggccaaggtcgttaggactttctcgaagaatgttggcctgccgaagattgaggcagacctctacaggtaccagcgacagcatatcgccggtagcttgttctatgctaatttcaaggtaaaactctcaactttttattattttttgaattaagatgttttctgacgaaggttgttttgccagagtatattactaagtaaagtgctgaggatgcaacaagatcttgaagacgagaaaaacgaagctacaatcaaagatctagaaaataaagtcgaaagtcacaaagctgttttgg

SEQ ID NO: 161242 - DNA, 460 bp, Zea Mays
cacgccggcatcctcaggaactgattccactatcacatggttgactcttcctctactctggttctgcggagtcttgttctatgtagatccatgagcaggggtgttctggtcattcctctagttgttgttcttctggggtgtctgtgggttatgcctggggcagttgttggcatagtggccaagttcgccacacttgaaacaatcattaggttaaactggggtagttgcattgttgttcttggtcggtgtgttcacggcgcttccctgacgattctgttgttggacactagacctttgaccggtctgagtgctgcttctctgctggttctgttattggttgttcctctgaccttgttgtcgagagcgctgtgcttgatagttgttgttcccactctgatttctggagcggaactaagaaccttgggagttgttttgccgggtattcctactggtctgccct

SEQ ID NO: 161243 - DNA, 439 bp, Zea Mays
ggaaagcattcgcaatggcaacagtagttgccttactatgcaggaagaacatttacaggcagaatgtggaggatatcctcatccagattatatatctgttgatatggttgatgaaagatcactgcatgatttgccacatgggttatcacaaaacaatgagcagtatgagatggagcagctcccatagaatatatgtgaaagtggttctatgcagatggtctctccggaccaatattgttcctctccggaccaatattgtgatgatacatctttatcagatttttacatggatgtatcctccccagagtcaatatcctgtgagaagaaccagcctgaagatattttttaagagcgagtctagcactgactcttctccagtaccctctagcagaaattccaccacagaggatgctgataaatacttaggtcaaccatcaaa

SEQ ID NO: 161244 - DNA, 520 bp, Zea Mays
aaaaaggaaacagtgcctaggcagaaaccatcactgttggcccattatccctgcagcgcagcccagtttgggaatgggggcgccgacacctgggacccacttgtttgtcacaacatcgctcttcttctatcgctgacaacccgggccaccctccagccgtctctcccgttgcgcacacgtgattgtgctgtcattgccaggtaggcccgcacgtcagctgctgcactcctcactcggaatcacggacaaatgaccccacctatcgggcctatcttctccttcctctcactcgcaactgaatgtgtcgtactccgcgcagggagaatcaacctcgtctgcccgtcccaccggactctatcctacaggctatataagtctgtcgttgtgttcctttcctccatgaccatgcaagggagctagcgcacgccaccacgaggagatactctcgtcgcccaattgtgccgagcggagaggagagagagataaagaacgtccctgtgcggatcttcttcgagcgctg

SEQ ID NO: 161245 - DNA, 508 bp, Zea Mays
gcacggcgtgccagcggccgcccgagccccgaccaccgtggaccggccactctggcccacctccatccaatccaacccctcggctagcctctccggagctccatgaagctccctgagcccttagatcgaacaccacttcgccggacgtgccggattgacatcgtcggacttcatccgatcgtcgtcgcacgtagaccgagctgcacagtgagccacccttcgattccttgcgtgcacaacaccattgacctcccgtgaagctccccgagcactttgattgagctctactgctgttagcaggccgaagcacacgaccaaccctactccgaccaccatcgccggtgatccgcccctcgacgtgaccgccaggagcccctggaccgcacccgaccctccactgtgcctctcccaccgccggtaagctgcgccactgctttttctccctacggctactgttctggcaaggagggagcgtgggttaagaaagggaaaaagccagggggttttt

SEQ ID NO: 161246 - DNA, 617 bp, Zea Mays
gggaaactggccacgccattccgtcatccaggttgcaatttgacgacccatgctggtccgcggtgaaaacagagatataatggtcgtcattagagcggaatccacggaattaaactatgacacagggggagatgatgggggcataattgtgatgctacggttctctccaccagtgattagcagcagctgattcgtcccagcttacaccgttagagctgatttggtgatccgggatctcgagaaaattggaggggattgagggggaaactagtcacgccattccgtcatccaggttgcaatttgacgacccatgctggttcgcggtgaaaacagagctataatggccgtcattagagcggaatccacggaattaaattatgacacggggggagatgatgggggcataattgcgatgctacagttctcttcaccagtgattagcagcagccggtttgtcccagattacaccgttagagctgaattggtgatccgagatcccggaagaattgggggggattgaggggaaactggctaggccattccgtcatccagattgcaatttgacgacccatgctggtccgcggtgaaaacagagctataatggtcgtcattagagc

SEQ ID NO: 161247 - DNA, 393 bp, Zea Mays
tgatccatgagtgatcattttattttgcacacctgtagtaatctcgttgtttccttgtaactccactcggtaatgaatctttacttcaacccttctgttggaaccttaccgatcttacccttgattgttttctccgctttgtcatttcgcgagtcttgtcttaactatatcctttgttatgctttttaattattatcatatgcacccttgacacctctatatcctacattgatgtttgtctcatacctgccctttaaaatcgcccctcttccgtctcatacattctttctcttggtcgtatcctcttctttggctcgcgagtttgtaacctcatcctttgttgtgcttttgcttcttatttcctttactcttctcatctctcaatcttacctt

SEQ ID NO: 161248 - DNA, 750 bp, Zea Mays
gtttggtttgattctagatataaccgagtggctccaaaaatagaatattcttccaatacgaaggatctctgggctccaaaaaaacacccgaactcatccgctcgggagcacatcgcgtctccattcctctcccagggcaggtacgctcctcccgtcgctcgttcctccccaatcttttctgccgccgcatatgcctccagccaccatatgagatgcggccaccgtgtgcccctagtctccagccgcatctcctctagccgcatctaccgccgcatctcgtttccctgtgcccatacactaccttgcttcttctggatctgccgaggcatatgagatgcggccagagcagccaccatcagatctgcagagcagccatggccgccgagtagtccacgaacaacaacgatttttggattttttttttccattgccgagcagccaccattagatccattgtccttttgtgatttgcttttttgtccttttgtgatttgagaacaccacaagtccattctacgattagcattatttctgcgattgagaacaccgtcagatctctgcggagcacgccatctaatgctttcatttttttacaggtgcaaggattgcaagtattcagagaacaaaaaagacttcagagcttaaggtattataatattttttattttctcatttaagcagtgaaattaagcatgcatgtgtggtttcaattggttatgttatcctttttatatagatggagaagaagta

SEQ ID NO: 161249 - DNA, 424 bp, Zea Mays
caccagagtgcagacgcgctctaatcctaacgcgattatgcgcaaaacggagaggggaaagtggcgggtaggaaagtggcagccataccacagatgaagctcccaggtgactcaaccacggcgcacggcggaattattcgaagacgggactcaggtgaggaatttgtcgcgctccgatcactgattccgcacgtggaggccccggttatactcgtcgcacccagacgagttgccaagaccccatggcgacaccgaaacgatggtggtcaagcgatccaacgacggcgacacttatacccgacggcggagtccaagtccaggaagccgagtccgcggtggagcacgtgcttcggagcagcgacagggagcgcccgccatggatctcggcgcccggtaatggtgtctttgtgcccacggcaagcta

SEQ ID NO: 161250 - DNA, 598 bp, Zea Mays
tgaccgaccaacatgtgggtccaggcgcagggcacgcgtgcgcgaagcggtatccggtgatccggaccgcacgatagatatcagacggctgaaatcaagcaccggaggggttaacggttgcgggcggtgccactcttgctcacgacgatgaggtcgccagagctggggcgggtgtgggctacagtggtttcgaggtcaccggggttggccaggatcggcgagaagaacccgatgaactcactagtggggttccggccacgagaccgggaccagagatgggagaacggcgcaggggagacctccgggcgggttggggtaactccggcgaagaatctcggccacgagatgggtcgatcgagtgcgatagggctcggtctagttcccatgagggtaggggagtgctatgggccaacattggggcatagggcgggactgagttggccggacaccgcgtggggcgcggcgagcaggcgcggccgaactccggcgtggccaaattggctacggtcaagggcgaataaggaaaatcaagcatgggaatggatgtctcacctcagaacgaagctcggggtggcttggcgtggcttctggcgggctg

SEQ ID NO: 161251 - DNA, 373 bp, Zea Mays
agtacaggagttgtagttaggccctgtttgagggtgtgaaaagcttcttcatgcacttgtgtccatatgaacaatacccctttttcaatagatcattgagaggtcgagcaattaccccaaaatttttgatgaacttcctatagtaacccgcaagtccaagaaatcctctgaggtctttacagtttgaaggtgtaggccatgaagacactgcctctatttttgatgggtcagtagccatccattgctgactaatgacatgtcccaaatagcctattttctgttgggcaaaggcacatttagacatcttgataaaccattgatccttctaaagaatttggagaacttgctataagtgaccaatgaggtctgtcca

SEQ ID NO: 161252 - DNA, 629 bp, Zea Mays
cagccgataggattacaaaagagtggagaactacctggaaatctcacgagagagggagagaatccagtcaggacaggagatggctcacgggcaggcaaggtcactgaaatgacagaagatgtgaacacgtattaatcacatagtcataagtatatgaaatgtgaataaatacatacatagagtgttatggcacagaaatcgagtgatttggcgaaagagaggtcaaacgacacgaaaacggcgtttgaacgaggaatagtgccataggaggtttgaaattggaaatgaagcatgaaatgacttggaattgagacgatacttcacaaataggtttatatgggtaaatatgagtgaagtgtgcgcttggtttgattttaggcgaagaaagtggaatttgggcactcggctcagaatcgatcgctagaaatagagatttgtgtaaaattgaagcctaggatgtcggattggcgtgagattttgcgaatatgttactggaggtatcatgaaggcgtctgaaaattttgggttcaattggagcatttttggctggtttgggtatttcaccaagcgcgtggcgtgcagtgttctaggtttagagtgaaatgcctatttgaggtggggaaaccctc

SEQ ID NO: 161253 - DNA, 608 bp, Zea Mays
tagagttccggtgagcaatctacggtgacccatcacactaaatcgtccgaggtttgttgcatatcactgcagagacgggggcgaacgtgtgggaggggtccatacccgaattggtggcgcgaaactttcggtccacagcagcggcgtcacacggcggagttttctctccggtgagcgattaccggcgcgcagagcttcgattgcgcccagttgatccacacacgcactccagggaccacgcagagacacccggccaactaccgcggccacaccggtgttgtcggcacaggaccacggcgacagtgagttctgcccgtgagaatcgcggcgacgaattggtggttggcgagaggttgagaataaaggagggagaagaagaggtgcacgggtcgccctttgtacccagtccggaggggggtcagcccggtcagcccatgcccgcgaatttcgcgacggagctgttgcatcagccaatctccacggctggtgggcgaagctggggaacgtggtgactgacagcgtgccccaccgtgcagcgtgtcaccccggttgcaacgggcacggatggggtggcggaggaggcactgatgtacgggtcccacatgtcg

SEQ ID NO: 161254 - DNA, 707 bp, Zea Mays
agacacatgcctggtataagatgtccagcaattgcagttatttttttgtttactcttgtatgagatgtatatacatgcatgtaacaagtaagcaccacctctttaggtaaacagtaaactatactaaggttaggacccctttcccatatgctccttagtaggcgctgtcgttatcctgctacagggctgtctgatgagcaatgatcacttatgtccctagatacgcacaatggatcacagatataatctgcatgcatattttttacctgataatagctcatcttattgtggtgttgatactttttagccatggtatgttgtgcattatttctgggttcttgttaaaattaacacaaatatgattatataacctaactgttagattatgtgtatgtgtttactgctgtaatgggccttggcccagcccatgtactcaactatatatatatacaacacccaccctgtttagggtcaggtttttcaacatggtatcaagctaatcctctcttctttcctccctatcttccttaggtgcaaccttcactggtcgcctgctcgtagcctttgctggccgcctacttgccaaccaccttcctccatggccagcctccctctcttctcccctccctttctctctcgccagtgggttgtcgttgctgccgccatcctcgcgtctaccgttgggctgcccatcaccagcatggccc

SEQ ID NO: 161255 - DNA, 562 bp, Zea Mays
aaagaaaccagacatggcacatggtcagagatatcccgaggcaacgttgttgcgcgagtgtttgggtaaattaccgaccaatctcgcgggatgaaaaaccaatcaagtctttgaagaaggggctccctttgcctattcgaccaggtaaaggacagaccatggagggggatttctatcaggtcaagctggctaatggcctcgttaaatttcaacatcaggctaagatctcccctaacaatatttctgttttcgggcctacgagtaagattgaagtccccaactatcagccaaagtttatcaaagggcatatttatattagagaaccagttgatgaattcaattttcccatgtggagtacagagcacgtaaatatttgtgataatccaggattcattcgacgaattagagaaaaattcaaccgaaagagcatattcattctgataaataacattgcccaccaatttcgagctattccaaacagtaatggaaccacccgaatttcccaccgaggggacaaaagcgaacgagtcaaaggaattggggcaaaattttctgagatcag

SEQ ID NO: 161256 - DNA, 572 bp, Zea Mays
gtagactgtccggtgcgcccatatcgcgttttaaaaaacggcctccagcccgagaccgagccagaggctctcttctccctctgtgctctctgctctctcgcggtctctggcgatctccacccctcgccggtgaccatctctcctctccggcgatctgctctctggcgaccttgtccatgtgcatcatctctctctagtgagaatccctctctctctttccccctttactctctgttcatgccaccagtgaagcacccatttccaccctttgtgcccaattccaaatcttgtgaatcctagtgaatccatgttgtacaatgtgttcctttgtggcccttgaacattcttgcaggttcctagctccttcgggagggttttcccacctcaaatggcattttccccgaaaccctaaaactccgccctccacgtgttcggtgaaatgcccaaaccagctaaaaatgctccaattgaacccaaatttttcaggcaccttcacaacatctccagtaacatattcaccaaatttcacgcccatccgatattccaggctttaatttcacctaattccccgt

SEQ ID NO: 161257 - DNA, 1488 bp, Zea Mays
atcacatgccccagatacttcagttcatatttcataaatgaacatttcctccttttcggataaaactgatgttctctcaacttatccaaaaccagactgatatgttgcaaatgagcatccaaactggaactgtaaatgagtatgtcatctaggaaaaccatcacaaattttctgaggaaactctgcaataccgaattcaaggcacactgaaaactagctggagcattggtgagcccaaatggcatcaccctgaactgataatgaccatggtgtgtcttaaaggcagttttgaactcatcctcagcccccattcggatctggtgataacttgaggtcatgtaaagacttgtgaagaatttagttctagctaattcatctaatatctcctctaccagaggcattggaaatatgttcttaattgtcatgtcattcaattttctgtaatccacacagagcctccaacttccatccttttttgcaccagtaacacaggagaggcaaaaggattcacactagggactatcaaaccagcagccaatagttcagacacttgcttttcaatctcagttttatgatgtggtgaataccggtagggtctggaattcactggtatagaacctggcaaaagtgggatatgatggtcatatggtctagtgggaggcaactgggtgggcacagcaaacacatcctcaaactcttccagaattactgttagtgtctcatttccagccacatcttcctctcctttaacctcctctgacatcacaaacacccatacttcatctcccttcacccacttctctaactgcaacacagacacctgttgcacctccctctttaggtctacatccccctgtagtctgaccttcaccccctgatcacagaaggttagcaccttgttgatccagtcataatgcattgggctatgttgtttcaaccagtcataccctaatatcacatcataagcctccaatgccaacaccctcatggcagttctatagacatgcccccagccttccacttcacctctctgacatttttttcacacaccatgatctccccattagctaccttcaccttcacaggagggcagtcttctgtgctcaaccccagtttagtcaccattctctgactaataaaagtagtggagctaccggagtcaatcaacataaacagcacctgatcttggatcagagattgcatcctcatacaaccatcacactctgtcccctttatggcattccaggacagctgatgtaatccttccactatatgctcctcctcctgttctagctttagcaacacttcatcagttagaattgtgctcatatcctccactgtcaactgatgtatttgagtcactactctcttgggacatttggcttgatgcccaggttcaaatttgtctccacatatgtaacatagcccattggcccttctataatctcttaactgtctttccttactcaattcaggattcaggatccc

SEQ ID NO: 161258 - DNA, 758 bp, Zea Mays
attatgtatggccaaaagatgttcatgcagcttcactttgtaagccacggatccacactacgctagtatttcaaaaggatgaacatatcgtggtgccagctttcccttgatgccaaaacgagttactcctttcataggtgaaactttcagatacacaaaatcgccaacttggaaatataagggtcgtcttctcttatatgcataactcttgtgacgatgttgtgcaatcttcaaacggtgtttaataagtttcactttctcttcctcctatttcactaaatcgagcccaaagaaaaaccgttcaccgggccctaaccagttcagtggagttctgcaccgctgaccataaagagcctcaaaaggtgccatcttgatactctcttggtaactattgttataagagaattcagccaatggcaagcactcatcccattttccgaaaaaggctaacacacatgcccttaacatatcttccaagatttgatttaccctttcgatttgcccactggtttggggacgaaaggctgaactatgaattaacttagtatcaagagatttgtggaagtgttcccaaaatctagagacgaattgaggtcctcgatcagacactatggtcttaggcacaccatgcagactcataatccgagcaatatatagttcagcataagtcttcgttggatacaaagtttttacaggtacaaagtgtgcgactttagtagaatggtccacaatcacccaaatagagtcataacccttgg

SEQ ID NO: 161259 - DNA, 632 bp, Zea Mays
ggcctgcgcacgcaaccgctactgaaagtgctaattttgtggcgacttcgaccgtggttgcggaaaatgatttgggtgattctgtgtctaagttttttgggtctgatgattctgggagttcggtggtgtggactgaagagtcttcggatgaggacttggattattttgtggctttggatgtggctgtggtggaggctttgtcgtgtgtgatgggtgctgaggttcccggtccgagcgccgggcggaggtggcgaagggcggtggcgaagcgcagggtgagtgaggtggagggtggtttttttcatgtggacagggctggtaggcgggaattgttgtcctcgccagctggggcgagtgtaggtgagggggagttgcgaagtctgtttgagggtgaggagctgaggataatgttgtttaactatagagagatgggtatcatcccgaaggttgaaccgttgtaaggtgtgatgccctcgctgtacgtatgtaactataatttgtatgatgaggctgtgtgccttagctgatacggccgtgcccgtaggggacttgtgcactaggtctagcgcgtttattatgtcggtccagctgcaccctcaggcgacttttgcacggatagtcttgggaggaag

SEQ ID NO: 161260 - DNA, 699 bp, Zea Mays
cgaaacgcacggcccagatcaacactcgaatcgttatgcgctcgtgtaatcccgcacgttggccaaagatccaacgatccacgatcgcaatagccaaaacgcttctgcacatctaatcgccaccgcacaacataaatcggatggctagaggatcgtctccctcctcccggccgcgacagggagagggtgcccggagctccactggttagctcgccggagcacgatgaatcggcacacaagtgccccaccgcccgcgccaatacgttctacgcaaagccgagatgacgctgaacatgaagggaagtttcttaccagcagttgggccacgagaacgcccaccgacggcgcggcgcggatttatggcgacaacgagaaattccggtggccacgaggttcctcgccgcccaccgacacctagcgcttcgtggcccgacgtcgatccctgtagagcaataaccgagccccgaacggcgcagcaagtcgatgaccgcggagatcccgtctcaatctctctcctctctttctctctctggttgctacaacggtgagggttgaagggctacgacctggattttatagcgcggcgtccgtgtgggttccgaactccgcgccgatttgggggggaaaggtcggtccgagccgcacgagctacgcgcagaggttacggcgactccgccatgcacgcgaggccacgcatct

SEQ ID NO: 161261 - DNA, 384 bp, Zea Mays
gcttgttgcgtagaggatgaattattaagacatgagtgtcggagttcatatattagtggttacgctacgatgatcaaagtgtctcgagtgcatgccaccatatggttgtatgcgagacgaggttatgcgcatgatgagtttagtaaaaatccatcggtgtcactggtgttaagttgaggtttatttgcgcgtggaaagtaataatgtgtttaatacctagaacacttagtcgatagtagaaattgttttggcttatatagagagatagtgacatgctaagtagtcgtcgctttctctataattataagtcgagtcgtgacgatgcgtattatgcgtttgttaaattatgcttcgcatatagtgtatgattgtgctcacgatttc

SEQ ID NO: 161262 - DNA, 729 bp, Zea Mays
aatggcaggcagcacgacgacatcttcctcctctttccatggtatactggaggacatggccgacatcaaagatctctccagtaccgcctccgcgttcatagccgaggtcaacaagcttgcccctaaggttggtatttggcacagtaccgacgcacccattcagccatccgacgtgatgcgaagatgcgatgaacaggcgcgacgtggcctcttcttcctctatccgtggcatgctggaggaaatggccaacgtcaaagacagctctagggccgtctacgtgttcatcgtcgaggtcgataaactcgcccatggttggtacttggaacagtatccacacatccatccatccacccatcctaagattgcatctttttctgagacccatagatagcaaattcagaacgaatggagcaagagagtttgagactaccggagttgcccaactaaacaagcagtcgttgttgctcacctctgaataaaatctgattggtggcatgtggacttttaaatctgatgtgttatattggcttagctttttctagagttttgagtggatcacaggagtccatgaccagatccagcaacaactattatcaccaatgaagaaacatgaatgctttccttcggtcgctgtgccatcttcaatttcttaatagtgttaatttgattgaacgttataatattcatcaatccacatgcacctcaatctcagcgtccttaggaaaaat

SEQ ID NO: 161263 - DNA, 948 bp, Zea Mays
ttacaggtgaatattttccataaattccaaattcccaaagcgcatcacccgaacgaggaaaaagaataaaaagaataacctccacttctcctctttgcaaaccgggtatcacactctaccccccttaaaaagaatttgacctcgaattctgacgcttctatcggaacgacaaaagggaaaatttaatgaatcaacaacacttacccacaacaaaaagttccggatatttctgccgcatcagctcctcaagttcccacgtagcctcgcgctcagactgattagtccataagaccttgacatacttaattgatctcttcctcaaaaaacgctccgaggattccaagatacgcaccggacgacactccaaggtcagatcctgctgcaccgcaattggttccatctcaatctgatggttcggatcccgcaagaacttcctcagcatagagacatgaaaaactatgtgtacccctgccatggtaactggcaattgctagcgataagccaagctgcccacccgggccaagatagtgaacggtccaatatatctcgggctaagctttccagagacaccgaaccgaacaactcctttagtgggtgataccctgagaaggacttggtcacccactgcaaattccaaatcctgcctcctcacaccagcataactcttctgacggctctgagcggccaaaatattctgatgaatttcccgaaccttttcagaagtctgttgtacccaatcaggaccaactagggatctctctcccaaggtctcccagcacagaggggagacacaccgcctgccatacaaagcctcaaatggtgccattttgatgctagcctggtagctgttgttataagcaaactctaccaatgcaagatgatcttcccagctacccttccaagacagaacacaagcgtgcaacatatcttccaaggtttggatcgttc

SEQ ID NO: 161264 - DNA, 538 bp, Zea Mays
gaagaaactgaaagatagctttgcaaaggtgggagcataatcttcggaacaaaaatttattcgtggtgatcccgaaggggttatccagtggatcggcgaagaggttgaagcttttgatgaaatactcagcgatcgtggggatttctgtgctttcaccggtgcacggggggtcgcagcaattgtagagaaggccggttgtgaacatattaaggccgcagcccagccagaatctattttttcagctgatgagaccaaggacccctcgaccgaagcttctttgctaggtgggaggttttattctgatgtctggataaagggcggtcgtgaaatggctgatgaagccattaaaaagaatgaacaagaatctcacgatgcatgagaaaaggcaaaacaatctgaagaagctgctgaacgcgccatgattataggtacttttatttaaagttttgcttcatcgttcgtttctagcttcgaagttcaccaacatattcttttattccagctgggctttcaccaccaccggagtcgtacaaccccg

SEQ ID NO: 161265 - DNA, 451 bp, Zea Mays
ctgatttgttgactaaagcaggaagaagtgtgttggtgcaatttgttttgacagggatgctgatttattgtgctatggttgtggacctgccttctgctacgatgaaggacactgataaaattagaagagggttcctttgatatggttgtaaaaatgccatgggtggacattgtgcagtggcatggggaagagtgtgcagactcacgagcttggtgggctgggtattttcagcatcactgagctgagttgggctcttaaaatccgatgggcttggctgcaaaaaactgagccatgtcagccctggtcatccctgccccttcatatcctgaggaaaatccgagagtttttacaaatggccatgtattctgagattggaaatggagcctctaccctcttctggagtgatcgatgactgggtgggcagcggatagtggatattgctcctcgtctt

SEQ ID NO: 161266 - DNA, 527 bp, Zea Mays
ctccaacttctcctggaaccaagctagtctggctctcaccacgaggacgtagaggaagatgcatgtacgtcgtgtcgtgcagctatagacgataagtatggctaagtgaccacaaaactctctgagcagcgttactgaccgaagcagcgtaggtggacaacggcgtcaaagactcgtgggatgagagagtcctgaacctctatctccttcacccatcactctgatatgtagacggttgatataataacaagcctaagggggcttagaaacccaccgtgtgtcataaagagaacggacataggttcccagctcgtgaagcacattctgtagtaagtttgggaagtggcccgtctcaaacattgaagtgtagtgctctgcgataggccacatcccaacaaaaccatcctcctggtcaggctcattgttgttgttattgttgttgttgttggcatcatcattgttgttgtcctagttatcctcttcatcatcatcattgcctccatcatcaccagaatcatcaggatcat

SEQ ID NO: 161267 - DNA, 551 bp, Zea Mays
aagcgacagacgatgttctgctagaagaacttttgtgctgtatttgttgtgatcgttgatacagctcttgcttcaatcaacttggtgaaatattctactgcaacaaaagcaaatttgaggttgccttgcgcagtgggcaatggtccgactatgtcaaggccccatcgttgtaatggcatggtgtgggcgatcagctttgtgaactgtgagggggcgctttaggtgagaatttttggcacgcttcgcacgagcagaccactcggtttgtcgcacacaagatggctggccaatagaaaccctggcgcatgaccttagcggcgaggactctgggtcctgagtgtgaaccacatattcctctgtggacttcttggaggagttcaatgccctggggcactgtgatgcacttaagcataggttgatttattccctttttgtatagctacccatccatcactgcaaagtcatggcttcgatgcttcaatctcttggcctcgacctggtcagtggggtgatagtggctttgagggttattggtgcgcgccagtcttcgg

SEQ ID NO: 161268 - DNA, 289 bp, Zea Mays
caattaaatcattctagaatgaatcgaaacacccccttcataatcggaactaaatgactaataaacttaaaagtacggaggatatgtgatgaatgatggcagttagcattttgatacttttaataggagcataaagtgctcgtttttgtatttgcaaaagggatttaaatgaaaataatgaatcgatgcacctcttgtaagttggtacattagcatgatgatctactgcatttattggatgctacggaagtcattgttaacatggactacccggttgtgcgatgttcat

SEQ ID NO: 161269 - DNA, 456 bp, Zea Mays
tcagtttgaggatggtagaccgaactggagttcaacttcgtaccaatgttctcatgaaggctcttccaaaaccttgaggtgaattgggatccacgatcagaaacagtcttcttcagtaccccatgtaaacacacaattcgagccatgtataactctgccaactgagaacctttataagtagtattgactggaatgaagtgagtcactttggtcaacctgtacacgatcacccatatagaatcataacccttcgaggtgcgaggcaacccagtaatgaaatccataccaatttcttcccacttccatttgggtaccttcaacgggtgtagtagtccaactggtctttagtgttcagctatgactctttgacaaacatcacacacaaccacgtgtgcagctacatctcttttcagcccatacctccagtacttcttcttcagatcctgatacatctta

SEQ ID NO: 161270 - DNA, 741 bp, Zea Mays
taccggtcccgcgtagcggcaacgccctgagaccgccgccattatttgacccggggagcttcggttcagcccgccgtgggtgtttcttggctcgctgcgcgggattgacagtcgtcggcgagtgaattcgtcggtggagtcgaagcaccatcgtggccgcgctcgctgccgtggccagggaattcggcaccacgattcatggtattaccactgccctggcactcgttgactcattaggatcgagtagatagcttcgggtttgcttttggggcagcgaaacgtcggtcagtgctcgccggggacgtccgccgtgggagggaaacggcgtcgccgctgcgccctgctctcgggggaagacgggtttattgccgttgatctggccatcgacggcccagattagatcgtgtgggcacccgttcggtggtttggatttggccgtgggttatgagatcgatggtccggattgaagttggtgcgtaccgtcggatggcgatttggtggctaggattagatactggttcataaaaggtcataagtcaatccgatccgtaggactgtaatcggacggccggaaaccctggataccccttcgctggtatcttttgcaaaagagaccctcggtttttataaaaccaacccgcggtccagactggttgttccctgggtctgcggattattaccccgtggcccctgcgcttcccattaattgaggcccagtccagaacataataaaatcaggga

SEQ ID NO: 161271 - DNA, 517 bp, Zea Mays
gccgtggggagagggaaagccaacgagggtagtagaaccactgtaaccatcgctaggaactccaaagcgacgagcgctagtgcgggaacgtgtgtggaggggatgtagccgtggtaaaggtcatcacggggagcagggatgacataaatgaagtttggagtcgtggtcgactgtcgtgactagatccaaagcttctacctctgatacagggtggggatggccattgcagatagcgtggaagtcgatgatgtagagcgaggccacgactgatctttgagagcagcgttggagtgacatagacgaaacgagactagaggagggaagatcgatggcttggggagtggcgtcgtagagcgccaataggggtcgacatctacttcaatttgactcaaatgaggaacattttgatgttgacgatgggtttcgtctgtaaatggatcgaagccatcgtacgtgtaactgtgtaagtgacatcgtggacaaaattactccataaaaatatcaacatatatgaatg

SEQ ID NO: 161272 - DNA, 308 bp, Zea Mays
caatttccttccgtctgcgtagttgagttcccacaagactccagtctcctcagtttcgaagtaggagacggaaattttgctcttttcattattttactctaacgattttgttttggctagaatttgtagttacagaatcacgcagttccggtcggtgtgcaaccagttttattgaattcttggtagttgtcgagaaaactgaaattgctggatccaactcttcaccatgctggtccgacttgtacctttcttggttcatgaacgtatgtttgtcattggatattcaaatgtagacataatttaatcta

SEQ ID NO: 161273 - DNA, 732 bp, Zea Mays
tccactgtggttaggccgggatcctcgtcgccgatgagcttcccctcctgcgcacgaggttcgaccaactccggccatccccgacgacgacctacacaccgatgtgaccgctgtgacctcccctacatcatcgaccatgtaacaccccaggtgttacccaaagccctggccaagggagcacacttgtgtcctactcacactatatgctagaatggaaagtgaaggaactcaaagttttagaggcatggttaagataagcattaatcataacaagaaagaaaccctaaccatgggagtaaaggagaaagagtgggcaattgaccaaaacataaaaagggacctttaccaaagataaagtgtattagtaaatctacaaaatttattaagagaagtattacaaaaaggcccaacaaaaacctcaaaacaattcaccaagtgggggagcacactagagccattcaaaaattctctaagtccccaaaaccacccctagcccaaagatcaaaggtgttcacctttatgctggcgccaaaaccacttggaccaaatagcaaaaagtgaccaaattacccaaggcacatccctgaaaaatttgaattcaaatcgaggtcatttgacatggtttgacatcagttttgtcactggtgacagtgcagacagacaagacttggcgcccacatatcttgtgatctagggcagatcttccattggaacttacacaaactagctagc

SEQ ID NO: 161274 - DNA, 430 bp, Zea Mays
tgatgatgattactatggggaggactacgatggagaggccgatggagaggccgatgatgaggttgttacaacgacacaggcaacgaacttcaggtatttttattttgacgatgagttctattttttgttggattgatattattaccagtgcataatttacaattttgtaggtttcggcggtcccttagagttccaccaacacaacccttggaccaacgtagggtcataaaccctgcagaagagaggagctaggtggaggtggcatggagtggcaaaggtcaccggacaccagttaacacagtgttgggatctatagctcgtttgcactatacaggggtggtacaattcaacgaggcagagataggggcgtatcactgggctcactggggcctcaaaccatatggacccaaccgtactcaccaagacgcat

SEQ ID NO: 161275 - DNA, 458 bp, Zea Mays
ggagctatgacgcgtcactcacggtgtgccctccctatggtgaaccgccttgttccctgctatgcgttgagcaagttgggtgaccatttggggtattgatgccggattgcgtgtctccggtgtgccatcaccgctgctgcacggggcgccgctgccaggcatcgtcgggggtaggaagaactgctctggccgttgatgttgaatgggcggctgggattaggccggggaaagggttcggtcggatctgattgccaccgttgatgtgtggatcgatggttggggattgaattcggcttgattgaatctgggtcgaggatctcgagatcaacggtgctcggtgcatcgcagctcacataaggcaagttatgatctgggccatcggtttgtgatcgtgcggctcaggtttgatcataccccttcgtcgttgacattatacttaagagaccccggaaaacatg

SEQ ID NO: 161276 - DNA, 530 bp, Zea Mays
gggaactgggcgacgaccaccggataaggaccctgtgcgcataggagataaggaggacgagggaacggcggcctgatttttctttcttcagaagcagagcggcggcgggataaggctggagaagatgagctcgagtgctagaagaagcaagcagagaagaagcaagcagggacacgctgcgcaggaaaaatcttatataccaacggtgcggcatacagaggataaaggataagaaagccgtaaatggtggaagctaaagagaggacaagacatcggctaaaaatctggaatttggaagctggtggaagtgacgtgagcaagggaaaatgaaatttccttctcattttctaaaccaatttacacgaataaacacagtttcatgatttaatgtttaaaagatgtagaaactgtttgaaccaagacaagatcgatgataatatttagataatgttcgacttggtgaatattctcagggtcagataactactacccgttatctatattcaaaaacttggatttgagtgagtaac

SEQ ID NO: 161277 - DNA, 783 bp, Zea Mays
ggaggaggtaagtcacgaagaggggagatcttgggggagaagacagaagacacttgacggagtgcaaccgcacatgcctaggtggacttgaagacctggaggctggtgccaaggcttagcataagactccagttccgtagtctttaggaccacccacacataagagacttgggagcccttccttcctctcccgctcgtttgtaacccgcttgtaacccctactacgagcatcgagccatcgaagactggatgtagggacgttctacccgaatcggtataaaccttgcgcccatcgagcacaccgtccatagcctagaacgcgcactatagaaatttacttgtcggagcgaaggttcgaaacactgacggttggtgccaggtaggggccttgcgcgttcttgacgaactctccaggttccggatggtcaacaacgacagtggcatagtttgggtccctagaacaaccatccattttgggagtctcgacttcatcatcaatgactgggggcaatgatcaaggcctcggaagccccaattccctcgacgaacaactcactcgacattgccaaaagcctcggcagccttcgattcggttccccttgaggaggtggcgggcagcgatgcgcactacgagccactttcaccgagatcgtgggaatgctaggccctctccgggattcaatccatgatctactcctatcggggttggaaggtggacttaaccccccatcaagcggggccaaccacaacctagcctaggagtacctcgtggccaattgctgg

SEQ ID NO: 161278 - DNA, 518 bp, Zea Mays
aacaagtgcgcgaaatcgaagtcctctacaaaagactatccgtgcaaaagtcgcctaagggtgcagccggactagcacaacaagtgcgcaaaatcgaaggcacattacatacgtgcaaaagtctacatcgagaaactgtccgcgcaaagatcgactacaggcacagccggaccgacataacaaacgtgctagaccaagtgcgcaacgcccctatgaacataaccagatgcgcgaaggcgtgcaacctcatcataccaactatagttacacacgtacagcgagggcatcacaccttacacgggttcaaccttcggaatgattcccatctccctatagtcaaacaacattatcctcagctcctcaccctcaaaaagactttgcaactctccctctcctacactcgccccaaccggcgaggataacaattcccgcttgccatccctgcccacacgaagccgaccaccatccacttcactcactctacgcttcgccaccgcccttcgccgcctacgcccagc

SEQ ID NO: 161279 - DNA, 900 bp, Zea Mays
ggcaattacatgtccttttatctcatagtttgcttcatgtcattcagcgacaaaaagagcaatgtgctaacatctggttgagcaaagtatgactgagatttctggtcttaaattatttggtaaggtatttttgcttactaattgaatcccaagttgtgaaatcttctatgccaaaaaggctttcatgcattatattatatatcttcgggttacttcgggtaaaaatttatgcatgaggagagagcagagaattaacttatccatgttctgttgtatttcaatttaatttcccagattattcaagcactatagagcttgatatagttgttatggacacttggcaatataaataaatatatgatgccacacaacacaattaaacaaaatataaagtgagaacaaaattgtttacgaaggttgcacataatgtgacttcaggaccttgaacaacccaccacaatccacgcgagtacaagctctagcgtatctggcgtcaacgcgtgtgcggccatcagggctacgacagtatagcaagccttcgtaataagcgcaacaggcacaattatggcttggtaattggggtacacgataaatccacgcaacgtgcgcaacaggcgcaattgtgctcgcgtcagacagacagtgcctacagggcatgcaaaaaatacacgactcagcgatggcggtctgactcaacgggagcgatccaattaatggagagcgcgacatagcaatcacatgacgcagccaagttcgaacggcacaaatattgcgtcatgttgccagggcgcagtcaatattcagctaatgccataactcatccgattatcaacgcagcctcatcggcgtgtctgagtacccattatataatttaatcgctcggcgtgaatcagaaactca

SEQ ID NO: 161280 - DNA, 776 bp, Zea Mays
attagagccaattttgagtattcataattaatatgtttccctgctcagactgtagaagaattattggtttcaaattaaatcaaatcaagcacggtcttaatgtatcgaccctgatgtcgttcgatttgatccatcgacatctcatctaaaccttatctcatgtactatcgaatgacttcgtagtgatccgattcaattgtaccccggtcagaccctagttttggatttaatattttgtgtcttattttgttgaaggaaatgggagaaaagaaattttgttcacatagttatttccaccgccctctctcttccttatcttctccatgtttcttgagtattccaccgccacctgatatgttccttgcgtcaaacaccagccaacctctctaccctcaccgtcgctctcaggccagaggccaatgcccctctcctcctcacggcgcccttctcaagcatcagcagtgggctcgccgtcgtttccccccaaccctggcgtgcatcaccatccctcatcctcatctcttcctctgctccttcgttcctcactagctcggccagggagctcccttcctctcgcgcccatcttctccctgcccagacgcactcgccctggactccatgtgtctccccagcttcatcttcctcagctcgcccaggccatggacatcagtgagctcaccctaggtcccacctgcattgaccctactcctctccatccatggctacgctcggcatccacatcaagccttgccctgggatcgtcttccaacgtcccc

SEQ ID NO: 161281 - DNA, 600 bp, Zea Mays
taccgtctgaactaacagtcgacaacggcaaacagtttgacagccaagacttcaaggacttttgcttctccatcggcaccaagctcgccttcgcctcagtctatcacccgcagtccaacggagttgtggaacgcgccaatggaaaaatcttcacagctgtcaaaaagatgctcctcgacgaaaaaagggcaagtgggccgatttgttacccgaggcggtctgggcactaaacacgacttagtgcagggcgaccgggttcactcctttccgccttctatacggatcggaggccatgaccccacaagaaataaaacatgggtccccgcgaacagttccttcagcagtccccgacatggacgagcccacttcaaaggatctcatcgatggggaccgagtcttcgccctgcaagctctaaataaataccaagcccagacaaaagcatggcgcgaccatgcagtcatcccaagggaattcagcgaaggggacctcgtactcgtccggacagcccggacagagtccagaggcaagctagagcccaggtgggagggccccttcatagtcaagacgaaagcttcccccagcgcctacaggctcacaac

SEQ ID NO: 161282 - DNA, 445 bp, Zea Mays
ggacaaggaatgatgttgaaatagatgatgctgcacaggttgggtgtaagaggaagttgaagtataaagtatgggaggattttgttagagttactgtatctggtaaatggaaagctaagtgcaattggtgtagcaaactattgacagctgaaggtaaaagtggtaccagccatttacaaagccacataaatacatgtgagtcacgacaagctagaaaaggcctaaaacaatcctccttgaaattttcacaaaatccagatggcagggtttgtttagagaagtatgtatttgatcaagatgttgctaggaaagaacttgcattaatgatatgtgtgcatgagtacccgctgtctatggttgaccatgtaggctttagaaagttttgtgcttccctacaaccgttgtttaaattagtgtcaagaaataccattagaaaggatattct

SEQ ID NO: 161283 - DNA, 526 bp, Zea Mays
gttatgacggggtatggcccgcgccatacctcagccgacccaagagaatagaaaaacaaaaattctctagactttcatttgtgccccgcgtatgcctcatcgctgagcaccacgcttcaccgctaggcgcttgccctgcctccacccgctcgggccgctccacacagccacgcccatgcctgcctccgcacgcacgcacaggcacatcggggcccatctcaagagctcttcccatccacatgcacatggggcacggtggcaacatgcccagtgggctatggcagcagaccaagagtgtgcaatgtggctcgtccacaaacttgacgaggagaaaatgctactgtatttttgcttgtcctctgccataccttactttttattcgtgctccgccactaaattaaacaattgtgcatgcagatgtacaaccaaacaacgcgagattagaggaaatttgatttgttgattttttttatgagaatgtttatgaaaatgattgttttttttatttgtaaggctgtatgcaag

SEQ ID NO: 161284 - DNA, 465 bp, Zea Mays
gccaacggtatgagtacaaccaagaatggagtcacgtccaagcttacacgcgataaagaagaggatatagccaagggtgaggtaagtaaaacatcactctcaaattgagataggagattggagattttagataacatacataatgtaatcaccattgtatggtcgagggatgggaaaggtaaaggtgataacaaacagaagtaggcaaaggatggagttaaaaactcgcaagcgacaaagaagatgatacgtccaagagaaaaataggtaaaacatacaactctcagattgagatggaaatgacgggattttaaagggccaaaataagataaacatcaaagtaagatatagaggtgataagggcaaaggtgataatgatgaaaagcataatccatggacagagttaaggcaagactcacaaagtgatgaagtggagaaaacaatcaaggaaaagataagtgagat

SEQ ID NO: 161285 - DNA, 527 bp, Zea Mays
caggctggggatcagatcgctagcgtagcagcttcaccgccgacgaccgatctccgccgcgattcgtgccgccgccgtttcaatttgtgctcggggtaagtggataacacccggagtacgtcgccagggataaactacagccagtaaacaactccggccgccgtaccaagttcaccgcggcggaatccgataagtatgtcgatggccgccgtcttatggccttgcgccgcatgtctaagcctcgccaccgcatcgccgtgacacactttagctccccgttgatcgccagagtgaatgccacggcaggggacactaattcacgtgcgccagtgctcttctccacctctaaccatcgcgtgtcaccgctcaaattcccggccaccgccctcccatagtataaattgaccacgcccacgagctccgtgaggttgttaagcatccaaccaccaagaattaacctcgctcgttcactagagtgtgcgaattttgaactttccccaaatcctcgcaagaacactttaagagag

SEQ ID NO: 161286 - DNA, 799 bp, Zea Mays
ataatgtgctgcactgctaggttaggaactataagaaatgccttacctcgtgtcagattggtaagtcttgttaggctgtgttatgtgtttctcttgtcttgctatataggtggtattgtgattgttaaaccctttttgcaaaaaaaattgttgcttgttctgttcataaaaagaacccccccccaaacaaccttgagtttagcaagtgaaacctcttaaaaaaatttcattcttgttttggtgttttctaacccttgtgtgttttacccttgaatttacacctgcacagcttgtagaaccccatagcttgaccgctagaccaacccaagtctccttgtgcacttgttgtgtcaaaaaaattattgttggtgcctagttgcgcaaaccctatcaaggccatgtttctttccataaatccttgcccctaaaaattcatagcattcctgttgatcatccagctgatcttgttgcctacctctcctttcgcatggatccagtgatctttttttccttgtgaatcatgttttggctttatcatccgaatatctagatcccttaatgattctgccccgttatctggttatctgctataacccgttctcaagtatcggatgttaatcttgactaaatctctcaattctgatccttctcatacccccatctccgaggatcatgacgcttgttttatcaacttatctctaaacggcatatccatgtggattaattgatgttgctgttatctttggatctctcatgtctctaaaagcttatcaatctcgatctcatggttggttcctcc

SEQ ID NO: 161287 - DNA, 403 bp, Zea Mays
aatctgtactacttcttaagtacattgtgtaggcgtgcacagcacccatgttctgcctcccgtcctcatcccgtcatcacagccgcgtccctttccacaaaatcaggctgcagcatcgtccccacctgcttctgcattcccctgctgcctcctgccttccataatatccatgcggcgccttctatggagagagcgtcaaatccgacgccaccatctgcgctgatccaaatccgcccttccgtcttcggtgccgagaggaaaatggacaacaatcccatccttcggcggccctgcgtcagccaggtagccatggccgcggagagctgccacccgcgtggtctctcgtgttagcgcggtcctgcatcccagccgaccctgcccgccacagtgaagctcccggtcc

SEQ ID NO: 161288 - DNA, 455 bp, Zea Mays
gctgcacggaagaggcatatttcattttattttcttcgagattaaaacggatcgactttggacatgggtaggaaattaatttctcgtccctcagtgagatatacttattagatcacagtgtttagatcaaagtgaagacatactacttactacggttaaaaaaagactagctatttatagtttggttttagtgtttgattattaagataactatttggactaacggtgatttttgttgtacttttatgtagtgtaataaggtgctaagtagatttggacttaagcaaaataatgatatggattatcaaacatcttgggggtcctttttaaccgaaggtcctcaaaatataatctcatcaattattggtagattgtttcaggattaacaagtcagattgttttaggattaataagtcagaacgctgaagggcaccttctgatgaaaagagcgtgta

SEQ ID NO: 161289 - DNA, 552 bp, Zea Mays
gtgagcgccggctaaacatcgagggtcacaacctcgatgaagactttgctgcggtagcaccgcaaaccccaataggcaccaggtactaggcgggtgtccctttggctggcgtgggctgcgccgcactcgcggatcatctccgcgcggcgacctggccatccatgttccgaccgcacctgccagaaaagtacgatggaatgtccaacccgtcggaattcttgcaggtgtacgtcaccgccattacgacagtaggtggagacaccgccgtaatggcaacatattttcatgtttccttgtctgggcctgcccggacttggctcatgaaccttaccccaggatcaatctacttctgggaagagctctatgcgtggttcgtagcaaacttcgccagtgcttatcagcggcatggcatggaggatcacctccatgcagtgaggcaggaacccggggaaactgtctggaccttcatctcccgcttcaccagggtacgaggaactataccccatatctccgacgcttccatcatcaccgctttccgccagggggtgtgtg

SEQ ID NO: 161290 - DNA, 705 bp, Zea Mays
ccggggaacaatatttggtaatctcttctgtattaaaaataataacatcccccccacaaacaatgttttagttctcttatcctaaccgtggactcattgttcaggtggactaacaaagaatgaactaaaacaagccatggatccacgatattggaacacatacacagcatgtatgatgacaaataagtcaaccacaaattgatttgcacggtacctttgcttgactggaggttgcaaccgaagtcctcgaatcccagatgatcttggaaccgaacaccttcaactcgaagtgatacgaaaatctgtaggcggcaatgaagaaaaatgttctgttagtacgtggttgatgacagtggacctactggacatgaggggaggggtatcgcaggatcgaggatgaaccctagcaacacgagatgacgcaacggggtgaggatggatgcgaggtgcaccgtaccttacgaagatgcagacgcgatggttgggacgacgcggaaccttgacgacggagcaagggcggcggcgtcactgcggcaaccatacggacagaggaaaagggtgaaggaaacgcggcaatgcgaggagaagacggtggggacggcaatgggaggagggatccgtacctgcgtacaccggcggcgatgcgtgtggtgcggaccgacggcgctccgttcggttcgcggcggcggcggaggagcgttcgag

SEQ ID NO: 161291 - DNA, 658 bp, Zea Mays
aaacaatgaacagagagaatggcagacattggcagggagtattttgcttgtcagggataatgatgcctgctctcaccatacacctaatctctggtagccgtgacacgttcggatgaaacatactcgacactattactgatatttcaactaatttcttcaatatctatagctgtttgtgaaatttcttctgtgctgtaaaaatatacaattagagaactgtgtatccaatggaaagaagtgtcatgttatatcagtcttaatttgatcagataccccaagaaatatacattttttgtcaagtatgtggtagatatattccttttttcagtcttgattccttcgcttgtgtgacgagatggctcagattcacaaagaatctatggtatgccatcacttcacacaactgatatttgtgaactacttacattgatgcaattgttattatacgaacctcacagatacacaggatattaaataatgataaacaagaagaattaattgaactcaccacaaaaattacaaatagaataattatatgtctataactaataactgtatctaggttctgtacatacctaaaatcaattgaatatggtttgtgtttgtcagatgcacactctcgtacctctattttgacaacagttagctccatcagtgc

SEQ ID NO: 161292 - DNA, 531 bp, Zea Mays
tcagtagatatgtttggattctagaacaatgttgttgactattcgagcttcgaactcttctcttgcatcacgctgctgctggtcttgatattgcccctgaggctgctgattgtaagatgaagttggaactggtgcaggtggttgaggtaaggcccacctagctggagagtgatttgctgaagcaaccggagctgtagactgtggaagtggttgttggttacgcacgtactctgggatgtatggagagtaatacgaagcagtgtgaagaacttgtttcggctgattctatcatgcttcggcatcagctatttccttctacttttgtattgtgacttggcaagtccttgctgtgtgtcctttatcctctccacggaataggcagaatagtcttcttgtgtaacaccccattgctcccatataaggagtgttaccaaaaacccttcccatgaacttagacaaacataagtaaagaaatggagatagaaaacaaagaaaaatccggcaacacctcccttgaaagtagcataacga

SEQ ID NO: 161293 - DNA, 276 bp, Zea Mays
attctccaaagagcgagataaacgaaggtgcgctagtcatggtttcaccacagtcggccgaaagtgtgatggttgtatcgttacctaggctagctgaaaccttcaacattaccctcgaaagtgagaatgtccccgaaaatgttgaaggggataaacatgagaaagctatagagccagcagagaaaaaggaatactttgaaaagtaaacacaaatcactacaacacgtacagtttataatgccagaagacaagcaagtgaccaggctgctcgaatat

SEQ ID NO: 161294 - DNA, 410 bp, Zea Mays
atactcaagcacaggaaagatgaagtaaaacgaagagcaccctcaccggatcgacagtgccaccagatgtcgggacacaaccttcgcgcagtggaactccagacctgcctgcttcaccacaggttgctgtcgccggacaacgaaaatggatcccgtcgggacaccctcgccctccgtcgtagataccgtcgcagccagctccaccacccccggccatggatcccgtcggaccttcccctcctccaccatggatcctgcaacagccaactcgccccccgccatagatccagttggggcctccttgccctccgacgtggacctcgtcggaatcgcagctgcctcgacccgcgccatgtacctcatcggagctacctcgccccccgccatagatccagtcggggcctcctcgc

SEQ ID NO: 161295 - DNA, 725 bp, Zea Mays
ctggcataaatgtttactagaaggacaaagatttgtttagtgagagagaaggttagtatttttgcactgctctgcctattaccctcccctgacacccgagctcttagttgaggttgggggcaggtaggtttggggaacatcagagccttgctatgggtagaaccatcgtagttaatcgatgttccatgcgttggcaagcgtcctccccttctcgtccttcaacttgaaggtgcccagtggaagtacctccccgatcatgaatggtccctctcatggtggggatagtttgtgccaatctttgttggtgtggacccgtcataagaccaagtctcctatttgcagggttctttggacgtagtggtcgtgacaccttcgtagtgtctgctggtacttcgccgatcccaaaagtgccatatcacatgcttcgtcgagttggtccagcgcgtcctctaggtttgactcgttttgtttggttgcatactattttacccttggggcaccatagtcgaggtcggtagggagcaccgcttcagctccgtaaaccataaagtagggcatatacccagtcgagcgattcggggttgttctcaagcaccagaggactgttgtaaccacctcctgtcattgttggccgatctgcttgagtcgcgtgaagatctgagatttgaggccttgcatgatcattctgttggctcgttcgacctgcccattcgtgcgagggtgag

SEQ ID NO: 161296 - DNA, 920 bp, Zea Mays
tgaaggtgttcccggtgatctaaggctactcagtgcaaattggtggttcggcaagcatcacagagttatgagaaggctcaaacgagggagagaggaggatgaactgaccagaatggggctggccgtggtgaggttggtttcgcggtggcggaaaccctaattgggggaaaaccgaaattcaagctcactgatgcacgattgctagcgattctcggtggtggggtgggtgatgaccttgcggggctggcgggggcttcaatttatagggctcaacggtgatggccgggaatttcaacggggatgcgcggcggtcggaagggcagggagttactggtgcgcatgaactcatgtctatcgtcgtggcggcctcaccagcgacgattggacggccatagagagtcacggcgacgcggtggaaaggtagagccacgcggcacaagaccgagaggcggcggttcaccggcgagccaatctgctccagcagcaaagcagaagggtgcggcgatgagtcaccggagtgacctccagctcaccgatggtgaggaccctttacctcgcgacgttatccatccaccacggtgtgaatcctggcgccggtgacacgtatcacggcgaggcacataggcggtgagatcttttgggtgctgacggtcggaacccagccaagtactgtaccatggcgatagccattcagtcaacctgacagagcatcttggagctccattttctcccagattcatatggcaacttgatcaacactctgtagcaaaattgtagagcaatatactatctacaacattgctatatggtgttgccacaaaaagccaatggatcatgcttgaaattgggcttgaagttcatgtcagtccactgttagtctgatttcagactttaagtagtctgacagcccaactttgggc

SEQ ID NO: 161297 - DNA, 497 bp, Zea Mays
ctctttgaattgtttctcaaacttgaagcgatagggcaatcgaacaagttcattctttttctttgttcccttcagcttcggcatactctattcactcaacgttggaaataccctgttggctaggtattcttgcactagatctccagtgctgatctattcagccaccaccctgaattctgctacagcttgttggcatggtgacctcgacgtcatgcggcacaggggcctagttagtccgaagcttaaacttagtgggctcatgaccatcgtcttcaacttctccctcttcttctcatcggccttgatgtagaaccactcacttttccagccggttggccacttggtgcgatagctgagcaccggagccttcgtatccttgcgatacgcgaagttataacagccaaaattctcatgtagcccgtcttctctggccttcgtttggtaatgtagctcatgcactcggcagaaagcttcagcattcgggtccattccttggc

SEQ ID NO: 161298 - DNA, 430 bp, Zea Mays
atacagtatctcacagctgttcgcagtctcgagaggcaattcaagggcttcaccttacaacatgtggaccgcgccaggaacgaggaggtcgacgtgttggctaaggcagcgggcagaggcgagaccttgccctccgacgtgttctaccacgtcattggcacactagccgcccgcaacctagagggattacaagtaaccaatgacgccgaaggccatcgcattgtcaacctcatcatgaatgaagattggcggccccaataacactttttctgcaaggatactaccacccgagtgacatcaatgaggccaagcgcctcaagcaccaaagccgggacttcgtactagtcggtggctagctatacaagaaggggatcagtcaacccatgctaaaatgcgtcaccaaaaccgaaggcatccagatcctgcgcga

SEQ ID NO: 161299 - DNA, 448 bp, Zea Mays
ctccagcccagcatcaggcacatcagtgcaaacatccatcatgccaccgtctgctggctctgacaacagatcttctgggaccatgtcttcaagagtctgatcaaaattcaccagagataattcttgcagaccaatgagggcaaataaagctagagaaggaacaccactgctttccccgctggctaggtaacgccggctgttcttccgaattagagggatttcatcctcttcttcctcatcttcatcaacaacgcgaacagtacacccattggggtcagctttggccagatcacacccattgggatcaatgtcatctaggtcacacccattgggatccgcagcagtcgggtcacacccattggggtcagtttcagcaaatgcaggcactggcacttcctcagcagcaggaacagaaggaccggcatcctgatccaagctagacactcga

SEQ ID NO: 161300 - DNA, 676 bp, Zea Mays
taagaacaatgatcacttcagcctcacaacagtcgtttgcatctagagatcagtatgtctctcctcctcagggagattctcgtatgcagcaatgaaggcctcaatatcttccaaagagggtcgtactctatggtctagactgccgtcttgaataggcgagttggatatgaactttgaaaagggcctctgagggggcagattctaggcagaatatgaaaggggagcaccagcatttgaaaccttgcctctcaccatcaaatcaactccacacgtcctcctcagatattctcttattggtaattcgagtggggtcattaacaccagtgtacgggtaagcagggtagactctatctttcaaaggctgaatattcttgaaaacaaagtcgacaacaacagcttcagcagtcaagcctctgtccttcaatacacatatctctacaagtagcaccaccctggactcagcaagccctaaatatgtggggatttctgtccagctaggcgttcggacgtcgggctatctccctgatcgagcaggaagtgacttgttctgattttccatagtaaaccactcgaagcgccatcccttaatgttgtctttcaaaggaatgtcgagatactcagctttcctacctcggcgaagttccaagctagcacctccaacaagctgatgctgccc

SEQ ID NO: 161301 - DNA, 751 bp, Zea Mays
gtcaagggtgaccggcctaagcagagagatggtaggaccaaaagagtggaactggggtcttgactaaatggctagcacaactgcagcctaaagagcagaattggagcagaccacattgaagggataagaataccagtatgctaaaggatatgagtcatgaatgcccggtgctctgccttgtctgctaaaagttgctgctgaagagtgtcatggcggtcctgaatggtctgtaacatggacaacattcgctcggacatctactgctggatggctgcctgttgggcctgctcggttgctaggtgagcctgctgctgagtgagagactgtagaattgtggccaatgcagggtcaatcgcaggaggaggagcactggagccaccagccttgtggtcgtgggaacgaggtggcacgagaggtggtggcagaatccccagatactcatcatctgaagaagtgtcagcagcggcaccctgatcctcaaactatcaaatagcctcgtcctcatccctaaggcccgacaccagtggatctactgaagctagagcggtgtcctcagaagctgggcggtaaaatccaaactgaagtatggaggcatcaagggtagcctggaactgaggaggatggatcagctatgcgaagacatgacaaaggtagtgagcatatggctgtagacgtcgagcccgaagaccatccaacactgtgtcctttatctcacatattaggaaatcgaccacatcgaacacaaagtgag

SEQ ID NO: 161302 - DNA, 384 bp, Zea Mays
ccgatcgggacatgggagagaggtggggtcgttggatccctgatcgagggtgtgggctatagcacatgtaccagttcgactgggatcgcgtcagttgtagatctcccatcgtgtggttgcgattagattggggatagtgtttcaaaggatgtgatcgagacagttgggtggcaatcggagggttcgggttggatcacaacgtggatgtattgtgggtcgtgtgatttagatccaagggctaaggatgtgtaccggttcacttaaaactcgatctaatctggaccgctcagatcagatcatgcggccgagacttcaagataccccttcggccgagaagattgcataacagaccctaggtttttgtaaaacaaaccagcggtccac

SEQ ID NO: 161303 - DNA, 305 bp, Zea Mays
gtgcttctagtttttctgcttgagaaagtctcttccccgaagcatggcgaatgatgtaatcagtgctttcttttgaagcttcggaggcaggagcttcagccctttcaggcgcaacttgttctctcgccttttcttcaatcacgataggctctgtctcagaagactctaaaggcccagcttcggtatcagcttgaattactgcagcttcaattttgaccgactttgtttcagcttcggtttgcgctttcgaagcttcggcaattttccttgaaggagtagagttcaaagtctttactgtttctaac

SEQ ID NO: 161304 - DNA, 488 bp, Zea Mays
cggaccgaccaacatggggaggaggcaccgacgaggaaccagaggctgaaaccctatcgccaagccaagacttagctaggaatccactctgtaacccttagcaccacctccaccacaataagagacttgggagcctctcttccctctcgcccacttgtaacctctactacgagctttgatcatcaatggtattggttgcgcaaaccatcgatgactggaagtagggacgttctgcctgaaccggtataaaatttgtgcccaccacacacaccgttcggagcccagaatgcacacaataaatttatttgtcgaagcgaggtttgaaacaccgacacatctccacccagacctaggttttcttaagcccacatcaaatacaactcaaagtagagtagggtattacgctactgcggcccaaagcactctaagtccttgtgtgttcttgtgttcatccatctcatcaggcaaaccctaggcagccctctgtt

SEQ ID NO: 161305 - DNA, 642 bp, Zea Mays
ccggatcccgcaagaacttcctcaacatagagacatgaaaaaccgggtgtacccctaccatggaatccgacagtagcaagcgataagctaggctgcccactcgggccaagatagtgaacggtccaatgtatctcgggctgagctttctagagacaccgaaccgaacaactcctttagtaggtgataccctgagaaggacttggtcacccactgcaaattccagatcccgcctcctcacatcagcataactcttctgacggctgtaagctgccaaaatattctgacgaatttcccgaaccttttcagaagtctgatgaacccaatcaggaccaaccagggatctctatcccaaagtctcctagcatagaggggagatacactgcctgccatacaaagcctcaaatggtgtcatcttgatgctagcctggtatttgttgttataagcaaactcttccaaagcaagatgatcctcctagctacccttccatgacaaaacacaagcacgcaacatatcttccaagtttggatcgtttgctctgactgaccatcagtctgagggtgaaaagcgacactaagtgaaagcttggtgcccaatgcactgtgaagaccctcctagaatttagatacaaatttggagtctcg

SEQ ID NO: 161306 - DNA, 389 bp, Zea Mays
aaagaccaggggctaattcgtatatttctctaagactcacatccaccctgcggggatggcgggttgattgcatggaaatgtaagggttcttttgcaaaacgcgttggctgaaggggtatcttcgtctgtgggccgttggattacgatcgagcgggttagattagattcaaaccccactgaaccggtatgcagtcctagccaaccgattttgatcaaacggccaggaatccatcacgaaagaggtacgcgatcatcaatctaagtcgtacgcatatgatccgacggtccatccttaaagcgtgaaggcaatggagtgatttaatcgggtccgcccattgagcatccaacggccgaggtcgaaccaacctcccaccgacctgagtccggtg

SEQ ID NO: 161307 - DNA, 728 bp, Zea Mays
gcatgtttgaatgaaaatttgaatttggagatttataaatttaaaatttaaaacagaaaacaaaataggggattagaaagtgaaaaaaatataaaaagagaaaacacttccctcggccggatgggccaaatccacccggcccaagaacacacctgcctttcgccccgcacatccctacccgcgtcctccgctcatggccactgcctggcgggtcccacagtgtcagcctccctgctcgcgcgcgtgtcttctgttcctgacaagccggccacaccgcgcgtatcgcgcctcactctgtcgccgccatggctctatgactgatggggccacctcgacagctcagtcgtcctcctcaacagaccgcgatttctactccgtgctgcggactcgatgcaaacagaagcgcgtggagatcgcgcgggccagtcgtcggttccgcaacctgatcttcaccactctcccccgtccgtgatcttcgtggggcggcctataagaccatgccagcgcctctcgtccagggaagcaagcaaaagcgcggggggaacatggagggcagtgaggtccgccgtgggggcatatctaccaaagccctgatggcatgcgattgtgattcggtctggggactgagccgcatccctaggaagaagtatatgtccacaccgagcacgataggttagtatctacgcaggaattgttcgtcggagcactccttcgccatggatccgcaa

SEQ ID NO: 161308 - DNA, 537 bp, Zea Mays
ttccgcttcagatatggacagtctttaatgaagtgtctagacttcccacaattgaagcatccagtagatgaactcaggagtgcagggaaacgagtaccaggggcactcggctgatttgttgaggtgggggcagtggcagggcggataaagataggttgtttaaaggggtaggagggtggatgtggtgaagaacagttttggttaaaaggtcgaatcaccatcctttatcgcttctcaggcccctgattgggcctgtcacctcccaagccctttgacttccctgggcctgcatatttggctttaactgccagcgtcgtgctgacagccctgctgtaggagaggtcgaggcaggtggccattttccgttgtagtcggtcattaaggcccctcataaaacaatttctcttcttctgatcagtgttgacctgatcaatggcatactggaacaaatggttgaacttgttgagatactccaccttgtttaagcttcatgaattcttcttgtttcatatggagcaccccttctggaatgtagtg

SEQ ID NO: 161309 - DNA, 1047 bp, Zea Mays
caggtagttgttcggcccatttacccttcttatcatcgagaagtcgtttcttgatagcggtgaaaatccaccgttggcgcgctcgacgacgccgttggattgcgggtgatacaccgaggcgaaggcaagcttggtgccgatggagaggcagaagtctctgaagtcctggctgtcaaactgtttgccgttgtcgactgtgagttcggacgagactccgaatcggcaaacaatgttttgccagaagaacttctgggcagtcttcgacgttattgtggatactgccctggcctcgatccacttggtaaagtattcaacggcgacgaaggtgaacttgaggttcccctgagccgtaggtagtggcccgataatatccagcccccagcgttgaagtggccatgtgtgggcaatcagcttggtgaattgcgaagggttgcccaagcggtgacaaaacttctagcaagcttcgcacgacctcgtgactcgattcgtggcgcagattatagtgggccagtaaaatccttgacggatcaccttggcagcgagggccctgggccctgagtgggagccgtaagctctgctgtggacttcgcgcaggatctgaatgccttcggtttcgatgacacattttagcatgggttgactgatccccttcttgtatagctggtccccgagtagtacgaagtccctgctttgttgcttgaggcgcttagcctcattgacgtcactcgggtggtagtatccttgcagaaacagtgttattggggcctaccaatcttcagtcataatgaggttgacgatgtgatggccttcgacgtcgttggttacttgcaatccctctgggttgcagacggctggtgtgccaatgatgtggtaaaacacgtcggagggcagggtctcgcctctagctgctgccttagccaaagcgtcagcctcttcgttcttggcgcggtccacatgctataaggtgaagcccttgaattgtctttcaagactgcgaacagccgtgagatactgcatgagtgcggggtctttcgctgaatattcttt

SEQ ID NO: 161310 - DNA, 502 bp, Zea Mays
tattggacggttggcatttgtttggatccaaacgctagagccaggagcaaaactttgcgtccgaggtgtccacgccttcctcattcttctcagccgttcaatttcgttcctacagttaccaacgcgcacagtgattcctttggataaggccccgcaccatcctcgcgcgacgggattcttccagatggaaacaaataccacatgacggggaagggaaaaggggagcaggcaccgtcgtctctgctcagccgcgacatcgttgacgtcagctacaacgaccatggtggcagccattcctctgtgtccactcctccccgttcgctttgtcgttgtctctccgattgccataagtatgaacattccttttcaccataacttcacagatctacgtccccttagtgttagggttgtcttccagcctcccgcaatgtgcgctcccatgccattactacacatcgagtagcaatcgccttcctcgtgtttttccatcgctcgctccccc

SEQ ID NO: 161311 - DNA, 450 bp, Zea Mays
tagaggtgcccttaccagcaatcgcgtagccgaagccctgctctattttctctcttcttgcatctctctcctccacggcggcttgttcgcccacacggttccggcgaccgagcacccaaggtggcggcgcgaaagaatgcagggcagtcgcagcgtcgagccggaacaggggttctccagctctcggttcgtggtgaagtatctcgcttgcttccatggactcaacgaaggatacgacacgaccctggcaggtttatatatcctggaggcgaactggcaaagcatgaaccagggaatcagcggggaagtttgttacggaggtagttatggttcgcgtttgttgcagtagcggattacggcgagctctatccaatctcgggtagaaggacctggcaactcggtctatcctatccacgcgaatcgtaaccacccccagctggcatgggcctg

SEQ ID NO: 161312 - DNA, 1027 bp, Zea Mays
cccagacattgaaatcccaatgggtgtcgtgctgcaaattggtcctttgatttcttctgctatcgttcatgtcaaccctataatccctttctgtgccgctgctcgaaaagaagtccagcttgtgccagcttcatatgagtcagatttccttgttgatctctcggtaatgacctttgttgcttgttatcctgtctttttgccgactggcgtctgatttattgttttctcctatatgatactttgagtcaggtcgccatatctttgcttcaggctgagggtcaactaaaaagatgctcagactgattccgtgagaagcactcctcttagctatagtctaaagttgtgatgctcaagaagaaactggtagacctgtaggtccctcatgcgacgtagaatcatggcaatgttgctatctccttgcattcagtcttgttgtatgcttcccatcattgacttatgtggaatcctacagttgcttcaaagaaacactttgatcttgaagataagttggcatgctcccaggcggagttccgtcaagtgtttgtatttctcgatggtgcccatgaagcaaacaggtcattgcaatggaaattcaacatggaggaaaagaatcatgagatatttggagcacttcaactttcttactccttgttgttagtccgctatttggagcgctttgatacgcgggatgaagtgtgaaggctagaggtggaggttggtcggcagaaggaagaatatcgaaatcttatccacttatcgagacaacttggaagaattgtataaagatgttgttgttgatcaaactgccatatgaaatagccacaacctaactatgacagagcttgagaagagaaaaggcaaattggctctcttacaagagttggtcaacgggatccatgagtcactgtccttcaaggattctacgcttaaggacctatgtgatttgtcgagatctcaagcaagaaaactagaggttttggagcacaacgtcaaggtcttagagaacatctgcaagttattgaaagcc

SEQ ID NO: 161313 - DNA, 541 bp, Zea Mays
gcccaagacctcctgtagtcacgactcgcccgagaccaacctcaggcgggagacgtagtcacggctcacccaagacctcccacagtcacgactcgcccgagaccaacctcgggcaggagacgcaatcacggctcgcctgagacctcccacagtcatgacatggtcgagaccaacctcgggtgggagacacagttttgactcgcccgagaccaacctcaaacggtatacgtagttctgactcgcctgagacgaacctcggacgggagacacagttctgactcgcctgagactaacctcgggcggaagatgctgttccgactcgtgcgagcgcagtcacgactcacccaaggccaaccacccgatgtagtcacgattcactcgagcgcagtcatgactcacctaagcgcagtcatgattcgcactagtgcaatcacaactcgcccaagggcatttcgggcgactgtccggtgaggcctagactgacctaagtttggccaaacttagccaaacttatttacttggtttcaactcttgggaggat

SEQ ID NO: 161314 - DNA, 1236 bp, Zea Mays
aaaaaacatgaaaacgatgaattttagtaggtaccttgggagcagctatgtcgtgtccactacccaatgctagcgctacagcagaaatattgcgaagacgccctagtgtggaggatgaggaacttgctaactgtcgatggtgtagtttgatgcaaatctgcagggagcttctgatgtcacttcttactttgcctttaaattctgctctcgctgctttcacagtttcactacagtgtgaaggcacgtaggttctttgctttgcttggtgtgggagccaaaggataaagctggaattgtgccttgctctttaaacaaatgcaccacacgcaccgacgcactgtcccttacaacagccatgccatggcccagccctggacattatagcgcttctctcgatgccgttgaatttttttgaatttctctttggtgccatcaaatgaaataacagattccctcagcaccatttccgtccatgtgctgttagtggggtgttattttggcaggaaattgaccattttgctccttccaagcaaaccaagtgaattctgccccttttacttcaatgccattgtaggtgaacaggaagcatgagtttatttgtgcatcgcatctctaaactcatcgacagcttctctgccacacatagagcacctcaagtacagtacgaattcaacagtgcattttcacctgttgagaaggaacccgttccaattttctcatgaacttgctttgccaagcccaaatgcaggcaacacggcaacaagcgagccatctgatctgacaatgcatcgccgcttctcgggagctccctggaccaggacacagcatcgtggccgcgaccaaaccgcaagaacgaagagatgacacttacttccagccttccaggtgatgacgctccttaccgtcatttgaccgaacaccttcagcgcttcgtcgaccagaataaccccactagcgatcccccgtgacccgtgtcttgaggatattcaggtacagctgcgcggtgcagaaggcggtggtggaaggcgatgagaggagcgaagggaacgtggtggcctggtgggggcgacacccccccgatcgccagcatgctcgccttccacgctcctctgctccacgtcgacggcactcgtcgtcactcgtggtgactagtgacttggtgagcccagagtgtcattggacgagaggtagtgagtcccgctcgtcagcgaaaggtgaatgaaaacactattcttg

SEQ ID NO: 161315 - DNA, 455 bp, Zea Mays
gaaactttcaccaagtttggaattattcgatctctagaacaaccaaatttggagcctgttaaaacttttatttctcggagcaaatgcaaattcgaaagtcaatctcatctcgcaactcttgtccagactcatttattaggactctcgatagttgttatgttatccaatcggtgtctgaatccgccttctcgacagtcggtctatgtccaaatatgtagtccgaatccgcattctctagcagaatctcagtagtgtcaacctctaattatttcttatgcaattcagcttgttatctttatgtcatcattcatctctatctatcaagtgtattctcaagatttcttaaagtttgaaccaatattcgtgtgaagttataaatcctacgcttgcctgagactgctcgattaagtaaaagaaaatttataaattcaaccaagtcatgccaactttcccaa

SEQ ID NO: 161316 - DNA, 947 bp, Zea Mays
acccactgcaaattccaaatcccgcctcctcacatcagcataactcttctgacggctctgagctgccaaaatattctgacgaatttcccgaaccttttcagaagtctgctgaacccaattaggaccaaccagggatctctctcccaaagtctcccagcacagaggggagatacaccgcctaccttacaaagcctcaaatggtgccatcttgatgctagcctggtagctgttgttataagcaaactctgccaatgcaagatgatcctcccagctacccttccatgacagaacacaagcacacaacatatctttcaaggttttgatcgttcgctctgactgaccatcagtctgagggtgaaaagcgacactaagtgaaagcttggtgcccaatgcactgtgaagactctcaaagaatttggatacaaatttggagtctcgatcagaaacaatggacttaggtaccccgtgaagcctgactacttccttcatatacaagggaaccaaatctgaagctgaatttgtggtcttcatgggaataaaatgtgcagacttagtcaagcgatccactaccacccatatagcatccctgccccgaggggaacgaggtagacccaccacaaaatccatggtgatatgctcccatttccactctggaatttctaatggcttcagtaaacctgcaggccgcttatgctcagccttcacgcgttgacatacttcacaggcggccacatacttagaaacgtcaaccttcatccgcttccactagaagttttgcttcaaatctcggtacatcttggtttcgccagggtgaatggtgtaaggtgttttatgagcttctctcaagatatccatcttcacctctgatttctgaggcacacaaagacggcccctgaaacaaaccaaatcattctcatcaatggtgaactctcgtggtttaccatcac

SEQ ID NO: 161317 - DNA, 361 bp, Zea Mays
tggtgaggtcaatcgcgcagtgcacggttgataactagagaagtggtgctgcgattgcggggttctagtcgtgttgattggaagccggattgtttgtgtgacatctccaccaaattggtagttatcttcacctgacggaagatcgggcaccccgttcctatcactaacaaaaaaatccactgtcctactggtgaatgcttcccaaaaattcaaaacccccaaagcgcatcacccgagagaaaaaacaaagaaagaatgacctccaacttctcttctttgcaaaccgggtatcacacttattctatggtgaggacaagggccatactacaagaatgtgccaaatcactattctgaagcaaaa

SEQ ID NO: 161318 - DNA, 2193 bp, Zea Mays
cgaagatattccatgcccaacacccatgtttcctgggccacaagtagggtcgccctgcccatgtgcccaagtggccaaggatccccgccctgcgcgacggccaactggtcagtggtaaccaacccgggggacactcaccagtctgctgcctgtctgattcggccaagagactactgtttgtggccctagctcagtcagacgggagtaggaggctgcagttggactaaacaagcaattttgccccgtatcatcaggtgcacaaggtcattatcttagaagactgcaatgagagggccaggcataattgagatgagatgagatgtgtgtgacatgccaccaccagtaccgacgtctcctccacagaacagaaacaggcatccggcggccggtagcgagcatatctctgtcgtcgtggactcatcctggacctgggactccggctagctactcgcagttgttttatgctgctctaacctcctagtgtttggtgccggggcattttcctaagctactcgcggatcacgcagctaccggactggctactcttcttggcattgggcgtagactatgggagagggggaggggggtatatgtgagtgctgacagctcagctgcatgattcgtcaggtttcggggcttggaagtcatgacttgctgctgccacatgactgaccggaggtctgcaggccacaaagaaatggaggaatcttgcgtagaaaggtcgattgagatcggagctgacgagctctagacttgtagcgcatgcacgcagcattggcccttgtgatttccagccttccaggctcctatcaacgtcctacattggcacctcatggacatcaccagccacgcatttaaaagtgcccgttaactaaaagattggttctgattaggtgactagtagcaatttctggcaggtgacaggtggcttatttttgtagtttctttactgtaggagattaagtttctgtggatcaaagaatatctttccaactacaccaagctacgttgtttggcatggctgcaaagatagctccttgctatactccatggagaagaagctagagccactcgaactttaccaaaatggggccttaatgagctacgtacatggatcgattgaggtatttcttttttgtttatttcttgattcttgataacacgcacgcagataaagtgttccaaacttttgtctgctggctgaataaaaaatgaggttggctgggctagcttgtgccaatttttttacaggatcgtgtattgctcgaggcagagtggggacggcaaccagctttgcgggcataaaaattaaagaaatgctgtgggaatcctgcgtcggaaagcaggacctaagatcgtctcaaaccttccaaagatgacgcgccgtctcgaattctcttattcggcttccgcctaatggcatcactgcatacgtactcaaacattcaagcgacgtctgcttttgctacgtgcgtggtcttttctttaaggtatgatacttaattgcaatccatgcttatgatgatgatggtcgttcctgctagttgtcgtcaccacgtattaatgattttccagtgtttggccatcggctcctcgagctaactggccatttttagcttagtttattcgatggttatctcgctttcttcccaaagttacgcgtagggaaagcacagcacgtgtggaaaactcagcccgcgctatgttaatttggcaacctaaacggagttacagattgcggcgcaagtcgtttttttaggctacgtctaacagttatcctatctcattccatattatacatcttaattttaagctccattttacaaatagtactatttaacgtgtaaatcagagttttatgtgaccatatatacagtcactacatgaagttacagattgtgggtgtcgcccattcttatctatctactctttcgctgacgtaaatttctcccaacgcgtgctttgttaattagctggttggttcgacacatcagcaactaatcaagcaattggccaaacaccaacgcctatttgaaaaggcgctgggacctaacagcaggattatcctagtccacctcaacaccaccgttgctagttcgttggcgctggtacggtacgtaaacaaagtcacgctctttgcacactgctggaggccgaattcaagtagctttcttacccatctaatcagtcctc

SEQ ID NO: 161319 - DNA, 526 bp, Zea Mays
gcaagtgtcctcccatttccaagatggtatgggaaggggttgcaaagggcctgctgccttcagatgactggctttgattctctggcaggtatcgcactcggatatgtacttgttaatttccctcttcattctggtccaccagtataaggatctgagatcatggtacatcttgttgctgccagggtgcatggagaattttgaaaggtgagcttcatccaatatcttctttctgagctcagggtccttgggaacaaccaatcgatctccaaaaccataaaatccccttgctgtcttgacggaagcacttgtatttctccgccttctgcttgatcatttctatgataacctgtacacccttgtcttcaatctgggccctgactatttgctcttgcagtgtgggctccaccgagatataatttaaatcactcgaagaaacaacctccaggttcaatttgcacaactcatcacacagggtggtaactcttgcatccatgctcatacaattgcactgggcctttctgctcaa

SEQ ID NO: 161320 - DNA, 610 bp, Zea Mays
tgtgaagtgcatgtgtccagcatggcctcacacccccttgtccccgcatgcatagcagtggcatgttttctctcccccacggaccacgcgtcaacaccttcgtggcgaaaaggaccgtgaaacgcggtgggcgtggcaatctccaccaggttttaataagaaagaattgctaacctattcgtttgattttaatctataccaacttctactagtgtttttgtttctacaaattacaaccgcaacagtttaaaccgaatttaattcgaagcgaacaacctatgttgcaattgtcaatcaatacatggacagggattgctgacactgaaaacgccacttccatcagcaacacacgtccaacacttgtgaacaggctagacttccaagtcaggatttgtgctgcgacagcgtcgattattaacggttgtttatcacaacttatgagcttgaagatggacagtgaaaagtactaccttcgttcttcaataggaggctcctcaggtttgcgcttctccattgcaactagatgtagtagatgaagaggtgttgtacaaacatgcaacagtgccacgataatgtagtatcacatctccaagtggtagtgctacatctc

SEQ ID NO: 161321 - DNA, 781 bp, Zea Mays
atttcttgttgaacagttgtgtcttttcaactgtccctgtagccttaactcagccgcttgtggagaccgtttcatgttgaacagttgtgtcttttcaactatccttgtccctgtagaattgaaacggcaatcgccgaacacgaagcggcaacttttgactcctctttgctcctcgaagttcgagtaaacgtcgattcagttcttgatttgaatgtatttaaatggtcatcggccacaattccattcatcgcaactcagaaaaaactgtggcgcctagctttatccatgtcgacatcactgagtgattcctctgcttcttttgtctccattcttctagccgtgaaccaacccttgtgtgggatcctatagcggcatatgaaaaacaggcacctttgcactgggatgcaaatggatgggactttgcagttgcatcggaatccgacggtgacctcaccgacggggacgacctctagttcctcgttgacggggagctggacttcgacaccagcactaagtggtcttaggcgtacgacggagaatcgtcagatgtggagtccttggacaatgatgacgacccgatgtctggacattggatgggcatggtctcctcggatgacaagaacgacgacgacggcagcagtgactacggcagcagtgacgaggacagcgagggcagtggcgacgatgacggcgatgatgatggcggggcaagccaatgtgatgagatgcctcccagcaagcgtcgtcggctgtagcatgatagcttattctggtaggaaaa

SEQ ID NO: 161322 - DNA, 859 bp, Zea Mays
aactcttaagccatctctaacaagccgtgtatatgggcatgcaaaacactgttttgtactgtagactatactatttatagagtgtagtttcaaatatagagtgagataggaggtgggatatggtggatgctggagataacctaggctctcgtcgtgcttgtttgggccattttacccctctatagggttgcactttgtgagcccactgagaggtattagataaacatatcgtttgctgttgttcatggccacgactgcaatggcggtggtgtcttgcaacgttgacccgcctcctccatggccatctcctcctcctttgagtgttctgttgcggcggtggtagaggatcctcgcctccggtgcaacctccatcgtcctgctcgtgtagaggacacaccctaacaccacttccttctgcctcactccattgttatcgttcactcttccgcagcgactggtatcagatgctggtgtgtatggagtagaccttagacgtggaggttcaagccgctcgaccgctctaccttgctgatggtgtgaagccttcttgccttctccttcctagcagtagccaagcaaggagattctttctcgccttctttgtgctactggtgggtggagagctttgtgctccgccatactaattaaatgtgcttccttggcaccaactttgtttattcttcagattgtcaccaccttccccatgttaatttgaagcaagttgagtcctaggtttacacctcctatggctacacgggacatgcgatgattgacttgtttcttgtggttctttgtgattatggctacataaataatctatcagttttgcataatcatcatattgtattgcttcattttg

SEQ ID NO: 161323 - DNA, 561 bp, Zea Mays
tgaattttgtgtagcatggcctcccgaaaatggcgttgtaggaccaaatgaagtctgtcgtggttttgaaaaccaggggacattaagatttgtgtttggaggggaagctagcatggactcactctgaatggtgagccaccaggactcaagcgatggatttgagatagtgggttatactggttcaggcttgcaccctagtccagtgtagtgctgatcatagtattactgagggcgtgttacaactggtgtgctatgtgtaaagaaagatagggtccttccattttatagttcaagggtcagactttatagtggggatttgtattctactagagggtgttcggccattggcccttggatggtgtggttcctctgacgccgtccgtagggtcgtgcgtagccattacagccatcatggcatactgtctcgtccactcatcataaggatccatgtagctagtctcccaccgacattctcgtggtagtgcacggggggtcccgcaggtcagtcatatggagcagtcgtgcgtcgtgtggtctttgcacgtcatcacgagcctgcgt

SEQ ID NO: 161324 - DNA, 536 bp, Zea Mays
tcactctcgattacatgtgtgctcttttatgatgcaaatatggcacatgaaatgaggagatctactatacattccttgtatacaattttgagtattacaaacatcacatagaagggcatgaactaatctgtagtcggctagccatgacgaggtgttcacggtggcgcggaaaacggatttgggggaaatgtgaaattgggaggctctggtggatgatcagaggcgagagctggtgcactaggtgcgtaataacctagcaaacctggttgatcactcaatttatagaatctatcggcggtggtgtccaatttggagaaaacgcgctggcagccggagagaggggaagttcactggcgcgagttaccatggcattcactggcgcgtcgactcaagggacagaccggctatctattgcgaccaacgacgatgtggtaacaaggcagtagcgtggtgtgcttgggttaacggcgatcagcaccgcacggccacgtcgcggcgacaagtggatggggtgacagagtggccacagtgctctg

SEQ ID NO: 161325 - DNA, 509 bp, Zea Mays
attcaaacaaaaaatttacggagattgtcaatattccatgaatgctctaagtcttcgccggatggcgttgttagcctgtacgcgctggggacgccttcgtcttgacgatgaagggaccctcccactttggctctagcttgcctcgtgactctgtccgagttgtccggatgagtacgaggtctccttcgttgaattctcttgggacgactgtgtggttgcgccaggcttttgtttgagcttggtatttgttgagggcctgcagggcgaagacacggtctccgtcgatgaggtccttcgaagttggttcctctacatcggggacggctgaagggcttgtccgtggtgacccatgttttatttcttgcggggtcatggcctccgatccatacagcaggcggaaaggagtgaacccagtcgcccgtcacttggtcgtgttcagcgcccagactgcttcaggtagcaggtcggcccatttgcccttcttgtcgtcgaggagcattttcttaatg

SEQ ID NO: 161326 - DNA, 392 bp, Zea Mays
gtcagaggcggctggggaggtggattagaggtggaggtggtgagggcgccaagcgcatcgtagagacggaggacaggaatgggtgcgggatgggagagggtccgaacgacgctggaactcaggcgggcggtggcatatggaggtgtggacgcgagcggagtggaggcgaaccttccatcgactgcgcggaggctgcctttccatcgacccagcgccattatagttgggtgaggagacgagaaggcggggtgagggcaagggtggagggcagcgctgatggcgtgggcggaggaggcgagatttccgggggggacgagggcgagtgagcatgactgccatggaaggaaccatgctccacgcggtcaaagaggcgcgatttgtgggggaggcgc

SEQ ID NO: 161327 - DNA, 433 bp, Zea Mays
gttggccatgacgcgacgtctcacggtggcgcgggcaacagatttgggggaagaatgaaattctttggctatggtggctaatcgagggcaggggtgggtgctctggcttcgtaacaacctagcggagctagcagcgcactcaatttatagtgtccaagagtggtggctccgaattttgaaaggggagactggcggccgaagagagggggtgagtcaccggcatgaactaccgtggcgttcaccagagcaatgtctcaggcgatggacagactacctacggctatctactgcgacgtggtaactcttctaagtatgtggcatggctacgaagggcggcgaactccagcgaggacacctcagtcaatcgtgcggcaagtggcatggtgaatagtacggtgataaggctccaacccttccctgcattgagatgttt

SEQ ID NO: 161328 - DNA, 440 bp, Zea Mays
caaaaatcctagaggcccttggccccgtcttatcatcccccgtaccttgcaaatctattttcctttttcggggagctgcaaccacaaccttcccctttgaggtgccctcttcaggccgggtcttcacctattttcctcgatcattgtcggcgtcagtagagtccccctctaggtagggatcgtatggcaagctattcaactcaaaaacatggttcaacctgacgttggaaccgcggatatcccaacttgttagcatcccagtcttcgatacatacttccaacaatcttaatggcctccgattccacctctcacacgaaggcggtcgcatcccacccacgcaagtcaacattgaaggctgggctctgcaccatcttatcccctagtgtcgcatccggtgaggtctaattccacccaaaccccactcgtgcgccagcggcca

SEQ ID NO: 161329 - DNA, 666 bp, Zea Mays
acaagaattagtataagaataaaagaatgattcaaaaattgtaaatttctaaatatacaattctcgcaccttcaggctattgtatgcaaggctatcagcaagatcctccttcgtcatagcgcataatccagcttcaagcttcggaaaccccatactcctagccatctcccggcagacagataattctttattgtcagggaggcagtataggaagtcatcttcgtctgttccattgaacactaatgctcccctcggatattttaattctctagcatagtgattagcttcataaatctcttcttcagatagtttttccccgaagcatgtcgtacaatgtaatcgcttatgttggaaggtgcttcgggggcagcagtgccaattccttcaaccgaaattggctctgacatttttattttttcggcttccaatgctgcctttgtaacctttgtttcttcggtttccaaaggttgtttcttggagggctctgaaggcccagcttcagcttcaagttgttgcttcgaagtttcagcaacaaaggcttcagtagacacttcacaagttccaatggttttctttggagttatgctcgaagatttaattgtctccaaaacatctaacacattaaccatccttttttcttttcggggtcactgttggacccttctg

SEQ ID NO: 161330 - DNA, 399 bp, Zea Mays
gagtaattatagaccttcctgtggctcaccacaagcatgaaagctcaccgggcaacccctaaccatctaggaggattcacctccaagagtaatgaatgcataacgaatgttgacaaagcccgacaagtgctcgatcaaagattgtcttgctctagatctactctctagctcttaatatgctctctaactattaatcaaacactaatcacacattctcacaaagagaggagttagagagggctcaaatatggtggttgagttgggattgttctagactagcaggaccccctagggcgtggaatggttatatatacaccccaacccaaaacttgacattaaaggtcaaaactagttgtttgggttgtacaggtctggcagtaccgattgtccgtgcggcac

SEQ ID NO: 161331 - DNA, 383 bp, Zea Mays
cgacaacctggggtccagctctagagaatggatgctcgtctcctagagtggtccggagccatgtagctggttagccttgtcccgtaccctaagtctgcacgctcgaccgctctgcaatgggtgtcctagtatttggaactgtgatcctgagggtctggacatatggcttggcttcccaggctaaatcctgcaggtcctgttgcatgaatcaaaggatggcagataccagacgatgggtcctatgggtgtgcaactaaaacttcaaaagcctaagctgtgtgtaggtccaggtcccagtccagtagtaggtagtctcaaactgtagagactacctcctaggggccggaccaccagttttatctttggtattctggtatccagcc

SEQ ID NO: 161332 - DNA, 846 bp, Zea Mays
agagtatgtcccaagtctcgtgagtatgattgaggcagagtgccaatatcagaggtgaggagagttgtgagctatgaagtgtgttgactctcgtcgccccatagaaggccctgggttcctctttttatagtcgcaaggaggagacccaggagtacaagggtggttgtgctgcttgttgtgattagaggaggcgtgtcagagccctgtagcgatgtggccgacgggactgcccttgtccttgcgtcgtcttttggtcaggaggtcgttcgatccctgtagcatgttcttttgacggggcagagagccgaggcagggctcgagagcatgggcacgtgcccgagccctagcccgtataggggtacttgtgtcgagttagagtggttgtcacagtgcttggcgtggtcttttgcgagattcgcgggagaggtggcacttaatgcgcttctgctagggcagttggccgaggccgagctcgtgcgaggcgaagatttctcccgaggccgaggtcttgatcggacattgcaagtagccatgctcagggtggttgaaacagtggtcagagtggaggaacagtgctctggatttgcgccatgtgccttgtcgtgggcggtaaaggtagattagaccacagttgtgtcatcttttgttgactttggcaccctcagtagggcaggtgaacgtacagacgcatgttctagaatcggggtggttggccgagatgggtagatcccggaacgtcgcctgagacaccctcagacaaatcaaaaatgtgcttgtcattcgaggctggccacgggcgagtcggaaatgtatttcccgcccgaggtaggcctcaggcgactcgtg

SEQ ID NO: 161333 - DNA, 752 bp, Zea Mays
gcttaagagtgtcagtagagttgttaagaaaatattggagaaaaacccaatcaaagatgggctgtcagactgtttgaggtttgaatttcagaataacagtgttatgagatgaactttgagctcgattttgaatggggtccagtgactttttgtgacaacaccatgtagcaaagttgtagctggtatttagcactacaattttgatgcagagacttggacctgttgtcacacgaaattgggagaaagtaaagctccaatgggctctgtcaggcatctgaactgagcatggccatggtacagtgtttcagggaaagcagatatgggtccgatggccgcggtggaaaaatctcaccgccgacgacctatccgcgccacgattggtgccggagttgagatgttcgggcggcaagcatcttcccccgaagatctttttcctccggataggaccgccgcggtggaaggcactaaccccggctgccacgcggtcattcctccttccggccgtgtccgatcaccggcgccgctctcctctgttcggccacgccatcacggatttgacggtcttccggccatggttgaacgtggcaagctctaggggaatgccgtgttcggtgccatcgccgatcgccagctcgggctggcaatagttatcgccgtgaccgcgattgtgactctccgcggctataaattcaccccgacctcgccctcccttctcaaatcaaccaagccccgaccttcgtctccaaatcgcg

SEQ ID NO: 161334 - DNA, 458 bp, Zea Mays
gatgccctgggcttcgagttccctcactatgaaagacttgacgaagaagtcggggggttgaaaagaaaaagggttgtaagtgtgttgaagaggacaagaagaaaaggttgacaaagaacccaaagttggcaccagagccttcgacaccaaagaaaaggaaggctatgtcatctgaccgcggagaagaagagagaccttctccgccaaagcattcagaagagaccccttcgcagcttccattggcgtgaccaaaattctagaggtaatgactgcaccctacctttcccaatgctaagtcctttaggatcagatctaacaagcttattacagccacagaagaaaaatgttgagagaactgccaaagtagaggtaaacaaggatccttcggcacctggtggagggaacactcagaagaagcgtaagatgatgaatgtgatgagggctattcttgacacccc

SEQ ID NO: 161335 - DNA, 538 bp, Zea Mays
aacaaaaacaagaaattcaatcatcagatggctagagtacgctcaacagctagggttactcgcgacggagaggaagccaaaggtgccaaaaccgctccaatctctaaagtgatgcaacggtcagggctggtagtatcggaggatgcacctgccgctgaagctaagtaggttgatgctgaggaaattgaatctgaagataattacagcgccgtgccatctaaacccagccacttggagtttgggaaatccaccattaccgaaggtgatatgtctaagctgatgaagctgtgctatttcagtgaagcaaaaaaggagttggttcgttttggtggagaagaaaaggatgaggtggtagtgttcaaaagcttctttaaatcaggattaaggtttcctttgaatgggatgattgctgatgtcttgaagaaatttgggatttatcttcatcaactaacgcctaacgccatcgttaggctcagtgtctacatctgggccctccgaagccagggggtagaaccatttgctgaaggcttctgccgag

SEQ ID NO: 161336 - DNA, 456 bp, Zea Mays
gctcttttgccgccgcagggctgtggcgtcttgtggccagggatgttgggcacgcaactcaaggtatggatgtctcccctagattcatgttggccgccgcttagtctaggtttgattagtctgggtaataaaccatagaatcaccgtggggttggccgggtgttgctccggtggcctcgccgccgcacggtgcgtgctgttcgccgtggcccatggagatagaagaaggcctggtgccgttggatattctttcgatggcccagaattggttgtcgcgtaacgcttcgtatagagataacaggaaccgttagattgcgatcggacggatccgaccaggcgcgctcgtttaaactctgcaccatcgatgggagatccatcggccagcgtggcgtactgtttcgtagataacagagtctaatctggaccgctgatagggaatcgtgtggatctgagcgc

SEQ ID NO: 161337 - DNA, 540 bp, Zea Mays
ccaacatcatgtgtcaaaaaaaccgcatcgacggccttcgacatacaaaacagtcaacacaaggggcagcctagactaccctcgtgtgcgacatgtccgagcaaaagtcgcccaagggtgcagccgaacatgcacaataagtgtgcgacatcaccctaagggtgtgaagtctttactataagacaaatccgagcaagagccgcccaagggtgcagccggacatgcacaataagtgcgcaacatcaccctaagggtgtgaagtctttactataagacaaatccaagaaaaagccgcctaagggtgcagccggacatgcacaataagtgcgcaacatcaccctaagggtgcgaagtctttactacaagacacgtccgagcaaaagccgcctaagggtgcagccgaacatgcataataagcgcgagaaatcaccctaagggtgcgaagtctctactatctgaaacagtcgaacaaaagccgcctaagggcacagccgagtacgcgccagaagcgttcgatatcgcccgcgggaagcgaggtcc

SEQ ID NO: 161338 - DNA, 530 bp, Zea Mays
gttctaccttgtcattggcacaccagccgtccgcagtccagagggtctacaagtaaccaacgacaccgaaggccatcgcatcatcaacctcatcatgactgaagattggcgggccccaataaccctgttcctgcaaggatattaccacccaagtgacgtcaacgaggccaagcgcctcaaacaccgaagccgggacttcgtacttgttgagggccagctatacaagaagggggtcagtcaacccatgctcaaatgcgtaaccgaaaccgaaggcagtcaaatccttcgcgaagtccacagcggaacttgtggctcccactcagggcccagggctctcgttgccaaggtgatccgtcaaggattttactggcctacaataatctgcgctgcgaatcgagtcacgcggtctcttcaccaagctgattgcccacactcgggcaacccttcgcagttcaccaagctgattgcccacacatggcctcttcaacgctgggggctggatattttcaggccgctacctacggctcaag

SEQ ID NO: 161339 - DNA, 1658 bp, Zea Mays
gctcaaacaagcaagcattacgatgcttccacagttcccaagcgaccaaaatgataaaagaatttagacccttccgcatttccttaggagcagttgagattactgtccaccaccattttgaaaaacggaagcatctggcgccaaggcagtaaggcccaactgaagaaagatgcttgctcatacttgtctagcaaaaacacagctggccaagagatggtgaatgtcttcatcatcttgatcacagagcgggcacacatcagggtggggcaagcctctcttagcaaggcgatcaaccgtccaacaccggttatggaacaccagccaaatgaaaaacttacagcgaggaggtgcccagctcttccatattcttctccaaggtccaaatgtgatggtgccaatgaaataagcactatatgctgacttactcttgtgaatgccggattgtgttaatctccacacaaattggtccggcacatgttgctgcaaaaatagaccatctaccatgtgccaaacctttaggtactcgaatataacctggactgtgagcgctcctttgatgtcatccacccatctttggttttggagagcttgggctacctcttcctcttcctcttggctgtccgctttgagacagcactaaataagctgggtgtcacttcagatatggtatggccatccagccatctgtctgtccagaagagtgtttgctcaacgttcccaacaatgacgtccactgcaatgttgaagagggcctgagcattgcgagggacttgagttgggaggcctgcccaaaggctactaggaacagttttctcagccacaaccagcaaatccgcaacgctcagccaagcagatacagattatgaattccaagaccaccatattccagaggccgctgcaccctttcccaagagaccaaacagtgacctcctttagcttgttcctgaccctttcagagaaaactcctccttttgtcgatggcttttagaacccactttggtagatccatggcaatcaaaaggtaaataggagcagcagttaacactactcgaaccattaccaatctgcctgcacggttcattaaggaagctttccaccccggcaaaaattctgccaccttatcaattaatggcagcaagacctcctttgtgggtttgccaattagcccaagataagtacaaggaaaatccttgactgtacaggacttccgtgagacatatacaattattgcattcagaatattcatgaccaaaatgaatagcattggagacaaaggatctccctgtcttaaacccccgtctatgataaattgtctcccctggctcaccattcactagaacttgtgtagaggaagtagataacagcaaacataagagattaatccatcgctgtccaaacccaatatgcctaagaatttccaataaaaaggaccaggagaccgaatcaaaagctttagatatgtcaagtttaaggaggatgtgagcttctttcttcttattcttgtgcagagccttgaccgtttgttggacaaacataaaattatcatgaattctttgacctttcacaaaagcagtctggttggggctgatcaaaatcggtagaacaggggccaacctattggccattatttttgttactaatttagcaaagctatgcac

SEQ ID NO: 161340 - DNA, 352 bp, Zea Mays
gggtggcatgcccgttagctcctcgggaaacacatccggaaagtccgacacaaccccgatagcctcaagcgggttggcctccttactatcaaccgagatctggtgacaatctccctccgctgatttaggcatccttagctcagccactacctcctctccggatggggacttcaatgttacggtcctcttgtcacagctaacattcgcttcatatttcattaaccaattcatccctaggatgacatctactccaagggtgtctattactattaggtcactggggaaccctatcccccttatttccacccttatacttgggcatattctatctgcttgcactttaccaccaacc

SEQ ID NO: 161341 - DNA, 473 bp, Zea Mays
attttcttttgatccattgattgaatggtcatggccgagaaagatacaatctgaaacggcctttatacaatggtgctttattgaatgatctccatattggaaagctggtgacttacatcgtcaggcttagttcatatgcttttggttcgtcaaccttcaccaaaaggcaccgccgccagttctcggtatagtgattggcgtccgaaaaggtgtcaacacctctgtcgcatatgctcaaggtcggccctgcgcgccaccagcgcgaactgtcggaccgtccagcctcagacccggaccgtacgtcccggtcatttctggtgcccaacaacctcctcaaaaagagttttaccgtcataatattctggattggtgttgtgtagacttgctggccctaatggtcgtgggcatcttggccacgttgacgtagctcttgtctcctccattttctggccactgcgtcagtgtcatctttg

SEQ ID NO: 161342 - DNA, 534 bp, Zea Mays
ttgtgagctctggtggataattggaagtgaggaagggtgcgctgagcgcataacaagagggcggagcagggagggccttcaatttgtagtaactacatgagtgcttcgtgaatttgggatgagatgatctcacggccggaagggaggtgagtcaccggagtgcaactgccgtggcgctcggtcaggtaagacccctagctgtaaacgggctgtccacaacgacatattgcgacgtggtaatgtccccaagcacgtggcatcctcgcggcgagtggcggacaccgacgatgacatcccggccgggcgtgaagcaagtgggtatggtggccaactcacaatcttatccgcagtcacgatcttttcacttgcccggtaatatccgcgtcgatccctgcatgaatctttacgacgagcttgaatcaccgcgctcgatcaccggcggcgaggtacactgcaccaaggatcttcttcagtgcactgtaccatggcgatggtcattcagtgcgccagacagagcgatttgaggagttcctt

SEQ ID NO: 161343 - DNA, 424 bp, Zea Mays
attttctatgaatttattaagtttctaggtttatttatgtactaaaaagtatttactatattatttttactattttcttggttcactggaccgggcatcaaattccagaaaggttaggggctaagatataaattttcccagacacagctttaactcgcggtggacggcaggtttatttttcaaaaaccagagggctctttagcaattaggccacgacgaaggggtatcttcgatcgccagccatccgatcccgatccaaaggctcagaatagatcgtgaagcgatacacggcaggcaccacaggatccaagatccccggtccaaaatctctcccttgcattaaaccgttctagcctttggattttcaatctacggccgatacaacccctcttacctcaatccttcatcgcggatccaacggtcc

SEQ ID NO: 161344 - DNA, 998 bp, Zea Mays
ataatgttgaacttattttgtgtaggttcctatatgttccagctccacatacagctgaggttattgctgatcttcttcatgatgttctccttgactggcatatcgagaggaatttgtctactataactcttgataattgtagcacaaatgatagtgttatgagaaatatggttgggacctccaatgagaacctcagacaaatgatggatgcttgcaccgtagtaagcttgcaccgtcaatggtggaagcactcatgtgtatgcaggcttggtcccgtgctgacatgttaggtacgtggtcagaattttaacaacatttatatgttatttgatttcatgcacattataggaaacaaccaatgatggctgctttgttgcaatgtagggtctccaactatgatgggtgttttgatgacttgtcttgatgaacaagatgaagagatggtactgtttatttgttgctttaatgacttgcattgaagagcctgactcgagctgtttttattattttgcaggatgaacatgaatcaacaattgttgattaaccatttgagatgaacctgcttgctggctgctgctacaaactgcttgctgtctgttgggtgctgctagcctgctacaaactgtttgctaattgctatagactatcatgtactcatgttgtaagagacatatatgtatgttgtatgaagtatgcaaatgactaaatgtaatatgtatgctgctacaaactgtttgatgctacaaactgtttgctattgactatcatgttggccttgtttacttgctattgactaaatgtaatatgtatgatgtagcctttcatcatttcatgccctcttttttttgatgaagtatgaatgtatgatcttgtttacttgctattggccttgtttacctgctacaaaccgtgttgctggtgctgcctgtctgctggaaaccagcacacctgtttcgggtctgtgggtccccgacaggttgcgggcctccacgggttcg

SEQ ID NO: 161345 - DNA, 389 bp, Zea Mays
agcgtgagcatgtcgcaccgccttaagtcgttgccgacttaagtcgattgctccgttagtagggcatagtggtcaccccgagttaagtaagcgtgagtatgttgcaccgccttaagtcgttgccgacttaagtcgattgctccgttagtagggcatagtggtcaccccgagttaagcaagaatgcaagtcaatcgtaaacaaactgagtatctttgaaatctcttttttattgatgacatatttccactttacagagtacatcgtcgtcccagcagttgttgaaatacagctagggataaaactttctgaggtgttctatgttccaggagttcccgacttctgtgccatccatctgagtgagacgatacgatccgggccgagtgacttc

SEQ ID NO: 161346 - DNA, 1333 bp, Zea Mays
ggaaggtgcaggagtattcagacagtggcactaagagaaaaaggtcacttgagtggctcaattttaaccattgtcaggatagtatgtgcattttatagtgggagcacaatgtgatctctcttgctctctttctgtctctcccatggccatataattggttacttgtagctaccactgtcctaaaaggcatgattgtcgaggtgcatagacaaaactgcattccttttcacttttcggaatggaggtagtaaggtacaagccatcttaattaaacaacaaacggagaccggatagctttttgtcaattggaggatgggaaagtcgacatgaagggcaaggggagctagaatggtgttaaatcatttatacaactcagagtatataccaagttccataaaaaccaagtggcaagtgttagcacatatcacaaaacaattgttgtaaaaccagataaaataaaaacgaattgaaatgaaatatactcatctgagtttcaacgccatgtaaatgtaccagctcagttttcatgaaaaaaacttgtccatcttgctaagatccagtctgacttcaataccacatttttagacagcatgaatctagggacacacgatacaatatataatttgttgtaaggcatgtcttgttcagatacagaatctactaaaactgcactatatatatttagacaatgtgaacatatgggcacgcggaacaataactaatctgttgcgaagtaaaaattacaagttcatggagaacagatcaagagaccaataaattacaagttgccaaatatgcatgaacaaatccatcctcattgtgcaggtactaatccttatgcgtaaatccagggacacaaacttgtaaggcaacaaaagaatcaagcacataactatagaggcatggaaatggacagaccagtttaatcttacatcaggtgatagaaatgaggataaacatgcatattgtacaaagaatcttatgtacataggctcaagccatggtgggccaatttattaatctgtacacttgcacagattttatgaaatgaaaaaatatcctcacacactgacctaatgttcttcccgattttttcacttcttatcatccactaaatctaagaacattggtatttctaaattgtgttttccccgaagttgcaaacaaatacattcaacaacattggttataatctcatgaaccaaatgcagtggctaaaaaaggagtgagatgttagctcctatgtttcttttataagctttattgtcatgatggggccttcctaaagataggttatggtagatttagaatcagaaataatgaaaggaagcat

SEQ ID NO: 161347 - DNA, 949 bp, Zea Mays
tgatttttaaatctagaattcaaaaccaggatttaaattgtgataggatacttgaattggattaaaaaaaagaagagaaaactctctgtactgggcctattaccttactttcggcccatctctaccatcacagcccgcgcagccgaaccaacgttcccgctgcgcccttggactgtcacactggcgggtggggccactgacgcgtggggccttctcgacagacctcctctccacgccaacccactgcgtggacgtctcagccgacgcgttctcgtgcgcgtgccaccatggtcactgcatggtgggccctcgcacgcggattcgccatctctctctcgcgttcgtggtctgaccgacgtctgggtcctattgtttagccctctgcccacgaacacgcgccccgtgccacagacttttgggccccgctgctcaggtccggcatctaccttgcgtcgatgctcgcgggcgagcaactaaatccactgaaatcgcgcggacgtcgcggaattcggctccctaactcgcctagaccgcggacaccatgggcgccgtgtaccttgttccgctgccggacaacctcgccctgccagttttcccctttccatgcgcgctctcggtgagctcatagcgaccgtgcgagattatcggaatccgggggctcctcaaccaaattgccgaggttctcggtcgattgcatcgctccgcccctatataacccagtcgctcccgctcccttatccatctagccgagaacccagccaccaccaacaggaatcgtagacggagagagagttagagaccgcggtacggatcttcctcacgcgcgaggtattgggatggatggactcggttcattggtcgacggtgagcttcgatgcttgcgttgtcgtcggggggcggagaaggacctcgtggccactagaatttctcacccatgccgctgctccgc

SEQ ID NO: 161348 - DNA, 970 bp, Zea Mays
cgggtgacttctgacacaatgaatgacccttcccatattggtgacaacttatgtcgtccttcccccgttagaatttgacgaaggaccaggtctcccactacaaaggatcggtgtcgtatggctttatcgtgatagcgcctcaaggtctgttggtatctggccgactacattactgtgttcaatcgctcttcctctagcacatcaatatcctctagcctggtagcttcggcttcagctatgctttcgaataccagccttagtgccccaaacctgaggtcggcaggtagcactgcctccgaaccatagaccatgaagaaaggggtatttccatgtagagctcgactaggttgagttctcaagctccaaaccacataaggcaactctctgatccactttcccgcgaactttccatttttgtcgaacactttcttcctgagtgcttccagtatcattccattagccctttccacctgaccattggctcttgggtgtgctactgatgcgtacttgatctggatactccattgttcgcagaaatcaaagaattcagagctagtgaagttggatctcaggtcggttatgatgctattcggtatcccaaacctgaatattatgtcttgtatgaactccacttccttggctgaggttaaagaagcaataggcttgtactctatccatttggtgaatttgtcaatggcgaccagcacgtgagtatagcctccctgagctttcttgaagggtccaatcatgtccagtccccaacatgcaaatggccatgttacaggtatggtttgcaggagttgtgccggtaagtgttgttgttttgacaagaattggcaagcttcacatctctggactaactcggctgcatcactctttgcttttggccaatagaaaccagacttgaaaactttcccaactagagttctggatgctgcgtgtattgcaaactgtccagcgtggatctcat

SEQ ID NO: 161349 - DNA, 389 bp, Zea Mays
accatttgaagctttgtatggcaggaagtgcaggactcctttatattgggatcagactggagaaagacagttctttgggccagaacttattcaagaggcagaagaacaagtccatataatccaggagaatttgagggtagctcagaccaggcaaaagagctacgttgataatagaagaagaccactggagtttgaggaaggtgatcatgtgtatctcaaggtgtcaccacttcgtggaatgaggagatttaaagttaagggcaaattgtcccctcgctttattggacctttcagagtttttaggcgagttggggagatggcataccaactcgagttacctgataatctatctgatgtgcataatgtattccatgtgtctcaacttaaga

SEQ ID NO: 161350 - DNA, 306 bp, Zea Mays
gccgagaaggtcctggctatggtagcaaaggaggctcacgctgctggaatcctgtccgtccaacggacagagccgcagttagaactagttgctgcaatcacaggtggtgcagcgcagatgacaatgcatcggagattggctcatcatgtcagcgatagtaaggactaaagactcctgaaattattatatagctaggaaggagtatatacatacacggatgcgcatcttagctgtgtgtgtgcctttgcattgcttcatcaggtcttaagagaacggcatccctcgcccgcttcctggataaacgca

SEQ ID NO: 161351 - DNA, 632 bp, Zea Mays
gaaaaagatgacaccgcaacagttagctcccaacgcctcaggcatacaaccatgagaaggtgaatcacttggagactgaagcagtataggacacaccaaacgtggcagtaggtatgttctcagttgaatcccatccaacaagtgtgttattttatactggtgcaacacattcatttatcactacaaagtgggtagaaacatataaccttccaacaagacccatgacaacctcaatgtgaattaattcaattggtggggaagttcaggcagtaagatacgtttgaatgtaggggtgtaaataagggggatagagtttctcgctaacttaatagtgatgagtacgtatggaatagatatcatcctagggatgaattggctaaggaagtatcgagcgagtgtcagctgcgataagaggaccgtgagtttggtgtcctcatctggagaagaagaagtggacgaactaagcatgtccaagtcagaaagaaaagattgccaccagattaccgttaatagcaaggaggccaacccgcttgaggccataaaggttgtgtcagagtttccagatgtgttccctgagaagctactgggcatgccgcctgagcgaaaggtcaagttcactatagagcttgccc

SEQ ID NO: 161352 - DNA, 603 bp, Zea Mays
tgccatcttttgcatagatcaaacaactgtgttagtttgttcaagcaaactgttaactaatatgaatctacatgtgaggttctcaactgcatagttttgtggactggggacatgctcagttgggcgaacaatcgtggtaacgttgatgtcaatagaattcaccatagctcagttgacagaagagacaaagtacaatcccaattaagcacgcgagtcaactcgttagagaacattttgttgtcagtgattccattttgaggagcgactggtacactaaggctactggcacctccggtacgacgctgctggtaaaacttatttcaccctcctatagaaaagggaagagacaacattctttcgcataagcagacgtagagccaacattctttcgcataaagttctgaaccgatggctatgaactattctaaaaattgacttgctaatttgcatacggatatatatttcattaagatgtgaaaacaatttgcaagtatgtgtgatatgttgctttactaaacggcttgaccaatctatatttttcggtccaaaacgactaaaaattagttgtcatagttatatctgatattaaatgcaaagaaaatt

SEQ ID NO: 161353 - DNA, 554 bp, Zea Mays
tttcccaggctttctagcctcttgtaagttgtaaagcctgtatagctgtgtaataaaggaatgaacccccacaccacccctgccttgtaccagaaataaggaaataaaaatgtgatgtgtttcctttaccattatctaccctaggatcttaatctcgggacgagattcttttatggggggaaggatgtaacacccctggtgttactgtaactaaaacttgagcatggcatcatagcattggcattgcatatgtttgacacacctagagtgcattcactaggcaaaaatttcaaacaagttgtattgtttaagtgttttgcaaataggaccctggttaaaggacttaaccctaaatagggattaaaggggtaaaacctaacccaagttgagaaaacctaaaagctttagggtaaaagtcataaaatgaccccaagaataaacttgaatcacttttatacccctggaataccagaaaccctaattggaaccctggaaaaccctaaaaccaaaccctaggggcttatgtgcaaaattagcccacttttgggctaaag

SEQ ID NO: 161354 - DNA, 644 bp, Zea Mays
cttctgtttgggagcagaggaaaggcaagagaaaagaaaaggagcagctcgtgttaccatgcatgcctgcaaaagccaaagcgagacgtgagacgtgtagtgcttggctttgcttgattcttccctccgatgcaatctctcaccctattcgctctcagccgacgaggtggttcatggtgtgctgcagattgtggtaattcccagccgaaaggtgcggttgcagggtttatataatcccgagttcaaggacggctattatgcggagtttattaggatcctaatcacagatccggcggccaacagggcatcaggacttgttgtaatagcccgagattcccgtttattctccacggtcaccgctgaactcgtgcggaggttgttacaacaaagagatggagctgaccggatggccccaccagccgatggctgattcccacaacacagaccatgcacttcaggctgacaagcggggaccagcagacagccagcagctgggacgcgtgcgcgcggcgcgaggccagtgaacgtgggagtaagtgggccggtttttaggcgaaagtgtctgggccgatggtgagcacccggcccaaggcgctggaaagcttttctcttttctaattcttattttctgtttttcttttttg

SEQ ID NO: 161355 - DNA, 374 bp, Zea Mays
cgtgagcatgttgcactgtcttaagtcactgccgacttaagccgattgctccgttagtagggtatagtggtcaccctaagttaagtaagcgtgagcatgtcgcaccgtcttaagccactgccgacttaagccaattgctccgttagtagggtatagtggtcaccctaagttaagtaagcgtgagcatgttgcaccgtcttaagtcattgccgacctaagccgattgctccgttagtagggtatagtggtcaccctaagttaagtaagcatgagcatgttgcaccgtcttaagttactgccgacttaagccgattgctctgttagtagggtatagtggtcaccctaagttaagtaagcgtgagcatgttgcaccg

SEQ ID NO: 161356 - DNA, 360 bp, Zea Mays
caaaacattaacacaacaatgactatgatcatcttgactttcctttgaatagcttctatttagtaccagagagctccatcccttgtctccttgcaacagctacagaaacatatatatagctaaccaaatcagaaattagttggacatgattatatagaaacaaaacaaggtaactaaattagagcatgcaaaaagatacatgtttgtggagtgccttatcatggtcatcatcaagacaccaagagctcataagcagacatgaaacaatgcttaattgaacactaagaaactgtagacagtagtaactttgagcgagaaattaggcaagaacttgttaaatgtcctatgttcttgctgtga

SEQ ID NO: 161357 - DNA, 369 bp, Zea Mays
cttactaaacccggggtgaccactatgccctgctaacggagcaatcggcttaagtcggcaatggcttaaggcggtgcaacatgctcgcacttactaaactcggggtgaccactatgccctgccaacggagcaatcggcttaagtcggcaacgacttaaggcggtgcaacatgctcgcgcttacttaactcggggtgaccactatgccctactaacaaaagcgatcgattcaagtcagcaacgacttaagacgatttcgcatgcttacgaatactcatataggggtgacttctatatcccataagcaagttccaaaaccatcacatagcactttactactgcaaatttacgtaccgtcgaattccgaaac

SEQ ID NO: 161358 - DNA, 649 bp, Zea Mays
ttctatgttagtttaggtgtttaggtagggatgtccctttttggccaacccgttcgatcgggaccgatggctcgccgcctctctccacgataaaccatgagtcagacatttcctaggactcgaacgcaaactagaaatgcccttggagcttgtgcgctagggtcctggctgctagtatgcccgcttctgaccaaccctcactttgttgggagtggtcacgagccctagtgggccgaccttcaaactccaattgctaaggggcccactcagggtccattggtgattgtccgcgtgggtcatggagtcttattcctatgaagaaaaaggaaaaacaaatgaaaagatgtgggcaagaggtcttattagggcgcggttacacgatcatggggtcgtaacaggtttaatgaaggacttacttgattcgctgttgatgcgtaatcatggcagacatgtgtggttgacatctcttgcctaagttggagcagatgggcatcgtgttagaggttcggatgggacgcgctcacatcatgatcgtttacacgacctaaaccagatgttcacagcaatttaacggggcactggtgcttaccggggcacgcgccacttcaggtggttacatagttacgtgataatcgtcccgtgtgtggta

SEQ ID NO: 161359 - DNA, 453 bp, Zea Mays
acgtggcggtgcgggggagggcgtcgttgtcaggactatgtggagcaacacaatagacgaacctgcagagaagggggcatggtagtaggggacacatagtcgagatcaaggaacacgtcgagctcggtgagagaggcatcggaaggagaagaggaaaaggggaaatccgactcgttaaaaacgacatgacgagagacgaggactctgtgggaggtgaggtcgagatatcgataccccttatggtcgggggagtattcgaggaagacacaacgactggagcgggacactaacttatggggagcaatggaggtgagattagggtagcaagcgcacccaaagacacgaagatgatcataggaggggtggatgccgaaaagagagaagtaaggagtggggtgggaaaccgccttggtgggaagacggttgaggaggtaggtggtagtggtgagggcc

SEQ ID NO: 161360 - DNA, 769 bp, Zea Mays
atccgagaggaaataacgtttcgaaggacgatggtctttaaccattaacaatcgtgttgccttgttcttgattaatagcatctgagaacaagtgaacaacagctagtagaccaacggtccggatcacatcactgaaccggcacaaccctatctaatccagaccacacgctcaagatctaacggccacaatgctttctctccttcacccgacagaccaaggcagcaccgccctgaaccgcggcggagattcatcggcgttcccagacgcagcacccaggtgcactaatcggacttcggagaggtgctacacgatgcggagagaagggcgagtgccacgaaggtgacattacctgtgattatgtcgcgatgatccctgcccccggtgcgcagcggtgatgcggtggagtaagagctctggcgagaaatcaccatgtctccaaggcttctggtgctccaaaccccttccgaacacgttgttcccgaatcggtgaacacgcctgagtcacaagataaggctaggcgactccggacgcaggcaccacagtggcggctcttaagctctcactctgctctccctcgcgcgatctctgtaatcacgatgttgattttttggctcaagtttggaggatgagggagggaggtcacgtcaactttatagggacaaggtgagcacccaatgcggcgaggtcgaggtgacatatcacgagatctatggggcatttgcgtgacgaccgggctctgttacaagagcacgcaacatagagaagag

SEQ ID NO: 161361 - DNA, 538 bp, Zea Mays
aaaaagactttgatttttcgcacttattgtgctagtccggctgcacccttaagcgacatttgcacggagagtcttgtggagaaagacttcaattttttcgcacttgttgtgctaatccggctgcacccttaggcgacttttgcgcggagtgtcgcacgcgagggaggcttcgctgctccttgcggtgactttgatgtggtcgaatgacgaagaccgtcgatgcggtctttttcgacattgctttaattttttgcggaggattttcgcgtgtatattacatggctccgcctcattaaaaacctcaccctcgggaggaaaagagtgcgggccggaataaaactgtttggtgaattacaagggcgtgttagccctgaggatttaaacaaaaaatttacgcagattgtcaatatttcaggaatgttccagatcttcgccagattgtgttgttagtctgtacgcgctgggagacgacttcgtcttgacgataaatggtccttcccactttggctccagcttacctcgtgcctctgtccgggtt

SEQ ID NO: 161362 - DNA, 884 bp, Zea Mays
ggctcagggaccccccggtctcgaaacgccgacaagtgttgtagtggcaaagcaagaagtaagtttaatgtttttaaacgattagttgatagcatctatcgacatcgtcatgatttttgttgtatggcggatcgatgccttgtcgtcgtagtctcggggaattttcggaaatgtgctggtgctttactgatggggttgaatgtccttgtgatgtatttgaataactgcgtgtcgtacgagaatccgaaaatggtgaaagttggtgtatgttggtaattaaaaaaatagtcacgacgttagccaatagccaagcttatgccgaaatttaaaatatgggcaatttgagttgaaattatgcttatctaggcgtgtggattaataataattggaagaacagtcgttcaaattggtcggtccaattaagaatgattttgcgtgtgaggtgaggtggtgacatgccaaagtagtcaccgcttccctatatttataagtcgagtcaatacccattatgagttcattaaatttcacgtcgcacatagtgtatggttgtattcatgacaaggaggtgtaggttttactcaattagaagtttgattaatgtggctaggaaatttgttttgtcttgggtaatgaagtggtgacgtgaccaagtagccccctcggttatgagtcgggtctagatgtgttatgccttcaccgtgatacccatcacagatgttatgaaaaatgaaatagacgcatcatatgatttagtggtgctggtattgcgatctaagtacattatatatgtgtgataaatgttgggcttgaggattatctttcgggcgaggaaggtgtaatagacttatatgtgtaaaatgattaagctagtaatacaaaatgac

SEQ ID NO: 161363 - DNA, 816 bp, Zea Mays
ggaattttctacctgccttcaggtttctgaggacggtaatgccttgatttcttttcgaaatccagcagaataatttattgagatacggctatctgaatttccccttgttgtccaattgccgtatcagggatgttgagtcaaaatcagaagtgcggtattgaatttgtagctcataaatgttcatgtgtatctgcattttagctttggttagttttgttgcaagggtaggagcatagtgattcatttcatgtgttttgtacttttgtttagaataaactgcatttatagtaatagtgttcagtcaagtcatctagttgatcctagtcaccatgggactgaccaggcgactagtcgctattagtcgtcgaagattggccctagtcgtcctatacatatcaagactaacatacaaatcaggcatgacggacggtagctctagggtggtggccggtgggtgcatgtagggttgcaagttgggctgaaaaacatgagtccaagtggcctaagcccatgtcctaagctgcccagcaattccattatgtttctggtcgatgaccagaaaattaattagcctaatcgagtcatagcccctaatcgagtccagaatactggctaggacgattaatcgcaattaaccagatgatttgataacactggtagtgttatctatttgcatatataatttggtgagtacaatgtacaattaccttgtgattctagtcacagacgtgattgtattaatctctgctgggaagtgcctcacgatgtatttctggctaaattaatcaagctatcttaaaacaagaaaatagtaac

SEQ ID NO: 161364 - DNA, 741 bp, Zea Mays
gactaagaaaggagggaagcttgattgtcccccatcttccatcctgatgcacaacacatcatcgagggtagcagtccatgccgaaaaccaaaatatgtgcaccgaagaagggccctagggagcccaccggatcaggtcctccactgacatggcatcggccaccccacagccggccttgtcgtacccctagataaggttcttgaagaccatggatggggcaccctgagagggcatcgtcagggcacggaggtcaaccctagagtgaaactaggcaatgaccagggcaataccagccccacggtggatgtcatggtccacaatgttctgaacgtggctcgaaatgttgaggaggcaatgtaggcgagttgctacacgcgaacagatgctctgggtcaccgaattgacctcccggtgcagctccgccaacttggcctcctgccctgctcagaagataaagagaaacataagtctcagcgcccccgaggggcagaaagggattgagaagtggggcaagtggcgtactcattgcctgggtgtcaacaatggccaatcgtgcctaaagacctgcaacacaagcattgaatgttcatactgtcaatcgagatgcctccatccgaccctgtagctcggccatcaccaacagcagaagggccgaggaccgacctctcaagacggcacatgagggcagggaggaggaagcaacgaccctcccgcacaagatgacacgatcggattgggggc

SEQ ID NO: 161365 - DNA, 320 bp, Zea Mays
aaaaactccaaacaagcttttcaagtggaggttcaatagggatttctgaaattcagatttctgaaattcagcccttgagccaaagaccgagcgtgttcaccttgatccctagctcaaatcctaatgaccccattgacaaaaatgtgcctaactaacccctctaccgcataccagaagatggcatcgggacgcgtgctctggacatgtcaaacctggaatcttctctctgtgtgcggcagtgagacaaacccgatttctcccctctctatctcttgatccattcagcaaaacctacaagcctccacacacaaacgacaaag

SEQ ID NO: 161366 - DNA, 534 bp, Zea Mays
caacacagtctcattaagcattgagatgtggagagagctcaaactacatgaaatgcatcctcatctgtatcagaagaagccacagtctatccaacggactcagatgtggtagcccctgtctcatgctgagttgtgactaactgtgggggtgtccaatgatgccactgaggatgatagagtctcacctgtgagtgtcaaaggagtagttgaaactagaggcacaaaagcagtcagaagtgcaactaactgaggcatagctctttaacctgactatgactctatgagtgatcactatcgtcgaagtgggtggtgcagcagtgtcacaagtgttacttatgatatcaaaagtgctaaagagagtagagcatgtgacactggttgcgacatgtcatggtgaagagaagacaaggggtatgcgtccgggtaggttacaagatcaatattgagtcagtcacctaatacgagtcgtgaccgagttggtcccaaaacatgtaagttgtattctatcattttacatgtttcttccttatctgc

SEQ ID NO: 161367 - DNA, 624 bp, Zea Mays
gaggatttcctggtttgataggaagtatagagggcatgtattagaagtggggggaactgtctcattggatggagaggataatttataagagtgaacattgggtcttggaccatcatgcttgaggcagttgcctcatatgacttgtggattagtatgcttctttgggtagcggggtaaaacaatgacgtcaatgtgttcaaccaatcatcatttttcactaacatgctcaagtgagaagcaccaaatgtgaacttcatagtgtggccacgtgtacaaccaagggtactaccttgttgatgatatctaccttcagtgactgctatttatgaagaccattaccctcccacatactccgaagcagcctatattttctgcaagctaggaggccgcacagaaggatatagtgagaatatttggagggtcattaaatcttgtttccacattatcactagcctaggtcgattcttttccctctatgtactcaatgtgatcatgcatgcatatatcattctgcacatcatgatcattaatgatcagtgtggaggatcttatgatgtggaggactacaagatagacaagtccttcattatagcatcaacaatcacctttaaagcattgatgggc

SEQ ID NO: 161368 - DNA, 620 bp, Zea Mays
gggctgtggtgaatgaactggggcagtgaggggtgggctgtgcgcgtaacagcgaggcgaagcagggagtgtcctcaatttaaagggatggatttcttgcttcgcgaatttgggacggaagtgcacacggtggtgacagaaaagatcttcgctggagcatgttcaccgtggcgcgtagtggagcaatggcttaaggtagtaactggcttcacgccacgactccacgctacgtggtaacaccctcagttacgtggcgtggccgcgaggaacatcaaactccggtgatggcgtcccggccgaccacgggagcaactggctgaagcggatgagctcgcgccagagaccacatccatccccctcccccgatattttcaccgtggacagctatccactcttatccaggcgcatatcttaacaccagcgtgaatcacggtgaggagattaccggcgtagagatcaccgacgtccagggtccctgaatcgggatgttatgcaggttactgttcattctgaatcccatccaaaaaccgcctgacagagcaagtttagcgtcctttttctccagatttcaggtgacaacaggtcccagtctctgtaccaaagatgtagtgctacatatc

SEQ ID NO: 161369 - DNA, 1192 bp, Zea Mays
gccaattgtaatatacctgtagggaatcaagtcttcggccctgcagagccacgagtcaataccggattggtctgccacgaatctatatgtcatgagtgactccaccacgttcatagaacgaccctgccaaggggtagagcgaggcggacgaagataaaggggtcggacgaactagacaaaacccactcgagtgagacttgcatgcccgttagaataaccacgtcgtcagccttccgtacgccgcattaattatgccagtcggtggacgcagcgcgaacagtgtcggtcctccatccactcgtgatctatggacctaggatggagtcccactcatgacctatacgggtcataggcatgagtctcactcatgacctggggtcctaggtctaagtcaccaacgccctatgacccttcatgacaagagggaaggccagcaaacaggctacaaaggcggaaggtcggcgtaggaaaagaagtggacaagatcagcaatgacgacgacaatgcccagactttcctcgccggcacaaatcaaatccactcccgacaatctcagagatacgacagaagacccacgcaggcaagggaatcgacacgcggtcagttttcaccaatagggcaacatagaagctcctttgagaagtatgacaccacatacagagacttgggatctctccctctcccgcctgcttgtaacccctactacgagcaatcagatgtcgatagcgcgagaaactaaagattggagtagggacattccgcgtgaaccagtataattcttgcgccgactgagcacaccatgcaggcctaagacgcacatacacaaatttactcgttggtgctagtttgaaacgctaacagttagcgcgccatgtaggtgctttgcacatttttgccatcttctccaccaggcgccagatggttgggagcgataattgtcgaaggcaaacgacgccgaatccatctcagacgcacgagcgatgccgaacagatacgttatcataaacctcgtgctcgttattttcctctatttatgaaactcctctcctctcgagggaatggggagaaacccatacctttgtccctctagtgacctcctatgatagagatcaccctcagggcaacgcaatcctaggatgctctctatgtagaagtaaggaggaaaagacatggactccacgcttaccttcac

SEQ ID NO: 161370 - DNA, 710 bp, Zea Mays
cctgagcaccggcgagtctagactggccggatcacgcaaagaccggcgctctccgtcgactggcacctaattcgagccttaaccgaagcttcccctaaactaatttcactaatggcgcactaaaacgccctgaccacggtgaccgtatggacaacggccaactgaacgtgttcccggcaatcctagggactctagcccaattgggttggtcaaggagtatcaggggcacacaagaatgttgaaacaagatagcagggagcatgaacggacctagaggtcgctgaccacggtgaggttaatccgagtggtgttcttgagtgagttgggggaaatgagaaattggagctctctagtgaacgattggaggtaagacttggtggcttggtgcgtgattaccctatggagctcgtagtgcgctcaagttatagaacccgtgagcggtggccggtgaattggacgacgacgcgcggcggctggagaaacaagaagttactaacgcgtgcgattggtgtcctattaccgtggcaagctccccggcgatgaacggagggttattgcgagtcacggcgatgtggtggatgtgccaaggcacatggcgcaaggccgtgaagcggctatctccgacgaactcatccgaatccgccgtggctagctcgggtacggtggtcggagtaatttagtggccggagcatatccacggtgcgatattt

SEQ ID NO: 161371 - DNA, 407 bp, Zea Mays
attctagacctgatccaatctaataggttaatctaacctaacaacgtctaaaccttaagttgagctaacctaaggtcagtcacttaaccagttaatagtggtaaaataaatgagactctacttctatagaacatgttttatcttagttcactctgcactaaataaagaacgacagaccaacccaacggattgcataatctataaaacctcacctgacatcaatccagtttgacctacatcatgtagtctatctcatccataactatcttaatcaaatttctccaaccccgatgatatatactaacctcgaatcaatgagactaagaccggaaaagaaaaagatcaaccccgtcaaggaaggagagaagttaaactcgatcttcggatacatcaccacccaacacgga

SEQ ID NO: 161372 - DNA, 779 bp, Zea Mays
cgaaaaccagggatggcgggttgattcccaacaatccgagggtttcttacgcaaaataaccatgcgaaggggtacgagatccactcaaccgtcagatctaaaaccgacggtcgagattagatcagcgggcgaaggcacgcgcgcgcaggcgagcgagcgctgacaggcgggccagcggtgtcagcgaccgagaaggggcggactgaccagttgggcccagggcacatgcgctgataggtaggtccggacgtagggcacgcgtgcgcgaagcagtatcccgtgatctgggtcgtgcgatagagatcggatgggggagatcaaagccagggaggtgttaacggctacagcggcgccacttctcgcggtggtgaggtcgccggagttggggcgggtgcgagctatggcggctccgaggtcgccggagctggccaaaaacgaaggggaaggcgcagcgaactcactgttagggttatggccacgagaccggggtcacaaatgggagaatggctgaaggaggactccgggcgggtcggggtaactccggtgagggattccggcttcggggagggggtctgaggcgcgctaaggcctggactaacttcagcagggcaagggtaacgccaagggccggtgcaggggcacttgactgggccaatttggtcggtcactgcgcgggtgcggcggaccaccacggccaacctccggcgaagctgaattgaccaacaacgaagcacaattgggaaacccgagcatgggaatgggtgtctcaccgcggggcg

SEQ ID NO: 161373 - DNA, 886 bp, Zea Mays
gtgggcagcaaatttctgttctatcgtcatctcccaatcaagatatccctcagcatcataatgacccgaaaaagatggtaattgttattaccttgctggcggtgttggtgtggcataccttctatgttttgatgaaggcggcgacgtaggcgcaaatctctggtggccgcttaatcataattaccttcttcatcaaacaccgcatcatcgggaagtcgtggacgaggaggtggtggtggtggtgcttgttgttgcgtctccaacacagcaagtctgtcgacgatctgggacaatcgtcgatccaacctctcgtaagtcttgccaaggttcatgtcaatgaaggcatcatgcactgacttgtggaccgtctcctccatttgctccttcaggagattgttttttgcctcaagatcttggcggctaacacattcatcgaagtctgtagggatccttgcttcttcttcgtcgcctaccatcaaaacacaaaaacaggaaacaaacggtgacggttatccctaataatttcactacacgctcctctcaggtataacacaggaacacactttaatgtatcttaccaagctcttacaagtgtttgacgaaatacaagcaaaggatggtacaatcggaggttggttcgtgatacttaccaagagatagtgaaaccgcgattgcaaggtcaaatctgtattgatcagaagatatagtatgtggagctataggacaagcacaatatgtatgtgaatgtgaaacaaaatcgagtgcagatgagcgaagttcaataaatatccaaagcacaagtcacaattgctggctaagagatgtatccgaggcatatcacaacaagttggaacaaagaacaatggaaatagcagaatggcagtac

SEQ ID NO: 161374 - DNA, 533 bp, Zea Mays
ctggaatccttcagccgttgcaaccacccgcgattgctgcgggtttagcagggacttccgggtatttatgcgtgaccaggccacatccttgtacatccagccgaggtcaccatcgccgggcgcatcgaggatcaggactggctgccaccgtcgtcgtaggcggatacggtcgccgccaagcggtcctcgcacccgcgccgccgattctgggttccggatggtcctagcgagtcactatgtcatcctgcacctattcgtgaccgccacgggtgaatcaatcaactgagctgctgttgatttctcgctgaagtggaggaagcaccgcgacaccgtacttcatcattggcaggactacgcagtactcgaaccactggtatgtttatgcccccgtcaggttcgtagattcccgtaccacgcgcacctcccttcgggttagtctagggcaccgggtcatggttgggtgagtcaccggcgcggttccgccgttttggctgggcgctgttgctcgggtcaccacgggagaagaatagatg

SEQ ID NO: 161375 - DNA, 694 bp, Zea Mays
gatctggtcaccacaaaaaatctggagcaaattgactccaaacatgctctgtcagatcgactgaaggagctgcgcgatggtacagtaactagatcagagcgctagctcagttaactcaccgctggtgaccgtgtgcccggattcgcgcccgccgcggtgattcgtgctcggtgcagttggataacgcggagggagtaagaaatatcacccagtggatgaactccggccactgttcactctggccgccatgtccgcttagctcacagccgcttcggatccaccctcgccggagttagccacctcgcaaccttgtgccacgtgccctggcattttaccacgtcgcagtagctcgtgttatgcatatccggttatcttgccacggtaattgccaccaatcgtgtgcgccagtgcacctccttctctctgaccgccaccgcgcgagttcaaaattcactggccaccgctcatgggctctataaattgagcacaccctcggctctgttaggtattcaagcatctaatacacccgctcgtgcctccaattactcaccagagcccctgaaccgctcagttcccccaaatctgttttccgccacagtgaacaagctctcaccgtggtcagtgcaattcaggtctggtcttgccctctgctctcttgtttcagcactcttacatgccactgatgctccacgac

SEQ ID NO: 161376 - DNA, 325 bp, Zea Mays
acagcctttgtctaggtctatgaatgacgagcgatacagtggatctggaagaaatgccgatgctataagatcggatctcctgaacaaaagagagatgcaatgagcgttgcaatgacccgattagagagatgtataaacggatacaaatcacacatttagctgaagaataagggttacaatcaaatccacttcaatcgacaaaaaatgcttcaaaaatcgacggcaaactcgatgtatttcaaattggattacctggaacttctcggaaagcattgactcttgaatcaggctccaatgctcggagattgaaggaggtcagctggat

SEQ ID NO: 161377 - DNA, 614 bp, Zea Mays
gtgtacgttttggccttgccaataagctctaatggagaggatgcagctgcaactgcaagggtccatcgcctcttcgctggtaagttcacatacactacacagccaggggagggggcagccgggcaggcaatggagcacgcacgcagcttccatttgtagcggcaggcagcttctttctggaggaagctccgtcgtaaatgcaatggagtattaattctcctgctcctgctgcatgccgctgctgcctcctctagtcttgacgcttcctttcccttccatgccctctctgcattgttcacctttgctagtacttccctctcatgtcgtcgcagtggcagctctgccgccggcacccacgcacgcacgcacgcacaattcaatgcgcaccactgtactcgctctctgtgcttcctgctaggagatcgacatcgactcgactactaggagtatctttaatgtcgttgctgctgctcccctttctcgatcggcttgctgatgatgtgcctttcttgctccccttccggcgatggcgtggtgatgacgacggtggcggtaatggaacagtgggcagacaagcagcagcaggcggccagcaccaacgccgcagcggcggc

SEQ ID NO: 161378 - DNA, 674 bp, Zea Mays
gccccgcccgcgccgtgcgccgctgtgcctgtgcgctagcaaaggcactggcgctcgcccgagccagtgggttaagctcgctgattagcacgtcattaaggaggagcggggagaggtggacgacgacgacgtcgacggcggccagagtgctccccttactcgcggggccgcgtctctgcggggcctgctgtcattgtgtaggtggcgggacgggtccgggcgtctggaggggcggcaggaggagcgcagcagggccactcgttttgctcccggagcgaagagaccagagcgcgcaacgtcgccttcaccaacttatctgagtttttaattcagctcggcccggctcgtctctccgggctccggccgctttcgtttctccggagaaaacggctcggaatcgcaccggtttttcggttgcaggaccagggatttgaggcagagcccagagctctgtggtgctagtgatatactcgctacaaaggcaaaggcaaaggcaggcaggagcaggacctggatctctccacctcattatggaccggcgatgtgttgtttgttgatcaatttgttccatttgcatggtatcgtatcgctcgctggaaataaaaacgatggaccgagttgtgcaagtggacgtactggcgctactgccagaggtccattccattacgcccgac

SEQ ID NO: 161379 - DNA, 552 bp, Zea Mays
aaaaattaaagtcataacatagattgaactcaagacctaatgactagaagactacataggttgctgcattggcaaattagttcgaaacatatttgcgcatatgtttccttcatgtatgtgttaaacaaagctaagtaaatatatatcttcccacaacataatatttagtcagatgcataagggcggtaggggatcacgagttcctgatctctggacgtccagcggccgacaactaccatccccttctccggtgtcggtgtccgacgactgccctctccttctttggtgccggtgcccgacggctgccctccccttcttcttcggtgctggcgtccgacggcgctgctgccctccccttcttcttcggtgcaggcatccgacggtgctgctaccctccccttcttctctggtgccggagtccaacggtagagtccccttcttctcttgtgcctccatccgacgccactgctgccccccttcttctctgatctcttttcccccattggctgagtgtgcagcaatatacctctcctgcatagcggcaaaaggggt

SEQ ID NO: 161380 - DNA, 1175 bp, Zea Mays
agatggtgaggtaagtggtcgcagatcgacgaagaagaaggctgaagtcagtggtgcctcggaggtaccacaggatccacgtcatagcgatgagatgaggctcccacggggcgtgcatatggaggcacatctgctggacagcataggcgatgttaggatgggtgaagacgaggtactgcagggccccagcaagacaacaatagctagttggattagccaccggagggccgtcgttggaggagaccttgccctgagtgtccaccggagtcgagcagggcttacaaccagccatgccagcatgctcaaggacatcgatggtgtactggggcttgcgctcgacggtgatccccaaaaagtggtatagctcacctagatccttcgtcgcgaacttgtcacacccggatttttaggtacagcttccgaaggtcccgcctcagcatgagcaaagctactggcagtaatcatctccgagatatcttcagttttactgccagaagcttcgacagaagaaggaggcggcattttcacaaattctagaacagcttccaagacactagccatcctcctcttccttggagttcctatggtagctggcagcttcggtagtgttgtcaccttcatcttcggttgctctggtactctttctgctaccttttctggctctggctctctggctgggtctgcaataatttcaacaggcacaacaggaacaatctctatggccagggggttgtttccaccatttcacttaacttcggcacatcggccgtctcgatgcgcttgggtctacgtgtcaaaaccttgattttctttgacctcgacacacccgtagataccgaggcagcgaccttccttttcctcccttgcttctgggcgagatagcagtagtctaggtaaacgaacccaatcacatcaaacactctattcaacctcttcttgccgcgagcgccgaaggcaactgtcatagcttcatcttctgcctttgagtacactctaagtatctcatcacttgttgcttctataacatccaaccaatcatcatttggcttatcaaactggtttctaaactgaaaagtatacttcaaataaactagtccacactggctggagccagcggcagtttcctttggcatttcccattcgctcgcaagaggccaagcaatatgctcttgaac

SEQ ID NO: 161381 - DNA, 272 bp, Zea Mays
cagaggtgtcctcgccggagtttgccgtcaatcatagccgcgccacgtgcttagaagaactaccacgtcgcagtagatattcgtatgaggtctgttcgtcgctggaggcattaccccggggaacgccacgatagttcacgccggtgactcacctctcccctcgaccgccggtctccccctttcaaaattcggcaccaccgcttagcgcccttataaattgacagcacggtctgctccgctatgttatcaccaagccagagcatccatccctg

SEQ ID NO: 161382 - DNA, 631 bp, Zea Mays
ggcgttcttttcctggccacaaggacatgctaaaatcactcggttcacggcgacaatgcaaacgctggaggcaggagattgtagaatgaggcagaccaagccaaaagactgcaattaaacaagtagtagtgtacgtactaagctggcatctccccgaaaacagcaacagcagcccatgccccgccctactgtcatagccacccattaaatgctgctcaatctcccaagaaccgcagataagaccaaaaacgggtggggtttaacgcagccccaaaccaagggtttaacgcgatcaatttgtactagtatactcgcactactacctcatccatccatcgtcttctctcctcgctggccaagctcaggcgtaagcgtactaaaactgaagtgaggaagacggagctggagagaaacggcagtcacgccctccatatgcttgttgggtgcggctgcggcacacacaagcaacgacagctgctgaaagcgagcgagcccgcggccaccactgccactcacgcacacacaccacctccgcacccggcacaccacatgcctcgccgaccatcgcgcactgctcctccttgctagctcttcccagtagcaagcgaccgcgcgcgcatgccgtgaccgt

SEQ ID NO: 161383 - DNA, 529 bp, Zea Mays
gcttgggcttataggcatctcaaagtgaacttgcctctcatcattggggagatcaccaattgaagcaaccagagcctcaacttcttagggagagggtcgcactctaagacccaagccactgccactagcaggaggattggacacaaaattgaaaaaagacttggaaggtggcagattccaggcagaatatgcaataggagcaccaatattcgatactttgcctctaagaatcatctccagtcggcttaccaaatccacatcaggaatcctcttgttggtaacccgggttgaatcagtgacaccgctatacaaataagtcgggtacgctccatcctttgatgctatccttgaggggatgtcaaggtattctgtcttcctcccacagtgcatctccaaactcgcaccacccacaagctggtgctgccccccggccatcctaggacgacaatgatataagtatttccacaaaccaaagtaagaaagaattccaaggtaggcttcgcacaaatgaacaaaaacagaaacttgc

SEQ ID NO: 161384 - DNA, 627 bp, Zea Mays
cccggacaccatcacggcctacgccttcgaggacaaccagctctggctgcgccatctgctgaacctcgcggtgcaggccatgggggcagcctatgtcctgtaccagtctgtggctacccaaacccaccagagggccttggtcaccgcctccatgctgatgttcgtcaccggccttgtcaagtacggggagaggacatgggcgctgaagcgtgctaacatcgacagcatccgaggcggtctcgatctgcaggacgacagagaccgtcgccagccgtacgatgggagggctggaacggcggagctggagctggactcggaggaggttctgctgggcgctcactacgtgttcaacgcctgcaagagcttcttcaccgacgacctgatcacgtcgggagcagagcgcgaagctatcagcaggggcatacagttcaatggcggcaggtacacgcacgagctgatcgagatgcagctgtccctgatgtacgacatcatgtacaccaaggcggcggtcatctacacgtggtatggcatatgcatccgtctaatgtcaccggcggccacctgggcgtcgttcttcttgttccgactgagcagcagccgcggccatggtggacctggtggttacag

SEQ ID NO: 161385 - DNA, 455 bp, Zea Mays
tgagtatgatggattcaatagcgtgactctaggtcactcaaaggaatgggttagggttgcaaaacaattcgtggatatcgcattttccggtggacctcgtgtggtgaagtgtccgtgtaccaagtgtcggaattttaagtatgtgagaaaggccgaaaaactggagcatcacctttgcaagaatggtttatgcctaactatcttgtgtggcgctcacatggagaagtagagcaaaatatcacagagtcagaaagaattgatgatgatgaggatgatcagatggatgacttggtggctgatattagtagagagtatccaacattggcctcagaacaggctacaccagaggaagtgcaggagttctataagcttcttcacgcgttagaggaaaagtgcatgacgacaccactgtgaccgtgttgcaggtggttacacgtcttatggcaatgaaggca

SEQ ID NO: 161386 - DNA, 678 bp, Zea Mays
ccggagcgtcgcccaagacgccctcgggcgaatcaaaaatgcgcttctcgcccgaggccggcctcgtgcgaatcggaatgtgtttcctgccagagattgacctcacgcgagttgcaacttggtctcccgcccaaggttggcctcaagcgagccgtgactgtgtctcccatccgaagttggcttcaggcgtaactgtggctctcacctagggttggcctcgagcgagtcgcaacttgggtacctcagaccttggtacaatcaggagcgtgtttgcttatgaccccttcttactcaagcgtttagggattttagggttgtggtctaggtatccctaattatggttcctgacactaggcaagcaataaataaagtgagaaagtttaattgagatggaaatgcatactccagtcaacgactttaatattttactaaggtatcaagaagctcatgagtccccctagtccttgttgaagtctctcgcatgggccaagttctcagtcatgtaaatccacggatagcatctgggccttttccactcataagtggatgtcccatatggcctcttctggaccgacccctgccatcttcaatatcaacctcccgggcaacccgtcatgggtcatgttccctccactatatggtggcagccaccccttactacaagtccctctgagttat

SEQ ID NO: 161387 - DNA, 392 bp, Zea Mays
gttccttctccagctttgtctgctctcgttggtctgcaagaattgtctctggcaaactttgatcagactctcgaagacatggtcctagaagatctgttgtcagagccggcagatggtggaatgatggaagtttgcgctgatgtgcctgatgccggttagagttatcccgagcaacatcttgtgcctcgtcgaccttggggcgcggtcttaagagtcaagaggccgatctagattgctccgttctcatggaagttgttggaggtccttcagccttagaggtggctgccacagagagctcggtcctcaaggatggtgctagcgtttgcccagcccccgagggtgttgctggagatgatccagctcggatgggtagcgcgagtgaaaggatcacg

SEQ ID NO: 161388 - DNA, 680 bp, Zea Mays
ggggaaacgagtaccaggggcactcgactgatttgtagaagtaggggcagtattgggacgaatgaaaacaggctgcttgaatggataggaggatgggcgaggcgaagaacgattctgattaaaaggtcggatcaccaacctggttcgcttctcaagtccctgattacacctgtcacctccaaatccctttgttttcccatggcctatattcttggcttctactgccagcgtcgtgctgacagctctgatgtaagtaaggtccaggcaagtggccattttcctcagaagcctgtcattgagtcccctcatgaaacaattctttttcttcagatcagtatttacttggtcgatggcatactgaaatagatgattgaatttgttgagatactgcattacagtatctccccttgctttaaccggataaattcttcttgcttcatatggagcactccttctagaacatagtgctcacggaaggctggcttgaattcctcccaagtgatcttgtgcccagttggttgaattgctataaaattttcccaccatgtactggcaggtcctcttagttgttgggcagcaaataatggcttctgtgtctctgtgcagtggatcaacctgaatttttgttccatgactcttacccactcatccgcttctaaaggttcttcagctttaataaa

SEQ ID NO: 161389 - DNA, 549 bp, Zea Mays
tccgttagcagggcatagtggtcaccccgagttaagtaagtgcgagcatgttgcaccaccttaagccattgccgacttaagtcgatcgctccgttagcagggcatagtggtcaccccgagtttaagtaagcgcgagcatgttgcatcgccttaagccattgccgacttaagctgattgctccgttagcagggcatagtggtcaccccgagttaagtaagtgcgagcatgttgcaccgtcttaagtcgttgccgacttaagccgattgctccgttagcagggcatagtggtcaccccgagtttagtaagcgcgagcatgttgcaccgccttaagctattgccgacttaagccgattgctccgttagcagggcatagtggtcaccccgagtttaagtaagcgcgagcatgttgcaccgcctcaagtcattgccgacttaagccgattgctccgttagcagggcataatggtcaccccgagtttagtaagcgcgagcatgttgcaccgccttaagtcgttgccgacttaagccgattgctccgttaggtagg

SEQ ID NO: 161390 - DNA, 1261 bp, Zea Mays
gtcttacgccatatggaaataatgatgaactagttagaggcgtattaccggtgggtgtggcagacgtacgtgatggccacagtgaacgatggcccagcgacggtgggatgtctccgacaagcaattctgtgcgcgcaagacgaccccgggatcaggcgagacacagcgagcttctacggtcccccgacaatgacccctgggcgtcaaccgaggctaagtcgatggcaaggtgaagatggctagctcacggcgactcgcactctctctcctctctgggcttacggcgtttgacgtcgaactctcgaccgcggcggccccgcacttggctaggcaaatgagatcgtgttttttgatgaaccggggacaaaacgtggtgctatatatagccttgggtggaggcgggctgacgtacgcagtgatcggcttgcacggatcgtaacagactcagccaataatccggggaaggagaaggttctagccccatggggtccatctgccgcaacccccacgcacgcagagaccaaagtctgagggcggaacaaacgaccggggtcaaggagagcccgaacagatcctgcgttccagccttccaggttgagcttatccagaggtggaagatgatcccggtatagcggacccacgcataaggctggctccaacaggccagctatcagaccaggcaaagctagtttagctgtccaactggtactgtagcgcctccaataaggcagctatcctggctaggcaaaatacatgggaggagagagaagagccaaattggctggcattgacacgccaggcatttccctctgacaaccgtcagttgggaccctgtgagagaatcgacgagcaggatgcttcggtgatttggcgcaaaagcaaatgggccagcagtcacagctaatttggcttccttgttgcaaactagacgcctatcgctgtccatgtaaaatgcagagggcaggtaaacagaaaaatggctgagcaatatggctatctgttgttggagccagcctaagcgacataaggaaatatttcgatgacatgctgtggtagtgacatcatcccggccgaaggaatagaaaaggataaaaaaacaaaagggaagttgggcttgcacccatgttagttttggagagcaatggggcaagcgaccatgggctcacggtaatggtggagcttctccatttattttattttcagttttctttctattttcttctttcagttttaaattttaaattcacgctttgcagtcaag

SEQ ID NO: 161391 - DNA, 385 bp, Zea Mays
tgagccttatcagtggtgtgcatagggtgaaaatgtgccactttcgtcagtcagtccacaataacccaaatcgaatcatgatgacgagaggtgttgggcagacccacgatgaaatccatgctgatgtcatcccatttccacgaaggtatagataggggctgcaaagctccagctaatttcaagtggttggcctttatcctctgacaggtgtcacattctgatacatactgggctatctccctcttcattctagtccaccaatacaagggcttcagatcatggtacattttggtgcttcctggatgcatagagaatttggagagatgggcctcatccaagattttcttcttgagatccttgttcttaggaaccaccaatctgcttt

SEQ ID NO: 161392 - DNA, 945 bp, Zea Mays
ttccgaactccctttctaaagtgtccccaaattccttgagaaggtcatcaaggctagctagggacatatcctcgacgtcggacaagttctctatcctggagggaggtagtgctggaggggcttccttcttccgttcagtctggcatccttggctcttggtcctcttccagattttctttgtggggcgagcttctttagcttcttatcataatccatcttcagggttcggtaggcttcacgagtgttggcctcttcaccttctgctatttcgagactttcttggagggacgtcttgtcctttttaagttccttgacctgtttctctaagctttccacccgggagtttaggtgggtgctatgggaggaaaggtcgtcatagtggttattgagggtgtggagatatccggccatgtagacgatggtggggtcatcctcagtaggatctcttcctgatagggcctgaagtcttttcctccaggcaggggtatttttgttgctaagtgggaagtaacgaagggggtttcaaagacctccctgctgtagttttggcatagccatcagagagctttttgggcaacattttggcaagtgtctgggaagcggtgtccggtgaaggtgacttggaaaggagggtggttcgggtagcttcggctttctcccaggtagactgccatagagcacttctcagttccattctcgtggtattccttccagacgtacttcggcttcttgcggatccccatgcgaagcgcacaactccgcaagagatgagggaatccttccacctctgagcagtaggatgtcctaatgaccaaagagccttccatatggtagaggaaaagaagggtctgttaatatcgggggaaaggagagaagatttttcttagagataagaggtcttttctttttaaggcaaacttttaaggtcggggctgcgatctacgg

SEQ ID NO: 161393 - DNA, 312 bp, Zea Mays
agcagctatactgtgcccgacggcgcccagcagcaaggaaaaatcggacacatcaacgcgggtgccgtggacgtacggtaatgcccgccgagaggccctaccgctagctcaagggttcatacctcgagttcaaacgagtcagcgattcatcgatgcaatcgccccggtcacgacgctatcttgccgcagagttccgagcgcgtatcaacgacctcgctcagtcccccggcgactagcttcttctccctgcgtgtacacggatgcaatggaccttccaagccgatactcgaggctggatcgacgacgtaggca

SEQ ID NO: 161394 - DNA, 371 bp, Zea Mays
gtggcatcagagatggcattgagtagggcactcggagaggtctgcaaattatacactcgagtggtatactcactagacatgttcaatgaggcatcgaataaagcaccaattactagtacgataacgtcttgcttttaaaacttaatgttagagttgtatcagatgtacgctgcagagagttggtgtgcactagatatgtctaatgcacctgtgaaagttgagtggcttgctaatgactagtttcttagcttgaggctatttatgtccctccaattcattcattcaaagtactcatcggagagtaaactccagcctggtggtgaaatgctcccgcctaatcctaagaataggggctgcctagggattgcgtg

SEQ ID NO: 161395 - DNA, 442 bp, Zea Mays
gttagggtctccttctgtcgaatgtcctcgaaacaaactaactgttttaattcatttaacaagcgtactgcaggtctaaatgccgaaggtaaaatatcgaaccgagggacgcaaggtatacgacaaagtttcagcaatcattatgatcgtagcttcggctcaagttaattccgaaggtctcgcagcaagccaattcaatagtagaaggacaactttatcctcagaccttagtgtttgcattagagtgaatgtatagagattaggggcacaattgtaatttcatctgagttgtgtgctaggtctataaatagatgaagagtgtcccatgctgttcacgggctggaaaaaggggtcaccagagtgagcataaggagcaatctcttttatgcagaaacgaagatacaaatacagttttctattatattgctcaaaatgtgatcgt

SEQ ID NO: 161396 - DNA, 1197 bp, Zea Mays
gtaagatcgaggggctggaggctgactcataatgagtcagtcttaattttgtaatgactctcctactggtgaatgaaaacccgcttttgtgccaatctactgttgcacgctccgctcctgtctgacgattcactagcattttagaggtaatgcctgagtgatgttgttttactgcaaccaaaactctcccgagctatcggcctgcccctttgtgcccgacttagtaagccaacccatacttctgctaacgtcctcttgagttcttgttttttcctccgtcgctctctagctttctgagttcccgaatccgtttgcgtcgtttgaaaaattgcgatggcacctaggaaaataaaatagagtgctactatcccagacatccctccgatcgatcccagtagccaactccctttcgttattaaccatgtttttgtcgtttctgaggctgaccttctgcatcttgttgagattggtgttctaccgtcgaaggaactatgttcctggcagatcttgcgtggacttactgtcccgatagaggatactcatgaggcaattatctttgtgccttttctcatctggggactggccctaccagtttctcccttctttcgcggtcttctcgatttttactctctgaacctcaataatctgaatcccaattttgtgcttcaaattactgtgtttgttcatctttgcgaagctttccttggaatccttccacacattgggctttggaaatatctttaccattgtcggcccgaaatggctggagggcagcatcagtttgttggaggtgttagcttggaacttcgccgaggtaggaaagctgagtatctcgacattcctttgaaagacagcattaacagatggcactttggtaagttggtccagcgtttgccccagtgttcggctaagcatgtttggatagctctttggtaagttgctctagcgtttttgaggccgaacgacatggaggtataatagaaagctccaaacggcgtgatgaatgcagtcttttcctcgtcttcctttgccagagtgatctaatgatatccggagtattaatcttggaaggagagcatagaatagctagcagtcgaatcaactacctgatctatcctagggagtctaaaggggtccttcggatagtgcttattgagatcggtatagtcgacgcacatgcgccaatcaactttattc

SEQ ID NO: 161397 - DNA, 620 bp, Zea Mays
cggtggctgccatatgccggaccgaggcgacgaacatggagcactatgtgggatcgtttcccaggcttagcacgcgatgtttttggacagacagggaaatagaaaaatatatgcgtcttcttcttcctctcgcttctgggaatgatgcctttcaggcttccatggagaggaggtcgcgcgactgtgatggcgatgacattgtacttcacccatcttcccacgctcgaaaagataacagtctctttcgttccgtgacttccaatcgtgttccatagcactctcaaagcacgccaccttgaatctcatcctctcaatcatcggcactaattcccaccaagatacatgccatcaagagcctcctctccctcctccctccacccctccccgtcaaacgccgccgcgccacaaagagcacccccacctctcgatcgactgcttcctcaaacgctgttgcgtttctcgcgcggaatgccccatctagtagtctgcccacgacccagctcctgaccttggcgtgcccgaaactgcagcttcgcgaccagctctcgaacgtcgcgcacctatagcggggaccggtcggtggcatacgacagaacgccaggtcttgacgagcagcacac

SEQ ID NO: 161398 - DNA, 1258 bp, Zea Mays
tgaaaaaattaatattttgcgcatttaatgtgatgctgcgtattttcattggttaaaacttaccacacggatggccacgggtttgaagacacagaaaaaccgaccggatctagtgtggccatacacggaacggcattgcacatggccaaccaggcattaatacgtggctgtcagttttctttcccacacacattacgtgcaatgaggatatcgtataggaaggaacatgcaggggcctacgactgttctcctttccatgctgcgatcgtgtgtgcagtgagaagatcgcgccgcggcgctaggcaacgaatgagcatgcaggtggggccacacggggtggtttcctttttttcctattccatactgcacgaacggccatagtaggaaaacagattggcctgccggagcgggtgcgatgccgacgtggcatgcactatggcgggtggggctgacgacggtggtgtctactcgccggagtcggggctgagcggtgcgcagcagcaccatacaagggtgtgtcgtggcagggaaggctcggctagacatcggcctggccagggatcacgcagggtggctgcacgagctcagctgggggcgaggcgggctagctgcgtgggcaacgccaagccgcaccggtgaggggctaggccagctacgtcgctaggtgagtagggagtttggtgcgagctccttggccaccatgatgtttgcgtagtgacgaggaagaaggaggcaaagaagagggagaaggagaggatttgtcacctacacatgaagaacagccgagcaggcacgcaatgaagaggaagacgacgcgaggaagacgatggggctgctcctctgacgacgcgaggaagacgacgaggcggccccttagaccacgaaggcacaatgcatagagaggaaaatgcgtgggctgctcatgtgtgagaaggaagagggaaggggttcatggcaggcgtgtacgattgtatagaaaggagagggcgtgagaggtggttgtcaatttcacggcggctcttgtcctggccgagcgagagagacagctgcgcggcgagttgcacgagacagggttagacagagttagatgggtggtagacatggttagaaaaaattagacgaagacggtcagatccggcccgtgggcccaagatgacgaggtggacgccgaagggaaagacgaggatataggaggatcgccgacacaagcagcatgtcgttcgcgagaagacgcggttcagtaatctcgcgaaaaggg

SEQ ID NO: 161399 - DNA, 697 bp, Zea Mays
tattacttttataaaatttgagtattacacacacccaaatcgtcggcaagtgtgtcggcctccgcgtcgtcgtccagctcgatgaagaataccccgcgggcattgcacttgtggtcagcagtgtacttttcggcgcagtggtagcactcgccgttggcgcgcttggctgccatctcctcagcagtcaggcgcttgaagcgcggtctggtgaccatcgtcggccgctgttgggctggcgatgcgccagtcttggttgttggtgcgcgatacataccccgcaacgccttggtggcctccgtgtcgcgccgcttgtaggcccgggccaggttcatggctgtttgtagatgggatggggcctgcagctccacgtccgtgcgtaaaggctcgcacagacctgctgtgaataaattaccttggtgctgcatagatagatcagcacaatgacataatgccaaggaaaattgatgtatgtagtcatccactgtgctcgtgcgacacagatccttcagctcagcgagaccgtttgtcctcaacggcggtccgaaccgcatgttgacgaaatcggcgaagcgaggccagtgaggatgccataatcccgctccaaagcgtagtaccactctgcagcaatgccttcgaggtgcatcattgccatccaaaccttcttctcctccatggtacgcatgccacgaaaataggc

SEQ ID NO: 161400 - DNA, 405 bp, Zea Mays
cacagcgctcccacccttcggccgctctcgcgtcgggcagggctcgggagtcgggactcctcgcacgcattggagacttggaggccgtcgggactccatatcggcattgacgtcctccgccacgattgtcctgttcacgattgtgtccctttatcccaccggtgcaatcgcgggtggttttgtgtttagggtttaacagtaacactccagtgcggattgcctccaaggtgggatcttggcttttcatcccgttcgctctagttctttgcactttttttgtttgcatcttcttttaaagattctgatagcggtaatgcttatacttaatgaagattcgaatcatttgcattatatataacttttatctgttgcgctttgaaattaggttttttcgcttcccttttt

SEQ ID NO: 161401 - DNA, 708 bp, Zea Mays
ggcgtctcgacagttcgcctccgagcggtcccaactcgagcgggaccgcaaggagtacaagagagacctctagaaggtgtgcgccagggagctagaggtggtccggagggaaaagaaggtgacccgtagggaggaggccgtgacccagagggaggccctcacaacagagtaccaggctaagctgagcgctctggaccagactctggaagcctagcaggcccagcaggtcaaggccgtggagagggtgcaaaagtggcagcaagagctcgagggcaaggccagcgacgccgccctcgccgaggagaaccttaaggcgaaggagcagtccttggataggcgggagacggaccttgccaggcgagaggcggatctcacctttagggaagaaatgctcacccggcgaggcgagttgctggccgagcatgagctcgaagccgaggagaaggagaggaagctggaggagcagatttgccagttcaatgcagcgcaggcggtgtcgggtacctaggcgatggaggccaccagaaaggcccttgaagatctctaggcagagcaccgcgtcggggtccagcgcattgacgagtgggccgacaaggcaagcacggcactggtgccactagggatgagccctagcccagtgtcggagctggcagcgtcaatctccgatgcctcccgatgctggactatgtcgccgatcgcctctggcgc

SEQ ID NO: 161402 - DNA, 442 bp, Zea Mays
cggcgtccactgctctccggcgacctcgaccagtgctcctcggtgagcagcctcctttcttcctctgtcttctctctctctctgttctctaggctgtgcactcccccatttccaccctttgtgtaaaattccaaatcctgtgaatcccagtgaatccatgttgtgcaatgtgttcctttgtggccattgagtgtccttgcaggttcctagctccttcgggagggttttcccaccccaaataggccatttccccgaaaacctaattcaccgcacgtcacgtgttcgatgaaatgcccaaaccagccaaaaatgctccaattgaacccaaatttttcaggcaccttcacaacacttccagtaacatatttgccaactttcacgccaatccgagattccaggctttattttcaccaaattccccgtttcgagcgatcgtttccga

SEQ ID NO: 161403 - DNA, 3815 bp, Zea Mays
tgtcgtttcacctcatacgcaagggttcactatacgtaagcgaatcgcacggatgatcatggcctcgtgttcttgctgttctacccacgtgattcgtgacgggattctcgatcggatacaatcacgggtaggcgtgttgcgtagtaccatacatgctttacaatttttctttggctcaagtacctaatcgagagattcgattaagaaatagtagcagagaaaacatgccacactgctctagacacttgtgttttgctacggcttcagggaggcgatgagggtaacaaacaacaatgggcattggttaagaataaggtagaacttacctggtggaaatatcattccaatattgtttagaaagccaatccaagtttttccagggaagaggacctacatgatgccatctctttaatactaataatgtccagtccaagtcacgagtcattgcaacatcaactctgggaggaattaaatatttgattgaacattggagactgattgccttggaccttagcttgctaagcatgttagcaggaatctaccaagtgcagcaacttggtagtcattttgttttcagtaggtaggcagataggtcatgcaagtgactttaacaaagttttttttttgttggttaccatccctttctgcttatttgtagccgttgaaaacttgaatctttttctgctgtctggctaggacatcttttagtttcaggtacagcccagtattctgaaagagaaatcagttgaccatccattgccgcccttgtatcgtgatgtgctgcttcggtaaccaaacctgatttttcttgttgttccatgtgctaggatgaaaacgaactattcgccacagttgccagttgattttacttacatctaaacaggcacaatttgctctttacctagccaaaataccagttgtattctgctgctgctttgccactctaacattttggacttgatgctggaatctttaccattattccattagcatcttcatactgcattacgtcattggtggggccatgctgtaatcttaattttctaccccttagaaaatttgtgccgacaggggaaaaagccgatgtaatcatttgcgttttgataaactaaccactgaagtcgcaacatagaaaatagcatagcctttaacatgtgtcaatctagacttgccttttgtttacttagagtaagaagactagcttcttgaccaagaaccatgtttttattttcaaaagatacaggcaccgtgctcagcctgacaggctgtctgcatgatttcaactagttaatctatagcgtgtatctttttcatataaactgaaaggagactgtccaggtatcggtatggtcattttttctcattttttcagttcttcatcgtgtaatttatgctgtattaggaagtgtatattggtaatcaaaggtgatatactttaaggaaccttcagccttgctggtgataaggagatcacactgagctgatgctcagaatatacgagacagcagtttggtatgctactgttgtcttctgacttctgctatcgctagagctgcttctcacaactgaaggcatttgattggaacaattcctaatgatctttgtacattactctcgctaagttaataagttgtgtcacgttgatgaacattctgacaggtttagctcatatgctcaaattcttctctcacttgtttcaacttcttatttcattctctgtgatgatcatcagatcctccaattatgactagtagtctaggagcaaaatgaatttgttataaacatttgtgaatggccaagcccatcaatatctcctgaaattttatatactcggattttaaatgctttctttccttttccagttgcattgcttgctagctatgattaggatgatactgaggtgttccacctgctggccttaactcatctgatatcattgacagaagacatatgccgtgagcatgataagctactaagtgccgaggccatggttggctaatggaccataaagtcgtctctatcagtttcagggaattcattagagccctccatgatgaaacctggggcatatggtacttaaatgcagtaaggttttaaatagccggttatagtgaccaagatatatcctttttttagtagcaaaaagttatgctatttagcccgacatatcccgctatacccagatatatcccgatattattacttttaagaagcatggggataaatctcttatcccgctatttaaaacactaaaatgcactaaagcatatatatatatatatatatatggcaccatatcagttacttcgtctttctggcataacctgcacgctgttacgcttctatatatttggttttgaaggtagttgtgttctgtaattgtctctatttgtcaatttcattttagaagtaattacttttcttttttattttctattgttgttaaattgtgctctgaaatcttttttatgttaaacatgaggagaatgctaaattgccaaatgaattcataatgcagacttaatctcttgtgatgtgcaagttccaccatgttagcttgtccttctgtaccaaaaacatttttgactaatgctttatttattttgtttagggtgaacaatgtatttgagggaaaaaatggaaccgttaattctgaaggttctctgcaacacatcattagtatttgaaactgaaattttgaatgagttagtggaaaaactgtgtgtcactagttagatgcccatgtattgctacggtttctttaaatgggatagttattcaaacacattttaaacctttacaataagcattcggaaatcttgagcggcttgtggggatagtggtggcggggtcctactcatgttgtcacgacttcaggcctcacaggcgaggcgagcagtggcgccacgatggatgcctgcgtcgatacctctcccctcctcaatcaaacaactataatctcgaatcgaataaataatcatagtcagagctagcaagcaatgcaattgacatctggtatctgatatctcaattgatgacctaacagttctaatgcgctgacacctagtagtcccatctgcacatgccatcgtcttgattgtgtcgctgtcttgattgtgtcgctgcctacctatgttggcacatcattgttgtatggatatacatgtctaaaatgggccaggtttgctaggcggcccatggcctggcacagtttaacctggcttgagcatgatccggcccgttgtccactgggcccatgctagtctggcttgatcaccgtgtcgtgcatgggccttaggtgcagcacgacgggctagacccggtacagatcggttttttttccctatttttcataaaaaatatccttattatgcttgattatagaatataaaacaaaaaatatgtgtgtaaaggtggagtgaacaaccaggttcaatttaaatccctacttatatacaattttaccttatttgtagaaagcaggaatggggaagaggagaggtgatgcacaaactgagaaactcctgcattataggagtagatattatgctccacccccaagctgctgccactgccattctctggaatcaatcatattccttgccaggttgaactccaggacaaaaggttcagattaatgggaagatgcagcttggagccaataataagcctgtggggccgatattgttttctttaagttcctctttgcaacaactctccactctttaaaacaagcagcattgttggattgtcttcattcaattccactgtattagcaacatctagtaattattaatatgatgagagaaaatgac

SEQ ID NO: 161404 - DNA, 632 bp, Zea Mays
gagaagcaatatccgaaggcttgatgggatacagcccggactcacaccgtccttcaaggagtagctgacgtgtttctcgatccttaataagataataccaaggatgaaattcaaagaaaacgttattatcacgagttagtttatgaacagataacaaatgtttagaaatttgtggcacatgaagaacattattgagtgcaagagggcgactatcggtattaagagaagaataaccagtgtgcaagatttgcaaaccttgtccgttgctgacttgcaccgtgtcaccaccattataattctcacgcatggtgagacgatccaaatcactggtaatatggtccgtagcaccagtatcattataccatctcggatcaagttgataggagcttgtcgccgctactgctgcagagggtggttcttcattgtatgcgtcatccatccggtaccagcaccgaatggcgctatggccttctttgtcgcagatctgacagcgaacgcgaggacgagtagaaggaacacctcggccagaagaaggaggggcacgaccgcgcccacggccacggccagtgccacggccccggcgaccaaaagggccaccacggccggcgacatgagcagatgcgccgacttga

SEQ ID NO: 161405 - DNA, 882 bp, Zea Mays
gccgaccacgtgcatcgacatcaggccacccgtagctaagcccttgatcctgtccaatacaggcaggaactctggcgaaagggacggcttggacctccactgcttgcagtcgagcgctggtccatcgctcggcaggacgaggcggtcgttggcctcgacgctggcaatcacctagtcgctgcgccattttcccacctcgcgccgccaaaggtggggatatagacgacggctggatctggccttgtctagaagtagtaggcaccaatgtggtccctagtcttcccgaacttgaccagcacgaagaagtaacggaagagggaagtgcagggggccacacctacgaacatctcgcaaaggtggacgaagatggctgcctggaggacggagtggggtgtgaggtgctgaagctaaagcatgaactcctccagcagcagcagaaataagggcgaaattggcagcgccaacctgcaggagatgtaggaagtgaacagaacgaactcctcggcggcgagatcgccgagggggcagcgctgacacggattcttccagcgagccccgacgcgctccactcaagcaggctgcgcaccaggttaagcgcttcctcagattgaaaacggtcaggatgaccaagagaagccatggcgagtgcggcgggcgggcgtggagcagggaagcatgaaggcaaaggggcatagcgattgggagagaatgcgaaaaggtaactgctgcacgcggggtgaaccttttttcaaggaaacctgaatccttgttcagggaaacccctccgagcatccttgaatcgccaccggaaatctcgttcgacgggcaccaaggaccaaggtaacccagtccgtgtcacgggggcccaggtccacaagtcat

SEQ ID NO: 161406 - DNA, 319 bp, Zea Mays
gagagcttctgggatgtagctaggggtaaaacttcctgaggtgttctatattccatgagttcccaatttccgtgccgtccatctgagtgaggcgatatgatcccgaccgagtgacttctgctactaggaatggtccttcccatagaggtgataatttatgccgcccctcccccgttagaattcggcggaggacgagatctcccactgcgaaggatcgatgccgtatggccttgtcatggtagcgcctcagagtttgctgatatcgtgctgattggatcaccgtattcagtcgctcttcttcgagtacatcaacgtcttc

SEQ ID NO: 161407 - DNA, 732 bp, Zea Mays
gtgtgacagtatcaatcggagctctagggtttgctcgtcggatttggcctccgcggccgtgccgcctcatgccgggtcgtatgcaacaggcgaaccctggggctctccgtggagaaggtgccaggcacgccaggtaaaacgccgtactgagtttgcagtccgggatatagtgcgttctctgatccgatggtggggaaacagagagcgatgactgtcgccgctggtgcggagctctgctgcgctcagctatcagcggtggaagacgaccgatggaccgttagatcttggtgcacggctctgatcgagtctagacgtaagttgacgggccgttgatcccatagcaaacgactaggattagatctagacgaaataaatcctgagcgacggattagatatgggtggccacgatttgatttggcgtaccctttcgtctcaatgaatcgtggtcgtgtgtcgtggatcggatggatccagggggatctcgacttctttaaatccctacccttgattttagatccaagggttcctgctgcgtaccgattcgggagcgtaagattctaatccgagccatgtgttgccgatcggacgactcagatctattgataccccttcaccgagcaagacttgcaaaagagaccttatacttttaccaaatatacccgccatccctccattataggaagacttaacagttaggcccataactttatgcagagccccctaggctttgtt

SEQ ID NO: 161408 - DNA, 775 bp, Zea Mays
tccaaaattttgaggtgaactgtgttcccctatctgacactatcttccgtggaataccatggagtctgactatctctttaagatatatccgggcaagggtggctcctccgaaggtagttttcactgggatgaagtgggctaccttggtaagacggtctattatcacccagatagagtcattccctttttgtgtccagggcagtccggttacaaaatccatgcctgtttcctcccacttccattcgggcactagaaggggttgcaataagcctgcaagcttctgatgctcggccttagttcgttggcaagtgtcgcaccgggccacatactgtgctatctctttcttcattcctctccaccaatatctggttttgaggtctaggtacatcttggtggtccctaggtggatagagtaggctgagttgtgagcttcgtcaagcaggacttctcgtgcctccccttttggtacacacaatttttgaactaaaggactccttcctcatttgtcctaaagtccggaagtggttccttgcgagccttttccataagacctgctgtctcagtgtccaggcgttgagccttgcatatgaggtcttctagcattggcttgacttctaggctgccattgtctcccaaacatgcattcagctgagctaattctttcttccaatcttctaagaagttggttcctttcttcccgaaaggttttcggctgagggcgtctgctaccacgttggccttcccgaggtggtagtggatctcaaggtcataatct

SEQ ID NO: 161409 - DNA, 357 bp, Zea Mays
accaccctgagtttttaggcaagttggagagatggcctatcaactcgagctacctgataatctaactgatgtgcataatgtattccatgtgtctcaacttaagaagtgtctccgtgtccttgagaaacagttaccaatggaagagcttagtgttcagggtgatttgacttacacggagtatacgatcgagattcttgatactttgactagagttacaagaaataaggtgataaagatgtgcaaggtgcaatagagtcaccatggagaggatgaagcaacttgggaaagagaagaagaacttcgcatagatgtttccatctttttcctaaaccttcttaaatctcgaggacgagattc

SEQ ID NO: 161410 - DNA, 308 bp, Zea Mays
cccagctggcagtgacggaggagacattatggtttaatgtgacatcagttatacttttttaaaaactcttataccttctactatataaccacgaaataagacacagtgagtagacccagctggcaggctctgaaacgcacgtccgaaagagaccccttcgtgttcgtctcgcaaaacggcagcaataatcattcaacggcgttctagaacgaacggcgtttatttttcgacctctacctccccgccccccaatataatcgctgtcagacaataaaatccaggcacccctgtccctgtccatcgctcta

SEQ ID NO: 161411 - DNA, 382 bp, Zea Mays
aatcaaggaatctgggaatgtgtgggcttcaatcactgatcttgaaccaaagttacttgctcatcagagaaaagccttcgaatttatatggaaaaacttggcaggatcattacagcttgaagaaatggatggttcaacaagtagaggtggttgtgtggttgcacatactccaggagcgggtaaaactcttctgctgatttcgtttcttgtcagttacttgaaagttcacccaagaagccggccattggtccttactccaaaagctgcaatccatacctggaggacagagtttcagaaatggggcatcctgcttccgttacatgtgcttcaccactctaacagaacaagcaaactgatggggggtcttagttcgaaactgcag

SEQ ID NO: 161412 - DNA, 477 bp, Zea Mays
ccaaagcaaccttctcgcgtacgaagtggatgtcaatttcaatatgcttcgtgcgacgatgatggacggggttggcagtcatatagacagcactgacgttgtcacagaagacgattgttgccgtagagatgggtgcatgaagctcctggagcagctgatgaagccaacaagtctcagccacagcgtgcgcaacaacacgatactcagccttcgcgctcgaacgagaaaccgtagtctgtcgattggaggaccatgagactaagttgtcgccgaggaagacacaataccctgaagtggagcgctgagagtctggatagcctgcccaatcagcgtcggagtaggcagacaaactcgtaatgctgccggtgccgatgtgaagtccagtggagagggtacccttgacataccgcaggacccgcttgagcagggccagatgaggctcgcgtggatcgtgcatgaataagcacacctgctgaa

SEQ ID NO: 161413 - DNA, 661 bp, Zea Mays
tctacgtcgatgacatcgtggtcaaaactaagaaagggtcgaccctagtggaagacttgaccctggtcttcgacaagctgcgggcaacccgcacgaagctgaacccggacaaatgcatttttggcatttccgccaagaagttgttgggattcctggtttcgcaccgaggcattgaagcgaacccggagaagatcagagcgattgaggcgatgaggcccccggcccgagtcaaggacgtccagaagcttacgggatcgttagccgcccttagccgcttcatttcaaggttggctgagagagcgctgcccttctttaagctgttgcggaagtccaggcctttctcttggaccgaagaggcgaaacaagccttcctggagttgaagcagcacttggtgtccctaccaatattggtagctccggaaccagaggaaccgctatatttatacatcacggcggccgcagaagcagtgagcacggtgctggtcgtcgagagaccagcaccagaaagccaggaacctgaggactcgggaccggctacaagggtccgaaccattcaaaggccggtctactatgttagtgaggtccttcatgaggcaaaaaccaggtaccttgagacgcacaaactcctctatgttgtgcttgttgcgtccaggaagctgcg

SEQ ID NO: 161414 - DNA, 570 bp, Zea Mays
gttttagataacgaacatagcgtaatcaccaaggtaagattgagagatgagaagggtaaaggcaataagaaacaaaagcacaacaaaggatgaggttacaaactcgcgagccaaagaagaggatacagccaagagaacgaaggtatgagacgaaagaggggcgattttaaaggacaggtatgagacaaacatcaatgtaggatatagaggtgtcaagggtgcatatgataataattaaaaagcataacaaagatatagttaagataagactcgcgaaacgacaaagtggagaaaacaatcaagggtaagatcggtaaggttccaacagaagggttgaagtaaagattcattaccgagtggagttacaaggaaacaacgagatcaccagggatatgcaaagtagaatgaccgctcatggatcattaagaaacaagggtggtcaagggcacgttaactgaaatgtcttaaacatatattgggatataaaggtaagcacatataaaaaaataagagtatgcaagattccaatggtacgagcataccaagaccaagaaagtacaaattgccaaa

SEQ ID NO: 161415 - DNA, 743 bp, Zea Mays
ccggcgggatgaaggtgctccgacttgtactgctggcaagttgcgcactcccgcacaaagtcctgcaccaggcgcctcatgttggggaagtgaaagtcgcggcgtagtcggtggagtgtgcggtgaacgccctcgtgaccgtccacgtggacagcggcaacgatctccgacagtagtggagaggcggcggggatgtagaggcgcccgtggaaggtgaccatgccgtccgtcacggcccacggggcagtgcgtgtgccggcgcgtacctcgtcgtggacagccaccaaggcgggatccatggcctaggcgtggcgagaggcggctgatgaagtcgaaacggggcgccgagacagccaacagctcgccctcctcggtgtcgcggcgagagagcgcgtctgccacgacgttcgtcgcgcccgacctgtactcaacagagaagtcgaagcccaacagcttgtcgacccaatgatgttgtgggatcgtggccaagcgctggtcgagcaagtatttcaagctatagtgatcggtcttgacgacgaactgccgaccctagagatacgcccgccagtgtcgcactacctggacgaggccgatgagctcgcgctcgtaggccgcgagagcgcgatgtcgaggagcgatgggtctgctgaagaatgccaccggatggccctcctgtaccagcacgacaccaaacccatgtgacgatgcgtcacactcgacgatgaatatcttcgcgaagtccg

SEQ ID NO: 161416 - DNA, 946 bp, Zea Mays
acgttgagggcctgtgaaagaaagaagatgaagaatataatgacattccaatatgattggaatgatgaagtcattgcccagttttactcaactctgtggatcaagttggttgatgaggaaagtccctataactttccttatcttaacttatacatcgaaggcagctggtacaaggtgagctaccgtcggtttgctcacattcttggattcactgacaatgatatttctggtgataagatcaagatccatgatttctgccaacctaccaaagatgaagccagagatcttcatctttctgagtctgggaaatattgggagtccaccaacatgcacaagtattacaaatacatcaactccctcagcgggatgaccctcattccaaaagggggtaatcagatgaatattcttggagagagcaaggttttgctctcattcatgaagcccagcagcttagagagcatcaacgtctttgatatgatctggcaggaaatcatccatgctgcctgctttccactgaagggatgtcttcatgcaccttttatcatgaagatgattgaagttgtgacgcagtttcgatatgataaaggtacaagacatcaatcttatacccctttttggattgatcccaacaatccagcagggcgcttgaggaaagccccttccagctcccatgcacatacctctgttggtctgtctgctggtcctgctgctactgccggtgcctcgcgtccctcccctggccgcggatctcccacgccacgtggtcgtggtcgtggtcgaggtcgtggccaagggatgggtgcccgcttggcccatgggattgcagcatttttctctatgtgtcggaacatttctgctgatgtacatgagctggcaaggcgtcagcgggagactaacgacaatcttcgtcgtcaagcttccactatgggtatgccctttgcccctc

SEQ ID NO: 161417 - DNA, 379 bp, Zea Mays
atacctagctgcgcccacaaccattggatcccagatctacggcgcacggcgcacgatgcccttcactccctctcggccgcatgatttcctttcaacacgccagatccaaaacgacgaaggggtacccggattctaatcataaccacacgttcgaggatcaatggtcgacacgatatcagagccgggacctaatctaaccctccgacgcggaatcaacagtcagcgggctatcttccaccttctgcccaggcatcggcggacacgccatggcctctcccccgcccctcgccgcggcgattaaccggctgctacggtctctaacccgcgcccaagctttaccccacaactcaacaaagtccgctcgactccaacgatgcta

SEQ ID NO: 161418 - DNA, 705 bp, Zea Mays
tttgctcccgcttatcgtacaacacatactactgcacgatcgcaagtacagtacgaccgtaattagcggagaacagttatcccaccgttccattccccttcacttcaccccccgccgaggggaaagtgtgatgattagcagacttgcagcttgtatctcatttataaatacacaaaccccacccagcaggccagcactcaagaaccgcaaggaggcgcctttccggcgttgcccttgtttttttcccctctccaactcgaggggttttcgatccggggggcggttcccggcgagatttttgacccggcccggtgcttggttccattgatctccgtctgctactccttcctcctacttggttgccttgccttcccggtccctgatcggagcctgtcgccggcgggcgggcgggctgagtttactgcccgttactggggggacaaagagcagaaggaacagagagtaaaaaatcttgggccttgatcggatccgaggacggggcaatgcggtaataaggagcggccatcactgccggagtttgatccatccaaggagaagaaagaggaggggaggccgcgctttcctttctttctggtgagcgttccggcctccgcgccgcccgtctctgttcattctttttagccttaaagctactacagtactaggcaacaaaagcggtcgcggaagttgccatctttttttttc

SEQ ID NO: 161419 - DNA, 1127 bp, Zea Mays
gtcctgtggcttgcacttcatctctcggccttttgtcccaacgcttgttagtctgttggttgccttccctctttggtgcctggggtgcaggatctgtgtgggcgatgaggtcctgtgcccgctcatcagtggtgatgtagatgttcgctttccagaagagctgctccgaggtggtcggagctttctagaggatagcttggacgaaggttgagttgatggatctgcggtagaagttctcgataacagctagctcggcgatgtcgagaatgcgattcctcatggtctagaaacgctcaaggaacaagcggagggagtcatcactttggtgcttgatggatttgaggtcccaaggttgtgtcggtttgtcagaaagggattggaaattcacgacaaaccggtggcagaagtcagcccaatcattgatgtagtggcagggaaggtgttggagccactgcagtgcatcctgcccaagcgtgatcggtaggtacgctgtcatgatgccctccattgccccggtggcctaggcggccatagtgtagacggccaaccagtcgtccgggtcttgcttgggctcgtacttgtcgacgttcgagaccttgaagttgggaagccattggatcgcctagatccgggggtagagggcttagactccatacatcccccgggcctcccggcagtcttccggggcacggtcgttaaggtggtccctaggcggtgactggtgtcgtgggtcacgtagcctctctcaaaccgatcggtctggtgtcaggctatttgtcgaggccgctgcggattctgtcctcgttgtgcggttgcatgttggtgcaccatgatcccgatcatattcttcccacagccttatctcgctttcgtgttgacgatcgtgggaagcattgatgttgcaccgcatgtctcgtcgactgttgatgacgtcgcacatgttcagacccggatgagcgaggggaagaagatggtttgccgcctgggtaaggatttattggtagccctccgcatctagagtgcgaggtaggccattggcgatctaggccagaacttcgctgacttcacttgacgtgtgctcggctcaagcaaagtcgggtagcaggctccggggaaggagtggattg

SEQ ID NO: 161420 - DNA, 696 bp, Zea Mays
taattatgcccccagacaagaacagaaactaaaaaatgtggcccgcaatctatggtaggtattaagttggttgtcgtactaatcaccctcaacgcatctatcgtcgaccacattaatttacagttatgtgatgactccttgaactgtcttgatgaaaccctaaccgaatgaccaaatctaaggttactttggcggccagatagtactggaatccgttcattgacatgagttcggtcaactacggaactcaaacctaaaattttcgaatataaagttacaaacaagtaactgcgaagagggggaagaccatgttcgtacctgaagagctgaagatccggcccgcaacaacaagattcgaaccgatgaactctggatctaagcgagtcgtcgatggtcggagaggaaatccaccgacggggagacgtaccgccaaaacggactgggatttgtggccgcttccgcttccgaggcgaacggacttcactcgtcagcaacaggacgtggtcgtcgtcggcgccgacctcctccggctccgaattggccttgcgccgccagatccgccgccgcgtcgccccttctcgcccgcattcccgagagccgtcgagaggaagagaagtggacctggaactttccgccgtctggcgcgggcgccggcttccacgagaagagcgcgtagcggagtgcacagtcctcccc

SEQ ID NO: 161421 - DNA, 1099 bp, Zea Mays
cactcggctgattggtaggagctgggacagtagtgggacgaataaagacgagctgcttgaatggatatgaaggtgggcaaggcaaagaacgattttgattgaaaggtcggattaccaaccttgttgtcttctcaggtccttgagtggatctctcacccgcataaccctttgattttccatgtcccatatttttagcttcaactgccagtgttgtactgatagccctgctataggtaaggtccagatatgttgccatttttcgctggagcctgtcgttcaatcccctcataaaacaattcttcttctttaagtcggtatccacctggtcaatggcatactgagagaggtggttgaatttgttgaggtactgcatcaccgtatctcctccttgcttcaacctgataaactcttctagtttcatctggagcactccctccggaacataatgctcccagaatgccaatttgaattcctcccaggtaacatgatgcccaacatgttgaattgctgaaaaaatttcccaccaggtactggcaggccctcttagctgctgagctgcgaacaagggtttttgcgtctctgtgcatcgaattaaccaaaacttctgttccattactctcacccattcatcggcttctaagggttcctctgctttgacgaagagtgatggtcgagtctcaaggaattccaaacaggtagtatctcgtggtccctgagggggaactctgcctccgtgctgttggaattggttgcccgccatttcgcgcaagaagcgcgtattatcagcggtggcattgaccaaggcagagatagcctcggccaaagtcggtggtaccggtggcgggatgggagtgtcctccccaccatgagatgtccccgcaccatcatgtgcacgagtccgggatggcatctgaggcaaagaaacatttggaaaatataacatgccaacatacaccatcatattacattgctgaaatgtaataattatacagactgcattatacaactcaacttttcttacttattttacataagtacaatacttatactatactactatagtcttcttcatcctttgttgctccattgtctgctgcag

SEQ ID NO: 161422 - DNA, 446 bp, Zea Mays
ccttcatctttcctagacgaatcatgtatctctttgacatgtgagtccagcccctagatagtgtagccgagctctcagacccatcaattagggtcttgtttgttgaagtgttcgtgaatacccctggtatatatctttaataatgccctcgagtctgattttggtagaggtattaactcgggcatattggactcctatattgaatattgtctgctaagccatgtatatgatactttgagttgttcttgatgacaaccgagtcataggactcaaccttttactattcaggatgaccaaaactctagatcggcgctccagattatgcaaattcacatagcttcagcttctagctcccaagcccattgcacttgccttccactatgtcctataaatatgcccactctatgacctttagtattccactagcccatcactttctagtgctc

SEQ ID NO: 161423 - DNA, 565 bp, Zea Mays
acctatcatggtcttgttcgctaaattagaattggtactcttggtatatatttgtaacacattgatcacacgtataatcatgattggtaggcctcgtgtggtaataaaagcccattatgtgaggcagttgtgttagaagaaacgcattcatgatccttgcagatatgaggcagtagtgcatgtgtgatcccatttggtcaggcatagccgggtagtaatggtaatagtattcgtcctcccttgtttatttttcgcttcatgctctgtactaacctctgagctagtatcatcattcatcaacgcacttgatcccccacccaccacacacacctcgctatatacttcaggttccatcaatctgcactatatatatccacaccacaaaacgtaaccataccctcctacatagtcttttaatatggttttggtgttgtagctactcccttctctctctagttgtgccctccattcatcagactcgtcatttttaagcacctgggatcagtttgaactttctacgtataaatctcccatttatttgaagctgtagtatagtagtgtgctg

SEQ ID NO: 161424 - DNA, 908 bp, Zea Mays
tttctcgcctcccactccgatctggctgactccttctccctcaggcctcgacgccacgacggaagaggccctctcggctgccacggttgtgcaagatggatgaagggcatgactggattatatagagctggtgcgagcccgtacctatgctcatgggaggtcggttgatgcatatccatcggctgggttcgttacgcagaacacggaataatcccaacaactgagctatggtagttatgcctgagtacaacagctggttcgacgctgggttcgttgaagcatcgcgcagagttggttacgagctaactccgatgtctaaggcagatccacggaagcagatgctcctgacctttgagctccacagcacagtgcccccaggaaaaccggtcaccatgacgtctgctccggcaagagtaaaaaaagaacttgtgcatggtgagggaaattggccacggctggaatctggccgatcggcccgcttgggctgagaagagctgggaacgggatgggttaagtgattaagcacgtgagtgggtgagttctttttctcttttttttcattttcttctatattttgtttgctaattcaaattacattcaaatacagttgaattcccaattcaattagaatgcacagtcaagaaattccagcatgaatgaaagttattaatatactaattattttatcactttattcggattttttttaaatatgtaatacacacatatagtttacaaaatatcatgaaataatttaacatgattcttttatgagtatatctatacactttaaccaggaataatttagtttacataagtcttttttttgtttaatctttttattagaaagtatatttattttggggaaagtgacttcaaaggtaaaaattctttaataaaggatgttt

SEQ ID NO: 161425 - DNA, 538 bp, Zea Mays
actgatcgaacagatcttctattcagggcaaggggtacttgttctgatcgtgacctcattcagagctcgatagtcgatgcacatcctcctagtgccatctttcgtctccacgaataggacaggggcggcccaaggtgaggtgcttggccttatataacctttctctgatagctcatcgatctgcttcttgagttcaaccaactctggtccagacactctgtaggctcttttagaaataggggcagtgccaggaagaagctctatggcaaactcaactttccgctcaggtggcatacctggtaagtcttccgggaacacatctgggaattcggacacaaccttgataatctcgagtgaatttggctccttgctatcaatagccatctgatgacaacctcctttccttggctcaggtgagattaactcggataccacttcttctcctagtggggacactaacttaattatcctcttatcacaactgataattgcttggtacttatctagccaattcatccctaggatgacatctattccc

SEQ ID NO: 161426 - DNA, 713 bp, Zea Mays
gagccatccgatcgatatctggtggttcagattagacctacaatccaccgaaccggtatacacgatgagccaccagatcaagatctgatggcccagatttttatgaatcccaatctaagcacaaccgcccgattattagatcaacggccggtactcgtccaagcgaaaaggtacgacaacttctaatccctaccgttggtttcacatcgcacgcccatcctcccttcttccttccctggacacaggcatcaggggaccaccgcccgcccgcggcggcgaccgtcgttggtgacagcggactcggcccccctggtgcaccaaacaccaggacgatccagcagcgcgtgagggatgtgaaggcgataccaggggagggcaactcaccagccatgatgaccccgacgcggccgactccgtgaggcgcggcctgaccgccgcctgtgagctccggcgaggaattggcagctctcaggtgctcccccatacatccaaccgccactagagggttcgcgacgggttggtgatgccccatagccatcttccccgcatcggttggtcctaccagcaacagtccatggtggcggcggcagatcttcttctttccccacgagcttgatccatggtggctgggttctgagcgcgcagcagagggggaaagggtgcttgtcaaaggggacgtgaacgcccgggtattatagcccaagggtcaggca

SEQ ID NO: 161427 - DNA, 273 bp, Zea Mays
cagaaacccatgacaaaacaaacagaaaagtaatactatgttttgctcgattctatgtggcagcaatcgttgcacctaaaagtagcaaaaagatgccacttgctattttgctgaaaggaagaatacctcaacacctcagctgagcacctcccattctaagctcacctctaatactcaaaatcacgacaaaggatgcttgcagtgtagctaacaaaagaaataactgtaagctctgctctaagtggcacatacccaccttgcagccaaatccaa

SEQ ID NO: 161428 - DNA, 767 bp, Zea Mays
gttgacgcagctgcagttccacattactcttggcacgacggtcttttgcgttacaagaatcggatttgggtggggtaagctattcccttacagactcggctgattgaggcttttcattcaacgactgtcggtggtcattcgggtattccagtgacgtatgctcgcttgaagcagctgttcgcttggcgtggagtgaaaaaagttgttcaggaatttgtcagtcaatgcattgtgtgtcagcgtgcgaaggtcgatcgtgctcatttacctggtttgttacagcctctactggttcccacgtccttatggtagataatatccctggattttattgaagcattaccgcgtcctcaatcatttacatgcatcctcgtggtcgtggatatgtttaccaaatatgcattttttttgcctctgcgacatccatacacagctctctcggtggcaaagttattccatgatcagatatataaacaccatggtttacctcagtctattgtttctgatcgtgatagaatatttctcagtaatctgtggagggagttatttcgtctggctgatgtgcatctaagaatgagctcggcttatcaccctcagaccgatggccaaacggagcgtgtgaatcagtgtctggaaacttttttgcgctgttttgtgcatgcctatccgaatcagtggagtcaatggttatctgtcgctcaattttggtataactcttctcctcactcagctattggtcggtctccgttcgaagtcttgtatggttg

SEQ ID NO: 161429 - DNA, 820 bp, Zea Mays
accaccgattgcgaacatggaagcaatagtactggtgtagttcgtggctgcggtggcgcttatatcttctttgatcggcgccgccgcaggcgagaccgcggcgcaggagctgcggcaaggtctctccgtcgctcacgaccagtcctactcgcagttccagccggtgctcgccgaccccacgggtgtcttcgcgctcgacttcctccgtgtcaactccaccatgctggaccttgccgtcgtccacctcccgtctgccttcccactctagcgtgcgatccccgaccgccccgcgccatggtctacagcggcctcgtccacaccgaccgcgcggccgacaaggtgctctggtccaccgctgccacctctgcctcggccggcgaccgcgccgtcctcctcaacacgtccaacctccaaatccagagcactggtggcagcagttcgcccgacgtggtgtggcagagcttcgactacccgtcggagaccatcatccagggccagaacttcacctccgcagcgacactctacagcttcgaccggcgcttcgccatgcggctggggagcaactacttcgacctatacatcgagcccccgccgtcttcgggcggcgttgctgcggccatgtacttcaagcacacggcgatggaggccaaggcccaaattgtggccgacggcggaccgacctacgcgcgcgtggagcctaacggcttccttgccatgtaccagagggaggggccgcccgccgacgtgctctccttcgacaccttcaaccgcggcgtccgcgccctccgccgcatgactctggagcccaacgggtacctcc

SEQ ID NO: 161430 - DNA, 486 bp, Zea Mays
ctccgattgtaccgtcctttgcattgtgttttcattagatactagtaagaacttggtaagacacggtagtgtgtgttcctattcacccagagagcgcgtagttgcttattagggataacctttactgtttgttcctgttttggtgtttccaatggtaggatccgatgacgagattgaggtagtcattcccacacaatttcccgattgtgtcagccgcgaagacttcgatgttatttgcatgcgtatggaggaaaatatggaggaaacggtccacaagtctgtccatgatgcgcttattgcaatggattttggcaaagtgctagatagggtggagagacggataaccgagcttgtcgatcgggttgccacgttggagacacgtccactacatcaatagcctcctccaccaccacaaccctagcagcatccaccacggcatcagcaccctccaccacaggctcacgatgatgccattttcaatgcacg

SEQ ID NO: 161431 - DNA, 953 bp, Zea Mays
gaaggctggtgcatttgttaggccaaaagacatagtagtgaactcatacaacccatacttggtaatgaatgtcgtcttcggaatgtcggaaggtcgaatcctgagttggtgataacctgacctcagatctatctttgaaaacacactggctcctctcagctggtcgaacagatcttttattctgggcaaggggtacttgttcttgattgtgacctcattcagagctcgataatcgatacacatcctcctagtgccatctttcttctccacgaataggataggggcagcccaaggcgaggtgcttggcctgatataacctttctctaatagttcatcaatctgcttcctgagttcaaccaactctggtccagatactatgtaggctcttttaaagatgggggcggttccaggaagaagctctatggcaaactcaactttccgctcaggtggcatacctggtaagtctttcgggaacacgtccagaaattctgacaccaccttgataatctcgagtggatctgcttcactgctatcaatagccatctgatgacaactccctttccttggctcgggcgggactaactcggtcaccacctactttcctagtgggaacatcaacttaattgtcctcttatcacagctgataattgcccggtacttatctagccagtttatccctaggatacatctattccctgagtacccattactatgaggttagctggaaactctatcccccttatttccacacttatattcaagcaaacactatcagctcgaactttaccaccggctgaatcaatttgaatgggtgttgacatgatagttattagaagattatgtgcttctacccatgatgcagtaataaatgaatgtgttgctctagtatcaaataatacttctgcaatatgagaatcgattggaaacatacctactatcatgcatggtgtttc

SEQ ID NO: 161432 - DNA, 557 bp, Zea Mays
aagacaatgacaaggcacaatacttcctcaaccccagacaaaacatggtagcaatagccatgatgcttcggtccatccccaagcctaacgaaccagaggcgaaggcgatgtatcgaaacctccgcaacctagcgaagagagctgttgtgcagcaagccaaaattgatcagcagatgcccctcggcacagaaagttatgacccacaaacggccttatcctggagcaggggggcacaagcctcccaatccatgagggcgcacattcctttgaaggatcaccttgggggcatacgcaacacccgacacatcatcgacaatcagtgtcaggagcaggaggaagttgagcagtcgcatgaaaggaggcacaagagaatccctagcccactcaggccgaggccacgcgccttcgaatgcgcgatccgcaaggcactattccctgtgaaggtaaggacaccgaccaacatttccaagtacgatgggtcttcaaaccccgatgtatggttggaatattaccacctcgctcgctgcatggcagaaatcagggatgaccacttcatc

SEQ ID NO: 161433 - DNA, 663 bp, Zea Mays
aattgtctaaataattattgcttaccattttggtcgatatggagaagtcatttgatgctgtttgtggttattggcttataatatattttttatgttagtgttgagtatagtcaaaagacaaaaatggcaataatccactatggccggttcctattgggacacgtaacttagaaaatgagtcattagtcctgaatcttgttacttttgctgccttaactctatagagtatagactaagaacatcaaatgattattgggtcgcttcctaggcttctatatgtttccttaggctgcctccaacagtattaggtaaagggtcccgtacccttgatttagcagacgaagacgtacagaacgtgtccaacaacacccgctaaacgagcatgtaaaatctagaggagcctcgtcgaacattatatctagagtgcaactctgcgtgcgctatacactttgttgcaatcaacgtgaaagaaaggacgacccacgtgcacctcgtgatcagagctcccaagtggaggcgacgagcttcacacatagactgggcccacacttatggtgcgttaacagtttcccagttttatttaatctaacaaatggttaaaatgaaggattggatatagaggatcaaatttagagaatgctgcttgagatagtgaagatttag

SEQ ID NO: 161434 - DNA, 630 bp, Zea Mays
tcggagatggggaagaacctggcgcggtgagttcgtgtccatcgccgtggcaacctcaccggcgacgatcggacagccgtagcgagtcacggcgtcgcggtggaaagtaaagccacgcggcacaaggtcggacggcggcggtcgtcggcgttcttatcggttccaccgcggtgaacacggtacggcggccgggatactttaatggccgggcttatccacggcggtgtgttccgagcgtttatcaagtcatcctgagcacgaattgagacggcggcggcgcgaatcttagcgcagggagggtcaccggcggtgagcaagccgcgctggcgtcctgatccactcgagctactgtaccatggcgatccccccattcagttgcctgacagcccatgtttaggtcacattttctctaaaatttgcatgtgaacttcatcaaacctctgtaccaaagttgcagagttacaaaccagctacaattcgactataggacttgaacacatttgagtactaaatcaaggttgaattcatactcaaagttggctccattacactgaacctctgaatttcagactgaatcagcctgacaactaatctttaggcttgattatctccaatatttccttaacaaca

SEQ ID NO: 161435 - DNA, 459 bp, Zea Mays
cagaagtggaagggttcccacatctgttgcgaagttgtgcgcttcgcatgggagtccgcaagaagccagaatacgtctggaaggagtatctcgagaacggaatggagaaatgctctatggcagtctacctgggagaaagccgaaactatccgaaccatccttctttccaagtcacttttaccggataccgctccccagatacctgccagaatgttgcccgaacagccctccggcaaatatgccagaactacagcaaagtaatctttgaaactccccttcgctactttccacccagcaacaagaatacccccacctggaggaaaagacttcaggccctgtcaggtagagaccctgtcaaggatgaccccaccatcgtctacatggctggatacctccacaccctcaataaccaatacgatgaccttgccctccactgcactcacctaacctcccgggtgg

SEQ ID NO: 161436 - DNA, 372 bp, Zea Mays
gttagggcaagaatagcctggggtaagaaagtttatggtgagaaagaactccgtgttgagtggcaatgcaactgaaggttgagtttgacttctctccttccttgacgaggttgatcttttcttctccggtcttggtctcattgattcgcggtgagtgaatatcatcggggttggggaatatggttgggatagatatggatgagatagactacatgatgtaggtcaaaagtttgttcgatgttatgtggggatagtcagattatacaattcatcatgactctattggttgggttatatctcatgcatgtggctgagttggttgaaggcactagtttaggtttaagtgctgagttggttgaaggcactagttta

SEQ ID NO: 161437 - DNA, 326 bp, Zea Mays
gttggattggatttggacagaggagattagatcgcgccagtttagaatggtggccgttagatggggaataggcgacccagattagaaaccaaggttctgctcaacctcaacgtaagtcgttgattgggaatccaagggcgcgggtttgatcttggtatggggcgctacggtctgtagatcgtagatcgtggggctgtgagagaatcgcgattcattaaatctggtccattggatttaatccaacgactgaaatctagggataccccttcgcgggtcagaatagcataaaagcccgtgtaatcgttagaaatgagcccgacgtcccg

SEQ ID NO: 161438 - DNA, 888 bp, Zea Mays
catctccttttgccataagacaatgaggagatgagaaaattgagggagcctccttgataacaatttcggcatttagtttagatgaagaatcatcatcatcatcatccgagcttgcatccgaatcccattcaactagataggctttgccatccctcttcttgtgatagaacttctttttcttcttatcatctccatccttacccttgttcttcttgcttggacaattcatggcaacgtgacagggttccccacactcaaaacatttcctatcattgaaggcatttcttattgatgtttgtccccttctaggttgacccttctttttcctcatgaacttgttaaatttcttcatgaagagagctaattcctcatcactttcacttctatttccttcatcttcactttctaccttttcaattgcttttgaaactttagctttgagagctattgattcccatttcatctgttttcatcttatgtccaggcaaggaggctgctagagcccaatggattttgaggtgttacagtttagcctttatcttgtgtgcaggcaagcaggctactagagcccagaggatgctgctacacatggcattttgctggcaaaaagccacggtgatgcaccaataacatggttgcttggttggctactctgctatggccgttaatacgtgatgtgtttcgtggcatgcggagcagacgcgaacgctcacaatgtcaccgtgttgtcccgtctgaatcgacgcgagtggtcaagtcttgaaagttgtgctaattgacacccaaatagtgagatatctcggcacgacttgtgtcgcaaaatccaagcaccaatttgttgttagctagacacagttttgggaaatttcatgtaccaaccgttgtttg

SEQ ID NO: 161439 - DNA, 594 bp, Zea Mays
ctgtggagcagctgtctagccagcagacgaacaacttcttgttggatacccacttttcatccctatccgctttaggcttcaggactgtctccattctgtttgcaatgtggcctcgggagtcgggaggatagccttacgaaacatttgtccatcagaccatatcaaggtataactgccgccaatttgcagtcccttcattctctaaccctatcgttttaggaacccagggctatagatgatcaatcaccctgctcatggtctcattccttcctcgtcggtacccggcgtctgatttgattccttccccatggccatggtggcgctttgctcaccatttcggtgaacctcagaggaacatgactgcgacctgaacctgaacctgaacgatcaggtctccgatgaaaagtccgagcagcctcgacgatgattcgtgcaccaaatttcacccacggtgctggtgtttggcaacgcccagttggagttggagcaactgtttggagacagaaatatatagggacacaggatcggtcattggtcaaccgccaaacaaagctgttttttgttaataattgccggcctaaaattattggcgca

SEQ ID NO: 161440 - DNA, 287 bp, Zea Mays
tgaacaagggtagcgccgaaagcgagacatgattcacatgaatagctagtgctactgctaactgctaagaagaggcatcgaaaaacgcaaaaactcctcttcttcttcttcctctttcatttcggtttgcagttcgtcgcctgtaaaacaggggagccaaatgagcttgcagtttcttcctctcttcttgttgcagcttgcagctcttcccgcaaatatgatgtaaccctacgtattacactgtcgtaccaaactgagtaactgacgatgcacccagcattccagaa

SEQ ID NO: 161441 - DNA, 820 bp, Zea Mays
cacgattaaaacgagcgggagcagacctgagatgagctgaccatggggcacggaggatttttgctggccggtgatagaaaagggggaaaacagtgtcgcggcggttccaggtggaattgggaggtgagattagggctacatggccgtaaaggactatggtttcaccgtgcactaccaattttgggagaggtcaagaggattccacgaatttgggctttaactgggctcactgatgaagatgtgaatacctcgtcgtggtccatgttgctatttatagccacggcggtccggctaacgattagcgatcgcggattgcattgttcacgcatggctaccacgtagagaagaggcacaataagggaaaaacgaggcatgggtgacaccgcggcggaagcgaccgagccacggcgaccgccggtgggatatctccggccacgcatgactgagttcgcgggatggtgccacgtccgaagttatctctccgcgatcaaatccctttcaccagatcactcgagcacatccgattcaatagtgccttagatcttttatccgcgttcttcagatatttgcagagttttgatcttcagcgttttactgaaccgaccaccttccatcctctctatctcctaattcttgttaagaacagggtgatcttcattaataaaacttgttcaccaaacaacagtctttaagtttactataaggttcatggttcaattctgtacagattttcagatttggtgctctcaattcgactgcatttcattggggccatacctatctgaacccaattttcagatttgcccaacttactcctgac

SEQ ID NO: 161442 - DNA, 437 bp, Zea Mays
ctccgacgaggcgtcggcgcagcggctgatgctcaaggggtgtcttcggcgtcgccgccaggaatcagatcgccatgaatcccatcaacattgtcttcggtaagtacaacaacattaatctttcgcgggacataatacgaatgccacctccttgatcctgcccgcatattcctccccagatctcctatccatcgctgctgccctacccagattcatgccctcctcgctcatatccgaccatggcttgatttccgaagctgtaaatcatgtgcggaaggttctggaggcttctcgtaggccacatcctccctgctcttcaatgggcttgaggaggggtgtttctaggcgctcttcaattgaggcttgatcgcgacgaggcaggagacgtcgatggtggcgatgacccagcggccttgcccgagcgcacactgttcgac

SEQ ID NO: 161443 - DNA, 625 bp, Zea Mays
gtcgcctggtcggtctctcgcctagcgcgccggggagggtttttgggtcactgtcatatggggccgatacgttagaatcacccccaaccccccgtgaacgcaaacagaatcgatcggctccctcatgccgcgcgtgtgattcggagattgttgggattcgccccagggttgttaggattttgtgggcccgggtgattgcctcccatggatatataagtgttaccctggtcgtggatcgttcatctgtgcccctgccgagtagagtacgaagagcgcgcccgtgagggagaaagggagccgccatcgttgtgggtcggtcctcgtcgccattggcccgggacaagtggtctgtgaggatcagcatcggccgtagaacgtcttcaagggctcggccaagtgagagatcaagtgggcgattggtaattcatcgctggggagcagggcggcgcctctctgctcgaccgaaacgaggaagacgcccctcagtcgtcgatcactagatgggcgactgagactagggataagaaaaacgattcgccccaattgcttatgaccatcggatccataacggacgagggagattatatcatggcgtggatggttcagggtcgttgatccatcgatg

SEQ ID NO: 161444 - DNA, 457 bp, Zea Mays
tatcgcgaagactatccgcgcagaagtcgcctaagggtgcagccgggaaaaaatctaagtctatcgcgaagactatccgcgcaaaagtcgcctaagggtgcagccggattagcacaacaagtgcggaaaaaatctgagtccatcgcgaaggctatccgtgtagaagtcgcttaaaagtgcatccggatcggcacaacaagtgcgaaaaaaccgaagactatctgtgcagaagacacttaagggtacacctggactagcacaacaacggccgaaacgacaacatcaaaccatccacaccaagaccaactataatcaagccaacacagcacagcaaaacaaatcagtaagtacaaaacgccttcgcacacacacatgcacgcgagggcacacaattccaccatacaagcctcgacgtacacaagcgagggcaccacactctacatcggctcaaccttag

SEQ ID NO: 161445 - DNA, 501 bp, Zea Mays
ctggttgaggctgctgcctactcaactcgggtggcgcaactccgtgctggtacaccgtgatcccgtcatactcctcccagcgtcttatctcatttccgtgtcgtcgatcacgcgaagcgttaatgaagctctgcgcgtctcgccggctgttgatggcatgacacaggtcattcgcaggatgagcgaggggtagaaggtgcttagctgcctgagtaagcaaccacggtagccttccgcatctggggttcgtggagaccgtcagctatcaatgtcagtactcctccaacttcactcagcgtgttcagtgctcaagcaaaatcagggtataggttccgagcgaggagagggttctctctccgaagcctgacgtcttgttcagctagctctcgctcccgatcttgagcctgtcagcgatcacagcggtgggagttacgcctttcccggtatactcgttcgtcgggagtttctcccacctccgaagcttcgtctcgggacatgggc

SEQ ID NO: 161446 - DNA, 1171 bp, Zea Mays
gcgaggctatcagcaagatcatccttcgacaagaccgataggccttcttcaagcttaggaaatcccatactcttagccatcttccggcaaacggatatttctttgttatccaggagacagtacagaaaatcatcttcgttactaccattaaacactaagggccccttcggatatttcagtctttgggcgtagtgtttggcctccaagatttcttctttagataatttcttccccgaagcatgtcgagcaatgtaatcagtatcctcagctaaggcttcggggataggagattttgctttttctatcacgacttgttctgtcattttgctggtatctaaaatttgctgacccaccttatcttcaggctcggcggccttcgtctcagtaggcgctgaaggcccagctttggcttcgacttggaatttggcagcttcggcagttttcttggcaggagcaggagttaaggccttcgttgtctctataacagtgtctagcacgctggccatcatcctcctcttaggagttctaataggagctttttgcatctttggcaaatctgcctctgccggtgggctcaggatttctggcatttctatcacttttggcccttcggctttatcatctttagctttggttggcccaactgtaggcatcttcggcactacagtcggctcttcagcgctctgcacaatcggagcagtttgctttgcttcggcagctgaagaggtcccttcgccaaattcaggtagtacggtcggttcaatataacgcggccggtgggtcagaaccttcacctttttgctcttcggctcagctggggtggccgaagcggcactctttctctttttcccttgccctcgtagcgggtagtggtaattagggtatacgaagccaaccgcatccaataccctgttcaatcttttcttaccacgacccccgaaagctgcggacaaaggattatctttggccttggagtatgccccgagtagctcatcactggtagctttaatacacttcagccagtcatcgtctggctcatcaaacttctctccaaatctaaaggtatacttcaaacggaccaaaccaccttcactggaatcagcggtggtctccttcggcatatcccagctttccacaagtagccataccctgaaggctacatgctcttgaa

SEQ ID NO: 161447 - DNA, 1109 bp, Zea Mays
ttatacaaaattacaagaaggaaagagaccgaaaccagtcacgtagcgacagcattgacccaggctatgatctccctctcccttacatgagtggaacgtgttgtaaaagaaggggaaaaatgttgttgagagtggctagcttattaagcgccgatcgagaggagactactcttgagatcgagtgggggggtgggggagggggcagtagtcttgcttgcaaggtactccagctgacagagacgagaaattgcaacttaacatctcgtaagatagatgcctattagctagctatagctagttgggtccctggtcgaaatcagggcgtggcttattagtgctgggagttggctcctaacaacgcatgtattgtttgtaggccaacgtcttcatttgatggcctcatattgtctcctcatctcggcaacgactatatctgcctcctgcactgctgctgcgtcacctcagcccccgacgacgttgcttcttcttgctacaacatacatacacatcgcactagtaaagaagagagcagggcgcgccttttctgcttggttctggaaatttaattatctgaaagagcaaccagttggggctgttgggctcgagtgcactacttgtttgttaaaaaaaccataaccgaagtcccacatgcaaatatatactactactttttttacagttgtaactgaaaagcactggaaagctgaagcagctattactgaattttggttccttgcagggtacagtcgatgcggctgaagctaacccttctgataggtttcacacacctaacgccgaggatgcatcacacgcatgcatgtatgcaatgcatactctaggagctgccggtggcggtgagtagggatggatggatggatcagaaagaagaatacatagataacgtatctaatctagtcagagagagagaaaaaatttaatgtgtcttgatacagagcagaagccagacggcaccgttcgtgtgttcttatttgggccacactttatgggcctttggacgcacaattctttctcaatgagagcatcagttttttttcctgggccctgtaggcctattttctgcagctcgtgtctcagacaacgaggcgtat

SEQ ID NO: 161448 - DNA, 1289 bp, Zea Mays
cggggctcgtgttcgcggcaccggaggaggtgaagcgcggcctggagagatggttccgaaggagagatcgggagccccagaggagttcttttggttccggccgatgagtgccgatgaggacagagcgttggatgcggcctttcccaggttgccagggaagcctgtccgcggttgccgcgccattccccgcctcgaatccgggatctccaaacctggacgccatcagcgcctgccctcagcgatttggaaaccgcgcagatccaggccattccccgcctaggtatgtgtcgcgcagattcagcaacatcccaccctgccatgtgggctaggcaccgcgccgtctcctccgcatcgccagcccgcccgaccaaccatgccatacgcagcgctcgtattctacagcttatcgagccgccatgccaacgccatgctcccgccttgccatcctctctgcctcgccatccagccgtgcaatcgcggtatggccggttgtggaggatccctcgcgtcccctagcccgaccagccatcaacccccttcgtttccccttccgcgctacatagaacacgcatcggccaggccgccagggtcccagatttggcatacttccattccccccaacattcccgcttgatctggcaatttatagcaaaatacttggataaataaaaattgtttttgttatgttatggcttagaaaaaaacgatgttgaacattgtaaatcttttgatgagttatttatcttgctttgattctgaaataaagaccaatgttgcataatgttccccagtatcatcaggaagtattaacttgaatggtaaactcattgtcgaagctagaagacctggtggcgagactgtcatgtctaacatacttcacttagttgaagaaacccagacaagggtggtccctgttcaacgattggcggacagtgtatagtatgtgaactgattcctatatttatgaaagtttagaggtatgatattcaaagcattacatctttgtcctgttactatctcaaccatctctgtgtgattggaatagtacatttagtacatgtatcatggccagcatgaaccatgggttatgtagagcttttttacttctgtagaatttttttacagaccaagtgaacatgggtgattggttacttcatataaatgttttacccttcggtatggttaatatttaaaatggcttattttagttgtagcacttcttcctgtctccagacacttagtgcatttcattacatattaatttcctattaatgatattgcaggcgaac

SEQ ID NO: 161449 - DNA, 692 bp, Zea Mays
cgctggggtggggctggctgatcggacatgctcgggcgaggcgcaaacgaggacggcagcttgggcgagggctcagcgtggatgcctaacaggtagggctcggggcagggtgagacgctaatgtgcggggcccacgggacagcgacgcgtaggggcacaaggctccctggctaccagatctcggatcaacggtcctagtccaacgaactgttatccaatcgcctgggccaacgaatcaaggatgaacggtcaggatcgggcatcgggggggttattagctccggccggccggggcggcgctattcgtgcccgcagtggcgtagccaccggagacaatccagaccgaggtttctaggggtgctggggtggtctggatagcaagagaggatgggcaggacccgacgagcactgtggcgaagtcatggtcgctagaacgggactaaacgagtggatggaggaggggggacctcgggcggaccagaggctactccggcgagccgaaattacccaaggtgagacagaatcggtgcagaagaatgtcagggaaggttacttaccaagagacgatgctcggggcagcttggcacgacatgaggggactctggttggctggacggcgagaaaccgtggcagaggcaaactccgacttgcgcagaggaggggttaagcgcggacctttctcgtggcggagg

SEQ ID NO: 161450 - DNA, 416 bp, Zea Mays
tcaggtgagattacttcccctcacctccgactccgattccattcctttctttcgttcgctaaggattcagtttagctaccaggtagaaacctctcctctccggctccattcatttcatttcatttcatttcacttgcattgatctctcccctcctctcgcttgtctcctgcttcatgcggcatttcccgatcgatcgagatccgaacaaatttgacgagctgcgtgtgcgtgtgtctgccttggggaactactccgttcgtaattctgcaaaagattggactcgatgtaacatgcgccccacaccctcattccaaattgcaaattcataattctgctcttcaattccatagaagaactcttctgcttgtctccctatgagtcttaggtccgagagctataccgcaacaagaccgcc

SEQ ID NO: 161451 - DNA, 273 bp, Zea Mays
ccggccatcagcgattcagcaaagcaggcgtgcaactgtgctgatgtggtgcgtacactactacactagctcttgctcttccctgattccgtccaataatccaatgtaccagcacgctgtggtgccgtactctgtagcccgtagcacctggccggatccgtccaatactccagcactgccatccaactatccaatactccagcacctggccgtggtgccgtactgccagcacgccgtgctcttccgtgattccatccaatactccacttttta

SEQ ID NO: 161452 - DNA, 588 bp, Zea Mays
cgaggctcaaagcacgcggcggccagcggctggccgccgaccgggacggcgcagccgacgactggactggactgatcgatgcgcggtgtacgtgggcagagggtgaccctgcggtgcaggtgcaggtgcaggtgagcattggcttgttgtcctcggttggagctggaaccgcgccgcagcgtgctgctgggcgcccgggactcaccaaccgggaacagagaagatggttgggtgttgtgggctggtggtggtccacggctgatgcttattagtgcttttcccagggtgatggccggcttgcgtcctgcttaattctctgtgatttgatctgaagatgatggatggatggatgctgaaagtggagacagtggcaagggcgtgcatgccctctcgtcccgttgctcacacgctcgtctcgctccaatcctaccctaccctaccctaccctaccctcggtgtgactgagtcggtggccaacctctgagaaggtgccaaaaagaaaggtacgagtgttgcaagccaccgcccaccgacaacgctgcgcctgcaccggccgcccagaccccagtgcgccggaggccagagctc

SEQ ID NO: 161453 - DNA, 560 bp, Zea Mays
aaaccaccgcggccaattcgagatcatgagttggataattcccctcatgcttcctcaactgccttgagccataagcaatcactctgccttcctgcatcaacacacagccaagtccaattcacgaagcatccgtataaactgtgaaacgcttaccgctctcaggcaaagctaggatagaggcgtccaccaacttgctcttcaatgcctgttaactgacctcacaatcgctagactagacgaagagaacacccttctccaaaagtctagtcaaaggcttagcaatgctggaaaaatttggtatgaaacgccgataatatccaacgagccccaagaaacttcgaattttagagacactagagggtctcttccactccaccacagacgcaacattcttgggatcaactgcaatgccctgctgattaatcacatgccccaggaaagccacttcggacaaccaaaatgcacacttcttcaacttgccatagaactgattctcccttagggcacctagaacgagacggagatggtgctcatgctcagcctcggtcttagaataaatc

SEQ ID NO: 161454 - DNA, 470 bp, Zea Mays
gttcctggccaacttcaaggtcgtttggcaatgggcgacggatctggattcacttcgacctaccacaactacccccgagctaagcaacacaaatgaactccaacctcttaaaaattatatagatgagcagcgagaccaaatgaaaaatatcgtagggggtatgcaaaaggattgtaggaggctagttcgtgcgttcgataaatctaccgtcgcaaattttccgtcgcacgaggttgaattgggggtaaacacgcgtaattcatcggctacaagttgtcacgaccattcacaaccctttatgggatgccgatagacaaataccccgagcaaccacaacctcctatgcacatcagcaatagattagctgatctgcacatatccgaaccgtccgcacatgagcgcggaccgtctgggccaacaatggtcggtcccatttttacggagttaccgagacatgtgcccgagcaacc

SEQ ID NO: 161455 - DNA, 798 bp, Zea Mays
cccggcccgcttggagccgtgcctgggccggcctggcacgaatacagtgccgtgcttgggcaggcatgccggcccgcagtgcaggcacgggcctggcatgataaaggggctgacctggtaacagcccgcttaagccgcgcgccgccatccccccacccctctgaaacctaaacctaatctgttcctctctcctctcactctcagctcttgcatctctcccacactgccgctctcggatctcgccatcttgacctccgcctctctcttccgctcccctctggtcgcctgcccccaatctaaggcatacgccagtcggcggcaagcctatgcctctccctcgtcgacggatccgacgctctggtgactgattctctcgggtctcagcctccgcctctccctcgtccgctcccctctgcttgacggctccgcctccaatccgaggcatacatcggcgagcctgtgtcggtcatcgacggatccgtcgatctggtgactggtactctaatcatcctctcctatccctccggcaaccctctcggtaaccctaatcctcaatctagtcactttggtcttcgtgtctcctctcctctcgttgccttgtcagtggatctggtgctccggcgtgcaggtatgaatctctaaaccctaatccttgatttcgtttgttgttcttcgattattcgtttctcactgagtccctctcctctctgcttgtgaggaaccggagtcgtcgatgaggtgacgagttgggctggccgattgacggctggtgcattgtggccttgttcctggtgcaat

SEQ ID NO: 161456 - DNA, 475 bp, Zea Mays
caactatgaaatccatactgatttcttcccatttccattcaggtaccttgagaggttgtagtaatcctgctggtctttggtgttcaactttaactcgctgacacacgtcacacaatgcaacatgagtagcaacatctcttttcaaacccgtaccaccaatacttttcctttagatcctggtacatctttgtacttatagggtgaatagagtatgccgaatcatgagcttctctcaaaataagttggcgcaggtgttcgatttccggtacatagattctctttttaaaccatactgtgccttgatcatcttccgtgaaatctggggctttacccaaaccaatttgtgtcttaatttctttgattttctcatcagactcttgtcctttacgaatctcttcttccaaagtagattcaagttccataaccgttgcttcgatattattgagcattccaaggttgagttgctccatttccc

SEQ ID NO: 161457 - DNA, 820 bp, Zea Mays
ccgaactccgcgcaaagcggccggggaaggcgctgggaccgggtctgctctgctcgacggactcgttcgcttccgcgcgatcttctcgggcgcccggatataaacgcggccgccgctttcccagtccatgcgatccgatcgctctgttgcgaccgcagttaggagagagagaggaagggagagtttccgccgccgcggtcaattgcgtgttagcgcagcgccaactccattgtgtctgggcgggaagcttcgccgagtccccacggagctactggtcgtctgggcggaaggaggggaccactgggtgaccggaatttcgccgccgcgcaaccggatctgttctgcgccgtgggcagactatctcggtgcatcgattgctgttgagaacgccttctccaatctcgccatggcctagtagtgctatcgcgcctgtttaattagaaaatggggccagggttggcgagatcggacgactccggcgaggttggggcatggcgccgccgttctgtgggggaaggaaaggtggaagatgcacctgtgcggttcgatcgttgttgaacggccgagatcgattgataggataccccttcgtctcatttaatcctagaggtcggatctagatcgtgcgactcggtggctgatcaaggtattttagatctgagtcgtcagccatcgatcggacgactggcatggcatacagattcgcggtgagtcgaagctaatcctcaccgtccacttcaaatctggcggcccatcgtggcccgtaccccttcgcgagcacattagtcaaaagagaccctctatttctatataatcaacc

SEQ ID NO: 161458 - DNA, 513 bp, Zea Mays
gaagaccgcgccggaaggctggcctccatgcacgcgaccttccagttccaggtagccgccgaaggcggaagccgcggcgagccactcgccgcgaacgcgagcgtcccccgccggcggccccgggagagcgaagctactcgtcatcgtgatcacttcttgtcccttgcgaccgcgatgcgagtcaacggtgtggcttaattggcgcgtgcggacggcggccgcctgccacggcgcgcgctgttgcctacggccgtcggtcaacctagcttccgggcgagaggctccggccggcgacgccttgttgccgctgtccttgtcacttgcacgaactggaagaaggttcctctctctctctcactagcctaccgatctgcgcggtccccgtgtcattgcgcgttgtggcaggtttgaatgccgtcagagttgatgccgatcgaggaagctggactctagggacacaaccacagtttatcgcgcaacgatagcaacaactcatacgacatctgtatagtt

SEQ ID NO: 161459 - DNA, 644 bp, Zea Mays
gttagaaggagggcgagaatgggaggaaaatgaaaacagaacaaaattatagatgtccaagcagccagcaggggcactagtgaggcagtgagccagtgaccatacaaggcgcggagctgcggaccgccggaccggagacagtgacgaatcaggaagggaaacacgcacccgcaccgcacggagcaccaaccgaccagctgtcaagctacaactcgatccgaggaggcgaggagcaggggcactagtgaggcagtgagccagtgaccatacaaggcgcggagccgcggaccgccggactggagacagtgaagaatcaggaagggaaacacgcacccgcaccgcacggagcaccaaccgaccagctgtcaagctacaactcgatccgaggaggcgaggagcaggggcactagtgaggcagtgagccagtgaccatacaaggcgcggagccgcggaccaccggaccggagacagtgaagaatcaggaagggaaacacgcacctgcaccgcacggagcaccaaccgaccagctgtcaagctacaactcgatccgaggaggcgaggagcaccagccgaccagcgaggagcaccaacgatgaacgagcatcaccaatcaccagatccgaatgggattagggtgagggtta

SEQ ID NO: 161460 - DNA, 1104 bp, Zea Mays
caaagatatagatggatgatagcactacaactttgctgcagatcattgggtatgttgccatgaaaatttgtgagcaaatcgagcctaaactatggctgtcaggttgactgaatactgcagcccatggtacagtgaccgttgaggatcagatcgccagccccagaaaagatctcaccggcggtggctttccgccgtgattcacgtcgccggcgtcatgattcgcgccctgggtaagtggataacgtcgtaaggttaaaagatcgtcaccgccgtgacctggaagccactccggctagccgtagttcatctcccctggctcaccgcccgcgggtaatgtgctcaccgccgccgtgccctcaccgttggccaccgcgtgtcccaaccgcgtcatcgcattgccgtgacctcctctgaactccccgtagaccaccggagttactgccacggcgataaacacgtgttcaccgcaccgccgttcttcctcactttcgaccgccgcgcatccttctcaaaattcacggccaccgccttaccctcctataaattgagggcggggatagttgcgccatgtaatcatcaagctattgcacccactcccatctccactcgctcaccgtagctccgcaattcgggttttcccccaaattgatctccgccaccgtaaaacaccacctccccgtggactgtccgttctggtaaggcaccatccaattcgcgcattgttctagcaccctttcatgctggtgatgctccccgacccctttaatcgaaccaaaccgactgggaccgccgggaacacatcgatctagccgccatgctctcggccaccgtggccagagttccttagtcgatcattagccaaattaagttgggggaaaggtttagggcagatccaatttagtgtctgctgctcggagaacccagccatagctccaatcggccggtccagaacctcgccggagcctctccgcgcgtgaacgtcgtcgtgggcttgggtctgcgaagaaatagaacctgaggggtttatttgcaaagtgtcagtgacttgaacaaacagtaaaagaattcgttctcagttaaccaaaaacctaaggccctttctgc

SEQ ID NO: 161461 - DNA, 617 bp, Zea Mays
atgtggtagttcctgaactgtgtactgaactctgcccaagtaatagtatcagcagcatcatgggcagcagtataagaatcccaccagtcagcagcaggacctgtcagatgacccgaggcataaagaactttctccctgtctgagcattgggcaatgttgagcatcttctcaattgctttcagctaatcatctgcatctagtggatctggcgaactggcgaaggtcggcggcttgtgactcataaattctcggtgcttatcacgaggtggaactggtggtggaggtggaggtggaggcagtggtacttgttgttgttgctgctgttgctggaattgctgttgtagctgttgttgtgcccttctctcctcgcgtatctcttctcgctcctggcgcaactcctggcgtatctcttctctttcctgacgcatctcctagcgttcttgctgcatctgagcccgcatatctgccatagtgtctgccatttgctgcatcatcctcatctaagctgcaatcagtgggtcaactccgcctggtggaggattaggaggattcatctttgctggttatggctggggttgtctatatatcaaccgagtgtgccgattaggaggcaaatc

SEQ ID NO: 161462 - DNA, 497 bp, Zea Mays
aaaagatctgaaaggggaatggatcaaaccgcccagtcgtcgtacccacttgctctgcagccgatccagatgacctcgccggagtctgccgtttgccgcccgaatgccatgtactgagaagtgttaccacgtcatagtaaactgccttaggtagtctgtccatcgcctgagacgttgccccggtgaaagccacgatactccgcgccggtgactcaccccctctctccggccgctagctttccccttcaaaatttggagccattgctctcggacactataaattgagtaagccgctagctccgctaggttgttacaaagctagagcactagccctcgcctccgatcgtccaccatagcgccctaattttggattttccccaaatccactctccgcgccaccgcgagtcaccccgtcgtggtcagccacctccaggtccgctctcgccctcctggtttgtgttttagcactttcgtgtgcttgtgattctcgtcgtctc

SEQ ID NO: 161463 - DNA, 595 bp, Zea Mays
tgtccaacaaggtttggtaaaagctcttgtttgctagatttaacggataacatcgtctggtacgcctccaacagtagacgctaaatggaacggtaaaatttagtgttcagcgttcaaccgcatatgtgaaggtttcctgtgcattcgctatccgccataagcagtcggctccactcgtctctccccgttggccctgcacgacgatggcgaggtggagcaggggaacaagtccatggtgctcatgacgggaggcgatggcggcgctcgtgaccggcagcgatgatggcgctcgtgaccggcgaaactccgtcattggttgcgcttcttgtgactgtgcttcgcatcactttggtgaaactccgatgatgtaggcgcgccgtcgctgggcgtgtgcagcccggtagccggcggcgagctacagcccgtgggacaacgtgcacatggcgttcgacaaaatgcctaaatcgacatcgccgtttattctgtaatgagttatccttgttctgaagggtgagggagggggaatcgttgggttcactccgtgcgctgcaggtcactgagtcctcgggggagggagcttctcggagaagcgttg

SEQ ID NO: 161464 - DNA, 1021 bp, Zea Mays
gcgccatgccggaacaggacgcggctgtagcgccggcgaggctcaggaggtggaactcagagtcgctggatagcatactggagcaggaggcgagagtggcggcggcgaggagcacgaggtggggctcggaggtgatggacgccatgccggaacaggaggcagcggtagcgccggcgaggctcaggaggtggaactcggagtcgttggatagcatactggagcaggaggcgagagtggcgccggcgaggagcacgaggtggggttcggaggtgatggacgccatgccggaacaggaggcagcggtagcgccagcgaggctcaggaggtggaactcagagtcgttggatagcatactggagcaggaggcgagagtggcggcggcgaggagcaggaggtgggactcggaggtgatggacgccatgccggaacaggaggcagcggtagcgccagcgaggctcaggaggtggaactcagagtcgttggatagcatactggagcaggaggcgagagtggcggcggcgaggagcaggaggtgggactcggaggtggtggacgtcatgccggaacaggaggcggcggtggcgccggtaaaaagcaggaggtggaactccgacgcagtggatgtaataccggagcaggaagcgccggtggctctggcgaggagcgggagatggagctcgggggcggtggacgtggtcccggagcaggaaaagccggtgatgatggcgcctgctgctccaccacctcctcctccgcctcctcgacggcgacggcgcagcgtcgagaaactgccgacatcagaggaactggagcaagagatagtagtggaagaggtgagaaaccccccgatgccgccgccatcgctggccatgttcccgcctggaacgccaccaccccctccgcctccgcttccgcctccctcgacggtgtcgcgcagcaagaagaagcgcagcggcagcgtgggcggcgccaaggagctagcgtccgccattgctacgttctaccagaagaagcgcaagag

SEQ ID NO: 161465 - DNA, 509 bp, Zea Mays
cgggctggctaagggcgccggcatccggcctccctaccgtacttgttacccgcttgaggaggtcgtcagtggatagggaggttgagcacatccacgagtcctccgaatagacccccggcttcatctccgcgagccgcaaccgccgctctgccaaagggagcaccctccgacgatggatggcggcgacgacccccgcagcggtaaggcccgcatctcgtaacttctgcaaggcctgcagaataggctggagcttctcctggttctcgtgtgtggccccccagtgccagttagtgccggcggcggtcaccactcgttgagaaaatggtggaagcatcccgccgtcgttccagagataaaaccaccggttctgccaccccttgttcgaagatgcaagggaggcagggatgtactgctgcgcgtgccctggcctcagctggagggtgcagccaccggcccgcaccgccatacggaccttcttcgcctccatcgtcgcggcaaagaactccgcg

SEQ ID NO: 161466 - DNA, 655 bp, Zea Mays
tcattatacattattcaagtatgttcatcatactgaatttcatgttcaacacttagcaaacttgttagacctttaaatatgttgttatccaaatcaccaaaacccacaaaagggatgaatgcactttcacctatgcatgtcatggacaatccagtgccctaacatggacaaatcggtgccctaatgcagactgtccagtgacctaccatagaccgtctaacaccctgcagagccaaccccaaggtcctgcacatcacgttaaggacctagggtttgttagtattttgcccaaaaaggcaccaacataattttcggtgactccactgggaagaaagctttggatctacaaaaaccaggtcgcaatggccgattctaaagatctcaatgatgtttccctagacaacaacacaaggctgactatagagaatttgttggccgccaagcaaaagtagtttgaagactacgtggagaagctagatgaggaagactagtaatgacaagctcagattcatgaggaggcaaagaggtggtacctctcgcacttcatgatagattgccaccagaggatcctttaggagagggaagtaaagctcgcttccctgatgacctcgctgcagcagcccccactataagtaactccgatgatacccaatcc

SEQ ID NO: 161467 - DNA, 1132 bp, Zea Mays
cagccccgatgatcctttggttggagcatttgaacgtggcactcagactgtagccaatgccataataaaagtagatgaagatagcaccttgccagatgggttgtttgaatgtgtggacagtatttcaggttttgagcttgagcttaaatccaagtattattcttggttggttgatcgtccttttaaaggctatagtttttgttaaatttcatacgactacaagttagcatggattagcgaatttgctagtgagagctgttgatgacatgttatttatggcttattgtatgggcctattaatcatgtggacttatgtatattttgtctgactaggtttcataaacaaacatagcgtttgtgttagtttgtcatgtccacagagtttgtcaggtcctacctttctcgttttttccctttttttagagctcttctgttctcgtatcacacagcacctcacaactcggtccggatttgcaaggcccgaccttttctccctttaattttaacgatacatgcacagctcttctattgtatttgtacttatacgagaagaaaaaaagtaactcaaacgtagtccaacaatattttcaaaacagaacgcaagcgcgatccgtttcaattcaaaattctagcttacctgtgatcaagaaggcctatcagctggagagttcccggtgatcgtgaccgccagctcctgcgacgttctcctgacggcggcggcggcggcggcggatgattgttggctggtgcccccagctagattattagcagctccgttgggggcgtcgagaatggacggggaattcaacgcgagaggcatcagcaggaaccagcgttgtcaccggccggtctccatgcacgagtggaagctcagagcgctatcggcatatcaggcgcatgtcgagcttgccaaatttaggacgacatcgatcctatttctcggccgggcattgtgcatacgtggagagctcagcttagcaggatgcttgggcctaaggactggtacaaggcatagaaaccatgggtgtggggtggccggttggggagagacaagaggtaacgtagattgaactgcgcgctacacagatcagtttagaagacaaaggcttttattcttagagacgggtgtatc

SEQ ID NO: 161468 - DNA, 896 bp, Zea Mays
caaaaagtctccgcgaaggggtatcgtggatccagggtcgtccgatctccgcctagcggcccagattaaaacctcccaaccatgatacggtacgcaactagggcggttggatcggcgatccacggccccagtcccgcctgcgcgcggtcgactctccaccgcgcgatcgctatccaacggtggagcgctatcgctatcacatcatcaaatccgggccgatcattcacgcatcaacgacccacgcattctccccaatcctacaattgaatacggcggcgccgctcgactacgcccggtggaggatgatcggagctagcccggcacggcgcccgctgacccgatgccaaaacaacgagctacaatgcgttaaggaggactcgccgaacacgagggtcgattacttaccggcgatggcgtgcccagggagtcggtctgcggcagagtgcggtcccgcggtggcccttcaactacggcgagaaattggggccgccctgaagatcaatcccaccagatactaccagggacgtttccctggtgacgctacgaagctccacgacccttcaccaagacccaaacggcgacgtagccgaagctagactgcggcggcgctttctctacactcggcgatagggcggtactggaaattagggcgacagacctaggggaaactgtggaacggagagaggcaatggatcgtggccacggatataggggtgggctgagccgcagctgcaacgacgtcggcgagatccccggaaggtgctctccgcggatcacgcgatcgctgttgacgcaaccgtgcgaaggaagggggtgacaggtggtgtcccgggttcagtgaccgagcgcaacacgtgctgagccacggacaacgagggcgagtggctgacgtattg

SEQ ID NO: 161469 - DNA, 334 bp, Zea Mays
agaaagttttggatgagtcccatctctcaaaattttccatgcaccccggaagtaacaaaatgtatcatgacctcagatccttatattggtggaccaggatgaagagagagattgctaagtacatatctaagtgcgacacttgtcaaagaatcaaagctagtcatttaaaggtagtgggtaccttacaacctctccccataccatcttgtaaatgggaggacatttgcatggactttattgtgggattgcccaacacctcccggcaccacgattctatttgggtcattgtggataggctaaccaagacaactcatttcttgcccgtgcataccac

SEQ ID NO: 161470 - DNA, 290 bp, Zea Mays
tgctctttatgctactctactccttttatgggctaaggaaggtgagagggctacatatcaactgagatgtgggtcctactcagtagagacctaacaacttccatcttgtcatggtcgtttagccagtgatgatggcttatctttggttatgccataatgttggggatgtcttatagcagtggcaaatatggcctatcatagtctcgagtactgagtccatgatgtcgaagatggaaataaagatgatggcatgtaagggatagtagtctaagtatggtgctcctatgccc

SEQ ID NO: 161471 - DNA, 429 bp, Zea Mays
ctttcagtccagttgtcaagcctgcgacagttcgagtggttctctctctagctgtatctcaaaattggcccattcatcagctggatgttaaaaatgcatttttgcatggcacattggctgagacggtgtactgtgttcaaccgactggctttgttaacccatcacatccagattctgtttgtcggctcaacaagtctctctatggcttaaagcaggctcctcgtgcttggcaccacaggttcgcctctcatctcatgtcacttggatttgtcgagagcaagtcggatacttctctattcacatgtcatcgggggtctgacacggcctatttgctgctatatgtggatgatattgttctcaccgcctcgtcagctagattcctccaacatattattgcagctctccagcatgaatttgctatgactgaca

SEQ ID NO: 161472 - DNA, 298 bp, Zea Mays
tggtcttctttggccttcctcctggagttgccatccgagttgagggcatatggctatagctaggatagctagggtacatgaggtagttagatttaaacagagttttactttgcttttaggatatttggattaggcaacctatgatgtaggttaggttgttgtttacggacgagttagtccaaggcattaatttagggtaagatatgtttatagaatgagggcctaatttatgtctaacttacttaagtaactcaatttggattagctcatgttagattaggtgggatctagatcagat

SEQ ID NO: 161473 - DNA, 633 bp, Zea Mays
ccttagaaaaataaggtgaggaagtttgcttctctaattcatttaatcttctatatttacttgattttctaggttgtgtgcttatatatcctattctagcttgctaggttagttgatggaatcgaaattgtaagaaaaatggatcgagctccattaatatgatatctagatagttttttctttcaacccctccctccctcctcaactcagtcgccaacctcttcctcccctctagcagctcaatggttgcctcccctcaatgattgatgtcccctgggacacggtgctctcctctgaccttagacgacgcttggtgccccccgcacccccttcccgcgactgcgctcgctcccatagctctcgtggccaacgcgcctccaactgctgacggagccccgcccgacgttgctgagcctccaaccatgggcctcctccacttcttcacggcgcgtccaccctcccaggcactggtaaattctcctacggtggtccttccccgccccacgcagtcgattcgccctaccgacctcttgcctccctatgcggctcctcccaccggcgtccaccgccacgatccctccctcggctcgacaccgctattgtgcctagcccctcccatgccgccatcaggct

SEQ ID NO: 161474 - DNA, 516 bp, Zea Mays
tagaccgatcatttcatttctaggatcggcctccagggtcttgtttacaaaagtcggccttggagttttaccatctcctatgtcgatctcctccaaaggatcggccgatgtaaacccctgtcctagtttatcgagatctctgaattcctctatcatgtcccccacagaggaatcagataatctttgtgtgatggcagactctccggtctcggggggtggatcatccgtaatactgtctttacactatggtagatgttcggtcttaaagtctgaactgttttgtgaaagaccagatcatccggccttagaagccgaactgtccgtgaccaaggactcatgaattttgtgtgtactcatcatttaaactttatttaggatttagccgattctccatcggctctagcattacaggaatgaaacccttcttatctacaattatgaattggtaatcagaaaaatctactcatgtgagacatgtagcagtctcataagtccagagtataggggcatcggcca

SEQ ID NO: 161475 - DNA, 306 bp, Zea Mays
gttgtacggtatggcaatgacaggccaacatgaatacgacacagcggtcatattgaaaggcgtaaaaccatcagttgccaagctgatacgaacgtttcttgcatcgctggcaaaatctggatcaaagttgtcgagagccttccatgcatcaccatctgacgagtgcaccattaacccatcttgtctgtctgtacaatctttatgccacctcatgtgcatagcagtcttcctcgagagaaacaaatgtttcactctaggagtgagaggcatgtaccgaagctgtttatgtgcaacctttgtcaccac

SEQ ID NO: 161476 - DNA, 476 bp, Zea Mays
attgcatcggcgagcaattcgtctcgcccgccaacttccttgctctgctgaccacacacacaatctgcatgacttggtgatcccgctcgatcccccaacgatcgagaggctgggcgatggtgaacgcaaggtgtggtcgcagcggctctattctctctctcctactcgtcgttgggcttcagcgtaatcatccatgcaaggttgcgctagctcccaagcctggttatggcggaatgcacatgggggctcgtaccatgggagcagaggccagaggagggccgaacctgagcgtccacacgccatggctggagccgagcacgctaggggaaggtgctgcgcggccctaacgcctgctcgttgggcgccgaaggtggaggccaagcgtggcctgtagggagcagtccatgccatggagatggagcaagggctgggcgctgagtaccatgtgagacggaggccggtactggagaagctcg

SEQ ID NO: 161477 - DNA, 522 bp, Zea Mays
ccctaaaccacccttaattttattttattttaagctaaaccgtaactgataagctgtcaaaatcacgaaggttgcacgttgatcgccatacaatttgtcttctatttacatctacgacgggctcggaaacatgagttgccgttccaggcttgtttgggaggtatacgattgtcagaaactcagaattcgaactcaaacctgaacttgcatgcaaaggtcgtggtgtcaccggctctctgactcttcttgtttactctagaaaacaagaaaaaaacattggctgggagaaggagatggtagatcgtggtggcactctgttttgtctttaatgtaatgccgaagctctgccatcaattgaaatagaacataacttagagatggcaaagagtacctgcccgctacccgaaattcagtgtgttttaactcttttagggcatgtgtttatgctaatttctctattcatgggtttgttaatagactcaaatggaacccaacagatatgtgagaatgggtttattccac

SEQ ID NO: 161478 - DNA, 545 bp, Zea Mays
caccccggtcagccgcggtactcctcccctggctcaccgcccgcgggtaaagtgctcaccgtcgtcgtgccatcgccattgtccaccgcgtgtcctaaccgcgccatcgcatcgccgtgactccctctaaactccccgtcgaccaccggaattactgccacggcggtgaacacgtgttcactgcaccagcattcttcctcacttccgaccgccgtgtgtcttgtccaaaattcgcggccaccgctcgctccgcctataaattgagccctcccctagctgtgtaacatcatcacccacccagccaccaacaatcgttagcaaccgtgcctccgagagcttgaattttggtttctccccaatccgggtttccgccaccgcaaaactcacctcaccgcggccagcccctttccggtcagctcatccttctctctctctcgtttgagctttctcgcaactccacgatgcttgccgacccacgtaattgcgctaggagctctctggtcgccgggaacacgacgatctagccgccatgctctcggtcaccg

SEQ ID NO: 161479 - DNA, 498 bp, Zea Mays
cactcggctgacatgcagtttactccaccctaaacaacatggagattctgctcgttggtggggagattgtggtggatggccacagccccaccgctgctgccattgacgacaccaagcttcgatgtcgcgtgcgctcctttacctaccgcagggaacatcttctatctcggatctctcggtatgtaacgcccactaactcctcgctctacatccatctgaacatggagtgatggagaagatgtaagatgatcgtgtgtgtgtcgctgcaaaggagactcggtacgtcggtggggtgatcatggttggccgcagccccagcaatgagcatcgacaagacctcgccgagactcccagctacctcggtatgtgacgccaaccacctcctcgctcgacacctaaacaatgagatgattatgtgtgtcggtgtagagacttgtgtagatggccacagccccaggtttgctaccaacaacgacgacgagtttctaggtttcctcc

SEQ ID NO: 161480 - DNA, 474 bp, Zea Mays
agtcatcccctgaattgcatgagcgcgagtatgctgtaccgacttaagccatcaatgactttagccgataactccgtttgtagggcatagtggtcaccctgaattaagtaagcatgagcatgttgcaccgccttaagtcgttgccgacttaagtcgattgctccgttagtagggcatagtggtcaccccgaattaagtaagcgtgagcatgttgcaccgccttaagtcgttgctgacttaagtcgattgctccgttagtagggcatagtggtcaccccgaattaagtaagcgtgagcatgttgcaccgccttaagtcgttgccgacttaagtcgattgctccgttagtagggcatagtggtcaccccgaattaagtaagcgtgagcatgttgcaccgccttaagtcgttgccgacttaagtcgattgctccgttagtagggcatagtggtcaccccgaattaagtaagcgtgag

SEQ ID NO: 161481 - DNA, 382 bp, Zea Mays
tagagcatcatagaacacattcatggcttgatcattggttagaacattctcattgtcactaggtgatggttcatcttgcttcaatacaacaaacccatctctaacaataggccaaatctttcctcccatagctttaagatgcattgacattcttattttccaatagtcataattgttcccatcaaaatgttgtggcttcccaatgtgcacattgttgttactagccattttgtccaactccgcgatggttaaatccacaaacaatggagtccaaacctctgatgccacttgtaggatctaggacaccggctagagggggtgaatagacggttttaactaaaatcaaagacactagagaaatttaatcaaaacaacaagagat

SEQ ID NO: 161482 - DNA, 808 bp, Zea Mays
agcgcaccttgcgaccgcggtggcgactccaactcggagccgcccgacgccgatctccggcaaccccccgccaaccaacgcccaccacccaccaacctaggcctcacgccccacgccgtgccgcgcccccgagctcctcgcgccggtgccgtgccgctcgttcaggggaacctccgcccaggtgcatgcatgcagggatggctcctcgccaacttccactccgccgccaccctaggttcgatctgcccccagagcccggctcacctctggttgaccccgtcgtccctcctcccgcactacaacaccaacttcgtccgcaacgcggcaaactacctcctttctgtgcatccggatcgcctgcgtgttgtgtgtgtgcgtccgtgggtatttagggtgtcggtcgccagtcagaatattgcgaacgtccttgtgaccaggggtccccttgtcttagcatcctccgtgctcatcccgcaccactccatggtctcggcagtgcttgctgttgatcgccttgcgaagtcacccgaggttgacgatggcgtcttcaatgcagcccaaccaccccctgtgctaccgtcgttgtcgcccactccttctactgtggccggacaacgcaaaatctacagaaatacgatctcctctggctgcgccgcggtctctgccaggggaggaattacacgtcttgtctcacctgcccccgctttgctgccccttcccatccctgctgtcgcccgtcccgcgacacccgcttcatccggggacagcgcccccttccttaaagcggtgctctctcccgccaaagccc

SEQ ID NO: 161483 - DNA, 976 bp, Zea Mays
ctaaaaatgagtttcacatgcaacagcacactagcacagtactgtgttttatcaagggctttggataatgataattgaaatacaaggtcatccgaacctatgttgtgcacaaaatttgtaatatatagtaggaactcaataaataaaaaagtcattcaggaggtgtttttataaagcaggcatcaagcatcgacaatctataaacaatgtgagcatccataaaactgattggccaagtattgcttcatagattagagtcagagaaagagggatgtccataatcaagccaggtagtttctagtcacaccatgtatttgaaacaagatcagtagtatgggaatgttggggcgtgagtgtgtgtctggacgtctggtgtctgtggggttgtttgggctcttgccccttttttcttcttaatatagtaatcagctctcctgcgttttttgagaaaaaaaaatatatcagtagtatgcgcagaaacagaggctagtgaaattctgttttgcgatatctgttttgggactaggctctaggctgaagcttggaagtgtaagccctgagttctgcacctgtttgggaggattcttacttttcaaaggataacacaaattaacttatctatagcaccaatttggcttgtttttcagatatgttacaggggctgatgttttgaatctggacaagtcacatactgaatgtgtggagacagagtgaagtgctagggaaggtggcgcagattgcttgctaaccacaattcagtgaaaagaatgtcatggaccactttaaaactattagaatagtacgaacatgcaaatggtcacaactccaacaaaataaatccatccatcatccttcggatacatcgtcgataagttttgacttcgtgaggagcacaccatttccataaggagtgtttacagctgtctgcctgtcatattcaccagataaccttgtctaaaaagtgtgcccatgagct

SEQ ID NO: 161484 - DNA, 357 bp, Zea Mays
tcctggatcactatcttgaaatttggggaatgtccactttagaaatggccctgtcctaccctctcttccccccaccccactgctccctacgatctcttccacgctcctttcctccaccccgatgatcccatcaaggaacacacatctctcgctcagagtttctttcattaccttccaactccttcgccagcaactcgttaccttccaactccttcgccagcaactccagtcgcgcagtggttcgctcgttctcctccatgtgtcgagccatcagtgctcggtcttcctctgccttcttctgtccgatctccatggtttccatcttcctagtcatctgctccaccgccagcatcatcc

SEQ ID NO: 161485 - DNA, 582 bp, Zea Mays
ccgggcagaagagtgcaatgttccgagccagccagagttagattctaatgactagagggagccaatcatcagatatataaagaatgaagaggaaccggatgacaaagctgcagcagaacgcatcgcaaggtagtaagctcactacaccctcattggggaggcactatacagaaggggcacaataggagtcctcatgaagtgcattctttcggctactgggaagcaactgctagatgagatccacgccagacaatgcgggatacacgcagcatataggactctggttgggaaggtcttcaggtctggtttctactggccgacagcaaagagtgatgcagccgagttagtccagaggtgtgaagcttgccaatacttatcaaagcagcaacatttaccagcacagcaactgcaaaccatacccgtaacatggccatttgcgtgctagggactggacatgattggacccttcaagaaagctctgggagaatacactcacgtgctggtcgccattgacaagttcactaaatggatagagtagaaacccattgcttctctgacctcagctaaggcagtggaattcat

SEQ ID NO: 161486 - DNA, 459 bp, Zea Mays
cggggttgtgaatcggtacgttatcggggccactggatcccgatcctacggtccaaagtggatcttgagcgacttggaccaacaccctccgatcagctatctacggttcccgatcctattctccgagattgaatcacagtcaccggatcaggatcggacggctacgccaatccaatccgagcggtacactacaacagatctgaaccgcacattcacggatcgacggttaataacctatccactaccttcgcctcaccgaccgacggcacagagacaccacacgacggcgccatgaacggagaaccccgtgcgagcgccgacgagcactaaacctagcacgattatgcgcaaaacggagagggagggatagcgggtagtaagggggtaaccataccgcggattatgcgcacagatgccctgaccacggcgcatggtggaacgcccaggattccacggcgt

SEQ ID NO: 161487 - DNA, 463 bp, Zea Mays
tgacaaattcatatctttaaaattatgacagcagggatatcaaacaaaaactcctgaagcatctacataaaattccccacaagttttgtattcaaacgataattaaattccaacatctaaatggccccaaacagcctacaagatacaccctgcgttcagtttttggacagcagcctagctggattcaaaaagcgatatctcctaaaatatacctccgaatcgaacgtataagtactctttgaaaacatatgacaaagctctacatgattttcacaatgattaccactaattacccccgaaaaatccccaaaaactaataatactactgttgttcgtccaccaacaaaattctagacagcacctctaccgaatcgcataggtgaacgtataaccaaatgaattgcagcacaaatacatagataaccacaagatcaccttgagttcttccttccctccttccttc

SEQ ID NO: 161488 - DNA, 501 bp, Zea Mays
ttcttctccacaaacaacactggggcgacccaaggcgaagtatttggtctgatgtagcctttctccaacaactcaccaatttgcttcttgagttccaccaattctggtccggatactcgataggctctcttggaaatgggggcggtgtcaggtataagctctatggcaaattcaactttcctttcaggtgccatgcctggtaaatccttgggaaacatagttgggaattctaacactgccttgatagcttatggtggctcaatttcctcaatatgggcggtgacttggtgacagcttcctttccttggtccagacaagaccaactccactaacacttcctctcctaataaggacactaacttcacagtcctcttgtcacagctaaggcttgcttgatatttggttagccagttcatccctaggatgacatctatggttacatcccgggtacccattactatcggatcataggggaactctatccccttatttgaactcttg

SEQ ID NO: 161489 - DNA, 1020 bp, Zea Mays
gagcattacattctagatgtcattcttcagatgtagcttgaagagtttgttcgtctgaagcaaggcagtgactctgtaatgcagtaccttgccaagttcaaccacctatctcaatctgccatagaacaagtcaacatgaacttaaataagaaaattgcttcatgaggtgtttgagcgataggctgtagcgaaagctggctacctgtttggatcttaccttcgatagggtcgtaagcatggcgatatcggtggaggcaaataattcaggacaagggaagacaaaaaggtttggacgtgaaggaggtgagggatcctcttagggattcgagaagcgatcaaggctagtgatctgttccttcaacccgaatcgtgcttttcctcgcccaccctcctacccttttcagtagtcggtttttattcgtccaactgctgccccctactcaaaccactcagccacatagcaacgcctctagaacagcttcttcaaggcagtactccacaacggatattgctagaatctggactctcaccattttcgctggggcggtaagactcgaagtatcacttcgagccttgagtcgctgctcatgatgaaccagcaggagttcctcttcctcttcctcgtcctcatcctcctctgcctccataatataccgaggaaatcttgccataccaccaccacccacctcatcaactagatcgtcatccacaacctcaccaacaacaactagctcggcttgagcgaacactgtttacatatctgatgtacaccagagtttttttcttttaagtctctgagacatcaacctgggcatccggtcgggcaggccgcttgtgccatggaatcgcaaggccaccagctttcttcctagaggcaccctattgcccgaaggccgcaacccccgactcaaggtcctctgactcagacgactctctagcaagcatgcctagaacagctccaatctcagagtcatcagctaggagttttatggaaatgtgggtctgcttgtgctcctcaag

SEQ ID NO: 161490 - DNA, 1489 bp, Zea Mays
aggactcaggagagtatcctaaaaaaattataaaattttggcggctgaatgcggtgaaagggaatacaaaatacagtggggcaatgtgggccgtgtaatagaaatatgagttgttattgctggccttagtcgtgtatcaagaaacactataagtgaagttaggctcgaggacagaggcacgcaagacaacaatcagcagatattgcgtagcgattcttctcttcttcccaattcctggctgcattctagtggctactctctattactcaagtagcctaacagcagtatccaccgtgcccgagatcgccgccttccccgcgctgtaccaacggctaggcgaaaatcccgcaaggcggggtgaaatggccggcatgggcttgagatgaccccggacagttccttccctgcgaacgatgatcataggatggtggcgatgatgtgccccttcattccaagcaccgttgcggaatcgtggcggccgcgaatgcagccgcgaatgggaatgacatggtcattaggtcctgaatatgtcaaacgatattcaattcacagatgttaatttatgctacaacatttgaaaaaatatggaacttgcttcaatcaatgggatcgggtgattccatcgaccaaaaacattccagttccccctaaccagacccagatagcaggtgtccaccaaatcaaaatctccagatcgaaccaaccaattcgattgcaccagaatctttagtatgagaagaattatggcgcttctacctaagaaatatgtaaccctaaacctatatacagacctagagtgcatctggcaaaccctaataacaacatctgaacatgtgtgcaccaagccggaagcatatcggagacgtatacctgcgtggatggaggtgctcctgccagatcgagctgtcggatgaacaagattgaggctattgccgctcaagcttcagatctgaggctcaaagttgtaacaagcctagggtgatgctagcagctcgcgcctggcttggagcatcgtggagagggcccaacggcgatgtagagcatgagccgatcgactccaacgggaagacgcttgtgtcaagtgctgccggtggatccgctgcctcccgcccttcatggtggaccgcagcttccctcggtgtcccccagcaccaacgccattccaccactgcccaccatgacctgggatcgaagagggacagaaggtggatgctggaggaggaggggctggagtttgggttgtagatggcgacgacgaggaggaagggagccagcggatggcgcgacgtttcccgccagggagggggatgatgttgcagttcctgctgccagggagggcgacgacgcgatggggagagagaaacagagaacacgaggagctagcaggtggagccagagcaatggcaacacggacgtgaacgtctggtccgtcgaatccaacaaaaaaatttgggtccaagagctgctttccatgcatcgcgcagcggca

SEQ ID NO: 161491 - DNA, 777 bp, Zea Mays
ctcggctatagaaaggcagctgctggatgaaatccatgcgggacaatatggcgtacatgcagcatcaagaacattggtagggaaagctttcaggtccgggttctactagccaacaacaaagaatgatgcagcagagctggttcagaagtgcgaggcatgtcaactcctatcaaaatagcaacacttgcccgcccaacatctgcaaactattcctataacctggcccttcgcatgctgggggctggacatgattgggccattcaaaaaagctcaagggggatatactcacatactcgtcgctattgacaggttcacaaaatggatagagtacaaacccattgcctctttgacctcagcaaaagcagtggaattcattcaagaaataatgtttaggttcgggatacctaacaacattatcacagacatgggatctaatttcactagcttagagttctttgatttctgcgagtagaggagcatctagatcaagtatgcgtcagtggcacacccaagagctaatgggcaggtggaaaaagccaacgggatgatgcttgatgcactcaggaaaaagatgttcgacaagagcaaaaagcttgcaagaaaatggattagagaactaccgtatgtagtctggagtctgtgaacccagccaagtcgggccttgcatggaaacaccccattcttcatggtatatggatcggaggcagtattgccagtagatttgactttggagcacccaggctaacatttaaaagcatagctgaagctgaagcaacc

SEQ ID NO: 161492 - DNA, 570 bp, Zea Mays
gcatcgacggctggaacttgggttcccgggatccttcgacgacgaggcctgttcccctacgatgcgcgatatcctctctctccgaacatcacacatagacctgctcgagctacggaaggaaaggaacgtgggtggactacgtatcaagtctgatacgaagcggcttaggaaggataggatgtgggcgtatatgaaggcatgggatctccgtgaaaatcggtcagcgttgagccaggataactgcccagagatgtttagcggacatgggatgaacctgggcgacatcacccgtgacgtcatttccggcgagatgaataaacaatcagagaaaataaacaaacgtgtccctacgtgaatgtgggtcggtcgactaggatcaagtccatgtgcaaggtgaacgtgttcttttcttttcttttatacttcctatttcatgcttcaaattcaagataagttcacaaacgaaattccaatatgaatgcaaaggttttattttattttaacttattatcttactcatgtatacaaatgctcctaccctatgtgcaattcaacaatagtagttttatg

SEQ ID NO: 161493 - DNA, 412 bp, Zea Mays
gcgctgctcccctaaagctcacatcattattcccaaacaagaaaaagataatacaggcctggcctggccattgaagtgcataaagtaaggttccctacacatcctcatgaaatgtttcagatacttggagtcgtaattaacagctgaaccaaccctatcggacgaccaaccgaacattcactcagtgtcaatggccagtaactgaaaacgcacgcacgagcacatggcacagatgcagcaatcacaagacagccgtgactcgtgagcgcgcgcactgaagaagggagatgaccccaaccccaatcccgtacacgaaccaaaaacccactgacccaccggtacgccacacaccagaaggtaattcatcgaacacctctcgcgcttgagcgttccaacgacgtaccgccgctga

SEQ ID NO: 161494 - DNA, 351 bp, Zea Mays
cgaggccaccaggatccggacccccgtgagggaacgccggaccccaacacacctaattgggatctcagtgttcccctaagacggaacccggacccctctaggtgaggtccggaccgtccacaacgagatctcgggacggggaatatcctggcttaagtcgggggcgtatagggttccggcacagacatttgtcggaattttgtcaggcacgcctactttcccctgcctgggtggaaacccgatgctgccacgtgtctgtggcccgtgacgaaagccggagagcagggcctgacgtaaggtttcggacccgtgcgatctctgcatttattgcggagatcgtgtgccgcctga

SEQ ID NO: 161495 - DNA, 359 bp, Zea Mays
ggcacgagctattcccaggaacgcgtggctgtgggcggttcgctggtggccagggcagcgtatcagctcgccggactggcgacgcgaggtggcgaggcaggcgagcggcacggatgcaggcacgcaggttggtggacgcgatagatgcagggcttgggcacagcgttgcacgcagggaggggcagctgcacggcagaggcggccatggccgccgacgggtggggtagacgaggcggagacgcggagtggggggtagacgccggggctagggatgctcggccagggagcggtgttgttcgccgattgccagatgaacaactgcatgcgcattttgagaaaacgtcctagcaggaacacga

SEQ ID NO: 161496 - DNA, 325 bp, Zea Mays
cgtcagagatgctacatgggcagaattcgaagcagccttccgtgagcaccacgtaccctaggggatagttcaactcaaggaggatgaattccgggagttaactcaaggcggaaggtcagtcagtgaatatgtgcacaagttcacagagctggcccgctacgcgcctgaagatgtcagcaccgagtctagaaagatggcccgtttcctgagaggattaagacccgagcttaagaccatcctcgccagccaagacttccacaacttctctcacctctccaacaaagctattcaagtggaaagagcaaaagaggaagagaaagggcac

SEQ ID NO: 161497 - DNA, 736 bp, Zea Mays
tttactctaggtttgaaattcacaccaagatttgaaattgagtatttaaaacatgagcaaaatagaaacagaaaagaaaaggaaaaagaggacttccctgcgctatgggccaattcccctcaaaccggcccataacccctcatccttttctgagctcgagaccgctcgcgtagtcgcgtgtgcgtataccatgaccgctgtcctgttggcccatgatcacatagactcctaaccgcgctggtggagactcgatcacgcgcgcacgcgctcactctggtcgccgacactgtgggctcgcgtgctagccttcatcctgtgcacatgtgcactttggccaccgccatgtggaactcccctctctagtagccgagctcacatctctgcatggggggcccaactcctagttttatctccctagtcaaactccattctatgtccaaggtgtgcaccgaacttcagcgagatccgcggccctggcgcgtaccctgccccatatatatggcccacttccccctcatccatctcattcaacctctactgtgtgccaccactaaatagccttcgccacgccacgttctagagtgccggcgagatgtagagattactgtcgccgtggtaccatgcccacgattccggtctgcacccgaggtatggccgaaagagttcgctagggcataaggaaaccatgcacgaagtctctgcaaccggtggttgactgggtcatttgggattcctc

SEQ ID NO: 161498 - DNA, 761 bp, Zea Mays
ggtagcttcatcttcagtatgatggttccattgtaccttatagaatttaagagtcctttttcgggtgatcttgtccttcttatccaaaactcgaatgggatgttctgaataagttaagtctggttccaaggcaacatctaccacatcgatggttcgatcaggaatccgaaggcacttcttcaattgagatacatggaacacattatgcattgcagacaatgtttctagcagttggagtcggtatgccactggtccatatcgttcaagaataataaacgggccaatatatcggggtgccagtttcccttttaccccgaaacggttcacacccttcattggtgataccttcaagtatacataatcattaacttgaaagactaaaggttgatatcgcttatccgcataattcttttgctgagcttgtgcctctttcaagttgtgtatgatccgttggactttttcttccatcactttaaccatgtcgggcctgaaaaaccatctttctccaaactctgaccaatttaagggtgtccggcaccgtcgtccatacagtgcttcgaatggtgccatcttaatgctttcttggtagctattgttatatgaaaattcggccaatgacagacaatcatcccatttctatggaaactccaggacacctgcccacaacatatcttcaagtatctggtttactctcttagtttgtccacttgtttgaggatgatatgttgaactatggagcaacttagtacccaaggatttat

SEQ ID NO: 161499 - DNA, 330 bp, Zea Mays
gtgcggaggagaggaaggaaaggccgggatggcttcgatgcagcgcgcaggtgtttttataggcgaggagagggaattgctggcgtgttcaatggccattgaagctgataaacggccgccattaatggaggagaaaatgccaacagttatagcggtggggaaaaggaaacggacggacacagtattccatgtcgccgagacgacagcggcatgggctcgaatgtgggcgtacgcgacggcgaggtgctgtgtgcggcagctgcatagacgaagagagtacaacagcatcgcctgggaacaaagcgtttaagcagagaaacgaatgaacgg

SEQ ID NO: 161500 - DNA, 729 bp, Zea Mays
agcttaagaaaaatcgataaggattaacttagccggcggggattttcagtattcttgttgtgcttccagcgcttcacacggctttcaaccttgggcccgttgggagatttggccaatttgaaacagcacaacagccgagcagaagcttgtgcagcaacttcttgcccgcacactaatggtgtctcggtaggatcagatcgagctctttaccgtggggttatccccccaccctcgctactgatgttcgtcaggatcacccttgggacttggctgatgcgtatgggtttggtttgtgaagcataacagtagaaaggtccctttctttccaaggtggctcaggccatgcgatcacatgtgtcttgtagcacatcttgggcatcgggcgccgacacatcggcaagtaatcggtcaatggctctgtcgtccagtgcctccctatggcgactaggggatccaagatggaagggggtcgaacattgacgatggcttcacagacttcagggactgtatccagcgctccatcatatcctcgtcgtctcagccatgcataaatgtcaaatcaaagggagaagggtctctattacaactgtgatgaggtttactcgcgtgggtatcgttgtcagcccctattccatttggaagtgctcagcgagggtgaagaggatgattcactggaggaggaaccaaccctatctgtaatagccatgaagggtctgaagggcagtcgca

SEQ ID NO: 161501 - DNA, 515 bp, Zea Mays
caggagtcccaagagagctggccaagcacaaattgaaggtctatcctcaagccaagccgattcgacagaagctacgtcatttcatgcctgacaaaagagaagctatttgcgcggagctagcccacttagtgactgcggggttcattagggaagtgctgcatcccaagtggctagcaaatcccgttcttgtactcaaaaagaataaagtggattggcgcatgtgcgttgactatactgatctcaacaagcattgtctgaaggatcccttcgggctccctagaatagatcaggtggttgatttgactgctggctattctatgttgttcttcctagactattattctgggtaccatcagatcagcttagcgaaataagatgaggagaagactgctttcatcaccctatttggagctttctgctatacctccatgtcgttcggcctcaagaacgcaggagcaacttaccagagagccattcagacttgcttagccgaccattggggcaagcgagtgtaa

SEQ ID NO: 161502 - DNA, 1490 bp, Zea Mays
ctgagaccttaggttgactgaccgcataggcatgggaatacgcctgagacctttcgtgggggcatacaaccgtgttaatggtgacctctcgatgcccctgcagtatgttgtatgtatgtctagacgtggcttactgatgatatgtcttgtcatagctgacgtgggttagtagcactagagtggaacctccgccccgctgagttgctcgacggggacttggtcgaccgctttgcctcgcaggcttggtcggcaaaggacctggtcgtccactccttggcacagggttgctcgacaaatgggactgaaggaggtcatgggcctattttgggtaccctattcctacatacccgacagcagccccgagccttcatgcaaatttggagttgtgcagaggcttttgctcgaggctttacatttttttggcgtgtgcaagcacatctattagatgtagcccctgagccctcgagtaatccatgtggattgctcgggggtttatgtagttagcacgcagtttagagatgggtccatcccatggtggttgtcacgcaatgagcgtgagtccatattactgcccttttgttgaagaccagatttctcggtgcgcgcaagtgcatctactagatgtagccccgagtaatccatgtggaatttttggggtttttattcggtgtgtgtacagtttagggggcggacccttcttgtgatggtcgttcatagggtcttctatactgtactctcggtatgatgccttgccttgcttgtccgtcatacaggtccctgtagcgagtccattgctgatgtcttcataacagtgcgtggtgggtccagcgagttagtctcatggtgaggtcgtgtgtgtcatggcttcgcctatcgttatgagccctgcatcacgtgccagcttgcgtaggcttacatttggtatggcgcactatcccatctttcctagtatacgtgtcactgtagagactccggtgttgaggtccttccacgaccgagggtgactaaccccacagggcagtgggtatacacctgagacctttcgtggggcattcaatcgtgctgatggtgaccacccagtgccccttcggtatgatgcacgtatgcctggacgtggcttagtgatgatgcgtcatgtcgtagctgatgtggatcagtagcactggactgggacctccaccctaccgagttgctcgatggagacttggttggtcgctccgcatcgcagccttgctcgacggggacttggtcgatcgttccgcctcataggcttgctcggcaaaggacctgatcgtctactccccgacgaagggttgctcggtaaatggaatggaaggaggtcatgggtctactttaggtacgttgttcctatgtaccctatatcctccctctgtcacctgcttgtaatctcctaccacgagcgatgcgatttgtgctagtagcacaagccgtcgaagactagaatagggattcttggcccggaccaatat

SEQ ID NO: 161503 - DNA, 340 bp, Zea Mays
atctgtggtagaagaattcatggatgtgtttccggaagagttgccaggaatgcctccggaaagagaggtagaattctacattgatctcctcccaggcaccgcaccaattgcaaagagaccataccgcatggctcccatagaattggcagaactgaagcttcatatcacagaacttgaacataaagggtatattcgtcctagctcatccccttggggagcaccagtgttgtttgtcaccaagaaaggatgggagcatgagaatgtgcatttattactgatccttaaatgaagttacaatcaagaacaagtatccactaccccggattgatgacctttttta

SEQ ID NO: 161504 - DNA, 1094 bp, Zea Mays
agaaataaattacattaatacacatacaaaaacttgatgtttggtttttacaaaagactaaagcaatatacaagcattacactctcaagtatacaaaggtttagtcttccttcagcacttttttagcagcttcatttaatagtctagcgacggcttcgtcaacagctacattagcgattcttatcatatctaatgcttccttcatggccaggtcagcttcgtggttatatggctctggtggaggtgaaagttcagctacatcataaaaaatgtttgttagttccgaagctgaaaatgaactttgaagttgaacctcattaaaggtacctataagccttgcgcgctcggcaacttcttcagctcacttggtttcttcttgagcgtcatgagattctttttcatttttttctaattgcttcgtcaaccatctcacgtccgcccttcatccacacatcggagtagaatctcccacccagtgaagaagcttcagccgaggggtctttggtgtcatccactgagaaagcaaatcccggctgagctgcagccttaacatgttcacaaccgactctctctgagatcaccgcgaccccttgcgcgccagtgaacgcgcagaagtctcctcggtctcttaaaatttcgtcaaaggcttcgactccgctgatccactggacgactccatcgatattgaaagcctatgtaagtacacattgtattgaaagtcgtctagcatgcttgtttatcattcccaaggggcagtggctggcctcctagtgccgaagcgagaccatatagggcgttgaataatccctctcacatcctccctttgacttaggtcatttttcatgtaaacccattcctgcaaccaggagcccagccacctcttccaaaatgtgggaactggatagttcacttcagaccgaggcacaaaaccgtaacaaccaaagttgttgtgatattgctcctttccggtagccttcgtctcatagacaactcatgaatgttgcaaaagcatcttgcatctggttctagtccttggctcctcatggcccatataaagatccccactttgatgatagtttcgggagtaagttgat

SEQ ID NO: 161505 - DNA, 460 bp, Zea Mays
gcccgctacggatctaacggtctgagtctttcttcctcacctcctaacaccgacggtgaagatgacccaagaacccacagcggcgccatcgccgtgcacaacctaacctcgatactacgcgtccaaactccaatcgggtgggatctacacgacaaggaagtaatttcaagtgatcgggtgaggttcgtaccagcacaaaggcagcgggcagccctgtcctcgacgtacggcagattcgaagcttggtcgaagtccggcagtgaattaccaccggtccaagtcaccgtagtaccaaaattttccctggctacgccgaggtgcaccagcagatcacggcccaccccccaatttgccgacaacggcgtcgagtcaaagggctcacggcggcgggtccgctagatctctcagctcaccgaattcctggttcccttcgtcgaaattcgaggcaagaattggagca

SEQ ID NO: 161506 - DNA, 970 bp, Zea Mays
gagcatttgagctggcatagaaggtcggaccctggggttcgggtgaccaagggaatctctagaggagtagagggaatgccatacttttccacaaagctagtggctatgaaggagtgggatgctccagaatcgaaaagtacggtagcgggtttaaattcaacaaggaactcaccgagtactactcccggagcctgctgagcttcctgggcatcgacgtgatttactcgtgcccttccttggtacggggccttgttctgctggctgatggcggaaggtgccttgggggcggatgccgaggtattcttggggccattcaccgagttggagtaggcgggtcctggtggcttcagctgcagacaattgttcttgaagtgtctgggatcaccgcagtgccaacatgcatttgctaggggttggttgcttgccactgagggggaatggaaagagctctgactctgctggctgaatcatgacggggtgggtccagctggtctactgaagtttggccccttgggtggaaacccaaatgatcaagtcttctggtgccggtcctgctgctgtacccggagaacctggaactttcttttgagatgccctttttcttcctcctttgccctttcaacttgcatggccttgttggaaaggtgagagaaattgaggaagtcttggctagccaaaattgtcttgagttctggcctgagtcccttcaagaaacgggccatcttcttgccctcggtactgacatcatctggcgcgtagcgggctaactctgtgaacttgtgcacatattcgctgacagatcttccgtcttgagtcaattctcggaactcgtcctccttaagctgtacaagtccttggggcacatggtgctcccggaaagccgcttcaaattccgcccaggtagcatctctgatggtgacgttgaaggtgtcccaccaggctaaggccatcccggaaagttggtgggcag

SEQ ID NO: 161507 - DNA, 652 bp, Zea Mays
ctaaccgttgctaatcatgcaaatagcactgactggcggcaccacctgtggacgtagacctcagatgggggagtgcaccacgtgtggtgcgtgtcaggggtacctgtgatgggacattgagacctgttgcagaaccaagatcatggcaatttgcttcaatctttgcaagctaggaaacacggacattattggtgcggcatttttcaaacgcatgaacttttagcttgaacagaattctaccgtctatctatctatatattaaccgtgggagcaaagagatctccatgttgctccacgtcatcagaaaaattttcaccgtccgatagctgctcagctgctacatctatccgcgtgcggctgctgactgccctcgcttctcgacacttcgcaaatagaaagaggaaaaaaggatcgaaaatgggagcgtcggtcactggagcccggagttcacgagacggagcagcgacaccaccactagcacaacgatgagtttcaggagcagccgcaacatgttcgatttcgaccacgccgtcgctgtcaacggagcaccgctgccgtggtgggcagggtcgaccatgatgctaagcagccgctagctctgttgtcggaggaccactggcgggatggtcacatctaggctccccagggaccg

SEQ ID NO: 161508 - DNA, 371 bp, Zea Mays
cgctgcttctcgtcaccacaatgatgctcgtagtggtggtcgcggtggtcgtggccgcagtgccgcgggacgcagcggtggacgtggccgtggtggaaacaagccaacttgtcaggtttgtctcaagtatgggcatgatgctcttcactgccgccagcgcttcaatcactcattccaacctgaagacctgcgtgaacgcactggtaatgtcgcgaacactgggtcatacaacgtcgacaccaactggtacatcgatagcggcgccaatgatcatctaaccagtgacttggatcgcttgactgtgcacgatcgctacactggaaaggactccgtgcaggttgccaacggtgcaggtctgtcaatctcccata

SEQ ID NO: 161509 - DNA, 485 bp, Zea Mays
ctcaagggcactcgaactattactcgacttagggtgaccactataccctactaacggagcaattggcttaagtcagcagtgacttaagacggtgcaacatgctcacgcttactcgacttagggtgaccactataccctactaacggagcaatcgacttaagtcagcagtgacttaagacggtgcaacatgctcacgcttactcgacttagggtgaccactataccctactaacggagcaatcggcttacgacagtgacttaagacggtgcaacatgctcacgcttactcgacttagggtgaccactataccctactaatggagcaatcgacttaagttggcaatgacttaaaacggtgcaacatgctcacacttactcaacttagggtgaccactataccctactaacggagcaatcgacttaagtcggcaatgacttaagacggtgcaacatgctcatgcgtactcggcttagtgtaacatgct

SEQ ID NO: 161510 - DNA, 283 bp, Zea Mays
gcaatgtggtgtaccatgcgaatgttgttcctatcaaggataacgaaaataaatgcacgcggaatacttccgtgtcggccaattctcctaattgtgctagaaactggccaatgtgttcgcgtgtgcttttcccttgatcacccgaaaattttgcgaattcgggtatcctggtttcatgtgggtatgggtgatgatcaaataggctgtcataaggtttccgatatgattgcccccagggaccatgcttactccgagcttatctcgaaacaccccgactatttcc

SEQ ID NO: 161511 - DNA, 617 bp, Zea Mays
tgacactcttgtgcttcttcgtctcttggaagaagacgacgtgaagaagaaaaaaggtactttccccatgagagcacagttgtccgagtctcgcgcctaggctgcttccgtggcacggttcagcctcgtccttgcctctccactttggtcgtcgttgttattgtctcctaccctagttgtccagtgttcctacagccgcatagctaccgaatgcgcgatcgcttcaaccgaggcacacgctcgcgcagtactattaaccacaggtgcaaagagatcaccgcgttgctccacgtcatcagaaaacaaattcaccgtccgatcacagctcagtggctatgcctctacgcgtggaactgtcatccttctcgcttctagacgcttcatgttagggataaaaacaaaaggaagaacataaaagaaaaaaaatcaagaaggggagcgtcgaccgccagagcggagttcacgatatgacactcttgtgcttcttcgtctcttggaagaagacgacgcgaggaagaaaaaaggtactttccccatgacagcacagtcgtccgagtctcgcgcctaggctgcttctgtggcacggttcagcctcgtccttgcctcaccactttggt

SEQ ID NO: 161512 - DNA, 878 bp, Zea Mays
gcgctccaactgaatccgcagatgggcgggcacgatctgactgcggggtgataaaaccggtcgtcctcatctttcttgtgccctctgctccgttgaatttgctctagcctggccaccagagaccaccatcgctgccgtgcgaagtgagtttatgagtgtcgccgcatatcaccttgccgctggtaccacctgtgcccgacccgaagggactcagtggtccgccagggtccgttgaaggggcaggggccattggcgagcttggaacccgtctgtggtgcgcgtaattcgttatcgtcgccaggcgtggccgcggtgccgcaacgtcgcgcgggcagcgctggtaccgcaccacaccaaggtaattcgagccccatcatgttcgccgtaccctcctccacgttatgctttactgaattgaggaatagcgtagccgagctctaggaacgctgcgtagttatggcgccgccgtgccggagctggcgctccgccgcggcttgggtcgggtatgagcgaacgcgccaggaccgtttgatcgtgcgtgtgcgggcaagattaaaagtggcttaccgcttcgcttgtaacgttggatcggcgatggatggataggattagctccctgtttcattaaatcttggccgtcgatctcggatctgacgcgatgggtgaaaccagttgctgcttggtgtggatctaatctcggccatcgagtaccaatcggacggccagattcccaccataccccttcggtctggcattcttacataagaaactctaggctttttgaaatagaacccgcagtccacctggtgggtttcctgtgtctcggttgcatttgcgccagggcccctgacgtttctgggattcgaggcccagtccag

SEQ ID NO: 161513 - DNA, 770 bp, Zea Mays
acataatctccctccttaaactcaagtagtcttctccgggtatcagcataacttttctgcctggattgtgcagttctcaaattctcccttatttgctgaacttgttcttctgcttcttgtataatctcaggcccaaataactgtctttcacccgtttgatcccaatacaatggagtcctgcactttctgccatacaaagcctcaaacggtgacatcttcaaactggcctgatagctattattataagagaactccgcatacggtagaatcttatcccaactaccaccatgcttaagagcacaagctcttaacatatcttccagcacttggttagtcctctctgtctgcccatcagtctgtgggtggtaagccgaactaaaattcaatctgctatccaaggactcgtgtaacttcttccaataccgagaggtaaactgtgatcctcgatcagacacgatcttcttaggtactccatgtagacaaactatccgagtcatatacaattctgctagcttggctcccgtataattagtcctcccgggtatgaaatgagccacttttgtcaatctatccacaattacccaaatagagtcatacccagcaggggtgcggggtagtccaacaataaaatccataccaatttcttcccatttccactcgggaatcttaagcgggtgcaatagtccagcgggtcattgatgttcggccttgactctttgacacacatcacacttagccacatgagcagcaacatctcttttcaatccata

SEQ ID NO: 161514 - DNA, 832 bp, Zea Mays
agaaaagaaaatagaaaagaagaaaaatgggaaagtagcgcacttgggccaatttcgctttgctcggcccatttcctttcccttcccccacgaccgtgcatcccaatcccttgaaattcggtgccgacgcgtggggcagggctgtcagccccacaatgcttgtcgcgcacgatcgcttccacgccttgcgtcgctattccgcaggcccccctggcagtcaccacacctcacctgcatgtgtatggattaactacggacttcctctattgtgtgggcccgggactccacgcgttgttcatcttctagccggagagtattcgaccggatggcgcggaggttgttacaaccgcctctagccccgcctcggccgcagcttggggcattaataccagggggagcccttgttgtcttgaccccccatctataccgagtccacgaccagatcgagctaattcgggcacaaacccgtcgaggagagagagagtgagtgagtgagtcatgcgtcgccgggagtgccctagaccgtgtattggttgttcaagcgggggagccgcacaggaactcccacgtcgcattggacaagctattcgtggcatcatcagtcgagggacggtgatcgagcggtgggatttctcgccgggcagtggtggttggcgcggggttcccctcattggaggcagtagagtctacgcatccgatctaggtgaggactcctccctctaattcgttacggcctcctccatgaatagtgcgcatctagcgaatgttaggaagcgaggatgatcactggggcatcgctagtaatgtcgcagttgtgggtgaaagggccggc

SEQ ID NO: 161515 - DNA, 873 bp, Zea Mays
tgctgaaaaggtaccggcagaggtctttactggagttgatcccactggtggtgtacctgctgaagttgaccccaatgggtgtgatcgtgaaccaactgatctcaatgggtgtaatcttgttgaagctgaccccaatgggtgtaatcctattgaagctgaccccaatgggtgtaatcctgcaccatcttttatccgcattcttgatgaggacgaagaagaagaagaagaaattccactagttcgcaagaatggctgactctacagaggtagtagaggggatagtgatattccttctctagccctgtctgctcttgttagccttcaggatttatctataacagactttgatcagacccttgaggatgtcattcctgaggatatgttgtcagagccgactgatggtgatatgatggatgtccgctctgacattccagatgtgggattataggtatcccgggcagcatctcgcgcatcgtcgaccttggaaggcagtcttcggtgtcaagaggttggtcaagattgcccgactcccatggaggtgattgaggatccttcagccttagaggtggttgttgcagaaaacccagccccaaaggtggtgttggcggttacctagcccccgagggtgttgccggtaatgatctggctcgggtgggtagcgcaagctgcaacccagcccccgagggtgttgccggtagtgatccggctccgatgagcagtgtgagctgtaacccagcccccgagggtgtccgagcgagctctccttcccatacctccatggatgtccacgtcgggtcgtctccaccatgttctgatggagtgttagcgatgcatacttctttggcttcaagtgagggagtcaccttagaggtc

SEQ ID NO: 161516 - DNA, 878 bp, Zea Mays
ggccaattatacaccaacaactatatcaaaataccacaaattaccgagttgagtaactcaaacattgtctagtggtcgagaggttgtacaaaccaatggaagtgacatagtgagggagtaggcgacaatgtagtatccctcgagatagtcaccgatattaagaaagatttgccaaagatagaccttcgtctttggactcgggatctctgcccccaatggaccgagaagggtcgatcggcccactgttctcgtaggcatagcctgacttctcttagaggagggacttggcaccgaatctagtcggacgccatgtgcatgctcgagagcctcaagttcttcaactcagtaaacgttgtgtagtcacaattaacctactgatcagttgcaaattaatggttcttcacaccgctgaattaagatacatttttgtggcgatgtagtggttcgccgttattaaacgatgtaatagtgatggaaatttgctttctcactgacaacacacgagaattagcgacagaacaaagtgtttgttgtccgtcccgatcaaacccagaacgcccccgacgacacacgctctctctgatacgaactcaaacgcttgggacgcagagaggtgtgggtgcggacagagctttgctggctcgctgaactctccagccctttttctgtgacgaactctccggcagcccctttttctcgttgtactaaactgaatatatagtttttggcagcatatatattttatcgccgatgctaggttttctaggcctgtagtgaaaaaagagagagagagagagagagagagaaacagcaagatatatgtgttgtattgtatgtattatttgtctataatctagtacaacgcattcgtagttgat

SEQ ID NO: 161517 - DNA, 505 bp, Zea Mays
cgcgtcaagcatctccatcaaggactgtgtaatagcagagtctgggcaagcagcaccggcatcatcgctctcaaaaacatggagcctactttgtagctcagcatcaggatcatgtatgtaaagctgagcaaacttgggctgtgaacctggacgaggtagcaacgttccaattcgatgatgaaccacaccgttaattcggaaaacatacggtgcagtaccgttgtttatagccttgtcgacggaagcacccaaggaggtgaaagcgaaaagcgagttgtaatatcatatctggcgcaaaaaccgttttaagcgagcgtcgccatcaaaccttagaagagttcgcagaggttcaggtggttttttgtaaggttccaacctgatccgcccacccttacaacaaaggttgtagacaatcctccgttgagttacagcagaagcactcttgacacgctcctggaaccaaaagaaggcgccgcaaaaagggcattcgtgcgttgggccacca

SEQ ID NO: 161518 - DNA, 836 bp, Zea Mays
aactccgaccataaacaagtccgaccaccgtaccaagttgccacggccactgcggataacttcgccggtgaaccgccgtcgctcggtcttgcgccgtgtgtccgggcgctttaccacgtcgcggatagtcacgctaggggcgtccggtgatcgttggagagaccgccacggtagaagccacctagcgcttgcgccaatgcctttttctttcccggccaccgcttgcgagcgctataaattgagcccgcggctagcttcgcaacatcatcacgcaccaccacacccagtattgctcccagctgatcaccagcgagctcaaattttgcattctccccaacccggttcaaatacaacgtgaagctaacctcgccgtggccagccctccacaggtcagtccatgtcctctgcttccccgtttaagtgctctcatatgtctacgatgcttgccgacccacgcaattgcgctaggaaccctctgatcgccgggaacacactcctttgtccgcaatgttcacggtcgccgtggccagagctaattagttagtcgttgatgaaattaggttaggggaatggatcggggagggttcaattgggtgttagtcgcttggggaccctagtcgttgccccattcggccggtcctggagctcgccagagctcagccgcgctcgacgctgttgtggacccagcgcggtaaagaattagaaaccggagggtttatatgcaaaccgtcagcgactctgtgaaacagtaaaagaacccgtttccagttagcaaaaaccccgaggccctttctgtaaagccgccagcgctgccacggacgcgcgcgcgattccgc

SEQ ID NO: 161519 - DNA, 604 bp, Zea Mays
cgcaagtaagaatgatttgcaccaactagagagggagaatgaagaacttgaattgaaatcgcgctttagatcgaaaacttatctcacaccgaagaaacttcccaccgatcgaaggggaaggacttagggcgcgagatcggcgttgaaatgcttttgaacggaggaggacagtcgtcacaagtgttttgttcgtgagtcttagggtttagaaagagaggggaaggctttttatagccgcccccggctcagatctgaaatttctgggcggttgcgcaaataccggttgaaccggcctaaaactcggttgaaccggaaaaatccagtgagaaaccaatggatttccggttgaaccggccttgcacccggttgaaccggccctcactaaaaaaacacatattttgaagtataggaggagaaagcgcatggcaacaacgcaatttttcaaaactagaattttgaagtggatagaaatagttggtgcataccatccttaccttgcgaaggaataaactaaacgaagatccctattgctaatcaaagctgctcaaacacttgggaatctccgccagaaaccacttatagatctttatctttccaacacttg

SEQ ID NO: 161520 - DNA, 475 bp, Zea Mays
gcatgatggatgtttgcactgatgtgcctgatgctgggctggagttatcccgggcggcgtcccgcgcctcatcgaccttggagcgcggtcttaagggttaggaggctggtctagattgttctgctcccatggaagtgggtgaaggtccttcagccttagaggtggctgttacagagagcttggccctcaaggatggcgctagcgcttacccagcctcgagggtgttgccgaggatgacccggcttggatgggtagcgcgagctatgacccaacccctgagagtgttcgagtcggttctccctctcacacttccatggacgttcacgtagggtcttctcctccacattctggttgcatggcagcaacccaagcttcgagttaggaagtcgccttagaggccagcactcttgatgacagagttttgacccctgctgatgatactgatctggtccccactgatgcattgcgggttgtt

SEQ ID NO: 161521 - DNA, 735 bp, Zea Mays
gatacattcatagatagatagtggcaaagataatagtattttgccttgcctccctagctagctagcttttgctagcgaccttggatcatcgtctatggccgtggctgcttccatggcgatctatacctttcgcaagctgggcaaggtacccctgcgctctgggaggcagggaaagcgacgaccgaccaaccaaccaatgatggctaatcacatttgcaggtttaagtcaacaccgacatcatggttcaatcacttttgagtcttcagattctgagtcctagacttgaaatgcaactcataacagttgctcacaaattaaaatgcagaacaaaaaaagtcttgttgcaactgttgatggttagcaaaagtgaaaaatagatgtgattcttcaaatagtgatatatgtacacaatgactgtgtttttgggcgtcctcaaactcagattcttctatttcttgcaagttgtatgtgggtctgttagttgaactgtgatatacacacattagctaatagatcaactttgtattctcttagcttctatggcctatgggttaacacctatactttatttgtgtgttctcagatttccacgtgtaatttgtttttgtttattaagtagttccgttcttagataaataggcgtatatttcatctgcttagtatttgattattctttgcaaaatggttatcatctcactgagtgtattgtttagctgacaaagcattgtggccac

SEQ ID NO: 161522 - DNA, 668 bp, Zea Mays
cgatggcggatcagagggttggtttttggtctgatcagactagactatggactggtaggggtgtctcttggtgttgaacggagcatgaccatggctctccaaactacatgtgaaggggcttcccttaggggtggaaatgactggctctttgtgcgaagaggaagatttctttcagttggtagttatgtagccgtcacatgggcagtcttcgcttgggtctcttggtcttgagtggggaaggtgaccttaggcctctgggtgttgtcagtgaagactatctctatcaactccattgaggtggagttggatcgggtgttcttttcgaaagccatcgtgggattggtctttgtaatgaatacagtgggcgctaaatgttgggttctgacacgtggacccaaacactcgggagcaggtgagacaacggtgctcaacaaaataggaagctagggtgctcaatgtcttgtcaatcgtgtctcatctaggagttggatgtagttatttatagtgcaaccaatgggctagcctaaagtacgttcgtgcccttggatacctgctacatcctcagaatataatgtacaacagagtaaatacgaaacaatgctgacctagatctaattacaccaagagttgtacccgcaggagaggctgacagatgggccaactttaca

SEQ ID NO: 161523 - DNA, 751 bp, Zea Mays
ggcgacggggacggggagaggtggccggtctgctgcggcgtttgtgaccgttgggccagggctgatgacgatacgatttgcgtgcgtgcgtgaccggccgcgcctggcgcggtggtttttgaccgcccacgtcgtcgtcctcagtggcgacgtgtggaaatggaatgacgactaggaaatcctgcgcgccgactgctcgactgcagtccatcagccatcaggttcccatgaccccgcgctaagcacaccgatgaggtctgaagatggagccccaagaatagtggaatcatggtatgaatccgctctattatgatgtgttgttttttctaaccttattcatcatgtccttgcgctgtaccttagtggcttagtccacgaacttggttgtcatgtcacctgtcagcacccctcatcgacgaaacgcgccgtaagtgctagtcacaggatgaatccattttatcaagcatattgcacgaaatataggttcaccggcgtacccagaggaacctcagtcagtacccatggaagtccatacttctacatgctgctatcagaaattatcagaggtctaactactatcagacccatgatcctagcccctaggcccaccttgtcaaggagcatgatctcgaccccttgaagcaataactttgttcttgccactgccatccataagaacgccctaaatcctaggcgtcttagggctccaaatcctccttaacaccagggtgcttttaaacctagttctctc

SEQ ID NO: 161524 - DNA, 340 bp, Zea Mays
gctgaattcttttatggtgtttgtcaccttggaacacagaatcatattgatctttgcttttctttgcattgctcaacatcatactcatttactgtaccatttttatcagcttgcagtcatactaatcagaattgttattgttctttttcagattcaaattgtatagcagctttgtctgtgtttgtcatcttggaacacaaaatccctactactctccccccataaggtgtgtgcactccataacaacaatctgttgtgaaattacactgatatttgcccgtgcgttaggaccaattgccccatctgttaggaccaaatgattgacccatgtttttgttat

SEQ ID NO: 161525 - DNA, 835 bp, Zea Mays
gtctaattaaaacaaaccagggacctatgcgctaaaacagaggacggcgggttgatttcctaaaaccagggggtttctgaagaaaaacagccacacgaaggggtatcgggtgaatctaaccgttggatcagaaaccgacgaccgagattagacctgcgaccgagggcgcgcgcgcgggcgggcgagcgctgacaggtgggacaaggagtgtcagcgacagagggggagagtgcgttgaccgagcagacccagcgctagaggggaaacggatggctacaggggtctgagggggtcggagccgttcgatcaagatcggacggaggaaatcagaccaggaatgatgagcgactgcgaatggcactaacaagcgggccagggcgtttcaggcgcgtgtgcgtgaagcggtatcccatggtccgagtcgttcgatctgaatcggacggaggggatcagaccagggaaacagacggctgcgggcggtgagggaaacagacagctgcgggcgtgagctagggtggctctggggtcgccggagttgggcagagaggaagagggtgccacggcgaactaaaaggcggggaagaggccacgaatccacgggcagagaggggagaatggcggtgagaaaggtctcggggcgggccgggagaaactccagtgagcgatttcgacacggggaggggacttaaggcacgctaatgcctgggctggcttcagcagaggcagatgcaccttagggactaacaccggggaactagacagggctaaatcgaccggccaccgcgcgagcgcggcggaccgccgcggtcgagcaccggcgaaggagaaattggac

SEQ ID NO: 161526 - DNA, 345 bp, Zea Mays
gattctgctcaggtttgcttcttcattgatctatatatgtgttcataagctttgcactttgtattgatcattcctgtcaatgagacaattgcatttttgggacttcaaatatgacgtttcgcaataataccatccaaaacatttattttgtaaaaacgggacaataaacatcttccaattgattatactactatttatcgtattttttcacttttctaatttctttccacgtattttatactcacatttacccttacatctcttcgtcacctgctgatctgctatgcgcagccatggacgaggagagaaaggatcactcgatctgtcaagaactgcccgtcgcca

SEQ ID NO: 161527 - DNA, 685 bp, Zea Mays
gtaccagtgtgatacaactggtttttgggtactttaatttgtaatctatgttgtttaggtccaagaaccctataataactttgcagatccttgtttagtgaacaagctctgttaatggagactgacctattcttaaccagaataaggagaaaaggatgaatgaagaggggaagattagtcaagtgctgtagattcaaaagtgcagaaatatctatccctgatcttttcctcttgtcgtgtcttactttggaatagagtgaagatagagatgaggagatggcagggatgttcaaaactttgtccatcactgaaatatcacaaagtctgaaatatctgctacagtgacatcttatctccctaccccctgccatggataaactcacccttgccttgctatgctctgggaaccggcatgggtcttcagggtagagccacgcttcacacccatgcactctctggcatacctagagttatccttgctgtaatcccaagcacccagccatcccttgatcttttcactgcctatttaagagtaatcgaggggaagaagtaggagtaaaggagagatccttacctctgtcgtcaaccatggtgtgtagcttcaacatagttttgttgccttcctttccccaaactctaccgtgaacgtgcccaaattccttggtcaagtgactcaacgtgtctg

SEQ ID NO: 161528 - DNA, 403 bp, Zea Mays
ctcaattgcaagggtgactcatgaaggagaggaggtcgaagccaccaagacagccccgatctccaaagttatgaggcaatcggggttggttgtgacggaagaagttattgacgaagttgcacctactgtcgaagcagaacaagctggcatcaaagaagaaaacgttgatgaggaagaggaagactacaacactctgaccccatcaaaacccagccacttggactttgaaaaatctactgtgtctgaggctgatgtacccatgatgatgaagttgggttactttggagaagctgagaagaaacttattcgttttgccggagaagagaccactccagagcccaaaaatgacgaagtagtggttttcaagagctttttcagagcgggattgcggtttcccttgaac

SEQ ID NO: 161529 - DNA, 376 bp, Zea Mays
tgcctatttcttcccacttccattcaggtatcgggaggggttgcaataggcctgcaggtttttggtgctcggccttcgttcgttggcagatgtcacaccgagccacatattgagctatttctttcttcatccctttccactagtatctgtttttgaggtctaggtacatcttggtagtccctgggtggatggagtaggctgagttgtgagcttctttgagcaggacttctcgggcttcccctttcggtacacacagacgatttttgaaccaaagggctccttgttcatctatcctgaggtccgggagttgttccttgcgggccctttccgcaagttttgctgtctctaggtctaggcgttgagatttgcatatgag

SEQ ID NO: 161530 - DNA, 469 bp, Zea Mays
gtgggagccgcatggtgcattgcgtaggtttttgcgatggggcgcatggtgtggtagagccatcgtggtggaggaggtcgcggagtcgtcggcgcaaatgtcatggagctacaatagcagtttacggaggttgcggaggtcgcttgcggaggttagctatctgacgcaggtgggcgggggtttcgtggagtcagagctctgtgtgcgcggagtcggtgtggatgtcgcggaggtttcgcagaggcaggggcacggagatagtctacaatattgctttaatagatagtagagatagtgtctcctagcaagttaaccctacaaaatatataaactgcacgtgtagctactggtacgacttcattccatcacgtctcgtccgaggctgaatgtcgcgtcggaagtaggtttggctaggctgtcaagcgcctctgcgcagcttacaacgaaaacgttgttggtctagatagtt

SEQ ID NO: 161531 - DNA, 523 bp, Zea Mays
gcgatcaccacctgtgcgtcatggacagtgcccggcgagtccggtctccgtcggctgtgaagttggccacactcaaagacacgaacgggaggtcatcgtaggggttgggaggcggtgacgggaggggggcgatcaccacctgtgcgtcatggacattgcccggcgagtccggtctccgtcggctgtgaagttggccacccccaaagacacgaacgggaggtcatcgtcggggttgggaggcggtgacgggaacatggcggcgaggagactgaagagctgttgcttcttgctgtagccttgcgacgagggagcaccggcggctgcagcaagcgacggcgggaaagacacacgcaaggtgctcgatgtaatgcctctgtacagtaaacgtgaaggagataaatgactggtaaccactttggcatttcctatccttgcaaaactattaattaattcatgatgcaggagggtaacaaaggatgatgtagtacttttcctaatattacgttattttttgcagaatatt

SEQ ID NO: 161532 - DNA, 361 bp, Zea Mays
atcgatttctgtgattatttcctattttacctagtctctggatcgggcacggaatactgagaagtgcaggggctaaacactaaaatttctgagacactgagtacagtcagggtgtacggcgggttaattcgtgtaaagtgcggggtctctttagcaaagtgcacccgcgaaggggtatccacggatcccggccgttggatctgattcaacggctgcgatcaaattcaccaaccggtacaccccgattctaatctcgttcgttcacttatggatcgaaggccacaatcacatcttctaccccccagccaaaccgcaaccccatgatttattcccaggcgtcaaatccgtatcaaacggtccg

SEQ ID NO: 161533 - DNA, 878 bp, Zea Mays
aaccacaatgagctaagcgatactctgatctctcggcaaaaccaaaagatgcctggaacacaaaccgatgaaaagcacccaacaatcagatgataagatgcactggcagaggtcagtggcaaaacaaacctgcacccacggaggtcttcgcaagatctggtttaggaacgctctcagcactaaccccatggaatgccggccagaggcctgacgacacgggcgtggagcaggggtaggaggaggcaaggcggctctctggccatcgacggcctcgtctcttgtgggaaaagggggtcccgtgcatggtagatggcttaatcgtgtccgtgaggagcaggacgtcctctgggtcgacgcggggagcgacagagcaggcagagggagagaggagtgcgtgtgggagtgggatgtgggcgaggctaggtggtagtggaagaggtggaagaagagatagatggacggcgagttgaatttttgagaagccaaagggctgatttgcaaaatacacagggcacgtgtcatcgctgaaacggctgtgcctccgcaaaatgcggtcgtgcgtgggaggtctggtccttgagagaaagaacaaaaaagaaaagaaaccaaatgttattctataatagataacagaactgattaagaaacaaagaagcaacctaacatatattcagatgaatattttctaggtcaaaccactggtaaaaatagtagctgataattgtgtgacatgttagtccactatcgaatgaaattgcattttgcacaaattgtagcctcctaagctcctaccatgaacgaaccacaatgagctaagcaatactctgatctctcggcaaaaccaaaggatgcctggaacacaaaccgatgaaaagcac

SEQ ID NO: 161534 - DNA, 287 bp, Zea Mays
cgcggagctccaaactgagacgacataggagtagacggtgtaggagtaggcgcggcctgatactgaagaaaaccctgcatcggcacgaactgagaagtcccaggcacataaagctactgtggtggaagaggaactgaaaactgctgctcagcacttgacatcatgttgatagtgccctaagaagaggaggaagtcaccgactcccatctgagcttcccattaggattcctcctacacaccacatccttgtggtcctgactgcagatagaacaccttccaccccactg

SEQ ID NO: 161535 - DNA, 431 bp, Zea Mays
gggctcgtaccattatgtgggtgggttcattccatgatactgagggtctgtgggtgctagagagatgttagttgggggctgatagaggtgttgatggtaaaaatatgtatttttctctgttattcctagtgtgggcctcagtagctcgttgcggtgaacagagccgacctccactgggccggaccgtctgaccttaggcctggattgtctagtcgtgcacaagggcacagggtgttcccatataggtggtagaggatgtggttatccagtcttagagttcatcggcatcccataaagttgctgggattgggcatgcccgtttgcaaccgatggatcttatgggttttgtttagtttcaacatcatgcgatggaaaatgggtaatgactgatttatcaaatgcccgtgctagcctcctataatcctcttgca

SEQ ID NO: 161536 - DNA, 721 bp, Zea Mays
gtgtaggacaccttctcgatccacgatgcaggagagggatccaaagcggaaaacctccccgacgttgaagatgctcggagtgttcaagacgatagccatagagtcgtcgggaatcaacatcacaccccctacctggcgcgccacctgccggtgtttatgacccaactgcgcaccacgaggttccccacatgatgcttttgggtaggatggtgtcgttgattgcaactcgatggtacgtgaggatgcacgtcggatcacacgtagaggtttatacatgttcgagccgctagaatgcgtaacaccccacttcctatcggagatgagtctttgagtatcactggtgtacaaaggttgcagacaagccgtgagtggaggagagtgagttcttgtcgatctagtggtggtgtggttgctatgagagagctaatgagctatgaggtggtgatgagctaagatgtgatgtgagccgagctgagagatcagagatgaaataggtgttcgtaggcgtacccccttggccttatatagatgaccagagggttatccctttacaagccatgatcactctcttattgaatcctccttttaacgtggcacaccttccagcttatccggaattcagtttcccttcatctgagtcatctccgggtatctagcacttctggtacgctcaacctccttgcctgaggtagcagcacatgactcggtcgtccggccttca

SEQ ID NO: 161537 - DNA, 645 bp, Zea Mays
atagctcttggcttgatcatgtctgttatttgaatgggttgaaacaagctctatgtgcctcgtacagtcgttttgctactcacattctctctcttggctttatgagtgccaaatctgacacttccctatttatatatcaacatggccatgacacaatttgtttacttctctatgtggatgatattgtgctgacatcatcttccacctctcttctacagtgggtaattaaaactcttcagcaagaattctctatgatagatctcgaccatttgcatcattttctcggtctcacggtgactcgccagcctgatggatttcatatttctcagcgacaatatattcttgaggttcttgaacgtacgggtatgacagactgcaagccatgttctactcctgttgacacgagtggcaagctttctggtactgaggggccaccagttgctgatctgactcactatcggggtcttgccggcgcactgcaatatatcactttcactcggcctaacatttcttatgttgtacaacaagttagtctacacatgcatgatcctcaagaaccacattatacgttgatcaaacgtattattcgctatctgcataggacattggatcatggcttacatcttcgccccatggatgtctctg

SEQ ID NO: 161538 - DNA, 580 bp, Zea Mays
aacttcttttggtaatggatttttatttttactcttctgtcggaacctcaattatattatacatgattgttttctccatttcgggactttttaagtcttgccttaactctgtccatggactatgcttttcatcattatcacctttatccttatcacctctatatcttaccttgatgtttatcttatatcggcctttaaaatctcccccttttccatctcaatctgagagtcgtactttacctacttttcccttagtcgtatcctcttctttgtcacctgtgagtttttaactctatcctttgttgtgtttttgtttgttatttcctttacccttctcgtcactctatcctaccttgtgattacattatgtctgttatgtaaaatctccaatcttctatcccaatttaagggtggtgttttacttttctcacccttggcaatatcctctcctataccgcgtgcaagccttgacgtaactccattctttgttgtacttatacagctgactcttctatgtcttcatcttttctctgatacccttgtctattatcgcctttgacccttgcaatattgatgtctt

SEQ ID NO: 161539 - DNA, 486 bp, Zea Mays
aatcaaaggaccagatcagttcctgattcaagcgaaccggtacgccattttatgcatcggattcaactccaatggcacggatttaaaacatcctcgactaccccgcatccgtccgatcatattcaacggcttggatcagatctaccccaacccgagctggtatgggatcagggtcgaccatccaacgatctatggtacgtattttaacgtgtctaggtccaaacttggccatccgctattgaatcaatggtcaggattgaatacatcgaaccgttacctaggatctaatcatagtcgtctgctgaggatctaacgaccgacgacaccgcttcccctcaatgccttctcctcttttctctggttaggcgtgcaggcatacccgcggtggcgccattgccgcagacagcaatcccataatccttgcacccaaacttcgacccagaccgcggtacgcaaagaggagatggagccgaactagtaaagaag

SEQ ID NO: 161540 - DNA, 462 bp, Zea Mays
ccaaaagcttcttctaaggcatattttgcccctgctactattcctgtaagtttggtattagcattacagggcttcagcttccacaaatttaacggcttttatatatgactgtgagttggatttctgatttgcaacatgttcagcgtgtttactgtttagggctgccagtggccatactagctggatgcctacatgtcataaaaatcttctaatattgaatgactcattgagaattctaatagcatgggagctatggcaacatcgaaatgattgtgtcttcaatattgcttctccgtgtgaattcttgatcgtgcacgtgcagacagaggaggaaggaaagctatgatgcgcagcaggggctcagagcttccgtaggttttatagagcgtcttgtccttgcgatcgttacataactcaagtgtcgcacgcatggtcttaactcagtgctttgtgatgtttctg

SEQ ID NO: 161541 - DNA, 999 bp, Zea Mays
tacacagagatttcaaccgttggatcggcgtttgagggctcggattataagaccacatcacccaaccggtatgcgctatgcaccgttggatctgtgatccaaggataggatttaatgcatgagcgatctatccagaaccgtggattacataatcgacggttcacgctatacttgaccgaatcgttacctctggaatctatctcgaccgtcaatatttaaatctacggttcctggtaactctcttcggccgacggccaggatggtggcgcaacgcgcacccgcggtggcggacttcgccggagctggcccgaggctaatacggtgtatgattctctacgcggaacacgtctaaacaaagcggggctcaaagcgagactatagaagggattcgtaccagaaatcaagatgatgtgctcacagaaccaggcgtggagcggacaggagcgcaagccgatctccggcgagcaattcgcgcttcaacctccaccgccagagtccgccaccgccactgctgcgtttggaccgagctagcgatgcttctacggtatgcaccccaccgatgtaacggcgcaacaccactgcccgcggcgctccccttatccaacggcgatggtggagtagcgtggacatgccgacgtcacggggcccgtggaagaggagaggcttaggcacgcgcaggcggagcgcatcaataggaagagcggtctctagtagaggacgcgcatcacgcgccacggtcggccatggcggagcggcggtctgagtttttgctaatgcggcggaattggagctggcaatggacggctcagggtcggcgctagctagatggagagggaagggagtccaggagcacgactttatagctggatccgaaatctggggcacgccatggccaggaacgcgcgagatacccggcgatttcgacagcaacgcgggcacgattcagttgcgcgcgacaccgtcgcagggaagcagctaatgctggcagaggggccccac

SEQ ID NO: 161542 - DNA, 630 bp, Zea Mays
ccccagccacaaccagtagagatggatcctccgccaccgcctccaccagcaggagttgacccactggttgcagctcagatgaggatgatgcaacaaatggcagataccatggtgaatatgtgtgctcagatgcagcaagaacgccaggagatgcaccaggaacgagaagagatacgtcgggagctacgccaagagcgagaggagatatgccaggaaaggagggcacagcagcaacagcagcaacaatagcaagcaccactgcctccaccaccaccaccagttccaccccgagataagcaccgggagttcatgagccataagccaatgacatttgctagttctcctgatctactagacgctgatgattggctgaagtccatagagaagatgttgaacattgctcagtgcactgaccgggagaaggttttatatgcttctagatgtctcacatgtcctgctgctgattggtgggattcatatactgctgcccacgacgctgctgacactatcacatgggcgaagttttctacgcagttcaggaactatcatataccagttggactaatgaagattaagaagaaagaatttctgtcgctaaagcaaggaaacatgtcaatcagtgagtatcgc

SEQ ID NO: 161543 - DNA, 704 bp, Zea Mays
caacgagtgctcgtttttcctcctacaagcaagaacaacactaagcattgaagcaagggaagcaaaacaaaagcagccaagagagtttacctcatgtgccatcttctcggagttgagctgtgcattcagagaggagttcagggagcgagcaccgtccaagaaaacaaaagtttggcttaagtcgacctggctctaggaatacttctcttcaatatccaagcaccgctgagccaaatctgataaagcagcagaagaaaagcgcaagatttagaatgagacgagtaatgaaagcaaaaaaggggaaactatgagctcactaaccaatgtttgacgccctcagatcatctatttgtttttgaagcagtagagagttccactgcatcaaagatgaaacttggtcggggataggaacaccgcagaatctcagttgggcagatacaccgccaagaacatcctatgattatgaaaagacaagcaaaaaactagtttgctagtgggaacagtaaaaaagcgaaagatgactcacctgaagattggagaggaacaaaggaagacccaaagcaggaagagttgatacattgctcgatgaggggatgtcagcagcaacgacatcaaaggcgtggcttgaagggacctcagcctcgtcagtaggcggtagactcctggcgtctggatcactggtctctaaattgactagatcagcg

SEQ ID NO: 161544 - DNA, 593 bp, Zea Mays
cgctctccgccgtggacgcgcccatgacgcttgtttcctggccactcctccacgcgcccgaccccttttctgtaacccacacccactcgctcactccatctctcagttgcaccctcaacagacaccctcgctcctctctctcgcaccgcgcgcgcacccgtggagctccggcgtggtccatcgtccgtttcgtggccgccgtcaggcttctgtcacgtccgatgccctagtgagcttaacctcctcaccagcaacacgagacaccctctggtttgcccctagctcccctaattctctcggttcgcactcaccgaacccacaccgtgcagccggagcttcgccgccgtcgacccaaggcctccctgcgtcctcgtcgttgctcaggcgctctagagtcccctctcgaggtgagcaaactccccactcccttaatttcccatttgctgccctgttgtccgcgcaatcgctcgctggagttgagctgcgccgccgtcgggcccctccatcgtaggccgtgccctctggtgcctctgggccgatgtcgtgcctacgactaagtccaacgtgtcaccccgtgcttgcctgagcccttt

SEQ ID NO: 161545 - DNA, 741 bp, Zea Mays
tcaggctggggagcagcgcgagcgcctcctcgatggccctaggcccctagtcgcggccgcgtcgaaggcgtgggcggggtggggagctcctgggattaggttttgccggcctcggcgtcggcggtcgccgtgatgtaggtgcgttcaagcggggtgggtaggtgctgaggcgtgcgagcgcgtctgtggaggatttggcggcggttgaaccgtcgtcgttggcggcctcgtcgcagagaaggtttgatggggcggtttcacggggcctgggctggggagaaatgcacgagcgagtgcgagtgcgtttctgcgggagagtgcgtgcgttgagatgatccattaaagactggccgtctgatacgtttcagtaagagatctagtacgttggttttgacagtgggattattttggagttaatacgttgggtgtatttagctgggcatgagtgtgtgggataatttctatggtgtatctagcttagttttaactggtgggtttaatgggtagagatatatacacacacctgagacgatgaatcaataggtgtgattaactcgtttattgggtccgtgtacgctcattctgtccggacagttttttttatgtcccatatttaatttattaggcgagtcacttttatgttactcaaaacggtttcaatcaaaagcaccagctttgtccctttttattatttgtcatatatattaagttcatccaccctctaaccgatttcaagtcatt

SEQ ID NO: 161546 - DNA, 811 bp, Zea Mays
ctcaaggactggcgtccttctttggccgaacccaaattcaagatctagtgagtgtttcccctcacctaattccaagaatggcttcccggtttgctctggccacggtgaccgagggcatcactgaaggacatgggcgttcacggcaacccagggtggtctagctcaatcagaggggtcaaggagcttgaggaggacctaaggacgctagaacaatcgactagagcgcttaaacgaacctggaataagctggccgcggtgaaggtgtctctacggtggcggaaactcagtttgggggaaatacaaaattagagctctcgggtatacaattggaggcaatacttggtggcttggtgcgtgattatcctacggaccagacgacgtgctcaatttatagaagacaagagcggtggccgatgaatttgggagagacgcgcgacagccggagaaaacagaaagttactagtgcagtggatttgtgtcttccgttgtggtgaactcaccagcgatgaggaaatatcacaagccgagccactgcgacgtggtaaagtgctttagcacgtggcgcacggcggcaatcggccaacgccggcgaggtcttatcccgatcgatcgatgagcaaggggtacggtgagcttagccgcggccggactcaagttgatccaggcgccaagatatttacccgcccacagttatccacaatccacagcgcacgaatcccggcgatcgacgtgaatcacggcgcgacggtcatcggcggtgaagttcaatgaacctgatccgatcaggctactgtaccatgagagtcatctt

SEQ ID NO: 161547 - DNA, 710 bp, Zea Mays
ccagagccggatcactactggtgacatcctcgggggctgggtaactggcaacaccaccctggggggctgggttttctacagcagccacctctaaggctgaaggctcccctgtcacctccatgggagtcaggcaactcggaccaacgtctcggctttgaagactgccttccagagtcgacgaagcatgagacactgctcgggatacctccgatcccacgtctggaattcctgaacaaacagccatcacgtcatcagcagctggctctaatagcatatccttagggacgacctcctcaagggcctgatcaaaatccgatattgacagttcctaaaggctgataagagctgacagagctggagaatgaatatcactcccccctcactacctctgtaatgtcggctgttcttatgaaccaacatgacttcttcttcttcatcatcttcatcaaatatacagacaacagccggtgcacggtcacaaccattgggatcaacttcaggacggtcacacccattgggatcaactttaggacggtcacacccattgggatcaacttcaggaaggtcacacccattgggatcaactttaggacggtcacacccattgggatcaacttcaggacggtcacacccattgggatcaacctcaggaagtacctttgctagcacttcatcatgaaccggagtagaaggacctgcatcctggtcca

SEQ ID NO: 161548 - DNA, 447 bp, Zea Mays
atgtcactgtaatgaagtttggaattgggtggcctaattccacgtgatacagagggatgatgatctgtattgggggaagggagtttatagtcacagtccaataccacgaaattggctctctagttccaaatctcaatttccgtatgcaaccaaataataaaatttagggaagctaatttccaattcctgatttctgtgcaccaatatctacatccaaacggtgtgtaagaggagcaaggatgatatatatagtcgattgctatctataaggatctttagaacttcttagtccacctgtataataattagctcttcgttattaatgtatacttgtatctctaacaaggtttcttttttggttttcatgtctataatagttagctcttcattattaatgtatgacctacttcttagtcccgttctctcttccttccaactcactcagca

SEQ ID NO: 161549 - DNA, 309 bp, Zea Mays
atcctacaaatgaggatgaaaaattccatgaaagtgaagatgatcttttaagctctcaagatctggaggaatttgccaaagatgatgagggaatcatcccttcctctcaagggaaaaacaacaagtctcctttgggtaaccaaactgaaggttctggtaaaatggagtctgaaaaacaagctgtgggtatggaagtggatcatgctgaaggtataagaaggagcagcagacttgaagctaacgatgacatgaagattgtagataaagcgacagcgagagctatggctaagcatgccttcctgaccaaag

SEQ ID NO: 161550 - DNA, 447 bp, Zea Mays
aactggccataattcaagtgtttgttttttagcagtatcatatggtcttgtttatcatatggacattaaggcaactttcctatatggagactttaaataggagatttatatggatcagttagatgggtttgtagtaaatgttaaggcccacaaggcccatattgtctgcctatatatatgctacagtacccgaggggctattatctcgcctaatccaggttagtaacatggtaacagagcaggttagggtttacgtctaaacccgaccctgatacaaatttttggcgccgtcacgccgtcgctgtgctgccaacgcggccagctctccggcctgccgtcgcggccacccccttccctcctctagcgctgtcgcgcggtcttccccttcccccatcccgctgccagggccggttcttgcctgcgccctgcgccgtccgtcgctagggc

SEQ ID NO: 161551 - DNA, 461 bp, Zea Mays
atagatgataggtctacatcttgatattgtgtatttgtaggaagaaatctcgtctcatagcgaagtaacaagcaagaagcaaattcgtagtggctcggtctactgcagaggctgagtacagggcaatagtgttgagcctatgtgagatgatgtagttaaaggtctcgctaggtgagttacgggtgttgaggaatgagactgatgtttcactgtgacaacattgcggcgatcaatattacaagcaatactgttcaattttatcacacaaagcatgtggagcttgataggttcttcattaaggagaagctagtagggtcttaaggctagagtacattaagtctcgtagccagctagctgactgcttcacaaaagatctaggtcctaaagagaagtcaagttgtaacaagatggacatgagaaatatttttggcctatcttgagagggagtgttggtataaata

SEQ ID NO: 161552 - DNA, 901 bp, Zea Mays
gttcacagaattggctcgctatgcacctaacgatgtcagcacagaagccaagaagatggcccgtttcttgaaagggctaaaaccaaaactcaagactatcctcgccagctaagatttcctcagcttctcgcacctctcaaacaaggccatacaagtggaaagggctagagaagaagaaaagggtcacctcaagaggaagtttcaagtcctctgagctcagtagtaggacaggcaccagagagttcgatcttttgggtttcctcccaaaggaccaagtttcaacaaaccagcagggtctgctccatcacatttcagtcagcagggtcaaagttccctccaggcccactcagttgcaagcaaccaacctccagccaatgcctgttggcactgcggagaccccagtcactacaagaataattgtcctcagttgaagacttccgtgcctacctactccaactcggtgaatgcccccaagagtgccccatcacccgcctccaaggcaccctcctccaacagccagctaagcaagacccagtattatggcagggcacgagtgaaccacgtcgacgcttaagaggctcagcaagccccaggagtagtgctcggtgagttcctagttgaatttactcccgctgctgtactttttgattcaggagcatcccattctttcatagccactagttttgtggaaaagcatggcattcccactgcacatctagaaattcccttggtcacccgaaccccagggtgagaccttctatgccacctcaaatgctcccaagtcaggattcttttaagtggggtagtgttcttggcagacttagccgtcttgccatcccacagaattaatgtgatcttagggatggattggttaaccaatcacaattgcgtcataagttgc

SEQ ID NO: 161553 - DNA, 932 bp, Zea Mays
ctgctgccttcgacaagtcaggggaggaggtgggacccgcttcttggggtggctacaggacaagctagagtcgctcccgtctattatgatgggccatatgtcctatgtgtctcttgtgacttgtgagggggctacgaatgccttgcccggtgagggatgtaggcacttcgaggcctttgatcagggcaacgaggacttcgatgctggtgtgttccagattgaagacgacgtgctaaagcactctatgggggcgcttaacgataggatgtggggtcctcacggccgcggcttcgtccgagagagagccgatcgagcgctggtgtaggttttttgtttttgatgatggtggtgtgtgtgtgtgtgtgtgtgtttgttgtctgaaacgttgttatgttgtctttgcaggcaatgtgggatgaagaggtggaagacctcgttggccttgagagctcggtggcttggaaggacgttgtgatggagacgggagcggaagagcaatcctcactcaaggaaggcggcgctgagggtcctgcggcggcgggtacttctgcgcaggttgaaagaatatagtaggagtggtttgtcttcactttgtacatgatacttaagatcggttgctacacaggtttcgacgtctgggcctacgcaaacaaactttgatgataacgagaatgatgaatcgttagtgtgtcaaagtgtagtattcttagtagctagtgacgcatttgcggaatctgatgttgggtcatgctctttggaggttgaggggttggtgagcccgtttgctggaatggacgacgactcttcgaaagattatttagattattttatggtgctagatttatttgtagcggagtctccatcgagggtcgcccccctacggtggcgaggacttcggtcggggttgccctaggcgaaccgcgggatcgaaa

SEQ ID NO: 161554 - DNA, 694 bp, Zea Mays
ccgctgtaccggtggcacttccgttcgggcctcggtttggcggggaaaagcactaacgacacgcgtgtgatctagccatagcttcgcgtagtgtgtggacggccgggcaccgccgcaatttctcgctggtggtgaagctgcaccgccgtctgcctggtgtcgtggttgggaggaaccactctaagaattccggtgagaaccatctgcactactaaaccatgtcctcaatttcgtgttgcgtcgtttaatttgagtatggcggtgtggagcgccggattgagatccctccagtgaggtcgccgccgtggccaacgcgttgccgtcacggcgttggggggaaggaggaattaggtccctggccgtaggatttgggatggacggctgggattagaagtagcatttaccccttcgcgtattgaatccaagcctttggcgcctgatcgagtggatggggtggaatcgtgttgagaccgtctggaaccgtggatgccgcatccaagggttgtgggttatacctgttcaccttagggggaatctaatcccgatggttgaagggcgatcggacggatctggttcatcgataccctttcgggtgtgtagtattgctaaagagcccctggatgtttgggacactaacccgcagtccattatactgtactctgtgtcttagttatttagcgccaaggcccgtgcg

SEQ ID NO: 161555 - DNA, 809 bp, Zea Mays
atagattagaggtaagatagattagagcaaatagatattatacacggcccaacgattcaaactagaacctgctagttgtctaccatttctaattagtggcactgtcttatggatccggatgtctaccatttctaattactaattattatccaaacaatgccagttgaagtgtcatatatattgtcatggaacaacaaacgatggtggcctgctagctgctgggacaaatctacaaaacatatcatcctttaacttaatcaggtgattgcatgtggcttaccttcttcttgttgtggacctttctgacttctttgcctccttgttttcaccatcaaggtcgtcggcgatgacccaaatccagcaatggttagggtttaggggtaggcgagagaaatgtggatggggcgtgttaggtggaaggggcaagagaaatgcggatggcaatgagatagagtgggatgcagcgagtgaagtcggcgacgacgcagctcatcgacgcgatgagaggtaagggggcgggggtgaggtacctggtcgaggaggtaggtcatcgatgacggttgtgtcccagcgacggcggtgaggtacctggtcgaggaggtaggtcgtcgacggcgattgtgtcccggcggcagtgattagggtcggagaaaattgtgggggagaaagaggatgagtaggggagaaagaagaggaggtactggttgtgtctttggcggcgttttttagtgaccacgccgaaaaatgttttttggcgcccaatttgtttggcaatgcggaggctaataagtttaaatatagtagcgctg

SEQ ID NO: 161556 - DNA, 573 bp, Zea Mays
gaattatttgtagctgtggagtggtcatctgttgaacagacatcgcacttgccaactgctacatcaattctggtggaggatttgatagcatttgagacatcaagtctttgaactctttctttgcctcctgcttaaaataatccgacaactcttctttgtatcgatcacgtttcttgtacaaaccttcccactgtggtccgaatccttccttccatccttccttagacaagattcctcgtacatggcctggatgctcagggttaccgagaccagccattaggatgtctctctccctttgtggcttaaatgatccttggctctgcttacctgccattgcatatatgtttttcgcaacttcttcgacatttggatcatcaaaagatacaccagccttagtttgcctgggttttctagcacggatccaatttgccgtcctttcaccaagttgctcgtaaagcgtcggcaaccctgcgaccttcttctcggcgtcttcttgtctccatttagaaacttgacgcttgtaaccacctgtgcctaagtggtggtggtacttgttcttcttagatagttctg

SEQ ID NO: 161557 - DNA, 339 bp, Zea Mays
tttggcttctttaacaaagtcgggtccttctagtgtcctttcccctacactggaccacattaggggagtctgacattttcttccatacagtgcttcgaacggtgacattttgatgctggcttgatggctgttgttgtatgagaattcggcgtacggcaaactggactcccaatccctgtcgaaagttaacacacaggctcttagcaaatcttcgaggatcttgttgactctttctgtttggccatctaactgggggtggtaagcggtgctgaaatctagcttggtgcccattgcttgctggaggcccttccagaattttgaagtgaactgtgttcctct

SEQ ID NO: 161558 - DNA, 454 bp, Zea Mays
gtgacactgcatacagtttacaacacctaaacatgacattttctttattgctttggagtcattttccttgcacatggcttctccacgactggtggtgaatatagatggcttctccatgactggtggtgaagtagtggcatcttcaacatttgcagtcttgggatgttatcaaaactaaagcttgctgacattggttggcctaggaggaggtgccgacaatgtggtgctagacggttattggtcgccaccgacgctgcattctggaggatggtcttccatggcgatgggagattgaatggcatcagcttcggaacgaggctgccgcgagtgaacagaaggagatgtatggagatgggaggtcacggagagatctatggagaggggagcaaggtcacgaaggtacatatggagggaggactcacgacattcacggtgatttggcgttgttgtcctt

SEQ ID NO: 161559 - DNA, 704 bp, Zea Mays
agagctatcatgagggaaccccacaagacaagaattgtgtctatgaaacccacaagagagagtatgacaatcttgtgcatcttgagggagagtccatcgacgccttgtttgctcgcacccaatccatcatcaacaagatgaaggcgaacaagctaacgatggtccttgacgaacatgagagagctatcaagctactctatgctcttgatcgcaaggtttgggggtgaaggtgaacaccatccaagagtccgccactttggacaccctcaccgtggatgagctgttcagcaagctctggaacccctctgcaccgaccatggctcttgtgttcggtaaggcaagttcaagttctttgactaacacttcaaaacctttatttgcttgtctacccttgtgactgtgacagaggagcaaatggagtctcttagggatgatgagctggcacttgtcatcatccgattcttgcggttccacaacaactgcttgaatcaccggcgtggtggtggtccaaaggaaggatgctttgggtgtagtgaccccaaccactacatcgccaactgccccaagaagaacaagcatgactccggcaagtataactctgacaagcactcctacgacaagtacaactccggcaagcacaaggacaagcatgaggccaagtataagaagagtggcttcgacaaggagtacatcaagaagaagta

SEQ ID NO: 161560 - DNA, 437 bp, Zea Mays
gctaaacctttttatgtcttcggcacctccacccctgccgaagagcttagaacttctaatgttttcacccctttggttcttggtctttcaattttgtcagtctttggcattgcagcccgctcttcaatcctctgcataagagcatgttctttgacttcaatagctgaagaagtctcaccgccaaattcaggcactgtggccgattcaatgtagcgcggtcggtgggtaaggaccttcagctttttcctcttcggcgcaggctcgcttggagcagccgtaacagcgacttttccagaagttgtactctttctcttttgcccccgtggcaggtagcggtagtcagggtacataaatccaatagcatcaaaaactctatttagcctcttctttttcggctcccgaaggccgcagatagtgcgttatcttcagacttggag

SEQ ID NO: 161561 - DNA, 1921 bp, Zea Mays
ttggatctgctcaaatagatcgatatggtattcagatctatgttgtatagctttttcattagctttctgaaaaaaatggtatgatgagtgcggaatagctagggctgtgaaggagtcggatgggcttccacttgtttgtggcccatgtgtcgaggcagaagagtcggtcatggaggggcgggcgaaagccttagactagctccaacatgaaagcttagtttacaaattacagaagatatttctctgaatattttggacgttttgctgtgattcttggtcttcttgtgtcactagcttaaacagtgaatcaacgtgcatatttgatatcttgttatctcatattgtttttagcaatattacaaattacgcaagtgcataacggtctttatagtagatatcttagtttatatttgatatcttgttatctcatattgttatctcatattgatatcttgttatctcatatttcatattcttcgtcttcttgtttttgtaatgacagttttgtttcgccacttggacgttctatatgggtacactgcgtagcccttctttgtccagcttttactttgtttcttatgcaatatcaatattagtggtagtacacatgcatatgttccgattaacccattattttgtagaacatagtaaaaaaaatgccagtatagaagtgccatctgtttccgtcacatggagtgtgatatgattaaactatgcattagctggcaatttcagtaccatcatatacgctactgttgaagggttgagttcaagttatatgatcctgcgatctcttctttgcagtataaataatgcgacatgaggaccgaatatcttcattgattggtgtaagaaaaaggagtttcctagagattcacattatatatgttgctatagctctactactactgctaccaagttgctctcctctcctctcctaaaatagctctattctaggtgtttagtatggctatagagcaaaacttcaagagggagctagtcacagccaatcaaacactcttaactacaattgtctgaaattcagatttaaactcctattcataatatgaaaattcagacacattggcagccccactttgaatcaccttttctccaagttcccttattgatggaaccagtatatcagactaacagtatatcctcggtcgacccccttattgatggaaccagctgtgcactaggtacctagtaggatggatgtgttctgcaccggtgcgtctaacagagttgatgaagacgcgaccaaacttgaatggcagacaacgaacagctccggtgaagggagcggggatgatagttctattgacgacaatccttttcctcctatatctccaaggaagaaaaaaaacatcagatgagcttgatgccgactatattcccaacgatgaagaggtaaatagaaatatgccgactatattctaaaataatgttcatatatgaaggccattaattgttttaatatatagatttcaaatgaagagaagaaaaagtatgcatgttctacacgaaacacggaggatgttccgatgcctgaatcatctgtttcacataagcggaaacgagggcgacgaggtcccaatcagatgaaagaaggtgcagttatgtacgtaacaaaactcaatgcagagggtttcctgaagaaccacttgacgtggttacaaagtttcgaaattcatgcgggtctactgttagagatatagtgccaatcacacttcagaaatggaaggatttagatgaagacacccgcaataaactatgggctaagttgtctgagtcattcaaggtcccaaaaggcacagaggttgcagtaaggaagtcgatgctctctgctatggccaagatgtttcgtgggtggaagaccgagatgaataaggattttgttaagaagaataaggtttct

SEQ ID NO: 161562 - DNA, 544 bp, Zea Mays
ttgggggcgattttgagtaagctccagtggatgtttgattatggttgctataacaaaattaaagctggtttgtaggagattaattttgctacagaccaattagagggttgccacataaaaatttgtgaaaatcactcctgaaaatgctccgtcaggcgctctaaatggagttctgatggtacagtactgaagaagatcttcaggtgcagtgcacctcgccgccggtgaccccgcgcctggattcacgctggcgatgtgattcgtgcctgttggcgcgcggataacgactcggggtgaaaaaaatcttcaccatggatgagaccgagagccggccccgtacccatttaccttgcggtcggtccaggtaacctcgccggattttgctgcctaccgcgtgaatgccacgtgccttgaagctttaccacgtcgcagtaagccgccttaggtagctggttcatcacctgagacactgcctcggtgaaagccacgaaagctcgcaccagtgaacctcccctccctccggtcgccagcgcgccttctccaa

SEQ ID NO: 161563 - DNA, 357 bp, Zea Mays
cttgggtgggcttgcgcgcctgactgaagtgcaggggcggggtgttgtgaggaagacacatcgtcgacctttagatccttagcagatggctgggagtagatcctatggtactggttgggcctgagctcttctcggtcgtcgatcctgggatgagcgtaccagggtgggtcgggtattttaaacatctaggtccttgatctctgatcctgcggtcagcaaaggataccggttcacataatggctgatttgatctgggcggtctgatgtagatctaacggctcatattcaccaataccccttcgccccagaacaattccaaaagagaccctcgattttatagatataaacccgccatcc

SEQ ID NO: 161564 - DNA, 839 bp, Zea Mays
gggcaggcgaggtcattgaaatgatagaagaggtgagcacgtattagtcacatagtcataagtatatgaaatgtgaacaaatacatacaccgagaattattgcacagaaaacgagggatttggctatagagaggtcaaacgacgtgaaaacgacgtttgaacgaggaatagtgccgttttgaaattggaattgaggcatgaaatgacttggaattgagtcgatacttcacgagaggtttatatgggtaaatatgagtgaagtgtgcgcttggtttgattttaggcgatgaaagtggaattgtggcactcggcttggaatcgatcgctagaaatggggatttgtggaaatttggagtctgggatatcagattagcatgaaatttggcaaataagttactagagatatcatgaaggtgcctgaaaaaattgggatagattggagcaaatttggctggtttggacattttatcgaacacctggcgtgcgagggtttaggtgaaatggccatttgagtgattgaaaccctccataaggagctaggaacctgcatggggaaacacagaggcactatggcacacatccatgcacagggattcacaagatgacacatatttggtttattggatcaaaggggtggagtttgggatctgctactcagagagacagagagaaaaagggggaaaacagtgggggagctcaccgagagggaagagcaggcactggcaggaccaatcaccaccggagcacggtcgccgatgagggagaggggtggagatcatcgtgaaatcgcagagatgagagagaaaggcgctgtctaaaggaaacagaggcgctagctc

SEQ ID NO: 161565 - DNA, 1156 bp, Zea Mays
tcaatttcagctcagcaccaacagacttgaataggtgttgccaaaatgtgcttgtaaacaccgggcccgatctaaaatgattgccactggaaacccatggagtttgtagacatgattcataaacagcttggcaactgaactggcagtgtaagggtgtgaaagtggaatgaagtgaccaaactttgtaaacttgtccacgaccactaaaatacagtcgaaggatctagactgaggaaggccttcaacgaagtccattgacacagtgtgccacgcagaagacggtactggtaggggctgcaacttgccggggtaagcagctctgtcgggcttagcctgcaagcagatttaacattgttgcacaaagttcttgacgaatgacttcatattggtccatgcgaataatcccttgacatggctgtaagttactggaaccccggagtgaccccctaccgctgaagaatgcaatgctgacacaatgcggactgaatggttgtgtcgtctcccacccaaatacgacctttgtatctgaggatgccttcggtcagagtaaaattggaaacagcggatggatcgatggcaagcttagccaacatatattgagctattgggtcatggttgtagttgttttggatgtccagcaaccattgtggtaccacgactgagacagcatggacttcagctggggcacaacgggacaaggcgtcggccacacggttctctaagcctgggcgatactgaatcctgtattgcaattcgagtaatttggtaaaaactttgtgctgccatggagtgtgaagcctttgttcattgagttgtcccaaacttttatggtccataaggataacaaattcggtgtgttgaaggtaagcccgccattgttggactgcaagtattatggccatgtactccttctcataagtggaaaggtcgtgggatttgatgcccaatgctcgactgagaaaggcaattgggtgacctttttgcatcaggactgcgcctacacccaagtcactggcatcggtctcaataagaaaaggagacatgaagtctggcaaacataatacaggacctgaagtgagtgcctttttcaatgtctgaaatgacgtgtcatgttcactggtccacacaaaaatggcatgtttctttaacagggctt

SEQ ID NO: 161566 - DNA, 492 bp, Zea Mays
ctgctatcatcaagttgtgtctagcacatgtggtcaaccatttggagcatgtagaggcgcatgcttctgtctcagacttgcttgagctctttggcctccgttctccagtgaagcacgattaaccatcgtcgatccttgcttctcttgtggtggcctgcattgctgttgattccttggtgtgttaggacactagtgcaaacactgcagtctccgtccttggcgagatgccctctagggtctatggtgcgaagattcttagtgagatggaccttactactaatgaggtggtcgtaggagcatttgaaggagattctcgccaaatgatgtccactgagcaaaccatccattgatgtgtcttcagtgacctccacgttgcttcaggccatcacctttgttgaggatattgttgtggtggaggatgcatcagataatgaggaagctaccttggttgcgcaaactatttttgaggacacatatttcttaccaccatag

SEQ ID NO: 161567 - DNA, 419 bp, Zea Mays
accatgggcacagttccaccacggagcacggaccattagcaaacgtagcagcctactagccagtcaaatactatcggcggcgccataatacatgtatgtacttgtaattagatgagatccgaatgcagattagcttacatcaggatttgggggtgctcggtttggcgcttgtcgagtccacgcccaaacgtgggaccggacctccactccagtactacagtgcaacaaccagggaggagggccgcggccgcggcggctgtgggcgaaggagcggaggatctggcggcggaaggagagaccggcggggtggccttgcgtagttgcgtgctcgtacggggagcgtgccaccggccggccaggtcaaaaccagctcccaaaggtgactggtcccaaggaggagttgtttttcaacaaggcgt

SEQ ID NO: 161568 - DNA, 654 bp, Zea Mays
cttgtataatctcaggcccaaacaactgcctttcaccagtttgattccaatacaagggagtcctgcactttctgccatacaaagcctcaaacggtgacatcttcaaactggcctgatagctattattatatgagaactcagcacaagatagactcttgtcctaactactaccacgttgaagggcacaagctctcaacatatcttccaatatttgattagtcatttcagtccgtccatcagtctgaggtaggccaaactaaaattcaacttcgcatccatattatcatgaaaacttatccaaaatctgggggtaaactgtgatcctttatccaaaatgatcttcttcggtacaccatgtagggacacagtccaagccatatatactctaccaattgagatcccttatgagtagtcttgagcaagatgaaatgagccactttggtcagtctatccacaatcacccatatagcatcatatcctttctgcgtgcgaagcaatccagtaatgaagtccatatcaatctcctcttacttccattcgggtatctttagtggatgcagtagtccagctggcctctggtgttccaccttcactctttgacacacatcgcacataaccacatgtgcagccacatctcttttcaatccataccgc

SEQ ID NO: 161569 - DNA, 815 bp, Zea Mays
tctcccgcactcatgcgctgctagtaactgccatacaccattgatgctcgctagtgccgcttgcctcctctgctcagctgtcgtgctgcctgtccgtctcccacattgcatttactgcttcgcgcgtaattattggtggctggcgcaaccgttctttctctccggcgtcctctcctcttcttcccctccccttctctctcttgcgcagccagggaacaacccgccccaacgccgccaggagcccacgcgccagggcgcgacccggccttccgcgcccgaagaccttgcgcccatcgccgcctagccgcgacgcgccgaccctgagcagcccaggcgcccaggtgcccgaccgcggccatcctgcgcgtgttcctccgtccggccatgtgcccgcgcgccaggagaagcgcccgaccgagcagagcaacccccaaccgcgcagcagccgaccgaaccgcgcaatcgaagcccgaccccgcgccgtccatttcatttctacgttaatggagattcactgcttccgttactctctcccccacttattcttccttgaagacacgccattgatggtgttaataccgaccgttcctcctcagcgaccctctctctccctctcctccctctataaattggagccggacctctctccaagcatcccgagctcactcctgttgcccctcactcctcgccgacgaacaaccgtctaccgttcgtcgatagccggagtcgacgccaccgcgcccagaacatgcccacaccgtcgctctgctcacgcgcacccgctgtcgaacctctgctcgtgccgtgcacagctc

SEQ ID NO: 161570 - DNA, 960 bp, Zea Mays
ttttagtcaactaaaagcctgaattgtctatgaaattttcccagtcccatggtttactctcttcaaaaattacatctcggctaacaactagcctgttagtcataggatcaaatagtctgtaaccttttgagcctgactcataacctatgaaaaccattttgctagatctgttagccagtttatttaaacctggaccaaccaacttcacatgggcaacacaaccaaaaattctcaaatgactgacactaggtttctttccatgccaggcttcgaaaggagtcttagagattagagcttttgtgattgacctgttcagtaaataaattgctgtcatgacaacttctccctagaagacagatgggacttgcattgttttgagcaaacatgtagccatttgaaccactgtctgatttcttctctctactactccattctgttgtggggaatatggagttgtagtatagtgtttgatcccaccttcactacagaaaatggagaacagatttgaggtaaactcaccacccctatctgttcttaaagctttcagtttattctagactcaacctcagccctttgtttaattctcttgaaacattctaacgcttgatctttggattttagcatctctacccacatgtatctactgtgatcatctaccactagcaaaaaataagatgcacccctatgctcttgggagcaatctaaccacaaagatctgcatggactagctcaagatttttaattgccctgaaacctcacactttgggaaattgtttcctgtgttgttttcctaggacacaaccatcacagacttgctcaacttgcttcacatttggtattccaaccaccatgtttttgtcacctagactttttaaagctctgaagttcaaatgccccagcctggcatgccactgcctggccttttcttcagactttgccaacaaacataccggtgtggat

SEQ ID NO: 161571 - DNA, 331 bp, Zea Mays
gttaccgtagaaaacagttttagcaccaaaatttagagccagaactgagctactttataaagacgaggagccaaaatttatggcttcttcggaggatatagatcgaggattgtttctagccttgcaaagagaccctattgatgtccaaccaatgtgaatgcatacgatataatgataaacctattttgatgtgctcatgtttacttgttctatgcattattgattttacatgaatacgaggaaatgaacaactgggttagaggcttgccattcctactaggcgctcgtgtgctttaaactaaattaacatcgactcgaacatatacttgat

SEQ ID NO: 161572 - DNA, 754 bp, Zea Mays
ttttgccctagtgcaaaggttcaaataaaggggatagagttccccaccgatttaatggttatgggtaaccaagatacaactatagacgtcatcctagggatgaattggctaaccaagtatcaagccagtcttagttgtgaaaagagaacggtgaagttagtgtccttatcaggagaagaagtgttagtagagttggtcttgtcaggaccaaagaaagggagttgtcaccaagtcaccgcccgtattgaggagattaaaccatcagaggctatcagtgtagtattagatttcccagatgtgtttctcgaagagttaccaggtatgccacctgaaaagaaggttcaatttgccatagagcttattctaggcaccgcccctatttccaagagagcctatcgagtgtccggaccagagttggtggaactcaagaagcagattgatgatttgtcagagaaaggctacatcagaccgagtacctcgtcttgggcagccctagtgttatttgtggagaagaaggatggcacgaagaggatgtgcatcgattatcgagctttgaatgaggttactatcaagaaaaagtaccccctgcctagaattgaggatttattcgatcagttgagaggagccagtgtgttctcaaagatagatctaatgtcatgctaccatcagctcagaatccgaccctcagatataccgaagacatcattcatcaccaagtatggactatatgagttcacggtcatgtcattcggtt

SEQ ID NO: 161573 - DNA, 680 bp, Zea Mays
cctgcagaccgacagcgaccggacagattcaatgccgctccaccagatccgctcctccatgatctgctccgccgctcccatccctcgggcagccccttcatccttcggacagatcccatcctcgagtcccaccggagctctgaaggtaatctgtgcagggcaagattcagctacgaagagaaggccaaatggcaggcagtcgaagcccattcaaactctcctttcccaaatcagaaggtcggtcgtttcgccagctttaatgcaacgtttgaaccggagcatgcgtgctacagtaagggagtgacagcccatcctccttcagagcattcaacgcctacaagcctgagccctccgaggaaggaaagcagcaacattgaagtcgccgatgcaggttgggagatggttaagcctcccttctggtggaggaaagacaggcgcaacgctcgctctgcccaggcctcgcaaagatccatctccaaagaggagcaagaagagagggaaaaaagatttttgaagcacgttcaaggtaagtgctgtaattgtttcgccaccaaccacagagctgcagcctgtactaagcccactaaatgctggagatgtcacaaggatgggcaccaagcctcccgttgcccctcctataaagagagcagtttgaagattgttgaacagcaaagcaaaac

SEQ ID NO: 161574 - DNA, 329 bp, Zea Mays
tgtagacgacggctgaatttggcctcatctggaagtagtaggcaccgatgtggtccctagtcttcccagacttgaccagcacgaagaagtggcagaagagagaagtgcagggagccacacctacgaacatctcgcagaggtggacgaagatggccgcctagaggatggagtgggggtgtgaggtgctgaagctgaagcccgaactcctccagcagcagcaagaagaagggcgagatcggcagcgccaacccgtaggaaatgtaggagatgaacaacacgaactccctggcggtgagatcgccgaggggagcggcgccggcgtggattct

SEQ ID NO: 161575 - DNA, 279 bp, Zea Mays
cggaggcagtgctacccgctgatctcaagttcggggcgccaaggttgatcttcgaaagcatagcagaagccgaggccaccagactggaggacattgatgtacttgaagaagaacggctaaacgcggtaatccaatcagcacggtatcagcagactctaaggcgctatcacgacaaggctgtgcgacaacgattcttctcagtaggggatctcgtcctccgccgaattctaacgggggaaggacgacacaagttatcacccttatgggaaggacccttca

SEQ ID NO: 161576 - DNA, 615 bp, Zea Mays
ggaagaaggcggataatctcatgagtccacggcttaagcggtcatgtcagttagatgcccaggctgagtctacagaggtcaagaagaagaggaagctcatgcgttcatcagatctgtagccagtgactgcccaggccgagctgaaatacggtgatgatgtggtggatgctggtttggaggatgttgtggaaggtgggagtggggtgaaaacgactaggtatgtaatggaggtggtggaggaagatgatgatgaagaggtggtggtgcttcctttggttcgacgcgaatgacgctccaaggctcggagtaatacttcgattcctcctgccttagcaaggatggttgaaatataggatttgtctatgtcggttgttgatggtatacttgaagaggccattcctgaggagctagaacttgagttactagaaatctactttactaatgttcgcatagatcgcttggatgaagcaccttctgctagtttgctggccggaccaaagttaagccttctagtcccccaaggggattctgtgtcagtcagctttgccaccgacccattgttggcaccagaggacacttctataacaccctggtgttacaagaactaaaactttg

SEQ ID NO: 161577 - DNA, 942 bp, Zea Mays
ctgcaaatgggtggaggagggagggagtggtcggctgcaataggggaaaagagaggaagagagggagggggcggcggccacaaggggtgaggagagtgagagaggtggcggctagggttagagaggagtgggggggctcccgtccattggatgcgaatcaatggcccacaactcactctctcaaccgagctcccgacccggcgaaagaatgccaaaaaaagatttactgtttctctgaggtaagaaatttaacttctttccagaaaattgggtatcacactctacccccttaaaaagaattcgacatcgaattccaatgcttctatcggaacgacaaaagagagatcagcgaagacaaaaactcacccataacgaaaagttcggggtacttctgccgcatcagctcctcaagttcccaagtagcctcacgctcagattgattggtccacaagaccttaacatacttaattgatctccttctcatgacacgctccgaggactccaagatacacattgggtttcactccaaagtaagatctttgtgcacagcaatcggttccaacttgatttgatggtttagatcccgcaaaaacttcctgaacatagaggcatggaataccgggtgcacccctgccatggattctggcaattacaagcgataagctaggctgccaacccgggccaagatagggaacagtccaatgtatctcgggctaagcttctcaggaacaccaaaccgaactacttctctagtaggtgataccctgagaaggacttgatcacccactgcaaattccaagtcccgcctcctcacatcagcataactcctctgacggctgtgagcggccaaaatgttctaacgaatctcccgaactttcttagatgtctgctgaacccaatgaggaccgaccaaagatctctctcccaaagtctcccagcaca

SEQ ID NO: 161578 - DNA, 1138 bp, Zea Mays
ggtttatttcagtaaataccagggactctttagtaagatatccatgcgaaggggtacggatagatctcggccatccgatttaatactgacggcacagattagaagcgtgtgaatgcgaatcgggatgcgatcacgtccttccgatgcgagatcaaccgcccagatttaattaaggcgagacccagttgtggccctcggatcccgatctaacgccccaggcgagataccccgaaacgaaatacctcgatctaatcacacacgttcgtggtcagatcgacgacccggatctaaaacacccctgactcgatctcgttcgtccatatttgatcagtgacccagatccaacgatccaggggctgtcttcatcccctagaggaccccaatgaaaccgaggtcacacggcggcggacagaacacatggccgcggagctcgccggtgatctacgccccgacgatttcccccaaaatttcgcgggctaaacaacgcaaagatcactgcgcatcaggtggaggtacctcaccggttcatgcagggccgatcgatccagtaagcaatgtaaggcgggtggcggcgcttcttccccaacggcgtggaatccgcgatgccacggtcgatgaagccacataggaaaaccaagattatgcgcaggaggcccaggcgactagcattgaccgcatgccaattccagagccgcgccgccgatgagatgcccatgaggcggccaggatcttctcttaccccgcggcgacaaattttcttctctctctcgctttgatgtcctcatcactccatggatgatggaggcaaggtagggccgacggaagtgcttttataccccaagaacggatagagtccgcggcgttccgttgagatggggtgaagcgcggccgaaattccaggcggaagaacggcgcgattctgctgcgttcggttgaggaggatgctcctgacaagcgggtccccgggcgcggtgagtgaggcgagcggctggaggctgtttcgtgggtcccgccggtcagtggcacacagcgcaaacgacgttcacgcctgggctgcgcagagggagagtgtggagctgggccgaattggagacagtcagcccagttagggtttcattcctttttctttttactttct

SEQ ID NO: 161579 - DNA, 333 bp, Zea Mays
cttgggaatatgataatgatgcacgtcacaatggtcggagtaatacatacactttcttgcatgagggccagaaaattactttgcttcctttgactcctgctaagattgtacaagctgacaaggatagagctgcaaatacaaataatgaaccacctgttaaatctgaaaatcagcaagccattcatttgaaagctccagtaatgcttgttacaaaatttgatcttgctgaaatacatgttgatgatacttgctgctatgctttagtgtgcacagacgctttattttccaatgatgatattgctagcactgtgcctgcgcctgtgactaaccttt

SEQ ID NO: 161580 - DNA, 575 bp, Zea Mays
cggcagggaggagacctcggctggtggagagctcggcaaactccatggcgagcagggaaatacgcaggcagagggagcagggattatgggcgcgagctgaagacgagctcgaccggaaataggaacgccgtgcagagggagctctgcgagctgggatccggcgctggggggaaggagagatggaaggagcgggaagcaaggggagggcgcaggaaagagccacggcttggagaggagcgctcggcgtgaagataactatccaggagcagaccgacggccaggccttggttcatcacccgatcgctgttcaacaatgaagaagaaatatcccagagagagatgagaacggctggatatttcataggcttgagaggcagaagatagagagaaagaagctcatgcgcgccaaagaaaatcagccgacggcggccacacaaaaatcaaacagaggacggcggtgcgcaaggaaaaaatcacgctgcggctggaaaaatctgagctggggcggcgggatattctttcgagcagcgaagccaggcacacacggtagaagataaggccaccatgaaaatatc

SEQ ID NO: 161581 - DNA, 974 bp, Zea Mays
aaaataaatcatatcccgtaattaaagtgttaatgactaaccattgccggtcaaggcatagccgcatagaagaagccaaaagcactaaaaaaatattatatcccataatttgtttgggggtattgatcagaaattctgaatccaacgtcagcagtgtcaagtatgattgtacatgtacagatggacttggattggtgtgttgttgggttagtggagatccattagttttcaccctttctatttagtaatcaatacatttgcaacaaagcagaggagagatagacaaatgtcaaacgtggcaactctatacgcatggtttaataatgtacaatgggcccgtgtaaaatatgaagtagattactggagcactcctctacttggacggcttcaaatgagccaaactaggagttagaaacaacatgttctttgttctttaaacattaactactggagcagatcatctaaccatccacacgtattttgtactcaagtgtaacctccctgctcttttcaggcacactttgtcttcaactgtctgttggtttttactgctgttcagcctgtccttatgttgattgttttgttggatatgtggatgttaagttgttataatcgacttgaactcgccagatgtactacttcgcaaatctcttgtttggatctgtgaacacacagggataatttatagggaatgatcctgtcatactatgaagacgaaatttcatgacgccatcaaatgtaggctcactattggtgggagaattcgataccatactgcttcaactgtatttatatgccttgagatttgataccgtgtcatttcacactccaatttgaatagtacctttaagatttgatactgtgttgtttcagctttcaacagtataataccttcgattgcttcttaagatagattctttccccagaaaattcctgttcggatgcatcagattctcaggcaaactattttctcc

SEQ ID NO: 161582 - DNA, 838 bp, Zea Mays
tagaaagagagaattaccataaaatacaaaataaaaacctataaagttcatatcatgttcaaattgaacatttgatgagaagatagatttgccacaaaaaatctggaattttaaacttgggactaatttgaatttgggataaaaaggaagaaaagaaaagaaataaaagggataaaaccctgcagctgggccaaattcactcctcttggcccatctcccttttccactcctgtaccgtgcctacgcgccttgggtcgctgccttgtggggtcaagccgtcaggatggtctccctcctctggttgtggagcttgggtcgtaacgaccgggaggaaagtccgcctggactgcgcgcccgggcttgtcgccatcgtgcgatgcctgtacctctgtcgcggtgggccccactcgtcatgcttatctccctcaacaaaccgctcggcatcccgggatttttgagctccacggctcaaccacccgcgcgattcacggttgagctcaacgtactccgaagccgccgccgcctgatgtgttgacgctcccaatggcgtataaaggatcccagaaacctatctctgcctcctgtgtcgccattaaccatcaaccttgcctccatcactggaatttcaagccgccgtgggggaaaacgggcagccgccgtgggtgattcaccgccaccgtcatagcagccctttgcgtgtagtccgggaagccgccgaggatcgtaatacttgtgctgagaacctgcgggcgcggggatcaccggagtgtttggaatttctcaccgaagctccgtcaccaccaccgtgccgcccttcgtcgacatcgggttcctctac

SEQ ID NO: 161583 - DNA, 1260 bp, Zea Mays
aagcttatatgcatatgcacaacagtagcaagtatctaccctgcaaatgagaaaatctcaacatgcagaacagaacagatgatagaaaaaaacacatgaaaccctgttacctctcaacagctttttcatatggtgcttcattctcccaatcaaatgaaataaaagttgttggctctagcctagcgtcttcatgtttagtggattctagtgaacttgaactggtgttcccgcttatgacattctcttcaagctctgattcaccatcactgtcagactcacgggttcgcttcatacaaaactttcccttggattgatgcaaagagacttcggatttatctgttatagaagactcggatactcgatgaagattagactgcatctgtatccaccggttcaaggttggatatctacaaacaacttattggattgttaaaacatgaaataggttagcatgtgatagtttaaaatgcctaatcattacctctctgattgctcaagagcaaattcaaaaaatgatctctcagtttctggagcttgtgttgaatctttcacatgagtaaaagatgattcattgtccccagatagtatgctgcttccaaatacacaggccaaaactgctcttactgaagataactgggctaaatgcttcactaaatttaattggagaggatagaggggttcttgacgagaagacaaggacgaatcatgtgcactccatccttgagcaggagaagacttggtgcatagtctgttttctgaactaatattacaaatggtaggtatgacaggaatgcaagcccatccttgtcctgttcgtggaggtaaaacaggtggcacacatgctgatataatctcatgcacaaaatcaacactcattgtgtcagcaacctttgctgctgcatcagtgcttccacgctcaaaaaccagacgagttaatagctgcatgccaaaacaaacttgttagagaactgacactgtatgcataaagacgataaatacaataatgcaaatgaagttattatcgattcatcgtcttgacactacaacaaaataagagttcatttcatgtacaaatgcaaatccatttaatgtcttcgcagacacatctttgtttatgtgtggcatcttattaagttatttatatttcttttcagatatattttaaatactgctgaattaagacatgcaccatgatacttgtcagttattatttaactctgatgaacaaaatttatggtcaaacatgaaaccatgcaactg

SEQ ID NO: 161584 - DNA, 745 bp, Zea Mays
tgtgacctgtaggtcctcgttggtgcatcctcctcctgtctgtcgatccttctaggtgtcttctcgtctagggcccatccttgcatccgcccgtgtcttcggagatccaagagtctcctagcctcgggttggcctcctccttttataggccaaggaggggggtcggccagcggtggcttccttaagagcgttctaccatggggtcaagccacgcgtgctcatgggacccagggtcgcctgactatctcgtattctttatggtggacggcgtgggcagcgtggggcccaagcaccatcattcgagctatgccgacccctggccttcgtagcctggggctcagcatggttcgtcgtgttgtgccctgctagatgtctccgcactcaggcctagtttcggtaggtcacgagtgcgccgcaggtcagggggtgcgcaggccataaatgtgtcgcagtttgagcggtttgtaagtcatgagtgctctgtggttcgaggggctcgtaggctaagagtggaaggtggaccggtgcctccgccgtggctcgacactagacacatttaatgcggtcgatcacttatgactggtcggtcttaggctaggcgatggatccactcgagtgggttcccttcggtacgcatggccctgctgttagactcctccacgcccgaccccgggctaagtgtcacggggctcgtctgggggcgggttcctccagggtagacgctacatgtctcctctagctgacc

SEQ ID NO: 161585 - DNA, 652 bp, Zea Mays
gggggaaatgaagtgaagtcagaaggttatgtgtattcgtgcttttgggccagattgtttggttgcattggatgacatggtttcactggtgctagattaggaacaactgcagtgtttggtcctagcaagtacctattttagcagggatcagaattgtacaaacttgaaaagcttggatgcagttttgcgtggaagtcgttgaatcatgcaaaaatttgttagatccagctgggaaggttggtattctcgagattcaactgactttgccacgcttttattgaaccatgacccgtgtgatgtttcttccttggcctaatttaccgaattagatttggacagaacttgcctgatctattctggttctgaagtagccatcccagccacctgtctcgaggtcatttctgaccaaaggctattccaggccagttcagatatcagtttcttggctgtagacgcgtcactcttggcggtcagttcgtggtatatctgtgtcatgcatgggatctgatctgatccatctgtgatatggttcctgcgaaaaggatcatttagggccaggaagattcagatcttgtgtagtcatattcaattgctaaaggttaactgaactggacaagaaagaaaggtacctgccatctgatctgtgatcccc

SEQ ID NO: 161586 - DNA, 629 bp, Zea Mays
gttttccccacaaagtttcccaaaagtaactcaaaaatttagttttacgatcagaaacaatggttcgtggaatcccatgtaaacgaacaacttctttgaaaaacaattcaacaatatgtgaagcatcatcattcttgtggcatggaatcaatcaactacaacaaaaatggaatcccttccctgctttattcgtggtaaaccaagaataaaatccatggatatgtcttcccaaggcacactataaatagctagtggagtgtataagccatgagggtttaaacgagacttagctttatgacatgattcgcatcgaaggacatgtcgctccacatcccttctcgttttaggccaaaagaaatgattggcaagcacttgctctatcttcttggcgccaaaatgagccataagtcctcctgcatgagcttcccacaaaagtaaaattcgaacagaacattctggaatgcacaatttgttagcccggaacaaaaaaccatcattaacatgaaattttacccatcctctgccatcacaacacttagaatatggttcaacaaagtttaagtcagtcagatataattcctttatactttctgatctaagaattttagcattgagttgtgttagcaaag

SEQ ID NO: 161587 - DNA, 509 bp, Zea Mays
cttttcgataaaagcgtatcttgtttcagcatccaccagcctccgacttaggtaggtcaccacatgctcctttcctccggtcatttgcgtcaaaacagccccaataaccttatcttcaactgcaatgtacaatctgaatggtactcctacttgtggtgcttttaatacgagagccgaagacaaatactttttgatgagatcaaatgcttcctactgttctacccccaagtgaattcggcatcattcttaagtcgaaggataggggtgaaggcatcaatcttcccggctagattagaaataaacctccacaaataatttatcttgccgagaaacttctgcacttcgaccttacaggttggaggtccacattccgaatagatttgattcggtcagggtttatctctataccatgttcatgaatgatgaatcctaagaacttaccagctgacactccaaaagcatatttacgtgggttcatttttagaccatatcgacacattttatcaaag

SEQ ID NO: 161588 - DNA, 998 bp, Zea Mays
gttttatcaatcaaaagtttaatagggtgggtctgagaaaataccccatcatttttacaaaggctgcatcgaacctaggaccattggctcactagaaaaactgtcaggcctgtacttagacctctccttcatcagatttatctaaatatttcagaagcctcatacgcacaaaaactttttagccaaatgaaaacacctcaatcacctaacaacgattaagcaggacaaattttagcaccccatcctcatcacgccaagtactgagtgaggactccttcaaagaggaatattacaggaatcagcacgtgcatcgtaatggtagacatgtgccacgaccccaagacatgcacatacactcgtgtgcatgcccacaagaagacatagtgctcgcaggcacacatcccactaagaatctaacacagatcaaccagataagcagagagtttatattttttttatttgctgccaaattatttttgcagctgtggagctgctactaatatgaatatcataagtcaatgtttgaagccaagtgcggcttcactaaaagcaagatcattgacctggcctgagagagcagtattggtgctgcaccatgcatgggcaaagtcattaataccttcgacatgaagataagtttgtctgccataaacgggccataacagatccacacacatacacacaaaaaaaggttgtgcacgacctatggaagaggctccaacaggctaggtgggtaaccactaggtgaggtttatatacctaggatagcacatgtaagcacagctgcacagatatgtggtatccacgaatgtactaatctttcttttataatccgaaaagactgaacgtcatgggtatgatcccaccacatttcattcacggatatgttcattcaagttcaactgcagctcaaaattggactaaaaaactcgacatgagggtaagaccgtcctcacggcattacacacaggtctagaggacttagacctatgctttga

SEQ ID NO: 161589 - DNA, 395 bp, Zea Mays
gtaattccatgatctataaccgtcgtagttttctggttttatggggtcgaaaattttgttttgcgctagtgtagcttccccataatccatcaaagtgggcacacgccaaatgcaccgtgacaggagcccaacgacccatgcacgctgctctgtatgggatagggaaagcggtttcagtaggcccacacacgccgcaccttccatgcatagaaacgcggggaaatcagtttcagcagctacgaggtggagctgttttactcatcctaatccgcccaccaacctagctacaaaaagtcgtaccgaggcccctcaagcgatagcggtggtggatctgctcgccgccggtggcctgacgctctctagctactctgactcgtctacatcctccaaggtat

SEQ ID NO: 161590 - DNA, 307 bp, Zea Mays
ccatagtgtatgaggtcaaaagtatgcacaacctgatatgagctagggaaaggaagtcgaacatgacgacctagctgacaggtgtggcatagattctcagaggtgcccctagtacaagagatgactagactactacacaacttggacaacacatcagggctaggatcatcgagtcaatgatgccaagtgttggaggtactagaagaagtcagtgcgtgcagttgcggcgaggatgaaggcggtgatatagcagaagcagtaggtggagaagtggatgtaggcagctgcatggtgtataggggcctag

SEQ ID NO: 161591 - DNA, 397 bp, Zea Mays
cgagtgggcctcacgtgcgggacccactaggcgaccgacaggccttctcctcagccgagtttccacacggcggtttcgttcgtatgcacgttcgtctgcttccgaggagaatgaagaggtaactgccctcgtgtgtgattcgatctgcgggattttatgcgtggtgttccttgtggccttttgtgtggtaggtggtcggccaatgagatcgtgccacatcagctttaatccgtaaaagttcacttattcaatatatttcacgttgtaaatccttttcgatccgttacagatttcactagtttcgtaatgacgccgtctacatgttagtctattacattgctgcgatgggtgttttatgtaattaataaattatttgttcatccattggttattaaaa

SEQ ID NO: 161592 - DNA, 414 bp, Zea Mays
ctgttgcgtcgtcagtaggtatatatacgcgctgtgttcttctcccgacgccgcctatactctccaggcctacagctgctgcaaacgccgatccatctgattggtatgcagaactggaagtttcctctcctccgtgtcggactttacgatccaatccgatcgagcgcctggctgtgcctaccgaagcccacggtccacgtccacccccgatggagtgcgtccaccagtcggtctcggttctgcgccgtttcgtgttctcagtgggcaggggactcgagggccgatttgtatgcgttttcctgttcggttggagggccggggcagcgccgtatttgggatgagcccttgcggccctgggtttttctgggcttattttcgcgcgttggtcctgttaaccacgaccaatggctaggc

SEQ ID NO: 161593 - DNA, 566 bp, Zea Mays
ggaaagggtcgacgacggcgaggtggccgcggctgaacgggacctcgggtatcagtcacccgagggggtcctgaaggatgtcatcaccggagactctaactccggtggcgacagctagatgggccaccggggggaccctgtactccccggtctacggggccgaagcctgccttcccccagaaacccttctggactccccacgtgtccagtcttctgataggtccatacagaaacggctacaacataaggacgtggactctaccagcaaacgcgaatgggaaccctgggtcgggacctagccctatggcaagtactgaaccaaggagggttccgtaaacgctcccccagctgggaggaacccttcaaggtgacggaaacgtgccaactcgggggtaaccactttgctacagctggagtacctcttcctaacctctggagcatctctgtaagttctatccataggagcaagcctaaggggttgagtttttctcccttttgtaactaggttgcacatacgtgtacgccagcccggtggggtccgccctcataaacccggcctattggcc

SEQ ID NO: 161594 - DNA, 832 bp, Zea Mays
atctggagcgctgagatcggagcagggagatggagatgtggaatcgagggtaggagagagaatttgacgccgcctctagcaatctacgcttgcgtggtggctcgggggtttgggaggacttcgcaggagcaggccagtggccgaccggtggacttggcgtggtcgtcggtgcacgctcggaaccgcgcatgtccatggcgaggacgtttcttctcgctttgtcacagccaccagaccgcatgaattcgtgggcaatctggtctaccgcctctgcgtaaggtatgacaccatgaattgattcgcctaacatgtagcagcatgtagcacctatctgcatttcctaaagtcactctggcaccgtgcggtactctcaccggcgaagtcgccgccaaggtgggtctgggcgccaccgtggtgtgggtttcaggaagaagataacgtgatggccgtctgttccatggatgtgcggtcacgattaaatccctgagtcactacgcccacaaccgttgatgctagattggacgcttgtgattggaacccgcataccccttcgggttttaaatctaggccgtggatctggttatcgacggcgagcgttcaaccgtggcgcgtaatgcctcgggccgttgatcttgatccaagggctgctagatcacaccacgttaatgaagtctcaatctaatccgcaccgctcaatcgtgatccaacagctctcatccgcccataccccttcgaccataagttttgctaaagatccccttgaaaataggagaaatagcccgccgtccgcgcggggtgaatcctgagtcttgggacattttgtgagttaacc

SEQ ID NO: 161595 - DNA, 656 bp, Zea Mays
cgcgctctgggtgttcgtcgcggattcgtgcacgtcgtggtggcaaccggtggttccagggatcatcagttcggcggcaattcctcgccgtcgttcggttccagccgggtggtcgtgcgtagcgtgggcagccacaaccgtcacctaattcctggtaaatgagcttccaacctaatcgcctttgcagtgtgtgcgtgtagtaccgcgtaattgcattatggtgtagtagcgagctcggtggccgtcgccggagtagtcctctggcagcgggatgcgccatcggggagaggggaacagagcaaggaagaaggacggccctcggccgtcgatcgtgtagcgaacgaccacgattagaggtagaaatacccctttacgtattgtatcccaaccgttgacgcgagatcggacggatgcgtgctgatctcggccaaataaaatcttgaccgttgatgtagatcggaggggcgtggttgagagtgggttcaagatctaatatcaaccgcgagtgcgtgatcgtgcggttgagatccttcgataccccttcgtgatgtacactttgctaaagagccctcgggaaactcagaaaccaacccgccgtccataggaatagtgcgatgagtctagggaattcttttacgttagcccctgaactttct

SEQ ID NO: 161596 - DNA, 519 bp, Zea Mays
gattattttacgtgcaaacaatatatcaaagctttaggggcattacagagaatttatatcaaatgcacatcttcatagtaagtttaaccaaacaacttttagttttttcgcagctgtcagttcacggcaactttttcaccgctgacagctcacaacagctttttcacacctcacagccaaaccaaacgcacgctatagccacggacaccatgaagatatcgcagccgggatcatttgcagcgatggctacccatgttgtgaaggacggcggtctggccatggccgtaggagggcagggcaccgtcggcaacatcctactcatgatcgaacgggagatgggcacaaaccgtggagacatcgccaacgagatcatttgcagtgatggctacccctggcgtggaggacggcggtctggccatggctgtaggagggcagggcaccgtcggcgacagcctacgcacagccgaacaggagatgggtgcacaccgtggagacatcgctgccgagatcatttgcagc

SEQ ID NO: 161597 - DNA, 404 bp, Zea Mays
aagacgaaggcgttccccatcgcgtacaggctaaccatgccatccggcgaggacctagagcattcctagaatatcgataatctccgcaaattttttgtttgaatccttagggctaacgtgcccttgtaattcaccaaacattatcatttcggcccgcactcttttcctcccggggggtgaggtttttaatgaggtggagccatgtaatatacccgcaaaaaatcccccgcaaaaaataagacgcaatatgtcgaaaaagaccgcatcgacggtcttcggcattcgaccacaccgaagtcaccgcgaggggcagcgctggccaccctcgcgtgcgacactccgcgcaaaagttgcctaagggtgcagccggactagcacaataagtgcgcaaaattgaagtctct

SEQ ID NO: 161598 - DNA, 540 bp, Zea Mays
aaaactgagcacgttcaccttgatccttagctctaatcctaaatctcccattaacaaaaatgtgtctaactaacccctctaccacatgtctgaagatggcatcgggacgcgatccctagacacgacaaaaccaaagatttgcctcgggctcgggctgagagacagaccagacttgagagctccatatctttgaaaccagtaggccaaatcctatgacccccacacaagatcggtagcttatagggaggagaagaggttttgtgcactgaccaaggcaagagcaggctcggatgaatgaccacacgcgccagaactcgggcagaatgaatgcacacacgtgttcgaccctggtcggcacacttgcgttcgcccaacccgtgcgcgctcgccctagcgtccggtcaagtccgccgcgcgccctcgccccgccgtggctataaagcaaccccaaggccttggccgtacctcctcgcgcgctctcaggccttgcctaagccaaagctcaccagacttcgcctcgagcacaacgcgccactgccc

SEQ ID NO: 161599 - DNA, 1770 bp, Zea Mays
atattagaatgtgttattggcgctgaaaactataacgttttgtttctgttgttagaattcattagttgtcatgaatgattgtagaagtaagtgtggtgtgctggttttggaatcttttcctaatttatgctaattaatcagctggtaaggcatagagatcgccctaagatgagtaaatgcgagcatgttacactaagtcgagtaagcgtgagcatgttgcaccttcttaagtcagtgccgatttaagccgattgctccgttagtagggtatagtggtcaccctaagttgagtaagcgcgagcatgttgcaccgtcttaagtcactaccgacttaagccgattgctccgttagtacggtatagtggtcaccctaagttgagtaagcgcgagcatcttgcaccgtcttaagtcactgccgacttaagccgattgctccgttagtagggtatagtggtcaccctaagttgagtaagcgcgagcatgttgcaccgtcttaagtcactgccgacttaagccgattgctccgttagtagggtatagtggtcaccctaagttgagtaagcgcgagcatgttgcaccatcttaagtcactgccgacttaagccgattgatccgttagtagggtatagtggtcaccctatgccgagtaagcgtgctgattggtaataaacagtttgagtgcccttgagaatgaaatcttttttattgatgatgtattttccaattacagaatacaatgctgcctcgatagcttttgaaatcttgctaagggtaaaacttcctgagatgctctatattccatgaattccctatttccgtgccatccatttgagtaagccgatattatcctggccgagtgacctccgctactacaaatggtccttcccatagtggtgacaatttgtgtcgtccttcccccgttagaattcggtgaaggaccaagtctcccactacaaaggatcgatgtcgtatagccttgtcatgatagcgcctcaaggtttgctagtatctagctgactgaattactgtattcaatcgctcttcttccaatacgtaaatatcctctagtctggtagcctctgcctcagctatgttttcgaagaccagcattggtgccccaaacctgaggtcggcaggtagcactgcctctgaaccataaaccatgaagaaaggggtatttccatgcagagctcgactaggttgagttcttaggctccaaactatatacggcaactctctgatccattttcccgcgaacttttcattcttgtcaaagactttcttcatgagtgcttctagtatcattccattagccctttctacctgaccgttggctcttggatgtgatactgatgcatatttgatctggatgctccattgtttgcagaaatcaaagaattcagagctagtgaaattggatcctaggtcggttatgatgctattcaatatctcaaacctgaatattatatcttgtatgaattccattgccttcgctgaagttagagaagcaatgggtttgtattctatccatttgatgaatttgtcaatggcgaccaacacgtgagtgtatcctccctgagctttcttgaagggtccaatcatgtccagtccccagcatgcaaatgaccatgttacgggtatggtctgcagttgctgtgctagtaaatgttgctgctttgataagaattggcaagcttcacacctttggactaactcggttgcatcactctttgttgtcggccagtagaaaccagacctgaagaccttccc

SEQ ID NO: 161600 - DNA, 322 bp, Zea Mays
cttacacagcaccacagatacgagggaccgaatgttgtggaccccggcagcctgagcatggagggcggcgacggtgtcggcgtcgagcccggaggcatgggggagccttaggggtcaacagggggtcagggcggcagagaaggaggtgttgtgctgtggccataaaagcggtcagggcagcgctcatggcacacttttgctccagggccagggacgcgacacgctagtgctcgtgggaggcggtgacgaccacctagatggtggcgatggccgcgacgagcgaggaggatgcagatggaggagtcgtcgacgacggggcgat

SEQ ID NO: 161601 - DNA, 581 bp, Zea Mays
gccattgaaagctaaacactaaacatacttggccatcatttagttttgttcatgaggggaaggaaatctctgaatttagtcttagtgatccccataggtatgccaaggtaagtgaagggcaatgagccagggacaaccaaaaaccctagcaagctgagcagatttggaagcatccaagttaatttataggaggcatcatttttgtagttcacttttagcccagtggaagcggtgaaggagtgaagaattggtttgaggtaaaaacaagtcacgttgtgacgctctcatgaccaaaagggtgtcatctacatactagattattgggaattgcatctgacagtcatgatcaagagggtacgatataaccccaagctgagcagctttgttgacaatgtattacagcagctcggtcgcaagcacaaagagtagaggtgatagaaggccccttatcagacaccccttttgcataattttttttacctagggactccatttaagaggatagtagactaaccagatttaaggatgaggttgacccacataatccatttgttagggaagcccagctcggtcagcatggc

SEQ ID NO: 161602 - DNA, 285 bp, Zea Mays
tgaggatgacgatgatgactccagtgatgttgttgctaatgatgatgctatgcttggtgttgatgctacggtgaaccttcgaagcatcatggtgcaacgtgttcttagttctcagcctgaatcatcagagaagcagcaacgccataatttgttccagactttcttcgccatcgagaattggcgtgcccatgttattattgatggtggaagctgcaataatttggtgagttcagatttggtcaagaagcttggcctgaccacacgtccacggccacatccatacca

SEQ ID NO: 161603 - DNA, 386 bp, Zea Mays
tgcaaaccaaggtaattgtggcccttcatgccagcgccattggaggacattctggcttcccagtgacgtatgctcgggtcaaacagttgttctattggccacatatgaagcaacatattcgagatttcgtggctgcatgtgttgtgtgtcaccaggcaaaacctgatcggtctcgttatcctggtctgttacagccactgcccgtacccaactatgcgtggcaagcgatttctctggattttattgaggggctgccgcagtcaggccactacaactccattctggtggtcgttgacagactcactaaatatggacatttcattccattgcggcacccattcaccacactcactgtggcacaggccttcatgaccgcagtttaccgc

SEQ ID NO: 161604 - DNA, 2548 bp, Zea Mays
cacaaggacaacatatatcctagatttacgtgtaagtattgcaagaaagagtcgaagaagcggtgctacacattttaaacaacaccatgcatcacgtgggggaaaagtgcagggttgtagcaacgttctgccggacatttctgattacttttggtggtacattgacaagggccaagataaaaggaaagcaagaatagtggtggaggtatggaggttggcattggtgggttcatctcgtggttttgatggtgacgacaacgacgagttgtaggccgcaatgcgtgtttcgttgtcgtcctctcaaaagcactacacggtattacccgtagtgcgttgtcggtaccaaacatcgacataacctccttttcccatgcgtgcttaccaactaatcatgtgggagtatgttgggagacgcctaggaacgagtccagaccccgccccctatatatatgaagtggtacggctgtggtggatacataccccctcggatcctcatggacactaaaacatatcatgggctgcctgataggtttcctgctgagtcgccatgtgggatgaactagtaggatgtagccaactcaggtgagcccgatccaagctaatgaagaccgacgtccgagttaagcgtcgttgaagcccggatgtgtcggatgatgtagttgcaaacacctgaaaggcttggcattcgacgataactcgggcggctaggcgatgaagactccggatatgtagggacacaatctgcgacaaagaaggagataagcaagtagatagtaatcgcaacttgtaacgggataactctctctggtcgcgtatatgaggccgagggggaccccctaccattccatctcatcacccaccactccagctcatcctcacccacaaccctgagcttgtaatcctcgtacttcggagatcaatatcaaacccaacaggaagtagggtattacgcaattctaagcggcccaaacatgtataaatccgtgagtgatcccagcgtgcctctgcacgaaccatcgagtcgcgatcaacgacgccatcctacccaaaagcatcacgtaggtaacctcgtggtgcgtggttgggtcacaaacgccgacaacgatcgattgagagaatcacatatccaatcaaacaaatctacctacattactttatattatcatgccttaggagtatacgtagtgtagccctagttgtagtttcccaatctcaatcttcacctagcttcgactctgcatcgtctcgaggtgtcttgtgtggcttaccgatcccaaaataaccctagatctttcctccctaaagggatccatcctgaggggcaagatctaggttctagaggagctcatccctatcttcatataaaattatttgcgcacgcggatggtccggtggccaactgcggacgatctggtgacttgtcgtcgacggttcgccgcctcacagaagggttccccaatgtcctcgcccccgcgagcgggatctatgaatagttggtgtttggcccaaaaaaggtgttaagattttttggaattaaaagcatcgatagaaattgatttagcatttacctcattacactctaaattacaaaaggtgaatgtcatataattaggtttatctttatctgttgccctatttggcataacttattttacaatttgttcgtaggtttaaacaaatgttgtatcaaacagtaggcttttgcatcagcttgtcagttcaacttcttcttagaatgaactaaaaataggcaataagcagaagctgaaaaactagcttatccgagatgctgcttttcaaccagcagtagttgttccaaacaaggtcaccatctctagcaacgtcttctaaatttcatcatttatatcttatcttctatattttccaatcatattaacattagaaacttattgtttcaacataatattgtctcatttacatattgcaaatcatttttaaatatgtattaataaatatttttaagaactacaaataccaaacaaattcacaggtcattctcctcctcatccccacataatgcagcggaaaatcttgcttttattccagtcataggttccgcgtgatagcttgctagtggtcgcactcttcgtcggcattcacgagcgggtagagacatcgacactagatttacctgacctccactgttatagaggaccatgtagtgttccttgctagatagataaaggaggggagactctagcgtagccaacgcttaggctatctacactcatactactctaaattagtactttaaaacaaatattctaggggtatctgctagtcatatagtgtaaatgtgcagcgaatcttctaggggatgcaaacgaggcctctctcgtccatatattattgtatattttaggccggtagttaggagacttcacaaaaaaaatggaggagtgatctaactgaggctatctacactcatactactctaaattagtactttaaaacaaatattctaggggtatctgctagtcatatagtgtaaatgtgcagcgaatcttctaggggatgcaaacgaggc

SEQ ID NO: 161605 - DNA, 921 bp, Zea Mays
cgggtggattggagttgcgctcgtgcctcctttcgcacgattgctcaacttattcttgttcccagtgccggttgttgaggatttgttgggtgtcgtggatgtccctgaggcggtccttcttggggacgcgtgttcttgtggattgggaggggtgcgcccccttgctctaggacgaggccatgcgcgggacatagctatccacgtcgatgggtatctgccgatcgattttggcctgctgcacaacgactttctctaccagattgtggaggtttcgatacatcaccctttcctctggttcatcaggcttggggatagaccgaagcatcaaggctgttgcggccatgttctgcccggggttgaggaaatactacgcctcatcgctgctcttgacaatctggtcatataccttcctagcctgaggccttttgatctcaaggcgcttccattcgatgtcgtgatagacctggtcaagcttacagacaagggcatcgagctcctcttgctgctgcctgagggcgaccttgcgggagaggatgtgtgtgtgacactggtgctgataatcttccccttggttaggggactccttgtccccctaccattgtcgttccatggcagtgtttccatgaaacatgccctacccccacctcatgggtgtaggagtcgggctgagtcgagtcgtggcttgggtcgtcctagtgcaggttgaggacggatgtaggttggtggccaatgacgtccacgaatgttgaaggtggggctgcctccaccttctgcttgatggcggtggtgagttggttaaggcaacacttcagggcagcagcgcacctcttgaggtgtcgcttctccgccttactccagttggagctcgtgggtcctgcgcccgtggcgacaggcatgtcagggtcgatgaggcggagttca

SEQ ID NO: 161606 - DNA, 565 bp, Zea Mays
taggagctcaattaagaagtgagcaaagagagttaccatttgttccgtccatacagttttagtgaattagaataataattaatttacatcgtgtaggcgtccacatcatttctacatcgtgtcttgtctgtgcctgtgtgcctgtatgtagctgagcaatgagctggggctggagcccaggtagatcaggttctggttccataactgccagacacatgccctccctcttctagcccttcaatgtcatattatttaattgtgcagccgtaagtaatatcttaaatatgaaatattaagttatcatacaatatttaattgttttaaaaattctgctaagatttgatgtcatctgtactccaataagattctgatggaaattatttataccagccatcgggcgaatgcacccattgttgtacgttttcaagtaggttggtcaaccacacctccttcagggttcaatccatttagaaggttggtagtgggtgagcactctagaatttgttgaagtatttttgctggttcttgtgtaatcagtcatcactaaggcctccatcaattatgg

SEQ ID NO: 161607 - DNA, 933 bp, Zea Mays
gtcagttgtctgatggagagttcacgatggtacagtaccctaaccggatcagatcgcccgccgtagaaaagatctcaccgccgatagctttccgccgtgattcacgtcgccggcgtcacgattcgcgctcgggtaagtggataacttcgcggcgtcaaaagatcgtcgtcaccgccgagctggaagcccccccgatcggccacggcacatctcccctggctcatcgcccgcggtaaagtgctcatcgtcgaccgccgcctctcggccgtgtgccgtgtggctcaactctttcaccgtgtcgccgtgacctcctctgaactctccgtggctcaccggagttactgccacgctataggacacgtaatcgcgcgccaaggttcttcttcccctccggccgccagcacaacttgctcgaattgatcgccgccgctatcgctccctataaattgagccccccaccagttccctaaggtcctaagctaaccagccaccttgaattagccccgatcgttcgctgaggtccgtgaattcggagtttcccccaaatccgatttctgccaccgtgaaacaagctcaccgtcaccagccatactccggtcagttcccgtcttctgctcccttgtttaagcattcacatacgtcggtgatacttgccaacccatcgaattgaactaagagccctctggtcgccgggaacacgaccgtatagtcgccatactcacggccatcgtggccagagccccatagttgatcaatagcacaattaagttaggggaaatggttaggctagccccaatttcatgtccgccgctcggagaacccagccgttgccccgttcggccggtgtaagtgctcgccggagcgcggccgtgcgtgaacggcgtcgaggacgtgtcgggtgaagaaatagaacatcaggggcatttctgcaaa

SEQ ID NO: 161608 - DNA, 817 bp, Zea Mays
gcgcccgcgcccgcgcgctcaggccattttgcgcagagacccttagggtttcggctaatcagaacgggcgtcaatcactattaccttacgtcgctgaccgtttgcaaaaacatcctcacaactctatttcttctccaaggaactccccgacggcggcgcgctcgcagagcatcccaaacgtggtccgtaccggccatggccgacgatgactgctcggaataactaacaggaggcttcaccgatctaagatggtctcggaacacgcatcaatttgacaggaacgccatgagaatggtctgtccatgtgcacggcggaaatcgcgaccatgggcacgcgttcccgcataaccagagccgaattgagtaatcagacgccacggtgagtttcacaagtgcacagagttgtcgaaacaacattcaatatgggcaggggcttaccatggtggtccggccacggagcgcggtgtttcgtgcttgccggagacaggaaaggggaaagtggggtcgcggcggctctgggcgaaattgggagatgagatcggggctatagggccgtaagaggttgtgctttcaccgtgcgcaatcgatttgggaggaggtggagaaggcagtgcgaatcttgggttcttctcaagcttgcggttgaggcagtgagtgcctcgccgtggttcatgccgctatttaaagccacagcggaccgacaagcgatcagtggccgcagataaccttgctagcgcatgtataccacgtagaagagaagtacagtgaggtagaattgaggtgagagtgacacggcggcggaaatgactggtgcggt

SEQ ID NO: 161609 - DNA, 319 bp, Zea Mays
tggggctatctacctatttacaaacatcctagacgtgttggttgagagagtgtacgtggatgtaggcccctagaaaccgccgaggttcagtcaaatccaatttaatgtgcagtttagtgcctattatttcttcatagtacgtatagaaagtgcctaatttctcctagtttgtaatagtttgtcgagcctttgataagttcaccctacgttactccctgcttctcttactgttatgattaatttataaagcattgcacacattccaagatataggtgtctgtagtatattttgtagacgtacaacacaaacgacgattcg

SEQ ID NO: 161610 - DNA, 1096 bp, Zea Mays
ttaagaacttcccatttactggcggtggacaatattcgccatccggagatatgatccgataagcgctgctagagtatacatcttttacaatgtacgggccttcccatttaggttcaaatttgctttgcatcttatgagtaatattcataggccgaattaccgcgagaaccaaatccccttctttgaacgacctttttacgcgtttgtcaaaagctcgagacattctagcttggtatgcctctaagttttgcaacgcacgtagtcgtgtttcttcgaggttgtctagttcccttaggcgtaatttcactgactcgtcttcattgagcttttcttgaataacgactcttaaagaggcaatttgcacctccaacggcaggactgcttctcctccatataccagagagtaaggagtcattttggttggcgtccgagtcgtggttctatatgcccacaaggactcgagtaacttttcatgccaatgtcgcttattttgtgcaacgacctttttaagcaacttgcatagcaccttattgaatgcttctgcttgaccattagcagccggattatagcccgtggagaatgcttgatcttgaatttggcacacattttctctattttgtaatttttgaaagatgtcccattatcagatataattcgagctgggaccccgaaccgatatataaggttcgtccttataaaatcttctacattttcagctttgacttcttttagtgcaacagcttctgcccacttagagaagtagtcggttgcagcaaggatgaatttatgtcctttagaagatggggggtttattggcccgactacatctattccccacatttcaaagggccaagacatattggttgggtgtaatggttcgtggggctgatgtatgaagttgccatgtatttggcattcatggcatctttttgcaaatttcatggcatcgtcgaacattgtaggccaataataacccaaatgtcttaattggtagtgcaacttgggcccagattggtgtgcgccacatattccagaatgcacttcatttaaggcttcgatcacttcgctaccagcaaggcaacgaagtaaaatacca

SEQ ID NO: 161611 - DNA, 346 bp, Zea Mays
atcattagactcagtattgttagtacaagaatcaggtacaggatcagtatcaggaccagccgtaggaatagagcaggaacgacgaatgtaggtttgggtgataggtggtttggaagagtaagatggcgtggagatggaaggtggtgttatgggaataagaacatcaggtgtggatgtggaagatgatggttcagatgaaaaatcaggaatggaaggaagacacatgaaagaagtggattctgtgggataataggatgggtgagtggacttgttgtaaaaaaagggcgattttcattgaaactcacatctctagatattcgaatacgacgattagatggatcataac

SEQ ID NO: 161612 - DNA, 543 bp, Zea Mays
caggcactgtagactgtccggtgcgcccatatcgcgttttaaaaaaaggcctccagcccgagaccgagccagaggctcatttcttctcccctgccagcgatttctctctgtctctgacgtttcctcccctcgccggcgaccatctctccccggcagcgatcccacggcgaccttgtgcttctcttcatccctctcggtgagcagcccctctctccctcggttttcctccctctctgttctggtgagcagaggctcccatttccacccctttgtgctttttttccaaattcttgagaatctctatgaatccaaatggttgcaagtgttcctctgtattccttaagtactcctgcaggttctcagctcctaagggagggtttcacaacctaaatcgactccatctcccaaaacctaattcaccgcacgccaagtgttcggtgaaatgcccaaaccagccaaaaatgctccaattgaacccaaatttttcacacaccttcacaacacttccagtaacacctttgccaattttcacgccaatccgag

SEQ ID NO: 161613 - DNA, 447 bp, Zea Mays
tgcccctagatgtatgttcatgctcccctataggtgttgtgctccttcgggaggttttaaaccctcaaatagccatttcacccacaattcaaaacctcgcacgctacgtgttcgatgaaatgcaccaaccagtcaaaatagctcaaatcgaccccaactttttccagcacactcctgctactaccaataactctcacgccaaatttcaatcctatctgatttcctagacacctgttattccattgcttcctctttatagtgaacctttttgaggcgagtgccaaaaatttgttttctccaccaaacttcaaaccaagcacacacttcactcatattcactcatatatacctatctatgaagtattggctcaattccaagtcatttcatgcctcttttctaatttcaaactatctatggcacaattcattgttcaaacgtcgttctcg

SEQ ID NO: 161614 - DNA, 748 bp, Zea Mays
ttacacgcgagtgctttctatggtactcccgaactccttctctaaagtgtccccaaattccttgagaaggtcatcaaggctagctagggacatttcctcggtgttggacgagttctctatcctggtaggaggtagggctagaggggcttcttccttctgctcagtctggcatccttggcttctggtcttcttgcggattttctttgcgggggcgagcttctttagcttcttgtggtaatccatcttcagggttcggtaggcttcacgggtgttggtttcctcgccttctgctatctcgagactctcttggagggacgccttttcccttgtaagttccctgaattattgctccaggctttccacccgggattttaggtgagtgcagtgggaggcaaggtcatcatattggttatcgagagtgtggaggtatccaaccatgtagacgatggtggggtcatcctcggtgggatctctccttgacagggcctaaagtcttttcctccaggcgggggtatttttgttgctgggtggaaactagcgaaggggggtttcaaagactactctgctgtagttctggcataggtgtcggagggcttttcgggcaacattttggcaagtatctgggaagcggtgtccggtgaaagtgacttggaaagaagggtggtttgggtagtttcggctttctcccaggtagactgccatagagcacttctccattccattctcgagatattccttccagacatat

SEQ ID NO: 161615 - DNA, 367 bp, Zea Mays
aacaaggataacgtgaactttggggaacttcccaagaataccacctccctacccgacggcgcctgtaataacactgtcttccaaaaacaggatataactgcgcgatactgagttaaccaatccatacccaagataacatcgaatgcccccaaggaaatcacaacaagattggccgagaaaacctcatcagcaagaatgacggaacacccctgacaaactgaacaactactaatggagccattagcagaactaaccaaaattgggtgacccaacatctgcaccgaaagacaagcccgcgacacaaaattctccgaaacaaacgaatagctagcgccagagtcaaaaagagcatgggccacaaacgaat

SEQ ID NO: 161616 - DNA, 309 bp, Zea Mays
gagactttgtctacctcaaggtctccccgatgcatggtgtcagaaggttccaagtaaaaggaaagctagcaccgcgattcgtcggcccctatcccatcattggcagagtgggatccgcagcataccgtcttgaattaccaaaatccatgtctgatatccacaatgtgtttcatgtgtcccagctccgcaaatgcctgcaagtaccagaaagtcacatcgaagaagaggcaatccagattcagaaagatcttcagtaccgagagaagccaataaagattcttgactcagcagtccggaagacccgcaact

SEQ ID NO: 161617 - DNA, 726 bp, Zea Mays
tgtatttgatacgagattaattaagagatcaattttattattgttttcatgtcaaaacagaggcattaggtgataaacaacattattacaaaattatagcaattgaaatggattaatttggatatcatatgaattttctatgtattaaactagttctaacaattataaatcgttttctaaatggttttataagtgttcttcactgactgaactgcgcattaatttcagagaagcacaggggcctcggagtaattctcctaagacacagagcgcatgcggcgtggatggcgggttagttctgcagaactgcgagggctcttttgcatatcgcatccgcgaaggggtatcgcgatcacacggccgttggattagagattcacggcggggattacatccatttatttgccgaaccggtatcaactggtgaccaccagatccaaaatcagcggccatgattcaaaaccacccagatccgttcatccagtgttcaacggtcctgatttaattacagggaaaggggtatctagcacttaatcggagccatccgcttatgatcctatggctaacggttccttcccagctttccctctcccagcttgggccatacggcggcgccgcccaacggtgcatggtggcgcacccaccgaagaccccggaatctacaacgcacgaccctaattccctaatcgagcgaagctacacgatcctgggtgctcgacgaacatg

SEQ ID NO: 161618 - DNA, 692 bp, Zea Mays
gttaatttattaagtctctagggtttcttttgcaattttggacggccgaaggggtatcatgcattgtgagccgcacgatctaaaaccgagggcccagattagaccctatccaaaatgaagcggtacgctactatagccgtttgatcggcgatcaacgatgcagatttaaaactgcccagatccaccctaacccgcacgattcctgatcaacggttcaggttcaatccccgaagagatacgcacaagttctaatcgggaccgtcgactggaatccaacggtcaccaccctctccttcctcccgaccaaagccaaccacggcaacgggctcccccgcgacggcgccatggacggcgcggtgaaatccggcccgaccaggaccccccccgatcgattaactgacacagcgcaacaattaaaccgaggcgaacacggtgaggtgagttaccgggcgggtagaccactggcagaggcaggccatggcggagggcagaacagggaccaggcacgagctccgacgaggaattgagagcggcgcgaccggagtttgtgccccccgagtggtcacacacctgcggaatgagtggagcaacgccccggcaccacccgaaagcctgattatggagtaacgaccaactatcgtggtggcggtgatgaaggtttctctcccctctctcggcgtcgacgataaacc

SEQ ID NO: 161619 - DNA, 472 bp, Zea Mays
aatggtcttccccattgcagtgtttgacatatttcaatctgtagcatgtatgcatctctggtgcacactgccgcaccccgacccgcatgcacaggaagcctctgtgcttcagcccacctctagtcaaaaccacggcacaacagctcctccacccaaagctgtcacaaactcacaacgtagctcagatgtactcaatgccaaagtcgggtgcctcagctcagatctactcaacgccaaaggcagcatcgagagatgattctggagctcagatagctcaaatcagaaggatctcttcatgcccaaatcgcaaccctcccacccacacacacaaaactaactgtacaaaataaagctccacctcacccaaatcacctttatgatgtagatctgggcagaattgaactccctacccaaaatagagcaacaagctatcaaatagcacattgagtactctgccaccaagcaagcaaat

SEQ ID NO: 161620 - DNA, 475 bp, Zea Mays
gtcgctctaagggacattacttggcggattgtaaggaggaatttttatgtgaggtctgtgacagtgtggatcatcctaagagtaggtgcctggtttttaaccatctcaagcagagacccggatgcatctatctcagtggattcgcggctgtggggctgggttttttccatattccagtcactgtcaagaatccggcaaagagggagggccttgatgcagtgatcagagttaccgaaggcgagcttactgaggtggaagttgctgctgaactgaggcgcctaattcctgggacacaggattggaaggtgcaaatggttcagtctaatgtgttccgaacagcctttccctccacatctgagttacaacggctggtggaatggggaacggttcactcaaagaagaaaggggttctttttcactttgaggaaaagcaatcggaaaagccgtgcaaggtggtgaacagctactgggtgca

SEQ ID NO: 161621 - DNA, 472 bp, Zea Mays
ggcctgcgcgcgaaaaccagggacggcgggttgatttcctaaaaccgggggtttcttaagcaaaacagccacgcgaaggggtatcgggtgaatctaaccgttagattagaaaccgacagacgagattagatctgcgccgagggcgcgcgtgcctgggagggcgagcgctgacaggcggcacagggaatgtcagtgacagagggggagagctcgttgaccgagcgggcccagcgccagaggggaaacagacagctacaggggtccgagggggtccgatggggtccaagaggtccgaaccgttcgatcaggatcggacgatgaaaagtcagaccgggatggatgagcggctgcaggtggcacatacaggcgagccagggcgtcacgcgcacatgggcgaagcggtatcccgcggtccggaccgttcgatctgaatcggactgaagggatcagaccggggaaacagacagctgcg

SEQ ID NO: 161622 - DNA, 509 bp, Zea Mays
cccccacctattatccaaactgcaatccaacccttgattggcagcactatacctagcaaccaattgtcatgcaataaatcttggcgccgccagacagaattgtgcccagcctgacggacataatcatggccacgccgccgaacgtcgccatggttgtgctgccctccctcgtcgagcatatgccaggctccctgatcgcaaacatcccggactacatgatcgtgaagcccccgttttctttgatctcgagtgcaccttcctcgtcgagcatgagtgtgacgccctccatcgtcgagcagacgtcgggctccttgcccgcaacgacgccagcctccctgagcacgacgacgccgacttccatagcacctgatgcttcgacttgcctgattgcgaccacgccagcctccgttgtcatgcacgcgtcgggcagtttggagtgctcagacccaacaaccggtccaaattatggcgtatccacaccaacaaaatcatcttccaacattattgtg

SEQ ID NO: 161623 - DNA, 2986 bp, Zea Mays
cttacggccgcctcgtgctggtgacaggcgcggcgcgagatccgggctggaagggctggcgggtcccgttggtggcgccgtggcgtcggcgtgatctgagatgagattggacccggctgcgcggtattcgctgcggaggtagacggccatgacgaccaacaccaagcgcgcctacaagctccgtatcctcgtcgcttcgtttgcgctatttcgcttcctttttttaattccttgtcggggttgctgcatagtggtttttgtatgaccgatccatcgctgctgccgcggtcgttcaaccagtagaggggaacatttgggtcagcaagtttgagaaggagctcccgactcttaattttctgtttctgttgagttgttaaataggtattttgtggttgcgagattcggcaggtcacatttagctgttggtgattatcgagtagtcgttactgatttgtcgtttattatcctagaagtgcgattgctggcattccggcatgtatgtgaaaatgtctgaagtggtacattgatgcaaataatatcagtcatcgagggagattgggctgttaaattcgcacacattggaatgccttgacttgcatttggtgtagaggagtttgtggcgcactcgtccaatgttaactgcctcaagattgggaggaagacctcgcgggttcttgtcacaggaggagaggaccataaggtcaatctttgggctattgggaagcccaattcaatactggtaagactgtttttctagttctgtttctacgtatggactgattgtaaactgcggctccacagttgggtaggaaaacaaaactcttaactcacttgaaaaactattggctgacctaagtggttacaagatgagaacttcaccttttcaaccgctaacagatttttatgtagcacagttctccttatgccagtattcaattaatagaaagatacttttaagttagttatatcaacctaccgcacagcaatgcgttttgaggatggttcgtttatatagttaaaataggtgtcatgaataatgtttcttaaggacggagtactttatttaatccactttaactttttggtggccgtacagagcttatcaggtcacacaagtgctgtggagtcggttggttttgattccacggaagtgtttgtggctgcaggagcagccagtggaacaataaagctatgggatttggaggaggcaaagagtatgcagatatgaatatttaacttactatatgtgtatatgtatgaatcgttcagtaattgcatctcttggctcattttctatgcagttgtccgcactcttactggacatagatcaaactgcatgtcagttgattttcatccgtttggggaattctttgcctctgggtcactggacactaatctgaagatatgggatataagaaggaagaattgcatccatacatacaaaggtcacacacgaggggtgaacactattagatttacacccgatgggcggtgggttgtgtctggtggcgaagataatatagtaaaggtaagaatttgccaataactctatgctgtgtgtgttcaattgctagttcttctgctggaatttgatttttcttttgccttaatatttctaatgaaaaaaatcctttttttcccgaacatattacaatatgtttttctttggcagctctgggatctgacagctggaaagttattacatgaattcaagtgtcatgagggtcagatccagtgcatagatttccacccccacgagttccttctggcaacaggttagattcagaatttacaatgcttatctgtttcttgactgttatcttttctttgtcccttttggttgtacaatgtagtatgtacttgtttatggtaaaatatcagacttctgtcttggtatttgcttgaagaaaaaactcttctattcgttgagctagtaaattaatttaagtatttaggtgctctctaaaaccaagcttggcatttgtccgttaagtggagaagctgtttaaatatgatttcctaactagacctgaaccaaactgtaatggctgttcctttgatgttttaagtggtaaagtgtaatggatcatactatcgctgtaattgttgtctgccccaccgcacctcataataactttttgattgtttaccaaaaaaattcctagtagtcatatcttggcatagttcagcttgctgtaagtaaatcactatacatgtattgtgtaaaattttcgttatgagatatcatgcttgttttcgttggtgacatctgtaagagatgcattgaaattttgtacgatacgttctatataaactttctttccatgtcatcaattaacacatttcattttttgttttgttgtgagacacattctctcctgtcaggcagtgaagaatgtattcatatgtttgtgtgggagctcagaagactgtattccttttgaaactatatctctcttatgtaaaacttgttgcttcattcaggttcagctgataaaactgtcaaattctgggatttggagacatttgaattgattggatctacaggacctgaggtacatcggtatttggagctgatagttcacaattgtttatttcctttgcatttgtaatcctcagaatttaagcattatttccttaataagtagcttgggtggggatcccatctctaatgttacatcgaaaaagaaatggaaaatgaacataaacttagatgtccctgtttgatgcttctttatacaacaaacagtcatatgctaatgttttgcagcataattcagttcaatttgggcacctatttaattcatttggatacctcttttgtttccatcatttaattcatttgaatcacttcttggaatcacttcttgtgtttccataaaaaatactagacaacaggtgtccgatccatgacattcaatcctgatggaagatctttgttatgtgggctgcacgaaagcttaaaggtagggctattgtttttcca

SEQ ID NO: 161624 - DNA, 351 bp, Zea Mays
gtcaagtcaaaggcgttccctagcgcatacaggctaacaacgccatccggcgaagacctagaccattcctggaatattgacaatctacgcaaattttttgtctaagtcttcagggcctgcgcgcccttgtaattcaccaaacaacattattcaagcccgcactcttttcctcccagggggtgaggtttttaacgaggcggagccatgtaatatatctacaaaaatcccccgcaaaaactaaaatgccacatgtcgaaaaagaccgcatcaacggtcttcggcatttgaccactccgaagtcaccacgagaggcagcgcagactaccctcgcgtgcgacactccgcacaaaa

SEQ ID NO: 161625 - DNA, 640 bp, Zea Mays
gggagccgtcggacttgagcggcatggacgccagctgcggcgtgtagtacggcgacgcgctggtggccaagccgccgccgaggccgtacgaggcggcggcgcccgcagtgacggaagggaagaagaggccatgctgctgctgctgctggagctggagctggtgctcgtccatgtgaggagacagcgagaagcctagccagccgctcgccgcggcgttcgtgtcattgccgccgttgttgttgttggtcattgcgtcagcggagcgcgctggacaaaactacaagaggaagatgaacggggtcgtcgggctaatatatagtaggagctgatgatggcggcgggaatggcgaccggagtggatcaatcatcggggagcgcgcggtgtgatggccattgccgcgacgagagatcgatgagggccgggccggcggggtctgcgatagctagctagatcggccggcgaggcgtgaagcagagtagaggagaggaggtgggcaagtgtgtttgcgcttgtgtgggcgcgcgtggctttaaagggggagtccagcgcagcaaaaggaatgagacttgctccctctccttccaacatttacacacacaacatgctgcatcaccctaccaaaagagagagtgagaaatg

SEQ ID NO: 161626 - DNA, 604 bp, Zea Mays
gttcgccgtcttcgaccactggtgccgctccaattgctcaccggcgtcgtgatctccactgcaacaccgtcgctcgcgtgaccaggaatctccatgcttcgatcatcggtaagaagtcgctctgattgttcgctatgcccttaggatggtttagcgccgggccgtgtggttgggcaccaaaatctaggtgtggttcgcgccggcatgttctccgtcgatgggcagagcaccgccgtgtcgctggattgggggcggcatcaccatcaccactaatgccgactacctccattaggctctgcatcttcttattctctgtttgcaccgattggagctcgggttggggcgacggtggctaaccgacctgcttaccattgatggagccgccgcggtagaggtcctttgctaccgcgtgctcagtacagggacgaagatgattctgggagcgtggatctgggatcgtgcggcttatattagatcaagggatgcgttgggtcttggtcgtaggatcgcgatcgggcgtccgctatttggtaccggtttgggagagattagatctaatctggaccaccagttttgaatccaacggccacgagcatgccatacc

SEQ ID NO: 161627 - DNA, 656 bp, Zea Mays
ctttcccactcccagaagtttcagaggttcacacctttcaccaattcaaggatggtgtgccacctgagatctgctagcatgccttcgagctctcgctccagtgagacctctattgacgaacagattctgagcctgaaagcagccatctctctgccttcagtgtccatcaaaaccatggtggatagtctgagcaagctcggcagcatctacaaccacatcgacgcactcacatgcttgcccaggagccagaggaaggcagtggaggaggagctcgagcactccctggtcctgctcgatctctgcagcgctgtgcaagagagctttgttgagcttaaggccagtgtccaggaggtgcagttggctctggaacgaggtgaccacacggctgcccataccaagattcagtgctatgtgcgctcggccaagaaggcacagaagctgttcaagaaggtcaacaagaagactgcctctgacatcgaaggatgctgggtgattaatctggttgctgaagcgagagagattgccgtgttgatccttgaatcgacattgcatctcatgttgaagcaaattgtgattccaagctctagcaagtggtcccttgtttccaagtcattccgaaagaagtgtgttgtatcatgcgatgcggaacaattgca

SEQ ID NO: 161628 - DNA, 578 bp, Zea Mays
gtccgttccttttccatcatcaagcaaggccccaactaggtgcaaggttagatacatgactcaaattcatgattacaatagaagtttggacccacaggaaaagcggaggaaagcgtcacgtcgattcaagaaaagaaataattggatgagaataaatccttcctttacaactaggtacatgtgatttgtgtaacgaacaccagagactaggtttacaagggtggcccctaccagattggaccataaatggcgctagagtctgggaataggcaagccttacagggctagatcacaatttatcttatcgcaaaggaagagtccattctcatgttgctttgtaagtagaaggtacaaggctaacctaactgtccgagtactactgcaagtccaattttaagggcaagcagtggcacgttatgccttgaagatagctaagggcagaactagatggagtctgctactgctaccccgcacgccatggggctcgtgaccgacgagtaatgtcttgctgcctgcattgaataccatcggagcacatgttaggcccccatgggggtctatcccggccgacaggctac

SEQ ID NO: 161629 - DNA, 1066 bp, Zea Mays
tgaggccaagaagatctctagtttcaagagacacttgagttcgaagatgatgaaaagtatgggaatttcctcccgcacttccttcaacgattttgtcagtgactacttgactcaagagaaaaacaacaacctctacgcattggcaaaggggcgtaaaaggcctttggaatcaggaatgtcacaaccttgaaccaccatagtgactcaaccaaatttcaggccaatgatacccagagcaagatttcgtcctcctccgaagaagaatcaacaacaaggattcaggggtccgaaggcattcaaggtggccctactgcatgcaaaagctggactaggaagttcaacgggtagtacagctcaggtgaagggaccttgctacaactgtggacagatggggcacttcaccaagtcttttcctcgcctaaagaagaagaacaatgtctatcccactcgagtgcatctcaccactatggacgagattcctgacggataacttgtgatggttggtacgtttcttgtgaacgatcatctctcaatcatacttttttatttcggatcttttcattatttcatgagtactgcttttgctcatcgctttaaccaatcatctgtagaagtggggcataagtaccggataagctcagctggggctgagattttcacaaatcatatagcccgagaggcaaccctcaaaattgaaggaaggcaatttcgagcccagttgatagtgatgccgggattatccttggatgtgatcatgggaatgaattggatgaaatcttgggatgtcaatcttgacaccgcaaatcgaaccttgtcgctaagggagccacgaggcaccaaaatgttttggataaccttacctcgctttgagctgaccaatgtatcctttgcaacccaagcaacctcaattgaagagatcccagtagtttgtgagtttcctaatttttttcctgaagatttgctgggacttccacctaagagagatgtggagtttgctatggagcttaaacgggcaccacaccaatttcccgaagaccatacaagatgccacccaatgagctggcag

SEQ ID NO: 161630 - DNA, 729 bp, Zea Mays
cgaagggctgcgtgctatttagtaaagaatacgcggaggcaaagtactatcccatgtgtaaatcgtctaggttcatggaggtagactctggtgatggacagaagtggcagctcgacatccccttgacaatcctacgacaccttccgttcatttctaggatccagtgtctgtacatgacagaggaatccgcgaaacagatgacatggcacaaaaatggaaaacgatacaatcctgacaagatggtgcacgcatctgatggtgaagcatggaaacactttgatgctattcatcgtgagaaagccgaagaggctcgtaatgtacgtgttgcgctggccacagatgggttcaatccctatggaacgagcgctgccccgtacacatgttggcccgtgtttgttatcctaatcaatctcccctctggtgtgtgctttcaaaggcagaatatattcgtgtcgttgataattcccggacacccggggaataaaatgggtgtgtacatggagcctttgatcgatgaattggtacgtgcctgggaggaaggggtatggacgtatgaccgagctacgaagacaaacttcagaatgcgtgtttggtaccagtactccatgcatgacttaccggcgtatggtctattctgcgcctggtgtgttcacggtaagttcccatgcccagtttgtaaggaagctctcaagttcatttggttgaaaaagggtggaaaaatattcgtcc

SEQ ID NO: 161631 - DNA, 349 bp, Zea Mays
gctatggccattgattttcctcaatgggctttggaggcaattgataaaattagaaagggttttctttggaaaggccgcaaagaagtcaggggaggacattgtctggttgcctagggaagggtgtgcagacccctccatttgggagggttaggtatttctagtttaaaggaactttgctgggcccttcgtatgagatggttatggcttcataaaactgatccagaaaaaccctgggcaaacctccctatccaagttccaaaaaaggcaggagctttcttctccactgttttggtctctgaggttggaaatggagcaaacactttgttttggacagataaatggatcttgg

SEQ ID NO: 161632 - DNA, 687 bp, Zea Mays
cccggccgtgcgccgcgtggcctagcctttctaccgcatcgccgtgactcccttgggccatcccatcatcgccggggaggttgccacgccgttggccacgaattcgtgtgcaccagtactttcttccacctccgaccgccgcgcgtcctcctcaaaattcgcggccaccgtcttacccttctataaattgaccccacagtgagcttcaccccatcctcacgcactcagccatcgttaattgttagcagttcctcaccagagttcgagaattcctagttctcctcaaaactggtttccgccaccgcaaagttcaccttactgtagccagccccttttccggtcagtccaaccctccctcttcctcgttcgagctctctcacatgtctgcgatgcttactagaccgtccaattggactaggggtcctctggtcgccgggaacacgacagtatagccgccatgctcacggccaccgtggccagcgctccgtagttgatcataagcgcaattgagtgaggggaaatactccttaggggtagaatccggtgtaaactaaagattggcgccggtcatcgcttcaatcggccggtgcagtggctcgccgaagctcctccgcgcgctgccgtcgtcggggacctagcgcggtaaagagatagaacctcagggacctcggtgcaagttgtcagtga

SEQ ID NO: 161633 - DNA, 621 bp, Zea Mays
tagaattcgaactgaggcacgaaacaatgtgggattgagccgagacttcacgaataggtttatataggtgaatattagtgaagtgagtgcttggtttgaatttaggcgaagaaatagggttttgggcactcggctcgaaaacgatcgcgcaaaacgggaattttggtgaaatctaagcctgggatctcggattggtgtgaaatttggcaaggatgttgctggaagtgttgtgaaagtgcctgaaaaatttgggttcaattggagcaagtttggctggtttggccatttcaccgagcacgtggtgtgcggggatttagggttttaggaaattggccatttgtggtaggaataccctcccgaaggagccaaggacctgcagggatatgaaatagggacaagggaacacaatccaccaactggatgcatgggatttcacagaattttgaaagatttgcaaaaggggtgttcactgcctaagagacagagggaaggagaggcaggggaaatggatcagctcaccgagggggaaggagagcctggcgagatcgccggaagatcgccggagatggtagccgccggtggctggagatcgccggcggagaaggagagaatcgccagaac

SEQ ID NO: 161634 - DNA, 781 bp, Zea Mays
acattttcaaggtaactatttagagtaccatctaaacattgatactcttctaatacgtgttggaaaaccaactgagaatcaccaaatgccttcacatggtttacttccatatatagtttagaagctccaagccgaacaaaagggcatcatattcggcttgattgttagtgcagtaagtttttaatcggctagagaagtcgaaggaggcgttacttggtgaaacaagcaaaatgtcaattccttgtccttaattgcaaaccggtccatcaaaatataaattccagggagtaacagtgaggtatgatatatctagctcatgagtatcatcaacccgatgttctacaataaaatctgctatgacctggcctttcataaatttcaatggtccatatgccaagtcatattctataagtgcataagcccatttaccaattctatcactcataatcgggttttgtaacatgtacttaatcacatcggtttgaccagaaacaatacaatgactagttagcaaataacatctacatttggtgcaagcataaaacaggcatagacatagcttctcaatgaaagtgtaccttgcttcagcgtccaccagcctccgactttggtaggttaccacatgctcctttcctttggtttcttgtgtcagaacagctctaataactttatcttcggctgcaatgtataatctgaatggtactcctgcctgtggtgcttttaatacaggagttgaagacaaatatcttctaattatgtcaaatgcttcttgctgttctac

SEQ ID NO: 161635 - DNA, 1124 bp, Zea Mays
atgtattcatcgttggtgtaggttaaattaggtgaaaatgtaatgtacgtgacatttaattggtgttggaaggtgagataggttaatttggaaaggtgggttatcaaacatgtgtgccgaagtgcgttgtagtagtgattgtttaagttgaaccgaagtgtcccaagtacatgccgggatatggttgtaattgagctaataaattataagtgttgcgtgctatgagactcgatcgatgtagttaatattgattgggcctgtagagaggtggtgacatgctgaagtaaccatcgcttcctctacggttaagtaggagtcatgtgtgatgatgttacttatggggtgaatgcgtattgaaatattttatgtcgtgtaatatgattagaaatgtgaaggatagatagggtttttcggaaatgttagccaatagatttggacaagcgtgatagaggttgagtcacttatgttataaaattgatgctcgacatgttaggtctcctaaaatgtggcgttttaggtgactcgtgtgttatccaatttaagttgagcaacggttaagaaacactaattaatcgactccaaccatattttgagttacgatgtctaaaacggttcgctaagtcttctactgtgattagccaactcaagttaaataggagttgatttcgttaagtgtatgttatatatgtgttgtctcggattgcgataataagaggaaagccgacgtgtaggatgtatagcggcctatgttgttgcgctagttagccgaattaatagatgggtttgggtaagctcgtagtcacggtaaattgcttgttgtcgtctaaacgtgtatggttatgacacggatgacaactattagtgctcatgtgatggctaagttaaaatgcaaattattgggtgaaaagcgcttcgatattgattttcgtggagaatgtgttgttaattgagtatggaaattctaggcacgaaatgacttggataaaaagtagtaagtcgacttgttggtcctaatttgattaatttaactctaacaaatggtaaagcgttggaataattcaagtctctataacgcagcaattcttgaattgtataggagctgaaatttattaattgttgttttg

SEQ ID NO: 161636 - DNA, 553 bp, Zea Mays
gctgggcgaagtcatcttcctgattaggtggcggagggggttgttggtggggtttgttgcttgtggtggtggtgatggtggcggtgacgggagagctagcctttcttagttatggagttggggtgttgatgggggaagttggaggggtgttggttgtagttttgatggtaatatggaaaacgattgatggttatcttcgtgttgagggatattaggggtggtaagtgtgggctatgtctctttggttgtttgcgagggctgctccggccatacggtcattggcttattttgttattgggcaatctttagtcgagtgcccaacgtcttcaccatgtaaaagatgcaataaagttttctttgttgttggggggcctctaccatgcccccatcctattcctgtgccaccccctcgaccctactacatggggtagtcgtgacagtgagggggacatcgcttggctgctgctgattggctatgttgtggacttgcagatgctgttgaccccgctcctgactgggatggttttgttgtattcccctggcccatgattcg

SEQ ID NO: 161637 - DNA, 379 bp, Zea Mays
ttgggccgtgcgcgggataccatgagtcgttgcactggttctgaaaacttatcttttcagtctgttgcgatggccctgagaagacatggaattggcgcgagtggcggtgcgattttttcgcacccggcaactggtgtgccgtttgtatgacatgtgggcctgggcccccatgttggaccgccagttgtagtgaagctgaggggcgcattaccgcggggcggttgtacgcttcctgcgtggtggttctccttttcgctcactggtttcggcaaagatgagggagcgcttaaccacggggcggttgcatgctccttgtgcggcggttcgccttccagatcgctggttgctccgaaaatgaagaggcgcataactgcggggc

SEQ ID NO: 161638 - DNA, 768 bp, Zea Mays
gaaaacggtcagactacgatttctttcacacgtcggacgcgagcattctgccgcgtggtgatgtagccatcaagggccctgctgttcgtctctttaaaccatttgatgagctctttgttgattcacaggttggtacaatcctttttcatgtatactcaacgccactagtactaaagcaccattctggatctttttcaggattttgatacggatgctcttgaaaaattcattgaagtgtctggtttccctgcagtggttaccttcgatgctgacccaaccaaccataagtttcttgagagatactacagcactcctagcgccaaagtgagtaatacaactgtgattatgttctgtttgctctttcaaaatttgaatatatgagctgtatgtatgttgggtggaggagctaggttttcatcattcatttacctttgcataagtatagataatactttcatatctactgaaatcaaatatggttgggcaggcaatgcttttcttgaacttcagcgacgacagaatcgaggccttcaagagtcagattcaagaagctgccacgaaattcagtgctaataacataagttttttaattggtgacgttgaatctgctgaccgtgccttccaggttgctatttgtggtttctctgagtaattgtttgccaaggataaaggatttctacagctaaatgcctaacaagctctcgtgcaaattgtttcagtactttgggcttaaagaggacgatgtgccgctcctttttgtgattgcac

SEQ ID NO: 161639 - DNA, 442 bp, Zea Mays
ctgttatcatgccggtatctgaagtttgctgatcagccttgtcctcaggcgcgacagccttcgtctcaatgggcactgtaggctcagcttcggcttcggcctagcctttggcaacttcggcaactttcttaataggaacaggggtcaaggcctttgcagtctccataacagcgtctagcacgctggccatcctcctcctcttgggagttgtggcatgggctttttgcatcttcggcaaatttgcctctgccggtgggctcatgatttctggcatttttactatttcttccacctttggctcttcgatcgtatcatccttagcttcagctggcccaactgtaggcaccttcggcattacaatatactcttcagcgctctacacgatggaagtagcttgttttgcttcggcagttgaagaggtcccttcgccaaattcaggcac

SEQ ID NO: 161640 - DNA, 813 bp, Zea Mays
tgattatatcaggagcatatttattaatgtgacgagtagtttagaaaatgctagttgcgtggaggatgagttattaagacatgagcgtcggagttcatatattagtggtcgcgccacattgatcgaagtgtctcgagtgcacgccacaatatggttgtatgcaagaccaggttatgtgccggatgagttattaaaaaatccatcggtgtcacttgtgttaagtggaggtttatttgcgcgtggaaagtaataatgtgcttaatacctagaactcttagtcgatagtagaaattgttttggcttatatagagaggtggtgacatgccaaagtagtcgtcgcttctctatatttataagtcgagtcgtaacgatgcgtattatgcgctagttaaattatgcttcgcatatggtgtatgattgtgctcacaatttcgagtagacgcttcaagtaagtcaagtagatttgtgttacaagtgtgtaatggagttagttgttttagaaaaattattgaaatactcggttcgtaggataaacatgtatgtattcatgattgggaagtaaatgcatggtgattgcgagttggagactggtagtttacggttcgtataaattggtcgatgtgcgaatatacttgtgaatctgtgtatttataaaaatgttgtagtatatgttgtgtctcggattgcggtgataataggcaagccgacgtgtatgttatttagcggctatgtcgttgctctagttagccgaattgttagatgacttggttaagcttgtaatcacggtgaattgctcgttgtggtctaaatgtg

SEQ ID NO: 161641 - DNA, 1024 bp, Zea Mays
gcaacggctagggttcccgagtgactaacacctaattgaatccatcccgagcctttcccccaacccaatttcacaaatggtgacaaggattgctcttgccacggtgaccgtgaacatcgcggcaaaacagtcgcgttcccggcgaccaaagggctcctagctcgattgtgtgggtcggcaagcatcgcagacgcataagaatgcttaaacaagggagcagaggggaagagctaacctgagttgggctgaccacggcggggttgagttcacggtgttttagaaccggattagggagaatccgaaattcgtgcttgctagtgagggatttgggatgcaggtgggtgcagtaggtgcttgggtacatggcggagctaggggcacggtcaatttatagagcccgcgagcggtggccgtggatttggacgacggcgcgcggcagtcggaggtagaagaaggtactggcgcaagcgctaggtggcttctaccgtggcggtcattccggcgatcaacggagaggctagagggagtcatggcgatgcggtggcgtggttaggacacgcggcataaggccagaagagggcagtgcaccggcgaggttatctggttccaccacggtgaactttgtacggtggccgggatactttaatcgccgggcttatccacggcggtgtgctccgagcgtttatcacgacatccagagcacgaactgagacagcggcggcgcgaatcttagcgcagggagggtcaccggtggcgagcaagctacgctagcgttctaatccactcgggttactgtaccatggaatgctccatcagtgcttctaacaggggaatttacagagccaataactttcaattttgtgcagtaacatgatcgacaccctttaacaaagttatagtcctaagatccagctacaatattgttatagcaatcctaggcaaatacttgctcgatcatgcattaattcatgcccaaagtgcttgcagttgcactgcttgtctgaaattcagaacttaatcagcc

SEQ ID NO: 161642 - DNA, 451 bp, Zea Mays
gtgcggagagtgtccaccatcgtcttcatttgacagcggtactcgtccacagagagatcgccctgaacaagctgacggaaggcggtctctaggtatagaatccgagtttggcggttgccgaggaactgagcctcaagggcaccccagatccggtgagcagtatcgtccggcactcgaatgatgtcctaaagctcggccgtgagggtgccatggatccaagatagcaccactttatccatcaggaggcaatcctctgtcggtgcagcgaccgcgagtaggacgtggtcggcgagggcgtagcggtggagggtctacaggacctggtcgtgccactgagggtactgagtggagtccagcgcgagaatgtcggtgacggttgcctggatgctggtgagggtcgtcgcctaggcgtgaagagaggcgctgagggtcgaggctggggctggcgcag

SEQ ID NO: 161643 - DNA, 323 bp, Zea Mays
gcataagggctgggtcattccaaagctcaagctcagaggactcatgaccatggtcatcagcttctccctgttttttctcatcagcctttatataaaaccattcatttttccagccggttggccactttgtgcggtagctgaggactggtgcctttgtatcctttcgatacgcaaaattataataaccaaaattttcgtgaagaccatcttccctagccttcgtctgatagtgcagctcatgcactcggcagaaagcttcggcatctgggctcatcccttggcttcgaagggcccagataaagacgctgagcctaacgatagcg

SEQ ID NO: 161644 - DNA, 597 bp, Zea Mays
gcaaccatcgaccaaatgggtgatgaaaagaaggttgttgatccagcgctggccggattttacgaagctatggagaaaaccaacgcatagaagattgcaaatgagatgttggttggaatatccaaaaactccagcgatagtgacaatttcgatgtagaaagtggaaatgaagatgccaaagatcagccctggagaccaagccatgttgtcttcggaaaatgaactattaaacaagggcagatcgatgtaatgagggggaggtattttcgtgatatctcaatcgtgaaggccgaaggggagaataatgttcctcttcccaaagctgacgaagtcgtggtgtacagaagctttatgaaagtcgggcttctattccccctagacaaattgttggttgaggttctgaagacctttgaaatttaccttcattaacttactcctgacgccatcattaaagtgggaatctttatatgggccatgaggagccaaggactggaaccagatgcaagatgcttttgcaacatccatgagttgtcttatgagacgaaggctatcggaaaggagcagtatcacaacaactttggttgttacagtttcgtg

SEQ ID NO: 161645 - DNA, 1115 bp, Zea Mays
taacggacgagtacaagcgtatgtgagtgataggtgggcccgagagccagggcccacggcacacgctgaattacaacctggctgggactaggtcgggacctccacctcgttgagttgctcggcatggactaggtcgggacctccgccttgctgagttactcgatagggacttggtcgagagctccacctcgttgagttgctcagtagggacctactcgtcaggtgggccattaagagtcacaggactactacaggtacctagttctcgcgtacctgtcaccatgtcaaacgaggcttaaggggtaagctatactgaccaaaaaaatctacaaggaagggtcattggattagaatttgcgcccgaccaacagggcgcggtattcctaggatcgtattacttcagccattacagaggtgaggatgtgcaagtctgactaagcgagaggtttgattgatgaaaatgggagtatgtatgtcagagcgcgtatgtcttccaccacgacctattggtggacagtggatcaaccacttcgtagctattaagtcaacaaaggacactggataaatcgttgcaggacatgactgagtgtaacgatgggctctagggtggcctaggtgtgcctacaataccctaacggaggaagaaggcatcatccatggagtccctcgactgatgggaaccaaagaggacaacgaactagacgacaatgcctgaccttttttcgcttgacccttaggctcttgtaacagggttggtctatgaccttggcctataaaggaagggaaagggacatgattccgaggatgagcaatcacacatacacatcactagcacaagtcaaagcacatagcacttataaccgcacacatattcacacactagagacttgggagcttaatccctctctcgcccgtttgtaaccactactacaaaccagtgcaacgtaacacgagcaggtcaactggatttatggatgttatgcccaaactagaataaacccttgtgtcctctttgtacaccattcgctcaaagacacgcagagcacaataattactagacagtggtttcgaaacaccgacagttgacacgccagacatgagcatttttgcccgtc

SEQ ID NO: 161646 - DNA, 952 bp, Zea Mays
atctattcgtgcgcatgtcgccgacgtacgtgtccctccggcctccggatcggagccgccattattgttgctacatcttggttaggttcacataataatgaacgtacgacgtgccggcgaggcgtacagtaaagtgctgcactcagttcttcgtcccctgttcagctgtccgttctaggacatataggcgcagactactgcactgtagcaaaacgaatatgttgctagtgcgtgcacgggcgcggtgaatatggtcgatcgtccatgcatggagtcgtacatatatactcctaatgaccaaacgaatccgaagcaagacacggcgcgcggcgtcggtgaccgttcatgcatgcatgcgtggcgggcgcggccctgagccccttgcccctgacggtgctgtgagtctcgtgatccttttaattgcatttgcatgcgtgttcacgtcgccgtttctccgccatgcgtaatgcatcggcacagagattccacgcgttcccggcccggcccggcccggccccttttcgtcgagatgtttgaaaggcgtagacatcggtcatcaagtactactctagtcaccatctatatacctggatagcgcgccctgaattatatatacttgcctatacaagaacaagtacaagttcgatctctccaaatttctagtccttggggaatcattggtttgttgtgcgagttttaattgggtggagccagttgccagatagaccggagacatgcaccaacgttgcgactgttgtgacatgatcgcccatttacttttttgggggaaagaactgggaagcatgcatgcatgcatgggcgggcgcacgcgcctcccgaactctttggcacggcacgcttggattccaagccaatcaaccaacctgcgcggcgggcggggcagacggcggcagaggcacgagcccccggagcctcctatcctgtatcttat

SEQ ID NO: 161647 - DNA, 963 bp, Zea Mays
tggaaaggtcacacgagaggtgacgatccaggcaggacgggagacggcacacggtcacacaaggtcactgaaatgacagaagaggtgagcacgtattagtcacatagtcataagcatttgaaatgtgaataaatacatacacagagagatatggcacgagacaggacgatcaagaagtcaaacgacgtgaaaacggcgtttgacagacaaatagtgacataggatgattggaattcgaattgaggcacgaaacgatatgggattgagccgatacttcacgaatgggtttatataggtgaatatgagtgaagtgtgtgcttggtttgaattttggcgaagaaatagggttttgggcactcggctcggaaacgatcgcgcaaaacgggaattttggtgaaatttaagcccgggatctcggattggcgtgaaatttggcaagtaggttactggaagtgtggtgaaggtgcctgaaaaatttgggttcaattggagcaagtttggctggtttgggcatttcaccgaacacttggtgtgcggggagctagggttttaggaatatggccatttgaggtgggaatgccctcccgaaggagctaaaaacaagcagggatacacactagagatactagaactcatttcaccaactggattcatcagatttcacagaaattagaagatttgaaaaaggggtggtgaatggaatgacacagagactttgaacccgagagcagggagaaagagggaaggagagagctgctcacggaggggaagaccacgggcgaggtcgccggagcccagcggggatggtcgccgtcggtggagatcgccggtggggggggggggggaacgccgctggacagagaagaagacagagcgcggccaggaaaagaatgcctctggcccggctcggtccggctggaggcggttttttaaaacgcgagatgggcacaccggacagtctac

SEQ ID NO: 161648 - DNA, 324 bp, Zea Mays
cttgacatacttaattgatctcttcctcaaaacacgctccgaggattccaagatacgcaccggacgacactccaaggtcagatcctgctgcatcgcaattggttccatctcaatctgatggtccggatcccgcaagaacttcctcatcatagagacatgaaaaactgggtgtacccctgccatggaatccggcaatcgcaagcgataagcccgggccaagatagtgaacggtccaatatatctcgggctaagctttccggagaaaccgaaccgaacaactcctttagtgggtgataccctaagaaggacttggtcacccactgc

SEQ ID NO: 161649 - DNA, 561 bp, Zea Mays
taactaaatcaaacaacacagttttcgaaatctgttctgatggtggacagaatataacaaccagtttgtaaaattcataactcctaatctgccaggcctatggttatgaaattttaacacaagcaagataaaaaaagcatatacaactttcttataacgaccacgaacagattgtaacattaatttaagcaaacaattcaatctctgaaatctgtatagaaattggacagattcagttactgaatttgtaaaaaacatagctcctaaacgatcagacttatggctgtcaaattttaacataagtaagataataaagttatctaccactttattatatggcttttctacagaaaacataatttagttcatcaaacaaacagcacgacgaaaacagtacgtgcagcccaaaacagcaaccaataaaattcagctcctattcacttcaaaaattgccgcgttctagagtcttgaaccattttaacactttaccatttgttggagttgaaacaatcaaattagtaccaacaagtagacttactaactttttatccaagttatttc

SEQ ID NO: 161650 - DNA, 518 bp, Zea Mays
ggagggtcaattggctgccttttgctttaggaggaagagagatgagcggcggggttctaagttgagcagagggaacatgaaccacccctctcatggtgttcatgatcctcctattcagagacatcatgcgatgcctagaggtgctttgcctgttgctgctaggcctaaggcagtgagaccacagggtggtcatacccgacagggtgctgatcatgtgccatatggccaaggaccccatgctatagtggctttgattctcacttccctagcggaacacggtttccttctcgtggtgatcgctatcccccatgggaccagggatgtttggtgttttccctaacagttttcaggggcaaatgctacaacacgagtatccttcacactttactaaccccagtgttgtgccatttgctcacctcgtgtcttattattgatgctggatagaagcctggagaacatgtggctcatggattcccactgttcatgccacatgaccgaaagttctaaatggttctcca

SEQ ID NO: 161651 - DNA, 338 bp, Zea Mays
gttcaatatacaattaagtgtgaaattacaatcacaacctcaaactttatacacatagctataaaaattactagggacatcattgtcattccttccgaagcgatagcaaacattccagtctccgtttccagaccatgtgcttcgacctcgacgacatgcttcgactctgcacataaatcgaagcttcctccacttctcttttcacttgtgttgacatccttcggcaaacatatgttaattactcctaagacaaattgtaaaaaactgtcaatataaattagttttgagaaccttcggttagttttgagaaccttcggcagaggcattcccccaacagt

SEQ ID NO: 161652 - DNA, 487 bp, Zea Mays
ggcagccactccccgcttggcggtggaaggcggcgttggaggcggcactgaagccatcaaagccaaagagatggagccgcagcacggctcgcttcccaccccaaattgttgggggcacgagggatggacccatggctcagcccgctgtccaccttcacgaggctggtgatcatccttccccccgaatgctggaggaagaagcgggaaggagcgtcgcctccacggacatcccacggaggtaggcgacgatggccgcctgaaggatgaagcagcgcgtaatgcgtagaggctagaggccaagcccctccaacagcagcacgaagaaagacgggatcggcagcgccaacccgctggggagtttgaagacgaagaacacaaactctccagcggcgaggtcgccgtgaggagagacaccgacatggatccttccggcaaacgccagcacaccccatccgagcgagttgcgcgccaatttgagtgccacctc

SEQ ID NO: 161653 - DNA, 339 bp, Zea Mays
tgcatggaagactgccctccaaggtcgacgatgcgcgggacaccacccgggttacctcttgcccggcagaatcaagcagcgaaagtccaccatctggaacctctgaacagatagttggaatgtcaactttgggaggctccgatagtttgtcttcaggaatgacctcttccagtgcctgatcaaagtctgatatcaaaagcccctaaaggctgacgagtgccgacaaagcttgggagggaatatcgctgccccgtcgcttcctctatggtgacggttgttcttgcgagtccgcggaatctcttcttcttcttcctcttcatcctagtcaaacaccctgcc

SEQ ID NO: 161654 - DNA, 700 bp, Zea Mays
gtgacggtctagttcaatcggatgggtcgacgagcatcacgggtatgtgagatcactcaaacgagagagcagaggggacgagctaacctgtatcgcgctggccacggcgaggtgttcttgcgacgttcttcgaccgatttgggggtaatcccaaattggggagctgtggggaacgatcggagctgatagtgggtttactggatgcacaattacctagcggaacatgttgaggcttcaatttataggatgctcaagcggtggtgatcaatttgggcaagttgtgctggcggctggaggggaaaaggagttctgtgctaggaacaggtggccttcaccgtggcaatcactccggcggtcaccggacatgcaccccatggttcaccacgatgcagctaaagcttaagcacgtggcgcgcaacggtgacagatcaacagcggtgaaggttatccgatcgaccgatgagctcgggggtacggcaagcttagccgccacgagacccaactcaatccgggcgccaagatttttacctgcccgtccttatcttctaactacggtgcacaaatcacggcgatcagcgctcatcgtggcggcgagtcaccggcgacggtgaacggctggcagtcgatcttatgcagatactgtaccatggcatcccttattcagttagcctgaccgagcgatttgaaacccaatttcctc

SEQ ID NO: 161655 - DNA, 947 bp, Zea Mays
ggaacaactttgctgcagagtcctggattagttgctatatgagtttgagagaaaatttagctcaaagattggctgtcaggttcatctgaatgaaaatctccatggtacagtgctttgtgaggatcaggacgccagcgcagggagccctcaccgctgacgatcgatccttcgccgcgattcgtgtcaccggcgactggattcgtgcctggagttgatggatagcatcgcggggtaaaagatcatcaccccgtgcgctggacgccactctggctagctgtcgtgcctcccccttgcgcactgatccttcggataaggttctcaccgccgttaagccctcaccaccgtccgccgcatgtctttacctgtctaccgcatcaccgtgactcactctagctccacgttggtcgccggtgaagtcgccacgacggtagacacaaatccactgcgccaaggtccttctttatctccggccgcctgcatttgcccgaccaaattacgcgccacctcctaaaccccctataaattgatggccggggctgttgcgccgtataatcccgaagccatagcacccgctcccacccttaatcattcacctagctcttgaatttcaaactttccccaaactggtctccgccaccacgaagagcacctcgccgtggccagcgtgatacaggttagttcatccctgctgctcttgtgtttgagtgaccttatatgctcgtgatgctcgtcgacccatttgattaaactaaactgccaccaatcaccgggaacacattcatctgtccgcaacaccctcggttaccgtggccagagcgaatcgggtcaccatttctgaaattaagttaggggaagtgatcgggaatggttcaatcctatgttcgctgctcgggagcactagtattggccccctccggtcggtatagctcgctggagctcggttctgt

SEQ ID NO: 161656 - DNA, 457 bp, Zea Mays
gtcgggctgtcaggctgtttgatgtctgaaattcagactaacagtggtactgagtcatcttgggagctctgcagatcaagaacttcaaagaatttgtcccgagtcaatatagcaaagttatagagccattgtagaggaacaactttgctataggtgtttgggcttggtaccatatgaaattgagagaaatttggccctaaactttgactgtcaggtgcactgaatggaatggccatggtacaatatctgaagtggattagaccgccagctcagtttctcaccgccgacgatctctccgcctcgattcgtgccgccgccgtttcgattcgtgctcaggttgatcggatagcgctcagggtcacacaaatatcatcgccgtggataactccggccagtaaactattccggccatcgtaccgcactcaccacggtggaatcggttgagctcgccggtgac

SEQ ID NO: 161657 - DNA, 971 bp, Zea Mays
tcttcacgagtatagaattttcaatccacactaggtggtgaatttctcttacaaaccctatcgctaagagcttggtgacctcctcgcctatggcctttcatttctccttgtcgaaacggaagagacattgggcaactggcatcgctgtcgactggatgttgaggagtgctcggtgacttcccgtgggatccctggcatgttcataggcttccaagcaaaaacttcatggttttgctggaggaagtcgatgagcatgccttcttgtttgtaggatagcgccaccttgatgtggacacgcttggctgagtcagtgggatcaactaggacctcattagtgtccgcggcggacttgaaggtgctagagccgaccttaggagggtctggagcatcctgaggcgtgctcttctagtgctcggccatccccctggttgctaccagtgatgaggtgagctcacagttggcatgttcacaggtgtaggcgaccttgaaagaggcgcttgttgtgatgatcctgtgaggaccagatatcttaaggttgagataggtgtagttggggacatccatgaacttagaataacatgatctcccaaggatggcattgtaggacccggaaaatccaccacctggaactgtaatcgcttagtgtggaagttggaggcatcaccgaatgtgacaggcaacgtgatccacctaagatggttggcctaatgacttgggatgacactgtgcaatggtgccagactggggcgtagcttggagtgtgtgatccccaagtcgtaaaacgtctcaacatacaagatgttaaagtcgctccctccatacatgagcaccttagagaggttcttcaggccgacaatgagcttaacgacgagggggtaggtcccggcatacatgatcttctctatatgaacacaatgataaaaaatgttcatgaactccaaccatcggaggtgcttcggaacgatggagtc

SEQ ID NO: 161658 - DNA, 463 bp, Zea Mays
gtcccggccgtcagctccttcctcctcgcccgtgcgtggcatcggcgcgatcaccgctgaccgtcgtcctttcctcaccctgccattactcatgcgctagtgaagttaggcaccgcttcatcctcgcccactatgctcacaccctcacacggcacccctcctcgagccatcccatcctcggcgctgtgcgccattaccgccgtcgttgtgcacctcgtcagtgccagcttgctttggtcgcttgcctccctcggacgcctataaaaaggccaccccgagctccctttctcctcgcaccggcctcgaccactctcccttccctcccctgagctcaatcaagccaagcaccaccgcctccctccgctccggtgagctcctcctcccctctccagtagcttagggtcaaattgagatagctcacgaacttcaccacctctccacgaacacgaagcaccactttctc

SEQ ID NO: 161659 - DNA, 444 bp, Zea Mays
ggggatgcaaacatggactcaccccaaatggtgaatcacgaggatccagcctgatgagctgagacgcaggaggttatactggttcggctcggggtcctagtctagtgtagtgctgatcactgtattgctcagtacaggagcgtgttacaacaagtgtgcttgtgtcgagaaagaaggttgctcgacccttttatcgctctagggtggccttttatagcttggtttcgaaagtcatgtgagtgtttccttcctggtcgttcttttggcaatcttttgctcatgcgcggattgtctgtttggtttgtccccctccccccgcacatcctcacgcgatcagaggctctggcagaggtgctacaggcggtgcagctagagatagagcatctttgcatgggagccacctgtcacacccgagctttaagggacaaagccgggtgcatctca

SEQ ID NO: 161660 - DNA, 399 bp, Zea Mays
gacgtacaagatccagcagctcagctcaccaagatgatattccacaaaatcaggagcagaatgagccacaaccagccccaatccatcgtttccgcataaaggctttagcttgtcgtttaaaaagaaaacctcctgctccatccacactgtctgacgacgatttcatggatgctccatcgttgaagcgccaattcagatctgcctcaccttctccttcagaacaaatcagtgcaaagaagataaaagtaccttctcctcaagttccgagcgtgaaaagaagtccaaagtctaatatcattacaaaaaaactctcctaaacagaagactcctagaaaatcacaggtaatatgtatatatttctgtttattcatgtgttaattttggtgcccaatcaatttt

SEQ ID NO: 161661 - DNA, 687 bp, Zea Mays
acactgttgtgctgttaaaatttttaaccatagacgaagatctctgtgttgcattttcgagcaaacgcttcgtcactggagattagcttcgtcttaaaaaagtgtagacacaaatggccagagttcgatccactgctagggtgtctcgtgagggggacgaggccaaacctgccgaaacatcgcccatatcagaagtaatgaagcgatcaggtctagttgtgccaggggaggtctgacgaaggtgcttccaatgccgaagctggacaaactgtggttgagggtgagagtgataatgaaagcaaagaggataacaacattctgaacctggcaaagcctagtcatcttgaatttgaaaaatctactttaacagaagatgacatgactatgatgaaaaaactgggctatttcagggagtctgagagcaagcttgtttgatttgttgggaaataggtaattccggagccgagggaggacgaagttatcatctttaagagtttttttagagcagggcttcggttccccctaaatgacatgacaggggaggttctaaataactttgaaatataccttcatcagctgacccccaatgctattgttagacttagcgtcttcatatgggctctccgaagctaaggaatggatgctaatgccaaagctttttgccgggtgcacgagctacactaccag

SEQ ID NO: 161662 - DNA, 996 bp, Zea Mays
cttagggttatttagggtttgtgaattcttctcaccttgaggtgcatgacatgattaaggcacaattcttaagacaaaaaagacttaattaaacctttgttcctaattttttatgtcctttgctcaatttggttcacatgtgataatggtttcgagttagctttgagaagaaaccttaagtgacactggggtgtcacagccgcccctgctccctttgacctaagaattatagaggggaggaggaagacgtggtggctggcttggaattattgaggggaggaggaagacgttgtggccgcccctgctgcgtagattgatctattgataaggaacgagaggaaatcttgaaggagatcgagtgagcttcgattcaggcagggttgttgtagatcgtgtcaattcctttctgtttacacgcgggagaggtaggtattcacgccaatcattgtgttcatcgtgaaggcaaagttggattctatgtttaacgaccacagaggtcagctcgctaacggtgacatgtttttggtcgttggctgggttggacagagcttgcattgtgccgccgagactcctcacaaccacatattagaggtggtcgtcattttctagtcgttgatatgcttttctcttgtagtgaatgggcattcttgaaagtcatctagggtggcggtgaataagcaaaatctgaaatttataactttaaacacaaacttcaaccccgattaggcgttagaacgagaataagaacaatcagagtgagcatgagagagttcttcttgcataagtttctcaaatgattgcggattactttgggagcaacttagttgatatggaatcaagcgtaagcaagagaactagaaagaagggagatgaacaaacaaatcatgatcgaggatcaaacataaagaacgtgggcaaattatttcctgaggtttagttccgaagaacctactcctactccttgttaaggagtgtactgaggactggtctctttca

SEQ ID NO: 161663 - DNA, 704 bp, Zea Mays
ttcgcgttttagtttaaaaataaattagtgggcaacaagtattaagaacaggtattactaagcaaggcctgatcattttcactcttccatatatgcagcactgtagcaggagtaggtagcagcagtaagggctaccagcaccatttggcgccacaggttcgcagcatccaaacaccaaacagtgtgtagtaccataccataccatacctctgcccagacctcggagcaatgtatttggtcatggggcattcttgtacagttgggcaggcaggcaggcacactggatgcggcaagttgcaggaggcatgggcagctcagctcaaaggcgaggctcatcatcaaccacagatctgaaggcctttgcctttctttaggttcaggcctggccggcttcgtcaggtgcatccccccggcaggagctccagactccaacttgagatagaaaatctccaagaggtccgccgtgacaactgacaacctacgcggcaatgtcttgagggacaaggcttgccttataaaaagtacgtagagactgccgcactgacctttgagtaccatgatagcgattatctgcatgcaagaggggatttcataaactatacttggttgtgtactacaaaagcaggcaagatcagtagagggggttcctccccaacttgcctcttgttaccttttgcacgaaacaacagccggtttgaggaacc

SEQ ID NO: 161664 - DNA, 584 bp, Zea Mays
gagatattgtggtgtgaagttggctctgtctgagttgtccagaccgagacaaaaactgtgtcaagtcctgtcaaaccactttgggttgggctcaaatttttctagggtgttctaggggtctttagacgccattttgtcaattgggccctatgggtttgaggtttggaaaaatgtgaacatgcttgatctttgaaagagggctggttttgaaagtgagaaaaatctgatttttcttttatgccttctctttggtgacatttttagggtttttctgaaatctttttggggtcactctcttactattttttgtagggtattcagtgtactacaacttttataattagcccaagtcatgataatgtggtttacatagcctttttgctatactcccctctagggctccatttgcctaaagggatttgaattagggtttgagccattttatcctctttaggtgcatgataaggccaaggcatgacttctaagatgggttacacctacttaggatcttgaccccaagtttggtgtcttttgctcaaactaaaccacatgtgatgatgggttcaatagtgtaggcttgagtg

SEQ ID NO: 161665 - DNA, 386 bp, Zea Mays
aactagttcataaatttagcgtatcgatgggctcacataatcaatgttcggacaacagaactgcttctcatagtcttcattgatgacatcacggtctccacaatcgcatcgaggcggtgagtccatccgtctttctgttgctaccttcttctccgcatccgtcattggtggaggatttgggggaggaggtacccaacgcttaaaacggtcatgactagtccttccactcaaccaattaacgaaaaagaagatatcgagggtcaaatttatcaggaccgtcgatccactggaaaaagaaacacctctgatgcccctaaaataatggaaagaagcactattacacatctacaaaataatgaatgcgaacaaaattaagtgacaagtca

SEQ ID NO: 161666 - DNA, 933 bp, Zea Mays
ctccatttcaggtcgaggcctttccctgttatgctgttgctaaaagagatcatgacaatcgggccttcggttttgctgcaattacctatagaaatagagatttggtggaagagtacctgatctgtgggatctgtccattaagccgagggtggtctgttaggtcggttgttggtttttgtagtagattctaagtcctatcttttctgttgatctaggcgatcgctcccaagatatttttgtggcaaagatggtgaaagagctagaggacttggtgggtcttgttactaagcgtgaggttgagaagggtatcgagctgcgcgagggagaagtccagtcaaatctcgtgtttagtcagatggggcttgtgtatgaagcacacaaggctcgactgaagaggaaaaagagaatgccaatgggggtccctactcaatcttagacatcgtcgtagactccgttagcctgctcgggggaagtgaacgctagggcctccttcgaggccttcgctcttgagctggtggagacatgtgagccaactgactcggcgcatgacacataggctagactcgctgaggacttcaccgagcgaattaccgggggtaagttggggaaagacttgattctgatcagggttggctcagggagtgcaaagcgatgggttgtgagggatatacctgtgttgtgcagctgcgaagatgtcgtattagcctgagtggcgatggagctgcttatattcccttactcgcataacatccccgatgtcattgttgcagcaatggatccgaaggggaaggtgcctgcttcaatctacggagtggcgaacatggaggggcggacaaagaagtggaaggctcgtgctgctgagcctttcgtcatcgctacttcgctaggtcccaaagagtcaaggactacaatgattactggggtgacgacaac

SEQ ID NO: 161667 - DNA, 620 bp, Zea Mays
cgccaagttgtaatgcactaggcatataaatagaaacccacagcggcagcatttgttacgccatttcagttgcttgtgttgttttctcaaattttaattctcttgctatcagctctcgcttgattttcgagcttcgtgatatacacaagtgcttgttgcatgtctgaagagaagaagatgtctgaggtgaagaaggttgtggaccctgctcttgctgggttttacgaatctatggaaaaaacaaatatagagaagatcacaaaggaaataatggcagatttgtctgaagattctgacgatagtgatgactatgatgtggaaagtggggatgaagattctgaagaccggccctggcgaccaagccataccatcttcagaaagtcgaccattaaacaaagttagattgacgccatgaagggaaggtactttcgtgacatgtctattgtgagggttggaggggacagcaccgcccctgctcctgaagaaaatgaggttgttgtgtacagaagctttatgaaggcgggtcttcggttcccattgagcaaatttttggttgaagtgttgaagatatttcagatctttcttcatcaaattactctcgaagctataattagaatggg

SEQ ID NO: 161668 - DNA, 1070 bp, Zea Mays
ctcgccggggacagttgggctcggccgggatcttcgctgcggactccgcgactccctgggcggccgtggataaatatcgtgcccgtggactcttctccccgcctacccagcatctcctccacttattgcacgaagccgcaaccacagcgtcaactccgcgctcccccgcctctgacctcacgaccgccacggccacctctgtgccagccatcgcttttcttcgaccagtgggcgcctcgtcggagctcgggtgagcttcgaccagcaccaatttcgcgtattgaatcccgacactgtgcgaacttcttgtcgcgccgccacgcatcgcctcactccgtggacaaagcttctgcccgcgccaatcaaggtgaggatcgccaccgagtcttcgtttccctttgtgcattgcgtagcgcctcgtgcgaaaatgagttgtaggcccttggatcgggaatcgctcaccagaattatatcattgcggaggatccacgtgtcgccatggccaaccccgacctcgtcgccatggctcggtgtgactcctcgctgtatgttcaacatcaacccctctaggttttgcaccggtcaattttgggttcgggtcgtttgagcggcaaatcgcgtgggcgccggcgagccaccgccgtgggtgagccagcgccgccgctcgggttgctggtttggggctgaattggggcgggtgtcattggccattggatcacgatcagtcggctaggaatagaacttggataacgcttcgggcggggtcatctcaggtcgttgatcggctcacggacggagacaaatagggtgtggctgttttaaatctggggccgttggatcgtgatccggcgggcagcgtctcgtaccggttcgttttgagtaggatctaatccgcaccatccgcgcgtaatcggacggctctcattcgcccataccccttcgtcgcggccattttcaaaaagagaccccctgctttaaccaaatcaacccgtcgtccgtagggttgttcgcctgagtctaggaaagttatagtttgacccctgtactttacagaaaatagcgcgcggtcc

SEQ ID NO: 161669 - DNA, 996 bp, Zea Mays
aattttactactctctggactgcgcaccaaaattagggaagtgcaagggctaaactataaagattcccgagactcagactactggcgcattgaccgcgagttgattatagctaaggttagggtttctttcgcaaaatggtcgtcgcgaaggggtatcagattatttcagccacccgatccagattcgagggctctgattagacttaggcctttactgaatcggtacgcagcgcaggccattggttcatagatctacgacgcagatttaaataacctcagatcctatcagggccatccgatcggaacctacggttaggatttaacacagcgaaggggtatctgagatctaatcctaaccgtactctcacagatcgatggtcgccatagccttgcgttgatataccccacgcccgtagaaccacgacgagttgcggatccatggcgaaggagtgctccgatgagcaattctcgcgtcgattctaaccaatcgcgctcggtgtggccaaatacttcttcctagggacgcgactcagttcccagacctcgaccgaagactcggcggtgacgccgaccaaaagtagcgtgcgacggcacttttcctcacacatggccctggtggcgctcgacgatggtgcttccgcctcggatggggtgaggaggagggatcgcgagccgtgctttatagccagaggaacacggatttcgaaggcctgatcctgccggcaagtttggactccgttgcggtgtgctggcgaccacgcgataacagcggaatccgttcagaggagcacggagcaaggaaaagggtgatgacagggcggtcccaccgggaagccacacatgagcagcagtgagcgtgaggcggcagaggctgattagtgggcttcgatagtcagcaggcgcgagcgtgaggagaggtgggccgcgcgggatgcgaagtgaaaagggagtgggccgcgcgaaatccagggatatgggtcgcgagggaagaagcgg

SEQ ID NO: 161670 - DNA, 891 bp, Zea Mays
acacatttttcttggcttgcaggacaacaccagggatctacggtttcttgcactgtactgcatcacattccatcgcaagaacaaaaccatcccgctccttgcaaacatccaaagatacaagttttcacggatgtagtctagtttagatatgttagatattatgtctacaatatttcataaactttatcaggagttatgtgcgtatattatggtaatgacgatagaacaatcatgtgtcgatgttgatgtttcttatgttatgttaacgacaacctgggaaccgtaatggataaactgtaatgttttctatgtttttaacgtcatgtgtgttattttttatttgatcagtatgttgcatatcattgtgaactctatgtggacctagaaccacatgtatagtatattatgacccgtttttattggttacgttacttttgtcacaagtttatgctacaaacagcatcgtgttatgcttatttttacacataatgcgcaaactaagttactttgtgtagctgtgtaagttgttgatatgtgtataatggttacgatacttttacagcactactttcccaatctcaaactaacccagatctatgcacacactggtatgtatatacaatagcataaatggtatgacgctgcgatattgcatgatttatgctgttacgtttcatgttcttatgcagccataaacactgaacaaacttgtaaagtcgtcccacgtgatttgcacgccagcagattctttttgcatggtttatgcatattattcaatctgtttatcccggtataaatgctgacgcgggcataggtgaactgtattcccagattcgttgcatggtatatgctgttggtccttgttctctcggatgctatacactaagaaca

SEQ ID NO: 161671 - DNA, 764 bp, Zea Mays
aaatatgtaaacaaatgactcaggtgaatgtgcataaacagaactgaagatatgcatatatattacatacaaacagcatatatatattacttgggttgtataaaagtactatctgctaactaatcagtaaatacctaatccacagcctttgcctaaatacagaatgtcgggcgatagtaggaatacagaataaatacacataccctaatatcggggctcctaaacaaaaaacagatgcaatgcgcgatgcaatgacccgattatagtgatgtataagcggatacaaatcacacatttagctggataataagggttaccatcaaatccacttcaaatcgaccgatagggctcaaaaaatcgacggcaaactcggggtatttcaatgttggattacctggaacttcttgaatcggctccaatgctgggagattgaaggatgtaaggagtaatggaatggcgttggattggagcggcggtggattggcgctccgctggtttggaggcgctgaaatcgcctggggagtcgcctcccacgaaaggaaaatctgcgcggctggggttttcttcaaatggacgctggtttatctccgttgaatgcgcgagtacggttttagaaacaggaaacgtgggagaggtggctggttgacgggggtaacggcgccgtgactatgcccagttgactcggtgtggttcaaccaaaatgcccatgttgactagcctgggcttcctttattattggaagcccagggctcttaatatataaa

SEQ ID NO: 161672 - DNA, 370 bp, Zea Mays
actcctgagcttcagcttctggttcttcctcttccacgagaattccctacatctcctcgacaatccctactggcacttcctcctgcgatcatgtatgatgtatggatgcaatatgaggataaatgatgcttaatgcaagagatgtatgatgcttatgggtgcatgcggtgtgcacattatttaagatttactattacgaggttactacaaattggttctataagatagtctacatcgtccaagatagtctacatcgtcaaagaacatatagtctatcttttcttggttggtcctcactaacattttaaagaaatcacacaactcatcactaatcacactacaaggtattcctaattacactacacattca

SEQ ID NO: 161673 - DNA, 651 bp, Zea Mays
ttcggaacaacaaaagaaaagattaatgaatcaacaatactcacccatagcgaaaagttccggatacttctgccacatcagctcctcaagctcccaagtagcctcgcgctcagactgattagtccacaagaccttaacatacttgattgatctcttcctcaaaacacgctccgaggattccaagatacgcaccaaacgacactccagagtcagatcctgctgcacaacaattggttccatctcgatctgatgatccggatcccgcaagaacttcctcaacatagagacatgcaaaaccgggtgtacccctgccatggaatccggcaattgcaagcgataagccaagttgcccacaggggccaagatagtgaacggtccaatgtatctcgggctaagctttccggagacaccgaaccgaacaacccctttagtaggtgatactctgagaaggacttggtcacccactgcaaattccaaatcccgcctcctcacatcagcataactcttctgacagctctgagcgaccaaaatagtctgacgaatttcccgaaccttctcagaagtctgctgaacccaattaggaccaaccaaggatctctctcccaaagtctcccagcacagaggggagatacaccacctgccatataaagc

SEQ ID NO: 161674 - DNA, 447 bp, Zea Mays
cgcttacctaactcggcatgaccactataccctgctaaaggagcaatcagcttatgtcagcaacgacttaagatggtgcaacatgctcgggcttacctaactcgggtgaccactataccctgctaacggagcaatcggcttaggtcggcaatgacttaagacggtgcaacatgctcgtgcttacttaactcggggtgaccactataccctaccaacagagcaatcggcttaagtcggcaaggacttaaggcggtgcgacatgctcgcgcttacttaattcggggtgatcgctataccctactaacgggacgatcggtcgaagtcgttaacgacttaaattggttcggtaccctcacgcctacttagtccaacaccagcacgtttgcaactactcatcctaaggcaacctctatgctccacgaagaaatttcaaaaccatcgtactgc

SEQ ID NO: 161675 - DNA, 312 bp, Zea Mays
cggcagccatgcgtgaagcagctggcgtggtttccagttcatcgatagttgtgtgagcaagatggtttggtccaatgcggggcaaaggtgaaacaaggaccaactgtccgtacgtgtagtttgatgcacacactgcctcattttttgactggtcaactgcttagagaggtaataatctggactggaccctgtgtgttgcgtcttcatgcaacagacaccctccagcaatcttatcaaaaggagcgaattaagtagtagtttttaggcccctcgcagactagttaattagtctacaaatgtgtgcaatcccag

SEQ ID NO: 161676 - DNA, 427 bp, Zea Mays
cacgattcgtgctcggtgcaaagtggataaccacgagggagtaaaagatctggcagggagatggattgggtcgcgagcagtagtttatcagaggggcttggggcagtgcgacgtggccgaacgaccgtggttgtcagaggtcgccggtgagctcgactgcgccacgccgtggtcctttaccacgtagtcgtaaccgttgcatgctcagaattactctcctcgcatctgtaggccgtcgagcgccgcggcatgcttgccagtgcaatgtcttgtcaccaccgccctccaaatcccttccaaattcggagtaaccgtggccaacctcccttgcttcgccccctcataacgaacccagtgcaactctaacctcggccggtcatctaccatagcccgagcaattccgtttccccccaaatcggttcttcgc

SEQ ID NO: 161677 - DNA, 510 bp, Zea Mays
agtgcttgatcaaaatccgatattgacagtccctgaaggctgacaagggctgacagagctggagaaggaatatcacttcccccctcactacctctatagtgcctgctattcttttggatcagcgggacttcttcctcttcttcctcctcatcttcatcaaatatgaaagcagcggctggtgcacaatcacgacccttggcgtcaactttaggaagagccttcgccggtgtctcatctggaaccggagcagaaggacccacgccctggtccaagcttgacagtcgccgaagctgccttttcttccttttttcttcaacgggtgcagtcggtcggctcactcggcgcggacgttttggtcgggcaccttcgggtttctgggctttcaccacttcaccaagtttttgcccatctgtgatagccattggttcggtgagggcggagtcagacgattccccagccagcaagctaagtacaacgtccatctctgtgtcgtcagtgctagttggcatt

SEQ ID NO: 161678 - DNA, 480 bp, Zea Mays
gtgagggctacatgattgacccttcgatagtggtctttcttctgccgttttgtgtcgaattcgaagctggatcctccagtaatcatgtggattacccctcgaaagggttgaccggcgaagtcctcctgcttcggtgggggtggtggtggtaacggttgatttggatgctgtggtggtggaggcggttgagcttggatttcttggtgttgaggtctctgttgttgccggtatatattatggttttgctggtgaggatggaaatgttcattgtggacttggtgttggttgtactcatggggatggtaggtgtgggcgacgactctttggttgtcagtcggttggtttctagccattcgatcctttgttgccttagttttggggcaatccctggttgggtgtgtcgaggcttagccatggaaaagacaatagaatcttcactgttgcgggcctcagcctcttcctctaattgcattactgtcg

SEQ ID NO: 161679 - DNA, 524 bp, Zea Mays
ccccaaccctggtccaccggtgctccatcaccttgccctgtcggtcgttggtcctagctcccagatcgtgccctcatccgacgtgcttggaccccaaccgtctccgatctcgacctcaccgctatgaagccatttccctcgtcattgatcctcgtctcgatgctggcgaactgacctaggtcggccagggataccactactattgttccacaccagtcgcttcaccattaccgcatgtttgacttcacctcctactgcaccttgggcaccgtctcagcgtcgtcggttgtgcaaccttcctatccacggtcacaacacctcgccgtcgttccgcgcaccatcgatgtggtcacgctattcttttactcaacttaattccttgctcggtgtcgattattaatgatgggttatgtgaatgtatgtatttatgtgtgagatgtgaggaagagagaaacccagtgttggggcctatactgccaaaggtatttttattggttgtgctatataattgccttaaggataca

SEQ ID NO: 161680 - DNA, 453 bp, Zea Mays
ggcggagatcctcccacctgtgccgtcgccggaagccgagatggactttgccgaaggtggggacggagctgaaggcgcggctctttcccaaggcgacgcctaaccctgttggaacaatttctgttggatgcgcgtgtgtctttctgcagccgctgaggcctgaacactttgttaccgttgcatgaagtcgtactccttttccttttattttgcgtgtctggctttgcccgttagtaacagggtggcttccccatgtaggggtcacttttcgtggcgggtgacgagtgaggtgttcctaacccggaggcataggggtccctcgactcagtcggccttgccacttacatgcacccacattcgctcctggggccctgcttctgacatagccgggggaacgcaaaagcctttttgatcaaaaattttggatgcagagaggttccccaatcctgacgc

SEQ ID NO: 161681 - DNA, 621 bp, Zea Mays
cagtgagaatctacctagggttgctataacaaatttatagagctattatagaggaacaactttgctgcaaagcctcggattagttgctatgtaagtttgagagaaaatttagctccaaggttggctgtcaggttcatctgaccgaaattcccatggtacagtgcctggtcggatcagaccgccagcgcagggagtcctcaccgccgatgaccgatccttcgccgcgattcgtgtcactggcaattggatccgtgcctggagttgatggatagcatcgcggggtaaaagatcatcaccccgtgcactggacgccactctggtgactcaccaccgtacccccttgctttgcggcttgagcagataagctcgccggtgaaccgccatcttccggccttgtgccacgtacctgagtgtttccaccatgtcaccatgaacctttgcgactctctgtggctcgccggagtaactgccacggcgttagacaccaagccgctgcaccagtgctcttcccctcctccgatcgccgcgcgtcctctgcaaattcgcggccaccgctcgcaatccctataaattgatggctgggttagtcaaattggaacctattctatggttgcctcgggt

SEQ ID NO: 161682 - DNA, 813 bp, Zea Mays
gccaaaagcttcgttaaaattttcatactgttgtttagtaacgaaattggcctatagtctcccaccttttgcggattttccttcttcgggatcaaaacaatgaatgatccattaatacttcttaggcaaacttcttcttgataaaacttttcacacagatcatagaagtcttgggcaatgatgtgccagcactttttaataaaattggtattgaaaccatcaggaccaggggttatccgaaggaagtgctttgacaatgttgtcaatctccagcttagagaaaggggaatctaattcatgaagatcttcatttctgattaaaagctctaacaaatcaaaatcaataccaataaaatcagacgatcccagtctgttcttgaaagcttcccagagaagatttgatttgtgctcatgctcaaaatgtatagccccaatatcatcggtcaaagaagtaattgaatattttatatgttttacagtggcatgtgcatggaaaaaacgagagcaaatgtccccttcagtgatccacttgatagatgcctgttgcttccaatagattttctaaatatttagcagttcagctactttttcttgcataatatctctaaaattccattcctcaatagaaagatcacaatgctcttcaatattgtcaataaactctattaacaacttgatatttctcgtcgtcgtatcaatatttggtaaagatcgctgccagtccttcagaacctttcgaataatcttaaacttggctgttaagtttttagctttgtcaggaatgcatggaagcccaagccacgtggtttgaaa

SEQ ID NO: 161683 - DNA, 400 bp, Zea Mays
gcaatggagatttgggaggtgatagatccgggcacaaatccaaaacgtgctcaagatcggcaggccatgggtgcgctgttgagatcagtacctaatgagatgtggggtacccttggtgctaagaaaactgctaaggaagcctgggaggcagtcatgaccatgagaattggtgctgatcgagtgaaggaggtgaatgtgcagaagttgctgaaggagtttgagaacatagaattcaaagaaggtgaaactgttgaagactttggcatgagaatcaccaatctagtggtaaacatcaagtcactgggtgaaacagtggaagacactagagtggtgaagaagtttctgcgtgtggtcccacctcgcttcaaccaagttgcagtttctattgagatgttttgtg

SEQ ID NO: 161684 - DNA, 1168 bp, Zea Mays
ataatatgtatcttcaaagtcagtattttaatggcacaatataaacttaaggataaaatggccacaagaatggaatttaaattttaaatgagtttgaattagaaaaggaggaaaagggaaacataaaataagaggaataaaagagaagagagagcactctagcgtctgggcccaatctggtcggcccatttccccaatccctctcccgtggcccagcaacctcatttccctctcgcgcgcgcctggctctgcgggctgacatccgacgcccacacgtcggtgggttattcccagtgtcacacgcgccactgcctgtggatccatctggtcatacaactttcgaatgcatcaccgttatctgtgggcccgcattgtcatgtccgtcttccccgcagagaaggactcgtccgcgagtcaaaaatccgcgcaggatccgcgcaatcctagcaaatcagccccagtaatctcggtgggtggttgcaaccgcctcacccgatagctgagccgccatgcgaactactagggctataaatgccgacttccctctctgtccgcgaggaaaacagagaaaacccaggaggaaataaccagccgtcactcgccatccccagtttgttgctgatttgatcttgggaaggcgcttagggcagcatcactggcgtcatcgcatcaggtagggacaccccaatctgctccgcgttgatttacgcatcgtttagaacttgtcgaatctgggtatggggccttggggcgtcgggattggccaacatcggccatggccgccaccgcgtggggggaaagtagcaccgccgcaggtggcttctagggttgaagacaagggcgctcatccgttggatcaaaaccggtggttgagattagatcttaggtgatgaatgaccgtgaccgctagatctacttgaacggtcggatttgaaccgattgatctcccatcgaacggtttgatgaggaccgtaggatcggatcggatggctcaaagtaatcaaagcttcataataaaatctgaacccttgaatttcaatccaacggtggaaatcgcatactgcatcataagcatctagatctaatcctagccgcaggtcttagatctaaaggctcataacacccgataccccttcgctgtgcgcgatttgcatctaggcccctcggt

SEQ ID NO: 161685 - DNA, 391 bp, Zea Mays
agtgcccagtcatcacccggcggttatttctaaaaaagctggcgtgccatgtcatcacttggccgttatttccgaaacgaccgacacgactcaaattgactcagctgctgtttctaaaaacgctgacatcatctgacttcactcggctattaccttcaaagtggccgacgcggcccgtcctaactcagctgttacctctaaaacgccgacgttgccgtcagtcgctcggccgttacctctaaaacaccgacgttgcaatcagtcactcggttgttacctctacaacgctgatatcgctagtaaccactcggtcgttaattctaaaaacaccgatgtggctccgccatcattcggacgctacctcagaagcgccaatgttgtcaataataac

SEQ ID NO: 161686 - DNA, 754 bp, Zea Mays
aaggtgagtggtatatgagaccatttgtctaaacgaccggcccggtgaggactacatgattgactcttcggtaatggtctttcttctatcgttttgtgtcgaagtctacgttcgatccaccggtaatcatatgaatgacccctcgaaaaggttgatcggtgaagtcttcttgtttgggtgttggtggtggtggtggtggattttggtgatgtggtggtgttggcggtaggggttggatttcttagtgttgctggtacatatggttttgctagtggggatggtaatgttcattgtggaattggtgctagtgatattgttgggggtggtaggtgtgtgcgacaactctttggttgtcagctggttgatttctggtcatccaatctttggtggccttggttttagggcaatacctacgaggtgtgctgagtcttcaccgtagaaaagacagtaaaaccttcgctgttgcagaactctgcctttgcctctacctctagtgttgctaccgtggccctgttttgtggggtactcgtggcgacgagcagtgtctctagtctactactgattggcgatggtgttcacttggtctggttgcggtttggccggtctgagtctgactacgtaggcctaacccatgtcctgctggactgtggagtgtccttgggtttccgctgtgactcgacttttcgctagttgagctcttcggactgggcattttttcgaatagctgatataacttttgcaagtttttgggtgg

SEQ ID NO: 161687 - DNA, 363 bp, Zea Mays
gccatacgagacgtaaaatagtcatcgccgacggcctagggaatagggtcctttctatgccaccgacccctggtcaccttcaacattcgcgaagagttttcccagagttcgggcgaagtcataacctccctaggcctagcacatgtcactgtcaattcctcaatgaaaaacctagaggccttcggccccaccatttccctctccgtacctttcgcctctatcttcctcttccgagtcgttgtaatcacagtctttcccttcgaggtgccctctttagactgggtcttcacctttttctctcggtcgtccccagcatcagcagagtccccctccaggtaaggaccgtaccacaggctattcagt

SEQ ID NO: 161688 - DNA, 660 bp, Zea Mays
tcatcttgtagctgtctccaagtagccgagtggatgcacttcatgaggactcctctgcgcctcttctgtacagcaggccccctatgatggtatagtgggccgactgtcttgcagtgcactctgctgcggccttgtcatccagttcctcttcgtttttatgtacccgatgatcggctctctccagtcattgggatttgcctctggctaactcagggcgttgcattcttccatctgatctgtgataatgcttggttgctgtatttcttggacgaagatcctaggtggaacttgggcccgactggaccccagttttgacaatgcgtcagccgctgcattgcgatccctttccacgtggtggaactccatccttcgaacttgtcttccagctttcgcatggctgcgcaatatttgcccatggagtcggtcgagcagtcccaatctttgtttatttgacttatgactaccagtgaatcgccatacaccatcagcttcttgatgccgagtgaaaccgcgatgctcagccccgtggattagtgcttcatactctgctacattattggatgccagaacaaaagctggagtgcatacttgagttgttcacctccgggagcaataaagagaatctctgcccccgctccttgcagctttagcgagccatca

SEQ ID NO: 161689 - DNA, 615 bp, Zea Mays
cggcggagtcgccaaaaagtgtgttggcttcgaatcgagacaaaacactagggtttgttccgcttggcgagctctctgcggcatcatagacggtccgcggcacggggccgaacagtccgtgaccctgtggcaggagtgggtcttctctacgttgagccggacggtctgcgcacgagaagaggcaacaacgattgcctataacatctggatcttactccctggaggggctccataagggaggagctatcctagggtttgctttggggtcggtaggccacctaagacgccccaaggcgacatagaattgaagagagttgaagatggagatggaagaagactaattactgctactccttgggcaagaaagtaaaggtattgataaatagattgattggtttgattggtgatccatgcaaatggcggtacccgttcatatatacaggggaggtctggacccgttcctatgtgttccccaacagaatctgtgagtttagatggataaatacgcacggaaaaaagggctaaaccacatgatccgatctaattgcagaccgtccgcgtctaaggtcggactgtccggccacagatccgaaccatccggcctcttcaggtggc

SEQ ID NO: 161690 - DNA, 520 bp, Zea Mays
atccaattgttggatacttcagctagattgttggtgacatagtcacacttgatggaagggttaaactcactcctccatttcacctcttaataaaattctgcataagatgtctaaagaatttcgtatggtcagcccgaggaaacacaaccttttcttcattttctaaccctttgcatgtatctgtacaaacagcaagcgaagtaagatctcctatttccctgtgaagttgcctcatgaaccacacccaattgtcatcagtttcaccatctataaatccaaatgtaagtggatacatccaattgtgaccatcaatagtcgtggttgcagccatatgcccattgctaagctaactcgtacattttatcgtcgtcaactcctagtcaataacagcttcagagtgagaatcatgatgtactaccattgctaataagctaagcgggggctcatcatcaaggctgaaaataaaaaataaaaaaatggattcaaatggactgttaatttgtagtgctgctattctcta

SEQ ID NO: 161691 - DNA, 470 bp, Zea Mays
ttgatggtaacttcatttaacgattggtaatcaatacacattctcatgctcccatccttcttagagacgaacaggacgggtgctccccaaggtgatgagctgggacgaatgtaccctttttgctgaagatctgtgatttgaagcttcagttctgctaactcggttggagccatgcggtatggtctctttgcgatgggtgctgttccagggaccagatctatgtagaactccacttctctttctggtggcattcctggtaattcttctagaaatacgtccatgaattcttctactactgatatactttccgttgctagattgaacatcattgggtcactggcgggtggttgtgcctgacaggagactgactttccctgctggtcgatgaggaggactgtcttgtctgcgcaactgatgatgcctttgtgtttagttagccaatccatccctaggatcacatcaattccttt

SEQ ID NO: 161692 - DNA, 622 bp, Zea Mays
ctctgttcctggcgactcactcttccccccgccggcgatcttcagccaccggcggccaccgtccccgactgggctccgacgacctcatccccctctccttccctctctcggtgagcctccctctgttctcactccctctctgtgctctgtctgaggctgtcaggctccctttttccacccctttgcaaattcttcaaattcctgtgaaatccaatgaatccagttggtgcaatgtgttcctttgtccctattgtgtatccctgcaggatcctagctcctttgggagggttttctctcctcaaatggccgtttcaccgaaaccctaactccctgcacgccacatgttcggtgaaatgcccaaaccagccaaaaatgctccaattgaacccaaatttttcaggcaccttcacaacacttccagtaacatgtttgccaaatttcacgccaatccgagtttccaggcttcaatttcactcatttccccgtttcgagcgatcgtttccgagccgagtgcccaaatctctttttcttcgcctaaattcaaaccaagcacacacttcactcatattcacctatataaacctattcatgaagtatcggctcaattccatgtcgtttcgtg

SEQ ID NO: 161693 - DNA, 425 bp, Zea Mays
attaagcatgttgatgaggaaagtccatacaactttccttatctcaattttttcattgaaggaagctggtataaagtgagctataggaggtttgctcacattctgggatttactgatgaggatatctcaggagacaaaatcaagatccatgactttcgccctcccaccaaggatgaagccaaggatcttcacatctctgagtctgatgaatattggaaatccaccaatctgcacaagtactacaggtacatcaattctctctgcagaatgactctcatccccaaagggggaaatcagatgaatatcctgggagagagcaaagtcctgctctcattcatgaagccaaacatttctgaaagcttaaatgtttttgacatgatttggcaagagatcatccatgcttcctgcttccctctcaagggatg

SEQ ID NO: 161694 - DNA, 373 bp, Zea Mays
ggaaatcttaaaccagctttaaagaagcttttgaagaccactacttcatcctttcctggcttcggagtaatctcctccccgccgaagcgaaccagctccttcttcgcttcattgaaatagcccaaattcatcagcttcagcatgtcaccttcggaaatggtagatttcccaaactccaggtggctgggtttagttggcactacgctgtaatcatcttctgactcaacttcctcagcatcaacctgctcagcttcagcggcaggtgcatccttcgatactaccagccctgaccgttgcatcactttagagattggagcggttttggcaccttcggcttcctctccgtcgcgagtaaccctagctgttgagtgta

SEQ ID NO: 161695 - DNA, 464 bp, Zea Mays
gctaagctcgccgtacccacttgctcgtcgatcggtcagatagaccttgccgccattggccgattcccgccatgcgccacgtactaaagcacttgatcacgtcacagtgaatcacatcgtgcatgcccggtgatcgccggggagcttgccacggtaataggccacgaatcaccgtgccagtaaccttctttctttccggccgccagcacatcttcgcgaaattggacgccaccgccgtgggagcctataaattgccgaccccgcctgctccgctatgtaattgtgcaaccagtgaagcaacccgtgcctcgaatcatccactagaactccctaatttgggatttcccacaaatcaacctagaacaccgagcagtataacctcattgtggccagctcaattcaggtccgatcttaccctctactttcttgtttcagcacccttacttgctcctgatactcctcga

SEQ ID NO: 161696 - DNA, 394 bp, Zea Mays
gtcatcaagctgtgggtatcccctacaacttggtgtagttattaataaagtcagttatttagttgggtaatccatgtgtttccactttcctctttatctgagaagttgtcagtgaagatggtcatttgtttagtgctataaagatttccgtatatcttttcttatgctaaaggactgcagagtcagatttgatatatgtgtgtgatttctacagatgtctgagaataggcgcagaggtgcgaggcatgctcagcctgaacagtaggcaccccaagaggaggcagccccgcagcagcattttccaccgccaccaccgatgaccattgagcaaatgttcttgatgcagacccaagcagtccaggcaattggtcagaccttagcagctatgcagcag

SEQ ID NO: 161697 - DNA, 392 bp, Zea Mays
ggcgaggacagaagatgtccttccacagcccaaaagattctgctttcgctcatggttaccacaacttcacccagaatcataaaaaaaaaatatccagtgtggcaactgaaccatcaggatgtctgtgccagcgttagcccaggtgcctgttggaagctggtttgggctgcatcaactgtccgcgcagaatttggaccgatgtgagttctcgatctcagctttgggcttgtcttcgaagtgcatgcatgttggatacagattcccaactcccttgtgtctgtgtagatcgcagatggcgggggactggaaagaagatggttccttccgctgctcgtggtgtgcttgaatccagtagtggtacacattctggtggctttatgatgaaaaggtga

SEQ ID NO: 161698 - DNA, 401 bp, Zea Mays
gtgcgaaatgttattagaacagattaaaatatctcgagggtattcccaagagttgttggaattctcggaacgtttctttgggtagtaaatatgaatttcagtttttattctaatattatttaaatatctaaaatttagcatttgcgaagaactataaaattctagaaactcgataatatatgtatatatttttctttcgtcgagttcgttctagatctcatgtccttttcgcggtgtcgttaaaacatcactcctcgcaatcggcgtgtcgctcgcgtctactcctatctacccttcttgcctcgtctcgatgcgcaatgcccatatgctgtgcctgcaaccgcctttttccctcacccattcctttcgctgtaatcctagacccatgtgtcaacttcatc

SEQ ID NO: 161699 - DNA, 553 bp, Zea Mays
gatctgaaaaataagaattgtttgatgaggggactaaatgaccgacttcaatgtaagatggcaacatgcttggacctcacatacagcagggctgtcagtacagcactggcagttgaagccaaaaatgcgggacacagaaagtcaaagggatatgcgggtgaaagatctactcaaggacttgaaaagagaacaatgttggtaatttgacctttcaatctaaaccattcttcacctcgtccaccttcatatccattcaaacagcctgtatttattcatcccacatctgccccctctccaaccaatcagccgagtgcccctagtgctcgtttccctgcctttcccagttcctccaatggttgcttcaattgtggaaagttcgaacatttcatcaaggactacccatatccgaagcaaaacaaatccaactctcagcaggcttctaggaactcaaacgaaaaggggaactcggccaactcttcaacgggcaagaatttcaagaaactggacgggtctattatacccaggtggctactacaccggaaggcaaaccggt

SEQ ID NO: 161700 - DNA, 791 bp, Zea Mays
ggctactgcaaaaggaggaatcacaccaagaaatccccaatgtctgtcaatccttggagatggtggctatggagatcttcacaagccacgagtggcgatcaaatgctagaattgagacggcttaaaattgttctatgattccaaacaaacttttttctttctataacaatttatggagttgtaataaggctatatgcatgtaagtgcaaaatgctggaatttatttccattataaaaaaatgtattaggagcactaggctccctctaactagaggaagccccaaccatcccactagatcgtctcgatcaggcaccaccgagaccatccaacatgacaacagattttattattagttatacaaacattaacgcttgttttgtatctgcacaaaaaacacacgatatgtgacgcgcccacgccccttggtcaatcacaactgaatccaccaaaaggccccaacgcacacccctaaatcatcccacgtgcctcaactgctcgcaaccctaatctaatccgccatcatctcctcccggattgccagtcgccctcatcccctcacgcccgccaaaccctagctatcgccatcctgtcgctccctcccggcattcgcccagcagcgcgtcgtcgttgcgccatcgcccatgtgatcgtgtctgcgccgacttgtggagctagcggactgggtaggaatcggagacatatgtagccatcaccaccagaggttggatcaaacgaaggtgaaggccgactgtacgctccgtgtagggtggacacttttttaccataaatc

SEQ ID NO: 161701 - DNA, 558 bp, Zea Mays
ttttcaactactatatatatacagagagagtctgagtgagtctgaaaggtagacagttaggatttatacagccgatcccgtaggctatattataacgtagctttgctcttcttaatggctcgtcccggacaagaggtgacggtggcgtagaagagcgagcaccatcgcaagcaaccggtgcgtgtcatgcgcgcggtgagcgagtgttggttgttgggtcacggcgcgcacgtcggtcgtcttgagcacggaagctccttcaatttgctgcctgcagctgcaggtacgagtgctgtgtgcacagggtgtgtgtgtgaccgtcggctccttttatatttcttgattagaacagtttgtttcgacagtacgaattattataattcacgtcagggctggtgtgtgtcaaaatcactcccagatctgggtggatgtttgatggctagcttgtctgttgagccttggcagctgacgtaactcttttttttctgtcgtccctgtattttacttttagggtatctacggccttctgatgtttggttttaattcgtattgtctttt

SEQ ID NO: 161702 - DNA, 317 bp, Zea Mays
cgtcggaagagattcgatgatttaaaaacccacacgatgtgcagacgctggtatagacatggattctctctaaggcgcgctggacacagcttaatcctccgccgtgaggattagtctgtgtgagcatggctgtcgtccgcaacgccgtcactgctcccggcgttgtcgcccatgagttcctcctgaagatcagctctccttctctcttcttccttcccattctctccaatagatgctaggtgccgtccacattgcagtgctggctgggtggagatcggctaggagtactagctgttgtgacctattctccccattcc

SEQ ID NO: 161703 - DNA, 576 bp, Zea Mays
gatctttttaatctttgggcccggagattctcccccaaggatagactaaagattctagtaggggctatagccatatgctgggcaacttggctaagtaggaatgatgtggtttttaataaaagtccgatcaaaacttacatgcaggtactttacagaggaacctactggtgtcgtttctgggcgcaacttcaaaggcatgaggaagacgccaatgttatcagggaggcctgcaggaagcttgagacgacagtgatgcagatcttcgcttttcatgggtggcagtttagtaataggatcgctctgtgagcgttgtttttactttttgctgtccacccaactgcgtttggggtttgtatcgccgcttgtggctctttgagttggatctgttggttttgtgttggcatgacaggccgtcatcttcgtgatgtaggctgggaacactctatcccattatctaaaaaatgcgcagagtaaatttctccccgcgaagcaaacaacaaaattgacaccacgcaatatacttaagcttagtgtgtgtggtccatcatcttctcaaggacagacctagtgccggag

SEQ ID NO: 161704 - DNA, 970 bp, Zea Mays
gcgtcgcgcgcagcttgtcaaataccagggttaagtcttccactagggttgaccctctcttagtcttgactacgatgtcatcaatgtatacctccaccttatccctaattaggtcgccaaaggtcttactcatggctcgtgcgaatgttggcaaggcatttttcagaccataaggcattacaacataacaataaagaccatccactattacaaaagcagtatgtttcctatcctgcctagacatctggatctgatggaaaccagagtaagcatctaagaaggacaagaggtcacacccggaggtggaatccacgatttgatctattcgtggaagtggataggggtccttaggacatgccttgttgaggttagtgtagtcaatgcacatccgaagcttccattagccttggggacgatgactggattggccaaccacactgggtggtggacctcctcaatgaagccagcatccagcagcttcctgacttcctcattgatgaagtcctgccgctcgatggactgctttcgaggcttctgactcaccggcttggcgtcagggttaatcttcaggtggtgctcgatcacctccctggggatcccagtcatctgtgacggttcccatgcgaacatgtcaacatttgcccggaggaaggcgatgagtgcgatttcctatttctcccctagactccccgcgatgcgggtagtctgggaggagcccgctccaacctggatggtcttaacggggccgccgtccatcccggacggctgtaccttcagcgcctttggaggtgccttggcacagggggttggagggtcccttccctcgccatccgggtgtgcggcttcagccgccagggcatgtagcttttcgacggcggtgagtgtgtgaatcatctaggcccctgttttggtaattaatgacaaccatttgtggactaacaattcttggagaaataagaatgcaggttgg

SEQ ID NO: 161705 - DNA, 382 bp, Zea Mays
cttgatggtgacctcattcagagctcgataatcgatacacatccttctggtgccatctttcttctccacgaacaagacaggggcggcccaaggcgaggtgcttggccggatgtaacctttctctgacagctcatcaatttgctttttgagttcaaccaactctagtccagatactctataagctctcttaaagatgggggcggtgccaggaagaagctctatggcaaattctactttccgctctggtggcgtacttggtaagtcctttggaaacacatctgggaactcagacacaaccttgatactctcgattgggtctgcttcactgctatcgacagccatctgataacaacttcttttctttggttcaggcgggactaac

SEQ ID NO: 161706 - DNA, 861 bp, Zea Mays
caagtccttcggtgatggtgatctgaatctgttcctcttctattaacttcttcttgtcccaatcttgcctcctcacctgacgaatggttcctcgaacctccgatcggatgagacccatgaggggcggtctgggatgtctggaaactgggtgttattgcctgtggatgagctcccatcatcccgtcaccagttcctcccctctacgcgacgcttcctcatcggtttgcattcgccaccacatttgacagtcgtgcttgatcctgggatagctatgccagaggcttcatggagagattcatttttgttgggcactggttttctgtgatatctggtggattatcaccagcaatcaccggagagaagagataagaagggaaaagaacacaggcaaagagaagcagacagaggtctggatatttggtttttgttcttcaatgccttcttcatttcagacatttgcctcttatacgcgtggccaactcgcctgcgaatacacgaccacattacgacctaataccagagattaacaaagtctaacaactgagattacaaggccaaatccggcccaacaggatccactaaaaccaaaccttgttagtaaacctctcccaccgcctcctcagtcatctgcggcgatgtttgtctgatcctgatgcagtaccgatgtgacaatttcttcctcgtggttctctcccatccgaccatccgtgagtacacgctacacacgtgctcatgaaaacaccatgcgtctagggttcgcagacggccgctgaaaactatgtgtggttttagtacttgagataactaatggactaatgtctattctctccatcccatattaaaatttgttgtaattaatta

SEQ ID NO: 161707 - DNA, 740 bp, Zea Mays
ttttaccgatcacatgaaccctaaaccaaaagagattaactcacttgttttgcttggtgcttgggccttatggaaccgccgcaaccaatgttttggtacctaacccgatgagtgtagatacgagtgaagattttgaccctcggcccacacccaaccttaagttttgcgggtatggatgcgagtttttatttctacccacaggtgacccacactcgactcgaagtttggttcgtttttatttttacgtaaaaatgattgagatacaatattatatattttgaataagtaacttaactaatgattcatgaaatgttttattgttgctcaacgtgagaagacttagctaatgatggttgacaggttcgatcacgggcagatgttagctaatgacggttttaaaacaggtttagaattgcaccgacaggtacgatagggggcaagtttatgtagagctcacaaatgccatcgtggacagatttttcacggattcaatcgtagatagatttttgatgcagctgactcattgcctgggagttttaaaccctgatgttttaagtgtgtatggcatgggttgtacaagcttgtgcccaactcttctctttgtaatataatgatacatattttcctgcgtatgcatacgtattccagaaaaatcgatcccgatcaaattgaaatcaattgtactgttatttaataactattactccttccggtctagattataaaatattttacctttt

SEQ ID NO: 161708 - DNA, 924 bp, Zea Mays
caggaccgacaacctacccgatgctcacgaggacgaactacagcgactgggtgttgctgatgaaggtcaagatgcaggcatgtgagctctgggaagccatcaaccccggcgaggttgacgagcctctggaccggttggcgctcgatgtgatctatagcgcagcgccgccggagatgatcttcacgctgaccaacaagccgtcgacgagggaagcatgggaggcgttgaagacgatgcgggtctaaagaccgccgcacagagattgagacgcgagtacgagaatctctcgttcaaggacgatgagtccgtggagaacttcgccctcaggctcactagcatcgtcgcccaactggacacgttgcgcgaccccgagccggctgaaaaagtggtggccatcttcttgttgctcgtccacggtacaagcagcttgttatctccatcgtgacactcctcgacgtgtcgacgcttaccatcgaggaggtgactgggcatctcaaggcggccgaggaagatgatgacccccacccatgatcagcgctggaggcaagatgtaccttactgagaaacagtgggaggcgcggatgaaggagcggaagggaggcgatggcgatcgaagaatgaagagaggcgacagaagccacggcacccggcatcgaacgtccagggcggcggtggccatgaacacgccggcaacagacctagctgggtggaccgtgatcaatgtcggaggtgcgacaagacgagccactgggccagggagtgtcccacgaagcccaaaaaaggtgaggcgcgtgctgcacaagcagagaggagggaacccttctgctggcccgactccactcgatccacacctccggcagcgatggtgtgtcgccgcctacgccgttcgcgagaacacggggtgtgacaaccctgcttcagcca

SEQ ID NO: 161709 - DNA, 564 bp, Zea Mays
ggaatggtctgcagctgctgtgctggtaaatgttgttgctttgataagaattggcaagcttcacatctctggactaactcggtagcatcactcttcgctgttggccaatagaaaccagatctgaaagccttcccgaccagagttctgaatgctgcatgtactccgcactgcactacatggatttcatctaacagctgcttcccaataaccgagtgaatgcatttcatgaggactcccgtcgcacctcttctgtatagtgtgccccctatgagggtgtagtgggctgactgccttgcgatgcgttctgctgccgccttgttatccggttcttcttcatttttatgtacctgatgataggctctctctagtcattggggtctgactctggttggctcaaggtgttgcactcttccgtctgatatgagaggatactcggttgtgatatttcttagacgaagatccgaggggagcctgagcccgactggatcccatcttcgacaacgcgtctgctgccgcgttgcagtctctttccacgtgatggaactccagccattcgaatttgtc

SEQ ID NO: 161710 - DNA, 682 bp, Zea Mays
ggattattttgcggcatttgatgtggctgcggcggaggcttctccgcatgtgatggatgctgaagctcttcctggtccgagtgctgggcgtaagcggcgaagggcggtggcgaagcgtagagtgagtgaggtggagggtggtcgtcttcgtgtggacagggctggcaagcgggaattgttgtcttcgctggttggggcgagtgtaggtgagggggagttgcaaagtctttttgagggtgaggagctgaggataatgttgtttaactacagggagatgggtatcatcccgaaggttgaaccaatgtaaggtgtgatgtcctcgctgtatctatgtaactataatttgtatgatgatttgtatgatgaggctgtgtgccttcgctgatccggccgtgcccgtaggggacttgtgcacttgatctagcgcgtttattatgtcggtccggctgcacctgtagtcggtttttgcgcggatagtcttttgagggagacttcaattttgcgcacttgttgtgctagtccggctgcacccttaggcgacttttgcacggatagtcttttgaggaagacctcggttttgcgcactcgttgtgctagtccggctgcacccttaggcgacttttgcatggatagtcttttggggaagacttcggttttgcgcacttgttgtgctagtccggct

SEQ ID NO: 161711 - DNA, 898 bp, Zea Mays
tttttattaaatactatagaaaattagtaacctagcaaaattggtcttgcatttttagcatttttctacaattttctaggaattttctagtcctagcagaaaaagaaaaagagaaaggtgctatagttttgggctaaatctggcccgagtcggccaagaaacggggagaacgcgcgcacgcggtgtccattttgtgcagaggcccctggcggtttgaaatacctataaagagccctcctaattgttcctatgtctcactgacatttgcacagaggtccctcgacttctgtttcttctctaactcgacccgttggccacggcgcgctcaccgccgaccaccctattgctcggactggccaagagcaacgacgactgcccaaattagctactgggcaagcattaccgacccgaggagaccctagaacaggctctaattggattaatccggccctggatttgcctgaccacggtgatggcgaacaccatagacagatcaggatgttctggttgattaagcgtggtcaagctcaatgggtcgagcagatgatgatcacaaacacgtgtgggtgctaaaacacggacaagaagagcgagggcggacctggaggcggctggccacagcacgacgtctcacggtggcgcagacagatgatttgggggaaaacccaaattcagcggctgtagtggctaattgaaggtgggaatgggtgctctggcttcgtgataacatggtgcagcaaaccgggccatcaatttataggagattaaagcggtggccagtgaatttggtcttgcacggtggcggctggagaaagaggagatcactggtgcaagcgattggtggcatctaccgtggcggctctccggcgatcaccggatatagataacccgagctatt

SEQ ID NO: 161712 - DNA, 831 bp, Zea Mays
atagctgcaccgaaagaggtgaatgcaaacaatgaattgtaggaccagataagcctcaagaaacgcctcgagcgagtacctccatcaaatctcaaaagattagcaagcaaaggtggcggacgctcaaacggttttaggttcactttccctcctctgcagcaatggttgtacacaatttttttctgggtggagcaggaatcgtttttaacacgctcttggaaccagaaaacagcatggcagtatgggcatacatgttcaggtccaccgtagtatgacctctcagggtaggcatctacacaggaagaagagaaatggtagcaccaaagcaaagcaggaagaatgttaccaaaaatgttgggcataatacacaccttttagagcatctatgtatgacctgtccaaaggaagcgtggttgacaatggctcgtcaggtaccatgtgatgtactctactgcgccggcgtcgcctattgaatgcggcaagcgctgaagggaatgacattatagatctactacctgtgccgacataagcatcactaacaccatattgttttttgttgaagtaatggctgaacaaacatgggtgtacgcacgtgttccctatagaacaggtattggctggttagaggtccccgaaaggttagatgggtctacttcgtcttcaccatgaaaaatgcgatgggcatcagttgtctcaaagactgggcaatctaaagaggttgcgtattttttggcccgcaagagaagtatcgcaaattaggatggataccggccatcgcatgcataaacaaagcagcaaacttgtgaggactaaccctgtgcaattgcattg

SEQ ID NO: 161713 - DNA, 928 bp, Zea Mays
ctcggccggtcccaattgcacgcgtgcgcagggcactgcccggtggggtccactggtcggactcacgaaatgtgcgctcgactccgatgactgtttagtggtcccgtgttgtcatccctttccccgtttcctcgcgtagatcgggtacgatctcaacggagactgcgtgattcccggactcggttgccagctgccatgatctacggaccttgtgcggagctataagattgggcgcctgggctgtcgtctcttcctcctatcaacgcgtgctacccgcgaccgaccgtgagagagaaccagagaccggaagagggattgctgccgccgccacaagtcgacccgtgcgctcatcgccaccgcgtcctcgatgtcgtgcctgggggtttcactggaccacgaggatggtgttcgcggcttcatcaggcgggattagcaatcgggcgacctgggagttcagattgttcgtcgacgttggttctgcccgccggacccgccgcacgacctcgctgggactcgctgcttcgtaacccacggtaagattacccttgatcgactcccctcggtatgcgcactccgtaggcgtggcggattaggaattttgggcgtgaatgcggggcattgtgggctctggcattgtgcgccgccgcagtgtgttttccgccgccgtgggcgaggttcttcgcttcaccaatcgcgctaggacctagcgggatctatctctctgtgcacactcgacataaatccttgcgcgtagggtcggagcgggcattctgggggctcccccgctctgcgccggcgatgcgccgccgtattgggcgggctctgtcgtggacctgcttggggaaagaagagaaggccctgtccgtctatttcctgatgaacggcttggatcgggccaacgattcaatcaccgggtgatcgattctga

SEQ ID NO: 161714 - DNA, 475 bp, Zea Mays
gccgcgacttacccccgctccccgttgatcgccggaacaactgccacgccactggacacgaattcaccgcgcccgccttcttcttcatttctggccgccgtgcgtcctccccaaattcactggccaccgctttaccctcctataaattgatgaccggggctgttgcgccaagttaccacgaagccaatgcacccacgcttgcctccaattatccaccagcaaccgtgaattgttcattcccccaaatcgactctccgccaccgcaaaactcagctcgccgcggccagctcaactcaggtcagtccaagtccctctgttgcttgttctagcatccctaggccctcctaaagctcttagacccgcccaattgaactagaccgccacccatcgccgggaacacgatgatctagccaccatgctctcggtcaccgtggccagagctccttagttggtcattagtgcaattaagttaggg

SEQ ID NO: 161715 - DNA, 647 bp, Zea Mays
aaaaaaacaccctacgtgtaccgtacttgacggcgtgggatccttggcctacatgggtcgcatttttttggtaaagtgggacacagcccccgcctggcgatgcggcctcgggccaccaactggaagtggcgacgcgcggcccgacgacgcatgtgctaagatttatttggcaaaaaaatttgctcccgcggagcttcgaaccagagacttgcgccttgcttcgaatcagtgttaccactagactactcgcttgttcttataaataaagaaagttagagtgcataagttggtcaattgggcctaatcagaacataatcgttagcgtagtacttgttcccatctgtcgttctgttaagatgttcctagccgccattttgcgatctgcatggctgttctgcttctgccttctgcgatctgcgcttctacgttctacgattgacgatctcagtctcggccctcaggttacggcacacaacgacgccggtgtcggtcgtccgcttgatcggcaactgggtagcgtcgcagcgaacgagcgatcttgtcgcctgatccattgatgcattgagtaagtccataagttttgatagattaataattcatccattcatcaagatgcaaattaaataattatctttcaagatgcaaat

SEQ ID NO: 161716 - DNA, 332 bp, Zea Mays
ccatctggacagcacaccattcacatcgaactcccgctcatcagggatttgatatcaagcaagctgaatcagcttccatcctgccactgcctgagatttatagagaagttggcacattatgatatagaggttggcaaggcttgttcagttattaaacagactcttcagcagattgttgagaaacaatacaatctatctgatgtttttggcgagttaattgatgaggtcctccgtgctgagtcgggggacaatgaagatggttatgatgtgcagaaaacaactacaaaatcagatgatattcttccccagtcggcaggttagtgagttttatg

SEQ ID NO: 161717 - DNA, 461 bp, Zea Mays
tctgatggcttccagctttcttttaatcgtgtgcatccaatcgtctgcatcgagggggttgctagacccggcaaacgtgggaggcttgagtctcaggaaatcccccattctatcttgcggtcttccaccattcggtcgttgattttctagacttcgagtgaggacctcgatgagtcaggtttgattggctagaacttgggctagatctaagggtagttgcggaggtgcggggaggtgggtttcactttcctctctatcggcttccccttcagctctcaggggaaaccctgctccaatcccaaaggcggtaggcgtggttttatccgaagccatctgccagggaagagagtcactattatgcacatgcaaattgttttcaaccaagttattttattcattacaccaatacattacaagcatatggctactacaggctgtactacacgagagcgttccctgag

SEQ ID NO: 161718 - DNA, 565 bp, Zea Mays
agagatgatgctcggtttggagatctctgagcaggacactgaggttaggttgcgctccttgaaacatgcaagtgttgcgatgtttccaaagcacccaacctccccaaaatgatcagggagtttagcccctttttttgtccctcggttgatgcttgcaagctctatgccaccactgagcaaaggaaagctcgaactggtttggtgcccaggtagcaagacccaactgattaaggactttaaaccagaaaacccgggagaagacagtgctgcatatccttctcttcctggtcgcacaatacacaactttcagggtggtcaggacctctcttactaaggcgatctgctgtccagcatctattgcgaatggctagccaaataaaaaccttgcacttagacggagcccaagatttccaaagacgacgccaaggcttgaaagtgatggaaccataaaagaaggctctataggctgatttagaagaataagcccctgagggtgacaggttccaaatatgtttgtcactgctatcagataaaaccacctcttggagtgaatcccaaagctgaa

SEQ ID NO: 161719 - DNA, 404 bp, Zea Mays
gctaaattagtaaattttgactcctattcctttttttgtacccatgaatggagtcaattggcggctaaatttgcctttccttttctatcgccggggtgacactcacctcatgtgtatcccgaccaccaaatgtgaagcaatgtctctcaaagtagggcagcagtttagtgttcatgcttcctgaactgttcccatctttactccctattggccctggctctattggtaaggttgtctccagcagcttacccatcctatctcccattccatcccatattttaaacttcactaaacaatgttttatgcgaccatatgcataatttgctagagacaacctaaggacacaaaggagatctgctttgacctacacagcggccaacctctttctgtaatgatgtgctgat

SEQ ID NO: 161720 - DNA, 654 bp, Zea Mays
aaagagttatgcagacaagcgatgcaaacccttgtactttcaagttgaagattatgtctacctgaaagtctcaccaatgaagggtgtatcacgtttcggggtaaatggaaagcttgcacctcggtacattggtccttttcctattcttgaacaatgtggaccagtggcataccgactccaattacccaaaacattgtctgcagtgcacaatgtgttccacgtatctcaattgaagaagtgtcttcgggttccagatcgaactgttgaagtgacagatgttgccttagaaccagacttgacgtattcagaacatcctgtttgagtcttggatcaaaaggatagaattacccgaaggagaactctcaagttttataagatacaatggaaccaacatacggaagatgaagctacttgggaaactcaagagtttttagagaagaatttcctaggctttttagcttcatgtaaattgtgagaaatgtacacttgttgtaataaagaagtagtccccataccacctctgccttgtaccaaaaataaggaaataaaaatatgacacgtttccttttccattacttgccctaggacttttaaatctcgggacgagattcttttatggggggaaggatgtgacacccctagtgttactaccac

SEQ ID NO: 161721 - DNA, 694 bp, Zea Mays
cccaaatagcagatattctatcgtggttatatcattacctacttgcatggaattgcaatgtatgaatagaagaaatatcataaatggtgctgcaaataattcaatatggtaagtaggagcaatttgtagtatgttttaagtagatttcattgaacgaggcttatgtatcaacatctctgccttagtgctattatgttttaagtagcgaatggcatgagtccagtacaatttcccatggcttaatgttcatttctttctttttttcctttcagttaaatctgcctttgtcatgcttttctaagttcaatattaggttcgaatcattgaacttctctggttgtgtaccaagttagatagtagcagagaaataatgaatattttctgttggtgttgaaaccaaaggagaatgagggacaggctgtagcggttggctggttcttgcaggacattaggtactaaaaatatgtattttttaaacctcagttttggtgtctaatgtaatagttagatttgttgtgcgccaatgcccaatctttcattgatggcaggaatgtgtcatgtgttgtagaattttccttcatttgttgtctgcgaacaagggtacatagcttttaatttggaaatctaattcatttggactgaaataaattctgaaagaatgggaataccttcaatatcatgtgcttgactcaag

SEQ ID NO: 161722 - DNA, 893 bp, Zea Mays
gaaatatttgtttgcctactacactattgtggaacacgtgacagtgaatagtgctggcgaaccacctggctatatatgtccgtatagaccggacaactcgtttagcacgaagctcgacactattttagttaggtacgaaaccggcacggcatgacggacatcaggctcgagccagcacggcacggcagtcgtgccgtgtttgggctccatggtcggcacactttgcttggcctggctcggcacagaataacgagtcgcacgaagctagcccgacgcccccgctctccttactgcatatacatgacacgtgccgcacgcagcacgcccggcccacacacccctgactccccgtactcgctcactgtgtacgttgtggaaaccctaaatccctctccctcccctcctagcggtcaatgaaatcgcctctctaggcccgactgtccgacaacggcgatggccgacggggtgacggttgtcggcgatggcttgtttggacatctatactctcaaatctcttctctttctcctcatctcctctcatccccttccctactctcgcatcccgaaccctaatccccatcctagcaccctcttagcccaatgaacgtgctcctcctcctcacgctggtgctcatagccactcaggtgactcaggtgctctggctatgcaggtgagttcaagtcttccagatcttactctttgtaccgtgctcctcctcctcgtattgttgttcttctccagatcttgttttttgtaggtatcattcttgtgacgatgcttcttagctgtcgagggatcggagtcgccgacgaggagctggacagatagtggggcttcattggtctaactttctacggcatggacgatgatattgatctgtccgctgtggagg

SEQ ID NO: 161723 - DNA, 534 bp, Zea Mays
gacgtttccaccttgtttgtccaaccctatgcaccatggtttctaggaaacaggcgagctcgatgatgcttttagctagcaaccgtacatcactggcatagatcacataaatccatctggctctaaaaagcctttgtcttccaccttctggccagcatcgtccttggtcggggttagtatcccacgcaaccttccttttcttggaccgctaaagaatctcctcttcaacccacaatccttgtacaaatgtttgatagggaaagtatggtttggacaaggctgctccaatttcttttcaaataaattaggggtctctttaatgggtaattgaacttctttagggtcgacgacaattgcaggcaggacttccgtctacttttccccttcctagtcttcttgttgcatttcatgtgcttgttggcacgaccaagggtcccctcattaggagtcctcccaaactcgaccatgttgtaagtctggccgtgggtctcaaccccaagtgttggggctcgaactctggtcctcaccactgtc

SEQ ID NO: 161724 - DNA, 374 bp, Zea Mays
tgtgcagcataattaatcaaagatttaataaagtggttggtaatacatgatccataactctattgtagtatgccaattaaagtataaagtagataaagaatataagatataatatttgttgaatgatcaatcgatgcatgtaacgttaaacctaattcgcttgtagacactgatatctgaaccccacccctttatgattcatcatatcgtctggttaggtaactgttgattgccactaaccacttgacttgcctctgtcatagccccacaaccaaagcccaaagaaggtgatcacgcgaagcaacagaatgagcgccaacaacttatatacatactacattagatcttgtgaataataaaatctacaaatttca

SEQ ID NO: 161725 - DNA, 842 bp, Zea Mays
cagagcatgaagggcaacgggtatgcagtctgctaccgtccgtttggaggtggtggactcgttaccatcgaccaggtatggtattgtctggatggccgctcctcagcttgtctgaaagacctatgcctgtcctatgccttgtttcggcagctcattgcaaggcgtttctttgggctagttgtccaacggcccaagaccatccctgaaataaaagaccatgatttcgtattcaagaaactgctgccctctgaagagcatttcaaaagagccttcaggattatcgaggcagagctgggcttctgctacgactacttcttcacaaagtactactacaccttcgcagcgacgaatcagctaccggtgccgttcctccagtctttggctttagcaaagatcactctaatcttaaccgttggtgtgtttgccgtcaggaattcactggtacttgagacgccaaatccgatcatacaagtacgcatctcaagagctgactacatcatcactctgctgcttttggttatagccctcacagtggagctggtgcatgcggcattttatctggcatcggactgggcccaggtatcactagccaccatgtatgtcaagagatactggtacgaaatcagcccatccatctttgcaacagtcatcgctttccttagaagggtcacgttttctggacagctgatgagaaacaggatgaagcagcactcattgatgagaaacgggataaaacagcaagatccagtggaggtttctgatgcagtgaagagagctgttgctagatcgctcatatcaacgtatggcggcaacgacccaaccaaggacgacgacgccgtaga

SEQ ID NO: 161726 - DNA, 599 bp, Zea Mays
actgaagaagattccacaatattaactgatgaggttctacaacaattggagcaggaggatgagaaggaagaaatatgttgcaaagtgtccttgcaagctatggtgggtaaggataatgagaacaacatggtgataagtgcaactatgagcaaacagactttagtgatgttgattgactcaggaagttcatcaaatttcatcagtgctcacatggtgcatcagttggagttagtagaggtggtctgttctccagttaaggtgaaggtggctaatggagaaactatggtgtgtgatagaatggtaagaggagtggaatggtgctctcagggtttttcattttgtactgatatgagagtcttacccttgagtgcttttgatgtcattttgggctatgaatgacttaggcagtttagtccaatgcaatgtgactgggaccacaagatattggaattcatgcataagggagtcatggtgaaaatcaagggggatagttctcagcctcaaacttttatacaagatgtgtccgtattgcaagtgcataaatggctgaagggacatgaggtctgggcatttgtcgtgctagaagtagtgtaagatag

SEQ ID NO: 161727 - DNA, 588 bp, Zea Mays
gtgccaggaggtgttgggcaatcccacaatgaagtccacgctgaggtcctcccatttccaagatggtatagggagtggttgcatagtacctgctaccttcaaacggcttgctttgatcctttggcaagtgtcgcactcagatacatacttagcaatttctcgcttcatcctagtccaccaatataaggatctgaggtcattatacatcttgttactcccggggtgcatggaaaacttagaaagatgagcttcatccaaaattttcttcctaagtttggggttcttgggaacaaccagtcggtcttcaatccataggacacccttgctgtcctgacgaaaacatttgtacttatccactttttgattgagcatttccttaattacttgaacacccttgtcactaatctgtctcaagattatctgctcttgtaaggttggctcgactgagatataattcaaggtacctggggaaacaacttccatgttcagcttgcgcaatttgtcacacaaggcggcgatcttagagtcaatggttatacagttgcactgggtttttcgactcaaggcatctgccacaacatttgcctt

SEQ ID NO: 161728 - DNA, 1230 bp, Zea Mays
cgtaagaagacatacaaggtagtgattaaatttgccgcaagggctgacctccggcgtctggagcagtttttagctggaaggcaggcagaggctcctcaagaagccttgcaagttcttgatattgttctgcgggagctgccgacaacaaggtaattaaattagactctctctctctctctctctctctctaggtttcaggatgatacatgcactgatgatttggctctctctctctctctcttgtttttttttaaaagatatgcaccgtttgggcgatcgtttttctctcctgacctggggaggaggcgttcccttggtgagggaatagaaagctggcgtgggttttaccagagcattcgccctactcaaatgggcttgtcattgaatattggtaaaactctgtctgtctgtctgtctctctctctcatcagatacatacatacatacaagattactgaatgcttctaaccttttcttgtcttttcagatatgtctgcaactgctttctttgagccattacctgtcatagattttgttgcacagcttttaaacaccgacgacatctactcgaggcccctcttagacgctgaacgtgtcaaggtacgctagcagatatttgtaacgtcactttactcaatattttttttgattaatttactcgattttcagataaagaaggccttaagaggcgtgaaggtggaagttacgcaccgtggtaacatgcgacgcaagtatcgaatagctggtttaacatctcaggaaactcgggagctaacgtatggcaaaaaaaaatccatgtttcttcatgaactcctgcatttacactttccctctctggatcatttgttcagagaaaaaatttcctaaaagaatgttgatgccatttgccacagttttcctgttgatcaaggtggcacagtgaagtcagttgtacagtattttcaagagacctatggctttgccatccagcacacctacctgccctgtctgcaggttggcaaccagcagcacccaaattaccttccaatggaggtaagcttagtcgctgcagccgctcctctcgctcttttctagcaaagctctacactatgacttatccctgtctaatcttatttgctagcaaaacctaatgtgtttactactcaggtctgcaagatagtggagggacagaggtactctaagagattaaaccagagtcagataagagctcttttagaggagacatgccaa

SEQ ID NO: 161729 - DNA, 646 bp, Zea Mays
gggaatgaatcggatgagcctgcttctaaattttctgattttggtggctttgggagttcggttgagtggacggaggagtcgtcggatgaggacttggattattttgtggccttggatgtggcagcggcggagtcttcgccgcgcgttgcggatgctgaagttgtgcctggtccgagcgctaggcgcaggcggcgaagggcggttgcgaagcgtagagtgagcgaggtggacggcagtcggctttgtgtggacagggctggcaagcaggaattgttgtcctcgccggccattgcgagtgtgggtgagggggagttgcgaagtcttttgagggtgaggagcttaggataatgctatttaactatagggagatggagatcattccaaaggttgaaccgatgtaaggtgtgatgccctcgctgtacatatgtaactataatttgtatgatgaggttatgcgcctgtgctatgcttgtaaaggcgttgtgcgcttggtctagtatgtttattatgtcggtccggcgtgcctgtggtcagtcctggcgcggacagtttggtgtagggtttagcacgggtagtcttttgaggaagacttcgaatttgcgcacttgttgtgctagtccggctgcacccttaggcgactttcgca

SEQ ID NO: 161730 - DNA, 609 bp, Zea Mays
aagcgaattaccgagacctgcacccaagccgccacatgccgtgcaaaccctagatagcccattcggaccgtctgcgtaaggcgccagacagtccgaatataatgtcggacggtccggcacagagttttttaaggaggatggatatccaactccgtatccgtcccagctagactccccatctcaccatatgacacaccagcaccataatataatctatcaaacttgtgagagtgagtactttccagcctctagaaggccagaaaggaatggccagacctatgaacctcatagggcatgcattaacgcgctgcaaaacccaaaccaatggggaggaaaacaacataccaacatccaaacaaactcacccatattggatcaaagagccggtagtctctcaccggctgccattggtatagtaagggaggaaatagctggggtgttccgagataagctcggagttagtatagtcctcggggggcagtcatatcagagaccttatgatagccagtttgactggctcccatacccacaagggaccagaatacctgaattcacaaagttttcgggtgaccaagaaaagagcacgcgtgagcatatagaccagttctt

SEQ ID NO: 161731 - DNA, 1017 bp, Zea Mays
aacagagactctaaatgacagataataatattacaaaattttagaaattggaatgggtcaatttggactaaaaatagattttctgcaaattaaacaagtttctgcaattaatttaatactaaaaatctatttctaaattcatttctctgatttttcttattctctggactgggtctcaaatcctggaaagtccaggggtctcggggtaatatttctaagagacaaggaacactcgtaattggactgcaggttgatttcttgtttaccagagggctctttagcaaatgtgttggccgaaggggtacgtagagatcctggctgttggattagcgattaactgcggggattaaatccatttatttgtcaaaccggtatctactggtgaccactagatccaaaatcaacggccatgattcaaaatctcctagatctaatcctagccacaggttctagtgtcttctcctatcccgaacaccccaggcggtggggctggccccacggccgtgcagcccagcgaggtaccctgccaagcgattcaacgcactagagcccaacccgaaaagtgctacacaacacaaagttcatggtgaaacaaagggtaggaccttacttgcaaacgtgtagcatggtgccccggcgtcgtgcatggtggctcggcggtgaaggaggaccttcagagaagaattccggcgactctaaccaagctcaggatgttcatgccctcacacagcgtgccccagcgatgcaccctggccaccctgagactttaaacagcagtcatcgatctgatcgatgatggcggctcctgctggcttcccattggtttccgcccgtgcacgagattgtggccgagacttgggatttcaggtctactctatcgcttttatatcctgggcagaggctataacagcccaggagattctggtgtggggtttgttatgatcgcgtcatggtttgttggagataatcacgctggatttctggttggtggcgctctgttaatgtgtggaggagcta

SEQ ID NO: 161732 - DNA, 473 bp, Zea Mays
acccagtatcatggcagggcacgagtaaaccacgtcgacgctcaagaggctcagcaagccctgggagtagtgctcggtgagttcctagttgaatttactcccgctgatgtactttttgattcaggagcatctcattcattcatagccattggttttgtggaaaagcatggcattcccactacacatctagaaattcccttggtcacccgaaccctagggtcagaccttctatgccacctcaaatgctcccaagccaggattcttttaagtggggtagtgttcttggcagacttagctatcttgccatcctacggattgatgcgatcttaggaatggattggttaaccaagcataatggcatcataagttgcgcagataagaccgttcttctcactgaccaccaaggaaagttagtttcatgtcaggctcagccacccgcccaagatccaatggtgtttaatctagcagcagaa

SEQ ID NO: 161733 - DNA, 533 bp, Zea Mays
ctttctttgatgtctgtgatgtgaataggaagtattggaccaattcaaatttataattgaaccaaattcaatcaagaaaaaaatgcgcttgggccttttgacggtgtcgaaactttttgttgcattaggagtagctgtaaataaaatcatctactactagtaaaaaattacagtgtacaaaagagttcatgggcaaagccagaaatgtcaacgaaaataactaatgcacaaaatgactacaagaggagagggcatattacagtggcacatccaggttacacattgcgccgtttcgtcaccaaaaaaatgaagtagcacaccgtgcagacgtagaagaaaaacaaggcgatgtcctccagcaggttgcgatgggagtcggtgaggctcgtgatcatccagagcacgatcacgacgaacagagacatcaccgacaagaacttcttgtaggtctcgtcaaccggacgcggtccccgtgaccagaacctcctgcgggcctcatcggccggagctgcttctgctgctgcagcatcgtt

SEQ ID NO: 161734 - DNA, 352 bp, Zea Mays
ccgtgatccccgacggcgaacggtggcaagccgagctccggcgagcttgtattggccagaataagcaatggctagcctttccctttgctagacaccaaattcaaccctaaacgaccatttccctcacttaattgcaagatttgagctctaaatcacacaacccacggtgacagcacgattactagacaacatggagcgttcccggcgatctaccccggtctagtgcaattgtttgggccgatgagcttcaaggacatatcagagcactgaaacaaaggaacagagagtgggaaatggacctgtaactcgctggccacggtgagagtctttcacagcggcggaaaaccgattt

SEQ ID NO: 161735 - DNA, 354 bp, Zea Mays
gtgccatgtagcgcttttgtgaggtcggcgacgtcgatcgcaactcaatggtacatgcaaagcatgtcagagacacaagcgattatataggtttctattgcaacttagaagcgtaataccctacgtcttgtggtttctacctgtggaactgtttgcgctcgagtgttgtgtgtgtatgtttttttcctatggtcccctctttagccttattctcgacttaacaggagttacagaaaaatgccccgggtgcacgatctccatgttctgtctcatctgcaccatgttgcgtccggctacagttaacgagtcgcccgtcgatttccccgcacactgcatgctcaggacgcaaccgac

SEQ ID NO: 161736 - DNA, 1269 bp, Zea Mays
tgttaggccaataaaaaccagaccttcgcaagagccatttcatctttggagccgattggtgggtaccacaaattccttcatgtacttcggccatgaccaatatagcatcatctgggcccaagcacttaagcaggacatcgttgactgttcggcggtagagttcatcactcatcaagacatacttgaaagatgtacgctgaatgttcttatctgtcctgatattgggatttcgtaaataattaagtataggcgtcctccaatcacttgcaccggcttcattatcagccgattcaattaagagaacatttctagtaaccccgcgacctggggaatcggccctacaccggttatcagattttcagtgtcgtggaatctccctcgctttatccgataacctgatgcatcttgtgccagatggttagctctatgattctcaactctcgaaatatgctgaatactgaattcgtcaaaataatggattatgctccaacatttttcaaggtaactattcagagtaccatcaaagcattgatattcttctaacacttgttggacgaccagctgagaatcaccaaatgccttcacatgttttactcccatacaatttaaaagttccaagccgaataagagggcctcatattcggcttgattattagtgcaataagttttcaatcggctagagaagtcgaaggagacattacttggtgaaacaagtatgatgccaattccttgcccttcattgcaaaccgatccatcaaaatataaagtccaaggagtaatagtgaggtatgacatgtctagtttatgaatatcattaatctgatgttctacaatgaaatccgctacgacttggcctttcatagatttcaatggttcataggccaagtcatattctatgagtgcataagcccacttaccaattctaccactcataattgggttatgcaacatgtatttgatcacatcggcttgaccagaaatagtgcaatgactagacagtaaataacatctacatttgatgcatgcataaaacaagcataagcataacttctcaataaaagtgtaccttgtttcagcatccaccaaccttcggcttagatatgtcaccacatgcttcttcccctcagtttcttgtgtcagaacagccccaatgaccttatcttcagctgcaatgtataatcgaaatggtactcctgctcgtggtgcttttaatacgggagccgaagataagtattttttatgagatcaaatgcttcttgctgttctgcc

SEQ ID NO: 161737 - DNA, 883 bp, Zea Mays
ctggagagagacagttgtagcatttatcttgaagcttcagtttgaagagacgggaggccttgtcatccaataactgtgaggatctccaaggatctgcaaagtttttacgccactagaactttggttttactacagaccaaccagcgtcatccagtcgcatcgaggcagactcgcgcccattgaattggagcagaccggacgacccagaatcgacgccgcccgccgcaggctgatggaaaagggcactgtttgcattcactgcggcagaggagttgaatttctgctacaagatcgacgggccgtccgctgaccatttcatcttctccgagcaaggaatccgctgtaaaggatctgccaataaagtctgagaagagcgaatcccatctccgattctagaatccgcaggcgacttagcagatctggagacatcgattcccagtaggccccccagagaagacgataaaccatccccacaaatctgaatatcttgacaagatttgcgaattgccggcttggagtggtgcggatggcaaggaacagacccccaaaaacttaccgccgttggagagtgctgccagagcggccctaccggatcttcaaaataaccattgtcttgcttcacgggaagacgaacgcggaaggcaggagacgaaggcggcaccagacgagtaaggccagccccaccagatctgaggagaccgaaaagctggcggcgccgggagaaggagcggaggccccgccgccagggaagtcggcaccgcgagcggccgcgaccgcccgaccgtcagtcttgcaccgcatgtcctctgtaaattgaaggtatgttatcgttggagtctttagtttgaatatcatgaatcaacagatttagcaacggtgatga

SEQ ID NO: 161738 - DNA, 527 bp, Zea Mays
ggggcatggtgccacgcaggcaccggcgctgtagcaatcatcacatcacccataggactcaaatacagatttgccgtgcgtcttcgctttgcactggaataagataagtccacaaacaacattgctgaatacgaagcagtcatcttaggacttcgcaagctgcgagcccttggagtgaccacatacaacatcaaaactgattccaaggtctccgctggccatattgaaaaagactactctgccaaagagccagtactaatgtagtatctcgctcctatccgaagcctagaaaaataattcaaaggcttcacattataacatattgagcagaacaagaacgaagaagctgacacactagccaaagcagcagcgaagggcaaacccttgccatttgatgtattttttcatatagtcggcacaccagtcataagaaaccctgagggtctgcaaataacacaagacgtcgacgggcaccagatagtaaatctgataatggccgaagataggcgagcaccaatcacccttta

SEQ ID NO: 161739 - DNA, 761 bp, Zea Mays
ggataatcaatatcctttaggtgtccatcaacactaggttggttaccaacgaatagatggtctgcatttactatctcagaaggtctagccttcattagcttgcaagcattttaatcctaggatttgtgaccatacttctccccctcttatttacaacatcattgtaatagggagcttagtggtgttccatttaaccactctttctggcacttccacataggattaatttgagtgacacctcatagtaaatgcacatggcagtcaatttgcaacttcttgcaaatcattcgaacccaaaggttcagttttagtacgtgatcctgagcctgaatgcttactgcattcatcatttcctggcattctttttggtactcgaaatctccccctaatgcctggaaaagctcatgattcaagcaagcgtacgggccgtaaatagattctcatgaagagattctaaaacttaatgatcgacggagaatgaattctcacatagatccccagctttctgtgtgcccatacatgtacgctgcggtggtgagattgggaacatacccaatgtacgcatgggaaatccttcactgattcccatgtactaaaaaccataggagaacttgtacatgcagtacatgcagttaatcacaagtcaggagcgtgcaaaacttcctgactccaaccataaccagttggaaatgacaattcattactgatggtcattaatgatctgaaattttcgaatctatcacagattcatcatatccttt

SEQ ID NO: 161740 - DNA, 374 bp, Zea Mays
gctacattgaaccagccacagtgcccgaatttggcggtgagacctcttcggctactgaagccaaataacctacgcttacgcagaagattgaagagctggctgcaatgccgaaggcatcatcggccaaattaggtgagccgaaggccgataatattgaagagatagaggttgaaagaacaaagatattagaagttataagcctttcggcagaagtgacagtgccgaaggcacaaaaagatcttacagcgacccccaagaggaaaaggatggtcaacgtactagatgtgctggagacgataaagacttcaagctctactccagggaaaactgccgaagcttcaaaaacgcagactgagacaaaactaaccgaagcc

SEQ ID NO: 161741 - DNA, 416 bp, Zea Mays
gtcatggatcggcttgtagaggggagaattgggggactggagtgctgggccgtgacctccgggcatggcgccgccgtgggtatggtctccgtcgcgattcgagttccggaaaggggggaaactgggggtcgcttgggcagtgtgtatggaccgttgattcactcgacaacgaccgcgatggtgaggaagccacccgttgcaaggagatagaatttgggccaccgatctcactatcaacggtaagattgcttgcaggattcattggggcatctgcattgttggatcgcgatctcacggcatagaacacttacccattcacttaaaacctagatctaatctgaaccgatagttccagatcggatggtcctgatctactaatacccgctcggcctgaacaaactgcagaagaaaccccc

SEQ ID NO: 161742 - DNA, 757 bp, Zea Mays
tgaaaattggagttactttgatcaaatgatgggctgtcagacgcagtttttctaaatcccatggtacagtgcctgaacggatcagagcaaccgcgcatctcaccaccgacgaccgccgccgcgattcgtgccaccgccattgcgattcacgccgccgatgacccgataaggctgccatgtaatagctatgcgcctggagatgactctggtgactcaccgtcgtatcccccttgctttgcggcctgagcagataagctcgccggtgacagccgtcgcacggcttggcgccacgtgccctggaacctccatcggatcgccgtgaaccgctgtaaccctctgtccatcgccggagtgacagccacggtgaccggacactaagcacttgcgccagtaacctttcccctcctccgaccgtcgtgcgtctcgcccaaattcatcagtcgccgcttaacaatcctataaattgatgatcggggctgttgcgccatgtaatcacgaaagcccaacgcaccagctattgcttcaaatcacccaccagataccatgaattccttacttcccccaaaccgattcatcccaccgcaagaacacccttgccgtggctagcgcaattcaggtttgttcttaccctctgctccctcgtttaagcagtctcatgcgtctgtgatgctcaccgacccacccaattgaattagaccgccaccaatcttcgggaacgcgctgttctttggatcacccgcactgtcaccgtggccag

SEQ ID NO: 161743 - DNA, 433 bp, Zea Mays
cagttctttgtagaaaaaattaaggttctaaagtattacttaacgagcccataatataactgcatcaccagcctaagcctaactgtgttgttcttacaatgatagggtatgatagggctaattgtggatgcaaccgttccactgttacaatcatgggagaatatgctcgatggcacaggaggtagtaaggagatctatgttgatggatacctgaggaacttttcagcggatgtgattgctagagcatgttttgggagcaatttcgtagaaggaaaagacatattttgcaagctcaggcagctccaaaagttgatttctgaacaggatacacttgttgggctgtctgcagtgtggtaagtggacttttgatccgttgagagatttctaatgcgatgggaatggacaccttgactggttattaatcttgttgttc

SEQ ID NO: 161744 - DNA, 814 bp, Zea Mays
cgagaataacatgcttgtattcattgctcacaaaagtctttccctgggttacaacattttaggggaatttacccataagcctagtccaaaatatgatgccaaactaagctcgcgtgggttcctgtcctcctaataagtcaactaacccatcaaccctgagtggtagaggcaacgctggaagtaggtgaaggggcactccgaagggagtcgcatttggacttggagctggctctaattcctcaggaccctcctctccctcgtttcctgcatcatttacctccatgtcctggtggtgcatctccaggtggtcattggcttcctcaatttcctcctgcacatcatggagctggatctccaggatatcgatggtgttatcctagatttccacctgctgctctaaaattgcgatgcgctggctcaattgttccacctgtaggtctttccaccaattccgaagacaagtccaccatgaagtcctctcgactgtcgagagtgatcttagtagtctgagcaagatcagtgaggtgtgctatggtgtcgctctgcagggcctgtaggtgatacaatgtgctcatacactgaacagtgatcctcccaccttggtcgggatgcatagcccacacgtccttcacgtggctcactctgttgcaccacatggggtcatccctcttctcggcggggaagagtcccagtgggtgcatcaccatctccaagggatgatacccgcagaaggttgtcagggctttctacgctgcggcctcagtggtgtcgtccgccctgaacccgacagtcttggattcaagagaatgccaac

SEQ ID NO: 161745 - DNA, 1061 bp, Zea Mays
ccgcgcaaccgccgccatccatctccctctctgccctgcgtccgcgatgctcgccacggcgctcgcttccccggtccccggcgctcgcttctccggccatcatggcggagcccccctcccaccctgtgtcgatggcaaagttgtatgtgcaggtggtgccgcccccggatctaaacaggaacactgagtagttcatgtaccccgaggtctggaccgcctacatcatcttcttttgctggatcctcgccctctccgtctttgggtgcgcccccaacattggcatggacgctcgtcaaccttggccactttgcagtacgtacaacggcattctctcgctccttgcttgtcttactgtctgccatgttacttgctccccttgctatcgttggttcgttcgtgtgcagaggctggaatggggtttcagctgttcctattaatgttagcatgaggagcatcttactgaagcggctccatgtttggtcgtctacatcatgagggattgagggctaagttctgatgcttgtgttggatgggattacatacctttacacttacatgcatttcacctattttggcacgttaataactttgggatttctaaactattaaacattaattcgaggttatgcatatgaagataatttaggtacatgttttcttaggccaattacaaacaaataatgttggggtgcataatagtgactttatcagtagtcaggtctgttcgcattgtctcaacagctaatagttccacaaatgatttggcaggaacaaagtgtgtattgccatcctatggtcctttcaagtttcagctattgatctttttgtgttaggtaccttagttcagacctcagcatgatccaccctcctgacgggactcaggaagatttgtgatgacactactgacatagataacaaaagtgcccatgaaacgtgcatgaaactatgatatatattctaccaatgttggacaattacagaaaaaaatggtaaatcaataaatcacagcagtataggtagcaaattatccaatcaagtcttgtcacatactactaacttag

SEQ ID NO: 161746 - DNA, 510 bp, Zea Mays
taagggtgcaacttctgggaaggctgctgcttcagtcgcttcaagcgagcctgcgccgaagaggaaaaaggtgaaggttcttactcaccgaccgcactacattgaaccggccatagtgcctgaatttggcggtgagacctcttcggctattgaagccaaagaacctgctcttacgcagaggattgaagagtcggctgcagtgccgaaggctaacaaaattgaagaaccgagaaccaaaggaacgaaaacatcagaagttctaagcccttcggcaggagtggaggcgccgaagacacaaaaagatctagcagtaacccccaagagaaaaaggatggctagtgtattagatgtgctggagacgataaaaacttcaagctctactctaggaaaaattgccaaggcttcgaaaacacagattgaaactgagacaaagctgaccgaagccgaagctatactgagccaggctgacgccgaagctgggccttcagtgcccgccaaggagaaatcctc

SEQ ID NO: 161747 - DNA, 516 bp, Zea Mays
ggtttttgtgccaaatgtgctgagaaatggagtactgggcataagtgtgcagctcctgcacaattacatgccatggaagaggtgtggaatttgttatctgaagatctagaagatgagccagagacagaatcgtctgagccaatacaagaacaaattttcatttctttatcctagtctgcctggaagggttttgagggagttcacacttttaaattggaaggatctattaaggtaaatctatagttattctcattgacagtggtacttctcatacctttctacatgagaaagagcagcctgtgttacagggagtttcagtttgaccttctgcgttaagggtacaagtggctaatggtcagatggctaagggtacaagtggcaaatttagagttgcagggaattcctcatgcagtgcctacttgtaccattgtggaactctggttattacagaattcggatccggccctagcacagtctaccatccatcctagcattcagactctactacagcagttc

SEQ ID NO: 161748 - DNA, 291 bp, Zea Mays
gcgaggtgcaagtgctcgacggacggcggctcggccactcggggttgcgggttggcaggtgggatgcgtcctgtgggttggcctgggggctgggggttgaccaagagtgaaagacgacaggggatgagggttgaggggattagggtttgggcgttaggctgattggtgccttggtgggctggcggctgggctcattggtgggctggcggtttgttcattggtgtccatgtgtgggccgacagtaatggttaatttcggatatccaacggataacccgtgggtgaggtttat

SEQ ID NO: 161749 - DNA, 610 bp, Zea Mays
tttcatcaaaaattgtaagaaattcaccatcaaatggcaagggtgcgttccaccgccagggttacacatgacggagaagaagccgaagccactgaaactgctccgatttccgaagtaatgagacagtcagggctggtagtgccggaggacgtttctgacgaaggtgcacctgctgccgaagctgagcaagttgatgttgaagaaggtgaaagtgaagaagaatacagtgccctgccatctaaacccagccacctggagtttggaaagtctactgttaccgaggatgatatgccaaaattgttaaagctaggctattttagtgaagccaagaagaagctaattcattttggcggagaggagatcaccccgaagcctgaaaaggatgaggtggtagtttttaaaagcttctttaaagcaggattgagatttcctttgcatgaaatgattgcggatgttttggagaacttcgggatttatcttcatcagctgactcctaacgccatcgttaggcttagagtctatattttggctctccgaagccagggggcagaaccacttgctgagggcttctgccgggtacatgagcttcactatcagacaaaagctagag

SEQ ID NO: 161750 - DNA, 609 bp, Zea Mays
cactcacattatcacaatagacaagtgtggcatgctccaaaggttggcctaattcctgaaggagctgtcgtagccaggaagcctctgccacaccattagcaatgtcacggtattcagcttcagcactggagtgtgacaaagtctgctgacgcttgttggactaagaaatgagactagtacaaagaaaggcagcaaaaccagaggtggagcgacgagtgtcaggacaaccaacctagtctgcatcagtgtagacggtgagggtggttggcgaggaggtgcgatcaatgaagagcacaagatcaggagtcccctgaagatagcaaaggatgcgcttcacggcactaagatgcagttcccgaggatcgtgcatgtggaggcaaacttgttgaacagcataagtgatgtcaggacgagtaaatgtcaggtacttaagggcaccaaccagactgcggtaaagggtaggatcggccacagggtcactagacgaagacagcttggactgtgtatcgacgggggtgttgtaggccttgcagccagtcatgccggcacgctccaatatctcaagtgtgtactggcgctgagaaagcaacatgccagtggccgaacgag

SEQ ID NO: 161751 - DNA, 601 bp, Zea Mays
gaggggctatcttaagacttaaggtgagcttaatgtttgtacgtgtaggcctagcagcgagataatctactgtattgcttatcggcacaagtgcgctgacgacgagtgccatacaaattcaaatggaaacaattatatatcaagatgaagaagagataatcagtagttacctgccgtcagtgtcatccctcgtctagctgttcttatcgtcctctgaacatggagaattttcattcgacctagcaacatcgtattcatcctttgatgaagactcctgtagtcctgtaacccagccaagttcgaaaaagaaagaaaagaaaagaaagaaaaactccagccaaggaaattagggtggctgccgttgcctgggagacagtcctgcgcggtggccgctgcttatccttgcatccccatacttcttgcgccgcgggagggaatctcctctcgacatcacggacggttgggacagccgacgaggcgacgagagtgcagtgatcaggtagtccaatccaaaacgaagagaatgggtagatcgacgatggctctacgagggggcgagacgaggagggtgggcccgggccatagctctcgctgagggccc

SEQ ID NO: 161752 - DNA, 650 bp, Zea Mays
ggcgatgtagaacacccttgaattagtcaaaattaggagaatggtgttttttcaggcctgatttagttaaagaaatggaagaaaaggtccaacgcataagacataacttcagagaagctcaagcacggcaggagaattatgcgaataaatgacattgaccattaatttttcaagtcaaagatcatgtgtacttgaaagtatcaccgatgaagggtgttagtcgatttggggttaaaggaaagttagcaccccgatatattggctcattccctattcttgaacgatgtgggatggttgcgtacagacttcggctgctaaaatcactttctactgtacatgatgtgttccacatatcacaattgaagaagtgtcttcggatccctgatcaaactatggatgtgtctgatgtttatttagaaccagacttaacctattcggaatatcacatccgagttttggattagaaagaccgagttactcgaaaaaggactctcaagttttacaaagtacaatggaaccaacatacagaaaaagaagctacctaggagtctgaagatttcttagaaaagcattttcctaagttcttagcctcttgtaacctttagggtttatgcactttgttgtaaagctagaacaaacccccacaccca

SEQ ID NO: 161753 - DNA, 575 bp, Zea Mays
aataggggcagagcctaggataagctatatggcaaattcaactttcctttcaggtggcatgcctggtaactctttaggaaatacatcgcggaattccaacataactctgatgcctcaatcgggttagactctttgtcatctattgataaatggtggcaggctccttcttctagttcagccaagtacagcttagtcactatttcctttccagatggggacaccaacttaactgttctcttgtcacaactgacagtggcttgatttctgtgtagccaattcatccctaggatgacatctaacccttgagttcccattactactaggttagcggggaagtctatcccccttatttcaatccttagattcggacaaatcttatcggactgaacttttcccccaactgaattaactcttaaaggcgggatcattggttctatgggaatgttatgtgcttctacccaagatgtagaaacaaaagaatgagtggcaccagtatcaaataatacttttgctggataggattcgactggaaacatacctactgccacgtcctgagcatcctggattgcttcggc

SEQ ID NO: 161754 - DNA, 298 bp, Zea Mays
gccagtacagctttgaaatttgtctttgactagatagtgtgcaaattggtggctaccgattaaccactattaatctatattagtttgtgttacacaagaaacggttctatatgatatatgcacgtgtaattaactagtattcacggattcacttcagtatcgtgcacataatattatatgccgaaaataagactttgtcttatgttccatatgtatgtaaatatatgtactagttgtttccgtacgcctttattttctgacaaaacacagcctgcagaagcttccgcgttctaaccca

SEQ ID NO: 161755 - DNA, 766 bp, Zea Mays
ggtccaggactcaccggggatacatagccctgctcggggcgcattacgacagggatggtataatccgccttccccatcgccccccttgattcgcttgaggagctcgttggtggaaagggcggccaacgccatacgggaactctccatggaggcctcgggcgtcatctcgtccaggcgcaagcaccgctccaccagcggcagcaccctcctatggtggaaggcaacgatgaccctgatcgtgttaagcccccagtcacggagcctctgtagggcatccaggaggggatatagctaggcctggtgctcccacggtgtgcctcaccaccagtcctcacccacagtagtcatgacccgcttagtgtacgtaggtagcctctcgtcatcgttgcgaaggtagaaccagtgactctgccatcccttgttcgaagaggtaagagtggaagggatgtacaactgtgcccgatctgagcgcacctagagtgtgcagtcaccgaccctcaccgcgtggtggaccttcttcacctcctaggggagggagaacggctctacgtgaaagaggtggagccacaggtcccagtggggctcgatcatgaggtatccctcatagaccgccgtgtaaattgccgcttgggctatggagttgggggttgaagttgtgcaactcaccccatagtagtgcggaagcgcccgcatgaaacgactcaccgacactctggtcccccactcgtggaacgagacgaagctaaccacatagcctgtgggcaga

SEQ ID NO: 161756 - DNA, 395 bp, Zea Mays
accacacgcaatgctgataccaatggagtactttctcatgggatatggactgtataggccaagacagataaactatagccctcgtagccctctgaatccgttttgtatatcaccagagctcctctctcctgagagcatgggggttaagctaaagccaatcaagacacgagccaaccttaaagcataggaacaggtgatgagaatgcgtaggaactgatgcgcatcccttgatttttttgtgctgaagtgacatagctattgtttccgtgatgtacataagacaagaggttagtcgggtcagggttgggtgggtggtcgattccattgatttgtagcctttaaaacagttgtacattgtcacagatttatttgttgaagggagaagaaataataag

SEQ ID NO: 161757 - DNA, 639 bp, Zea Mays
tgaattcctttttacaatacaatgatatctggaaaggtacctaaatggtacttttacacaaaaattaagtggcatattagatgttgctccctttttcttcatttcgagatcattacatgccaagaataataatatgctcagttcattgtgtaattctttcaactagaaaaagtagtgtaggctatgccatacataattgttgtataacaggtaacactaagataagaagaccgggtgagtctaccagcatgctaaggctggtgtttctgttcatgaccacaacagtttgaaattggacatgaccttgatagtttataaaattataaaaattcaaggatatgatacgatacgttgcaatacaaacttgatgagatagctataaatggtatttgtacaagaaaatttaggccctgattggttgatggccaaaatttggctgacaaaatcaaggcaagctaagtttttggttgccatggtttgcttccaaacttgacaacatcacacatttgtcttctaaatgattggcaaaaaatattacccaacctttggcaacttttgcttgccaaatctttggtgaggcaaattttggtagcaaaaccttcatcacgagacagtatgcacagttcaatgaaataaaag

SEQ ID NO: 161758 - DNA, 504 bp, Zea Mays
tcgccgtcggccgcactccaccgtagccaagtacaaccgcaccgcgattctcagtatggcaccttccctatgccttgacgtgttccctagtatgtcctggaggtgcgcgtgttggggtttgggcactcgtccgcctgggcgccaaatcgccagcggggtcggactgggagcaccatgctccgccgcgaagccgccgggattggtagtggcgattgcacaccgttggatcgggtagcgatggcccggattagaatgaaggtactgattcagtggaagtagatctaggtcgttgatggctgatcgggcgatccatgttggatcggataacataaaatcctggccacccacatcaaatcctagggcccctatttagtactgatcctggttatgttgcttctaatctagggcgttggttcatggtcggacggcttggatcgtcagatacctcttcgacgaacactttagcataagagtcctcggaaaaagggggatatcaacccgccg

SEQ ID NO: 161759 - DNA, 502 bp, Zea Mays
cgaaggcatcaccagccaaatcaggtgagccaaaggccattaatattgaagaggcagaggtcaaaaaacaaaaatattagaagttataagcccttcggcagaggtgacagtgccgaaggcgcaaaaggatctcacgacgactcccaagagaaaaaggatggtcaatgtactagatgtgctggagacaataaagtcttcaagcaccactccgaggaaaactgccgaagcgtcaaaaacgcatattgagacaaaaccatccgaagccgaagctgcaaagagccagaccgaggccgaagctgggccttcagagcccgccaaggagaaatccttggaaaccagagaagaagaaacgaaaaaaggggctataaggcaaattctgcctaaaaactgtctcttcaactcccgaagcatcttccagagtacctgattatattgtacgacatgcttcaggcaaaaggctatctgaagaggaaaaacgagaagctcaatattatgactacaa

SEQ ID NO: 161760 - DNA, 511 bp, Zea Mays
tgtactactactccatctaccctagaaccaaagcaactcgaattttgtcccaaattaagatattaggtatttggatatattaaaacattcattaaatactcaaccttatttgggtaagggacaattaatatcctgcgtgacttgggccaatcaaagtatgtgttgtcttaggccattcttaatgcgagtttcataagggtttcattcttattaaatgatatgacacataagcaaagtagacgacatgacatgtaacatgatgaagagagatatgagagagtttcatggtgatgaaactctgtttacactgttttctagataaatattgacatggcaccttggaaacagtgtaatgaaacccccattgagaatagccttagggcatgtacaacactgagacaccagtttagtttttcaagtataagagatgactaagagattgcatggtacatccctgagacactggatcatcaatgcagctaaaagacaacgtgtatggaaagtcgtgaag

SEQ ID NO: 161761 - DNA, 905 bp, Zea Mays
atgttgtggcagatgccttgagcagaaaggcctagtgcaattgtatgagcatggatgcaagagttaccaccctgtgcgatgagctgtgcaagctgaacctggaagttgtttcttcgggtgacttgagttatatctcggtggaacccacattgcaagagcaaatagtgagggcacagattgaggataagggtgttcaaatgattaaggcaatgatcaagcaaaatgcagagaaatataagtgcttccgtctggacagcaagggaattttatggtttggggaccgattggttgttcccagggaccctgagctcagaaagaagatactagatgaagctcacctttccaaattctccatgcaccctggtagcaacaagatgtaccatgatctcagatctttatactggtggaccaggatgaagagggaaattgccaagtacatatcagaatgtgacacctgccagagaatcaaagccagtcatgtgaaggcagcaggccctttgcaaccccttcccataccttcttggaaatgggaggacatttgcatggattttatcgtaggattgcccaatacctccaggcaccatgattctatttgggttattgtggacagattaactaagactgctcatttcttgccagtgcataccacccacaagacagagaggtatgcagaattatatgttgatcaaatagtgcggttgcatggtattccaaaaaccattgtatctgacagaggagcactgttcgtggcacgcttttgggagaagctgcaagaatcacttgggacccaagtaatccgaagctcagcataccatccccaaacagatggtcagacagaaagggtgaatcagattttggaagacatgttgcgagcatgtgcactacactacgggaaggattgggac

SEQ ID NO: 161762 - DNA, 541 bp, Zea Mays
ctgcgtcgaccgactttagaccccggattctccgccttccatgaaatctccgcccagcatggggaacacacatcagcctctactattattgttttgcagtttcattcttttaggcccaatgacacttctaccttctatcgtatgtgtattcatccctcggccgtcgcagctgattctagggtcgtcattggtggtgtgaaagcacatccttcgagaagattgggctagagttccaagtcatggtgggttgtgctgctccttcacgtgcccccaccaatgtccgctctgattctaagggtgaaatggaatattcatgggatttgtttgtctttctgtggtttcagactaccgccatcgacaagaagatcatcaggaggaaaggaggaataatgcagacaacctcgtaatgatcctcgcggaggccaaggtaggcacgagattctctccccagtcccctttggtgagcctgcattgcgctatactatagcttagaccttcggtcttacaaactcgggaattaattgcattcagttgtcggcgt

SEQ ID NO: 161763 - DNA, 408 bp, Zea Mays
gagagaagggcgtagcagcagcaacagcaacaacaacagcaacatcagcaagcaccactgcctccaccaccaccaccagttccaccccgagataagcagcaagagttcatgagtcataagccaccgacatttgcaagctctcctgatccactgtacgcggatgattggctgaagttcgtagagaagatgttgattattgcacaatgctctgaccgggagaaggttctatatgtttccagtcgtttgacaggtcctgctgctgattagtgggattcatacactactgcccacgatgctgctgacactatcacatgggcagagttcacgatgcagttcaggaaccatcatataccggcgggactgatgaagattaagaagaaggaatttctgtcgctgaagcagggaagc

SEQ ID NO: 161764 - DNA, 282 bp, Zea Mays
tcgagcgcataagtacccgttggaaaggtatgacaaagctctacatgattatcccactgatccccactaatttcccacaaaaattcacagaaatccctagaactactgctgttcgcccacctacaaaatttctggacagcacctctaccgattcgcatagataaacatataatcgattggattgcagcacaattaaacaagatacaaacacaaaaatcaccttgaatcctccccctttcctcccttcttcttccctccaccaaaaaccaccgggagacttgc

SEQ ID NO: 161765 - DNA, 465 bp, Zea Mays
cggtactcgcgtccgcgagctcctgaggaaggaaaacaagatgtcacaaagaatgccctggtcacacaaggtgaacgtctaaatccttacctcgaaaaccctgggaacgtccctggaaaggatttccatggttgaccgaagcgacctcatcgccgcctcggtatactcacggaaacggtcccgggacttctcctccaactcatcgttgaggaagaagaggggctctgaggtgccgcggccccaaaatcggagcggctgcccacaccactcattgggattgagctgtgcaggagtaaggctgctgctccccaggacaggccacgattctgcacgcccctccaccgaggcgtcgggtccccctacagccgatgcatcgagtaccaccgccgtcaacgtactgggcccctcctcggctaaggtggcaggcctccgatcaccgacctcggcaacgacggccgccctcgc

SEQ ID NO: 161766 - DNA, 875 bp, Zea Mays
gctagggtttgggagggctaatgggccgaaacaccaattgcggcccaactaacccacgcgacagctcccgaccgcaacgcaaacgtcaaaccaaataaattctactgccctagttgcgaatgttgttcacaaaattccaaatccccaaaacaacaactggatgagggaaaaaaacaaaaagaacaacccccaacttctcttctttgcaaaccgggtatcacagatggtttgtctaacccgaagcaattcctcatgaactacaaggccactatatcctcctatggtggcaacacaatagtcatggcaaagtcatttgccatggcgatcagaagtgtggctcagacctggtactcatcacttcagctcgggatagttacctcgtggcagaagttaaaggacatgcttcttaccagcttttaaggttttcaatccaaaccagccactgcccaagctatattacagtgcacataagactcagatgaataccatcagtcatttgtcaaaaggtttctctgtctttgggcccaggcacaagtagtctaggatgacatcgtcatcgaggctatcgtcaagggacttaggccaagtctagcggctcaatacttcgctagaaagcctcctcgttctcttgagaagctgctgcagaagatggatggatacataagagtttatattgacttctgccaaagaaaggaagagatccactggtacacttaaaccgcaggggcttcaagggaaggtttcacccaaggcatgttcaaagcacccacaaccaagtatagaacaaagaaaaagcaacccaatctcaacgacaattctctgtcactggccaacaaagccattaagcatgaaacaaacctctctttgaactcaat

SEQ ID NO: 161767 - DNA, 776 bp, Zea Mays
acgcgtacgcgtatttccgggacgtgggcgccgaccaaaacggagaaccagatttccggcgctaccgccctgcgcgcccccataaatctcttggtcctggcagttgccgtctcggtcgccctggagaaaagcaccaggcgtgcgccgtcatattcacagccgctgagagaaacaaaggaagcagagagagaacgtgagtgttgttgtcgagagggtgttcgacaagtcacgcactggacgtccaggtattttctgtgcttgcggcgtggagcgttctgggcctcctcgccgggcattgaggacagcgcgggcaccgtcgtctggttgggtcgcagaccagggcgtgctcgaaagtggtgggcgcagctcggcgtgattcacggtaaggactccttcccccgactcgcgttcatctctagttcgtgtagtgtcgttcggataaggaaataggcccgggaggggcaggagcacgccgctccggcgggttcgccatcgtcgggtgggcggcgctgccgcctaggcgctctggggttgggggcgattacgctgggtcgtcggatcatgggtgaatggcggggattcgaagcacgggataccggttcgccctgcttgatccgggccgtcgatcctgtaacgagtgtatagggttagatcttggtcacctaaaatcatgatcgtcgatctgtgatcgtgcggtggccgttgcgttccggttcattaaaatgcttgtctaatctgagccctaggtttctaatcggacaactagagtttacccg

SEQ ID NO: 161768 - DNA, 324 bp, Zea Mays
agggaagttgctcagattcattgtcagccaccgaggaattgaagctaacccagaaaaaatcgaggctatcatgagaatggaagcgtcacgatcacagaagaaagtgcaaaggcttactggatgcatggcagccttgagcaggttcatatcaaggctaggcgaaaaaggcttaccattctacaaattgctcaagaaggtggacaagttctagtggaccgtagaagcacaggaagctctcgaagcattgcaaaaattcttgaccacgccaccagtactgaagccgccacgccgagccacaccaaatcagccggtagaagatctgtt

SEQ ID NO: 161769 - DNA, 1139 bp, Zea Mays
tggctgtcaggctggtccattctaaaattcagattctcagtggaacagagccaacttggtgtgtgaattcaaacttgaattgttgagaaattgatcaaggttgctgtgacaaagttgtagctggtttgttaggctataattttggtacagggagctagcttagtcaccacacaaaattgggagaaactggagctccaaagtactctatcagctgctctgaattggtgttcgccatggtacagtaaaataccggatcagaccgccagcgcggctgtcttcaccgtcgacgaccgatcttcgccgtgattcgtgccaccgttgtgtgattcacgtcgccgatgacccgataagaccgccaggtgaaagccaccccctggggataactccggtgactcaccgtgactacctttctgccttgcggctgtagccgataggctcgccgtcgaccgccgcctctcggccgtgtgccgcgtggctcaactctttcaccgtgtcgccgtgacccgctactgccgtcaaatcggcgccggtgggcttgccacggcgatagccacgaattcaccgcgccgccttcttcctcctctccggccgccagttcggctcgactaaattgatcgccaccgcccgctagctctataaattgacctcgcacgtagctgcgccatgtagttgtgaagctgtagcacccgctcccaccctcgatcgtccaccagcacgcccgaattgcgtattctccccaaatcagttctaaaacaccgtgagctcaaccccgccgtggtcagcccaactccggttagctcctccctctgttctcttgtttaagcattcacatacgtctgcgatactcgccaacccatccaattgagctaggatcccatgaatcaccaggaacatgtaggttgctagttcatccgcgcgctcaccgtggccagaaacatttggttagccgttcctgaaattaacttaggggaaacgttcacggggccctgaatctggtttaggatgaagaaggacgccgttcctcgcgtgaatcggccagtacgcgggctcgccggagctccgtcgtgctgctcgccgtcgaggatcaggcggtgtaaaggaatagaacctcaggggtttctttgtagtttgttagtgac

SEQ ID NO: 161770 - DNA, 922 bp, Zea Mays
caaaggttgaaccatgttatggatgctcttaactttgagtatcctgactatgaaaggcttgacgaaggggtcggaggggtcaaaagaaaaagggttgttagtattctgagtaaggaagctacccgatctgtcaaggaggaccagaaagctttgaagaaatagaagactctatcagagccaaaggattcggctcccaagaaacgtaacctcgtgaggatatattctgggatacgaaggtacaagatgtgctagagaagactatgggtcctccttcaccctctaccactgaagtttcgtaaattctgaaggtaatgactgaatccatcccatttgcactgctaagtcctctaaggttagatctaactagcctctcgcaatcaaaggaaaccgctccatctacggaggggaaggccgggggcagaagaaacaacgaatgatgaatgtgatgcaagctattgagtagacatcgcccctagcttcggccgcaaaagcagctatgtatgtcgatgccgaagatgccgccggagccgaagctgattaacacgcaaccacgatgtcagaaatcaacagactcatatcggatgtggttgcagagaaggacgtagctgcaatgccttctgacaagggaaaaagaattgaagatgcctcttcggaagataaggatttcaaccttcggcacctgggtggccaactactttccgaagaggacaaatcagaattaaaagagtttgttatatcctgcggttaccagcccagatccatactcttcgacgggtggacgaagagattttgggatgcattcgtgaccgtgccggggctaaaatcataagtactttatctaagagtgttggatttccgaagctagaaaaggacattagttgctataggcgacatcacattattggcagcttgttctactcaa

SEQ ID NO: 161771 - DNA, 607 bp, Zea Mays
tttagttgctcttcatggtgccttttgagcatctctttggtcgaccatcttagtatagtcaccttcatgcttttggctatgttacctttgtccttcttcaacctcgtgagaggaccaagctcactacgcaatctattcattgtgttttccttggatatgactctgagcgtaagggatatcattgttgggaccctatcgctcaccgcatttgtgtgtctttggatgtgacctttgatcagtcatgtcctttctttactactgatttgtcctcttcttcctcttcctctgagtctgttgatttcctccgcttggttccacctcttccgaccaccttgtcttcaccaccctcccctgttactatttcatcacctccaccactatcaccttctccacctccaccatcgtctccaccacctccaccatcccctgtgtcacgtcctccaattcttttccactgcactcgacatccacgtccatgtcctctaccatcccctccgacatcatctagctcgtctccttttgtgcttggtgtgcttccttcgtggtatgaccttcgtgatcgacgtacgctttattgtctgactcgtcttggttttatcgcttctgg

SEQ ID NO: 161772 - DNA, 743 bp, Zea Mays
gtgaccttgaaggtataaggtgatgggtggccgccagtctttggtcattatcagatttacgatttggcgcccgtcgaggtcttgtgtaatctgcaggccttcggggcttcttacggctagtgtgtagatcgtgtggaaaaacacgtcgaatggcaagggttcgcctttcgctgctgctttggctaacatgtcagcttcttcattcttgttccactctacatgttgcaaggtgaatcctttgaattgtgtctctagacttcgtacggcagagagataatgcatgaggactggctctttagcggagtactacttttcgatttggccgacgactaccttagaatctgtcttgactatgcacgttgtcaccccaagggcccgtagtttgcgaaggcctaggatgatggtttcgttttctgcgatattatttgtgcatttatctgattccaatatgaaacgaagacgcgcgacatatctgtatttgagtcctgtgggcgatgtaatgattgttgcagtgccagtgcatgcatgacaccatgcctcgtcgtagtggatggtctagatagtctctgcgcgaaactgctatggctccgaaggccctgtccagtctactatgaagtttgccaaaacctaggatttgattaccgttattggcttgaaggtgatgttgtaaccggagagtttagctacccatttagcaattctggcggatgcctccttatttctgaatatgtctcttagacccc

SEQ ID NO: 161773 - DNA, 345 bp, Zea Mays
cgggtaaagattcctagactcaatgcacaataccccctagacggtgggttaatatctaaatacttcgggggctcttcagaaagatttgcaggccgaagggggtatcgggtaactagagctgtccagattagatctagcggcgaagattggatctggcgtgttatgtactggtgagcagcgaggaccattggataatggatcaacggtccaggtcacttttgaacacgatctaatcctacgcgctcgccccgcatcagacgaccctaccaagccgagccaatcggtacgcgatgccctaatcccgatcgtccgaaggtcatccaacgatccagtgttgtctccctc

SEQ ID NO: 161774 - DNA, 467 bp, Zea Mays
gctagatctatgaggtagttattgtttttcaggattgctactattagagtatttctctgcccacatgatacctgatttttttctctttcccattacggtgagatccatccctcgagaccacccccacaagaccaagattctcaatgtcgactagggtttggaatttggagattgggggtggggggttaagggtggaagatatctagttttagaaggtgcccgtagaatttggcttgtttggtgtcaagacagtggggatactaacatgggtggcggagtacggacggtaagaagcattgagatgttggaaacccacttcgacatgttaccatggtgacaaggagtagtgggagccattagagatgatgtgaggagggtggggctgggtcgaccacgtgctgctcaagagatggtggtgtggaatttaggagtgggcaatcagtttgaaccgagaattcggtttagtt

SEQ ID NO: 161775 - DNA, 451 bp, Zea Mays
cctcgcgaaaagcttgctgccacaacagacgcgtgcgattttgggaaccggaggggtttcatcgcggtgtggttgggatgtgggactccaactcggacctcgtacctaagcactataagaacggccgcatccgatgaccctccacccataaaaccaaagttggagctgggcgctgtgaacatggcgcgccgtgtgcaataccgagggggggacctggtggttgagaaactcctcaccggaggaagacctctaccgcaggtccacggtggcgtgtgggcgatgtggtggctgcgcgcggaagcctcagttccggttgaattcctcaccggattcatgttggtcgtagatccactttgactggaaacaacgatgtcgctgggcgttggacaagctccctccacggcttcaacggccggtaagtcagctacttacatactcaccatgtcatcct

SEQ ID NO: 161776 - DNA, 402 bp, Zea Mays
ttgatgtgctcgacgccgggttggggccatcccgggcagcttcccgcgcctcatcgaccttggagcgcggtcttgagggtcaggaagctagtttggattgccctgctgccatggaagtgactgagggaccttcagccttagaggtggctgctgcagagaactcgaccctcaaggatggtgctggcgcttacccagcccccgagggtgttgccggggatgattcggctcggatgggtagcgcaagctgcgacccagcccccgagggtgttgcgggagatgatccagctcggatgggtagcgcaagctatgacccagcccccgagggtgtccgagcgggttctccctcttgcacttccatggatgttcacgtaggatcttctcctccacactctggttgcatgg

SEQ ID NO: 161777 - DNA, 636 bp, Zea Mays
ctcggattgcggcgataataggcaagctgacgtgtatgttatttagcggctatgtcgttgctctagttagccgaattgttagatgacttggttaagctcgtaatcacggtaaattgcttgttgtagtccaaatgcgcatggttatggtcgcgggtaaaattagtggtgctcatgtgatgtctaagtgaaaatacaaattagtgtgtgaagggcgcaattgatatacacatttataccagggttgattattatggtgaatgtgtttgctgattgtgtatggtaattctggcgcacgaaataacttgtataaaattagtaagtctacttattagtcatcattcgattaatttaacgctaacaaatggtaaagtgttaaattggtttgagtctctagaacgcggcaattcttaaagtaaataggagctgaaattattaattgctgttttggactgcacacagtgatttccccgtgctgtatgtttgatgaaccaaatggtgttttctgtagatatgtgctatagaaaagtggtagataactttattatcttactggtgttaaaatttgacaggcataagtctgatcgtttaggagctatgctttttacaaattcagtaactgaatctgtccaagttctg

SEQ ID NO: 161778 - DNA, 635 bp, Zea Mays
ccagactccagttggctcaagggccctccaaccaactcgtctgcgtggaagataaaagctccctagggtctcgcccacactgtcgtattcccaccgccgtcctgcaatcgccgtgagctgagagggagattcacgccgctgccgtgggattcacaccagcgcctccgcttgggtgccaatcgcccgctcgcaagcttcgccgagtcgtggggaaggtttccgaaggccaacgctaaggatttgtcgtcgggacccagggaattcatcaccggagttgcgcccgaccgcggagccgctcctcgccgtggttctccctgcactgcgaccctcgttgtcggtaagtgcattcctcagatctgcaagcatctagtgtccacgtagcaccatctaggtcagagttcatgggctggggcgggtaaaacgcgaggtccgaccatggcgccgccgtggaatgttacccgccgccgtgttcagtcaccgggttggggaggaaggttgtgcgtcgtcgatcatgtggacgatgaccccgattagaagatgggtatcccagattacttcccttgatgaggatgttgtgcccccaaatggtattcctcaccccatgcatggccatacagtgagtgggaactagaaca

SEQ ID NO: 161779 - DNA, 464 bp, Zea Mays
caacatattgtttttatcctgtgtaagcataaagagtagtcttgcagcttatgcatccattcctctttgtagggcgcaatgcttttggcccttttgataggctaccaagcactggtaatttttactcctaaattttgtaatacttgtgaactaaattattgaaatgtcattgagacatcaaataccattgcagcattcttttgtattctggaagttcacgggcttagatatgtaggaatccatgcctgcacaaagacattcatcggcactctcttgctagcagtttccagtagatctttgcacattcaattttgaaggcctgatgtaggttaaaataaacaccagaaggctggacatgttccttgcctccccacgttagggtcggagggagctttggattagtccgagcatttgtacagattgcttgatgacatttgattcactagatggatcatgagtttttg

SEQ ID NO: 161780 - DNA, 371 bp, Zea Mays
actgagtgaaagggtaccttgcatcaaatccgagccctcaaactgacgatcgatggctcaccttgggttaacccaggatctattcccatccgcacgatccggatcggacattcacgagatcgtcttcttccccaggctctgagaatagcagtaccgtgcagccgccaagatgagcacgccggcgcgagcactgcggcagaactgggtgcacggcgagggattcctgagtaccccgggccgctcccatcccgcagcgacgtccgccgaacaggagtccgagcaacaccggagatccccaccctgccagatccgcagccgttccttggctccacggcaaaatctccaatcgatggtggcggcttcaacttccc

SEQ ID NO: 161781 - DNA, 539 bp, Zea Mays
gcaaccaaccatcagaataccaaaatttgttccaaacgtcaagaattcacataagacgaaaatttatttattcctttctgcattccattctaggatgacagtgagtgatctgcggtaccaggtgctgctactgctgctgttccatctactagagcaagacgccaacgacagtcatgatgagacaggaagaaattgggatgacggtgaatgatctgttgtgtcaggttgataagagccccttttcctgatagacaaatgggagaaaatggaaggtgagactgattaaaacttcatgtttacctctgatctgcgtatgttctgaataatctgcctaaactggatgcgccggtttccgaagccggatgtcccagtttctgctgagtggagcagagacatttgacttccttgaccatatatgtactacaatcagataagattccaggaattgaactcgatcctagatattggaaccaaatttccacaactcaaacaagctctaaatgttggaccaaaaaaatgcccccatttactcatttgcc

SEQ ID NO: 161782 - DNA, 708 bp, Zea Mays
gtgaattgctcatcggacgacaaaggaagctccgcgctgcagctcgccgcggactgcctcacctgcatcggcaatttgggtaagaacctcccctctaatttcgcgttgcactccgcgtcgtgtaggctaaattgatcgagatttggaccacgggcctgtcgaatcgtagttcgccggaaaatcgccccgccgtggctcgtcgacgggtgggcggcgccgccgcggttggttttgggtgggagaaagacatctggccgtccattccctgacgatcggcctggatcagacctggcgtacccctttggattcattaaatgcaggcggtcagattgggatcgggcggtagcgattaggccagagcatgttcgcggtttggatcgtggatctcagatccaacggcggagatttcgtaccgcttcaattaaatgggaggtgtaatctggtgcgccggtttctaatccaacggctgaaaacacaagataccccttcgcgggttggttttgcacatgcgcccctgtgtttttattatatagaacccgccgtccattgcacagtgcaccgagtcttaggtattcttctggtttagcccctatactttgcagaaaatgaggcccagtccagaacccatttaatttgagtaaatgaattagaaaatgtatttttaatacaaaaataagtgctacatcttcaataattcatagaaaattc

SEQ ID NO: 161783 - DNA, 769 bp, Zea Mays
acacaacatgcgaataatatcttaatttggattagaattaacctatacaactataaagtataataaataagatgaagccatggttacctttttctaattcagctaattgctccatgtcctcctggatattaattggagtggtccttcgcagccaatcctgagtgtaaacaagtgcttccaccatgaatggagtaagagatgtcctgaagtcatcaaggattcttccagacgtgctaaaaactgattctgaagcaacagttgacaccagaattggtagcacatcacgagccaagcgtgctaataccgggaatcttgaggaattcaccttccaccatcctaaaatatcaaacttattatcttctggttcagtatcttcagcaaggtatttttcaagttcagatttgttgttgccaccgccatagttgtgttgttttagttattgtgcaattaaggacttcatcctcccgcctttggactgtcttacttcttgagaatcattggttggtgttgttgcatcaggtggagcataaagtctcctatattcttcaaacaattgtcgaacacatagtttaatagcagcccaaaccttatgtccattttcctcactaaacatctcttcaatcactagctttgtgtattctgatagtttgtatcttggatccaaagctgcagcaacaaaaattagcatgttcatattctctttttctttctccttccccttccctctctcattcacatttctaccagtttcgccaagaggttcatgcca

SEQ ID NO: 161784 - DNA, 362 bp, Zea Mays
aaacgaacaatgaagcaaaaggttttaaataaaaatacctataatcatggcacgtttagcagcttcttcagctcgcttagcctcctctcgggtgtcgtgagattctttctcattctttttaatggcttcatcagccatctcatgaccacccttcatccacacatcggagtagaatttaccgcccaatgtagaggcctcagccgaagggtcactagtgtcgtcaactaagagaatagattctgcctgagctacggccttaacatgttcacacctgcctttttctaaaattgtcgtggcccctcgggcaccgacaaaagcacaaaaatccccacgatcgctaagtatgtcatcaaaatcttcgg

SEQ ID NO: 161785 - DNA, 779 bp, Zea Mays
tcgcagtttaggagactgccgttggagatcttcggtcgtggcgaaaccatctgcgtggggcgaggggtcctcggcgacgatccttcgtgaagcagcacctgcgcccagcctctacctcgtctcggcggggtgagttcttttcccgctatccttgctgctaggattttcgcacgggaaatcatcagggtatagattgtagcgggttgctcgagtatcgcgctgagcaccgaaggtattgggcggtgggtggcctactgcagggcgccaccgctaggcgttttgcttctcctgattcgcggctaggtagaagaaggcatgtgcgtcgttcgatcgtgtagcggcggtcaggattgttggagggtatcctgtcggctggaggtaggagaaggaacgggtgccgtcgatcaaggatcgtgcggccagtgagggatggaattgatagtgcgctgcagatcataggattcggatccgacgtgtgaggatgatctcgggttcataagggtctcaggctaatctaggcgcctcgttttggatcagacggctgtgataaccctataccctttcggccagggcgttttgctaaagagtccccggggaattcaccaatctacccgccatcctgtgtggagttctctgtgtcttgggggatttcacgtgttagcccccgagttttcgagaaataatggccgccgtccagagtctgggaatttcaggaaataaaatctaaaatgattttcaggataaaaataaatatgataaacatagaaaattcataactt

SEQ ID NO: 161786 - DNA, 394 bp, Zea Mays
caattatggcaagtagaggttgtggcaagggtataataaggaaagacttcatcctgatccctgaactctggatcttgattcctctggcgatccaacttgatccttgaagacttgagttgatgcttatcctcctttgatgtggttggtcttctttggcctttattcttggggttgtcatctgagttaaggacatatggctaaggacatatagttaggatagccggggtacacgaggtaggtaggttttaacagagttttactttgcttttggaatagatgaactaggcaacctgtgatgtaggttaggtcattgttcacggatgagttggtggaagacaataatttaggttaagatttgtttgtagagacagtgtctaacctatatcaccaaatt

SEQ ID NO: 161787 - DNA, 730 bp, Zea Mays
catacattgaagaatgggatttgatgggtgagaatgtggacgacaacgaggagccgcacaacaacagactataggcagtaccaagtttggtagtaaggtgtgactcgttgcaagcttaggggacagtggacacaggatgactacaccgacatcgattcgtcggacgacgaagacacggcgtacaaccaagacactcgagtggggacacaagtggaggcagcaccgatcttggaccgagtggtactggttaaaacttgttactcaattcgaaatgcacaaaatatgacatctatgtaatgccaatatgattgaattcttttgcagggcaacacactgaaacggtcggtacaagacatcgagcgcttctgttcgacaatcggcaacaacaacacgcgtaccttcctggacataagcttttaaaacaccttgctatccaaaattcgatacatgatgttgcttagcatgtttttggcccacagcgcttagccaaccgcctacgcagagcggccactcgttgtggttgcaggaccaccgcgccatgggacatacacgttccttcctttcgcctgcctgggcagggttcttctgcccacacagctatagcatccacaggccatggcattgggtacgaggatgaggaagacgaggtggagggccatgtggagattgggccttcgcaactcgaggactctccgtcgacacagccttcgcagccacaggagcgtagacg

SEQ ID NO: 161788 - DNA, 517 bp, Zea Mays
cagaaagagatcctactgaagatgacccaccatcgtctacatggccggatatctccacactctcgataaccactatgatgacctttcctcccactacacccacctaaactcccgggtggaaagcttagagcagtaggtcaaggagcttaaaaaggagaaggcatccctccaagagtgtctcgatatggcagaaggtgaagaggccaacactcgtgaatcttaccgaaccctgaagatggattatgataagaagctgaagaagctcgcccccacgaagaaaatccaaaagaagaccaagagccaaggatgccagactaagcggaagaagaaagcccctctagctccacctctccccaggatagagaatttgtctgacgtcgaggatatgtccctagctagccttgatgaccttctcaaggaatttggggacaccttagaaaaggagttcggaagtaccttagaaagcgctcgcgtgtagtgcgacttgtggtaactgtatgcttgtaatgaactggtg

SEQ ID NO: 161789 - DNA, 727 bp, Zea Mays
gaagaacacgggcgttcacggcaacctagggtggtctagctcaatcagaggggtcgatagcttgaggaggacctaaggacgctagaacaatcgactaaagcgcttgaacgaacctggaaaaagctggccgcggtgaaggtgtctctacggtggcggaaactcagtttgggggaaatccaaaattagagctctcgggtatacgattggaggcaatacttggtggcttggtgcgtgattatcttacggaccagacgatgtgcacaatttatagaagacaagagcggtggccagtgaatttgggagagacgcgcgacagccggagaaaacagaaagttactagcgtagtggatttgtgtctttcgttgtggcgaactcaccggcgatgagcaaatatcgcaagccgagccactgcgacgtggtaaagtgctttagcacgtgtcgcacggcggcaatcggccaacggaggtgaggtcttatcccgatcgatcgatgagcaaggggtacggtgagcttagccgcggccggactcaagttgatccaggcgccaagatctttacccacccacagttatccacaattcacagtgcacgaatcccggcgatcgacgtgaatcacggcgtgacggtcatcggcggtgaagttcactgaacctgatccgatcaggctacagtaccatgagagtcatcttcaaagtgcctgacagaggatgtttagggtagattatctc

SEQ ID NO: 161790 - DNA, 406 bp, Zea Mays
tcaggtcttcggttgagatacatgggtttttggtaaatttgggattagttaggttcgatttgatattggagttgtttgattgaggagggggagggacgccgacgcgggcacctgtcgtggcgccgccgcccgccacacctgcgaggcctgaagtcgtgaggaagtgaggagccgaggaggaccccgccgccacatcctcacaagtcactcgggactttcggctacttactctactggcgacaaggcgatagagggaggagaaaggggtggcggtagttagggtttggtgccgcttgagccacctcatgggagacggcgcggggattggaattgtggttttctcactcagcatatgaaatgtatttatgaaggttacatggtagacgcgttgagatcacgcacaacg

SEQ ID NO: 161791 - DNA, 442 bp, Zea Mays
cccgagtacacatcattcaagtcaagatgcaagcaaaagccaaaaggaacagggaattaaaagagcagctaaattaagctagctagctactagcatgtgattcctgcgcacatatcacgaggcacgcaagcttcgaaatcgctgccatcgccgggcaccagcgtgcagacgttgttatcaggatcacagcagcgtcctacaggaccatgaaaagggaaaagaccgcatccggtgcagcaactgccaataatcatgggtggcaagcagtcgtcctcctcctgctgcagaagctttctgatcaccgccgtgggcgtgggcggagccagatggacggcggccgccgatgacaggatcgtcacgaccataaccacagccgccacagccttattacctacagccatcgtatctctctatatatctcgtttctttgcctgcttttgct

SEQ ID NO: 161792 - DNA, 440 bp, Zea Mays
gaagaacatgggggcggtggctcggtctctgcaatttcgggtccctctccggtgaagaagaacaaggcgacggtgtctcggtctatgcggtggagaaggtgaaggcgatggcggtcggcctctgcgttggagatgctgaaggcgacgacgggtagaatctctagggttcggccgccgcggtggagaagaaacagacgacggcgataatgctagggttcggccgccgcgtgcgttacgggtgaggtgagctgaataactgcgtgctcgtgggtggattcgtgggcccgatacacgtactctgctgggcgaaatctacgcgaagacccatggatcgacacgtggattactgtttcgtaaacggaaacataagacatcgtaatatcaatattttgtgtggggactagtacggctgcccagattgcgggaacacaatcttctcg

SEQ ID NO: 161793 - DNA, 848 bp, Zea Mays
gtccataattgcatctgcatatacatctaggcataaaaaatgtttataaaataagtaaacaacctatattattccccaataaaatgtatctagtatcagattcatctcatcttaacaaattctatcttatccttgaaaattcatcttaaaagcatggtcgtcccgagacacaaaataacagatcaaagctctgcctaagatccttcagtttatgaccagctattaggctatctattctacctactaaattattcccccttgcaaaactatcttaccatacgtctctaactcaaatggttaataccaggaggggaggtgtttatctacccgcacgaattcgtcgaagaagggctgtagctaatccggaaccagaaatgaatcctcctccgaattcctcgcctgttgatgacgtgactgctgctcaaatgtgattattacaataaatgactaacacgatgacagaaatgcaagcacaaatccaccaagaacgacaggaaatgcggcaagaacatcaggaaatgcgccaagagcggcaggaacgacagcaactaccacctccaccaccaccagctccgcccagggataagcaccaagagttatgagtcataagccacctacattctctaattcctcggatccactacaagctgatgaatggttaaagtccatggacaagatgctcaatatagctcagtgcactgacagggagaaagtgctatatgcatcgggttgccttactggccccgctgcggattggtgggatgcatactgcgctgctcacgctgctgcaaacaccattacctggggcaaaattctccactcacttcaggaattaccatattcctgct

SEQ ID NO: 161794 - DNA, 529 bp, Zea Mays
ggaccacgcaatccatccggtgagtcggtgaagcgcctgggactggtatgggagcctcgacgccagcccacgacggcggaacttcgcccacccccatggtccctacagcggcgagaaattaacctctccccatcgcccgattcgccccgccgagtccccgaacagctccaccacgccacggcgatgcgccaccacccgtctacacgcctagatcagcgagggggaacccgattgctctgggcggcggaacgcggtccctacggctaaggcggagctcggtttggttagagttgttcacgcgtggatgaagcaaagaggaggataaggatccggttctggtcttcttatagccgcccgaagtccgttcgcggcccacaccaacgaactccaccatttgcgccatggcagagctcgtccgagtcaagcggcgaaggaaggggaggtgggcacgcagctgaccaaagggacccgcgcgccagcggcagaaaaatcggtgggcgcgagaggagtagctgaccagtgggccccg

SEQ ID NO: 161795 - DNA, 563 bp, Zea Mays
gtatataaatcatttgtgacacatgcaatgtttattgcaaaaaataattgttcgtatcacatacaacatactaatcactgcctgactcactgttatcgaaatcaattgcgtgttttttatgttgttgtctcattccaatgaggagcgttacttccaaccttgttcctagatctaggaggtcgtcctctcttacgtccagcaaggctagccaaccgttatttattctcctccaatgacaaacatgtcctactgttgtgaccatcagcaattccacacttctgccatttcctgttcattttctttgtaccttttgctcccaatttaataaccttttgttcactctcctttattgttcttcctttgggttttgagttatttggtcttgccaagcttatcccatcgactgcaaaatccagtttctgcaattcaaaagtatatatttttcagcacataatattatgcagtcccacattcagtctaataccattattacctttctggcatgatcattttgttcatggtcaccactctcattcatatccgcgtgatcctgcaaattaacc

SEQ ID NO: 161796 - DNA, 716 bp, Zea Mays
ctcatgtactggtagcaatcgacaagttcaccaaatggatagaattcaaacccattgcttccttaacctcagccaaggccgtagaattcatacaagacataatattcagatttggaataccaaacaatatcataactgacttgggatccaacttcacaagttcagaattcttcgatttctgcgaacaaaagggcattcagatcaagtatgcttcggtagcgcacccgagggccaacgggcaggttgagcgagctaacaggatgatactggaggcactcaggaaaagggtcttcgaaaagaatgaaaagttcgcaggaaagtggatacgggaattgccctacgtcgtctggagcctaagaactcaacctagacgagctctacatggaaacactcccttcttcatggtctatgggtcagaggcagtattacccgccggtctcaagttcggggcgccgaggttggtcttcgaaagcatagcagaagccgaagctactagactggaggacatcgatgtactcgaagaagaacgactgaatgcagtaattcaatcagcacggtaccagcagactctgagacgctatcacgacaaggccgtgcgacaacgatccttctcagtgggagatctcgtcctccgccgaattctaacaggggagggacggcacaagttgtcgcccttatgggaaggaccattcatagtagcagaagtcactcagccg

SEQ ID NO: 161797 - DNA, 435 bp, Zea Mays
atttcgttacatgtggctttgtctttattcaaatcagattcaaccatttaaatggactactaagttccattgccttggagggccttagcattcacacctcgttactgtactgcatttgcataattttgcatgcaaaacattacaaagtcaaagatagactagcaacttccacaaggcgcattagcttgttcctcatgtatccatgttaattgtttggtcttttaggcaaaggaaactttactggccactgaaacaaggtctggctcattcattgagtaggtacacgtgacatgcttattgataggtgtattgatgcaaccttctacacttgcattgatagattggcgatgcttagaccatcactgtaagcacctaactgttccctcagcccgtaaaaactcatcactgtcttaatgattcttactggcatggtat

SEQ ID NO: 161798 - DNA, 466 bp, Zea Mays
cgcgtcggcgggtggcggacgatgaaggtgtggtgagcaattacgaccacacacaacgaagatcccatgcgagcccgcaccggaaggtctccacgaccgatggtgaggcacccaagctggtcactcgggtccaaagggcggcggcacacgacgaagagcggatccgcggtggtgatccacgacggcaaggaatttctctggctaccgcaggcgccctcccaattagtctctcacccagttgctatgaggccagcccaacacccacacagccctactggcacctgaatcccaccatcgacgagtatccgcggcaacgctcccacggcgacggaaatcttccgccaaggcgactcccggtgcggaatttgggacagcgcaggcgagtatgggtgggagagttaagggaggagagagggtccgcatttagcatcgtgcacgcggagtcggtggggtgatcccattagcc

SEQ ID NO: 161799 - DNA, 650 bp, Zea Mays
gttcgatttatattaggattatgctccggccagcatccactcagctgttcgtttctcgctaatagacgctgacaaccgagcccttttagcctgaactcagcacacgatcaccagagccatcgccgtgtgaggccacttcaacaggaccttcttctccacatcttggagagattttgagctctaggattataaatgccaccgtgtcgcgttgtcgccctgggcgcgcatcacctcgccaacctcctccttcggggcctttcccagcctctgcggtcatggagcatctcgccggggtgcctgggttcacgcccgtcgtaccctatcgtctatccagtaaccggcatcgcacccggaggaaaacaaaattagtggcgggctcgccgtgcgcagcacctgcaacgcacgagcaccgcgtcttcggcaccgacgcgtgatcgccgtctactcgctcgttgcagggcagacattccacgatctcgtctacggctgcgccggcgtcgtctccatccctctggtccgtgccccgccatggcccagcccaagctacagcgaccttcggcaattgctcaccgtcagcacagttccgctccacccgtgactggccctgtgatcgcccaaatcagcggtaagtagccatcggtcttactcac

SEQ ID NO: 161800 - DNA, 518 bp, Zea Mays
cttcaacggatcatgcgcttctcgcggtcgcagctaacagtggaatccatgcggatccttcgccacccgaagctgccgctcggaccgtcggggcctacttgtcatccgcgcgttagaagtcgttagccctcctccgccattgccgagaactaccaccccgtaagtatcgcagccgcggtagacttctcccccacggcgcggactcaccatggctcataaatgcgtagcgcggaccccccctctatctccttaccgtgagctctacccttctcgtgctcgagaacaccatcgttggccaccacaacaaagtgagaagagctcggattccgccgtgggagattgtgcgctcgccggtttacaccgcgggctcgttcaccgtcgtgatatcttcgtcgcgtcctgatcgagcccttgcattgtgccttggcgcttcctcgggactgtgggagtgtgtccgacgccgcgtcgctcagaaatccttgaccgcgcctccggaatttctcatcgtaattgcggtg

SEQ ID NO: 161801 - DNA, 484 bp, Zea Mays
gcttcgatggcacacccaagagccaacgggcaggttgaaagagctaacgggatgatattggaggcactcaggaaaaaaagtcttcgataaaaatgaaaagttcgcaggaaagtggataagggagttgccctacgttgtttggagcctaagaactcaacctagtcgagctctgcatggaaatactcctttcttcatggtctacggttcagaggcagtactacctgctaatctcaagtttggggcgccaaggttgatctttgaaaacatagcagaagtcgaggctactaggctagaggatattgatgtactcgaagaagaacggctgaacacggtaattcaatcagcacggtaccaacaaaccctgaggcgctatcacgataagaccatgcgacatcgatccttcgcagtaggagatctcgtcctccgccgaattctagcgggggaaggacggcacaagttgtcacctctatgggaaggaccattc

SEQ ID NO: 161802 - DNA, 483 bp, Zea Mays
ctactacctacgatattatttaggtcttacaaatactactctaaatatatatatatacactaatcttgttgctcattcccctcttcactggcttcttcaccatcaaccaacacctcttccgggtttttgggttcttcgggatcagtttctgcttccacatggttgacctgaccccgattgatggtaaggcctgactcttgcctcctgaggcctgaccttgcttcattggagctagagttgtataagcggccctattgggacagtagttggcaaaatgtctagcctgcccacacttgaagcatgacctgtttgtggatgcattaggagcaacaggccccgctgaagtgtttgcttgaggagtagcttgggtttgttgagtctgttgcccggaactgccacgggctggtgtactttgaggtgtagtataatagggacgagtaccacccctagcctgtccttggttagtagcccttcttttctctc

SEQ ID NO: 161803 - DNA, 689 bp, Zea Mays
ctttttaaaagtctaggtactttttaacttgattccatgggctccacgcaaacggatggacggcatgttgattcagcaataccgcagggtctctttagaaaacaaatccctatgtgaaggggtattagagaatctttgacgttacattggggcagacggttgtcattagatctaggctcaggatcgctagaaattgcccgatttgagatctgtgttttggatttaaagggctcagcgaaggggtgtcgggctttagagcccattggattatagatctacgatcctgattagatctaggctacttgaattcgagccaaaagatgaggagtcaatggtagagatcaggtgattggggctggtttgccttcctcggttgggtggcgcaacaccgctcacgagacgctacagggcttcgccggcacgtgacaagaggatgtttcccctagggttctaggctagaggaatggcttggtgaactcaggacaactttttggtctcaagaaaggggcttggtgtggacagtgatggccgaaggagggttcattgtggcccatgatctggcagcacatctcgctactctagtgagcaactatggccatgagggaggctaaatcggcactccgaagcgaaggactagtgaggtgactagaggggagtgaatgggagacactaaaaaattctctgcacga

SEQ ID NO: 161804 - DNA, 450 bp, Zea Mays
gtgctagcccatagatcaaagctagtgttgggggattacctccacggtcacctcctctaagatggtgtcgtcagccaccgtgagcttcatgactagtgcctcaatctatctaggatccaaccccggtactaacccatgctccacctcccaaacatccaccacttcaccaaactaaagttggaaagcgattaggcatgttgtagcccctcgactaactgcattagatatcacaacccaaaggttggctaacaaggcatggaggtacctagctaggttgactagatcgtcctatgtctccactaggaaggcaatgttacaagcgttagtcaccaccatacttagtttctagagctacatggtccattccacaaggagcctcactattccttgggcattcccctctgcgccatggtgagcatgcatcgtctctctaatatccatgaacgcgct

SEQ ID NO: 161805 - DNA, 705 bp, Zea Mays
cctggcaacgtatagttatatgcgttggaagttattaggttccaacgcatgttatgtgttgcaacctatatccgttaaattacaatgatactggcaacgtttaacatgtgttgcaaaccgtatacgtagagtaaatacgatcatagcaacatttaccatgtgttgcaactgtatgcgtagagtaactagaattcttgtaacgtttacatgcgttgtaaaccgtatctgtagattaattttggtacttaagcaattttgcaactatggccgacccgtgataaaatttaactcgcgggtctcaccgatatccgacccgtgataaaatcaggtcgggtacgggttttaactttcacccgcgggtcctggcggatatccgaaattatttcagttttcacttttccgcccactagaaaccggcggaccggcccattctccatctttattcaccagaaaccctattagcccacgagaattaattagtttccgtcggttgctagattaaccgacgggagttaccagcatgtacttctcgtagacgccttcctctcccttacagaacctctcccgctctcccaaaaacctcccaccccaccgcctctagcccctgcgcaccccaccgcctccgaccaccgcgcccgtccatggctcggccccagcgactacccccgcactcgcctaccccgatctcccccgcctccatctcca

SEQ ID NO: 161806 - DNA, 518 bp, Zea Mays
tttgattgaaccctaccgccgtgagcaggccggagcacacgccgccgacgagcccgaccgcctgcgcacgcggccagccctattttggccatcaccgtcgacaatccgcacctcgacgtgaccgccaggacctcccggacctcacccagcccttcaccagacctccctcgccgcaggtaagccgcgccacccttttttgtctctgcggtcactgttgcaatagggaaggagcccgggttgaaagaaagaaaagccaggggggttttgcgaggtcagtgacttagggaaatagttccgcaggggcaccgttgaaaggaatagttagaggaaaccccaggggtctcagtgcaaaccggttttctttaaaccttttaagttttatttctttaaatgaatacagaacttgcaaaattcataactcgaattttatccaaccaaatttggtcaaaccaattttgctaggtcctaaatattatgaactacttaggaaaaataacaaacaccctgagtactgcaag

SEQ ID NO: 161807 - DNA, 346 bp, Zea Mays
tctagccagctggttatgatgcaacctaggccaggggctctagttgacccatgggcatagttctgcgctgtcgttgatgagggtggggagatcaccgaggcacctgtctctggtggtgttgcgatggctactgcaagggttttggcaggcattactgatgccacaaagtctgttgtggagtagttgcgctacataagtctccttctctctattttgttaacgaagtctactcgtggcaggttggtgccttcgctaagctggtgtcatctggtgcctcggtcaactctacgacctcacggttgtgcaccaagaagactgagctggagaataaacttgagggcctcca

SEQ ID NO: 161808 - DNA, 359 bp, Zea Mays
caaggacataccagagacggagatggctcacggacagctgctcacggcgatccacgaccaacggcgatggaagcgagtgctggcgacgaattctccgatcgttatggccacccacgccaaattggtggtcgccccagcacccaggcgtcccggagatgctcctggcccggttccgtgaactcggcactgcctagaggtctgaatcgaccacgactgcccgcttctccaatccctcccctctgctttcgtcgttctacgcggctacgaagggaggaagtcccagcgcgttgctacttctcgaggttagggctggggagaggcggcagcctaggcttaaatggcgggcgcctagattgcag

SEQ ID NO: 161809 - DNA, 590 bp, Zea Mays
cccacctgcaaaagaaggaacccagaaagagtttagcacccaccataggcggagaataggggtcttaagccttcgatttgctactctagattcaaaccggatgctctccaaaatgcacgagctaggccccaattcgctcttccagggctgatcgatcagagctcacacgaagcaagggaacatgagacatgggcgaagtggagtgcgatggcttacttgtcttgtctgacgatagcagcagagggaatgcgaagggcagcgatgctgggggagtgcgatggtcgacgtcgagggcgagtacgccatgtagcgccctcatgaccatatatgcatgtctgttgctgctctccctacctcggcgagatctagtagcgcgggactgagcagaggcgaagggccgcagaggcgagggctagcagctaccggcggcggcggtgtcatagagcacgtcgagcaggatggattgggaccgctgccgtggggcggtgcctagcggcgtggaaagacgtgaggggtggactaagccatccaccggggaagatggagatgggatgcgcgaggatgaaggccctgagcgcgtgggtcgtggg

SEQ ID NO: 161810 - DNA, 588 bp, Zea Mays
agcccgtcttcctccctgcctccacggcgaatgacggggaaccgcaccgcggtgccaaactgtactccggcgaggacaactccgaccctggagcgcccaatccttaatcactaccacgtagacgcatagggggatgtattgaatcgactgggagaatactaaccggctctagtggaacggagagctctgcccgcgacagctagcggaacagcggcggcgttgcgtcgacgttgagaaattgagggccggtccggccaccaccgcacgattccacgatcacgcgacaatgctagaccccgccagagccttaggggcgacaatcccggccatggcacccgtaagaacgtggattgccggcggcggccccaaatctctctccctctgtatgcctccctctttcttgccgcttcacatacggtcgcgcatggccaagtcgttcacatatatacccatgaggcaaggttcccagggcccacacgatctcccgacgcaacaaccctgcccaggtcggccatgggggccatgagacccgccgtgcccgcgggtgccgcgtgaggcaatcggatgaggaccaagtccagacctgac

SEQ ID NO: 161811 - DNA, 378 bp, Zea Mays
ccatcctataaatatccttttctccctgctttgtgtccaaccgttgataaaggtcgtcataggtttgaccccgggctctactaaccgctcgctttgcagacttcttcactatcctgtacttctctatgttgtctgcacacttgtcatgatgtaagcgtttgtagcaatctttcttctccttgatagccttttggacatcttcgttccaccaccaagtgtctttaactttccttctgtttccttgactcaacccaaactcttctgaagctatctttcggatgcatgtcaccatcttcctccacatgatgtttgtgtctccctcttctgcccaagggcgctcctcgataactctctccttgaaagtttaggccacatccc

SEQ ID NO: 161812 - DNA, 400 bp, Zea Mays
tgcgaaggcacgaccgcggccgtggggtcttcgactgccggctcagccaccacctccggggcaccttcgaccgtcggcgcaggggccggcacagggtcttcgccagccataacaggcacgggcacgaccgaggggccttcaccggcatccgagggcagcaccggattgacctccgcagcctcgggcggcacgccgaccagacctccaaggtcctcgacgtcctcggcacgctccatccgcagcaacaacacattcactcagcaaaaactatacatacccacacgcaaccaaccacacaaaaataataaccttcacctgctctctcgcccggtcggatcgctccctgacagcctcccgaccatgcgccccccacatcctatcaaaaagtgcccccactgac

SEQ ID NO: 161813 - DNA, 695 bp, Zea Mays
aagtctatcttactctatccgagtctatctttaacatggtaggtgctcctgtttatccagaattcgcctttcttccgagttatctcccgagtatctagctcttcaggtacttgcaatctttgcacgcgaggcatctacgctccttctatgttagttgcgtataacttggctatttcggtcttcatcttccttggtcgaactcgctcagcttggtcgtggcccaaaggtatgcctcgctaggcaaactgtcagggggggcattaggtagcccatggagcatttccgtgcttatagggacccgtgggatatctatatcccacactcgtgtctcagatctctcagtgagtaccagagactcaccattcgaagtgaatccgtgctagccccctgccaaacacgaatctcattgtccctcggtttctgaaaccacgatagttggcgcaccaggttggggaccgttagcatgccaagtgacatcttccacttcgatggctagcactttcgcgttcaccgacggcgagagctttgctccatgtagccgcgcatcacgttcagctctctcgacttcctcgccaccgccatcgacaaaccctgcctcgtccactgcgacagcatctgtggcagctcgccgacatttagcgtgctaggggttgcaagggtagcgccaagatctacgtggtccaccatgatgatca

SEQ ID NO: 161814 - DNA, 371 bp, Zea Mays
gcaatgtataggtacagcggttcccctggctccggagcaaccaggatcggcagggaagctagatgctgcttcaactcatggaaggcttgttccgcctcttcggtccaggcaaatgggccggatttctataggagcttgagaagggcagtgccctctcagtcaaccttgaaatgaagcggctaagggcagccagtgatcctgcaagcttctggatgtccttaatacgggcaggaggcctcattacctcaatagccttgattttctctgggttagcttcaatgccccggtatgaaaccaggaaccccagcaacttccctgcggagacaccgaagatgcatttctctgggtttagctaggtgtgggttgcccgc

SEQ ID NO: 161815 - DNA, 651 bp, Zea Mays
tgcaaaatggacctcaattgagttctatactaagtctgaaattcagtgttgagggctcaactttggagctttgtatctttcaaattctagggtttttgccctaggtcaccacatcaaacttgtagatcaaacaaaggagaacacttttgcttaagagtgtaagtctagttgttgtgaagaatttggagataatcaccctcaaagtcaggctgtcaggacatcttaagtctgaatttccagtaacagtgaaattaggcagactttgaacctgattttgagttggattcggtaactattttatggtaagctccatggcaaagttgaagattaactgtaggtctataactttggtacagagagctagcctggtcaccacacaaaatcaggagtaaatcgagctccaagatgctctatcaggtcgactgactgaagaaacgccatggtacagtgctcagatgtggattagactgccagcgctgtgtgctcaccgccggagacctctctgcgtgaagattcgtgccaccaccgtctggattcgtgcgcggtatggaacggataacgccggagttagatagcgcatacgtggcaccctaccccgagtccaaccggagacctcaccggcggccaccgagtcaatcgttttccaccgtg

SEQ ID NO: 161816 - DNA, 518 bp, Zea Mays
cttgatactgtctttcaaagggatgtctagatactcagccttcctaccatgacgaagctctaaactagctccccagaccacctgatgttgtccatttgccatacccagcttgcaatgaaacaaatatttccaccgaccaaagtgcggggcaatcccgagaaaggcttcgttaagatgaacgaagatggtgatttgatggatagaattagggttcaaatgcgtcaggttgatagagtaatagtcaaggaggccacagaagaagggagaaattggtaaacctaacccgtgaatcaagaagggggtaaaaatgacagactcatgggtattctccataggaatagaaaccccctcccaaatcctccacaaactcaattccttagggggaagaacgcccatatcaacgaggtgcagcaaatcaaattcagacacagaggatttgtagttaccacagaacggaagctggttgtcgagatcaaggggaggaatggcggttaccgagggcccctgcttcttcctct

SEQ ID NO: 161817 - DNA, 495 bp, Zea Mays
tggctcacaaatgctatgcgttcggttttgcccctagaaccgggtgtgacagaagtgatatcaaacttatgctgactctaggtcgttagactagttagaaatagaaagcctagtctgttcaaaacatgctaattttgttcttacaaaattattttattaaccttacctctttaaacatcaactaagttgacattttcttttatagatggttcgtacgattcaaaccactcgaatcaacaccaactacatccctccgccacgacaagttcctgtctacccagtggtagttgaggaaatccctgtgaatctccctcacattcgtgtggtgaacagagtcattctggaggacagctcggaggagtttctgcctacgcccaccccgttggcagaatcactagccttcgtagctggatcgtcagcttcagcaccgccagcactagcagtccaagcccctgctcctgaaggcgacgacccggacgactctggtgacgacga

SEQ ID NO: 161818 - DNA, 783 bp, Zea Mays
tggcctcggacttcccgacccaagggaaaattcagattcaatcccggtcgttcgctccgatctaacggtcaaccgaccgtcatcaatcctgacgcagacccgagcgccgctctcccagggatggcagcgtggtgctccggcgagcagtgccctccccgccacggtgaccgactcgcgacatgatgtgctgctacacgaagcggagggcatggcgaacacaggggagtccaacataccatgaattgtggcacaggttgacaaggccacggcgcgcggcggagttgcggcggcggcgaagttcggcgacaaaattcgggtgctcggtttgatccccgggcatgattcttcatgtacacgacccacgtacatggccgaacacccacgacccaatatcagccactaatcgttggtgcaagcacggggcttcggggcggatggcagcctactccctgcgggtttgatttcttggtcacgggagtggatgattggtcgagatggatgggagttgaggggagagaagagcagggcaagggcgcgaggcggcaatacttataccccgcggctagatcctaatcttcacctggtgccgcggatctgaccgagagtcacggcagtcacacccgcggagtccgtgctcaaggaggccatgaccgagaatctcgttggcgccgttgcccgagatcgctggcagctccaccgggttcggttgtggaatcaccggagtccgcgcatcaattgcctgcgcatgaagcggagcagagataaggagaggggatgaagctg

SEQ ID NO: 161819 - DNA, 414 bp, Zea Mays
gggcaaatccttggggtggatatgcatgacaacaaatcccaactaaacagtggatgcactgctgctcattgtcaaacaagtacacaagcaactccaggagatgaagtagtccacatagcctaacccatcatacagtggtgtagccaggccagaatcgaagcctaggtatcaccattgggaggggaggggcagtgaagcgttgtggatagggatgagaccaccactagtctacacatctactattttgcatctagcccccttatttcctcaaattatcctatgaacacccttcttccacattcccaaaatgtagaggcagtggaggaatggactagtagattcatgtcttggcgggccatggcagcctcaccggggagcactatgggccttttctggtagagccacgcccacgac

SEQ ID NO: 161820 - DNA, 441 bp, Zea Mays
cataagaacccatgaacggtggaatagagaacttaatcttagcaaatggatcatggtctggttcaggattatgatgacgacgtctaccattacctcccataccttgtcgattacgtgcgaggcgttgtcgcagcggtgcataaacaacttcgtcatcatcattgtcgtccacaggagagtgagctggggctggagttggtggtgggggacgagcctccagtacgtccatgcgtgtaacaagttcagcaactcgtcgatcaagctgctcataggatgtcgccgtagagtcctggtattttttaaagcttcagtcatcgcgcgcatcatctccttcaattccagctgagagacacactcatcgtcattaagcttaagccccttctccttgtcatttggttctttggtgctgtcattgttagcacaaaacagagacaaaaaggc

SEQ ID NO: 161821 - DNA, 473 bp, Zea Mays
cgcctgtccattccactggcaggtgatgtgccgcctcggcatttaatgagccctgtccattccactggcaggcgatgtgccgcctcagcatttaatgagccctgtcactccgctggcagacggcgactagaccatcccgcaggcggcgtgcgtgtccattccattggcaggcggcacgtccatactaccgcatgcgctacactcatcatgactcgcgcgttaccgaggaagcagccgcgacatatcaatactgtatggactacggacattatggcgctcggagatcgcccaggcgatacaggcattagttacttccttccattttgcccctgggcccacatgtcggggctcaacatccttgtatgtgcccccttgagctataaaagggaggacacacgacgttacaaggcacattcacttagacccaactcaagctcacagcttcacttagactcagattcacactcactcat

SEQ ID NO: 161822 - DNA, 547 bp, Zea Mays
tggcaattgatggagatatttggtggttgtgactgctgttacattgctctttttgttgatttttaactttgagggtaccaataagcatagtgcatagcaccagtacttttacaattatggaatctctgcaaagcaaggaagacattatactgtaataatttttgctccaatttcgcattgcaaatgttctattagtgtcacatttttctctaatgcttctagtgaaaaatgagaccttttggagacagtttctaaattttgtgtgctgctagcctaaattatgtgttgtttcataagctcagttctattaaaaaagtgtggcacaaattgagttaagtgataaaccaaacagtagccgcacatttaatggtgtgcctaaccttaggtgtggtagtaatccaaacagccgccacacatttataggtgtgcctaaccttaggcgtggagataaaccaaacaaagaactaaccttaggcgtcttaggcacgccacagatgtggcagggtgctaacgttaggcgtggcacattacacgtgcaaccaaacac

SEQ ID NO: 161823 - DNA, 418 bp, Zea Mays
gtatccacaataacgtcgaatactgcccagaaattcttctggcaaaacattgtttgccgattcggagtcccgtccgagctcacagtcgacaatggcaaacagtttgacagccaggacttcagggacttctgcttctccatcggcaccaagcttgtcttcgcctcagtatatcacccgcaatctaacggtgtcgtcgagcgcaccaacggcaagattttcactgctatcaagaaaaggctactcgacgataggaagggtaaatgggccaaccacctacctgaagcagtctgggcgctaaacacgaccgaatgtcgggcgactagattcactccttttcgtcttctatatggatcggaggccatgaccccgcaggaaataaagcacgggtcacctcgaacaagtgcatcagctgtccccg

SEQ ID NO: 161824 - DNA, 596 bp, Zea Mays
cgtcgggccatggcgaggtgttcacgggtgcggaaaaccgatttggggagaaagaggaattagagagctatggtggctaatcggaggcaggagcgggtgatttggcttcgtgattacctaacaaagctagcggtgtgcttgatttatagtgttcaagagcggtggctcccaattttggaatggcgtgctggcggccggagagaaagaaggtcactagtggctcagtcgtggcgctcgtcggtgcaatggttctaaagtggtgagtttaggcgtgctacggttactaccatgcggtaaagagctacgaggtggcataagtgaggtcgccggagtaccacggcgacaccggcggtctggccacattgcacggctataggcgcagttgataagcttcaccccgtgaccaaatccactccctcgcgagatctttttacttccccgttgatatccactgcgtgtccagcacgaatcacggcgaccggcacaaatccgggcgcaaggtcactggcagcgagggggatgaatctgaagatcttttgcgcactataccatggccaacatcttcattggttctgacaacgtgatctatggagctc

SEQ ID NO: 161825 - DNA, 336 bp, Zea Mays
cttgagttcctatttgttgtcattgtgacaatgtttgatttgcttctttgtaatgattgtgggtgtattgtgtgacttttgtcaacaatggcagagtctaggtaaaactttaaatagttgggttttctcttctctctgtgcatgtctttgctcaatcttttcatcctctccttccttcctatacccaaacaggagaatcaaattaggctcaactgtttaataaacaggaacccaattagccatcgccggtcgtcagttaaacgaagtcgcctcgcaaagaactcaaagcaagaggtacttgctactaccgcaaagatgaaggacatatcatctgcc

SEQ ID NO: 161826 - DNA, 651 bp, Zea Mays
cgcatgggcccatcgcgtcacattgtagcatttgtaccacagacatgaaatgagtgctatcctcctggtgacagatgcccccccgggtggttgcatcacggagtgggaaacagagcgtaacacgttttcacacagcacttggtactagtagcgatggggtcctatggctatctgtcgaagtgtggttttagtttccacactgtttgtgaagcgcaattttgggttgtaagactgtctccagctgacaatgtaaaatagagggacgttgaattgtagatgacactgtttgacattatttgttgagttgagtttcaaatatgcgttgagatatgggatctacgagagatatagcctaataatttgatttcttgccttagaagtttggagccggaccgagtctcgtattacacgcatacactacaaggttaataatctgttgaaatatataaagcttagccagacccacacaaatcaaacacacccagaaccatcccacatctgaaaccaagggacaagatcagtccaaatctccatttctcttactcaaatccaatagtctagcttatttgggtaatcccttactcatcaaccatgcatccacccgtgatcccctcacaggctaccgactcattattatcctacccaccgtcg

SEQ ID NO: 161827 - DNA, 789 bp, Zea Mays
atcccattatccgaggccatctgttgtaactccggtgtgtcaaagagtggttgttcatgtcccctagatgtatgtgaagtccttccatgtccagacggcgggggaggcccaaggcaaaggtgaacagaccgttggtggggcaagggactgcccaaacgccgaggctcatcattcctctgatcatccatgtcgtctgaaccatcaaactgatcgccatcctccgatggagtgagcagcaaggaacctctaagaccatcatggcagattgcaagtacccttacacttatattataggctaagcatctccgttcatagctttgtgggcctggctctagaatatgcagaatcatatcacggtgcagctgtttcggttggaagcaccaagccctcgctacaaaggatggaagagttttctgcaatagagtgtccagatgaacctcctcaataatacaagaatctcccaatatgaattcagctgttgagcggcaccaagcatgcaccgggattccgataatctcaacttccaccaagttcgacatgattgaggaagaggcatgagaaaatctggaccatcttttgaaaaccaagttgaaccaaggtcctcggagcactttaccaccattaagaaccctcattgcagtttcttcattaggaaagaatagaagaaaatcctcaggctttgcagattggattgtcatgtcttctaacttaatgctgaaacaatgtgccacttcttctaatacctctgatccaaggacctctggcctagtaccagtaacggtgacaagc

SEQ ID NO: 161828 - DNA, 454 bp, Zea Mays
tgggtctgctgaccagccgccacctctccattttctccttcccttccctctttcactctttacccgttcatttcttacagcagccatcgcctacacttttcctctctctcacacactctccccactctccaaagcccatttgtgccatcaaatccttgggaggttgttggagatttgttcctctcggcttcctccatcaactccctcactttcgttgggatttctgtggttcaatcttcagatcgaggtattaccttatttcctcatgtttttactcgatctcacccgttcttgattatcttgtgtatcgttttaaggatacttcttagtttaggtgcttgcaacacttaaattttccttctttttgtctcaaccattgtttgagtttagtagtttggtattgttcgttgtagttgaaccgctcgcatgaacggttgaagtgcatgctcaatat

SEQ ID NO: 161829 - DNA, 1330 bp, Zea Mays
tttagttgcaaaattatcataatgattgcttgagattgaaataactctgcataggtggccttaccacaaagaactttcacgttcagttttgaacaaaaaaaagtacagaatgaaatttcgagctataatactttggttctcctttacattttccatatcaaaatttcttcgtggtcaacacaaacctcctgatagtgtttacaattattttctgctcttctttccatacactgaccccagaaacaatcacttggatcaacataaaacaatctcatcagagcaatattctgtaaatcactcggtcctgactaaaatttggaatagagtgacatagaccagctcaccatctcatctatttaatctgaagagagaagtaacattcaaatgcatcataattcataggccaaatatcctgcaataacatgcaaatacagttttggaggtcagtgctgtgatcctattagacaataataaactacatcagataacgaatgcaggtgtctgaagtaatttcagagctacagattcatgtgcatctgtcatgcgattggaatcatgaatccaaactagaatcatcagattttaatctcataccatgtgattggttacctgtaccgtcttgttctgcatcatcacatgggttgaccatgtttaagcacttgtttggttgactgcacacgagggacataatctacatgaacagatgcaaaacaagctatttggagaccatttggctgcatccattcacatgtcagaaacaaccgtatccatccggccagcctcacgcgggcatgactggcggatacaaatctaatttacaggcattgatcaaacaccttggaacttggaagcatggccatgctggcaggatggtagtctagtggacacaatactgaagatatccatggttggactctagatctccccgttgtgctgctcagccgctggtaggcaccgctcacttcctacaggagcatctatttcgtaagaaacagaaacaaggatatgtggttagagcgagcagtgttgtgaaatgctgaatagacagtgcccttcctctgtgcagaagcaacatataagcgtcttggatttgggtcagagaagatgaaacaaacataggagtctgaaaaaacaatgtcaatgatttttttttctcaaacacgcgagagtctaacacaagacaaaacacagaccagacacacgctcacgcacaaaacacacacccaaaacccactcacagacacacactaaactaaagcaacataaagaaatgtcaatgattttaatgtcaacagtgaaaatgacttatggaacattataaggtttcccc

SEQ ID NO: 161830 - DNA, 959 bp, Zea Mays
tagaggccctcggcgttttggctaactggagatgggttcagttactgtttttctgagtcactgacgatttgcacagagatccctcaagttctaattcttcacagtgctacgccccgatgtcgcacggcggaggtccgatcaccggcgaggttaggccggccggattacgcaaggattggcgctctcgagcggcagacaccaaatcagaccccctccgagcatttcccctaagttaattgcacgattggtgacccattccggtctgcccacgaggacagcgaaggttatggacacatgctcgtgttcccggcgatgggtggcggtctggtcaaattaaagaggtcgggaagcatcgcagatgtaggagaatgctcaaacaagggagcagaggacgggaactgaccggagttgggctggcgacagtgagctcggttccacggtggcggaaatcggatttgggggaaactctgaattcgagcagatgaggggatgattgtgcccgattagcggtggttagctagaggactagctcacggagctggacacgggctcaatttatagggaggatgggcggtggccgtgaatttcgagcaagacgcgcggcggtcggaggtggagaagaacactggcgcagtgaatacgtgttcaacgtcgtggcagctattccggtgagcaacggggagctaaagtgaatcatggcggtgcagtggcgaggctcggacacgcggcgcaaggccgagaggcggcggtcaccggcgaggtaatccactcggccgcaaagagggagagagggccacgggggtcaccggagtgatcgccagcgcacgggcggtgaagatcttttcaaggtgagcaacacccacacggccgcggcaccaatcccggcaaagaagtcgccggcggtgagatcttttctacagcggtcgatctgatccccaacagagcactgtaccatggag

SEQ ID NO: 161831 - DNA, 375 bp, Zea Mays
gataacgtgaacttaggggaacttcccaagaataccacctccctacctgacggtgcctgcaataacactgtcttccaaaaacaggatataactgcgcgatactgggataaccaatccatacccaagataacatcgaatgcccccaagaaaatcacaaccagattggccgaaaagacctcatcagcaagaatgatggaacactcctgacaaactgaacagctactaatggagccattagcagaactaaccaaaatttggtgacccaacctctgcaccaaaagaccagcccgcgacacaaaatcctccgaaacaaacgaatagctagcgccagagtcaaaaagagcatgggccacaaacgaatcaactgaaatcata

SEQ ID NO: 161832 - DNA, 536 bp, Zea Mays
gccgcgtggcctactgcgcatgacgtaagccggcgggcggagcctgacgtaaggcctccgggttacgcggcccctgcatttattgcggataaggcgcgccgcctgtccgtcccgctgacagacgatgtgccgcctcagcatttaatgagccctgtctattccgttggcagggatgtgccgcctcggcatttaatgtgccatgtccactccactggcaggcggcgcccaggccgtcccgcaggcggcgtgcctgtccattccgttggcaggcagtatgcccatgctgcggggtgcactgtgctcatcatcactcgtacgttgctagggaaacttccgctgcacaccaatgctacgcagaccacagatatcagggcacaaggagattgcactggcgaccagcattagttgcttcaagtgttacatccgttatgtccctaggcccgcatgtcggggatcagcacccttgtacgtgcccccctttagctataaaaggggaggcacgcaacattataagactcagatacacttagacccag

SEQ ID NO: 161833 - DNA, 424 bp, Zea Mays
gtcgatgtgatttcgaccgccagggcggcgccgccgtcagtcgcggtcggattggaagatgacgtcggtgccgtctgatccgtttcggatggctcagattaggtaccgcgtaccgcttcggatagaactaataggagtcccaagatgttgatcggacggatccgactgatcgcgcccgtttaaaatcctcgccgctggtttgagatccatcggccaccgatgcgtaccgcctcgatatagtgtaggtttaatctgggccactgatctctgatcgtgcggctgagaactcactataccccttcgaccgaccactttatagaagagaccccgcgcaaaataaaaattaacccgtagcccactgtaggatagatctaattcttagggatttttacgccagggcccctacgtttctgtttattatatg

SEQ ID NO: 161834 - DNA, 924 bp, Zea Mays
gtacaagactcagcgcatagtgaatatggacgacaggttgatttctctgtttcacggggactcttaagcaatttgcgcaaccgaaggggtatcttctattgtgggccggacgatccagatcctgcggtctggattagatcctagcgcgatgaagcggtatgccatagcagccgtccgatccaagcacaacgctcccgatttaaaaacctaagatctaatctcgagcgttcaaccgtcgatcgacgggcgcgatcgccccgttgcccaaccggtatgcatgacctaatctccaccgttggtgcccgatcagacggtatcccacctttcttcttccccagcgccaccgagcagctgcgaccgattcgcggcggcgtacacaaggcggcaagctcccatcccggaataacggcgcccgattctaaatgacagcgagtctaacgcgtagatccaaccaaggcaaatcgatctaagggtaactcaccgagatgtatgcagcccagtgccctgaccacggtgaggagcgagcacacggcggaacttttcctccggtgtccaattcactccaccccagccgcaaggtttgcctgaagaagccgcggacaccagcagggtattgaggagaaactcccaggccggcacgggttagcccagacggcggattacgaccttccacgacggcggggttcctgcggccatggcggcgcgctgcacagcggcagcgacgaggtcgaccagagaagaatctccgccaaatcgaaaccccctaagaccaccagtaagcccgaaccgcaccaggacttcactcggagctcggtcaatggtggacgcgcacgacggcgaggatgtcccgcgagcgcacggcagacccacagaacctctcccgtgaactcggtttgtggagttttttgtgatgaggatagctag

SEQ ID NO: 161835 - DNA, 606 bp, Zea Mays
caaatctaaggagtgaaataaggaggatagatttccccactcacctagtagtaatgggtactcaagggataaacatcatcctagggatgaattggatgcacaagaaccaagcaatcgtcaactgtgacaagagaacactgaggttagtgtccccatccggggaagagataataactgaattgatcatgtctgatctagaggaaggagcttgtcaccagatgtccatatggtaaagaggccagcccgcttgagaccatcagagttgtgtcggagtttctcgacgtgtttcctaaggagctaccaggaatgccacccgagcggaaagtcgagtttgctgtagagcttgaacctggcaccgaccctatttctaagagagcttatagagtgtctggaccagaattggtggaaatcaagaagcagatcaatgagatgttagagaaaggttacatcagaccaagtacttcaccttgggctgctccagttctgttcgtggagaagaaagatgggaccaagagaatgtgcaccgactatagaactctgaatgaagtcaccatcaagaacatgtaccccctgccaaggatataattcctatttgatcagctgaga

SEQ ID NO: 161836 - DNA, 480 bp, Zea Mays
ggaaaagccaaattacctgaaggttggagaagaatgaaggaaatcccaaatcatgagaagccaggtggtggctcgacgaaggaatatcaaccggggcaatctgaagagcatcaccagggatcaactcaacatcaccagcaggcatcaaaactctagcatccggtgcgccgatctctaaggcgacttcctcatttgaagcatgcaatgtcactatgccatcagaatgtggtggagaagacccgaggtggacatccatggaggtatgagaaggggagctcgcattgtccatcggagccggatcaccaccggcaacaccctcgggggctaggttgcagcttgcgctacccacccgagccggatcattaccggcaacaccctcgggggctgggcaaccgctggcactatccttgaggactgggttctccacaacagccacctctaaggctgaaggactctcagtcacctccatgggaattgaac

SEQ ID NO: 161837 - DNA, 507 bp, Zea Mays
tttccaaagctttggcttatctacattcatcagctacaacaccaatacttcacagagacatcaagtcatctaatatacttcttgatgataatttaactgcaaaggtatcagactttggtgcttcaaagtacatcccaattgatcggactggagtgactactgatgtgcaaggaacctttggctacttagatccaatgtattattatacatcccgactaactgacaagagcgatgtttttagttttggtgttcttcttatagagttgcttaccagaaagaaaccatatgcctacagatccgatgatggtgatggtctcgtttcagaattttcatcattgctagatcaagggaccttggttgacattatagatcctcaaatcatggaggaggataaacaagtcgatgaagttgccaaactagcagcaaagtgtacaaaattgagtggagaagatcggccgacaatgagggaagttgagatggcacttcaaaacttaagagccacagaga

SEQ ID NO: 161838 - DNA, 391 bp, Zea Mays
gtcgacccaatcaacaccagagtagacgacaaagtcttattgaggacaaaggctcagaaacaaacccatgtgcaaggtaccacggacgtagcgcaaagtgcgctcgagaatgtcaaggtgtggctcctagggatcatggacgtggagacagacttgctgaacgccataagatatgtctggcccggtgaaagtcagataccgaagagcaccagcaaggctacagaaatctgttgatcaggtacatggttgccatctactgagagctttggattgatatcaatgagcattgagcatggcttgcatttcatcacgctcaaggatctcaatcatatagtaccgctgggagaggaagagactcgagcctgtgtgttgaacatgcatgcctaggaag

SEQ ID NO: 161839 - DNA, 292 bp, Zea Mays
tggaagaagagcggttgaatacagtaattcagtcagctagatatcagcagaccctgaggcgctatcatgataagactatacgacatcgatccttcatagtgggagatttggtccttcgccgaattctaacgagagaaggacgacacaaattatcaccgctatgggaggggcctttcatagtgtcggaggtcactcgaccaggatcatatcggcttactcaaatggatggcacggaagtagggaattcatggaatatagagcacctcaggaagttttacccttagcaagaact

SEQ ID NO: 161840 - DNA, 580 bp, Zea Mays
aatactacccatgcaaaagttgcctaagggtgcagccggactagcataacgagtgtaaaaatcgaaggcgcattacatcagtccgaaagtctacaagcgcaaccggaccgacacaataatgtaccagaccgggtgcgcaacaccttacgaacacacccagatgcgcgaaggcagtcaaccttatcatacaaactacagttacacgcgtacagcgagggcatcacaccttacataggctcaaccttcggaatgatccccatctccctatagttaaatagcattatcctcagctcctcagcctcaaaaagccttcgcaactccccctcacccatactcgccccaaccggcgaggacaacaattcctgcctaccagccctgcccacacgaaaccgaccatcatcaaacccgctcactctacgcttcgccactgcccttcgccgcctacacccaacactcggaccaggcaaaatttcagcatccgtaacacgcggagaagcctccgcctcagccacatccaaggccgcaaaataatctaagccttcatccgaagactcttccgtccacaaaaccgaactcccag

SEQ ID NO: 161841 - DNA, 451 bp, Zea Mays
tgaaccaaggccctatggaaaaattcagaaatcagaattctgaatttcagaaccctttcccaagttcacatgtgttccctatcttccaaaactcgaaaccataaagtccaaatataaaagtggcgccaaattttcttgaacatgctctggtgaagtttgaactcaaacaaaaactgtttgacacgattttggcgcaatttgtcctcgggactaggctgtctgacactggcaacttggcgacgttacaactctctgtccctagcctaaaaccgcgcaacatccacacacaaactacaaagcacagtcaggggaacaaatccttcacagcgatcttgcccaaattcacgaagatttgcgcccaaacagcgttaaaacacggacagaagcaacagctccacgtgttcgaccacggctgacacgcccggttcacgccagttcgcgcacccgcgtc

SEQ ID NO: 161842 - DNA, 352 bp, Zea Mays
taaccctttcaccaaatgtccgagcaccctcaaccaaatttgtagtgcattgagcgggaagaaactttgctatagtgaacatggtccgattccaagcagaaaatgccatttcatgccgtccaatgcagccactttgacgttcaccacgtgttcgacagtttggtgcagtgaggaagcgtgaatagcaggcggccagtcgtgtggcattggccaccggccatggccagccactccacgaccaccacgcctctaggccaatgcgccacaccgcccatgtgagccaatagccgtggcaggccgcgccctttaaaagttctcgagctcccctgcagcctccccacgccattctcca

SEQ ID NO: 161843 - DNA, 989 bp, Zea Mays
gcatcatggacccatctaggaagaaatcttctccggtggtggcagaagcggctgttggattgccacgcacattgttcgcaagaaccacgttgatgaactccaaagcgcaagaaccttggtgggtttccgcctcgcgtaagatcgtgcaacgtcgagtggccccagggtcgttttaacacctatggctcgatcgatcgaggctgcaccactgacgctacgaaccccttgtccatgtcacccactcgggcatggactcagatcacccgggaaagagaagtgtgtgcccctgagacttgcataaccgtgggggaacgaccaatgaccactccgccctgaaaggagatggtaggagcacaaagcatcacaccaagctacttcttcctagatatcttcttcatcccaggaagagtggaggacacacctgtttctgacgacaagcccaccatactaggggaggatcccccagcgtgacgcacgccaacgccgtaataggcgccacaacatacgacatcacaatgaagccagggaacaggatcctatgcaacccgtctctcatgacgaagcctctaaagtagggaaaacccctgacgacagagcgctctgcgagcgccgcaactcctatcgccgcaatcatcgccacgcctaggaatacgaacgacagcaagctgagtaggacgccaagctccgacacgagaactcgcttctcctctttgaacctgctgcctgactttgctcgaccattgaatacgtcgagttaagtcgggggagtcctggctcaaatcaccaacggcttaccgcgcaccccagacgcggaaggctattggcagatcctaacctacgcagcgaaccatcttcttcccctcgcccatccatcgaacgatctacaccacaccatcaacagtcggcaagacacacggagcaatatcaactcttcgcgcaatctccagcatgaggaggaattgaggcgacgagaagagtacgaccgagac

SEQ ID NO: 161844 - DNA, 551 bp, Zea Mays
gcggcctttggagatgccttggccactggccccgcagccggcggcggcggagacgacagcccgggcagcgccggccaggagtcggcatccatgatggggttttcgaccaccaccgcgacgggaaccgtcgcggcctcggggagcttccatacggcggccgccgccccagccttcttcgccccgagcaggctatcggacggggtcgtcccggccatggccgcggcaacggcagcatgcgggtcggcgctgctagccatcgtacgcaccctagtccgatcgggaggtagggtctcgacggggtagcagacgaaaggcgggggtcggaggggacgggacgggatcggtcagtggtacggcatgaggcgatcggtaacaggggttccaaatattgccgcgaggcgacgcaaaggctggcgatcggcgatcggatcgggggaggaggaggggggcggtgcggcggcgggcggagccggagctggggccgatgcctgcgacgctcgctgctcttcccttgccttcccttcccacgggcggtggatggaggcggacgg

SEQ ID NO: 161845 - DNA, 513 bp, Zea Mays
ctagattctatctaatctattatgatctaatctagagtaagttacttaatgctggtacaaaggattaagccatacttcaaatccacttaagcttaaactggtgacctagatcaactcggccatacccaacaacttgacctacataacaaatctatcttagccttttgtcccgaacccggatggagacaccaaagagcaagaccggagaaggaaaagatcaaccacgtcaaggaaggagagaagtcaacctcgatcttcaagatgcattaccaccgaacaaggcgtcctttctcaccgtaaactttcttacccctggctattcttgccctaacctatccatcttttatcccacataataagtatttggatacctatgctctcataatcacccaccattgacaaaaaaagactctagatttttgaaccagttatagactaaaagccaaattacaaaccaatccttctgtatcccttttctcacaaatctcgaggacgagatttcttttaaggggg

SEQ ID NO: 161846 - DNA, 535 bp, Zea Mays
gacaggtcgagcggcggcaccaggctggggacgacggcggcggcgaggcgctgcatgcagagctttctttcgtccgtcgctagccctgatcgaggcgtcaatgcaatggactagctgcggtgctgggcgtggtgagcaaatggcgaggaggcgagaagggaggttggtgatatatgggtacgttagcgaggggggtggggtgggggcaaggaagtcctgaggatgatagagacgagacgctgaaaaaggggtcgttgttggatttaattttataccagttggacgatggagttgttcaagcttcatgtcatagtcccaccacgcaaggcaaggaagaaactagaaggggattggtctctgcgtcctaggcgtgggaacgtaccagcaaaatgtaccccgttggaaaattatgtccgtctgccctgccgctcgtgttccttggaagtatctggctgttcttttgttgacggtgcatggtctaccctcatttctaaaatttataaattatagcagctatattatggatatataatcc

SEQ ID NO: 161847 - DNA, 805 bp, Zea Mays
aaagaattaagtctcaccggttatcgcggcgtggagagcaccggccacggtgcatcgcggcccgcggcggagcagagacaccggtgagcaatctcgggctcccccgccagtgctttcgctgattgaggtcacgagaaagctccaggcgacccaaggaggagttcagttcggttgtcgaggccagggagacgacaaatcgctcggccgacgacggcggccccacggtctgcactcgatccctgcccgatgctctacggtatcttcacaaggtggctctcctttctgatgaggcttgacggagttggtcgagggtaggcttagttttatacccggggactgcaacagcccggcgagaaaccagcatgtcgcgcggcggtcgcgggagttcgttgggttcggacttcgtcccgatccgaagctaggagatgaccctggacagtggggcccgcatgtctgtgtcaggtgcggcgcgggtgagattggcaactgggccccatcaatccgtgacacagggcatcaaggagctctccacattgacagcccaacccgtggaggcctaccagtcggcggcccgacacgaaggccaggagcaagctgaatgggccgcacggtaaaaaaaatagtattgggccgaggggagaggggaatctactgggccggagggtgagaattcggcccagccgagatctgggtttgttttttttctattttcttttcctattccaaatttaaagattcaaacccaatttaaattactggtttaaatttcagatctcctaatattaaataccatcctaatgtgaat

SEQ ID NO: 161848 - DNA, 815 bp, Zea Mays
caaacatccatcgcgccaccatctgccggttctgatagcagatcttctagaatcatgtcctcaagagtctgatcaaagtttgctagagataattcttgcagaccaatgagagcagacaaggctggagaaggaacaccgctactttccccactggcagtgtaacggcagctgttcttccgaatcagtgggatttcgtcttcttcttcaccatcatcatcaacaagacgcacagcacacccattggggtcagcttcaatgaattcaggcactggcacttcctcagcgataggagcagaagggccggcaccctgatccgagccagacacccgacgaagacgtctcttcttctttttctccccctcagcaggaaaagaggtttgatcaactcggcgagaacgttttggacgaacattggcagacttctgagcgtccaaagctttgttagctttagggatgggcaccaccaccaatgtttcagcaggagtagcgtcagaagaatccccagccaacatatccagcatggcacctatctctgcatcactaggatctaaaggcacctcaaaatgaacctgtcattcatcatcaggaatttcttcaagcgaagcaaccaaagcactaacttcttcggcagagggtcgcactctaaggcccaaaccgccatcaccagcaggaggatttgacacaaaatgagtgaaggccttagaaggaggcaggttccaggccgaatgcgcaacgggggcgcctacatttgatacttcgcctctgagtatcatttcaagccggctcaccaaatccacagcaggaattcttctgtt

SEQ ID NO: 161849 - DNA, 696 bp, Zea Mays
aaaacgccaaaaatgttgaaacgctcatgggtggaattttaatttttaaacggtttaaacaacataggtaaatttcaatatatcataattttagacaataacatagtcaaataccaaacaaccaacataagttcacgtaataatattgtgcaaaatgacatgtccacaaccacattaccacaatagcacaagttcagctaatagcgagccgacaaccacaaacaaagtgcaatgagatgtctagtagttcacaatcacaaacatagcacaaaagcaactaaagtggaatgcaatgtccacaaccacaagcacacaagtgttactcaagcactcaataaccatcatccaaatcatctaaagtaacatcatccttgtcttgctcatcagcacaaccaccactgttgtttgttgcttcttcatcatccatgtcaaggtcatcaagcacaaaattttcatcgtcttcattctcttcacccacatcaagcccatcttcatcatcatcaagaattggctaccatgagctctcctaggaaagttgtggcctcgaagttgtgtggatgcaccgacgacatgatcaacatgcattgctctgatagttaagaggacaccaatagaatagtactccactgaaataatgggctaatgatttatgattgtgtagttccttcttttttttttttctgaaatacgcaggag

SEQ ID NO: 161850 - DNA, 1103 bp, Zea Mays
ctctgccgcgctctgcttgccttctcatcggtcggtgggccctcgctttcagatccttccccaaccaagctccacggtaaacctccaccgctcacgcggaatcagcgcgggtggttcaacaaaccatcgtggatctcgcagcttgctctgactcagactttggccgctaccctgggtataaaacccgtgctgcccccctctcgccatctaccttgtgccgcagcttctttcgcctcgtagcagcgccaccgagtggaaagggcaaggaggatggagccactgcaaccagatctcgtctgcgcagtcactcagaccttctgcgtggtcgagcgggttgtctgggtgggcagcattgtgactgcaagagagggagaaacgtgttcggtcgctggaaccgtgtgggcgaacatgccaccgtggaggagagagagatgcaggaagggagaaaatagagcagggcctcggctacgcgcttgctggtaagggctcctctggtgaactcagctcttaccccgctttgtgtagcacgtttcggatttagggatagtcgccggttgggttttatggctgtgcatcggcgtgtttgccgccggtcaggccatggcgcagcctctgagcaagttcctgggaagacgatgggtttctggccgtcggatccaaacctgtggttgagattagaagtcgcatgccgatcgggctgtccattagatcgagatcgggtgtacgggtttccatctcggctatttaaatcctgagtgttgttatttgatcggaaggtccatatcgtgtaccggttcaggataatatagatctaattccgagccgttgaaattgatcgagcgacccatatccaacaataccccttcggccgaacaaatttacaaaagagaccttctgttttctctatttcaacccgccgtccatataaggttcgcctgagtcttagtacaaattgctccagtgccctgtactttacagaaattgttaagcagtccagaaaataaagaaaatagggaaaaagagatttagaaattgattttgagtatagaaataattgtaaaacttgtataatccatagaaaattcatattaagtccaaattag

SEQ ID NO: 161851 - DNA, 443 bp, Zea Mays
tccttggtgatctcgttgtctccttataactccacttggtaattaattttctttacttcaaccattttgctggaaccttacctatcttacccttgcttgttttctccactttgtcagtcttgccttaactctgtccatggttatgcttttcatcattatcacctttacccttatcacctctatatcttaccttcatgtttatcttatacatgtcctttaaaaccttatctcttccatctcaattttatagttgtattttacctattttccattggttgtatcctcttccttgtcgcttgcgagtttttaacttcatccttggttgtgcttcggttgggtattacctttacctttctcatctctcgatcttaccttggtgattacactctgtccattctctaaaatctccaatctcctatcccaatttgggagcggtgttttac

SEQ ID NO: 161852 - DNA, 1018 bp, Zea Mays
aaaaaatcctcattgtgtcccgtctgctccggcgctcacgctcatgggttatgtcttgcgcgtcagcttccagttgggccgttgtagagtatgtgttgatagtgatagtttgggtcaggttcgaggaatttttttgtcgagactatgtttcagtcttttcttaatataatatctataaaaccaggagtgtgtctttctctctttctctgagtttcttttatagtgcagttgaacggtttgggcctggctgttcccaacaggctttacctttcctcattggcagcaagatgttgccatcaagagatgatagggtagagttgatggtaatgcttggtaaggcgatgagttcctttgccgaggctacattattcttgtgcttttccacgttcttgtttagttaagttagttcctctataccaaaataaaggtactactgttattgtattgagcaaaacaatcccaagtctgacagtttgtagggaagaacagaatttatgatatttagatgagcatcatcagatccattatgaaatgtattttcatggtatagttatttgatgtggtacatgataaaaatactcatctataaacataacttatggtagcttgacatggagacttacggagatttcgtaagcgtctcaagtgagctttagctagataaaaacacatccttttatctggtcttatcttaaaatattattatgtcgtaaaaaatatctatgtagcagtttgttaaagtgaaattctcactgtccttcgactatctccaacactctatctcacttatctcatttcaaactgtactctacaaacggtgagtacaaaatatggccttacaacgcaccgcctcagaagtatcgaactgagcaccaaaaactgtccacagctagtcgaagcgatgatatgcgcggagctttccttctatgcatacccatcgcgaacctgtcttgccatcaagctttactgttttcgcactttccagctcagcgatgactctatcagatgactagacgag

SEQ ID NO: 161853 - DNA, 738 bp, Zea Mays
tggtacagtacatagaaagatctctggttcagccccccgcaccatcggtgacctctacgcaaggattcacgctgatcatggcgattcgtgcaggactcgagcaggataatactgggcgggtgaaaagattggagggggagcggatttggtcgcggggtgaagcttatcaaccgcgcttgtagccgtgcgacgtggccggaccgccggtgtcatcgtggaaactccgacgacctcaattatgccatgccgtggctctttactgcacagtagtaaccatggcacgcctaggctcaccatctcagaaccgctgcaccggtgaacgccacaactgagccaccagtgaccttcttcctctccgaccgccagcacgccatgccaaaattaggagccacgtcccttggaaacaataaattggtgccccagcctgctccgctaagtaattgtgcacccagtgaaccagccctcacctccaatcatccctcacaactccccaatttgggattcccccaaatcagtcaaaaacaccaccgtgtgtgagctcgtcgtggccagctctccacaggtccaatcacaccctcctcgctcttgtttcagtactctggtgtgctcttgatgcttctcgacttggccaattgaactagaacacgtaggatcaccgggaacgcctcggttcatcctaaaagcacctagagggagggtgaataggtgatcctgtaaaatcaaatacttgtagccaca

SEQ ID NO: 161854 - DNA, 1167 bp, Zea Mays
acaagggtatcaatgaggacccgagcctaggggatgttatcggcaagccaagcccgagggacacctatactacccccacatgatagaagtgagccctctaagggtcaccattgcctctaggtgtggccctcacctaagctcaagaagccatagaggaggtcaatgtcgttatagtcacatagtggaagcgactgaggcgggactcttggactaaatgtgggaccatctagagaggctgatgttctagaggtcaacgcattcgtatctattgatacccgtcgaaggagggaaatggaggaagccctggcctctagtattgctgccgctcaaccccaagaggaggctaaggggatctaggataacatgttttcttcttgattgtcaccctttcttatcccatatgcatgttttgacttgtttgggcttggattttgatcaaacttggatcttgtatatctaggatcgagtataacgtgtgcaacacctcttaacacatatggtagtccttgtgattgtgttttcatggtcatcaccaaaaccttaaaatcatggtcatgtgcacatgattcttagatagccatatgtagataaatatgcagctcaatcattagtcgagcctacttgaagccggcatgaatagcatacatatataccactttgcatcgtgttgatgattagggtaaagactagtttcgcaagccgtcctggtggcactgtcaatcaattgagaaagagggtttttgacaagctgatgaccaactcctgccgcagctcttatcacatactttgactatacacagagaatgagagattctccagatatcattttcagcctgaggaagcagtagtcaatatgaaaggagcaagcttgacaagtataaatcctctgaaattttgcatcctctcacaggcacgtcgccgtttgtagaatccaggcaagatccaagagcaagctgcgtccttgcatgtcaatgtcttcttccccatacagagcagtgtttggctgtttgttgaactggccccgttgtacatcgcattgcgacctgcgacgcatattctcagggtacttgctctagagactaatcgagacgacccggaagaggaatagaggattgtgttcaagtatttgttggtttggacacaaaggtttctagttattttctctat

SEQ ID NO: 161855 - DNA, 909 bp, Zea Mays
cgaaaattgggcaccgggcaattgcgtggtgactccgggcaggtgagcggatcatcgtttgggtgattagaccttcgtgccaccgaaaatcgtgagctgcaagaagaatccgcggtcagctcgtcgagctctacaggcaccatcatctcgagttcctcactaacgaggtaaacccattttcccccgatcgcttttagctctgctcaattagaatcgtactctgcgcgtgcccgggcgatcgtgggggcctatttgctcgttggcgggcagagcggtagtgaggagctcgggatccaccgtggtgagattggcgtgtttgacggggtcgcgcctcaagcctgtgggctgcttgcttattcgggaacgccactcgcgtgtgtggtcaccgctggacagacaagggtgtgggcgactgggaattcactgtcgagcttcaaccaacccttcgttccgccctacgccgtggccaatgacctctgctaccttccagtgtgggtaaggaagtggcccgactcccatttctctccaggttgcgatagaatctattaattttagttcggaagctctagggcgtcggtagtggatcaccagaggggtgggtgctccgccgtgagtcgatggtggccgccggtgtgccgtcaagtggtgaagacgagcgtcgttcgttgatccttgattggacggcggtgattagaaacagagtgccggtccggtcggatgtggcgtgggccgttcgattccgatcgatcggacgtgagtgggattaggttatttaaatctggaatgtccaagttagatcgaaaggcttagattgcgtactggttcgcagggtagtggatttaatctaggccgttcacacttgatcggacgactgaggacttatgatacccctttggattgctgacttta

SEQ ID NO: 161856 - DNA, 380 bp, Zea Mays
aaaatgatttgattaaaagagaagacatcaagggaattatccagcgccccatctggtctcgcttcggcctccgaaggccgaaggtggatattgatgacaatgttgaagcatgtcagaaggcctttagtattgtgtgtgccttcattggtacaagggattcaattcaagagcacatagccttcaaggtatgaccacttgtggagaattgggaaatgccgaaggataatgttgttgaatcgagtgaaggtggcctggttcgattaaagtatactttcagatttagggagaagtttgatgagccagatgatgactggctgaaatgtattgaagctaccagtgacgagttgcttgggacatactctgtgacaccccagtgtcac

SEQ ID NO: 161857 - DNA, 478 bp, Zea Mays
gttggcacgccgtgggcggaacctgcgccgaacgcggagaagcgctcaaaaggcgtcaggttttaataattctgatgacatcatcaaattttgacgcgttaattgccttccaactggaagcacacattgatacaacacaactcgcttgtatatatactgcaatcacataatggagaggatgtggaaaaagagaacatgagatgtgggaattggatatatcacatgtgcctgtgcctattgagtgccacagatttcttactgatcgtccaagtgcttagtgtaagatcaagtctagtgcatgatagaccatcttctaatttgtgtgacaaacataaaccaacaatgcaagttaacgttgatgagagaaggaatcgaaggcatcaggaaagagcacatgctcattctctgtcttgttgttttacatttggtgcctccctgctactcccaataatgcatagatctgccacacatggtgcta

SEQ ID NO: 161858 - DNA, 549 bp, Zea Mays
ataatgagaaagatgccaaaggaggaactggaaaagatccttcggtgactaggaccaaagaaaatgttcaaaaaacgacgtatgatggcagtcatgcggactgtgcaaaaaaaactccccctccagaagcaaggaaaaatactgctccttccatagctgatgaagttgccgaagaagcacatgaagcctagaacagaggaggcctgcttgggaccaccctatcagagattgattggattatagctgatgtggtacccgagagggaaactgacgaagcggttgctgccaaaacagtgaggaagcttcttgagagagcagtaccttttgatttaaggcacttgggtggccaatagctttcagaagaagatatgtctaaactaagagaattcgctatagcaggcggttaccagcctggattcgtgctctatggcggcgtggacaaagaaatactgggatgcattcctgatcgcgctgggtcgaaaattgtgaagcttgagagggatctcagtagatatcgaaaacaacacatcaccggcagcctggtgtact

SEQ ID NO: 161859 - DNA, 316 bp, Zea Mays
gatttggtattttatagtttttctctatttatgcaaataatcatcgtcccttaccatggagtaactattcattaaagatccgttcaaatttcttctagttaaaagctgctaggctttgaagcgttctccgcgtttctcgcatgcctgggtgatggtatcgcgacacgtctcgcggtccttcacacgtcacaggaaaactatctggagaaaccaacacacaataacacaaatcaacagtgtaggccaccctctgtctcttgtccaatccactccatttttctatcccgcacgaccgtgcttcacggacatacggatt

SEQ ID NO: 161860 - DNA, 507 bp, Zea Mays
aaggagtatgggggcaggttaagctcgaagctgtcggatattgtattgctagattttgatatgcgataaaaaccaaaccatttagtagtcaccgtgcagtcatttgcttgagcagttgtcttcacccgattagttctacatatacttgtaggaagataagccttcaacatatattggaagagtcaaagtgcaggagttcataatatttgatgaactagactagagtcaaataaacaagacagaaaagtagtaaacaaaataaagtgctgaaaaccactccaggggatgagtcaataatgaagaaaatgtaaaggaagctagagtagtaatagccttgagaacatacaaattctcctccgagaacattgatgtcagtgtagtctcgtgttttcgtgtaatatttcaaatcagctttcctacagaaggctgtccttgatgccaagtcaagttcctcaaccaagtaattggcaccctgatgcatgtaaacagcaccttcataaacctgaa

SEQ ID NO: 161861 - DNA, 788 bp, Zea Mays
tataggaacaactttaggatcaggtggagctcgatttaattggtaattgactaagacctttgtaacaagattaaagttggtttataggggaggaactttggtacagtcatcttccctggttgttgtacaataattaaagaaacaacagcccaaagttgctctgtcagaactatgtcgagctgttgaagtgttactgaaaactgaattcaagaacaggaatggtcacagtgcaatggggccgaattggaagcaccatatctttgattccattcagctttggtccagggatcctatagtaagtttgaagactgttgtttagtgaacaatctttattaatggagattaccctgttcttaacaagaatcaagagaaagggagggcgaaagggggtcagtttagtagaacactgaagatcagagcactgaaaatatctgaagaacggtggcaaagattcagggcagtgtagaattggatgtattcgagtgatttggggaagggatcggccacggggagataaccttgagtcctgtcacgattccgcgaacctagctagagcctgactgggatatttcgccggcgttcaccgtggcttggtcattccaccgccgtgtcactcgtgccttgctcctccctcactgtgtctcttccttacgtggtaaccatgcactgacaatgcaattcgtggccgtggatcgctagccggaccgtcgtgcctataaatagccccaccacccacgacgaggtactcaccacttcacagtgagctcggttgaagcacaaattcacgg

SEQ ID NO: 161862 - DNA, 2183 bp, Zea Mays
aactaacccaaaagggcaccaactagatctttcactaaagaagcgacctgatctggattcttctgttgattcctgaagatcctgttgtttctttctaaccataagctccaccaaaaataaatcagaagaccgtcgaattttttccgagattgcctactacagagccctcttaggttcctccaccaaccatacagcgactcggatgtctgatttcctctcaggaaagaacagttcccccatatcaataatctattccacacctctctactgaaagtgcaatctttgcataaatgagttaccgtctctagcgctgagttacaaagacagcaaaccggattacactgccaatgtctcttctgaaggttgtcagcagtcagcactttattatgcaaaagagtccacgcaaaaaaacgacatttaggttcagcctttgctttccaaatagggttgatattcattgtgcaataatttgttgcaaattggatcttatatgcgctgctagcgctatactcaccatcttccgtccatctccaagaaatggagtcttctagatcattcagcccgtgtgtactattgatagcctgccaaagggaaaccaattctttgatttcttctgcatcaccaaagggagagcaaagctggatccaacgattatttctcagggcctggaaagtcgaaatgttcttcctttttgctttttggaataggcttggtgcaatgttttttggtgcttgaccatggatccaactagatttccagaatactgcagttttcccattgcccaccgtcacacaagtggaagcgtagaaaagatcttcatctgttttatcacatggcagctgcaaatccacccatgctttgtctttggctttccaacgcaaccacaaccatctaagtcttaaagccctcgcaaaacgatccaggtccaggatacccaatccccctttgcactttggcaggcaagtagtagaccaattgatcaagcagtgacccccattgcatgactcaggattacttcctttccagaggaagcttcttcttatcttatcaatttttttcagtagccatttttgagccgggaagaccgtcaggtgataaataggttgtgcggataacacagatttaactaatgtctctctacctgcctttgataggagctttcctttccatcctgcgagtctgttattgattttttcaactaaaggttgcagctcaattcttttaacggttctaaagtgaagggggagacccaggtatttcccgggtaatgcagcgtatttaccggggaaggcttctacaagatttggccaaagggcctctgggtaacggatcggaaaaatttcagttttatcgaagtttatcttcagccctgaacacccttcgaaagtctctagaatcgattttagcactttgagatctgctttatccgctctaatgaacacccctgcatcgtctgcgtatagggaacagcgaagttttgcccctcttggcaggacctgccccagtaacccagccacggccgcccgctcgatcatcctgtgaagcggatccattgctaatatgaagagaaaaggtgaaaggggatccccctgtcgcaccccatgcctgtgaatgattttgtctgattgttgaccattgataataactctggaggtagatgaaccaagaattgctgcgatccaattacgccaccgcaggggaaatccccgagcttttagcacatcaagaaggtaagcccaatttagggaatcgaaagctttggatatatcaagcttaataaacagagcaggctggccgtttttatgaagtttcttgatcaccctttgaacgtataggaaattatcatgaattgaccgtttctggatgaaggcattctgggcagtggatacaatctcattcattctcagtgcaagtctgtttgccagaattttggttatgattttcatgaagctattgatgagactgattggtctaaatttgtctattgtgtcagagatctctctcttaggaagcaggatgatgtttgcctcattaactagatgtaagctcctgcattttagatgataaaaatcgttaattgctttggagaggtcgtctttaaccacatcgaagcagcatctatagaatagcccaatgaagccatccggacctggcgccttttcagcttgcaaccccataaccac

SEQ ID NO: 161863 - DNA, 1465 bp, Zea Mays
ggatcttattacaaaccgaggtgcaagatcatcatgtttggaggtttgtggtttcggtgaatatacgttgaaattagcctatacaatgatgttccgatgctcgattatgttcaagcaagatgatagaatttggaagacttgggctcctaacaaatgttgtttcttcttctggttagtggcacacaactagtgttggacaacagataggttagcaagaagagagtctatccatcctatccattgccctttatgtgatcaacaggatgacacaatcaaccactttgttggtgggctgctcctttacacgatagttttggtataatatgtataagccctttggaatgcaggacctccatcctaggcccgttgaggatgactttgattggtggtggggctacaatagtgctcgccttggtgggctgagcaagaaagtttttgactccatggttgtcttgggcttggatgctctagatgtagaggaatgcttttgtcttccaaggaacacctccaaacttggctatttctgttaggacatatcttccaaaacctcatagagatacataagctcaccaatagctgtaacagagagatttccatgcagatcagccatctaacgaaagttgggcaagacatcctttaccagcctcatgttagcaagacaaatgggcaccaaatcaaccattgatggagctaagtctttaatacatctaccatccagccacatgtccttccaaaaaaagggtattggccccatccccaatcttagtaacaacaattgtagcaaacaatttctacgctacaacacacactttaattgagaactccgaccaaggctttgtatgatcagttttttgcagtcacggccatcgaatccggaaggcccaaccaagattccatatgtcactaatccctagctcaccaatagctataatagagagatttccatgcagatcagccatctaacgaaagttgggcaagacaacctttaccaacctcatgttagcaagacgaatgggcaccaaatcaaccactgatggagctaagtatttaatacatctaccatccagccacatgtccttccaaaaaagggtactgtccccatccccaatcttagtcacaacaactgtagcaaacaatttctacactacagcacacactttaattgagaactccgaccaaggctttgaatgatcagttttttgcaggcacgaccatcgaacccggaaggctcaaccaagattccataggtcactaatccctagcccacccatctcctttggccaggttactttagaccatgccaagagacagtgaccacccttcccttcttgtctacctcgccacaaaaaattcctttgaattttatcaattgctttgatgacccaaaccggaatatccaaagccatcttagcataaatcatcttggctgttaaagaaaactgaacatggatggctctaccagccc

SEQ ID NO: 161864 - DNA, 661 bp, Zea Mays
gagaagagggccgccaccagtgatcttcgtccgtgtcggcgttccgacctcggcgtgtgtccgtcgacgtgcgttggtgcccggggaagccgatcgtgtcctccggacgggccctacgtctccacggcgcaggggaattgctcgtcgggcggcaaaaagaagcaccgcgccgcaggtcatcgcggactgcctcccctgcatcgacaaattgggtgagaaccgcacctataatttcgcgttgaactccgcgtcacgtaggctaaagtaattgagttttggaccactggatgtagtcaccggaaaagtgccccgccgtggctcgccgtcgggtgcgcggcgccgccgcggttcggttctggtttggagaagacgcctctgccgtttgatttgaacggacggtagagattagatgtgctcacccgttcagcttggacgactgctatccgtcgatcggcggatggacgccccgatttacgcacgcgtaccccccttcgctagaatttccccggatcgttagatcggaatccgagggctgcggtgagatctcggcttcattatatccgtaccgttggatttagatccaagggccgcgatcgcttaccgcttcattagaatgtcgatctgatccgggccgtccgtgtttgatctggcggcccacaac

SEQ ID NO: 161865 - DNA, 309 bp, Zea Mays
aaagttgagtttgctatagagcttcttcctggcaccgcccccatttctaaaagagcctacagagtatctggaccagagttggttgaacttaagaagcagatcgatgagctgtcagagaaaggttatataaggccaagcacctcgccttgggccgcccctatcctattcgtggagaagaaagatggcaccagaaggatgtgtatcgattatcgagctctgaatgaggtcacgatcaagaacaagtatcacttgcccagaatagaagatctgtcgaccagttgagaggagccaacgtgttttcaaagatag

SEQ ID NO: 161866 - DNA, 421 bp, Zea Mays
ctttatatgcatgatcgtgttgtttttcaattggtatatgtggtgcaatgattgtcaagtatgaagcatgtctaggttgctcgtaaaatgttatacttcttgaggcatgcattgttagattaagtcaatctttcatttgatattcaaattggtatctttatgtgatgaaagtgatagagtatgccttgaccaaggtatgttgtgatcccctctagttctgaggaagctagaatgtgcaaagtgcaagtcattcaaatacttgatgcacaacttgagggggagcacacataacttgtatctgttgaaactaactgtttcttgagcgatcttgtgtagtcttaaggtggaaaagagaagatgagcaagaaatggagcaatcaggactggggtacctctgtaagtcaaggaattggtatcttaa

SEQ ID NO: 161867 - DNA, 433 bp, Zea Mays
gatcgttatgggaatgaagaagcaggagaaagagacaacagaaattctcagatcagaggacaaagaatgcacaaaggtagagaggtgagttctgggcaactggacagagatggggaacagttgcaacagcatataccaaggatgcccttcccaaagtttggaggaacagatccagccatttggatcatacaatgtgaagattacttcaacctctaccgggtccctgattttttgaagtccactgtggcgtctctcaactttgaaggtactgcagcacgatggttgtaggtagtcaggttgaagcaagggttgggtgattggaggaaattgttgaatatgaggcaaaaggggagagtggaagaatatgtgaaggagtttgaggaagcaagatatgctactgttgttcataatcctatgatggatgaaacatttt

SEQ ID NO: 161868 - DNA, 538 bp, Zea Mays
gtcgcctcccttcggcaccgagaggggaacgctcttcaatctcatccatcgccgcctccctttccttcaacggtgccggagatggagtccgcgccaaatccgccattcaatcttcgccgtctcccttccttacgccgcgaggtgaacgggatcccctaccatcgagaaacccatacccatcctccatacacgccaccataaaccatatatatcaaggccaccaaactggagttcctctccttgcggcaaatcctccacgcgtttgtaagctctgggagtgaatcaagcgcaacaaggattgcgagctgctggtgggtactggacggcgcaacaaggcactggtcggcgcaacaagtgacgcccagactggagttcctctccttccaagccaggattgtggtcgcgcaacaaggcactggtcggcgctactaatctagtatgggaatttccctcacgccctgcattcttctgaaagtctgttattagtcccagaacacaccacatgaatacacaattttctgtccattttcttagtcac

SEQ ID NO: 161869 - DNA, 526 bp, Zea Mays
taagcgtgagcatgtcgcaccgacttaaggcgttttcgacttaagccgattgctccgttagtagggcatagtggtcaccctaaatcaagtaagcgtgagcatgtcacaccgacttaaggcgtttccgacttaagcccattgctccgttggtagggcatagtgatcaccctaagtcaagtaagcgtgagcatatcgcaccgacttaaggcttttctgacttaagccgattgctctgttggtagggcatagtgatcaccctaagtcaagtaagcgtgagcatgtcgcaccgacttaaggcgtttccgacttaagccgattgctccgttggtaggacatagtgatcaccctaagtcaagtaagcgtgagcatgtcgcaccgacttaaggcgttttcgacttaagccgattgctttgttggtagggcatagtgatcgccctaagtcaagtaagcgtgagcatgtcgcatcgacttaaggcatttctgacttaagccgattgctcctttagtagggcataatgatccccct

SEQ ID NO: 161870 - DNA, 1591 bp, Zea Mays
ggatcaccttgtctcagcccccttttaagttgaataatatcccctggaacaccattcaggagaacttgtgtagaggaggtggccaataacccactcaagatatctttccagatctgcccaaatccaagtttctgaaggacttcaagcaaaaaaggccaagagacggagtagaaggccttggtgatgtctaacttcagcagtgccctcgtctttttttgttgatgaagtaatctggcagtctattgtaccatcatgaagttgtcctgaatgaaacgacctttaataaaagcgcacttccttagggagactaaatcatgtaacttttgggacaatctgttagccatcagctcaagatatctctccagatctgcccaaatccaagtttctgaaggacttcaagcaagaaaggccaagagacggagtagaaggccttggtgatgtctaacttcagcagtgccctcgtctttttttgttgatgaagtaatctggcagtctattgtaccatcatgaagttgtcctgaatgaaacgacctttaataaaagcacacttccttagggagactaaatcatgtaacttttgggacaatctgttagccatcagctcaagatatctctccagatctgcccaaatccaagtttctgaaggacttcaagcaagaaaggccaagagacggagtagaaggccttggtgatgtctaacttcagcagtgccctcgtcttttttttgttgatgaagtaatctggcagtctattgtaccatcatgaagttgtccggaatgaaacgacctttaataaaagcgcacttccttagggagactaaatcatgtaacttttgggacaatctattagccatcagtttggtgacaagtttagcaatactgtgcactaaacttataagtcgaaaatcttttacctctttggcaccttccttcttaggtatgagagttacataagctgtatttagcctaccaaattgcccaaatttcctgctcgaaattgcagaaattacagccatcaaatcctctctgatgattggccagcacactttataaaacctttctgtgtacccatctggtcctggcgccttatctgatggtaactgctttataatttcaaaaacctccttttcagacattggtgcatccaaatcagccaagtcatgagtgggtaatcccaagtagtccaggtcaactgttatggatctgtccaccctgctgcccaaaagcttatggtaaaaatcatccaccactttgacctcatcatgatcagtgtatgtgccactacccgagacaagtttgacaataagattattccttttttctgtatctagcatgcatatggaagagcttggtgttggcatccccatcctttagccaattgattcttgatctaattcgggcaatggtgcgcttgagggaagcaagggctagtgaatgcttcttaagacccctcataagccattcctccaatggggacatgattcacatatcttgagcaacttcgagttgatgtaggatttctcttgcaagtgccaactgggaagccacatgaccactcatctcctaccacaacccatggatcatgacatgca

SEQ ID NO: 161871 - DNA, 911 bp, Zea Mays
ctcagtttggagctccgcgtctgcctcatccggtgactccgtggggttcttctgttaacttcactccaggagcttcctcttctgtgggtatttccggagcatatgtgctaccctctgcggatgtcagagagcaaggagacgtggtgacaggtacgatctcagttgattcgtttgtggcccatgctctttttgactcaggcgctagctattcatttgtttcagagaattttgtgtcgcgggctggtcttttggtgcagaggatgggtcacccaattgtggttagttctgctaatggctccattagtagctgttcagtatgtcagggttgctccgtcattcttgctgatgaggtcttttcatctaatcttgtggtgatttccttgggggcatttgatgttatcttgggtatggattggttatctcagtatcacgcaattatatcctgtttttggaagatagtgtttttgcaggcgctgtcgggtagggaggtggtattcttgggaagttctccaaagttcacgttatccttgttgtcgcaattgctttcggagcgtcggtcaaggaagtcgggagtctttttctccatggtggtggatagtgaggctgctttgcgggtgcaagacatccgtgtggcgtgtgattatgccgacgtgtttctagcagagcttccaggcattccactggagtgcgatgcgacttttgaaattaaactgattccgggtacgcagcctattcataaggccccgtatcggatggctccaaaggagcaggttgaattgaagaggcaattggatgatctgctggctaagggtttcataaggcctagcaggtcggcatgggcttccccagtattgtttgttgagaagaaggataaaagcaagaggttatgtgtggattatcgtgctttgaat

SEQ ID NO: 161872 - DNA, 320 bp, Zea Mays
tgaggttatgtgcccccacacacttggctatgcttgcgagggcgttatgtacttggcctggtgtatgttgttatgctgtgctggtgcgcatatagtcggtcttggcacggacagtttggtgtggtcgtttttgcctttgttatgcttcgtccggctgtgccctcgggcaacttctgcgcggatggtctttgcagtagacttcggtttttcgcacttgctgtgctagtccggctgcacccttaggcgacttctgcgcggatagtcttcgcggtagacttagtttttctcgcacttgttgtgctagtccggctgcacccttg

SEQ ID NO: 161873 - DNA, 432 bp, Zea Mays
gacgacaccagatggccccgggattccgtgcacgctcggtaccgccacaagaccgcaagaccacgcaaggactccgcccctcgattgctcgaccccctactgtacggcgaggaaaggttcacgacggcgctggagtttcacgggggcaccaggtagagggatggcggccctgacccgcggtcatatagggctgactggttcggttattgggagcgcgatgcccggagatctcgcgcagtcagttgagctcaagctgcaggccatggcgctacagaggctgacaaaacggccccgcgtaccagaaactcggccccgtgtagacgtgggagaaaacgcgctgacgagtaggccccattggtcagcgcatcagggcagatgtggcaaattgggccgcgcaagggaaaatgttatggtgggccgaatagagtgtcg

SEQ ID NO: 161874 - DNA, 811 bp, Zea Mays
ggcaaagctccgacgagctagagtggccggagggagccaagactggtgaccccaaacagctaacaccgaattagaccttccccgatcaattcccgcaacttaatttcatggttggtagtctatcaagctctgtccatgcggaccacggacgatgaggataattgcgcacattcccggtgaccagtggtttcccagttcaattaggtagtttggcgagtatcacatacgtatgggagtgcttaaacaagggagcagagggaaggagctaacctgaattgggctggccacgacgaggtgtgttttacggtggcggaaaccgaattgggggaaattagaaatttgtgagctctggtgatcaattaagagtgggagcgggtgcttcggcttcgtgattacatggcgcaatagacccggccatcaatttatagggttgttaagcggtggctgatgaatttggggcgagacgcgtggtggtcggaggagaggagtttactggcgcgcgtgattgatggccaaccccgtgtcatccacttcggtgatcatcaaacaggcaacgcacggttaactgcgacgtggtaaagcgtcaggacacgcggcggatgacggtggtggctcaacggtggtgagaatctcatccaagggatcggtgaacaaggggagaggcacggcggctagctggagtggcgtctagctcaccgacggcgacacctttcaccctacgacgttatctatccactccgagcacgaatcgggacattgacggcacgaatcgcggtggagggatcattggcggtgagagttctgtgctggc

SEQ ID NO: 161875 - DNA, 665 bp, Zea Mays
gccgtccagcaggttgccaatcaccagcccagccgacgcaatagtccatttgagtaggggagccactaggctaggtgccacaccaccaacagctgcctgatgacagagggaggtagacgcacccaccgccacttgatacagagggagggaggggtgccaccaccacatgtgagagagggctagaggggagcttgctgcaccacgtcctgcatgtagccgcctggtgaaaaagcgagagggtgacgccgctggttaatccagtcgttcctccagccagatccacccttgtctaggtcagatccaccctcccccaacctagatcaaggtatatagctcaagcttgcccctccattggaccgttcaagctcgccactgaaaaaggaaatccaaactcgccaccccaccacctgtccgcagtcagcccgaggaaggagagcaaggcgctagtgtggaaggagagcaattgctcgatctcaagccccccgtttgattggctacgactcgttcccaagtacctgtccccatcctacttcatgtagggcccctctcttccttagatcgtctgctgctcattcgcgagtgcttgtccccatcttacttcatgtagggccgctctcttccttggattggctgtctccaccgttcttagtgccaatagagacccc

SEQ ID NO: 161876 - DNA, 678 bp, Zea Mays
gtggattcaagaagtgttgaactcttacactacaaacaatgaggcacaagagttgttagccaagttaagcgttcagagtcctgacgaaatgggatatcagttgcaacgaggattgatcaggaagggcaatctgatatgcgtgggcaagaatacagcgctcaggacgaagatagtggcagctatgcatgatagtgtgttggggggtcactcaggcctacatgctacttatcatcggctgaagaaattgttcttttggagaagtatgaagggggatgtgcagtcttacatttagcagtgcatcatctgtcaaaaggataaatgtgaaagacttcatccaaccagtttactacagcctctactagtacctcaaggtgtctggcaggatcttactatggacttcatcgagaaattacctaagtcagaaggatatgacacaatcatggtggtggttgatcgtttctcgaagtatgcgcactttatgcctttgaaacatcctttctcggctccatttggatcaggtggtgaaattacatggccttcccaagtctattgtgagtgatagggacaaaatcttcactagttctttttgtactcaactcttcaagttactgggtcctcaactcaatctgagtacaacctatcacccacagacggatgggcaaagtgaaagggtaaatc

SEQ ID NO: 161877 - DNA, 317 bp, Zea Mays
ttcagcaacgtcgtgcatgtggacgtatataatattattttgtactgtagatgtatagtttacagagtgaagtttgatataagaagtaagataaaagagtggaatagggagactgttggagataatctaaccgtgtttcgtagcgcaaaggttccggcatgatttctttcctctttgactagctatgctatgcgttataacaagcttggaaatttaggcctactcacatgagacaggacaacagaatttgaccttcacgtccgtggagtgctcagcgaggctgacatggatggcccgcttgcaggtgtgtacggtca

SEQ ID NO: 161878 - DNA, 489 bp, Zea Mays
gctgaaggacacatcatgccaaaatcatggtttcctaatccatcattagccttcgcatccgggcggctgggttgcttgcgcttaggatttgtgagtatgcccaccatctcagcgttgatgcttaattgcttgggggcctcaccccccgtttcaagctatgcagactcagaggactccctagccaacatgccaagaatggcctctatcacaaaatcattagtaggttgttgaatcatgatatgagtttgcatctcttcatcagacaaactctggtaagcagtggctatggcatcaatctcctccatggacagccatgctttactgctggagctactgcattccccacgccgaggagggtcatacacaaactcagaaaaaggcctttgtaacaaaaaaaccagcaccatcaatatagatcgccgaataaactagcatatgacaaattcagggttaactaatcataacttatagcaggaggaagactccatg

SEQ ID NO: 161879 - DNA, 275 bp, Zea Mays
gctgaggcgggcgctgattctgcttgaactgctgatgtgggtggcctaagaaacgggggcggtggcggcaactgctgctgaggtgcctcatcttgtggtgcttgctgttcctcctaagcacgccttcctcctctgcgtctgttgtctgacatctgcggaatataatcacacatcagaactgatcttgcaaatcttgcagcataagaaaagagtatggaattcttccacaatactgaacaggtaagcatcttcactgagtcccaacacaggcaaac

SEQ ID NO: 161880 - DNA, 497 bp, Zea Mays
caaataatggcgacagtgccgagttggatttaattacaagaggacacgtacggactgatcgacctctctcgatgatcgagaacgaaagttgaaagaagaagaaaaaaaagaaggcattggagtgagtcgaccgaccctcataagccgggaattgaaagcgaagcttgtagcaagctagcactagtagctaggccagcactggaaaggaagccgcgcggggatgcaagatgctagtatacgtaccgaacaaaaggtttcagctgcctcaaaagcaaaagggaaatgcacgcacgctccaccatgccatgcatgcagctgacacactactaatcccccacacgcacggcacggtgttgttgttaacacaagataaacgtagcggggtagctaggctaggttccctatctgattggctagagcacttactcgtactcccccaccatatgatataccctgctcatcgactaactcgagtagactagagaaagaaaagggct

SEQ ID NO: 161881 - DNA, 413 bp, Zea Mays
gccaaattgttgcagctgtcgcattccgatatatacttagcaatttccctcttcattcgggtccaccagtacaaatatctgagatcatgatacatcttgttactgccggggtgcatggagaatttggaaagatgagcttcatccaatattttctttctgagctcgggatttttaggaacaaccaatcggtctccaaaccatagaattcctttgatgtcctgatggaaacatttgtatttgtccatcttctgtttgatcatttccttaatgacttgaacacctttgtcaccaatctgtgccatgactatttgctcatgtaaggtgggctccactaaaatataacttaaagcaccggaagcaacgacttccatgttcagcttgcacaactcatcacacagggtggtgattcttgc

SEQ ID NO: 161882 - DNA, 478 bp, Zea Mays
gaacgatcccttggggcacatgatgttctcggaaagcggcttcaaattttgcccaggtagcatctctgacggcagcgctgaaggtatcccaccaggatagggccatcccggaaagttgatgagtagccaggtgaacacactggttctcagggcatccgatggcttctaacttcctttttattgtgcgtagccagtcatcagcgtcaagcagattgctggatccagcgaatgtgggaggcttgagtcttagaaaatctcccatcctgtcctgaggccttccaccattcgggcgctggttctcaaggcttctggtgaggacttcgatgagtcgggtttggttggccagaacttgagctaaatctaatggcagctccggaggtgcggggaggtgggtctcactcccttctccaccggcttcttcttcagctcctagggggaaccttgctccaatcctggaggtggtaagcgtggttttatc

SEQ ID NO: 161883 - DNA, 660 bp, Zea Mays
atgaatttgaccaaaaccagatttgagtttagatatttgaactaaaataaaatacaaaatacaaaatagaaatgaaaatataaataagaaaaaaatgaagagaacttgctggacgacccatcatactatatagagccagcccatgtctctttccattttttaatatttcttgccgcgtgtgatatcagcgttacacaagcatgacatcaagcaagcaaatcacgtcgttctgttcacaatgcatggggctggcatatgggattcagtattcagctatccttcacaggagagttcaccacgtgaacttagtcgctatcagtggatcctctctgttagtcattgttttaggcatttgcacgagctctttattttttttgtcgctggttagttgccccggccggacgatctccacggagcatgggctccaccgtatacgagccgtagctttgggtcaactccgcgcaaacacacgcgtatgatggcactgatgagtgggtcccttgccagctgacctcgctacagtcttctagaagcaagccatgcgcatctataacaaacttgcaactgcttccgtcgttcgcgggagtcactagattttcctggccttgtataaagagaggagagaagaacgtccacagggagccgcctagtcatcaccgg

SEQ ID NO: 161884 - DNA, 568 bp, Zea Mays
ctcaacttaatcgccggtaccagcccacgtgcgacggaagaaatggcaacgttgtcggcctcctcgacaatcgtctccgtatcgacaatgacatccccgatggagactccatccacggtaacgacaacctccattgcgctcattctatcttcttctaccatggtcactcgtgtcatgtccttctcaacctccattgacagcactgctattgcaagtcagcgccttgtggcctccggcgacggctcctgcgatcgtgtggggggatagctgggctctcacgatcaggcccaacgaggaagatgagtcccagatgtgcgcgaaagacggcggcagatagtttggcggcagagaaaagggcaagcgggagatggggctgaggtgagcagcgcgactacgtatggagccgaagtcgagcgagtcgtggagccaagcaatgaggctaagcgatgtaagccatacaataaaaaaaatagccacccgtatgcatctgaagcaaggtccgctcatctaagaccttacggacctaccgtccataattttcttccatccatagcggggtttccctatt

SEQ ID NO: 161885 - DNA, 674 bp, Zea Mays
gggcgaaggattccatgtgcgcatagtgcgtgtcctagattgccaaccactggcatgccatcactgtgaccctccgtacaactgaccctgcggttgcgacagtggtccttgacaagatgcgcaggtgcatctcatggattgatgttggactggtcaccaatgatgtgttcattcctctactctttaacattgtgatgccacctggaagcatgcctcaacttgctactacaacggtggggtgcctttctattgtggaatcaaagaggatggatcaatggcgaaggtggaattgttgaggtcactcctggatgcatagctggggcttggtagcccagagccccagatagtgggttgaagatgacacccctggtgacaacatacactatcgaggctctagaatgtcattgcggtgcgtcatgtgtgtcgtcgctgctactacaagagcatcctactaacctatgtcaagtcccttgtgcttcttgcaccgttgttcgactatgacctttcccttgtcagacctagacatatgtgttggctcctgattctcatccccaacagatggggtggatctaaacacttggtgtgagccataactgacacaaagttgtacaatcaatactcccctgaaacactatccctaaccaagactccgagaaccaccaacaactctacca

SEQ ID NO: 161886 - DNA, 706 bp, Zea Mays
gtgcgacctgtcaaattttacatcgatgcagttatataaggggtttggtttgtaggggaccctataacaatttgttcttgtgcctacactctgctgctataagctctatctttgaagctattcttggctttaattgcactttacacctttaaatcacccctatgggattgtaatcgtctatccttgtattgttcatgtgagaccctccaaaatggtccatatcaagatgattgctagagcttcaactctcacttcctccaaagccctgcaacacgatgatgctagtagcatggaggaaaagtgagaccgctatcgaagctgtcgaattgaaggaagagataacaagtgaagtaactccgaccagatgagaccaaatgtattgaaaataagtctaatgtctaaggatgatgacgatggtggttttgatgaggaggatggcgaataccttcatttgtagggatgaaaatggaatggatacaactggatacagggtcatcccgtatcataccctaatgtatttctttcggatacgggacccgtatcataccctaatgtatttctttcggatacgggaccggttacgtgtagttaagatttgggacggatacaggacaggaccgggtaataatccggacgggtaagaaacgaataacggatactactcgggtaggtaccggataattgtcgggtagttcgtccgatgata

SEQ ID NO: 161887 - DNA, 606 bp, Zea Mays
aacgtagctagggatcttgtgagctcggcaaggactccttaccaaagatcgcgtgacacagaggtccaatgccgacgtcttgcggcatgacggtgatttcccagccctggcgagcaatcccgcatgcaccaatctcacgtagccaccaggcctttccccgcaatgtccgtcgtgtcacctcggtcacctagggtactccacaaacggatataggaaggagacgttgatttctagtggtgggttgacttctggatcgcctcgcaaccgaggggtccgactacggagggagcgggagatgggatgatcaagggggatgcacgagtcaggcccaagtgtctcggcttttaaccccgagcgtggaagaggtcgacccgattccccaggcagcatagcgcgaggtggttggaaccgctcgtccgcaagatgaggacgatcctgacaagaaggttccacttgtaagcgaccagcactacttccaccggacgactcacgtggaatcggtagctgacgagtgggtcccactctgcagtggcacagggtgcgtgctcacaccatcagccccggccctgggtccacctatcggcacgggagtgtgcaacatcaggc

SEQ ID NO: 161888 - DNA, 547 bp, Zea Mays
gccggagagcaaaatccccactcaattttctagttttggtaaaccttttatcttatttactgtagctagaaaggctcctatgtttaggccccactggagcattgcaagaggtgaccttatgctgtggaggtgtaggtgtcagaagatgaaactcgtggatagggagaggctactggttacttgtactcggcgcctataatttgtagtagtcgtatatgagccaacattttcaatggctaaatatatagtccctgctgaatttgaagagagcaacttgtctaggtatccatccatcatatcacatcacatcacatccaattcccaaggaacctaacggctaacatgcatcgcataatcctttctatttttaaaactgaagaggtcgttcttcagcatgggaaacgattttgttaggaattctttatcatatccaaagccagaggaacatatatagctgaaaatctgcagtagccgaacatcactaatttggggcaaaacgaaaccatacgtaccccttggattttaatttacctcaaaaaaaacgacg

SEQ ID NO: 161889 - DNA, 657 bp, Zea Mays
tgccaacacagcacatacaggcaagcacctacctccggactacgatcaaccaatcacaggccaaaatgccacagcggagagagaactagagtagaagtgtatggactctatatatggcgtactctctgtcttgtctgcgtttagagtggcagttgaggtgctccgctgcaggagttttttactccatacgtagctgtatcagcatagcgcattggtttagagctcccactgcggacagcctaaaatatcactatctaaacctactcatcatttattaccatttttttcatctattaaaatctcacccaacgaacaagcagtggtaggggacgtcacggcctcacgctatctgcagcgtgctcctgttctttcccctgcgtagagggccttcctgggggaagcgctgcacacgcaggagcgcgtctgtagcctgcatgcgagcggagggggaggccgcgcggctactgctgcgctcagcctcacggacgagagcgtatcgtcagcgtgatgcgagaacgcttgtgggagtgcgatatggggtttttgttttctcactggaacgggcgattctcccgggatacatggtacaccgtacgaggacgggattgtttagatgacctttatatatattgactcgataatcatgattactccctg

SEQ ID NO: 161890 - DNA, 487 bp, Zea Mays
ccattgggggctttgcctaggatttctctgtctctctcgttgttcgtgtccagaaggtaggtaagattcatgagacccatcactggccttttaggggttagtcgattgctgtaagtagagggtatcttcactctatccttaatcgactttgtctggcgctatttcgttctccatggactgtatcctatcagaaagctgcccaacccgagtccttcggggggaccccttggctaatcatggatcgtggcaagtgtcctgcctcggagtgtcctcaccaagaccagttcaaaagtcgctcaatgctgaatggcttggtggtttctgaaggctttctaacccttccctcttttgttactttccgaggatttcgtcttcccccatggcttccccggacgaggagtcaagggctgaccctcgaggtggcggacatgagccttcccccgtggttacacatcctgcgctctggctttgatcggtcaccccctcc

SEQ ID NO: 161891 - DNA, 721 bp, Zea Mays
tggttcgggtagacaaaggctgcttgaaagggaaagatggagttgtggcggctagaaaagaaaaattgaggtgaaaggtaagatgaaggcattgaggggttcgaaggcctcgaggtgttttgttgaggagttggcggagacgtgcgctagacctagggaggtcatgattttccccgacctccaggaatcatcttcgtgaatgctgagggtgaccaggggtgagtggcataaaaaagaccttgtttcctaggccgccggtgaagattacttgacgtcccgtttggctcacgagtttaaattctatccttatggaagaaatgttggtgttgttatgtcggtagtgatggaaaagcatcgttaagctgcggaagaagcggaaggcccttcttgggctggtggatgcccgttgtgacgcgaaggcgtcgcgtcccaatgcgaaggggcttaccgcagctgctgccatgccccctccagaagtgcctgcagcggcagccaggagggtgcctgcaccaccgcgggctattcaggtggcaggggcggaggagactaaagaggcctactaggagttgtccatggacgactacctggtaggtgatgttgtcatgttcaatgcccaaatgtggatgccgcctagcgatgagtggggttattgttgtatggattttgtacgatgatatatgttcttgtgttattctatatcacggctgtagggactgagtct

SEQ ID NO: 161892 - DNA, 477 bp, Zea Mays
cagccacaacatcaacaaaaaactgtgtgaagtttgaacagatataaaaaaactcggccgctcccggtattataagtttgaacagatatggtagaaggatacaattaaatggaaacaacagtgcaagtgcttatagatacagttggagaaggtaagataataaactcaagtctgaaccataccatgtgtctaaagatattaaacaggaccgctaaagctagtttggaagtagtttattcttcactttagccagtgcaaatgaaggatcaaaacaaagcaactgctatgcaaaatataccaactaggaaacgaagattcattagaatcactgcatcatcatccatcaagttataagaactaaaacaaaagtgactgcagaaagacaatagtatgtgcacatcaggacttctacaaataaaatcttcataatccaaagatgacatagaaagaacatttataatgtttatttagtgtgta

SEQ ID NO: 161893 - DNA, 709 bp, Zea Mays
gagcaaacaagggcgaggccagtaaggaaatgtcttaaaaaagaaatgcaacccactcagattttcagcctatagaattatagatggataaatctggtggaggaggctgaaggctcaatgtccactgaccatgaatcggaagggagaaaacttgccatcgtccactgaccatgaactgcaactaaacaaaaatcggaagggagaaaataagtgaagtgctcaccagatcgaagacatcctagaagctccacgtcttcttgccgtcgtcgtacaccgttcaagggcaagttcttcagcgtctgcaacctggcgacagaggatgagagagatggcgatggcacggacagcgggtgacaaagcagaggcgaggacgagagaaacaacaacctggggccatgaatgagagatgtggtgacggctggacggtggctgagggcggcgacggtgatgtgtgagggaggcgacgaatgcaacgcagaggacgtcgcgggccacacaaaatcggtcgtcagaggagtgggaccctacccccgtcaaaactgccgatacacgggcccagcaatcctacgaacaggcatcccaaacacgcatacgaagatctcgtgttgtctgtgaccgtgggctacctatcccctgaaaaccgtccggtttgtttgttcccaaacgaggccctagtgtgtggtttacaatctccttaattttcatatta

SEQ ID NO: 161894 - DNA, 478 bp, Zea Mays
ggcgactacagtacaaatttatatcacggtgggtagcgggtataagagcatctccaagagatcatgtaaaccaactctaaaaatgtttttaggaaagagaatatattttaagtcctccaaccattctctcttcttgtcttcgtattcttcgcatcccgcatccgctgcttgttgccccgcaaatttgcgtgtcgcgaagccttccccaattgcccatatcacgcgcaactaaccgactccggtgcaatgccagccgccaggtacacgtatccatctgatggcaaggacacaagtacggatgcaagtatagcaaccagcccaattagcacatggcgtggcccacattaaaatattagggcttatttattaggagtctgttgtgggtttaactttttttaggaatcttatttttaacaacagcgctaataagacgctttggggaagaaaatttaagtgtccttttggagctgctctaagt

SEQ ID NO: 161895 - DNA, 530 bp, Zea Mays
acgagacgctgctcgagataactccagcccggcatcaggcacatcagcacaaatatccatcattccaccatctgcaggctctgataacagatcttctgggaccatgtcttcaagagtttgatcaaagtttgccagagacaattcttgtagaccaatgagggcagacaaagctggagaaggaacaccactactttccccgctggctatgtagcgtcggctgttcttccgaactagagggatttcatcctcctcttcctcttcatcaacaatgtggacggtacacccattggggtcagctttggccggatcacacccattggggtcagcatcatctaagtcacacccattggggtcagcatcagtcgggtcacacccattggggtcagcttcagcaaaaactggcactggcacttcctcagcagcaggagcagaaggaccagcatcctgatccaagcatgacactcggtgaagacgtctctttttctttttcttcccctcagcaggagaagttggttgattggctcagcgag

SEQ ID NO: 161896 - DNA, 610 bp, Zea Mays
agcacagcgccgccgcactagagcatcatgacgaggccagggctactacgactgcgcgcgccaacgacggatctactctccctccctcacctatttctctcgcgttttccctccgacgctttcttcttctctcaatccagtggcgtatgggaattcgtgaactggagctaatctaagtgcgactcacgcggagggcaatgcggcatccatttgaagcccacgatcaaagtccccgccaatatcgtgccgacggcaaggacctatctgaccgggttttgcgctcatttagttaagacgacggttactgggcacctaatttgttgccgagaaagcaggggaagaaggatcagtcgaaggcacgtgagctatgcacatcgtctgttgcgaacaaccagcggggagaacggcgggttctgtttcgtctgcgcgtgcgggtaggaaggagaaggagctgaccgggggccccgctgttcagtggctaacagaagaggcacgcgatggggtggctgccgcgtggggtaggggtgtcggcgctggttttccatcccgggccgcgcgcaaggaaatggacagtgggctcaaaatgctttcctggcccaagtggcggctc

SEQ ID NO: 161897 - DNA, 520 bp, Zea Mays
accaaggcagttttcgcctctgtctaccacccacagtccaacggtgtcgtcgaacgcgccaacgataagatcttcagtgctatcaagaaaaggctcctcgacgacaaaaagggcaaatgggcagaccaactacccgaagtcatatgggcgctgaacacaacagaatgtcgagcaaccgggttcacacccttccacctgatgtacggatccgaggcaatgacaccgcaagagttaaagcacggatccccacgaacaaaccaattagccacccttgacatagacgaatcaacttccaaagatcttatcgacggagaccgtgtccccatcttgcaggccctgaacaagtatcaagcttagactaaggcatggcgtgacaacagtgttgtcccaagagaattcaacgaaggggacttagtactcacaaggatcaccagaacagagtcccggggcaagctagagccaaagtgggaagagccatacatagtcaagacaaaagcatcgccaaacgcttacatgctag

SEQ ID NO: 161898 - DNA, 355 bp, Zea Mays
aaaataactagtttattttggtcgacatggtatcaagctaccgaaaataagggccatattttcggtggcctattacaaccaccgaaaattagcagtataaatctctgatgcggatgtgcctgccttccttgcttcctatctcacacactcgtccacatcccttgcttcctatcgcacacactcgtccacatctctcgctcatctggtgctcaccgttgtcttgtttgtcgcttggtgctcgacgttggccgcccttgcccgttgcgctgcacgcctccactcccctacacccaattgtgcaccatagctcattcatgcccaccttgtttttcatcgttgtccctgtccggcacca

SEQ ID NO: 161899 - DNA, 619 bp, Zea Mays
gcggtctaaataatgattcaacaagcatgcatagagaaactgatcataaaaaaatcaaactaccatacaacgttggcaaataaaaaaatataaaacggattgtcaatatcgtccacatgactagcctgcaacaactaaaaattatgcatagcctttatggctattgaaacaagccatagaaggaaaacatgcacggcataaaatccacttgaaaccaccctatttattttttaaaaataaggttgcacataataagaaaacccatcaggtaaacatggttggacttatcaatctacgtcatcttacaaattcacttgagttctaccaatctcaagatttcatagacattacaacgttgcctttgctctatagagacaaaccaattttatactaagatcaagttagcaagtagccacactagccaaaaaaaggtgaggcgcaaagcattgcacccacggaaatattacattattaagttgggttgtaacccaacagttttatactaagatcaagttagcaagtagccacactagccaaaaaaaggtgaggcgcaaaccaattttatactaaaatcactatttcatctttctgtggctttggaatagtttcttctccaccg

SEQ ID NO: 161900 - DNA, 1031 bp, Zea Mays
cgcgcgctcgcctgactatctgcacacgcgcgctttgtctcactgctccacgggtcccgctcgtcagggcgcaatctccctcttcgcaacggcgtccgcagccgtcgccgccattgccgggagcagggacgacctcttcccatcttcccgacctggactctaggagataaaagggaatccccgtgacccgttcctcctcccactaccttctcgcgcaagcctagtctccctgaacaaattagcgccaccattgtcgagcccacgggtgtgtgggatccaccgttgttgaccggccgattcaccggcgtgtgtgccctgggtaccaatctggtgcggttgcggcgtcgttccggtggtggccacgaactccccagcccctggactagcgctgcctcacctgaattgctcgccggtgcccaagtttcgtcccgggccgcaccatagcgtggacaggtgtctactggtagccattcttcccggtaagtctccgtgcgcgttcgccttttcctcccctttaattagtgcgaagtgcgttcgcagtggggtagtagaaagcggggtcgaagctagcggcgatggcgccgtcgcgttctgcgcgcgccgccgtggggaagctcggctgcaggcggaggatagagaacgattcctggccgttgatctgattgtgggtggcctagattagaaggtagttaccccctttgttcaatggaaccgtgaccgtagatctgtgcttcgatggatgagagcgtgcatgggtattttaaatccggaccgtagacagggatccaacggctgcgatctagtttctgtttgatgcgcgcttgatctatttagaaccgttcgatgataatctggcggcccgaacttcgccataacctttcgcgctggtagttttgctaaagagtccccgaggaattcaccaatcaacccgtcatcaagtggaactattccctgagtctaggttatcttgcactgagacccctgagttttccaggaattgacgcccgatccggagcccgtttaaaatgtat

SEQ ID NO: 161901 - DNA, 435 bp, Zea Mays
cttggaggtgctcggggaaggaggacggtttccgaccgtcaatgcgcgatgtgcggctcagatcgactctggcgtagcgattgggctggatcaggccaaggtgaatgctgatcgttcgatcgcgatcgggcgagccgtggcgattgcaggtgtttttaaatccaagccgtagaattctaatcgggtgattcctattgattaccggttcataccccttcaccatctaatctcatccgctgtaattcgatcgtgcggctaggattgatggtcatagcttcagccgagcgcttttacaaatagaacctccagattaaagagtatcaacccgccgtcctgcgggtattgtgcactgtgtcttggagaagttaccccgaggcccctgcctttctcagtattaatgcgcccaatccagagttcataggaaatggataaatg

SEQ ID NO: 161902 - DNA, 379 bp, Zea Mays
cgaaggggtaagcacgggcgcgatcccaagcattcaactagcatcagacggtcggggcttaatggtttcttgatctaatcttgaccgtccatccatagatgaacggcgcaggggctttcttcctcccacacccgtgaagcagcggcgcccagcttcatggcggcggccttcccgccgatggcagtccgcccggcgcaccggtccccatccaaccaaattgtagcacgcgacgcatagagaatggcatggagaacaagagtaggggtatctcaccggctatcacacagtcggatcggctgtcaacggagaagagcggatctgcggcggcatcagactaacggcgaggaattgtggcgtcgatggcccacaatcgcacccg

SEQ ID NO: 161903 - DNA, 1438 bp, Zea Mays
gccgaattcaggagacaaaatttgaagacatgacctcagataaatagcgtctaaagccatcaaaatatctcccttgatgatactctagcaagatttatagaagtggtcagtaaagccatctggccctggcgccttgtccattggcatgtcttttatagttgcccatagctccgcttccatgaaaggagcatctagttgagagagctcaatctgctgtatacccaattctgcaaggtcaacggtataaattggttcttcagctttccccagcaggttttcataaaagtctagcacaactgcttgcttgtcctcttgggaaactgctatctgatcaccaacattaagcttgggtatgaaattcttcttcctgaaccttgcttgctgatggaagaaggctgtattagcatcgccgtcttggagatagaggatacaggaccgcaagcgggcaatggttctttcaagggaggccaggccaaggcagtgtagtttaagcttcctccgcagccactcctgttcagagagatcccttgaatcacgctcaatttccagtcgatgtaagatttctttggccatttccatctgaactttgatgttgcccaccttcctctgaccccatttctgcagccctttactgagcctttgcaatttcagaaataggcgctcaactgcacaatttgaagacacaggagcttcctaattctgcttcaccgcatccaagaagcccggtattttggtccaaaaactttcaaaatggaaccgacgcttaccagcagtcttcactttgaggccaagtatgagggggtagtggtcagacactcctgctgtcatgctttgcagaattgactccggaaataaaccatcccaatcaacacagcaaaaggctctgtccagcctaaccaaagtacgggtctacgggactgccgctcattagaccaagtgtatttccttccaagcagggggatctccttgacctccatatcattcaagaagcgtctgaaacttgccatcatcgctgtatccaggtttgcattgtttttgtcagcagcctgatagatgagattaaagtcacctgctactagccaagggccactgtagatcgccctgatatccctgagttcctgcaggaaggacactttctcatcgtctccctgtggtccataaactccagtgaacttccggccttcttgctcagcaaattgaatttcgttcatcctcgtgaagtttcataaactgtcaatgaatgtggcttgaaattcgtccacatgtagccatttttgtgtccaagataacggtcatctgatgacccttatttcataaaggtttcgccaaacatgattgcctctgtgtttattctaatctaattacagtataccgaatcctttatgtgcatgctgacactgacatacattgaatcttctgtaactggttactttctttt

SEQ ID NO: 161904 - DNA, 728 bp, Zea Mays
gcagtttactcggggtcacaagtgtgcagatacggtccagctccagtttgtggaggaattatggcaaacctgggacctgccagcttccgagggtacggatgaaaattcccatgctgaattacataatctgctgttgtctcaagctgcaaggggtggttcgccagcaaccaaaaccatgaaattctatggttccattcagggtatcaacatcctcattttactggattcgggcagctcccatacttttattagttcttcagttgcagctcaacttcaaggctgtaccacagtaaacaccagcttgctagtccaaatagctaatggatcacgccttatttgtgctctggaactagtgtaggccgaatggttcatgaatgactaccagtttcagtccaccctcaaggtcctacccttgtcgtgttatgatatgattgtcggcatggattggcttgaacaccatagccccatgctggttcactgggcagacaaatggctcacagtgccatacaagggttccacaatcaagttgatcggtttgcaaccaggtgacatccaatgctctgtcatgcagttatgtcccattgaagtactgtctgataaggaccagtcaatcatccaacttttacctcctcagctgcaacagcttctcgagaattacatccatgtgttcactgtgccccacggcttacctcccattcgtgattgtgatcatcacattccacttattc

SEQ ID NO: 161905 - DNA, 348 bp, Zea Mays
cgaaggggtatcttcaaatcgaagccctacgatcgcagatggacgtggcagattagctccgagccacggtgaatcggtatccgaacacaaccatccgatctgcagcgaacgtcctagatttaaagcaaccagatccaatcgcgcacgcccgatcacaaacggacgcctcagatcgatcctacgaaccggtacacacgcgatctaatcggagccgcacctggaggatcccacggtcagccataactccccccaatacccactcccgactgtcggacctgagcggcgccgccacgattccacggtggcgcgcacaccggagtttcccccaatcacgcaccagagcccccg

SEQ ID NO: 161906 - DNA, 898 bp, Zea Mays
ggccagggaagtcagcgacctagggacaatgcggactgaccggctgggcccagctgcagggtgcggttgaggggcggatccgagcggccggatcccaatcggatagttaggattagatttagttatataaagcatgatcgtaagatctaggatagacgtatgagatcagacgaccaatcctggtcggctctccctggctaccagcggcaacctcgcccgactccacgaaaaaacctcgccagaggcgcgagcgtggccacgccgggggtcctggggcgctgggaagggcatgggaaagttcgggatgacacggtggacgcggtcgtgggcacgacaccagtgcaaaggcactagagggtggaggtctgtggcctagtggaatagtggcggcacatccttgctccgacgagcaattgcgcacgcacagcgacagggaatgggaaatcagaggcatggggagcttggttaccttgagagagggctctgaggcgcttgaacgacggcagggacacgacgaagcctcaggtcgacgacggcggccttcggctgcacgatggaggtccggtgagtgcgagcagtgaaagacagagggggaaggggcaaaccgaggggtgtcccaagttgctggcatcaaggcggagatcaccgaggcaacggacacgacagggactcgacggtggccgcgaaacaggtctaaaaccatggtgtacaacgatgaagctccctgggtgcgcgcgcggtgcgaggcgagtgtgggggtgctgcgagtgcgcgaatgcgggaggaggagagcgagtggggtactgggcagctagaaaaggtgggcgcagcctcggcgtgtgtcgtgggcgtggagtccacagcgacgtgtgggcggttcgagagggatggatctgac

SEQ ID NO: 161907 - DNA, 355 bp, Zea Mays
gagccaacgggatgatactggaggcgctcaagaaaaaggtcttcgataaaaatgaaaaattcgcaggaaaatggataagggaattgccctatgtcgtctggagcctaagaacccaacctagccgagctctgcagggaaatactcctttcttcatggtctatgggtcggaggcagtgttacccgctgatctcaaattcggggcgccaaggttgatcttcgaaaacatagcagaagtcgaagccactagactagaagacattgatatactcgaggaagaacggctgaatgcggtaatccaatcagcacggtaccagcagactctaaggcgctatcatgacaaggccgtgcgacagca

SEQ ID NO: 161908 - DNA, 477 bp, Zea Mays
gatcatcgctagtttattttctggtaaattgattccattgaagaaagatcgctgtgcttcatttcgccgaatcaagatgccattgttccaacaaaagcaacatgtattttacatgagtcaagagatatgatctctgctgcatcacatagctacaataccatgggaatctcaaatacttctcactgaaacatgactgctatgcattcactctgatgaacctcttttaaaagaagagtttgtcacagcatttttttgtcactcagaaatccctctgttcagcaccaaggtcgtattcttttgtcacttcacaattgaaggggaagctaggaaatagagcattcttcaatcatggatttacggcgccctatcaggctacagctgagaaagggttagttactgctcgaggtgagcaaagtattcatcttccagctacatcattctggaaacttggtttctcaacaacatgacaagtgatcc

SEQ ID NO: 161909 - DNA, 1176 bp, Zea Mays
gtttttgattggtactgcagcacgtagatcctgtagaaggctttcacatctgctcaagcaccttggctttgcatgaaccatatgtagacacttagtcttactatggcatttagcgtcaactggtgcatgtaaatttcatatttcttcattacattgacaatcatcttgaacatgagcagccgaagtccaccactaagaagcttttgaaaactacaatctcatcttccttcgactcaagattggtctcatcaccagcaaaacgaatgatattatcatcttcaacgtacccaagtttattcaagagctcttggtcactaagcttgatggtagactagccaatatcgatgtagccaggctttgttggccgaagatcgttgtcttctcccgcagcatccaaagcaccctcctctatatggtcttccttagcaacctcgttagccttcagcctcctcgtcctggttgtccccttcatcacctcagaaattacaggacccacaaccatggtgtaaagagtgtctttctccctcccaagtgcctacgacgaagttggggttaccaactcagcagtcgaatgaatcctagccatcggaggattgcctaagatcaagttcccaaagcatgcaataaaaccagaggaatggaaaaagcttcggaagcagagaatttgacgtcaacatgttggtgcaagcggtaaatattgtggtagtggcatgggactgactgggttatataggcatctgggcgcagaagtcgaggagtcatcccatctaagctcgctgccctgtggaccgctagcgttccacattcgaagatatgcttgttaaactatgttgtataacgtgctgaaggaaggtgtttttagaaccttcggtataagtctttgtttgtttcgtggtctgagtacgttataaaaaaacgaactaatcccgcgagaggttattttgttgggagatgcatttgccaaacgtcctcaaaactaactgatgctgatggttttttacaatttgtctcaggagtgattaacctatgcttgccgtaggatgtcaacacaggtgaaaagagaagtggaggaagcttcggtttatgcgctgaaccgaatcatgtcgtcgaagctgaagcagctagtctagaaacgaaggggtccggcacgtatgctgccgcttcgtaagaaatgac

SEQ ID NO: 161910 - DNA, 374 bp, Zea Mays
ccggactagcacaacaagtgcgaaaaaaccgaagtctaccgcgaagactatccgcgcagaagtcgcctaagggcgcagccggaccagcacaacaagtgcaaagaaactgaagtctaccgcgtagattatccatgcagaagccgcctaagggtgcagccggactagcacaacgagtgcaaagaaaccgaagtctaccgcgtagattatccgtgcagaagccgcctaagggtgcggccggaccagcacaacaaaagcaaaaacgacaaattgtccgcgccaagaccgactatatgcgcaccagcacagcataacaaaacacaccagaccaagtacacaacgccatcgcaggcatagccaagtgtgcgggggcacac

SEQ ID NO: 161911 - DNA, 467 bp, Zea Mays
accgtcttaagtctttgccgacttaagtcaattactccgttagtagggtatagtggtcaccctaagtcgagtaagcgcgagcatgttgcaccgtcttaagtcagtgccgtcttaagtcgattgctccattagtagggtatagtggtcaccctcagttgagtaaacgcgagcatgttgcaccatcttaagtcattgccgacttaagccgattgctccgttagtagggtatagtggtcaccctcggttgagtaagtgttctgatttcaagtttaatcaagtcgaagtcgatggataaccaatagtttgaatgcttttgagaatgaaatcttttattgatgacgtattttccaattacagaatacaacattgctccgatagttcttgccaagggtaaaacttcctggggtgctctacattccatgatttccctacttcgatcctggccgagtgacctccgacactatgaa

SEQ ID NO: 161912 - DNA, 407 bp, Zea Mays
aacaacacaaaatctgcaactttagacacatgcatttgacctgggcccacctgtcatagacccaaaggtcttcttctacctcacgtgaacgagcagggagattttatggaggccgagctggggaaaaaggccaaggttggaccagccagattgacggcgaggtcaccggcgctctgctcgttcgccgaggaaggcaggaggcgggcctgcgccatggctggcctgggcgtccagcaccacacagaagtgctccatggccatgctgagcagagggagggcgccttgccggacttgaggaaggggagtagagagctccctgctgcaagctacgaggttggagggggaggttggacgagctgctgcactagcgagcttcggccaaggggagaactagaggtggaagacag

SEQ ID NO: 161913 - DNA, 836 bp, Zea Mays
taatcattggccacccgacttgatcaatgcaacgggcatgtacgtgtcatagtttttgatccgcaacaatccacgggctaagtacgagccatgatttttgacccaacccgaaaaaccccaacctaacatgcccaacaggcaagcacgggccgacccgacccgatccgacactaggcacgagttgatacgggccatgccaaattaccaacggcccgaccttgacctggtccgacccgacgtttaaatatatctaattccaactagagcaaaaaaaggatgatgaaaataagaatagaaagttgaaggttgagttgaagccaatgagatgacttagaatgtgtggacacattcgaggaacatttgtctaagtcatgaaagtgcccaagagaagagctaaatgaagacaagataaagtgccaaagtttagactaatctgttatactgcggtacaccagaccagtatggtttgtatcagattgtgcaccgaaccaagtacgcagagagcaagtttctgcgtttcgaaggcttggtgcaccggaccaggtcccttgacctctgttggaccagattggactcaactccatgagccgctcgtgagctggctcggctcgcctatgcagtgagcatgagaaaaaggttcgatttggcttggtccgagccactgtgagccgagccgactcgttagttccaaactatttttctagaccatctaagatatgagctctttagagatcgattactataccaatatattgtacatgttctagtacaacatccagttcaaccttgtctatcaactagtaaataacttaggagttttatatacttcaatttgc

SEQ ID NO: 161914 - DNA, 530 bp, Zea Mays
ctcgactacatctcacggggaatgtgccacgttctaccctttgtcgtacatgcacatttgtccaccaaagagaacagctctctagtgtcttgaatgttatgggtggcaagcttctcaagcatttccttatcatggtctctcctcttatataccaagggaggagagaggttacaagttaatcaaactatagatctggttagctaagacctaacagccctgatcttatcctggtcgtgaagtgtatgtagagtcatgccttcaactgtggcccaatgtcagggatgtccttctctagtggatgtcaaacttgtcgtaggggtaggtatgttatgttatattaatggacaatagtgtcgatgtctctcggtgcaatatatttgataatcaatgtagcaacttgtaattgataatacgttacaatacattggcacgcccacacatggttattaggtcgacgcacttaccaaaaaatggtcttgagtacactaatgcctaagtcgtggcgatagtgcgcttgtcagacattgttg

SEQ ID NO: 161915 - DNA, 632 bp, Zea Mays
agcctgaatcactctccaaataaaagtggccacgggacagttgatgaaaagatggttattttgattccaaaatgccacaaaacagcaatcaaaggacccctaccagtacttttcctcaaattttctttaggtaaaattttatctttcagaataagccacagaaagactgatttttttaggcatttccactttccaaagaaatttgaaggggacttttgcacaattgctcctaatttgagaatctagggttttaacagtgaaccctctcttatgcagatgccagaccactctgtcttcagaattagactgggagaaattgatacaacagctcatgagcgcttcccactcatctggcacaatgccaaccacatttcttctaaaagatagagtttcacaatttgaatcaatcactagattaacactgacgtttttatcaagcaagaggtcaaagagtctctgaaatcttcagcaaaaaggtttatccccacaccaaatgtcataccagaaacttgtatttttgccattgcccacaatttttttacaatgattataaaaagtatcctttacttctagaatcccttttcagaaataagaatcatcttgcctctttttaactaatttaaggggtttcc

SEQ ID NO: 161916 - DNA, 654 bp, Zea Mays
gtgggtgcagggattctctttattgctcctggatgtgagcaactcaagtatgcactccagctactatttccagcatcaaataatgcagcagagtatgaagcactgatccacgggttaagcatcgccgtatcacacggcatcaagaaactgatggtatatggtgattcactagtggtcataagctagataaacaaagactgggactgctcgactgactccatgggcaagtactgcgcagctgtgggaaaactggaggacaaattcgaaggattagagttccatcacgtggaaagagactgcaacgcagtagcagacacgtgtcgaagctgggatccagtcgggcccaggctccacctgggatcttcgtccaaaaaatatcacaaccgagcatcctctcgaatcaggtggaagagtgcaacaccttgagccaaccagagtcggaccccaacgactggagagagcctatcatcaggtatataaaaaatgaaaaaaactggatgacaaggctgcaatggaacgcatcgcgaggcagttggccccactacaccatcataggcttactgtataggagaggtgcagcaggagtcctcatgaaatttattcactcggctaccgggaagcaattgttagatgaaatctatgtcgggcagtgtg

SEQ ID NO: 161917 - DNA, 313 bp, Zea Mays
atctttttgccgcggagtataccgatagggttgaagtctaaaaggttgagctccacttagtaaaggaatatgatggtccacatttctcctgggaggtaaactggtgggcttctgaaataggtgctggaacttctgcaccagagctgcaatttctggatgcagttcagatggaactggtgccctcactggctgcagttctaacagctgctcgacggcctcttgcctgaccaaggcctctagttgtaaactggacagttggtgacaggaatgcagttgaggacttgaggtttgactccttgcaaccgaatggtag

SEQ ID NO: 161918 - DNA, 619 bp, Zea Mays
gtaagggcgtcgggaaggggttagggtcaggcgacgtcatgcgtagtgacgagcagcatcggggcagactgtaatacgcgagatcagactggcttgggcagcatcgggtagagtagggtcgacagataaatacgcggattgagctaaaaaggaatgacggatgatggaagttaggaggactagctaatccgacaagaagatccaggatagggctcgcttactccacataaaactttatttttctatacttaactttaaatgaacattaggtatagaaggttttacaaaattgaggggaggggctatggcgtgtttaagaaataaagtggggtggttaagaaataaaatgataacgtggatgtgttgggcatgcaaatttttcctggtccaaatctgctcctggctctatgtctcgctgttgtttgtttggtggtcgtgcactattgaaaacatatttccaaagtcttctgaatgcttttggccttagcatttcacttgttatagtgaatttcatcaccaattaaattggtaggatccctatattttggaagctcttgagtggtggttctaaaaactcctatgtcaacctcacgataaggttccatacaaatttttcaat

SEQ ID NO: 161919 - DNA, 901 bp, Zea Mays
gtcgaggtccccgacggcgacgagcgtggcagagctccggcgagctccaggactggccaaacggggcaaagactagcgccctacttcggccgaaaccgaattcatgccccaaccagcgtttcccctaagtcaattgcatgaatggctacccaaatgtccctggccacggtgaccgcgaggatgatccaaagaacaacacattcccggcgattggtggcggtccagttcaattgggtgggtcgacgagcatcacgggcacatcagaacacttaaacgatggagcagagggtatgagctgacctgaatcaagctggccgcggtgaggtctttatcacggtgttcttgagtgttcttgggggaaatccaaaattggagctctcgggtatacgattgaaggcacagtttgggtggcttggtacttgactatcctacgcaacggtggtggccacaatttatagtacgcaacggcggtggctctcaatttggtagagaagtgctggcggccggagagaggggagattactggcgcagtggattcatgtcttccgtcgtggcgacttcaccggcgatgagtaactatcgcaagccgacctactacgacgtggtaaagtgcctggacacgcagcgcaggatcagtaggcagccatcaccggtgagcttatccgcgccggccgcaaggcaagggggtacggcgagcttagccgcggccgaactcaagttgatccagacgccaagatctttacccgcccaccgttatccacaatccacagcgcacgaatcccgacgatcgacgtgaatcacagcgtgacggtcatcggcggtgaggttcactgaacccgatccgatcggctactgtaccatgggattcgtcattcagttggcctgacagatcaatttgaag

SEQ ID NO: 161920 - DNA, 995 bp, Zea Mays
gcggaggggttaaatctgacaggggcgtcccacgtgtaagcgatagcggcgaggaaacaggaacacacgcccgcggaaatcgcgcacaggttggtgcgctccactcggcgagttcggcggcaggcgcgacgagttcgactcgaggagggagaagacggtcctggcattctagccctagccgtattctgttggcgagtgggcaggcgagttcgtcgcggcgggattcgtggatccggacgtaactaacatggggaagaagactggcctgacttgcgggctcacaaagcagagagcagatcgggagcgtgggtgcggcatcgctttgatgacgagtgggccaaccgagtcagtggtcatggtggggcatgtgtgtcgttcaggctgtagctggtagagccaacgtgccagcgcaagctactaggcgaagtcagcggcgagcggcttgggatgtagccatccggcttgctccacgctgcagcttcatggccgaaatacggatgccagcaagacatcagcttcacagtacagtggccagcgagtaggccgcgtagtggcccttcggccaatgttctgggccaaaggtgacatccccgtaggcttcattttctttttttttcttttctatctctttctcctattttctttatacaaatttaattcaaatccatatttggttttaagtattgaactaaaatttagatgcacaatcaaaatctcagcatggatgcaaccccctttttttaatatatttatttagcatttattaaatgtaacatgtctcaataatagaacacaacttaaaataaatcatgatattattcctcagataatagaagaactaactaacttccttaatgccttatttagggtttacaaatcctaccccccttaacagaaatctcatcctcgagatttgtaggaaaaagagatataaggagattggtaagtaaattggctgttagtttctcattagtttttttataataatccttaat

SEQ ID NO: 161921 - DNA, 551 bp, Zea Mays
atgacatgccaacattttagttatcgtaacaccaggggtgttacagaacctacctccgaatagtcctttctctgattttgtctccaatcctcctactcgagatggtagcccaggccatagagtgcggccctccccagaggacattgaggccttgattgccccacttcagaatcttcccgaagctgagaaacaaactcatttcgagatgccatccagtatcgagatgatgttgaaatggatgtcgtacttagcctgctggccgaggaatcatctgactctacccgcactgagccaatggcaattgtgactgggcaagagtttggcgaagatgaggaaatccagaaacccgaaggtgcccgccggaagcgttcacgccgagtgaatcacccagctgcacctgtcgaggagaagaagaagaaaaggtgactccggcggttgtcatgcctggaacaagacgctggcccttcctcattattccttggcgatggcccggcaagcgccatccccgaggacaatgctgaaggttgtgatgatgcttaggctgctggttg

SEQ ID NO: 161922 - DNA, 798 bp, Zea Mays
gagagttccggctttcccctcataacgaggttagggccaaacaaaacaccacacttgtgtttacaggactcacatctgatacaaagttatcataccaataacaaacgactgaagcaagaacttattagaactgaattctattagaaaaacttcatccatatttggaataaaactgcatagccaccgtctcaaggcagcgacacgcctgatttatcttgttcttagcttcctcattgtgtaaaaacgtccaacacctaagccagtgtgtcatccggaatagtacctgcaaagaagttaacatagtggttttattaaagactaaatcatttctacttatccagatagcccagcatgctgctgaagcacctgtaataattaatttcttagtttttaatgggaccccagttaaccaggcaccaaaaatatttctcacagatcttggtttagataacccaaagcaccactgtaccaacctccaaacaaactttgcgaaatggcaatcgataaataagtgttgtatactctcattggctgtacagaaaacacatttcttattaccatgccagtttcgctttgctaagttgtccttagttagtaccaccccttttataagataccacatgaagatcttaattttcaaaggaacctttaacttccacaaagctttattgtaaaaaacttgtggattgtttagaagggcaccatacatggattttacagagaacaagcccgaactagtcaagttccatttgagtacatctttctcattagttagctggatgttaactaagcgggaaa

SEQ ID NO: 161923 - DNA, 656 bp, Zea Mays
ttgttcaagttaataacacaaattagcatgcggttaggaaagcatgggtatacatatccaccttattatgtaggacaaaagaggtctttaaagtatagataggtttgggtaggaaagagtgcggtaaggaaagactctctccaagattgtggatcttgattcccttgaggatccggcttgtatcttatcctttcttgatttgatgaggttgatcaacttcgatcttcggccatggaatcttcacccaagttggggacacatagttaagatggcttgtaggtaaggacagatggttagtgggtaggtcgcatagaatgagtgttggcatggcataatctagcttcctttggggtctagcttgattcctattcctattttatgatattaatctcttctttctcgagctttggtgtcttcatccgggttagggacaagttgtttaagatagatttgtaggtaacacccactaggttagattatattagattaggtaggatctagattggattgggtataactagattagactagtttaagttaagtacatctaccagggtaggatatatattattaggatatgttagaacatttcgagataggatggatctatcagtgtaggataaaatcttttaagatgagatggatatttgttaggc

SEQ ID NO: 161924 - DNA, 762 bp, Zea Mays
attcaagtcagtttcctgaccctcaagaccgcgctccaaggttgatgaggcgcgggacgctgtccgggatgaccccaacccggcgtcgaacacatcagcacaaacatccatcgcgtcaccatccgccggctctgataacaaatcctctggaaccatatcttcaagagtctgatcaaagttcgctagagacaattcttgtagaccaatgagggcagacagggcaggagaagggactccactactttccccactggcaacatattgccgactgttcttccgagtcaaagggacctcatcttcttcctccccatcgttttcattagcaacacagacagcacccccattgggatcagcgatagatggagcacacccattgggatcagcgacagatggatcacacccattggggtcagcgtcagtaaattcaggcacaggcacttcctcagcagcaggaaccgaaggaccaacatcctgatccaaactagatactcgccgaagacgtctctttttctttttctgctcatcagcaggaaaatcaagttgattggctcggcaagggcgtttcgggtgaacactgacaggcctctgaatatccaaggttgtaccagcttctaggagaggcgccaccaccaatgtcccagcaggagcagcatcagaagagtcctcagccagtatatcaagcatagcacttatctctgcatcactaggatccaaaggcacctcaaagtggacctgtcgttcatcatcaggaatttctccaag

SEQ ID NO: 161925 - DNA, 683 bp, Zea Mays
cccagattgagtcaacagcagcctctaccaacagcccagtctgaggacgatcgaggtaacctaatactcgctcccctccccaggatcgacgccatgatcatcgacaagaggatacatgcggggtctctacgctcaccccttgcctccgagccatccaatggcctcccaatttcaaagtctccaacgtcaacatatatgaacccaagaaggacctagggggttggttggccatctacacaactgccgctcgggctactgcagcaaagaaggacgtcatgacagcatacttgcccatcattctagggcaggacacactacaatggctccggcatctacctcgacactgcatcgacgattggggagattttagtcaccggtttatcgcaaacttctagtccctctccgaataacggcacatccataggatctcaaatccattaggcgacagaatgatgaaactcttcattcgttcctcaaaaggtttcaaacaatgaggaaccgtatccctgaggtcgctgaggtggctatgatcgaagacttctattggggatccaacgatccggctttcatccgagccatacttcaaaaagcactcgctacctctaaacaattgttcagggaggcggacgtctacatcactgtggatgagcaggctcaatacctcattggaggcgcaaagccca

SEQ ID NO: 161926 - DNA, 450 bp, Zea Mays
gtgcgtttgcatggaataccaaggactattgtgtcagacagaggagcaccgttcgtagcacgtttctgggagcaactgcaagagtcacttggaacccatgtgataagaagctcatcataccatcctcaaactgacggctaaacggaaagagtaaatcagattcttgaggacatgttgagagcatgtgtgttacactatggcaaggattgggataagtgcctttctctggcagaattttcttacaacaatagttaccaatctagcctaaagatggcaccgttctaggccttgtatgggagaagatgtagaacaccgctaaattggtcacaagcgggagaaagggaaatagttggacctgacctagtacttgaagccgaggataaagtctgcgtcattaagaagaacttggaagctgctcagggcagacaaaagagctatcatgataaaaga

SEQ ID NO: 161927 - DNA, 513 bp, Zea Mays
gcatccgcgccgtcagtctgcgcgcagtctgcgctgtcagtttcgcagtctgcgctgtcagactgccagaaatttcgcgcagtcaacacctttttctgcgcgcttttactatgcagtttgaccagaaaccggttgaaccggttttagaaccggttgaaccggttttctgtgctctaaccggccgactccccccttatttctctccctctcccctcttatcttcttctcagtttcactttccagccgccgccgcccactcttccttctctctctccttcacaccttctccactccaagaactcacttgtgccctctcatctttggaagatttgttggagatccgttcatcccggcgttctccatcatctcccccaatctcgttgggatttcttgactaaatctccggatcgaggtattgccctatttcatttctttttacttgatcctacgcgttcttgattatctaatgtatcattcgttgggtacattttagtttaagtgcttgcaacactt

SEQ ID NO: 161928 - DNA, 719 bp, Zea Mays
agctactagagctaaagagattaagggcatccttcattccttctcttccaattttatacggaacattttaataattctgacacacatatcataaattagcgagacacggggcaagaaagaacatactcatacacagcatatctaatgtgttcaataaattacacgtatgcatcaaaattagctatacatataccctaatgtcctttttacccatcggatactgccactaccaggaatcggtacaaatatcacaagaaattgacaaaagatctaaaaaatagttacttgaattctgattaaaggaggaaagaagggatcgttaatgccctgcaaccgcaacttccaattttgggtcggactcaaaagctaaggaaactggctgatgcattatcgttatccatccaatttcgggtcggtctccaaaggcctgatctagatgcagtccagctgcttaaatccaacgccctcctttccattcccttctcctggcgcttcctctagtgcctactccgtgctcgctcgctgtcggcttccgcgatcaacccagtctctcttctcctcgccgatcgaatccatcccatcgacagctctcctccgcccgcgatggtgatgcatctgtattctcgctcctcttccgccggcatgcgaagcattcgccgggagctccagcgcaggaggtccaagcccttggcgccgacagggtcggtcgctaagatgcc

SEQ ID NO: 161929 - DNA, 1030 bp, Zea Mays
gctcttcctacatctccacattttgcaaacatatctacgagtgcatttcctaatgcaacggttatatgagtgttgcttttactaatgtaagaactgatccagttgcagtattcaacactgcctagctgagcgcaggctgagacaacacttactaatgttgcttcatcaggcatgaatcttccctcaagcatcatctgctgaaatgtgcacagtgcatcatcatacctcaagttgtggttgtaccctgtaatcattgcattccacgaaaccaaattcttatcaggcatctgatcaaatagcactctagctgaatctagttccccaatctttgcataagcagagaccatagcagtccaggaaactacatccttccgatccataatatcaaaaagtgaccatgcagattcaacattgccacttgttgcataccctgagatcatgagattccaagagatggcatctctgatcggcatcctatcaaacacagcacgtgctgacaccatgtcccccgccctcgtgaatgcagcgacaatagtgttccaggagacaacattcctctctggcatcgcctcgaacaactccatggcccctgctgcgtctccattcgacatgtacacaccaactatggagttccacgaaaccacgtctctattagccatttcatcgaacacctggcgagcgattccaacatcacccgggtcgctgcacttgtagtacacgttcaggagagcgttctgcacgaccacatcggacccgaacccacacctcacgatctgtccatggacgcaccggcacaggaacagccgcctcaaggattcgcacgcgcgaagcaggaaggtgaaggtgaacccgttggggtacacccctgcggcacgcatcgcagcgtaggccgccaacgcgtccgccgcggagcaaccacgaccgccgccgccgccgccgccgccgatccctgcgaggcgctcgatgagggtgttgtgcgctacggtggaggcgccggagccggcagcgccaaggatcgccgcggcggcgg

SEQ ID NO: 161930 - DNA, 550 bp, Zea Mays
aaaccatcatgcgcttatttcccaattcatgaacacataacgcgtattgacccgactcaagatatagaggaagcgattactattttggcatgtcaccacctctctaattaagccaaaacaatttctacttatatcgaccaaacatttgtgtcgagcacaccttatattaccttgtctcgtatacaaccatgttgtagcgtgcattcgagacactaccgattaacttaacgcaattaccactacaatgcacttcgatatacacgttcgacatcacagtgcttcgacaaaccccacacttccaatctacttgtcacatccaaacacaccacgtgcccactgcgttctcatgaccaattttagcacaattatttacgacaacatttatcgactagacaatgaaacactaaccgatcattcgcacatctcatcttaaaaacacatcacatgtcacataatttatatcttcgatccactctatcctacactacgatgaatacataaaatatttttaacatagacgaacatcttagccgactgcaaaaattaccaa

SEQ ID NO: 161931 - DNA, 1018 bp, Zea Mays
tcctttacaagtcgaggtccccaacggggaacgacgttgcagagctccgacgagctcgtgtaccggctgaaccgctctaggaccggcgccctactttggtagagatcaaatccaagatctaacgagggtttcccctcaatcaatttcacgattggcgatctacctagctctgcccacgaagacatcgggcagcgtggacattcactcgcgttcccggtgatcagtgggttcctagttcaattttgcaggtcgatgatcatcatgggtacacgagagcactcaaacgagggagcagacggtatgaactgacctgaattgcgctggccacggtgaggtgttcttgcggtgtgtttgagcagatttgggggaactgtaaaattcaagctcgctggtgatcaactgagggtaatactgggtggctgggtgtgtgatgatcttgcggagcttacggagggctcaatttatactaagcgagagcggtggccgggaattgtagcgaagacgcgcgacgatcagaggagggggagttcacaggcgtagtggattcgtggcatcaactgtggcattcactccggtgatcaacggagggctaaagcagatcacggcgatgcggtggagatgcctagacacacggcacaaggccggaaggcagcagtcaccggtgatctcatcttaatccaccgcggcgagcgtagtacggtggccggaattatttactagccggagcttatccacgacggtgtgactccgagcgttatccgatcaacccgagcacgaatcgagacggcagcggcatgaatcgcgacggagagatcgtcggtggcgaaaaacttagctggcggtctgatctacttcagatactgtaccatggcgaactctatgtagtgcacctgacagccaagatttagggcagattttctctaaatttttcatggcaactcacccaaagctccgcagcaaagttgtagaccaatgattcagctacaatcttgccataacaactatagccaagttccta

SEQ ID NO: 161932 - DNA, 709 bp, Zea Mays
gctccgctccgatctcggatggtggtcacgctttcatcgctgccatcaacggtctcattcccacgtccgcggccgcccccgcaatcaactccattgcccccacaatcccaatccaatcccggcgctcaccttccatcgacgaagcggctcttcctcgcacctcgttatgcccaccccgaccatgacaagtgggcccttaatgtcagcgtccccctgcacttcctcgcgcttgcgtcccagcaaacacctctctgtctagggttgccgccgcccgatccagcagccatggtgacgcccctctgccccacccctgccactacgagaacattcaggttgtcggtcgcacggttcctcgtgccacgtgtcccttctcctccgtcaccgcccgactccctcgcgtggacagcgctgcgcaacacaggagagcgggctgctacttcgtcccaggtcaaggtgagcctccctctccctgatccgacacgaagtgttgagcatctcgtgggcgtgctcgtcgtcatggaggtcgagccagcactcgagcggctgtccggaggcgacacacgcggcggtaacagatccgacccaggtcaaggtgagccccctccccctgatccgacacggagtgatgagcgtctcgtgggcgtgctcgtcgtcgtggaggtcgagccagcactcgagcggccgtctggactacagttcgagctgctca

SEQ ID NO: 161933 - DNA, 538 bp, Zea Mays
ctgaggtgcaggatgtggtgaagaagcggagtccgggctcaatttataggtcgtcgaccggaatcggaggaggagcgcggattccagatcgcgctggcgagcttatcgtgcgggcagagccacgacgatggtccggcgaccaccgtttaaccgggcagcgccacctcagtgattctccgccacgtagccgaggatctttaccgtggtcgccgacccatcccgaccgtcgtggcgttcttatcgccggcgaggttctgatcttcatcccccccatgatgcactgtaccattgcaagcccgattcagtgcgcctgacagcccaagtttagggttaaatctctcttagttttctgtggtaacacacctaaagttctgcagcaaagttgtagactaaggattcggctacaattttgccacaacaactaagactaaattcctactagatcatgcttataatcgggccctaacttcatgccacctcactgtcaggccaaaattcagttttcagacagcctgacagcccatctttgggtgtaatt

SEQ ID NO: 161934 - DNA, 273 bp, Zea Mays
tgcgaacgcggttcctgttaaagacaatgaaaataaacgcacgcgaaatgcttctgtgtcggccaattctcctaattgtgctaaaaactgtcctatgcgttcatgcgtgctttttccttggtcacccgaaaattttgcaaattcaggtatcctggttccctgtgggtatgggtggtgatcaaatcggctatcattatgtttctgatatgattgccccagggaccatgcttactccgagcttatcttggaacgctctagctatttcttctctca

SEQ ID NO: 161935 - DNA, 633 bp, Zea Mays
tttttatttagttagtagttaggtattagttagtaattcgttattagttagtcataatggctggggttaggcactaaccatcataattagttagttagcaagtcgaggctgcaccgatcttggatcgagtggtactggttcaaacttgtcatgttcgttttgaattcaaaataacatgataactatgtaattgtcattgattacttttgcagggtaacacactaaaacgctcaatacaggatattgagtggattagttcgaacgtgggcgacgacggcatgcgtaccttcttggaggtaagtttcttaccagccttcatagtcaattagtttaaacttatgttctacaacatgctattggttcatagcgcttgtctacatgactacatagagtggtcgctcgttgtggttgcagcaacgccatgccacagtacgtacatgtcccatccattggtgtgcctgcgaagggtacctcaacacacacagctgtgatgcctgcatgcgaaggatttgtctatgacaaccttccagacgagattgggccttctcatctcccagatgctccgttggcataaccttcgcaaccataagagtgtaggcgccaccgctcgctgggcagttacactacaggcac

SEQ ID NO: 161936 - DNA, 283 bp, Zea Mays
cgcaggagcagtaacagcagcaagggcgtagtgtgtagtggctggaggagcacgcacagtaggaagactgatggtgtacaggggcccagagctgttgcacctaaggattgtgttcctggaattgagatccttcacagaaaggccaaacaggtcaaattccatggaacaattattctcagtcgtaaactgacggacagaaagaagattcttaatgatatcaggtgtaacaagaacattgttaagataaaactggccagaaagcaccgtatctcctacagaggtg

SEQ ID NO: 161937 - DNA, 542 bp, Zea Mays
gaattattttcagccccacgatcatcaatcaagggcttgcgtccagtagcgagtaaaaaagataaaactctccactgcctctcgagagttccgtccacacatgcttctggatgcctctcctcgcttcatccacctcgtctcactccggcgtcttccatttgacctccgtgccttctcctcttgcttgtggccacagtttgagccatgcatgccgcgccgacatggtgagcaagagcgacggccagtagaaaccgctctcgaacgcgacgctgcagcaggcacaggcgaggtcccgctcatccagatcacaccggctcatcgacgacagcaatgccttctcgggcgccaccgccgcgacgcagtcctcgcacatgtctccggcgtccatgagccagcggtacgtgctgcagtagccaaggcgcgacatgtctttagcatgcgcatcacacagcaagcggcgctggcgcttgacgccccacctccgctgacgcctctatggtacaggtgggtcccgaagaggctgccgatgccgaggcgggagc

SEQ ID NO: 161938 - DNA, 477 bp, Zea Mays
gtatcatcagttgcgcaaacaagacagtccttctcacagaccaccaaggaaagtcagtctcttgtcaagctcagccacccgccaatgatccaatgatgtttaatttagcaacagaaagcatatcagtggtagaagaattcatggatgtgttcccggaagagttgccaggaatgccaccggaaagagaagtggaattctacatagatctgattcctagaacaacgcccatcgcaaagagaccataccgcatggctcctaccgagttagcataattgaagctccaaatcgcagatcttcaacaaaaagggtacattcgtcccagctcatccccttggggagcaccagtccttttcgtctctaagaaagatggaagtatgaggatgtgtattgattaccgatctttaaatgaagtcacaatcaaaaacaagtatccactccctcggattgacgacctcttcgatcagcttcaaggggcca

SEQ ID NO: 161939 - DNA, 335 bp, Zea Mays
atcctccttgagctttcttgaaaggtccaatcatatcgagtccccagcatgcaaagggccaagtcactggtatgatctgcagttgctgtgctggtagatgttgttgcttcgacaagtactggcaagcttcgcacctctgaactaactcggctgcatcattcttcgctgttggccaatagaatcctgacctgaagatcttcccgactagtgtcttggatgctgcgtgtattccacattgcccagcatggacctcatctagaagttgcttcccggtagatgagagaatgcacttcatgaagacgcctgatgcaccccttctgtataatgtctcccca

SEQ ID NO: 161940 - DNA, 841 bp, Zea Mays
tcatggctgaatacatgactacattggagtgttccttttgttttattaccgttttcatgtaattttggctcaaaacaaacatgctggtccactcggttgaaagaaagccaggagcccaggaggcgtatacaaacatgacacaaaaatatacaccttgtacttgtagtcttgtacacagaagacatggtggcacagctactcacaggccatgcatggcttttagctagctaggaagtagtgccacacaggtagccaggcgatcgagcagtgggtgagagagaccagtacacagtgaaactagcgtgcagttccattccagctcgagcccaaacactccaaacatcatctttagtttaaaaagagtccatagttaaaagctaaaggtgaaattattcctcaagacaccttcatcaaaagagagatgctgcagatgtggaactctggccatgcatctttgaggaaagcaatgctgcgttggtctctgtgcgcggaaatgaacactagaacgagtggtcatggagcggcaggcaggcgcctacactggcgaagagaaggcaccggccgaccggcgcgccttttccctttggatgcaaggaagaagtaagcttcacagcgaatctgggcatcttcgtccgaaatttctgtaaaagccttgcattggtatcttctgtttcctgcttttatcttgtcctctcttccctacaattcaactttgcacctcccaaattcgaacaaaagttgaagctgaaagtaagctctgtagctgaattcatcgcaatgcaactgatgatgcgcagagtgtttctcaggaagccgagagtttgcgttggctgggtccata

SEQ ID NO: 161941 - DNA, 853 bp, Zea Mays
cagatgcgatcaaaagaacaacataggcattagattatcactcaagcttaataacaggagaatccagtaaatatgctacttctcatacatgagactatatgagattactaagataaagtgttagtctcaagatatgcctcaagaaattgaatgaattggctccccctaaagatatgcctcaagaaattgaatgaattggatagatgcactcacttttaaaggcaaatagggagaagcattattcatcttgatcaaggcttataagatttgcaataaataacttatgcctagttattctcacaatgaaaaagattttagaatgcttacaaccacaccattgattgttttgaagatctcattatccaagtaggtgttgttgctcttgatgtcttcctttttcatttgagtgtcctccctttatagttgactctttttccttccaaacttattgaaaatactcaagagaaatgttaatagcacaagggagtataagaatgatttcttttagataaggaatataaacaattcatcattcacaagtcacatagacatgaagtaaaatccttaacattagtgcacattattagaaaagaggaataagcaccttttaaatatcttgatcaaatataggaattttacttcttcatgttgaatttatcatgacttaaaagcatatcaatatgagaacgtgtcggtaccctaaatcaggggtaccctctcctacagcatgaagacgccgcacccatgcgacgtctcctagccacgcggaggacggcgcctgaccccaccgggtgaggcgggccaaagggcgcaacgtggcaaggagagacaccacatctcagtaagtccggac

SEQ ID NO: 161942 - DNA, 344 bp, Zea Mays
tgttaaactccttgcataaggcattatgtttaacttagataatctcacggcttatactatgtagtagctcatgaccatgtaagaagtacaaccatgaattacatcatcgactaaaagcaatatgtgaaaacatggggtgtatccagcactccagtaattcaaggcattcaaggcactgacagaatgaagtcaagattattaatttgttttgttatgtcatttgtcatgtaataacacaagaatgaaccaaaattccagaatacaaacctttctctcttgctttgtcatgaatgaaattgttagatctcgcaacaatatgaagatgtcatcaaaagcaaccttcc

SEQ ID NO: 161943 - DNA, 537 bp, Zea Mays
cataggtcctttttcgagtttgtgtctaatcctcctgcccgtgatggtggtttgggtcttagagtgcgaccctcccctaaggacattgaagctttaattgccccacgctggagtctcccagagggtgagagacagactcatttcgagatgtcagctagcacggacgacgaggagatagatgttgtgctcaacttgctggctggggaatcatctgactcgacacatgtcgtgccaatggctatcacggacaggcaagaacttgttggaatggagaggatccggaaacccgaagaggtccgtctaaagcgtccatgccgagtgagccggcctactgcacccgttgaagagaaaataaagaagaggcggcttcggcgactgtcgagcttggatcatggcgcgggtccttcagcgccggtttgtgatgaagtgacaacaaaggtccttcctaaggttgatcccaatggttgtgtccatgctgaagttgatcccaatgggtgtgaccgtcctgaagttgatcccaatgggtgtgactgtctt

SEQ ID NO: 161944 - DNA, 366 bp, Zea Mays
gccaattacgaatcctagtatccagccccgacgcgtcgaggccatatcccaggggggccaagtaccaaggaagaagttggtaacggtgcacgcagcaaaggaaaagtggtgtgcagataagttgtaatattgcccaataagtagtatctgaagagtatcttgcgaaatcaatggtatattacaacccgttccccagcggaaccctcgttttctccacgcaggcctagctactcatcgccagtaggatcccgctgaaagcgctcggccaccgcgtccacaacgtcctacacgccctcacgagcagcatcttcagtgttggccaccggacctgcgatgactggccccaaggagatagccggatcgtgg

SEQ ID NO: 161945 - DNA, 472 bp, Zea Mays
atcatcaaagaaatggtgaggttgagcgagataatgagctcgtccttaagggactcaaaccccggatggattaacgatggtttgaggattttctagccatcttgtggggactgcagacatctccaagtttggtcactagacaaacatcattcttcctggtgcatgggtcataagccatgttgcctaccaagatcgagctccaatctttcagagttctcaacttcatggaggctcggtcactcgatggtcgagttgaagatctcgacaaacttgaggagtccagggactcgaccatgatataatctgccaaataccaacaagccatgcaaaggtatcatgaaagaaatgtttaggatagaagcttcactatgggtgatctagtactatgcaaaattcaaaccataatggacatacacaaattatcacccatatgggaggggcctttcatcatggctgaagactccaacccaac

SEQ ID NO: 161946 - DNA, 768 bp, Zea Mays
gggacaggtcactggcgcaatggcttggtgtccaacgtcgtggcaatcgctccggtgatcaacggagagcgagagcaggatatggcgatgcggtggaaagggttagacacgcggcggacaatggtgacggcttaacaacggtgagaatccttgtccgaggggtggtgagcaacgggagaggtaccgcggctagccggagtggcgtccagctcaccggcggtgaagattttcctaccccacgatgttatccatctgccacgagcacgaatccagacgccggtgacacgaatcgcggtggaggattggtcgtcggcggtgaggttgccgcgctggcgttctgatccagttctggtactgtaccatggcaagctcccatcagtgcacctgacagccaatgtttgggctcaattttctctcaaatttccatggcaaccttcctaaagtcctgcaacaaagttggagagctacaaaccagctaaaattttgccatagcagccatagccaaatccctactaaatcatgtttgaatttgtgcccaaagttcctgcagtgcactgtcagtctaaaaattcagacttaagttgacctgacagcctgactttgagtgtgattatctccaaattcttcataacaaccttgcttacactcttaagaaaaattgttcacctaagatagatctacatagttgatgtggtgacctagggcaaattctcaatattttgaaagatacaaaggctcaaagttgaatcaatcacactgaaattcaga

SEQ ID NO: 161947 - DNA, 329 bp, Zea Mays
aaattacggcgtgaaaatcgcgtgcaaccgatcgtgcgcgggttctggctcgggcagattccagcgtaaaacgtgagctaaaacagcgcaaatgagtacgaaatttagcgtaaattctatatatgttttgtaacagcaaacggggcccgaaattacggcgtgaaaatcgcgtgcgtccgatcgtacgcgggttctggctcgaatggattttagcgtaaaacgtgagctaaaacagcgtaaatgattacaaagtttagcataaatcgtatatctgttttgtaatggcgaatggagccggaatttacggcgcaaaaatcacatgtcaccgg

SEQ ID NO: 161948 - DNA, 798 bp, Zea Mays
gttgttcgggggtaggctgtacatcccgcccgcctcgccgctgctatcagcgatactacgagcggtccatgaggatggccacgagggcgttcagcgcaccctgcagcgtctccgacgtgatttccacttccctaacatgaaggagttggtgcaggattgggtgcggtcatgtgcagtctgccagcgatacaaatccgagcacctccacccggcgggcctcttgatgccactaccggtgccacagggtgtgtggacggactcgcgcttgactttgtggaggccttgccacgcgttcgcgggaagtctgtgatcctcacggtggtggatcgcctgagcaagtattgccacttcatccccttggcacatccctactccgcagagtccgtcgcctaagcattcttcgtcgaagtcgtccgcctccatggggtcccacagtccatggtctccgacaaggaccctgtcttcacgtctctattttggcaggagcttatgcggctaatgggtaccaaactccacatgacgacgacgttccatcctcagtcgaacggacagtccgagtcggccaaccgcgtcatcatcatgtacctaaggtgtcttacgggcgatcggccacgagaatggctctgatggctgccgtgggcggagtacttgttcaacaccgcctaccaatcctcgctacaggacacaccattcctcgtcgtctacgggcgcgacccaccgtcgctccgctcttatgagccgggcgacaccaggctaccgactgtcgccaagtccatggcggagcgtgaggagttcttg

SEQ ID NO: 161949 - DNA, 488 bp, Zea Mays
ctgggttgcactgactgatggatcaaccacactgacgctgttcgtaccgtacaagtttatttatgtgataattgtgtcgatgtccctattttaacatgtaacaatagatttacttttcttagactttgtgtgttcgtccatgttttttacaacattttttagactttggatggtcgggtcatcgggtgggggtttgtcttgcttgtggttaccccacttggttgtgggctgggctgggttgcaccgactgatggatcaaccacactgacgttgttcgtatcgtacaagtttatttatgtgataattgtgtcggtgtccctattttaacatgtaactgtagatttaccttttttagactttgtgtgtttgtccctgtttttttacaacaattttgttttagactttggatggccgggtgggggtttgtcttgcttgtgcttaccccactcggttgtgggctaggatgggttgaaccgactgatggatca

SEQ ID NO: 161950 - DNA, 559 bp, Zea Mays
gccacacacaggacataggatgtcatcttacattgagagctgaaacctatctaaatcctcgagcctcttttgcatttaccttcacttcttggtctcgcaatccaccccataaatttagtaccgaataatcctcgatagttggtacctaggtaggggaaatcgtgctaatcatagtagatctgatgtcaactatgggctttgcacagggagacatcatcttcggtaccttcagattcatcgccaacacgctcgagaacattaggcttgtcccagattccccgacgacctcaatgtccctcacccaagatccagtagatccaatctgcactttgtattagacttctcctcgacaccagctcaaactcggaccatgctttgactttgattccgaccatgacttgaactcggactcctactacttaggagattagttcatgtttagggcaagctctgggcactaggaaggtcgatcctctaatcatgcagacaacgacaaagactagacaacaagaatattgaggaaccatgaagagttgtggcagcgtggccaagatgcaca

SEQ ID NO: 161951 - DNA, 461 bp, Zea Mays
atttgagcataacaaatttacaatgttaaaatgaaaggaagtagcaaaggtttcatcgaaataattacaataattctaccgggcaagagtttatcagaacctgaactatataacaaattcttcttcggtgttttttccttttttcagttgcaaggacaaagggatacaaacgtttatttcggcagatcagaagaagttacaactgtatgttttccttctccccttttttatcaatattatatacactaagggtactcaacaaacggatttcatcaaaaaataataaccactaactgatttcacaatggagcatttatttccttctacagtgctgaccataaaatgcaaaccgaaagaaatgaaatattccagagcataagagaatttttaacgcagtggtttgaatcaaaccaagcagggcttgacgtttttaccacaaagaccaattttgataactacaa

SEQ ID NO: 161952 - DNA, 909 bp, Zea Mays
gcccaaagcttgcggaagactcatccagaattttgaggtgaactgtgttcccctgtctgacactatcttctgtggaataccatggagtctgaccatttctttaagatatatacgggcaagggtggctcctccgaaggtagtttttactggaatgaagtgagctaccttggtaagacggtagaatataacctagatagaatcgttccctttttgggtctgaagcagtctgattacgaaatccatgtctatttcttcccacttccatttgggcacggggaagggttgcagtagacccgcaggcctctgatgctctgccttagttcgctggcaagtgtcacaccgggccacatactgagctatctcctttttcatccctctccaccagtacctggtcttgaggtctaggtacatcttggtggtccctgggtggatagagtaggctgagttgtcagcttcatcgaggaggattcctcgtgcctctccctttgggatacacaaacggtccctgaaccaaagggtcccttcttcatctatcttgaggtctgggagttgttccctgcaagctctttctgcaagacttgctgtctcggtgtccaggcactgagccttgcgtatgaggtcttctagcgttggcctaatttctaggctaccactatctcccaaacaagcattcagttgagttgattctctcttccagtcttccaagaaatcggttgctttctccccaaaaggtttccggctgagggcgtctgctactacattggcctttctggggtggtagtggatctcaatgtcataatccttaatcaattccagccatcttcgctgacggagattgaggtctagctgagtgaaaatgtactttaggctcttgtggtctgtgaagatgtgacatttgttcccgatcag

SEQ ID NO: 161953 - DNA, 412 bp, Zea Mays
agacgaacgagattacgtagaacctcgttcagttgcctatagtatcctatgcatgtgaacgatttgtcgatccaagtcatgcaagcataaaacaatttataaataaatctataagttgcaataacaatgaaacaaatactatgtcacttactttccacttggttttatcaaaatctaggattttgatggaagctctaaaggagggctcacaaaatgcagttttcttgttctccttgcttgagatgatccagacccacctcctgaatctccactagccctagagtcaacctcctgactctccactagccctagagttcacacctcttgactctcctccatcatcatctccccctatggcaccacctccttactctctttcctcccctctttgtccaacctccacacccacggc

SEQ ID NO: 161954 - DNA, 471 bp, Zea Mays
atctcattcaggaagcaaggagctagaagaggaaggttatcagccctgaacaatgagatgaggaacttgattgtgagatcaataacctcaaagcaatccatcaacgagaagatgctttgtctctctgagcttcagaagaagatcgatgatgcaactgaagaaatgcgcaacattgtgcaacatacagagcatcttgagcaccagcacgactacagagaccttcgacatgagggtcacaactatgataaccttcgacctgaggcatacaatcttcacgatttcctatatgacgaagcctctccactaacactagagctgcaagctataccctagccaccactatataggcctcccacattacttatgtatgatggtctgtcgcacccgaatttaaggacaaatatagatgcatcttaaattttgtatgaaaaaatgacatgttcggatattttattatcatcagttggaacc

SEQ ID NO: 161955 - DNA, 590 bp, Zea Mays
gggtgtttcttttttatttgtaattttttgaagaaatagctagctccgatcgtcaagaaatggtatagttatttaaaagtacaaagtgagtaatgtagtacgcatcgagagagacgacgcgaggaatgaagacgacaggccggggagttttgtaatgggggcaaaaagctgtccccgcggccggttctactctatacacacagagatgggcctccctatgcaagttgctttctctggccacatttgcacgcagcggaaactatagatgttaactaatcgccccataatccaactctgccagcttcgcttttgtgctgtgtgtgctgtgggagaagagaagatgccaagaaccggagctgaagcagctagcgccccgcccgtccgtaaacaaatctggcggttttgtcgcctctgcgtgcgaacgattttataataattgtaatcgccggcactcagatgggtccgcaactccgcagcgcaaaatcagatggcgtttgggggattggatttgaaccatgcatgccatccccttcgtttccagcgacgcgtacagcattcaggtgtgtgtagcataaaagaatgagaacgac

SEQ ID NO: 161956 - DNA, 573 bp, Zea Mays
ccctgttgagggcccaacctttgaacccctgaatagtatgctgcttttttcctttccttctcgaagaaggatgtccgaggtggcggtgccatcttctcgttctctgcaagggaatggaaaagaggagggagagaggggcacaccttttgatgcgtaatgcaaagcggcgctcgcagcctgacgtcaaccgataggaagggcaggaattaaatgcgacgagacacatcggcgcgcaggccgaccgttgcagcacgcgtgcgtgaggaattcgaagtgacccagcccacgcctagttttgactcgaggtggctcagcccaagatttggtgactccatccgtccctatgtattcgcccaagacgtgctcttcgattatttaccttatgtttttgccttcctatgctagccgccttcttcctttgccgcaaaaaagctcttgtgccctcctcttgtcttcttccctagctccggtggcagagaaagtaaatgtccttcctccccgcgacccatggttgatctcctctgccaccgacgatgacctgcaggcattggtggatgctgggctgctctgccc

SEQ ID NO: 161957 - DNA, 1251 bp, Zea Mays
cggcccaacagacagaaaccatccgcgcaacccacactttaccgctcggtcgcgcgcctacatgtgggtccagccggtcagttccgtgcgcgcgcgcctgctctagttcccctggatgacatgcgggccctcggtcgctcaacactgtgcgtcgcactgtgtctctgactggtggacccgggcgcgcagcgtcgtcaacgacctcccggagggagcgcgacatgggtggacctgccgaatcgcgcggatccgccattgaccgagctcgaccggggtataaaacccaaccacgtctcgcctcctcctcaacccaccgcgtcgcactactctgccctttccgcagtacctagaccaccctgggcgacacgagaagggcgccgccatctacgtctgggacgaccgctgccgcagccgtgctctctccggtgatccttgacagtaactccctcctctcgcttgcggaatcttctctggacgataggagtttataccgcgccatgttcgagccataggaccatagtaatcgctcgccgtagcgtgtgtccccgccgtggtttggactgcgccgtgggtcaggggtctacgctgttttgcagctgaaattgatgggcaacataggttcgggccgtcgtgaatctcatgagggctgagcgaattagagtttggggcaaggtttggccggattgcaggctcgccgcacgtgccctccgccgcggcgaaggtgctgccgccagagcaacatcgtttaggaagaagcgcgtgcgccgtcggatcttgacgggcggctaggattagattacatcataccccttcgctcggttgaatcgtagccatcgatccgtgatcgagtgacctagagcggatttagtcgcttaaaatctactccgttgatgggggatccagcggttgggatcgcgcaccggttcacttgtgtcgcgatttaatccgggccgtttaaatacaatcaagcggccacaatcctcccgtaccccttcgcgggtcaatattgctaaagagcccctctgctttcaggaaaccaacccgccgtccacatacactgttcactgagtctaggattttattcgcgcagccccctgacctttctggaattcgaggcccagtccagagaacatataaaataggtaaataaatacagaaattgatttttaatataaaaagaattcctaaaacttgtttatgccatagaaaattcatttttgctccaaattgaaccatcccaatttctaaaat

SEQ ID NO: 161958 - DNA, 996 bp, Zea Mays
gtgggccctgagggttaaacaaaaaattttcggagattgtcaatgttccaggagtgctctaagtcttcgccggagggcgttgatagcctgtacgcgctgggggaagccttcgtcttgacgatgaatggaccctcccatttcggctccagcttgccccgtgactctgtccgggtggtcaggacgagtacgaggtctgctttgttgaactctcttgggatgaccgcgttgtcgcaccaggccttggtttgagcttggtatttgttgagggcctacagggcgaggatgcggtcttcgtcgatgaggtctttagacattggttcgtcgacatcggggacctctgatgtgcttgtttggggcgactcatgctttatttcctgcggcgtcatggcctccgatccatataatagatgaaaaggtgtgaatccggttgtctggcattcggtcttgtttagggcccagaccacttcaggtagttggtcagcccatttacccttcttgtcgtcgagaagtcttttcttgatggtggtgaaaatcttgctgttggcgcgctcgacgacgtcgttggattgcgggtggtataccgaggcgaaggcaggcttggtgccgatggagaggcagaaatccctgatgtcctggctgtcaaattgtttgccattgtcgactgtgagctcagacgggactctgaattggcaaacaatgttttgccagaagaacttttgggcggtcttcaacgttattatggatactgccctggcctcgatccacttggtgaagtactcgactgcgacgaaggtgaatctgaggttcccttgagccataggtagtggtccgacaatatccagcccccagcgttgatgtggccaggtgtgggcgatcagcttggtgaactgcgaagggttgcccgagcggggagaatacttctggcatgcttcgcaagacctcgtgactcgattcgtggcacagattatcgcgggccagtaaaatccttgatggata

SEQ ID NO: 161959 - DNA, 785 bp, Zea Mays
atggctgagaggcacgaaatgagcatactttgagaagcggtccaccacggtaagaataactgatttgcctccaacctttggaaacccctccacgaaatccatggctatatcgctccaaacccctgaaggaaccggaagtggctgtaacaaacctgccggatgaaggtgttcagacttattacgttgacagactgaacaacccttgacaaaatctcttatgcggctggcagcaaggggactatggaaggaaaccctccaactgttgagggacttttcgatgccctcgtggccttcttcatgaactgaagctaacaacaggggccacatggatgaggcatctgacacaaaaattttcccttgaacagtaagagaccatcaacctcggaccacccttccttcacaattccagccaccaactgctgcctgagcgccaccacctgtaaatcagatcccatctcagcccgtagagtgtcaaacagagcaaatgtgggggtggaaatactgtgtaggttcaacatgacttcatctctgcgagacaacgcatcagcagctccattgagtttgcccgacttgtactcaactatcatgtcatacccaaataatttgctgacccatgtatgttgagggatggtggataactgttggtctaggatgaatttcaagctgtagtgatcagtctgaactgtgaacggtcgcccctagagatatggacgccaatacctgacagctttaaccaagccaatcaattcccgttcatatgctggcagcttttgatgatgaggggc

SEQ ID NO: 161960 - DNA, 739 bp, Zea Mays
gaaaaaccacccgcgccggtgttctgtcctcagcacatggttgcttgggagtcgcccgcgcctaggaagtccgcccgagccctcgaatcatgccgtatgcatccgaatcgaagtaaatcgctcactggaacttcaatcaccaccgcggaccgcgcttcaccgtgagcaggaggattcaggctgcaattcgcggtaagattttgcccgtgagattagccttactgcgtatttcgttttgcgtttgtcggtagagagattggacgctttgggatgtggttggatgaatagctcatcgccgccgccttgcccgtgggcacttccccttgctactttatttcggatgaaatgggttccgtgcgattcgcttcgttcttccactcgcatatctcgggttggataaagggccttggatggttggggtgcgcactccggcgggggcgcgccgtgcgggcggaacagggcgccgccgtgcctaggcgtgcagaggaaggagacgacaccgggaaccgctgatctaaccaccaacggtcgcgattggcgcacgtaccggttcggccggaattgatctgggccgttgaatccctggcaatcggttaggattagatccacggcagggatgcccttggccgtcggattctgatgagcgctcttgattaaaaaggaacttaccccttcatcattttaaatctgcaccattggatttgatctgtgcggtcggcatgcaaccataccccttcac

SEQ ID NO: 161961 - DNA, 782 bp, Zea Mays
gatcggttcctcacggcggctataatcagagaaggtattatagtagattagggtttagggttggtacacagatcacaagaacaaacaccagttatgatacacagatcacaagaacaagcaccggaataagaacttaccagagccagagcaccagatcggtccctcacgggcggctaaaatcacagaacacaaggtagtagagtagattagggtttagggttcaaacatagatcacaaacatagatcacaagaacagatcacaagaactaacaccagattaagcacttaccaaagccggagcaccagatcggtccctcacgggtacaatcacagagcaagaaggcagtagagtagattagggttcgggattcgagcacatatcacaagaacaagcactagattaagaagtctcgacctcgtcggagatgtcggctagaggaagaagaagacgaacactgaaagcttaccgtaaccaaagtcgtgaccaaaccaccaggcaccagccaagtagctacccggtgaggggaagccagggggacggtgaggaggagcggtggagcaccctaccgaagtcggatcgtgaggtggagcggcggagtcgaacggtgaggcggcggcggagtcgaatcgcccccaaatcgccaggagacggagagaacgagggcgagaccgcgagagacaacgtgcgaggcgagagagtgtgagtgtctgacgaggcggggcccagtggagagggggcgacgggattttagggtacgtagtagtgtgcctaaccgtgtctg

SEQ ID NO: 161962 - DNA, 458 bp, Zea Mays
gttcttggagaaataagaatgtaaggttggaccacataaaacaggaaatcttggagattcataagcattggttgtggatcaagtgaagacaaaggtataacataggtttcgtttttgccggtcttgaggagtttagagaagatacttgaccggattagtaggttagatagccgtactattaagaggggttaatgactttgatctgtgtaaaacttagtgcctcatagagcatctagtggttgcatttgcatgaggactaacagcgcttcaaatttcatgagttaaaaatcctttcagaagcttgtttgaaaagtgcaaagtcctggatgcgcggaccgtccgcgatccaccagtggggtccgaagtctgaccacttcggacatgtcctattcctttgcactgcggaccgtccaggccttggggacggaccgtccgcagtcctgaccagagaagactgc

SEQ ID NO: 161963 - DNA, 795 bp, Zea Mays
attggtgggcaaggattatagtgtcgtggccttgtaatcgatcgttgtgtttgacttccaccatgccatattggttttctcgcgttgtatttggagaaaaccaatcacaatcgaagaacaccactttgagttgtttatctccgaaaaacttgtactcgagtatatcattaatgactccataataattagtcacctttccttcatcatcgacagctctagttacaacttcagaatttgtcgtggctgctagaggatgagcatctttgaaccttgtagaacggaaacggaaatcattgacatcataccgaccataatgactggcagttactgcccctagggacaattgtcgaaggtccgagtgtatattgtcatttatatttacataatctcgaaaccaacacaagaaattaggccccccatcttttccctctcgacgaatctggtcacgttcacagccagacatccaattttgagaatcaaattcactgttagtataaggaaacaaaccttttagtataagaaaaacaatgatagcgacaatgactaaaaataaagtttacacttacaggagaaactgactcatctcttccatgtcgtcattggtgaaacagtatgctgtgctaggtcctacagttttgcccctccattaaaatatttcaagatcactgatagggggctcgtcgacatgataccgcaatgcaggggcattgacattgtgttcctctgcaaagtacaggcccgtgaatgatgctatctctttgtatttgaattcttcagtaatgcacccttcaactc

SEQ ID NO: 161964 - DNA, 683 bp, Zea Mays
cctcatcctacgactgcgtggggttcttattttaatttcactcagggagcttcctcttcagtgggtgtttctggagcatatgtgctaccctctgcggatggcagagatcagggagacgtggtgacaggtacggtcttagttgattcgtttgatgcccatgctcttttgactctggcgctagtttttcgtttgtttcgaggaattttgtgtcatgtgctggtcttttggagcagaggatgggtcacccaattgtggttagctctgccgagggctctattagtagctgttcagtctgcccgggttgttacgtcgttcttgctgaagaggtctttttagctaatctcgtggtgattcctctggagtcatttggtgttattttgggtatggatttatttactcaatattgcacagttatatcctgtttttggaagacagtgttattattgcaggcaccgtcaggtagggaggtggtattcttaggaagctctccaaagtacactctttccttgttgtcccagttactttcggatcgtcggtcaaggaggtcaagaatccttttctccatgatggtggagagtgaggctaccttgcgggtgcaggacatctgtgcgttgtgtgattatgccaacgtgtttccaacagagttaccaggcattccaccggagcacgatgcagcttttgaa

SEQ ID NO: 161965 - DNA, 419 bp, Zea Mays
gatagcaatgtcaaagcgtgtcagagggcttttagcactgtgtgtgccttcattggcacaagggacctgattcaagagtatatatccttcagggtatggccacttgtggagagctgggatatgccgaagggaccatcaccgattctagtgagggtggactggtccgactgaagtataccttcagattcagggagaagtttgatgagccaaacgacggctggctaaagtgcatcgaagctaccagtgatgagctacttggagcatactccaaggccgaagataatgctctgtccgcagcctttggaggtcggggcaagaaaagattaaatagggtatttgatgctattggcttcgtataccctgattaccgttacccgcttcgagggcaagagaaaaagaggaagattgccgcttcggtc

SEQ ID NO: 161966 - DNA, 441 bp, Zea Mays
gccaagattctggccatggcgccaccgcggaaggccatcacgccgtcaggtcctagttgggtgtggggaaaacaatcgccagttgttggatcagttatgagcgtctaggattagatctcgggtgaagggtcgtctcaaccgtagattctagagtgtgtgactgtgatgtcgtagcaacatacctcttcatttataaagtcccagccattgatcgtcgatcctgcggccgcaagcgcttagcgggtcatggagtgcgcgatctaatctggtgcgtcgggtttggatcggacggtcgtagtttcgagatacctcttcggtcgcgcaaccttgcaaatgagcccctcagtttctagtgaatcaacccgtagtacctctcgggtgtggcagagtctgggtgattttgcaagttaaaccccaagcttctctgtattagtgtgctca

SEQ ID NO: 161967 - DNA, 333 bp, Zea Mays
gttcttggcagacttaaccgtcttgccatcccaaggaattgatgtgatcttagggatggattggttaaccaaacacaaaggcatcataagttgcgcaaacaagaccgtccttctcactgaccaccaaggaaagtcagtttcttgtcaggctcagccacccgccaaggatccaatggtgtttaatctagcagtagaaagcatatctgtggtagaagaattcatggatgtattcccagaagaattgctaggaatgccgccagaaagagaagtggagttctacatagatctaatccctggcactgcgcccatcgcaaagagaccataccgcatggc

SEQ ID NO: 161968 - DNA, 822 bp, Zea Mays
cggatacacaccatacttcctagtttatgggaccgaagctgtcctccccactgaccttgaatatggcaccctaagggtaaaggcgtacgagaaccaatgcaacgagtcaagcctctaagatatcatggatcagctcgatgaagcttgtgcggtagcactactatggtcgatgaaatatcaacaaacgctacgacagtatcacgaccgccacgtacgagggagaactttggaagtagggtacctcatgcttaggttggtacagagcaacaaggatcgacacaattgtcaccatgcaccatgggaagagttgttcgtaatttgagaagttcttcgaccggacacctacaagctgaaagacgaatgaggcaagacgctcgccaatgcgtggaacatctagcaattacgatgattatatccttaacaaaaccctaacattaacattcgtacccgatatatattgtggtccgaccctactgtagcgaaaccaggggtgagccccagtggggactgagggaagaaggatgatgtagtaggccgaccccagtgacaagtagcgcatgtcctattaaatctaattatgttgccctcggtaaaccccaccatgctgacaattttccttttttctcgatcaacgcaagacacaaccctccctcatagggttgtttctcctcgactagactttaggaggaacaagcgccacccacgaccgatgcatcagcctggctaccccgtaaaccatccttgctcgtcaatgaaccgctcgccatgggctctccttggtaagatctcgtactcatcctttcctttgcaaggattgaaaaa

SEQ ID NO: 161969 - DNA, 440 bp, Zea Mays
cagaaaacatggccacctttttgctagctgatcaagttccagtgatcaacattaagttcaaaaatctacaaaacagaaatccctcctcatagtattgctatcaagaatcaaacttcatcagtagttcagtacaggtcatacttcagcataatataaagaccggatgtgatcaacaaaaggacccatctttattacatgcagcagaaatccatgccatacctgtcagcatggtccacagcaagaaagcaggaaaaatcattcatgcacgcccgcaataccatcttgtctcgggcacactagatctgaccgcacatgcacagtgcacttgtccaaacgagaaacggcttgcgtttagctcgagcctaaattccaggatttctacactaatgatcagaactttcccataatttcagtgcatgcatcccaatcctgtgcattcc

SEQ ID NO: 161970 - DNA, 329 bp, Zea Mays
cggaaatgccagacccctctcatgtggtccaacgtaggggaaaaagcactagaaggacctgcctttgtcaaagaggcggaagagaaagttgcactgatccgcagaaggttacttgaagctcagagtcggcagaagagttatgtagacaacaggcagagggaactccgatttgagaaaggagacttcgtctacctcaaggtttctccaatgcgtggtgtcaggaggttccaagtaaacgggaagctagccccacgtttcgtaggtccctatcccatcattggcagggtaggacccgcagcataccgtctggaattaccggaatccatgtc

SEQ ID NO: 161971 - DNA, 932 bp, Zea Mays
gttcgtggtggtggtggtgtccgttgccattgtcggtccttttttgtgcttgagctaagttcttgaaatatgcacaccaatgacaaccacatgaaggccgcataactagcacatggctgcaagaaaaggataaaaactgctcccagctaccactatctgccaaacacagaccacataattagcaagcgctagcgcagctgggatggagagagagctgagaatagtcggcgagcactggtcctctaactgtttcaacaggttggagatatagctctgagaatagtcggcgagcactggccctcttaactgtttcaacaggttggagatatagctcctgcaagcgtgttgctgcaaatgatcgacaggtcgcatcggatgccaactaccatcgtacgttgttgcgtgggtgtttggttcactgtcacgtgcgtcaaatgtttacctagaaccaggtcggatgccaaccaggtcgcatcactgtcatagcctaaggtcggatgagtcatattgctggtgccatgctagaaaccaggtctttcttttcacaggactaataatgtttggctaaaggtatcacaggtcaagcagatgagctatgtaatgttccccaagacttactaaccttatcataggctctaaacaacaaatgcatgtgtgctcatgatcatgtcttcgtttaccttagttgtccctagtgaatattttttttacaagggaaagtaaatcaccaactgttggttgcactatcagtttccaaagaacagacaatcagtatcagttgagaaccggctacaatgccaaatttctaagcggtactacaatcgagattaaaggcgtccgattgcatgcatggctcggtactacaaagattttcaataccagtgtttaatagaactagtactaaaggttcaacttcagtaccagctctcggc

SEQ ID NO: 161972 - DNA, 1282 bp, Zea Mays
ccgagagtagacggtgtgttacagtatctgccacaaaaaatgaaaccatttcgatacaagtatttcatcagaattgtttaggttggatattttgtagaaattgaatgattcagaacacagtgttggttctttgtaataatctcaatgtaagcaagtatactatatttcaaccaatcaaacagcagagggcaccttggtttgctcaagaaaagtataggcaggttccttcccaatctacaatctacagaagtcaaatggaccaaaaaaagaaatagttgagattgcccctattggtgttggggaatcctttttgcatggccactggaagatgatttttttttttgcagagttaaactagacatgattctatgagtttttctttattcgtagttgtaagcaatgaactcataagggaccagaatactaacagggggaaatattccttgctgcctttgtagccttgctctatttacatcttttttcctcgttcacttctctttgacaatatgtggtctgagaaggtattttgcatatgtgcgctgctagaaagtgggattcccttctaaagttgattcttcctgtcccatcacttcgtttttcaactctaagtccaaaagagtgagtccactccttgcatgaccaccaaccggaaagaaagaaacaaagaaagattgaaatgcaccaatacaatggttatatgatgcccacacggatttaagccaagagatggcctattcaaagacagcatagcagatgttatgaattttgacataaccagaaagaaaaatgtcaccaggagactatatccctttcctaaaacattttatttttcaggtttccttttcctgaagagggactattgtcaacagtcaatggcagttttctgaaaatagttgttctatgctcatagctcaagtttggaatcttccttttctgcaggaaagttccagatgaaagggcaggttgcttgacagccacaccacaagaacaaaatggaatgtgtgcacatcattggaaggttaatcaattaattctttcaaagatatatacaagaaggaagcaacatttaagttcattgaagtggaaatgacaagatgtcaactgtcgttgcttcaatacagtgaatggcactgaccagatgctatcaataagccacctctgagtagtgggtatcaagatgttgacttagcaatttgttgcaacatcattgtgattagctttacttaaaccaattgaaaacaggagtgaaaaagaattcatgaatcctaattaaattccacag

SEQ ID NO: 161973 - DNA, 658 bp, Zea Mays
ctcggtggttttgagcctcaaccatgaaatcgtggtgagtaccgcagagcatgcgcgaaacacatcctagacatgtgtctcgttagtcctcgaccgtagtggtgacacgatcctctctcccacatcctcgtgcctatgcgtgtcccaagtgccagccaccatggctagtcacctgtttttctggtccctcggtcaagtcccacgctcgtccttcatccctcctagtccatcggcatgatcccacatgaccttcaccttcaccgccatccaacatccttgtgatccacacttgcacgccacaagctaacaaacatggttgcacaaccaaatatgctcacaccctagttagtccatgacttaacccgagacgctacccgttgacaaccacccatcatcaacccaaacctgttgacaagttaaccttgtgtttgaaatcttccccttgatgagtgcattatcacaccaccatcaaacatatatcaacaaaaagggaagaagagaaattcacctaaatgaccaaaaacgatataaaagcaaaagcaggtcatctagagtgagcaacttggtccccaaagaaatgggcaacgactcaacacgaccaagcgaaggaacctagtcctcaagatcaacaccactagctaacaatcaaaaatcacga

SEQ ID NO: 161974 - DNA, 558 bp, Zea Mays
tgtcagacaagctatttactgaattgggcgcactgttcatcggttttcagtaacatcaccgtggataaggattggctcgccggcgataaggacgtcgtcgtggctcgggtaagacgtcggcagccacggcaaaggttaccggcgacgtgtcaaagcctccctgaggtggcagaccccggttgaacggcggccaccgtgccatccccaggttccgccgcgcggcgagctcacctgcgcaaatcaaatgtccgcggttctcatccgattccggccggtaggctataaattgaccacggacgctgcttcttctccacatcccgtgccgcagcaactaagcactggactcgagctcaccggaaaaacccacgtaattcccaaactccctcctcctctgttcttgctccgccgcataggactccaccgtggacaacactcttcgggttggtagtttctcaattactctctgttctagctcatgtatagtctcctattgctctctgtaccgagcaattggaatttggccgaagtccatcaccggaacgcgcccttgtcttgtaa

SEQ ID NO: 161975 - DNA, 566 bp, Zea Mays
gctccgtgaaccatggcgtgatccccacgcggacttcctatcctcggcgcataagaacggacttcgctgggctgtgacccccaccttctgtcggacctcacctcacgaggatttgcggccggttgaacacgtaacagaacgcgccgccgccgccgcgtatcgcgggaacccccacgattaatgcgggcggaccagctccgttgctgcggcgtataaagaccaaccccgtagctcccctcatcccctcaattagttaatttgaggcttccaccaagccgttgggagcctcgcctggcgcagggagatttgagtgatgcagcggacgtcgattccggtctacattcgggctggggcatcggtgtactacctggacgcttcgccatggcgcaacgaccgtgttcgtggttccgatgcaatgaaaagcgcaccaaaagccctataatccctcgccggagttggtgctccgccgtgaaccctgcctgcatcgcggacggactgctccacgacgtaatcaccggtaagatctaccttgatcaaatcgctccactctgtactacgtgtagaac

SEQ ID NO: 161976 - DNA, 447 bp, Zea Mays
gtaggttgtactgaacaggtgcagttctcttgtcacgcgcaggtttgtcctgggaacaagaatcagtgaatgaatgtgccagattgggcaaacttatgcaggaactgcaccaaaaaagaagagtgatttaatatattaaaatggaggcacgagggcagatagcaatagtaaaatggaggaactaagaagttcacctagatctggtgtctggcgcgcggtgtgtagagtcgacggccgagcccaccgcctacttcactttggctaggacgacggagggagaacggatctggcaacgacaatgaaggagagggacgtcggtggctggagcgacaacgacggctggagcggctgggatatactaggacgtctgtagcggcgaaaaccattgagtcgcatatatgtcccaaccgcatcataatcactggcggttttctttagtatcccgcc

SEQ ID NO: 161977 - DNA, 360 bp, Zea Mays
gggcaggtcgaaagagctaacaggatgatattggaggcgctcagaaagaaagtcttcgacaagaatgaaaagttcgcaggaaagtggatcagagagctgccgtatgttgtttggagcctgagaactcaacctagtcgagctctacatggaaacacacctttcttcatggtctatggttcggaagcagtgctacctgctgatctcaagttcggggcaccaaggttaatctttgaaaacatagcagaagctgaagctactaggctggaggatgttgatgtactcgaagaagagcgactgaacatggtgattcaatcagcacggtatcagcaaactctgaggcgctatcatgataaggccata

SEQ ID NO: 161978 - DNA, 455 bp, Zea Mays
cgggacctctagttgttgatgtctagtgctcaccagacatgttggtgaatatagagccaaccactcgagattatttgtctgtgaataactcttatttagtgaggagtctagtgtaccactagacacgttcgatgagtgcattaactccttagccaggctactatctcataatagctcatgtttggtgcaatgtgtctagtgcatactagatgacaaggtgttgtgttgattactttaaatgaaatctagttcactatacgcatcctatgaactggtttaatgcatactgaatacatccatagcacatgcaacaccaccaactcatccaattcatgcgctctttgggttggatttgttttcaaccttgtgtcaggctgtcatggagctacctagagctagttttaacaagtgtgcattacatccattaactagacccgactacatcaacctaccca

SEQ ID NO: 161979 - DNA, 335 bp, Zea Mays
gggcagtacaagggaaattaagggtgtggggggagttcctcacctcgagagggaactctagagcgcttgagaaacgacagggacgcagggaggccttgggtccacagtggcagagcttcggctgtacggggagaaggcatgtgagcacggaccgggtgaaacagaggggttgggggcaaaccagagggtttcccacgttgctggcgaagatgtggagctcaccgaggcaacggacgcggcagacgctcgacggcagccacggaataggcggcgaatcacgacagagctccacgagcgcgcgtgcaaagcgagagagagcaagggtgtttggatga

SEQ ID NO: 161980 - DNA, 499 bp, Zea Mays
tttaatgcactacagttatgcaattataatagctagtacaaatatgcgtaaaccgacgtgggccacttgttcgaacgtgggtcggtgacgtgtaacccgtgaattggggaagcgcatttaaacagacagttacgacaccgtaaatctatgtataaaattgcataaatggttgttactcccacaatcagagcgcccacgatcagcgcggccacgatcctaaaattcagcggataatggatatgcgccgtgaatttcgcgtccacgatattggatatacgcatggtacagggaaaataatcataatcttcaaaaaaaagtggacagtacgcatcatttgatagggcgcggctgggtgaagggcgtaattgctctggaagatggcggcgccatggggtaacaagtccataagtgagtatacgacgccgacgtctgttcatcgaccaaatcaatgcttggatatcgtaacaatggtgcaggaagaacaacaaggagggaacca

SEQ ID NO: 161981 - DNA, 560 bp, Zea Mays
gtgcaactcacgttccactatatgcagccaatcttcggcgtccatgggatcagcggaatgggcaaagacagggggatgggcgctcatgaattctgcccgcttgtctctaggcacctgtggcatctagacttgcacctgaggttgaggtgggggtggctgctgttgcacctgctacatcgctgctaaggtctgaccaattgcttggactgcttgggtctgcatcaggaacatctgctcaatggtcatcgggggtggcggtggcaactgttgctgagctgcatcttcatgtggtgcctactgttctggctgagcacgccttgcacctctgctcatgttcttagacatctatagaaatcacacacatatcagatctgactctacagtctttcagcataagaaaagatgtatagaaaatcttcataggactgaacaatttatcatcttcactgatagcttctcagataaagaggaaagtggaaataaagggattacccaactaaataactgactttattaataactacaccaagttgcaggggatacccacaccttgatgacaa

SEQ ID NO: 161982 - DNA, 465 bp, Zea Mays
gtaaccggtggagcaaagcacctcccacaagatggaagggaaaccctcatgggaaaggtagtcggaactaaaacgagtgtctcctccattgatggggtgggtgaagtcatctgtgaaagagggttagatgtaaatgttatggtggcagaaagaaaaacatgtgcccgggttgttaataggaggtgggttaaattagattcttttacccatttcgttattccttattaactatatttgttatatcattaattagacgcatttctccatagttcctaatttcatcatattttataatgcatgcatgctagatagaacgtctcctcaccgatccgaggggcgcttcaaaggcatccctacaattctaaggctggcctatgtggcctacttatatagccagctatttccccactattcataggcctttgatctaggtctagcgctctagtcctgacgattccaatactg

SEQ ID NO: 161983 - DNA, 331 bp, Zea Mays
caacaaccagtctggaccatggacagcaggtctcaatccatggcaaggcatggttcaggcatggcaaatgcctttccgagcacccggagtaggcgttctggggccacgcccgccgttccaaccttagcaagccatgacagcctatcatcagccacctcctgcatctgtcggcaccttcgacaacagcgctctttatgcggcactacaggctgccgcagttccaactcatccgcccaacacttctgactggtacttcgacagcggtgcgacgtcgcacatgtcgtcttcccctggtaacttatggatgattatacacattatctttggagca

SEQ ID NO: 161984 - DNA, 410 bp, Zea Mays
gccgaattcaactcatgccgacccaccagacttttcccctgcgcagcccaacttctctcccgtgcaccgacaggcgaggaccaatggccagtctcgccgcgtggcaggtgttgggtgtgtgcgacactggcgcgtggggccgcttggcagccgcgcctaccaaccgttctgtgcgtgcgtttcacagacagttgggacccactcgtcagccctcacagatgcgcttccgctttcttcgccatggctgtggtgggcgccgtgctctgtagatctcggcagggatggttattccgcttccactgcgaccatgggcacgctccggatataaagtcacctaggcctcagctcggagaaccgattagcacgtagacatacctgtcaccgcgtgagagtcgggccgccgctgacgc

SEQ ID NO: 161985 - DNA, 409 bp, Zea Mays
cagcgaaaccatcggtacaaactcgtttcctgcttgaggcgatggatgagagagatcggttggtgcagggaaattgggaccgcatgttcgagtcaatggaggcgatgactggaagactgaaggaagttgagcgggtgcagcaacaattgttgatgcagtctgagttggcggctgtggttgctgaacaagctgcaaccgagaggaatgatttgcaccacaaattggaagagactggtcgggaggtgtctcaattaaggctggaacagatgggaagagaattgggagaatcttcgacctctaatcaggatcatggtgctaatgatcgtggtccacgacatgatcaacagatgccccggggtggccatcaacggggattgagaaatgatcctcgtcaacctgtggattcagg

SEQ ID NO: 161986 - DNA, 364 bp, Zea Mays
ttttgaaatgcgaccgttgacaagtgtcattttactgtgggactgttggtttcctgaggcgccttttcgggtctatgaaagccgttgcggctgcgacggagaattttgtacccgctggtttacagaaaaccctagattcttttgccttagcacttgctgcacatctcccgctttttctcgccgccggtgaactggcccgcgtgaagtagaccgaccgccgccacagacggtatgttatgtcgtcttcttcttcttcgtcaccatttgccgcggccgtgttgtcaaacacgccgtcatcagagaagacaactagcgatccggtggcggcagtggagttgctaccggatcacattgtcgagtttgg

SEQ ID NO: 161987 - DNA, 507 bp, Zea Mays
cgtttttgtgagatgggacacaaatggactgttatgaacttgcaaatgaattgttacctgcaaggaaaaatcaacttcgttactactgtaacttgccatgaagcttaagctgaggactgtaatctatcagttgagcacctctacacagtcatgttgacttgcgccagagcaaaaatttatgcacagtgtctctgctttcaagcgatattgttttcagttaacacctatacgtactatcaactcatagaaaagttaggcctcagctgtggttactagtcaatacatcaacggttgtaacatgtagtacatgtctggtaaatatggcgacatagtaagtataaacagaagttgttcttataaacctgagatctttttgttcatcttgaacgcatcgcctattcttgacttcttgtaaaccaacagaaatctgttgccttttggcgcctcttattattatataaacagaagctgaaacccgggggtcgcgctggtgatcatcaggtcatt

SEQ ID NO: 161988 - DNA, 583 bp, Zea Mays
ggcgcacgttgtcgccgttgtcctcggctgtcatatcctcctagctgctcgccaccgacatttggcgctggtgttggtggttggtccacgccgatggtcgtcatctgatcgggggatggctctacgcatgcgcgtaatctgtgtgctgcctcatcgtcatagactgcgtgtttacggttacctgctggaccttggctactagttcgggtctgggtgatgattggtttcatggatggttgagggtctaggtgatgatcaattttcgatgtattgaacccaacatcgattcagcataccctactctcttataggagtactagatgcatgggcgtgaaaatggagcaaaagaggtagctgttggggttgggaaagtcagacctgtttctttgacatatgctcagtgttggatatgctccgaacgcgggattgcttgaatttgaagtggaaggttcagaatcggtgaactgaacatgatgttacagacccacttgtcactgaagctgaactactatcagatgattaataatgaaactttccctaagatcacacgtctaacagtctttttcatgaaaaccgatcagct

SEQ ID NO: 161989 - DNA, 594 bp, Zea Mays
gaagaagggaggaaggaaggggagaatccaaggtgatttttgtgtttatctcatgttaatttgtgctgcaatccgattgaatagatgttgcgtatgcgaattggtagtggtgctgtccagaattttagtgggtgggcgaacaacagtagtattagcaatttctgggaatttttcgtggaaaattaatgagaatcagtatgtgaaccatgtagagctttgtcatacctttccaacgagtacttatgcgctcaattcggagttatagattaggagatatcgccgtttgaatccgggtatgtggctgtccaaaaaacagatttttaggtgggcgaacagcagcagtattagccgtttctggggatttttcgtgagcaattagtgataatcagtatgagaatcatgtagagctttgtcttacctttccaacaagtacttatgcactcgattcggaattatattttaaaagatatcgctgtttgaatccgggtatgtcgctgcccaaaagagaaaaaaacatattgcagggtttatcttgtggactgttttggggtatttagatgttggaatttaattataaattgtatacaaaacttg

SEQ ID NO: 161990 - DNA, 433 bp, Zea Mays
cattctagatcaacgtagccacgagcgcgggcttcggtggcctcgcttctcgctaccagaatatcgctagtggaacgctcccttgccacattttggtccagtaggaggcggagcctgtctgccagcatccccgcgaacgattgaaaacgtgaaagtcggatgacaggggattagcaggaggaacgtttcccgcacccagctacccacacacggcttaccacaagttttcggtacgtggttgaaagttgatcgaggttgtctcacaacgccctctcacacgcatcgccctcctcacacaaatctctgcacagggctagggggtcgttgccctcagtagagagatctagagcaagtcggacgcagctcgatcatcaagccccgacgacacaatctgaggctccccgcgagtaaggagagacaatctcccccttcg

SEQ ID NO: 161991 - DNA, 374 bp, Zea Mays
gttcattgggtctttctataagctttgctgggaagttatcagatatgatatatgcatggctcttcaacatgtgtttaatttccaagggcatggagtttattgaacacaacatatataaccctcatcccaaagaaggaaaatgcaaggacaacctcagacttcagacccatcagcctaatgcacagtgtggcgagaatcttatcaaagattctggcaaaaaggttagtacaacatctacctaccatggtttcgcactgtcagagtgcattcattaagagcagaagcatccatgataattatagatacgtgcaaggggcaataaaccactaccacaaatcaaagcaaccaatgatgttcctgaaactggatattgc

SEQ ID NO: 161992 - DNA, 794 bp, Zea Mays
caagatttttggtagctttgccgttgcccctagctctggctcttcggccaccttttctttggcttcggtaacaggtttcggcgcttcggctgacccagttgcaggtgcttttggcacttcagccgattcttctttggagccggcaggagctgactgtcgtggctcaatggtggaagatgtcccttcaacatgcttcagcaccatggccgtctcaatgtatctaggccggtgcgtcaacacattgatctttttgcccttcggcgcagcagaaatggccgaagtagcagcttttctctttttccctgcttttgtgagggatagttataatatggttatacgaaaccaataatgtcgaaaactctattcaaccttttcttgcctcgtccttcgaatgccaaggtcattgcatcatcttcggcccttgtataggcccccagcaattcgtcactggttgcctcaatactgctcagccactcatcgttcggctcatcaaactcacctctgtatctgaaggtatattttagatagaccaggccgccctgactagactcggcagcagcttccttcgacatctcccaatcactcacgagcggccataatctataggcgatgtgctcctgaaccaagtctcttgtgccaataaaagtgcacacagtgttaaaactcctattgcatgcttctatttcattcccaagagcagtggctgaccttctgataccgaagcgagactaaatagggtgttggataatccattttatatcttccctctcaatcaagttattcttcacataaaa

SEQ ID NO: 161993 - DNA, 447 bp, Zea Mays
cgaccacgtgcatcgacaacgtggccgtgcggccgtcgccggagtttgcatcctccgccgcgattgtgccacgcttccggtcagtgaccacgtcgccgtgaactatgatcatttcccagtgactgtcggggcttctcatcccgtgaactgccacgaatcaccatgccggtgactcacttcttttccggccgccaccgcgccatcctcaattcaagcgccaccgtccctggaaactataaatcgagcccgccgttggctccgcaacctcattacacatcacaccgtccagtatcgcccccaagcttccaaccgtgagctccaatttcgagttgccccaattctgttccgaaacaccgctgggtcgagctcaccgcggccaacataattcgagttagctcacgccttctgcttcctcaattgagtattctcaggtacccgtgatgctcc

SEQ ID NO: 161994 - DNA, 625 bp, Zea Mays
gacacaaccaccctcctttctctctctggacgtgacacgctcggtgtgggcgcgacttgatcatgtggtgtcgggggcggatatggcctttgtatatatagccctaggggaagaatcgggttgattggcgcgagaaacccggcgcgatttggttgttgggggcaatgaaatcctggcggctagacttacggacgagttcgttgagccgaggaagaaagttctggtagatgggccccataggacagagacccccatggccatgtgggagagaacaactggcaagtggggtctagttgtaggagaaatggggagaaaggggagcgggcaagaggctggtaccagggcccctgttgtcagtgtggtgtcgcggccaatgcggtggtagagtgggtcaacgttaaggatggcaacgggtaaaatatccgcggatagtgtctctggatatccatatccacgacttatatccgatatccgaacccgtacccgttacccgctatggataacaaacagtatccacatccgttacccgcgggtaacggatatccgcggatatatccgtttgcccactacacatacaaaatatttaaatccagcaaattcaaacatgatatcatatttgtccagc

SEQ ID NO: 161995 - DNA, 1126 bp, Zea Mays
aggacgtctctgaacaggctgagcatgaacaccatgagagggcgattcatgtcctttctgctcgactcagaaacccgctgctcatctctcttcctcctaaagcaaaaagaagttagatgcctatccctctcacaatactcacaatggtacctcacctctctcttgggtggattttgtttgtgggagggggctttctttttggatggctgaggagctctaggaaggggatcactagagatgtcggaaaaggtgtcaagtgtgttcctgagatggttaggttttggaagccacacttatttctgaggaggagctctcactggttcatcaatcacaccatctctcacaggggtgatagatttagcaggggtggttttgataagcttgggagtgggtgaaggtttctctaaaggtgtcaaaccactgcactcaccaaccttcccaaagcgagcgccacttccatccttagcagcaaagcctaaccccgggccgccagttcccctcttgaactgactgaccatcatgctcaactagggctcactacacgacacccaactcaagacagatcgaagatatgtgttttcttcctcaattcttgtcttgtcgtgtctgcaggactcaagggcagattgcaaaccctcacaaagtgcacactgcgtaggtgcaggggcactcattgagctagccttctcaagcgaagataccatagcgtctctctgtgctagctcagactgcaagccaggacaaacggtacacgcacccaacaggatagacctagatcccaactcatcacgctcatctagcaaggtggagtacttggtctgcaaagtggcgatgtttgacatgtgtagagcgcactcatcacattcagtctcgtcggacacgtcaactgaagctctagcagactcaagttccctaagcgtgctctcgtacttggatctaaactctctcctctcatgagcagcctgcctaagcaacttattctgactagccagagcatcgttcagctcttctatctcagcgacgagatcatcggcggaaggtagtaccttagaagtagtgtcatcgccgatgtctttgtcctcgtttgtgccgaccgcatcctcaccaagtgccatggtgcagaagc

SEQ ID NO: 161996 - DNA, 681 bp, Zea Mays
tgctctagcctgcggacggtccgcctataggcacggacggtccccgataagattagatcatgtggttaagctcctttattcgcgcatgtttatccctttaaagtcatgggagttgttggagaacatctaggaaatggcctagacctccccttatatatttgaaggggtatgaccgattgatgcatcatcaatcgaaccaatcaatccatttatcaattcctttactttcttgcctaggagtagcgagtaacatagtcttcttcatctcaatcttcacatctctacaactctacatcgtctagaggcattttgggtggcctgccgatcctaagacagaccatatgatctctcctccctaacaaggtccctcccaagggcgagatccaagtgcagttggcgtacgccgccgccctgcgcatgcgcggactgtccggccaccaggcgtggatcgtttggcttggcgcagggaaccctgctcctgctgtccagttcatggaccgtccgaccctaggtcgcggactgtctgcgccgtcacagagagccttccaagcggaacaactcttagcgattggcgcacagattgatggcaacacatttattggcaactccgcttgggagactaagatcggatctatcaggtcgaccccctatggctggtccaggagataactctaatcactc

SEQ ID NO: 161997 - DNA, 571 bp, Zea Mays
gggtgaaccgtttttcatatcaactcttgatggatgaacagataaacaaatttgctgaaggtattcaagaagatatcaatgatattgaagtggcaatatgtccagtaccacgacatcagttcctcagtagtcttctcataaataagctagaggtgcaaatgcaagatgtcttgttcgatgatggcctcataccctcgtggtgtgtctatctggtcgagaactgcccattcctgttgtccttggacacacggtggaagtacttctgcctgactgtacatcgctcattctttccagaccagattaaccgttattatccacaaactaaaaagtacagggtagcccgaagtgctatcattgaaggtgctgtatcagtgatgaccaatcatggtccaagcaatagaatcattgaggtggagttcgaaggagagattgggactgggcgaggtccaacatttgaattctactctacagttagtcatgaacttcaaagagctgggctcggaatgtggagaggagacagcggtgaacatggattcgttcatgctccttttggactatttccaaagccgtg

SEQ ID NO: 161998 - DNA, 297 bp, Zea Mays
gctgtcgcacaaccttgtcgtgatagcgtcttagagtctgctggtaccgtgctgattggattactgcattcagccgttcttcttcaagtacatcaatgtcctccagcctggtggcctcgacttctgctatgttttcgaagatcaaccttggcgccccgaacttgagatcagcgggcagcactgcctccgacccatagaccatgaagaaaggagtatttccatgcagagctcggctaggttgggttcttaggctccaaacgacatagggcaactcccttatccactttcctgcgaatt

SEQ ID NO: 161999 - DNA, 368 bp, Zea Mays
aattactacaactttgaatagcgatttaggcatttagctttactccactagaaatataactaaacaaacgtcaatctcatatccttgccttcatttttggccttttggaataaatagtactgtggcttctgcgtccatagatgcatagagctgcaattattacattgttttacagccagtgttggctgaataaaagttaacaagtagtagcaccgtccaccacacatccataagttgataagctcatgcacatgcacaaagtcgacccagttcctctgagcgcctagaatttacgcattctatttcaagaacttctagaatttgttaggctgtttggtgtaagtggatggtggaaatctgctactgac

SEQ ID NO: 162000 - DNA, 655 bp, Zea Mays
ctcagcagcgaactttgaggtcagggcgcccaacgcaacatgatcaacgaaggcagtcgcctgccatgaaaggtacatcaaattcgcaaccacataaaacacaacaaactgacgaagtccaagacgactcacatgcttcagctgctgggaaatagaacccgccacgtctttaacggtggcgaccgacgtaatttcgttgttggcgcaaaacttggaccatgggtcctgcgaagcacccttcgcctcggcagccgccgcagccggcgtagccaccactggagccgggacaacatccagttgcccggcatccgaccctgcaccaaaatcttgtccaagacccagtccccgtgaaaaataaataaacattcaccaacgagtcctcggcctgtgtgggcctcgaacatcatgacaccacctacgcggtagtcatccacgcagatgtccatggcgaggtcggccccacccgccgccgcctcgtcgatgcgcgtcggagacggtggccttcgctccctcgtgggctcagccaagggcggcttgctcgagccggcagcgacagccctcgcacccgacgaagatttgctgggcctggggacggctggcttcgcagctggcggtggtttgctgctgccgggggcggcaaacttcgcgcctcccc

SEQ ID NO: 162001 - DNA, 583 bp, Zea Mays
tagcgcgagccaccgaagattggatgtagggaagttcttcctgaaccagtataaatcttgcgcccactaagcacaccattcggaccatagaacatgcacaaacaaatttacttgtgggagctggttcaaaccaccgacagttggcatgccaggtaggggccttgtgcattctcgacatcccctccaagctccggatggccggcagcgacaccgtctagacccctggaatgaccatccattttggaggccttgacttcatcctcaatagtgaaggggagatggacagggccccagaagcctgaccctttccacctagggatctcaacaccatcacggaggcactcggcggcctccatgctgtctggaccctcggaacgtccatccatttcgagggctcaactttgtccttaatagcgaaggggagatggtcaagtccctagaagcctgagcccttccgcctaggaatctcgacatcatcacggtggccctcgatggcctccacctcgtcccgtaggaccaaggatcgaccttgccctttgtgggcgacgagataagaggacagatcattatccacatgggatcc

SEQ ID NO: 162002 - DNA, 1671 bp, Zea Mays
ctcaattgcaaatggtcgagtgaaatttggaagggccagaacaggagctgataccagtgattgtttcaaggcttgaaaagctgtgtcatgaacctgtgtccacaaaaacactaccccctttttcagcaaatctgtaagaggtcgtgcaataacaccaaagtttttcacgaacttcctgtagtaacctgcaaggcctaagaatcctcttaattccttgcaattagctggtgttggccaagatgaaacagcctcaacttttgctgggtcagtagccactccattggggctgataacatgacctaggtaagcaatttgttgtttggcaaacgcacacttagagagtttgatataccactgctccctgtgtaggatttggaggacctgtgtcaaatggtgcaaatgctcgtcccatgtagagttgtacaccaaaatgttgtcaaaaaataccaacacactcttcctgagtagtggagcaagtgttgaattcattgcactctgaaatgtggcaggagcccctgaaagtccaaagggcattactctaaattcataatgaccatggtgtgtttgaaaggcagtcttgtgttggtctgttggattcattcttatctgatgaaaccccgctcgaaggtccaaggtagaaaaccacaccgccccatgtaattcatctaagaactcatcaataataggcactgggtacttggttttgactgtcagagcatttaaatgcccatagtcaacacaaaatcgataggtttggtccttcttcttaaccaatatcacagaagaggcaaactcactgtgactatgctgaattatactagactgtagcatttcagacacttggttttcaatctcattttttaaagcaggggcatatcggtatggtctcatttgtaccggtctagctccagtaaccaaaggtatttgatggtcacactccctggttggaggcattcctctgggtatttcaaacactgaagggtactgaaacagcacaacttgaatatctgcaggtaggtcagacaaaatggcttgttctttgtcagataactcctgtatgctgcaaacttggatgaccgctgtctgcattactgaagacttcaccccatacagggtaactgtggattctctgagaggaatactcagccacttttgagaccaatggatcaacatgggactatgtttttccagccagtccatccctacaataagatcataggtagatagtggaaggaccttgagtgtggatgagaacgaaaccccactgatggaccaagaagcattcacaatttggtgattgcaagatagttgtgacccattagcaacctgtacccgtaaaggttggagtactgaagttacccctgtcatattatcagctacaacactgctaataaaagagtgtgagctgcctgaatccaacaaggctaaaatgtccattcctgctatatgaccaacaaacttcattgtgcgaggagtgtccgacccttccactgctgcctgagataacatcaacacatttagctcatgctcgtcctcctccatcggtgaggcatatccaatttcagtttcaggcacttgggccatctgccacaattcctcaaccaaatgtaattggactgtctctgaacacttatggtcacgagaatactggagcccacatttgtaacataa

SEQ ID NO: 162003 - DNA, 490 bp, Zea Mays
ttgagaagctagcgatgcaagatgtggaaagtgtcaccacactcggctgacaagtgcgctagggccgtcgagggtcgagcatggcaatcggccccacaagctgaggctacccaaatgggtgcagcaggcgccgttgctcagggcagcatcaagaagaagaagaaccacggtggtgagaagccactgtacggcgctccaatcgctgctgatgtggctggggatcagaatgcatgtggcacacactcacgccagtagggtggtgacagcgggtcgtgccctattcattcgaccaagttcgcaccgccgtgcatcacctcttcccttcggttcacctatccttgctccccgtatttaaatggaaaaagctaaaattatgcacaaatggggatccaaaccatggttgtggttctaaaaccacattcacaaccacctagccaacagaaaacacatgtttttgtattttatactctatactcaagcataaataaag

SEQ ID NO: 162004 - DNA, 825 bp, Zea Mays
caaatttcatccacttctcagcccagtgtatggatatggggctgtggctctcaagccaatccatgcctaatattagatcataaccatcaagagacagcaacttgaagtcagtctgaaacatcaccccaccacagtaccattgatagtctagtataaactgtttgctcatcaaatacctaccatcagtcacctttacccttaggggtgtctgcaagagctgcatcccttttaccactccagccaagtgttcactcatgaaactagctgaactgcctgaatcaaccaggaccaaaacttgctggcaatgtatagatgcccataatctaattgttctattgctctcacttccactgacagcagcaacagagatagccagaactccctcttcagttgatgccttagtctgttcctcaatctcctctttctcatcctcattcacctcatcattgacagctatcgcccacatttcttcgaccaaatgcaagggaacactgctggaacaactgtggttgtagccccacttctctccacatttaaatcataaacccttagctcttctataggattttaatgcagcaagtttattttcttctgccttatgtccattagctgttgtcttacgatgttccccatatggtgtaaacccacgacttacagggactgctactgaatttactcccaccaaattaggttttcccggtggctttgaatacccactcatctccacccttctattttccctctttccagtgtgcatcaacacatcctcttgcaacatggctagagaacaggcagtgtccaaatcaactggacgttgaatcacca

SEQ ID NO: 162005 - DNA, 530 bp, Zea Mays
gcgaacgatcgtggctgattagtggtggctggttagctgatgaccctgcggagctggtcacgggcttaatttataggcggcttcgttggtggccggtgaatcggacgagacgcgcggcggtcggaggtagaagaaggtactagcgcaagcgctaggtggcttctaccgtggcggtcattccggcgatcaacggagaggctagaggaagtcatggcgatgcggtggcgcggttaggacacgcggcataaggctggaaggtggcggtgcaccggcgaggttatctgcccagccgcaaagtgaataagaaagccacggtgagtcaccggagtgacctccagctcaccgccggcaaggatctttcaccgcacgtccttatccacccaccccgagcgcgagtcctaacgccggcggcacgaatcacggcggaggagtgatcgacggcgaggggataaacctgagattcttcttcagtcactgtaccatggcgagtggtattcagacaacctgacagagcactttggagcttggtt

SEQ ID NO: 162006 - DNA, 754 bp, Zea Mays
gtaagaggcgatcttataaacctagacctcctagagatctctacgcaagatctcacacgtctagaaaataaataaaggtttcactctcagcccagtcctggtgaaattggatccatcaatcatgtccatggtcaaggtatgctttctctttttagcccctcttgaggtcctcggcttcgttgttaccatgaaatctgggttatatatctagtattgttgctcggtttatgtccccacttaatactgaacaaaggcacatgttgactgacacctgatcttaaggaagagtccacattctcacgggtggtttggagctaggtagccgcttagcttggtcccataccgtgagcctacaccttacactgccccataatagctgacctagtactttccggaccaggtacctaaaatcctacacctcattcaaaattaagggtcggatctcttaaactctgcctggcaaaaactcggttatataattcaatggaatgagtatagcaaagctaagatctcaagggctcactgctacgcactactcccgagccactctcagaataccttacgctcctaagcaatattcttaaaccatactcaagagttgctccctggactaaaggcaacccccacgtctgggataacctccatggagccttagcagctcggggccaggaaagagaaactcttggcttccgagatcggataacacgagggcaagaccactttctttgtcttaggcagcaacaacagtatgccg

SEQ ID NO: 162007 - DNA, 397 bp, Zea Mays
gtagtagcgcaccagcgccttgggatctttgatctctaggcggagtgggagctaacagaggcgacacgagaccaattccagcgcgaggaaatgctccagaccaattccaggtggccaaggagaagacgaagaccacaatcgtgcactacaaatcatctggacgccgactcgtccttcgcctctctgggatccggcgcgaggaaatgctccagatctacgtcgtcttggtacgacacgacgaaggaggacaagtggtcgttggggatggtggggatctgaacgtactggcggtgcaagggatcgcatggtgtgaggtccacgaacgtggtggtggctcgggaggaaggagaagctgaagttaacggcccacacgacgacgcgtgcagcgggagcggac

SEQ ID NO: 162008 - DNA, 1300 bp, Zea Mays
aggcgttctctggacggcttctttcaggtacgcggttagggtttccagtagatttcttaggttcgcattcttttccccatcttgcttcgcgtctttctcgcctctggtctcttccgagttcgtcgcgcgaaagtttctgtggggggtggatctcctctccgcttcgcccgccttcgcttggtgaggagtggcctcttccgggtcgctctggtgtgtcggctccgatggattcgaagaatcgaaaccctaactgggatcgatggggtccgaaggaggggccgcaaggttctcagtcgtgggggaagaatcggaacctcagctggcgtttgaagtccggatccggaaaacctgatatcaaagaagacattcctgtctccactcccggtgatgccggtcagccaggtatcctcaaaaaccccccgcctcccattctaaaatccgagaatgatttggtgcgtagggttttttgccagaaatgtggtttggatggtcatcatgctagggaatgttttaagtctttgtggtgcgagatctgtcgcaaagaaacccacaacactgctcggtgtgttcttcccaaacagaataaacctagtatgccgattgttggtatggcggcggatgggttagggttttactcttctcatttcgccaaacccctttccaacaaacctaaacgcagttttattggcttggttaaaatcgttgagggtttgatcaccgctaaagatctggagaaggatttcggttttcactttccttggggccgcacttggaaagctactaagtgtcattctggcttcctcatgcaattcccctctcaagagagattggatgaaatgattaatttccctgaattgaaaatgaaattgtctgcagccaaaatctctgtctcctcttggagttctcaggctaagcctaaatctaaactgcactctgtgtggattgtggctgagaatgtgccagaagagttgcaaaattatcaggccatttgtgaattgggatccactattggggcagtggaagaagtggatattaactctttaaactctaaagaaattgtgagattcaaagttcatgtgaagagtgttgctatgatcccccctatcattgaagttggtgtcaaacctttcctgtatgacatcttcaaaattgacaacatcactgatgaaggttggaatgatgactctgttaatctgggtaagagggcttcggttgatagacaagggtttggtgacatctctcttggcaaatatgctaaaaaggccaaaagtggtgatgaggactctggcaaggacatcaa

SEQ ID NO: 162009 - DNA, 482 bp, Zea Mays
ccgacgtgtatgtcgtatgacgggctatgccattcctttggttaatcaacttgttagatggctttggttaagctcgtagttacgatgaattacttgttgtggtctaaatgcgtatggttatgatcgcgggtaaaaagtagtagtactcatgtgatgtctaatttaaaacgcaaattgttgagtgattatcgtgaagaatgcatttttaaatggttgtagtaattttagtgcactaaatgacttaaataaaatttgcaagtcgatttgttgattctaattgattgtcttaactcgaataaatagtaaagcgttagagtaattcaagtctctcgaacgcggcgattcttgaattatataggagctgaaatttattgattgctgttttggactgcacgcactgttttaattgtgctgtatgtttgatgaactaaattgtgttttctatagatatgtgctatagaaaagtggtagataactttatt

SEQ ID NO: 162010 - DNA, 953 bp, Zea Mays
ctggactgggcgtcaatatctgaaaaactcaggggctctggcgcaagatttctgagacacagagaatagtgtcaaggacggcgggttgatatcttttaacccaagggtctctttagcaagaatccagagccgaaggggtacggggcgttgtcggccgtccgatcaagcacggatggtgaggattagatcagcgcgatcgcgaagcggtatgcgcagggaaccgttggatgttaaaacgacgggtaggattttattatcctagatccaaccttgtccgcccaaaccagatcgacggatcagatcaaatcaacgcgaaagggtacacgatgactaatcccagtcgttcgctgagagatcaacggtccacaacccatcatctccaaatcgtgcccatacgcggcggtgccgccctgcccgcggcgcgccctcgccggaggggtgaccaatccgcgcgcccacgccccgatctcacaatccgagagcatctacgcgttgccgagtgaaaagcgaacccaggagagggattcttaccgggggtcgcggcacagagagctccggccacggcggagcgcgggtctggcggggttctcaactccggtgaggaattcctatggttcctgctagattcccgccgattactccctcacacaacttcaacgcggtctgtccgccccacgggtgaccacaccggagcccgaaccataccgacaatgggtatccacgacggcggcccgaacatgaggtgatggcggcacaagagctcaccgctggcttttatggcccagaggcgagtctgggtaggtgccaggagtccgaccgaagcgggttgttgcggatttggcggcgaagtcagattcgccccagatcgcaacggcccagcagcgtagctcgagtttgttacggtagcgatgtggagaagaagaccctggaatgcgggccccatgtggcggtac

SEQ ID NO: 162011 - DNA, 866 bp, Zea Mays
agcatataggaggcaatatcaaggtaaccaaattaccaaacaaaacaaatatgaatactagaactggacagtggagagtggacaattcagatttcagaacatcattgaacattcagatttcagaacatcatagaaattatgaatactagaattgtcaggcactcagatcacattttagaattaagaattcagatttcaaaacatgaactgaacatcactcactactcactacataacatatgatgtagagttgcagacttactagtatataaatgccaagtaggcaagtatagaactacagacttactattgacctaaagaagtagagcctcatccaattgaaaagcagcatcactagcagccctccacccgactcagattcttcttcctcatccacttctccttgagtttgtactggttgttcagctagatgatcactaccatcttcatcatcaggataactaccatcttcttctccaacatcttgagcattccttggacgcttcctagttcaaacataggtccttggatgaggctgagaagaagaagaggccccccctaaccagaccaacagtagccctaggtacattttggccccagagaccctatgttgcacccaatgcttcatcaacggcagtccaaagattaccactatcagattcctcatcaacccattcattttcccattgaaactcttcaagcaccagtgggttgcttttcttgcgtttggaactgagctctcttatttttgcaaaccgattttctattttctggttgtagctcacatacaccaacttattcaatctttggtgctctaatatgtttctttttgtatggacctgcacatgcacatacatgaaatcagc

SEQ ID NO: 162012 - DNA, 769 bp, Zea Mays
ccggccagtcttgcccgcaggctcgcaggcgccgcccaccgacaccgtaaatcccagcagcccagccgcgcccaggtcctaccggcggccgaccaccgtaaatcccagcagcagagcagcccagccgcgcccgtgctgcttctgctgagagctgacaccagtggacgcgctcggctgcccgcgctgcttctgcttctggagttgtccctagttttttgttcatttaatcatttttgaccttcaagcaggttattaaagtatgcaagattgttatttcctattgtctgcctgtgccaagttctttgcatgcattacatgtgctgctggtgccagtatatttttaattttttatgggagacaagacgtctttgttcaggttatgtgtacatatgtgctttccaggtgttctttttttcttttgtgtgtgcgttgacaattgcattacatgtgctgctggtgcgcctactgctacttctaatccaagcgttcagattatgtgtatatacttatgctacttctaagcaatttgtcgttgattccaggttcctcaaaatcaaatacgcgtttcggtgtgtacaggaacatgaactgggctaactttttctgtgctagcgacatggcaacttatttcatccaactgatccaagcgaccaagccatagccaattagccaagcactcaactgctatgtttgtggactactacctgtaacctgtgtgactgtctttgtgaaatgtgaaccattttatgtattatatgtcttcactctt

SEQ ID NO: 162013 - DNA, 343 bp, Zea Mays
ctaatgcacctactatatagtaaatattcgagtaaaatacaatttcgttccttaaacttgttgagctgtgtcatcctggtccataaacttttaaagtatgcctcttaaaggctcaattgttgttcgagtctcagttatatcctaatgggttgttgtggctggactaggcccatatgtcaattgttgtggtttgttgcactccaaccacccttctccctccctcccatgccgccacgacacaccttggtcgttgggccgccattgctgtcgcttagccaagctcgtcacacggccacctcccctaacatttgcgttaggtttgcctgaccaccctctatcctcc

SEQ ID NO: 162014 - DNA, 634 bp, Zea Mays
ctctcttgcctcagtcgccagcacaccgagcttgtcgtggggaacacggtccgccgccaccgttctaccgattaagctacgtcgggtcgttggcctgtgaccaggagtgatcgcgggcagctaccgaatctaaccgtggcatctctgggcgaagaaatccatcggcgcacttctaatcgctcgccggagttgtgaaaccggggcgcgtccgccaagcgccgtggccagcgtcgtccgcgctgcaattgccggtaatactaccacccgtgaattcgccttaatctacgcattgggtcaacactgttagaacatagggattaccaccgtggggacgggcgcggtgttcatcggcgtttgcgccgacgtgcgagcgtggcgccgccgttagaaaccacaggggaagacgatacccgagcaccgtccgatctccaacgagcggctcggattggagaatcagacaccgtttcggtcgctggatcatcacagtcaatgtgaaatcgggcggtcggatggcgtttgggcgttcattgaatcgaaacctttagatcgtgatccgagggctctcgttgatggccgtgtgattgttggatagatctaatcgtcacccttcgattctaatccaacggtccagaac

SEQ ID NO: 162015 - DNA, 511 bp, Zea Mays
atcaaacatgagttcaccataatagaacaaacgagcaccaccttaacgaactaaggactaacgactaggaactaaggatgcataacaaaagtggttgattacatcgaggactcaactaaactagatacctaagctggtcctataggtaggggatccatatggaagttgttgttgtggttgtgacctgtagtggtggtgcacctcaagacgggtgggaaggcctctctgtactcaacaagctcagctcccatcttctagagtcgctcactggtctggcacaactcatccaaagcatgatccaactctgtgtttagaaccatggtgagatctgtatgcgcatccagccttagattaccttcatctagaggagagacaatggagctggtcatactaccaccaagccagtgggggtagtacttgatgcaaagatcgtctacgctcccaaattcgaagctgtagaaggacaaggcttgtctcactattgctctctgtctcgttggagatcctctaa

SEQ ID NO: 162016 - DNA, 968 bp, Zea Mays
cagaagtcatgaggtttactatttttgtttgatagtgcataaatcatagagcctaacaaaatttgtttgactaaatttggatgagtattccttaagttatgcatttaactaatttactgcatatttaaagaattgaatttcaaatggaaaaggaaaatctactttgcactagggtccctggtatatttttcatgcgtctcttacaaacaggtcctcaggctactattccaccgagtctctgacaatgcggaaaaccccctggggtaaatctaaatctaacatgtggtcctacccttattggaatagtaccctcggcggagaaaagggtggtggggcttaccgacggcgagatagctccggtgaggtgtccagggatgtcggggaggttacggcgatcatgtcgaggtacgggccggtgtcggagatcgcaggagttggtcagtcctcgtgcgcaggggggggagttcgtcggcggtgagtgagccggcctgctcacggcgggatggttcaatcggttggctcggaaagctttaccaagtgacacagaggtagtctacgcgaggaattgcaaaatggcgcattgacttacccggactagagtcgccggtgagcggtagaagtccggtgagggtgatttgggttttccggtgaggcagggtcttggttcttgcttggagaagcttcatggctccacggggaagctatccaggggctcgggcgagactaggtgcctacggaaatggcaaaccgcagtggcccggtgctcgggtggctcgggtgggcggtgtagagctcactagagctaagagtggagtgttgcggagtggagtgtctggacagtgaggacaagtgcggagtggagtgttgcgcgtccggggtggctttataggcgcgggcgcggtgcatggtaggcttctgctcctgttctaatgccgataggcttcatatcttcgcaaatttgggcaaga

SEQ ID NO: 162017 - DNA, 609 bp, Zea Mays
tgttaatgtacaggaccaaacggatcacaggcgtttagtgtctgtcagttctacaaacaagggtggttacatccacaagatcacgatgtaatagcgcgaggttccgttcatcgaatgccatgcaatggaaatcttcttgatttatgctgcgcgggtcatctggctaggaatacgactccacattcgtagactccattcatgctgcttaatttgaagccgacatggcacaacaagcagatttcataacacatcttccctatcgcaatttgacagtcagatctgggagaagttatggttcgcctccacaactaaagaatctcactcgacggagtcacattaatgctctgagaccgaaccctgtctatgatcttctgcctgcctgttaaatcttcttcgtatccaacgacctgcagaaaaaagccagatttaaatgagtcagacaatgttttttttttttgtgattgccgagttattcgatagactacacacctgagattctgtctgcgtctcactgaaagggtagtaagtagtaggagctggggaggggactggtacagagtttaagttttgaacctttgtgacagaggtgctatcttgcttctgttgcct

SEQ ID NO: 162018 - DNA, 1070 bp, Zea Mays
atatatattaaaaagagggagacaaggatctaagagacccaaaaaaataacgcactccttatggaggccagtaacactcgtacacgaaaggatccataaaaacacacacactccctacagcaacaacctatgcagggggtcagccaagaaggaaagacctttgactccagcaatttcctagcttctttcctcatctgcatgctccataatcagaggaaggctgggagaccctccataaaaaatgactctattgtgatgcttccaaatcatccaagatcctaaaatgatgaggaagtcaagaccttccctgaccagactatttgttgtctctgataccatctcccaccaatccgtaaaggaaactgtatctggctgtggggctaaactatgcagcccaaactttcttagcaggttgtaccagaaaactcttgagaagacataattcacgagcaagtggttcagggtttcaccttgctggtcacataaaggacatctgatagggtgattcaatcccctttttgccaagctatcagttgtctaacatctattatgtgccaccaactaaatgaaaaaacaacactttggaggagcccaagatctccaaacccttttatagtgcccaaaggtggtagacccaaagaaaaaaccaatataagctgactttgcagagtatctgccattcgatgataagctgaaaatgtgtctatcctcagtgttaggctgcagcacaaaatctacgaggatattctaaaggtgtagataatctacaacggctccaactgtaagagcccctttgatgtctgcaatccatcgtctgttcaatagagcatgctgcacagtccttttaataatttttttttgggacaatgctgaataatttgggagcaatatctgagacccttttgccatggatccatttatctgtccaacacatggtgttggtcccattccccgcctcagagatcagcaccttagagaagaaggatcgggctatgctagggacttgaatggacaggctagaccaagggcgtcttggatcagtttttttgctgagctctgctgggccctcc

SEQ ID NO: 162019 - DNA, 1022 bp, Zea Mays
ccacccgtcggggtttcccccttcctcgcgtcgtgcgattgcaaccgaactcacgtgcaattcgcggcaccagctccacccacctcgcggacgccctataacatcgaagccaaaccccctccgctctcctctcaaccaccagcgacctcgagccattcactcgtgctctccaattttgtcgtgcaaactccggcgcggaaggtgaagtcgccgaacacgaggtgcgttttctttggcgaggaaccctcggtgtcggtctgtgaagccttgcggggtcacctccaacgtgtctggggttgcgtcgggtgggatttgtgagcggtggccggggatttctcatcgacgcgcatccttcacctcgcggccgccactactcgtcggggaagctccgcactgcccaatacacggtaataatgcctctggtgcattccttgtgtcgttaggatcgtgttggtatcttcaggtacgctggtggggcatcagagcgcctgatggcatgttcgccggcgttggccgccgcgggtggtgtgtgccgccgtgcgggaggccgtaggctggacgatggcatcgcgaccgttggatccagcgctgacgatcgagattagaggatagggtaacctttgcacaactaaaccgtgtccgtaggattcatggcgggcggtttagattagatcggagcaggatcgaccttcgtccgttgattccggatcagacgataggggcggattatctgttttataacgcgataatctaatcttgcgcgtcggtttgtgatcggacggtcagcgtccgcccaaaccctttcggctagcgcgatttgcaaaaaagaccccgcagaagttgagtatcaacccgcggtccatccccctatgccctgtgtcttagtagttttagccccgagatccctgtcctttctgaaaattgatgcccagtccagagttgtttaaaaacagagaaatgattatagaaattcgtttttaatacaaaaacaaatctagaaacttgtaaaatgcatagaaaat

SEQ ID NO: 162020 - DNA, 1011 bp, Zea Mays
cggatgtggaggatgatggtgttacaagtgatgatgccagagatgatgctgccattgatggtgatgctgccacagcaaatttccggaacatcattgtgcagcgtgtcctcagtgctcagccagagacctccgagcagcagcagcaccataatttgtttcagactttcttcatcatcaaggatcgacgtgctcgtgttattattgattgaggaagctgtaacaatttggtgagttcagatttggtcaagaagcttagcttgtccacacgcccacgtccgcatccataccacattcaatggtttaatgataccagcaaggttaaggtaacacaaatggtacacatgcatttttccattcgtatatattctgattatgcggattgtgatgttgtacctatggaagcgtgctctcttttgttgggtagaccttgggaatatgataatgatgcacgtcaccatggtcggagtaatagatacactttcatgcataagggcaagaaaattactttgcttcctttgactcctgctaagattgtacaagctgacaaggatagagctgcaaatacaaataatgaaccacctgttaaatctgaaaatcaagaagccattcatttgaaagctcctgtaatgcttgttacaaaatctgatcttgctgaaataaatgctgatgatacttgctgctatgctttagtgtgcacatacgctttattttccaatgatgatattgctagcattgtgcctgtgcctgtgactaaccttttgcaggaattcagcgatgtttttcccgctgagatacctcttggacttcctcccattcgcgggattgagcatcaaattgatttgattcctggagcaagtttgcccaatcgttctgcatatcgggcaaaccccgaagagactaaggagattcagcgacaggtccaagaccttttggaccgtgggtatgtacgtgagagccttagtccttgttctgtacctgtcattttggtcccaaaaaaagatggtagttggc

SEQ ID NO: 162021 - DNA, 679 bp, Zea Mays
cttttcttttatttaatcctcttgccgcacatgaggtcagcatgacacaagtgtgacatcaagcaagcaacacatgcagccgtatttccatgcacacgtccacttctacgtagtcgccgacatgtggacgatagaatcacgtacgaagctctgcacgggtaactagtttataggatctgatgtcaaccgcgtcttcctccccgtaacaaacccatgcatgccgtaaccacctctccgtaacagccggcccaggtggcttcctcctatagctattctcccgccgaggaccgctccagccgaataaagaatagtttcctgcgtgggtgacgtcggctgggcgtcataggtgacctcatccgtatacctttcaccatcactgacggctgggccaccatgcattggtgttcgcttgcttcctggtcttgggcgttgatcggaacggcttgccgtaatcccggcactagcgccctgctcgccctataaactcgattgaccccaggggtttgccgtctctgttaaccagaagagaaaaaaaaccaacgagtatgcgctgacgatgtattcgcgcagtcgagagagaagaaaggaagagcagagagagaacgggagcgttgccgggagggtgttcaacggtgccgcaccctggacgtccagggactttcctgtgcttgcggcgtgg

SEQ ID NO: 162022 - DNA, 518 bp, Zea Mays
gttcgccttcttgaccgttggttacggcgaagatgaaggggcgtactaccgtggggtggtggcatgctccctgtgtgacaattcgccttcttcgcgcttcgggccagcttgtatgacatgtgaggcctggcccccgtgtcataggataggaaccttggtgcgcatcgggggagaccttgcccgtgacgcttcggggcgcgagcggggaaatctgcctttaaaaaggggttcacccctcgagtagcagccatgtattgcttctctcccactcgcgcgtcctttcgcctccaagctccttgtgcccctttgccttcaaggtcttcgcttcacgttgccgtagtttgccatggccttgtgacttcatcccgagcacgcccagactgagtgagtgctcgaaatggtataccgtcttcttggatggaatgcgtcggcgctcggtggaaggatttgcgccggtgttatccactccgatgagcttgccgctagagagtttgtgccttttgtcctccctaccgggc

SEQ ID NO: 162023 - DNA, 409 bp, Zea Mays
caagatccttctgacaaatttgaatatgatatataggagagaaactttgatgcagtcgggttggtcgttcgctgcctaaaaaccgaagaaaaagggtcctaaagtcgctctgtcaggcgccctgaattgggtgtggcatggaatagtaattgaatcagatcccaggttcactgaacctgccgccagcgtcctcacactgtaatccaatctcgacttggagattcgtgtgaaggagcaaataaccgcggtgaaaagatcatcggggagggtttggattggttcacgggaagaatcattcgccgtacccacttgcacggcatcgtggccgagcagccaccatcatggtggccaccgtctcccgctgttgcgccacgccgaggtccatttaccatgtcgtcgtggtcgtcgt

SEQ ID NO: 162024 - DNA, 926 bp, Zea Mays
tcttatgaactctatcactcgatcatgctaggaaaactactattgctctctcatttccattttttgtgtctttttctatattccaaggtttgggcagaaataggtttaagtaaacaatccttgcttaaccttgtgtattggggtaattagtatttttttatggtgtaactacatgctgggcaactccacaaattttctcagttctagtgtaactgttcttctacttttcctctattttcttgttttaggcagttttcaacattaaatcaaaagtccttgatcagatacataaactacctagttttatatttttaacaggcagagcactttatttgtggtggagcaaaattggtttcacaatttttgggctagtattacttaagttaccaaattttgaagttctctgctgaaataaaaggaaggaaaaagaaagaaaagccaacttgcgctggtccctgggcttttctactgttcgtattaaatctaggtccctagagcactattcattcatgtcactgacagtgtggaaaccccccgtgggtttttcccatccttaacccacgctccaccctcgccggaacagtaaacacgaactccggtgagcgattgtaccttaccggcggcagtagcgagtcggggaagaggtcagggggtcttgtgggggtccggcgagcttggtgacagcggcgattggtcggaggaggccggtggcgtccggtcctcgcgtataggcgggcggctggggaaggtccggcagcggtgatcctcacctcgggtgtgggtaggcttccaaagagaagcctaggagcttcaccaggctctggtgaagtcgttcgtgtgcttcgactcggcagtggcggctcgggttggccggtccatgttcaccgacgtgcgcgcgtcgagtggcggacgggagcagacctcac

SEQ ID NO: 162025 - DNA, 774 bp, Zea Mays
tatggattaacatctttgttatagaaggattagctagttgctatatagaaattagagatcaaagctctgcaaagtgctatgacagaggttctgaatggggtttcccatggtacagtgcactgaaaaagatcttcaggtgcagtccccctcgccgtcggtgacctttgcgcaaggattcgcgctgatcgcggtgattcgtgctggactcaggcaggatagtgccgggagggtgaaaggatcagaagaggagcggattgggtcgcggggtgaagtttatcaaccgcgtctgtagctgtgcgacgtggctggaccgccggtgtcatcgtggagactctggcgacctcggttatgccacgtcgtggcttgttactgtgcgatagtaaccgtggcacacttaggattgcaatctttgaaccgttgcaccggtgaatgccacgactaagccaccagtgctctcccctctctccggccgccagcgcgcgattccaaattcacgagccaccgcccttgggtcctataaattgagcgtgccatcagctccgctaggtagtcacgcatccagcgcacccactcgtacctcagattgtccacctgagagctctaatttgggatttcccccaaatctgtcaagaacaccgcgtgtgtgagctcgtcgtggccagctctccacaggtccgatcatgccttcctcgctctcgtttcaacatccctgtgtgctgtagatgcttagcagcctggccaattgaactagatcacgctagatcaccgggaaca

SEQ ID NO: 162026 - DNA, 351 bp, Zea Mays
caacatagcaaggaacccatgaacaacctcaacctagaccacagattaccacttatcattctccacgctagcaaagttgtccatacgctcaagtgaatagatgaagggtaaatgcaccgagacagtaagaacgccattacatcacgtggggtcaatttgcgtccaaaaactcagcagacactatgtccacagatcatgcaggggatatgctacaaacaagttgcccatagcgggaaataaaaaatgacatcttccttgcagaggaaaactggttctaaactacctatgtcttcagttgaccatgcttcattgcaatgtaccttagaagagatcatttttcctgctcagtca

SEQ ID NO: 162027 - DNA, 966 bp, Zea Mays
acgacgtggtggcagccgtcgaatccacggagcaccttctctccggtaaggataaacaccttcttggcaaatcttctttaccccatccccgtcggcgcgggctcgcatgtgaaattgcagaggactacggcacggcatcccgcgcgcccggtcgaaacgatctcgtgcgcgtgccccaccccggcgggtctgatctcatcccggcgggtctgatctcgtgcgcgtgagagagcaatttgatgtctgcgcgtgcagttaggctctgcaatttcgtgcgtatgcagtcagagagcaatttcgagatcgtgcgcgtgcagcaatagctatcctctgcaatttccatgcgtgcagtagtcagagagaaacctcctacatcttaattggttttctgtatggaacttagttcatgtatatatgtgatgtgtctagccatcttaaaacatcgttttctgtatggaacttagtgtacttggctgaaaaaagctgtaagagctatccaatagccatgggttctgttgctagccgcatcaattagtggttgggtacggccattaattgaagaccactgcaccgcatatatgtgagactgattgacaagcaaaatacacatatatagtttgttggagagggacctgacgagttttttgctattatagtatttgttttaacaggcttctctattatggtattcttaactccatcttctctctaatagtatttagaattgatcccatacgtctaaatagtattctgatctttttcttttttattttaattgtacttcttattatttctcttctcaactgaccatattacccatgtctaatctccatacgtgtacatggaattccttcaaccaaatgatgagtcacacggacaatagacattatcaggttcataggaacactactgagttgcaaattctgaaactacacaataacagaactattgtctgaaactgcacaa

SEQ ID NO: 162028 - DNA, 306 bp, Zea Mays
tttgagttgatcacctctaggagcaatgaagaggattcctactccagctccctgcaatttcagcgagccatcaaaatacattcaccatacttctgcagtctccgggttatctggtacttgttgctcggtccatttcgatacaaagtcaactattgcctgagtctttattgcagtgcgaggctgaaactcaatgtcgtgagcccctagctcgcaggcccacttagctattcttccaatggcttctttgttgtggagaatgtcccctattgggaatccagtgactactatgactttgtggtcgtcaaa

SEQ ID NO: 162029 - DNA, 511 bp, Zea Mays
gcttgcctggcgcggaagttacggggaagagattcgtgttcgttacagagggagaagacggatttgtggacatggccccatgtttcaggcgaacccgcggcaaaagaggccccacatgtgaaccagagtccgcgcgcagagctcaggcggagaccgcggtattcgcttgagtttgttatggagtccgttttgctgtacaggagcccgccgcgttgattggagatgacgattctggacagtgggccccacacgtaagccacatacgtgaacgacagtgagcgccatgggctgagcggggagagaagctgagttgggccggccgaagaggaaaacggcccagccgggatttctctattttctctttttcctttctatatttttctcccatttgtaatccctccttttaaattcaattcaactcatgttatgaactcccaagttttcaaatatccaacacacccttgaagaaaatataacatctattatttccaatattttatttattgttttc

SEQ ID NO: 162030 - DNA, 677 bp, Zea Mays
actccgcgcaaaagtcgcctacgggtgcagccggaatagcacaataagtgcgcaaaatcgaagtcttctccaaaagactctccgtgcaaaagtcgcctacgggtgcagctggactagcgcaataagcgcgcaaaatcaaagtcttctccaaaagaatcaccgtgcaaaagtcacctacaggtgcagccgggctagcacaacaagtgcgcaaaatcgaagtattttcaaaaaggttcggatcaacgaaggctcgcagttacatataagccacagttacatacacacagcgagggcatcacactttacattggctcaaccttcggtatgatacccatctccctgtagttgaacaacattatcctcaactcctcaccctcaaaaagatttcgcaactccccctcacctagactcgccccaaccagcgaggacaacaattcccgcttgctagcctcgtccacacgaagacgaccaccctccacttcactcactctccacttcgccaccgcccttcgccgcctacgcccagcactcggaccaggaagaatttcagcatccatcacacgcggagaagcctccgccgcagcccacatccaaggccgcaaaataatccaagtcctcatccgaagactcttccgtccacataaccgaactcccggaatcatcatactcaaaaaact

SEQ ID NO: 162031 - DNA, 547 bp, Zea Mays
ctcaattactgtgtgaaatccccaacataaaatggaattcaaattctcgatatttaaatttagggaggagtttaaatttgaaatcccaagatagaaaataaataaataaataaaagagaatgaaccagcgcgcttgggccattttcctcctcagccagcccaacctggccaccaaccggcccactggcgagccttcttgtctcctcgcctgtgaatgactattgggcccagcacgtcagctgcctcctccccattattcaccatctcagctggacaccgccgtgtgggccccctcggtcgggctcatcttcttccccatcctgcgcgactgagtccgcccatccctcaatcagcgcgcaggctcggccaacggaatccccatccttcggtcaccattgaactcgcaacagaaccacaccagcattgccgagatcctgggctgcctccgctattcccggcaacaaactccgagcccacatctatcccctcggctggtgcgttactcccctcgccgcatcacatatccgcacaaaccaagccatcagcg

SEQ ID NO: 162032 - DNA, 450 bp, Zea Mays
caccaatgttcacatcccttacaagaccagtcaacaaattcaggagtgattactcgatcccaacgatgagctggacacaaagaacatccttgtatgatgtcttgagacaaagatatgttttagggtacacaacatccaaaacttgttttcagctatacaggtgttagctgacatgctaaaatcatcctttaaggaaggggcgtcacaaactttaaaagatctaatcaaggcttctatatcataacaacctaaggcaagccacacatcgggttcccgaagtcgtaaacgctctccacaacaacactccgggctcacaacttcctgagggagggccacgatgaccaccggccacatgaaccccaactacactttgtcaatgatcatgccgctagtaacaaagaccttcaacctattgtcgatgctcgagggcacaaaactgaagcgtacaat

SEQ ID NO: 162033 - DNA, 649 bp, Zea Mays
ggggtaggcgaggactctggcgtgcgacggcgtcgaggcttcggctaggcgatggtgaggcatgcaggctacgcgacggcggctacgggatgcgctggacctcgcaccggggacagaccgcgcaccggggacgtgagccattgggctgatcgcgacgaaccgcatgccagggctagctgctcgggatcatgaggcccacgcgtcgggaacgggcgaggacacagcaagggacatgatgcgcgctggaagggagagagatgagagcaggaggggctcccgcgacacaaacatactcgaccacagcgaagagagggaacaccggtcaaggaacacatggcgtgagaactgacggcgtcgtcgacgtccagctcgggcgcccgcagacccgctgaccgggtcatccctattgacgccctcaggcagcgctagccgcgcataccgtccatggcaaggggcagtgcgcgaggagagggagagaggagtggttctgcggggaagaagaatagtgggcggttttagctatggccgagcgtgagcatgcgacatcagatttccctgcgtcgtaggcgagaacgtggcgtcggttctgtcttccgtgcgcgcacgacgagcaggggcgtggcgggagctgagcgtgcacgacgcgcag

SEQ ID NO: 162034 - DNA, 551 bp, Zea Mays
cagccacctctaaggctgaacgatcctttgtcacctccatgtcagtcgggcaatccggaccagcgccttggcattgaagactaccttccaaagtcgacgatgcacgagacactgctcgggagacctccaatcccgcggttggaatttctgaacaaatagccatcatgtcatcaacagtcggctccgatagcatatcctcagggacgacctcctcaagggcctgatcaaaatccgatattgacagttcttgaaggctaacaagagctgacagagctggagaaggaatgtcactatcccccttactacctctgtaatgccggctgttcttgcgaatcagcgggacttcttcttcttcatcatcttcaacaaatatacggacgacaaccgatgcacggtcacacccattgggatcaacttcagtaggacagtcacaaccattgggttcaactttagcaggacggtcacacccattgggatcaacttcagcacgaacacacccattgggttcaacttcagcatgtacacacccattgggatcaactttagcatgg

SEQ ID NO: 162035 - DNA, 1268 bp, Zea Mays
caaccatactggtatgattaaaattcatatttaatttgagcacaaagttcaaagtcatacttgaaattcaaattgggaattgaaaataggagaagaagaaaatcagagaagaagagaaaggaattctaacctaaatgggccgcagcgaccattttggcccaccagagctttctcaccgcgcagcctgcttcactggtgtctctgccctgtgggtcctccccgtcatccattcacgggcgctgtcctgttcctaccgcgaggcaccgacaccctgcccccacactgtcagctagcgtctcccacgcactctctggccggccccacttgccagcctgtatcgcgcgcgcctgtgtcgctgtgtccctgggtcatgttgtcacaagcttcctcttcgttgttacgactatgccgaaatctccggcgtacggatcgtccgcgcggcgtgggtttgttgaccggactttctctcagtcgcctataagaacgacagttatcctcggaactacccctccacgttcatattctacccaagccacgtctgcaaaactcgcagaatccgccgccaccgtgcgtcgtctttgcggagatcccgtcccgacgagctcacctctgtgtcccccgtctcgtacccattccaccgcctaccggtagtacacgggcgcgggaagccgcatgtacctcgacaaggaccggacaaccgaggaatccgacgttcacgcacttcgccaccacggaatcttcccttgccgcggaccgacctttttgtcgcgacgattgccggtgagacacctcctccatgttctcctagtcatcaatttggttttccacacgtgcttaaccgaacttagtcaccggggcggtagaatttggtgtagcaccggcaagatggccgccgtgggcaggggcgctccctagctcggctctgttgggggaagatgaccggtctgccgtaggatggccgctggacggagtagaatagagcgcgcgtaccggttggatcccgacggtagagatctgatcagacggatcagggcgactctatttaaatctgcgctgttgatcgtgatttgagcggtctgcgccacgtaccgtttcgctggtgtcttgatctaattcgtgcggtcgggttaggatccaatggcctaggatcgctgataacccttcagtcaagcattaatgcaaagtagcccctcagattttgttaaatgaacccgcggtccaccctatacagcgactgagtcttcgattctttttgcgcttgagcccct

SEQ ID NO: 162036 - DNA, 773 bp, Zea Mays
gccacagttagatttggtagctgcccgcgatcaatcctggtcacgcgccaacgacccgacgacgtttaatcgttagaacggcggcggcggatctcggccttctcggttctcacggcgatagtggaggtcagcttggttacggttgtttgtgtgttgacgaagtagaggggaggtaaggaccctgccacgcccttcttatggccgcctgagatcggtccgcgcgtgcccacaacggagtctgcaacgcccgccatgaccgagcacacccgatttgcgcggcgaaggaagagggaggtgggcgcctgacacgggggcccgcaagttagtgaatccacgcgccagacaatggtggagcgtgtgtctacgtctttggtcccaccaggcagtgactgtggccgatacgcgcacgtgacaagaccagggagcactcgacggcgtgggaccccagtgcagtgaccggcgcgatgctttaagaaagtgcagcgaccgccaagtgggccctggttgtcagccgcgggcgcagcagaaatgactagggggccgcgcagagggaaaaactagtgggccgaaatcaggtttagccgacccaaacgagattttagtctttttctttatatttttctattttcttttttttcttttcaaattcaatttgtattcaaatttaattcgaactcttgtggcccattattacaatttatacttgtaacatttagagatactaattctggaggtatttatttacatatattatttatttattcatatccttt

SEQ ID NO: 162037 - DNA, 834 bp, Zea Mays
acaaagcggtttggaactgggccatcggatcaacgttcaacggttaagatttaaaatacgcccgatccgatcctgcccttacgtcgacgatcctatggttagcacgagatcaagccgaggcggtgcaatctccctaatctacaccgtccatcccaaatcagacggtccgaggccatctccccaaacgatcccgacggcggcggcaccaaccccttgcacgacggcgccctggactggaaatccaatccgcgccttgaggtggccattttttaattcggcctagctacacgatgccccatatctgacgaatgcagtggaaggtcaagtacctcacgatttgatacagaagaacccgaccacatcaagcggcagacggttgagctccagcaaaggattgcttgcactccggtgagtctacgatcaccgcgatgccacaccagtattctccgcggaaaaacgaagccccggctctgaattccgaaggcgaatgcggcaacggggacgatgttcactggtggcactcagcactccctatggtggctgtggcggctctggaaattaggtcggttgcggacctagtggagctgcgagaagtggcgaggtgggcagaaaatatctggatgaatccatttatgagcctggaacgtgcttggtccacgtgccctcggtttgcgcgtggtggtttacaccgccgcgacaagtctgtgcggacgtccggaggaggaagacgagttccacgcgcgacggtcacgagattgcctggtgggggtccacatgctagcgactggtggcggaaggaaactgggctggcgcgcgggagagcctgccccgcgg

SEQ ID NO: 162038 - DNA, 712 bp, Zea Mays
tgtctggttgggctcttagagtcaggtggctttggttacagaaaccagatcctaggaggtcgtgggctgttttctgcttcatttcccaaaggaagtggtttgcctctttagatctattgtgtatactgagattggaaatggttttaaacacactcttttggactgatagatggttgcatgagcactgcatccaagagcttgcccttgcagtttttacctctattcctaggaaggttaccaaaagtagattggttaaagatgccttgcctaatttgagttgggttcaagatgttcatggagctatttcctatgcttttgggtgcagtttttggattttgctgagatcctggaaggtattttgttgcagcctaatgtgaaagattgtcatgtttggaggttttctagttcagtaactattcttcaaaatcctcttacactgctatgtttcatggctcgatgtttttcaagcaggttggtcgaatttggaagacatgggcctctaggaaatgtcgactttttctatggcttgtggctcacaacaaatgttggacatcagatagattagctaaaagaggattgactcaatcgcttctttgcccgctctgtgatcaacatgatgagactatcaatcatctgctggtgggtttctcctttgcgcgtcatttctggtttgggttgctcagaccatttggtttatagcacttccttccag

SEQ ID NO: 162039 - DNA, 331 bp, Zea Mays
gctcgcctcacacaagtatgccagacagaagaaagttgcacgaaaagcaccccagacccaaaaagggcttgagacaaagcaaggccagggggtcctaaaacccatacgcgtcatcagagcagctaagtcgcacatggagccacgaaagattaccaatcgttaaactatggacgatggcgtactattcccttcacaacaccaccctaagcacgacgttcgcagcagcattgaaatcacctaacaacatgtctagatctaccgctgacgaaccctcaagcggatcgatggcattgtggaaattaccaccaaagtgtagcagcacattggaaag

SEQ ID NO: 162040 - DNA, 875 bp, Zea Mays
attcacgtcttagtgctaaattggtgtgtcttggcttcaaaccatcacaagcagatacatcccttttcatttattgcaagggtactgttaaaatattccttcttatctatgtggatgatattattgttgctagctcttgttcagaggttgttgatgctcttctctctaatctaagggctgattttgcactcatagatcttggctcccttcactatttcttgggtattgaagttcaccagagctctgatggtcttctcctcactcaagaaaaatataccaaggatattttgcttcgaagtggtatggtcaagtgtaagcccgtctccacaccccttgctgctaatgagaagctatcactttcagacggtaccatgttgagcaatgaagatgccacaacttatcatagtgttgtcggtgcactacaatacttaacattaacaaggccagacatctcatttgcggtgaacaaagtttctcaatatttgcatagtcccaccacccaacattggtctgcagtcaaacaaattttgaggtacttatgtggcacattggggtatgggctttatcttcgtagaagtccttctctattttgagtgccttttctgatgctgactgggctggtaattctgatgatcaccgctccagtaggggttttgcaatcttctttggaccaaatcttgtatcatgcagtgctcaaaaacaaccaactgtatctcgctctagtactgaagctgagtacaaggtcgtggctaatgcaactgcagaaatcatttagattcaagagtgttcttagtgaactcggtattcctcagtctcgggtaccctgtttatggtgtgataagttaggggctacctatctcacagctaaccctcgt

SEQ ID NO: 162041 - DNA, 390 bp, Zea Mays
caaaatttaaatcttaaattgatttgtcgggctcctccttattaagaggagtaccctccaaaaattaacgtatgctgtttaatgtggagagcacacagcattcttctattctcagtcctatagtaaggctatctccaacagcccttaggctatcggctatctccagcagcccttaggctatcataagcagtctctttgctgctataaataaaaggtgcattgtatatgcaccaaatgctggcctaagaatatagggcggaagaatagttagctgtgtgctcaccacgcagctgcgtgatgggaacctgagaacttcgccctctttatgtaggcggcctctcttctgcctcctccttccgcgaggcgatctggtgctattccgtccactcc

SEQ ID NO: 162042 - DNA, 278 bp, Zea Mays
ccgtttggccatgtcactggcgataccccgccgtagtgcatgtacgcagtggtggtcggagtagcttggggcgagagagtgaggtgatgggcggctggtgaccgttgatctggtatcggatgtgtgagattagagctacaataacccttcgccctttttaaacgatggtcatggatccatacatcaatggttggtgtggatatcaaatcgggtcattgatcttagatctgacgggccacatggcatgcctattatactgcgtcatcatataatccgag

SEQ ID NO: 162043 - DNA, 445 bp, Zea Mays
ctgagatgggcaatgactccaatctcccctgaatgaagaggacgttggggtagaaaggagcaggcgcggtggtgtgctttttctcatcctcctttgagggtagaggtgttgggaggattgtttgtcgtgttttccttccccagtgtggaacgttcacctcccttctccgagtgatctgtgtccactccttagtgggcgaggtggacaatagggttcgccgggctggggaggccatggttgactgggcttccgttctccggggacatttgagctcggacttttgcggggtcatgcattgccaagttatgagcaggggcatggctcacggtttcactccatcttcttgtggaattcccgaagagggtttcttctcgagtggagttgctatgcggtgcagagttccctctaggtctgctacgcacgagatggttccgaagcagaaaat

SEQ ID NO: 162044 - DNA, 322 bp, Zea Mays
gaaaaatacaagtgtttccgacaggacagagaaatatgcagagatctacattgatcaaataattcgtctgcatgggatacctaagactatagtctcggacataggagcaccattcgtggcacgattttgggaacaattgcaagaatcacttgggacccatatcatccgaagctcagcataccacccccaaacagatggccagacagaaaggataaatcagattttggaagacatgttgcgagcatgtgcactacactatggaaaggaatgggacaagtgtctatctttggtagagttttcttacaataacagctatcagtcc

SEQ ID NO: 162045 - DNA, 383 bp, Zea Mays
attgacttgagactcatcctctaatgctgcatcaagttgaggaatgttttctctgacttcagatataggggggtggcaggtaaagctaagaccatatcttggttttgatcttgcacaagctgaataacggggttgggggatgcataggcattagaacttgtagtccctgtccaatggatttgtgagatgactataaatcttcaggcctgatacttgatagctaatttgctcttcaggtttctcctgtttagcattttgttgttgctaagctggaaaattggaatgtcctccactggttgaggccacacctctcacatcatttaactggtttcttgcagcaattgtggaagtttgagatcaaaacctagaatattcatcgattt

SEQ ID NO: 162046 - DNA, 512 bp, Zea Mays
cttggtttgatttgaggcgaagaaaatggaatttgggcactcggctcgaaattgatcgctcgaaacggggaattgtgtgaaattgaagcctagtatatcggattggcgtgaaatttggcgaatatgttactggaggtattgtgaaggtgcctgaaaaatttgggttcaattggagcattttgactggtttgggcatttcaccgagcacgtggcatgtagtattctaggttttggaggaaatggtcaaataagcctgttaaaccctccctaaggagctatttacctgcaggggtatataatgtggcactagggactcattcaagcacagagattcacagaatttggaaggaatttgaacttgagcaaacaaggtgtggtgagaggcttgactgagctgtgaaacagagagaaaagagggaaaggatctcgagctgctcaccagaggggaagggaggccgagcaggagcaccaccactggagcacggccgccggcgaggaggaggtcaccggag

SEQ ID NO: 162047 - DNA, 308 bp, Zea Mays
ggacacacctgctgccgaagcaacacaagctaatgttgaagaagctggttctgaagatgagtacagctgtggggcgccaagtaaacctagtcatctggattttggaaagtctaccatctccgaagctgatctccctaaaatggtgaagctgggctatttcagtgaggccaagaaggaattaattcgttttggtggagaagaagctatcccaaagccaggaaaggatgaggtagtagtcttcaaaagtttcctgaaagctggtttaagattccccctaaacaagatgattgctattgtactgaagaagt

SEQ ID NO: 162048 - DNA, 404 bp, Zea Mays
ggcacgacgacgaacagcgtacggatgcggacagtccggcgaggctctacagatggcgaacggcgtacgacacgcaagcacgggctcaacagcgggtgcgcgtgagcacagcagcgtgggcgtggtcgacggggtgctgcgcgggcgagctccagcgtggtggcgtcggactgttctggtgaggcgcgttgcgagagagaggagggaagaggcttgggctgctcggcagaggaggaagctccggctcgatcgagattttatagaggggggagaggaaagtagaggggcgctaggagtcggatagtcgcagtcgacggccattaatagcgagataatgggagagggagaaacggacgtgttaaagcttcataacgacgaagacatacagtcgcggacggctcggc

SEQ ID NO: 162049 - DNA, 461 bp, Zea Mays
agggtgtgtagacgcagaaaatctatgtgtagttttccatttgttagccgcatgcagggaagatcataccgtatgcatggcttttgccctgcatgagcatgcatgggggacccagcacattcctaagcacgttatgggaatttcatcaagtgcatgtaggtggggccctgctgatggtttcttactttcttccacctaatcacacggatggctggccagagtgcgggggccttcagccatggcgcagccgcacaagcatggaacgcacaagggggagggctggctagagcagggacttggggctttgattggttggagcaagcgactgccgcagctggggacgcaggcaacgacacacaatgtgagcgggtggccaatgacgaagttggggctgcacatgaccagcagagacatggaacgatgcggccacgacggttcggccagcgaacgacatggagtgg

SEQ ID NO: 162050 - DNA, 398 bp, Zea Mays
gtgcccagcagcctgcacgcgtgcgtgggcagcgcccagccgcgttcctggctagcggggcccacttgctagaccaatctgcctagccaagcttgcgtgctcctgttatctagatgaaaccgaccccgcgcatcctcctccccaagaaaatgcccaccttgtcctcatctcgagattcgtaggcaaccgtcgaccccttctagaacagcggtgcccgcacaaacctctccgtcccctcgagccatacctctgcttcccccacgcgttggccgttcgttctctctccatggaaatagccaccatcgcacctacccgcgccctatcgcggcaacgcagcagcccctgcgcgcccggccagccccggcggcgatgcgcggcaacgcggtgctgtagccggc

SEQ ID NO: 162051 - DNA, 685 bp, Zea Mays
aatgggtgtgatgtctgtattattgatgaggatgaggaagaggaggaggaaattcccttaatacggaagaacagtcggcgttatatagccagtggggagagtagcggtattccttctccagctttgtctgctctcgttggtctgcaagaattgtctctggaaaattttgatcagactctcgaagacatggtccctgaagatctgttgtccaagcccacagatggtggaatgatggaagtttgcgctgatgtgcctgatgtcgggttagagttatcccgagcagcgtctcgtgcctcatcgaccttggagcgcggtcttaagagtcgagaggctgatctggattgctctgttcccatggaagtggttgaaaatcctttagccttagaggtggctgctacagagaactcggtctccaaggacggcgctaacgttttacccagcccccgagggtgttgccggtgatgatccggctcgggtgggcagcgcgagctataacccagcccccgagggtgtccgagcgggttctccttctcatacttccatggatgttcacgtcgggtcttctcctccacattctggttgcatagcagcagcacgagcttcgggtcaggaagtcgccttagaggccggcgctcctgatgctagagttttgatttctgctggtgacgctgaattggtccccact

SEQ ID NO: 162052 - DNA, 637 bp, Zea Mays
ctatatatatatatataatatagctgtagaacgacagcagtacactatagctgtctagcaggacagcagtacaagcaatcaaaatcaaggatgtttccactaatagataacttgaacattattacgccgcctcctagtctcatctgtagtgtgaataacaactccaactcaagaggtgcagcaccaaatgaacaattgaagaaccaaaagaacacagagattaccatctgtagaggtgctcatttcggttaagttcagaacagactagtgaagtgtgcactaaagtgagcactgaacactgaactctgaatagagttcaaaacagattggtgcagacggttgccggagcagagcagtgagcagaggcgagcgctggagctgagcagtgagcagaggcgagcgtcgaagctgagcagaggcgagcgcaacagagggcagggccaccggagctgagcagaggcgagcgcaacagagggcagagggcagggccaccggagcagagggcaaggccgcagggcagcaatggagtagagtgtgagagggggcagaggcgatggcttagggttttactgttttagggtttctaactttctactgtgcggcggcacagtggcagacagtagagcttgtttctact

SEQ ID NO: 162053 - DNA, 1236 bp, Zea Mays
gtggacggaagagtcttcggatgatgatttggattattttgcggcattggatgtggctgcggcggaggcttctccgcgtgtggtgggtgctgaagttcccagtccaagtgttgggtctaggcgtcgaagggcggtggcgaagcgtagagtgagtgaggtggagggtggtcgtcttcgtgtggacaggactggcaagcgggaattgttgtcctcgccagctggggcgagtgtacgtgagggggaattgcgaagtctttttgagggtgaggagatgaggataatgttgtttaactatagggagatgggtattatcccgaaggttgaaccaatgtaaggtgtgatgccctcgctgtacgtatgtaactataatttgtatgaagaggctgtgtgccttcgctgatccggtcgtgcctgtaggggacttgtgcactaggtctagcatgtttattatgtcggtccggcggcacctgtagtcggtcgttgcacgggtagtcctttgagagagacttcgtttttgcgcgcttgttgtgctagtccggctgcacccttaggcgacttttgcacggatagtcttttgagggagacttcgattttgcgcactttgttgtgctagtccggctgcacccttaggcgacttttgcccctcgcggtgacttcgtgtttgtcgaatgccgaagaccgtcgatgcggtcttttttcgacgttgtagttttttgcgggggattttttgcgtgtatattacatggctccgcctcattaaaaacctcaccccccgggaggaaaagagtgcgggccggaataaagttgttttgcgaattacaagggcgagctggccctgaggagtcaaacaaaaaatttgcggagattgtcaatgttccaagaatgctctaagtcttcgccggatggcgttgtgagcctgtacacgctgggggacgccttcgtcttgacgatgaaatggccctcccactttggttctagcttgccccgggcctctgtccgagctgtccggactagtacgaggtctccttcgttgaattccctcgggatgactgtgtggtcgtgccatgcttttgtttgagcttggtatttgtttagagcctgtagggaaaagacgcggtctccgtcaatgaggtccttcgaagtaggctcgtctacgtcggggttggctaacgtgactgtccgtggtgacccatgttttatttcttgcggggtcatggcctccgatccatatagaag

SEQ ID NO: 162054 - DNA, 882 bp, Zea Mays
gaatatttgactcaaaggtgaagtccacaaaaggattcaaattcaaactagagattcaaatgaaaagaaaataaatcaaaaaaagggaaaggaaactcacctgtgccgcagaccaacaattcggcctaaaccgaatgccacccgcgcgacccagacttctcctccaccgcgtgtaatgatgctctctgctgcgcgggccccttctgtcagccacactgtggcgccatatctcaaatactgactggtgggacctcccggttggtctctcgcgcctgcttcctgcgtctgtaccacggactcactgggcccacgcgtcagtccctaccttccctatccgcgagctcgacggtaacaacatctccgccatctacgcgcgtagctcccttccaaccacccttcgtgctcggtcttccgtggatcctggcatgcgccaaccccgctgataaaggggagagtatccccttgaccacgcgcgaccgtgaccatttgtgatactcactgccagagagagaactaatcgctgccagggacctccgtcgtcgtcctcggtgccctccatgaattggcaccctgtgcgcggtcgggtaggttctcattagctcgtggatcgcgttgagggtggtggcagggtagcggtgcggcttgggcaccatcaatttaacaccggacgtgagtttccgccgtgcgctgtggaaagcctgggtcacctcctcgaatcttggtgagtaacatcctccgcatgaccataccgttaccgcttcacgcttctgctttcaggttagagattaggggcggcatgtgggtcggggcaatcgccggccatggcgccgccgtgtcttcacgttgaggaaggaaggaggagatatcgtggtcgttgatctc

SEQ ID NO: 162055 - DNA, 998 bp, Zea Mays
gttggttccattgtactttgtaaaacttgagagtcctttttcgagtaactcggtctttctaatccaaaacttggatgggatattccgaataggttaagtctggttccaaattaacatcagacacatccatagtttgatcagggatccgaagacacttcttcaattgggatacgtggaacacattatgtacagcagacagtgattctagcaactgaagtatgtacgcaacctgcccacatcgttcaagaatagggaacgggccaatgtatcggggtgctaactttcctttaaccccgaatcgactaataccctttatcggtgatactttcaagtacacatgaggttggacggacggtctcttatgcattgactgtaaagtatgcctacgcgaaggccgctgattgtatagtggatggcaattttgtcatcaatcagggcagttgcgacttcaggaggaggaactttttataatagtcatgaaggctttccttttcttgttgtatgcagagggacaattctgccaatgtggttgtttcaggtctatagccttggaagttgagtaggaacttatgtaaagggtcttccaagaatccattgatagaggggataatcttgaataccatgtgagggtggtgccttcaagggcaatgatgaatgacttgtccatagtggtgtcgtctcccctatggatgaaacggtgacttggtagctcataatgtactgtgttgggtttgtgcagtctttgtattttggataagtgctcgctctataattttgtggccacagagaggcctacaactatggtgacaggggcttcgtttgtcaggatagttcaatccttggaaggcaacttatgcgatggctggcctatggaaatgataaatgttttgattggcggctccagcaggctgttggtgggggaggtcttcgcgttgcatctcagcaatttcttgctccagtgctctggctttttcttcctcatccatgatctgttgcct

SEQ ID NO: 162056 - DNA, 622 bp, Zea Mays
gtggggcgatagcctaggaaacaaaccaatatactagaccatttgataaaatagcttcatgataataacatggagattaagtgataatatgaggagtgttctaaaataacatgaataccgaaactttattttggccaccctaaaggagagttggagagaacaaaggggtggattggcggggactggacgttagggtgaagcgggcgcattagcacgtcggtgtggagagtcagcgactccaccgcaaaatggcgacggtgaggcgacaataggcgtgggatagcgagggcaagcgacgatgcaatggtagatggcgacgatgtggcgaaaggcggtggcagcaagcgacagccattgtcgcgttgtgacggcgcgacgggacccttatgagatagcgagggcgggtggtgctgtgatgtcaaggtagaatcccactaatagcctacccatccgtcggtgcggattcgaaggcaaagtagatgtactgcgtgcaggattccgtcgtggcgacgacgccgacgagcaccacgactcgggtggggagtgggctgagtagtgaagcaccaagaaaaagttagatcaaagtctagttttcattaaatttagtccaacctactatata

SEQ ID NO: 162057 - DNA, 427 bp, Zea Mays
aatcaaagtgagttgtaggcctgcagtagataggatatgctggtttcaacttagactgaaccaacgcggaccaagccaacgagcgtgggccaagccggtcagatacacgtcgcaaacacgaccccctatatagcactctaggatgaaagggggagagacagagagcagtatatgtgcatggcgacatggctagtgagcagtgagtacaataatactcgcctttttctcagtgcatctcctttatttccgtttttacatatgtgtgtatagtgctactactgtgctagttagttcgttctcctccctctcgtcaacttgtgtgtgtaaacaacactgcacgttatttgcaatcggcgctaattaatttgttgttaaaaatgtacgttcgatcttctgtcaaaatacgctttgtacgatcgagactaat

SEQ ID NO: 162058 - DNA, 1079 bp, Zea Mays
attcataacctagagattcttggttgggcactgaacatgaggtggctttggctaaaaaaactggacagagtttgatataagaatacaccccaatgctgaagcccttttctatgcttcagtgctttccattgtgggtgatggtgctaaaacccttttttggtctgatagatggttgcaggggcaatcaattgaggctatcgccccctccttggtaagccaaattccaaggaaaatcaaaaaaagaagaacagtccaggaagccctaatggaaaatagatgggttcagggcatctctggaagtctgccgaaagtggttattagggatttcttgctgatttgggatttaattcaaggtgcacagctacagcctggggtttctgatgttcaccgctgattaccatgtgtttccggcttatactcttcaaagtcagcatataatagatttctagttggcacaacagcttttgaaccggctgatagaatctggaagagttgggccctgcgagatgcaagttcttcatctggcttgcatctctaaatcgatgttggacgactgacagattagctcgtagagggttggcataccatgacaaatgcctcctttctgatcagcaggaagagacagctcaacatattctggtttcctgtgtgttctccagggacatatggtggtgggtattgtgtaaagtgggtctgccacagttggcacttgggcatgaggatatgatattccaagactggtggagtagaacagaaagtcttgtgccaaaaattcagagaaaaggttttaatacgatggtaatcttagtggcatggtggctttggaaacatcgaaacgcatgtgtctttgatggaatagccccaagcaatggcaccattcttcagcacattcatgaggatgcaactttgtggggaatggctggagctagagctcttagaagcctttggccttagcttgtggctcgtgcctcctctctaaatgctaggttgttgttatcgtgttttgggccatagatgagtctctttatgttttttgttttcatcctgcatgaggagtgtccttgtattttggtttgttc

SEQ ID NO: 162059 - DNA, 867 bp, Zea Mays
ccccagaggaagtggatacagatgagaagcgccaagagtgtttcttggaaggactgattggacctctgaactatcagctgcagagtcatactttccccaatttccagactctgctgaataaggcaattggccttgaaagtaaacgaagggaattgtctgaccataaaaggaagttccaaggtcagtccagcaggaacacccgcccgaacaacgttcaaggttctcagttccgctctggaaatcagggtggaaataattatcaagtgcaacactctggacaacaaggtcagaggaataatcaaagtcagaaccagcagaggaacaactctcagaccaaccaaaggtctggtggtagttcgcagactcgacaaggtggcgccgtgaacacgcaggccagaagcaacaatgcaccagtccaacccaatggttgtttcaagtgcggtgagcttggccattatgctaacaactgccctaggcacaaccagtagacacctcagaagagcaacaatcggaggaatgaccagaacacccccgctcgaggatctgcacagaacaggactccgcagaaccagagtagaggaagagtcaaccatgtgacaacggaatcagtgcctgatgatgccgacatggtgtatggtatgttccttgttaactccatacctgcatcagttttatttgactctggagcatcgcattcatttataactgagtcattcgtggaaaagcataacttaccaaagcaccctcttaagaagatgttacacattagttcactaggaggtgacttgaaggccacacattcatgcctccatgttaatctcaagattcaaggaatagattttccagtcaacctagtggtcctaggat

SEQ ID NO: 162060 - DNA, 295 bp, Zea Mays
gttctctccagcactactcggagctcgggttgcgccgtgggcggacctcggtggactggcgtggacccgctcgtgacctcgggttgggctaggagtcgtccggctggggggaattgcttgtcggagagccacgcggccgtaggaactacactgcatcgtgggcagctccatctccgcctctaccgttggtgagtgcctatctagcatgttcagattatccttctcgtcgcatagcgagactcagatcgattgatagtgcacccagacaccgaattgttatacttcggccatggcg

SEQ ID NO: 162061 - DNA, 327 bp, Zea Mays
ggaggaaaagagtgcgggccagaacaaaattgtttttacaaattacaagggcgggctggccctgatgagtcaaacaaaaaatttgcgcaggttatcaatgttccaggaatgctctaagtcttcgccgtttggcgttgcaagcctgtaagcgctgggggaggccttcgacttaacaatgtaagggccctcccacgtgggttccagcttgcctctggactccgttcgagctgttcggatgaggacgaggtccccttcgttgaattcccttgggatgactgcctggtcgcgccatgcttttgtctgggcttggtatttgtccagagcctg

SEQ ID NO: 162062 - DNA, 781 bp, Zea Mays
ctctatttggaatcaagcagaagcaattactattgctcgcttccggaggaagcaaggcgaaccctagctgccaccccttttcctactctcggcttgcggcccactccgtgaacagtaatgcgggtactatagccacccctactctgtctccctctctcacttgtgaacagccacgacgcaccaacaccgtgatcttggccgaccaccttgatcttggccgaccacctgcgccacatccctactctctacgcgacgacatcggtaggatccacaatcatatcaagtatattaaaggaaaagaaagaaaaattaagtaggaatgatacctaatttaaaacaaaatttgaacattaaaacattaactgttttagaacgcagaaactactgcaaatcatgtttagcaagaatcgatgtgaaagctaaataaactactgttgtactaccctactggagatgaagatgtgaatccataggtaaaaacaaatcagtacggcaaagacgatagcatatagatcttgcttccatgtttgaaaatgaataaaaatgagataagatttgacaatgtgtctggactgttcgagttcatggattcctgtcatcaagctcaaaccaggccaagcttaagtgtctttttgttactggtcagtaacaattaacaaagtggccggttttggttgtggctcatacgctcacacgatgttgtttctctccgtacgtctcccatgagaacacccgttttcttttaggcccgtgggtcacaaggcaaatcacttccggtttg

SEQ ID NO: 162063 - DNA, 463 bp, Zea Mays
ggaaccatatcttcaagagtctgatcaaagtttgcaagggacaactcttgtagaccaatgagggcgaacagagcgggagctgaattgcagagaggatctggaggcaggaaagcaagaactagggcacggaaagcagaggcggctgtaaagcgcagtgcatatgggatattcccgagtcagatactgtttccaaaagcgcccagtcagcacccggcagttacttctaaaacaccggcgtgccacgttgtcacccggcagatacttctaaaacaccagcgtgccacgttgtcacccggcggttacttctaaaaccccggcgggccacatcatcactcggctattatcctcaaagtggccgacacaacccgttctaactcggctattatttctaaaacgccgacgttatcaccagtcgctcggcatttatctctaaagcgccgacgatgtcttcagtcgctcggcg

SEQ ID NO: 162064 - DNA, 692 bp, Zea Mays
tatgacttaactatatgtcccttcttagagcatctaaaacaatgtttaccatccttattaataatcaagccattctctttaatatagggacatgacctaatcaagtgcccattttcaaagcattcacttacttttcttagtgtgaagtgtggcttgatcattaccttggatgttaccttgcatggaggcatggttgtggcttttggcagaggtagtgattttcttcttttgttccttcctcttgacaatcctcaagtccttgactttttattcaagggattttgtgcatgccacggttgttcccgtctcaagctttttcaccatgtaatcacggttatcttgagaaggttggttagtgcacttcccttttagttgtgtcaagctcattcttagcctctcattttctttcttgagcttttgacatgtatcatcttttgttcctagaaattctagctcaaaggaggaattacttgttaacgagcaacaagcattagcacatggtgatatagtttcaatttgaatacatgtgcatgagtgaggttgttgggattttaagttttctatcacaacctcatgagcaatgtttaacatgatatgatcatccataagatttttatgagagcatagaagcatatcatgtttttcttgaaaggctagattttcaatttttagcctttctacttggtccttaa

SEQ ID NO: 162065 - DNA, 424 bp, Zea Mays
ggaatatgtcaagtctggttctagggcaacatctgttacttcaatggttcgatcgggaacccgaagacacttcttcaattgagacacgtggaacgcattatgtactgcagacaaggtttcgagtaaccggagtcggtatgccaatggtccatattgttcaagaacaggaaaaggaccaatataccggggtgcaagcttccctttaacctcgaaacgtgatacacccttcatcggtgaaactttcaggtagacataatctccaactagaaagtacaagggttgtcgtcgcttgtctgcataattcttctgacgagcttgagcttcttttaaattatgaattattcgttgaacttttcttcggtctcctttacaatatcaggtctgaagaagcttctttcacctggttcagaccagtttaacggag

SEQ ID NO: 162066 - DNA, 1090 bp, Zea Mays
ggccattcaccgagttggagtaggcgggtcctggtggcttcagctgcggacagttgttcttgaagtgacttggatcaccgcagtgccaacatgcatttgccgaaggttggttgcttgccactgagggggaatgaaaagagctctgactttgttggctgaatcgtgacggagtgggtccagctggtctactgaagttgggccccttgggtggaaacccaaatgatcgagtcttctggtgctggtcctgctgctgtgcccggagaacctggaacttccttttgagatgtcctttttctttctccttagccctttcaacttgcatggccttgttggaaaggtgagagaagttgaggaagtcttggctagccagaattgtcttgagttccagcctgagtcccttcaggaaacggtccatctttttgctctcggtattgacatcatctggcgcatagcgggctagctcagtgaacttgtgcacatattcgctgacagatctgccgtcttgagtcaattctcggaactcgtcctccttaagatgtaccagtccttggggcacatggtgctcccggaaagctgcttcaaactccgccgaggtagcatctctgatggtgacgttgaaggtgtcccaccaggctaaggccatcccagagagttggtgggcagccagttgaacccgctgattttctgggcaaccaatggcttccagcttccttttgatcgtgcgcatccaatcatctgcatcgagggggttgcttgatccggcgaacgtgggaggtttgagtctcagaaagtcccccattctgtcttgcggtcttccaccgttcgaccgttgattttccagatttcgagtgaggacctcgatgagtcgggtctgattggctagaacttgggctaggtctaagggtaggggtggaggtgcggggaggtgggtttcactttcttctctaacgacttccccttcagctcttcgggggaagcctgctcctatccctgaggcggtaggcgtggttttatccgaagccatctgccagggaagagagtcactattatgcacatgcaaattgttttcaaccaagttattttattcatt

SEQ ID NO: 162067 - DNA, 543 bp, Zea Mays
aaggccatccggctctgcgcagattccccccagaccacccacattacgggtgatctggaggaaaaataggaactcacgctcgtcaccttcctccaagcaaatgctgacgtgttcgcatgggagccggtgcagatgcctgggatccccagggaggtgatcgagcaccatctgaagatccaccctgatgccaaaccggtgagtcagaaacctcagagacagtccgttgagcggcaggacttcatccgaaaggaggtccggaagctgctcgacgctggcttcatcgaagaggttcatcacccagtgtggcaggccaatccagtcattgttccaaaggaaaacgagaagctccggatgtgcatcgactacaccagccttaataaggcttgtcccaaggacccgtatccactcccacgtatagatcaaatcgtggattctacctccgggtgcgacctcttgtccttcttagatgcttactctggtttccatcaaatccagatgtctaggaaagataggaagcataccgcttttgtaacagtggatggg

SEQ ID NO: 162068 - DNA, 781 bp, Zea Mays
cgaagctcatctttccaaattttccatgcaccccgggagtaacaagatgtatcatgacctcagatccttatattggtggaccaggatgaagagggaaatagctaagtatgtatctgagtgcgacacttgccaaagaatcaaagctagtcatttgaaggtagcaggagccttacagcctctccctatcccttcttggaaatgggaggccatttgcatggatttcgtggtgggattgccaaacacctcccggcaccatgattctatttgggtcattgtggataggttaaccaagacggctcatttcttgccagtacataccatccacaaggcggaaaaatatgctgagatctatattgaccaaatagtgtgtttgcatggaatcccgaggactattgtgtctgatagaggagcactatttgtggcacctttctgggaacaactacaaaagtcacttggaacaaccgtgattagaagctcagcataccatcctcaaacatatggtcagacagaaagagtaaatcagattcttgaggacatgttgaggacatgtgtattacattatgacaagaattgggataagtgcctttctctggcagcattctcttacaataacagctaccaatccagcctaaggatggcaccttttgaggccttgtatgggagaagatgtagaacaccgctaaattggtcacaagctggagaaagggaaatatttggacctgacctagtgcttgaagccgagaataaagtccgagtcattaagaacttggaagctgctcag

SEQ ID NO: 162069 - DNA, 526 bp, Zea Mays
ccctgatgggccctgatctgatacgtgtgttttgtgtgccctgatctgatattgtacgagattatcaaaaatgaagctgggatctgattttaatgccaagaactcgagcacgggcagggccagtaaaagttgtgtctactgttgtggtaaggttgcttctctcttttgccatggctgcgtatttagttgtgtctactgttgtggtaaggttgcttctctctggtttctgatgctcatttttcagcctgaaccgtgtgctcttggtacttgtaggcgtacctttcagggattggtgcgccatgcgcgggcatccacgggatcccaatcacaattagcttatcatctcaccttcctgtaaagtttcatgcttgctatttggtcaagaaaaatggacaaaagataaacaagaaatgacaagaaagtttcgtaagcatgtgatgtgaagtaatattatcatgtaattcaattcatcccccatacgctgcccccaacgctgcctccactccccaaccatgcgatgcccggg

SEQ ID NO: 162070 - DNA, 343 bp, Zea Mays
gggtagtgaacatcgagggcagaggttaagatcggtcgatgcgacctgttaggaagcgacagtccggcaatgcgacttgtgggtaagcggtggtcgactgacggtggaccctgactactgaagagtgagctccactacggagggagcgcacagagcgaataggcccagtacaagcagtcgcatctccgcctccactcctctagccgccagccaccgctcgcccactctgctcgccgagtcgccgtctcagggtcttgccgtctagccgtctccgcctcctctcgccctctccggtcgacggtcgtggactcatgagttgtgggcgctgccgcgctggctccgc

SEQ ID NO: 162071 - DNA, 421 bp, Zea Mays
ctaagaacaagggagtttctcaattttggcaaggccttcatcaggccaagcatctgtttcaatggggtgcgacgaacaagataaaaaatggggaagggaccctgttttggaaagacgtttggatgggaaaggtgcctattaaaatcaagtatcttagattttttgatatatgcagggacaaggatgtgcctgtttctgaatgttgtgagagaggagagtggaacatagatctagtgaggccccttaatgattctgattgttgcttatgggaagaccttcatactgagcttagggagcataatacctctcaagggagagacttagtgttttgggctctggacaactctcgcagattcactacgaaatccctttatagatttaggaccgatggtggtgtcaaaacccccgtttacaaaaaaaa

SEQ ID NO: 162072 - DNA, 527 bp, Zea Mays
tggtggtgtagagtgaaccgttgtagagggtagagatatggagagaggttgctgacgtgatacatgagtgggatataggtggaagaatatagagtcgctgaaggtagtctaaaggcgaggtatgcccatgctgatgcgttatccgtcctgagaaaattgttgagtaggaagagagcgaagagattagacttgagactcgtgagatcacaacactctaatagctacccctgcacataaaatgatttatagaggctcaaggcgtggaatcgtaataccatatgtcctattgtatagtggataaattaatggaaatgaagggaaagattacacgctcgaatgacgtcttagcaggaagatagactagctcatcctctattttgatctcggtgagagttctagtctaatcctagccgtctcgttttgcagaaaccttttggagccgtgggcttgcctgagccttgttctaccttcgatttgccttggactccgaaggattattaaccttaaactcctgaacaccatctacg

SEQ ID NO: 162073 - DNA, 375 bp, Zea Mays
gcgcgcggcaatctagcgtcccagtgcgccaaatctctacccgaatcgccccaaacctagaacagctctagacgaattcaaaggggctacataccggtgttgattatcgccgacgcagaccaaccacgacgatgggcggatccgcggctctgacgagcaattaatgggtgttcggtcgtcgatcccgcccactagcgccactgacagcttcccgatggttcgtgcaagtccctgtcccgaccctaggttctgggcaatgacgagggaatggattcgcgacggcgcggggttgactcgatgcaaggtcgtggctatctctttccctctcggctcgggcactggtacgttcgcgagacagtaacccaggatgcggcg

SEQ ID NO: 162074 - DNA, 585 bp, Zea Mays
gctgcttaactggccgagttgctgttgttgggctgctgcatgctggccgaatggcctatgtcttgaactcttgatgtctgtcattctgtcaagtctaaatgtctagtgtagtgtggcgtgaactgtgggtctgtgcctctgtggcgtggttgcctggtgccttctgtctgtgttctgcgaatctgcctttgtggcctttgtgagtttgtgacctcagttgcttttgagtcatgctatatttgttcatgtcaaattggtgccttattggcttgctaattgctatgtttatgcactgccactgagcagacaacagtagagaatgtgttatatgagtatgtgccttatcccttatgcccttgttgcatattggcttgttatgtttgtgttcacggtttatgagtatgggctgctggttattattcggttagaacccgaaaaccgactcctaagttcgggtaaccgaattttcggttatcagatacccgaactgtatttcggttccgccttcttaaaacccgaatttttaataacccgaaaaaaccgacccgaattgtcgggtaaaaccgaatgcccagccctgcctta

SEQ ID NO: 162075 - DNA, 826 bp, Zea Mays
cttctaacagccccctaatctaatttggtccccccaatcttagatcctagcttcgcccctggtaaggatggctcaggaaaagatgatccaacaggagaagatgaagcatcagaaggattgagccattagaagatggcgagatggggaaaaattccttgcacctagatgtacagaagcaacaccacatgcttcgtctgatcatgacacatgtccatcctactaatcttaaagcaaccgaacaaccaaccatgttggctcatgctttaagattggtgttatgttgctttaatattggtgggatggacacgtgtcacaaatcgagaggagcatgcagtgttttttctctgcagctgactgtagggaatttttagacgaggtcatgtatagacctatgtcataggaggcttcatagtgtaatttggaaccacaaccaaagactctaaagaaaacacaaaataaggcacaacgggaggcgccaagcgggaaatcgacacacaagctatagcgtcatcagatataaataagaaagaaagtgggtcaacaagtgatgttgaggaaacatagaagaagcatgagggtaaaaaggatgagactcatcaaaaaccatatcccgagacactcgcattcgtcgagtaaccggatcccaacaatgatatcccttgttctcgacattatacccaagaaaaacacaagaaaaaacacagtcaaccgactaattaatcaactaattgtgcttaggaggtgcaagaagcacatagcacacgcaaccaaaaagatgaaggctagagtagttagacaccttgccacaaagatgctcaaaaaggaa

SEQ ID NO: 162076 - DNA, 996 bp, Zea Mays
caaaataccttcgaagcgcaaatgtgggttgcccgaaggtgagtggagaaggtgagctttggaggctaagccctttgaaggtagcgagaatgcatgaaatgtcccatcgagtcatatacattgacggtgttcatctatgtacagggatctgacactatatatcttcgtatgaaattatatagataccatggactctttcataataactatacaatcacatgaggtattattattgtctttttactcaaaatacatgttgaacatgtctctcttgagctccctcgtcttttcaacgtctgttcttagtcgaaggctccctcttcttttcaatgtctattcttagccgaagctttatttgaacgccactcatcaaagtgggttccgatgatgcaacaacgcttctcttcatctgtgttgacgaagtctctcttattcctttgacttgccgaagtacaaaactgaagctcgcatcacctggctcccgaaacaaacttagtccccctttgacagggcttctctaagatgatttctgctctggcttcattatttttagcgaagccataccaaatagtgtttttaaaatactttgcctcaaaagcacttccctcattttcattggaacgatgaagccaaaaataacgacccaactagctttgccttgtgtacattttgtaaagtgtcccctcccaccacatgcatatgttctctgcaaaaatcttgctttgagttcgacatcgcataggaccacaccaccaacctccccggtaagctcctcatcctcgtctttagtttgctcgactctagcgaccacaagcgctactcctttatgtgacaccgctaggtagccatagaggatgcctcccgcctccacctcgtgcttgacagcagggttatccatgggctcactgttgacgacatagggtaggtcatggtcatccatggggacacgagacccagccatgggccacagatttgacaggtttttttcttcaaaaa

SEQ ID NO: 162077 - DNA, 397 bp, Zea Mays
gatttaaaacgacctaatctattcttccgaaccagatcggaatcggacggctctcggtgtttccaactgagacaagccaaccgccaccgattttggcagtcaacccgatccaacggccagatctcttccccccttaccctctcaccacgccagccagcagccggagccgtcaccagccatggcggcgccaccgttgacatcgcctgactctgaagatcggtgcccaagtgcgaccctaacatggtgtacaggccactacgaatctatttgtaggctcaatttcacctttggaaccccatgtgtagcgatcaccatgatggcgcggcccctaggtacctaagtaatttcgacgacaaattccccgctcctagggtctccacatggtcacacgcgagcg

SEQ ID NO: 162078 - DNA, 716 bp, Zea Mays
ctaattttggttaaatatttctcaagatataaatttcttaagttctctgcctattttaaaagaataaacagaaatagataaaggaaaaagggttttgcattggggtccccggcgaaagtttctaagttcattacagacaggtcctcgggttactattcacatgagtctatgactacgcagaaaaccccctaggtttctgctaaatccaacccacgatccttcccctaatggaacagtaactgcggcggaggaaaagggcgaaggggcttaccggtggcgagatgctctggtgaagtggtcgagggtgtaggggaggtcttgacggtcacgctgatgtgcggatcgtctccggcgatggtcggagtaggtcggtccacgtgcgcaggcgggcgagctcgtcagcggtgaggactccagcctatccagggcggtatagttcaattgaacgggtcagagaacttcaccagaggtcagggaagacataggcatgaggaattggaaaatggctcaccagatagctcggttcacgcgcggcggcgggtgaccaaagtccggcgtgggcaattctacttctctggtgaggcaatgcctcggctcaagcttggagaagcttcacagggtcttcgggaagctatccaagggctcagttgaggctgaatgtctctggatatggctagccatggtggccggtgctcgggtggctcgggcgggtggcg

SEQ ID NO: 162079 - DNA, 605 bp, Zea Mays
cttcggctgaagggtttttaatgtcatccgctgaaaaaacaaattttgtctgaactacagccttggcatgttcgcagccatctttctctaagatcgacgtggcccctcgtgcaccagcaaaggcgcagaaatctcctcggtaacttaaaattttatcaaaagcttcggcttccccactgatccactggacaagtccatcagggtcgccgcagatgaatttttgctcagaggaatataccctaaccctagcaaagttgtcctttaatttcttggcgcactccaaggatatttcataacatttctctttcgaagcacgaagctcatcggcgttcttttgtgctcatgacctttcgatctcccaaatttcatgtttcaccgcctcaacttcaaatttttcggttgcttcagcaaccttcctttttagttcttccacttaggctttgtgagcttcgccttgtgcaacaagtttggcttcgttagatttcagcctatccactaaggaaaataatatcttatccttttcgagagcttcgttccttagtgtgataacttctgagcgaagattcccaagagctattcggcagctctcatcttctgcttccttc

SEQ ID NO: 162080 - DNA, 378 bp, Zea Mays
cagagaaaaccagacttgtctggcaaccacacaagaagttaacagatgttggatggtatcatcctcttgatcacagaggggacatctgtctggatgaggtaggcctcttctagcaagccgatcagaagtccaacatctatttctgacagccagccacataaacatcttgcatttgtttggcgcccatgatttttagattctcttccatggttcaaaggtactagaaccctcaaagaatgtcctgtaagctgattttgaggagtatgtcccatctgattccagcttccatatgtgtctatcttcctgatcagttaaggtcacatcctaaatatgatcccaaagtctgaaaaattctgcaaaatgctgccaggaaagccc

SEQ ID NO: 162081 - DNA, 613 bp, Zea Mays
tgcctttataatttttagtcatctttttggggaacccaaccttatttcaaaaaataatctcgtacaaagtaaccaccttaccctgcctagagtatacgaggaggctacgagctaacaccagaaaaaatcacctgaagaaacgatctgaccagagcacgactgagctcaaagctatgtgttctaggtgaagcaaaaggaatgcgtcaggtgaactccggtaccgagccttaaattgtcgctcatcacctcagcctttcccacgtcgctgtaatctggaggtaccgccaaaagtatcaggtaatgaatagttctaatttagacagagacataaaacagtagcgtttagaacttttttcttctaaattttgtctgcacacacacacacttccaactgacgcagaaggggaggattgggatccttctacattttgtgtgttatgaggccttcacaaactcagctgctgaccaagctgtggctgaaagatcaagagacttccattccggatggtaatttgaaaaaaacttttgtttgcccgcatcccaaacattctagattgcttcaactcgtgaccatttccattgatccaaagagctggatccagagatcatcttg

SEQ ID NO: 162082 - DNA, 589 bp, Zea Mays
cagcccaataattattggaagcatgtagcattcataagtcagtcctggttaaaatttggagaacaattcgatagcatatgcacataagtgctttaggtccctcagtatccaatgtaagtcttacggagttttatgccaggtgttaatgcctctatgttagaccccctaaaatatggtgttttaagtgacttgtgtgttgtccagtttaagttgagaaaaggttaagaaacattaattaacttgctcacacccatgttttgagttgcaatgtctaaatggttcgctaagtcttctactgtgattagccaactcatgttaaataggagtcgatttcgttaagtgtttgttatatatatatgttgtgtctcggattgcgatagtaataggcaagccgacatgtatgccgtcgagcggaccgtgtcgttgctctagttagccaaattgttcgatggcttgggttaagctcgtagttacgatgaattacttgttgtagtctaaatatgtatggttatgatcgcgggtaaaaattagtagtgctcaagtgatgtctaagttaaaatacaaactagtgtgtaaggggcgcatcgat

SEQ ID NO: 162083 - DNA, 599 bp, Zea Mays
gtgcacacgtcgtggtagtcgccttatgtctacatcgtcgttctggttctggctattggtcgtggagattcaccaagggtttgtgtagcatgcgtgctatgatgctaggcgaaagggcttgttggaaccgtagagtttcttattgggatcgagtggcgccgtgtagctacatatggcgtggatagcgccaccgacgcctcaaccaccggtaagtcagtccctatagaggtattccatttccccgcattcgtttacactgtgtataggtcggagtgggtcactagagcattggggagcatacaccgacaaggggcgtcaccgtggtggatgggtgtcgttgcctgatgcatcgggctagtggatggtgataattaattgaagaataccattcaggtagatgcgatctagactcttgatcgtcgagcggacgattaggattataaggggcataccattttgtcgattacgcgtgagtcatggatctttgatcggatggcttgggtcgagtgggagtaataacagttttgtaacatttgcttaagagacctgaaaatgacacgcaatccaccacgcttgttccaacaacctgattgtttcta

SEQ ID NO: 162084 - DNA, 531 bp, Zea Mays
tccggctgaagaagattcgaaaggaaaaaaggtgcccacttctcagggacacccaccgagtgatcagtcggtccagccggagcaaagaatttggcccagagcctagagaactggacagctctattcctctcctcaatcatctgaaaggctgggtcaggctgccagtcctgatgcagcatgagattcatctccagattctgatggtgaatgttgttaggcccatcaaccgggacctgagggagctcaacctccaaatcctgggcctgatccacctgaggtggtggtccatcaacctcctgtggcccattgaagggggcagcattgatttccattccgttcccaatcagagcatgaccattcactgcaggatgaccattcgcggggggtgcaagctgaccagcaccaatggagctatcagacgacaagccagaatgctgattgctgtgttgcagctcttcctgctgaatgtgttgctcatctggcaaggggggttgggggtcttgctgaatgggctgctcattcacaatccac

SEQ ID NO: 162085 - DNA, 353 bp, Zea Mays
aagtcggggcagggtgaaaatatcgggtgggggtgaatctagtcgctggccggaccggtcgtcgtgtgccaccacggtcagtcacgctggcatcaccggagctcgttgttttttcggccgtgactcgtagtaaccacccctccgtgtcataagggtcgtgtcaagccactggttatccaccacagaccagttcccccttgtgcgtcacggtgagtaggccacggtgaaatattctagccggataaccatgatctcaatcccaaaattcttgtccagttcgatcgggacctataaattgaggatgccctctgctccgcttcttagttacgcttccaacccatccccaatttcgc

SEQ ID NO: 162086 - DNA, 872 bp, Zea Mays
aagagctaaaccctcgcctaggctggcttctccaatgcttggcccagacgcgcgcgtacacagcttgcctacccataaacacttgggtgccaacggctgggctaaattactctcccacatggcccacgtgacataaacccaaccgcatagccacactagttttgcctcaattatttattcatcttgccgcaacatacgtcatcctgacataagcaatgatgtcatctagctagctctcccacgtatcgctggtatggatccgactagcatttgtgcgctcagccgtgtcgctgcgaaacgggccccatagccagtgcctcagtgaacctgttcgtgcctggtttcgttgataggaggagtcgcatatacaggctctttgtttccagttcgttgaagatcccagcgatctttgcgatcgttgcaacaacccgccgagatccatggcgggcgctccctgtcgctgctccgaagcacgtgctccaccacggactcggactccgccgctatgctataaaactcgaggccaacctctcctatccaaacagacacgatgacaaacgagattgcctgagcaccggcgcctgagaagatgtgagagaccgagggagagagaataagaacgccctgtgcggatctccctcaaacgcgagacgccgggatggatgacctcggggccgcgccacctgagccatcgctctgcaccggtcgggcttcttcatcaagggatcttgaagctattggcgtcgtgaccggttcgtactaggtgccagcaccggtgagaccctctcctaatgactcgatctctccatcaccatagccgcgcataatggaagtagatgaagctgcgatcgccatgaacgaatctcgaggtc

SEQ ID NO: 162087 - DNA, 566 bp, Zea Mays
gctgtggctccgggaatttcctcgttgtgcgagcagcaccgccgcggagcacccgtcgccgtggccgagcttcgtcaccattcaaacgcgggtaatctctgcctcctcctgttcacagtaccgtgcgcttcatgtggaattactcggggtggctttcggggtactgggccgtcagcaggtgctcgccggtgagcgcgccgtggagctctgctcctggccgctcgggtgaccggggggggaagatgacggcgtttgggccgttagatccatagcgtgcggtcagaattgactcgagtctcgatagcacctgggccgtggatcgtgtatcgttcggttcagattaggtgtagcgcttgatgaagattgggccgtccgatcgagatcagagggctctgggttggatccgcgataactaaatctagaccgtagattgttgatccaaggactcctatagcgtaccggttcgggattggttaaatctaatcccacgcgtccatccgtgatcgcacggccagagttagtccataccccttcacgggcgcgattttgcattttgacccctctgg

SEQ ID NO: 162088 - DNA, 637 bp, Zea Mays
catggctgaaagggtaagcagctatatcggccgtccaatctgaaacgaggcacccagattagatccatgacggcgcaaattggtacgcgacggtagtcgttggatcaaggcccctgcggttcggattttaaatggtatgattacatcctaggcgcccacggccggatcaatggccaggatgaacctgggctgaaacgttaggcgcagaccaatctggccacagatcccgcgatcgacggccagaaactcatcggccatacccgctatctcgatcggcggcgccaccgtgcgacttagacgtgacggacgccattgccggagctccgaatctcgctatacagcgcgctattctccattctacgggatgctacacaatcagatggggctagtgaacaattgtgcaaggaatactcaccggagatgggtacggagattcctggcgatggcgcactgcggcactgcggcggagattgcactccggtgaacaattgcggatcgttccgtcgtcgatttggcccacaaacgtgttgatgttttctcacaagcacgacgcaggaccccgacccgatcctaggtatccgacggcggcggggaagagattccgcggtggcgccggtcgcctaggagtggattcgcc

SEQ ID NO: 162089 - DNA, 554 bp, Zea Mays
acgcccagttttctttgtattcttgcctgtggagggttgaccacatttcccattccttgagttgcgttcccaaaagtctgttggaaatttgatttattctgctctggataggggcagtccttgataaagtgtccgaactttccataattaaagcagccatttgaggaactgggtagggcgggaaacgagcaccaggggcactcggttgattgttctgggcgggggcaggagtgggacggatgaaaactggttgtttgaacggatatgtgggtggacgaggagaagagcgacttgggttgaaagtacgaattgccaaccttgtccgctttttagacccctgagatgatccttcacccccatatttctttgtttttccttgtcccaaattcttggcttccatgggcagcgctgtgcttatggccctactataagtgagatccagacatgtggccatcttgcgctggagtcgatcattcaatcctctcatgaagcaatttttctttttcaaatccgtgtccacttgatctatagcgtactgggagagatgattgaac

SEQ ID NO: 162090 - DNA, 321 bp, Zea Mays
gtacagtagccgatcggatcaggttcagtgaacctcaccgccgatgaccgtcacgctgtgattcacgtcgatcgccgagattcgtgtgatgtggattgtggataactgtgggcgggtaaagatcttggcgtctggatcagcttgagtccggccgtggctaagcccgccgtacccccttactcatcggtggatcgggatgagacctcgccgccgttgatcgatcactgccgtgcgccgcgtgaccacgtcacgattagtcacgttaggggatccggtgatcgccggagggagcgccatggtgaaaaccactaagcacttgcg

SEQ ID NO: 162091 - DNA, 513 bp, Zea Mays
gagggaaacaacagctgacaggggtcgggttgttgcaaaagtccgacgggtatcatagtgagagtttgttacaatggctcagagtttgttacgatcatgtggatgagttcgttcacgacggaggagatagagctgccatgtgagtcctgtaggtagtggcaatgcgcatggggctgcaggtgggactcacctatcaacgcttattgtggagggctggggagaggatggctagcggctctcggcccatatggttgaaacggagaagtagaacaagtcaaaaggagtgggttgggccgaacaaggtagagttttctgtttttcttttgtattttcagtttcttttctatttaaattcttgatttgaattcaaatataagtttaagtttaaaactaaaattgcacgaacaacgatctaacatgaatgcattaaatatatttatttttatttgtcatcttatttttatcaaacactttcaaatatggaattcatatacaacaatttagttatgttaa

SEQ ID NO: 162092 - DNA, 701 bp, Zea Mays
aggtgatacaacaagcctggacaccaagagtgaactctacagataacatcttacgtctacacgtgaaaatgattcgcacggccaaagctttgaagatttggaggcaaaagagagtaggaaacatcaaggtgcaaatggctattatacaaattgtcctaaccctattggagaaagcacaggaatccaggcagctttctagtgctgagctagttttccgtaggcagctaaaaatcaaaatgttggggcttgcggctattcagaagacaagagctagacaacactcaaggcagacctggatgcgtctaggagacactaataccagattctttcatctgatggctaataacagaagacgcagaaattttatcagaacgctacatcaaggaggaaggttgttgaccagccaggtagacaaaattaatgcagcccatcagtatttcctgaatatcctggggaatagaggggtaagacactgtgtcctcaaatgggaaagcctgggatacaccccttttgatctttcagatctagacagcatgatcaatgaaattgagcttaaaaatgttattatgggaatgcagtcagaaaaagcccctgggccagatggtttcataggctttttctacaaatattgcttcgaaatgatcagagaggacttgacaaacgcagttaatgatttctaccaccacaaatgtaagaacttg

SEQ ID NO: 162093 - DNA, 1450 bp, Zea Mays
tctttaaggtttacctaatgtcctctacatagaactagagacggttgttttccctttttttgctaccgacttagaagagatccagatgctctgttattcacagaggtaactgcatgcctgagtaactaatattggcttttatttatcattttgtaccacacttcgttagctatttctggtttcattttagccggtgatatggggtaataagatgatcagaaccctccctctgttttccattataatactttcatataatgcatagtactacttgttttctttgaccttcatttgattactatccattgtgttatacagctacttctaaattgtatgcaaaattacaagttatgaccgttcattcgaagataatcagtacttttcaattttgatgtatccagcacaagcctacttgacgacgacgggcggcgggccatggatatgtacgagaagctagaaaaagttgggtgtatgtctaatgttaattttagtttgaaccttacaaattgttggaacctagaggactgtattttgtgtcatatttaagtcgttttcatgtcgccgtgtcagcacattctcattcattacatttattttaagagtcattgtaggttcattctatagtcgcttgtttaatgttgctttagttgcttcattctttggaaattgcagatatgttttttagagcgcaaatttatttcctatctgagcatacaaaagacaaatagttgcacaaatattttgaagttcacatatttctacttgcactttagatgcagtctgtgttttcatcaaatttctttactctgcacgatatggttggtatttagtatcctctaaagatcggattttggcccaaacagtttgcagcgattgaagctagagactacatattttcttccgtaccatgcaagtagtgctatctcttccttaacttcaccacttaatgtctgtctaaatgtagtcattccatatccctcatttgaaacttttcatctgtgaagaccgtcaataaatgaattcttatattcaccaatgaagaagttccttttggtactattacaggagcagtgaaaactaaaaactgatatgattaggacaacatatcaacgtgcaaaggcagttcttctatttaaaactgcatgctgccatcacatctcaaaatgtttcttgtcctttgtttaccctaacaatactctcttctccaggatgcacaagatcttggcctgtctattgaacttcttccactgagccaccccgatgagcagttcgacatgtccccattttatgcggtaagtctccataattattttttatcttctctatgttctctgctaaattggtccaattgcacatgatttgattggtctggatggggatgagataatcgagtattttgccaagaagaaaaaccaaactaccatgtactgatgcagtctcagtgtcaaca

SEQ ID NO: 162094 - DNA, 435 bp, Zea Mays
cttggaattacactgagataccgggactgagctgagagatcgtagagcatcggctgtccattaagtccggtttcagacctttcaagcagagagctagaacatttcgtccagatctcctcccacgaatcaaggacgaaatccaccagctgctagaagctaattttattagaccttgcagatacgcagagtgggtctccaatattgtgccggtggagaaggagtcaggtaagcttagagtatgcattgattttcgcaatttaaatagagccactcctaaagatgaatatcccatgcccatagccgatacattaatcaataatgcgtcaggaaatagaattattagctttcttgatggtaatgccggatataatcagatttttatggccgaagaagatgcgtctaaaacggcctttatatgtccaggcttcattggtt

SEQ ID NO: 162095 - DNA, 1183 bp, Zea Mays
ttcaagtgaaactcgccccggcaacttgcctagaagtgcacaggcgaaatgatgaagaggctaggctctggcatgagcgttttggccatgtcaacatggcggcgctttggaagctagctcgggaggagatggtgcgtggattactatcgatcgggcaggtggacagggtgtgcgaggcttgccaagccggcaagcagagaaggacctcattcccgatagaagcagagtaccacgctcatcagcgcctcgagctagtgcacgcggacctgtgtggtccaatcacaccggcgatgccacgaggtaacatgtattttctgctcatggtggatgatttcacccgatacatgtggatagccgcaatcccttcaaaggattgtgctgcggctgccatcaaggagatacaagcacaagcagaaggtagatctggggcgaaattgagagcccttcgtacataccgaggaggagaattcaccacaactgaattcgcgaagtactgcgcagctgaaggtatacatcggcagcacactgcaccttacagcccgcaacaaaatggagtcgtcgagcgcagaaatggctcagtcgtagccactgcaaggagcatgctcaaggccaaaggtttgcccagctggttctggggtgaagctgtaagtaccgctgtttatgtgttgaacagatgcccgacgaagagcgtggacggcatgacgccattcgaagcatggcatgggaagaagccagcagtgaagcacctcaagaccttcagatgtcttgtgtatgttcgaaacacaacgccgcatctgaagaagctcgaggatcgcgggaggaaaatggtgttcatcggctacgaacacggctccaaggcgtacagggcatacgaccccgtcacgaagcgtgtccatgtgacgcgcgacgtggtattcgacgagcgcgcccagtgggactggggagctgttgaagaggccggggaacccagtgggggcagcgatgtattcaccatcgagtacactgtcacaagtccggcggccccggctgttgaagcaagggcagaacaagttccgggtgaaatcgaagacatggtggagacagaggccagggcagatgatgatgacatggatgcagaccacgacgatggtgtgcctctccgattccgcagcctagacgacctctatgggccagcatcatcaca

SEQ ID NO: 162096 - DNA, 470 bp, Zea Mays
cgacggcgacagccgatgctagcacatccgccgctgcccctggtaagcgctccaggaggcggggaccgacctctaaggtttggttgcattttgaggaagttactgagaagcagggaggtgaggaggtaaggatttccgccatttgccttcactacaagcacaccctatctgctaaatcttcttctagaactggacacttgatccgtcacatagaactttgccccgctaagaaagataaagaaaaaactagtagatctcaatccctgcttaagtttaatgatgatggatctgttgtgcactgggagtactctccatctgttgcaaggactgagttttgtcgtatgattgctagactagacccacctctttgttttggtgaatgtagtgcatttcaagaatatattactcgtgctcataatcctcggtttgttaagtcctctaggcaaactaccgctagagacttaattagg

SEQ ID NO: 162097 - DNA, 342 bp, Zea Mays
ctctctttgaggagatggtaaactagtgctcctcccaagtgcaatggaggccactagcctaggccatggctcttcttgatcggccataagaccccatccaggtaagtatgtttcaaggccgcacctctatgttcctttattgcattacccgctcgttttccctgcatgattagccgatgcggcactttccaatcggctaaacacatggtgcattcctcttgggcttgccttatcaatacgtataggcctgcctcggcccacctaggaaaagagccaacctgtggcccttccaggttccaggctccaagctcctactagaacaccacttgtgtggatgtgaac

SEQ ID NO: 162098 - DNA, 661 bp, Zea Mays
gagagagcctatcatcaggtacataaaaatgaagaagaaccggatgacaaggctgcagcagaacgcatcgtaaggcagtcggcccgctacaccctcataggggcacgctgaatagaaggggtgcgacgggagtcctcatgaagtgcattcactcggctattgggaagcagctattggatgaaatccacgccgggcagtgcggagtacatgcagcatctaggactctggttgggaaggctttcagatctggtttctattggccaacagcgaagagtgatgctgccgagttagtccagagatgtgaagcttgccaattcttaacaaagcaacaacatttacctgcacagcagctgcagactattcctgtaacatggccatttgcatgctgggggctggatatgattggacctttcaaaaaagctcagggaggctatactcacgtgctggttgccattgacaagttcacaaaatggatagagtataagcccattgcctctttaacctcagccaaggcagtagaattcatacaagatataatatttgggtttgggataccaaatagcatcataaccgacctaggatccaacttcactagctctgaattcttcgacttctgcgagcaacgtagcatccagattaagtatgcatcagtagcgcatcc

SEQ ID NO: 162099 - DNA, 849 bp, Zea Mays
caacgggagtctaaacctatctaaatcttcatgtctcttgtgcctttccctttagcttttgatcacatgacctagtccataagttcactgccaaaaaaatcctcgagacttggattgccactctagtaactcatggtcgtcgatcttatttttatcatgagtggcatgtaccagccactgatgtggtcccccctcgcatagcggcctatattacaacttgcacttaattccctccaatatgtatgttggttgttggtcatagatcgaggggatgtcgtgcaatgctctagggaggtaaacaatgaatttcgccttcattcctttaggtgcgttgatctgtgctggctccattggatgagtgtaaaacatcttctctccttcgtgtgacctaaaggtgggccatggtgtagtgtagtttctagctaaaatggatttgacgactcatgcaatgacccctccatggagttgaggaggatatctggctgccactccatttcttgatgaatcatgtagttcatcttgtgtcagagggcaatgttgtgcttctttgagggcttagcaaggttgacttgcttgagcagcatctccggccatcgaacgaccttgacatcgacactataggtccatgtgaagtggctaaggggttcattggctagggtcttgaggacccattcatagtattactgtagctcctagttgacgtccttgagctagggtggccctgtcttgccttacggccatcgctccagccatcactgatgaatcgactgagtccttcctttgagtagtaatattgatgaagaaatgttgtagtggtcccactcggcatgtcataaatgtgttgtcatg

SEQ ID NO: 162100 - DNA, 1065 bp, Zea Mays
ccttggcataatgttgcgtttcggcaatttgctcttctgataattgcttccccgaagcatgtcacacaatgaactccaactcttcggtaggtgctcgaggagcaggagacttggacttctcagggacaccctctttttctaggattagtggtgcaatttccgaaggtcttgcttcggcagaaactgagggtccagcctcataaatagtctgcgctactgacttcgtcagatttctttgaaactttagcttctgtccaaggtgcttcagcagaagcaggagttgatgtttttacagactccattacaacatccagcacactagacattctcctttttcttggagttgctatggagatgtttgacaccttcggcaattccttcgcgtagggtggacttagtaccttcaactcttctgctgttttctccattttcggctcctcagtcacacttgttctagcttcgacgggcatagagcgacttggctcagacatagaagcagacccttcaattagcttcgacacctcggccgtctcaatgcgcctgggtcgatgcgtcaaaactttaaccttttttgaccttgatgtaccagaagtcatcgaggtagcaactttcctctttttcccttgtttccgcgagggataacagtagtccgggtacacaaacccaattacaccaaacactctatttaatctctttttgccacgagccccgaaggtagttgtcatggcttcatctttggcctttgactatgctccaagcagctcgtcactagtcgcttctatggaatttagccagtcatcattcggttcatcaaattggctcctatacctgaaggtatacttcaggtagactaaaccaccttggctagagccagcagcagtctccttcggcatttcccacccatctgcaagtggccacactctataagcaatgtgctcctgcaccaagtcccttgtgcctatgtaagtacacactgtattgaaagccgcctgacatgtttgtatatcattcccaagggcagtggctggcctcctaatgccgaagtgagaccatatagggcgttga

SEQ ID NO: 162101 - DNA, 664 bp, Zea Mays
ggcctttctatctgcagccggtgcggcggctgtgctgtctgcctttctcccgtctccgccaaccgctccgctagccaccacgcccgccgctttcctgccgtggcctccgtcggggttcctcaacgggtaacccttctgccttcaacgcctccaccacccatcgctcgcatgcgcgtcgatcccaagtgcgaaccccctccactctagtcctctactccctccatctactttctcctgcgatcaatgatcatcatcccgtcgccacgtcttctgttggctcgctttacagacgccacttgcgtcgcgatatttatttatttttctttgtcacctcgattgttagggtttacggtctgcaggtcggtatgccccagcgctcaatcgccaatttatctgcaagtctcagcacttgtggataatttggatccatgtggtttggtttcgttctaccgccgtgctctgcgctacaccgttaccttcgccttttgcttcgcgcattgcagatttggtgccgcgttgtagatagtttatgtttggtcgaaccagtttcttccatgcagaaaataaaaaatattgtttggaccacaattgtttgttccttcgatgtttcgttgaaataaagcggggaaagtttttatctaaaaaattgtttgttcttttgtcc

SEQ ID NO: 162102 - DNA, 1243 bp, Zea Mays
cgggcctcgatttccagagaagtcagggttctcggtgtaaattttctaagacacagagcacagtgctctctggatggagggttgatttgtgatttcttcggggtctctttggaaaaattgacccgcgaggaggtacgggcgagtctcggccgcccgatcgacgatctacggctacgattagattcgcgctttatgaactcccgcttagatctggaccacacgatcccaaactaaccgcccggattttatgaagcccgctatgaatctcaagcgctcgctcagagatggacggaccagatcgaaaacacgcgaagatttcttcccaggctaatctggaccgcgcgttcatgaatcaacggtcgaagctaccttccccaaccagccgactttgggcacggcggcgcaacccaccgtgcggcggcaagaccgccggagctgagaatccaatcacccagccagccatcttctaattcgttcactccttgcctaattagtgacattacgagcccgtttcccccaccaattcctgctcacaacaagcccagagtaccgcccacggcgcaccgcggcaacaccatggccggacagtggactcaggggctcagctgcaccatcctacgattcgctagtgcatagcctataggaagggaggacgaatacggtggggacttaccaatggccggccgaggtcagacgacgctcatccacggagaaggcggaagcgaggaaccggctgtgctccgacgagtaattccgatggagcaggcgacaatttccaagcgaagaggccacggctacttttcctagggtctagaggagttcttgggtacaattccgaggccttggacaatggttagccaagttttccccggcggcggcaacggcgggtttcttttccctctctctgctacggcggtggcgcggtatggtggggggtttgcgggtggacgagagaggcaaggaggtgcagctcaaatacccacaaacgcggccccgaagcagtttcctccccggtccatccacgcgaggatctcggcggcgccttcttcgcagttcggttgagctcgcccgcgagcctcgcattctgttgaggatgaagccagctgacaaaacaggcccacctgtcggtgtccgctgctgagacgcgtgcgtgaggagactgggtaactggccagtgggacccggttgtcagcaggtgggacagcgggaatggtactgggccgcgcgcgcgttcgcggaaaga

SEQ ID NO: 162103 - DNA, 1164 bp, Zea Mays
aagtaagcatgtagatcgataataaatagttcgagagcttttgagaacgaagtctttttattgatgacatacttttccaattatagaatacaatgttgccccgatagcttttgaaatctagctaggggtaaaacttcctgagatgctctatattccatgaattccctatttctatgccatccatttgtgtaagtcgatatgatcctggccgagtgacttctgctaccatgaatggcccttcccatagtggcgacaatttgtgccgtccttcccccgttagaattcgacggaggacaagatctcccactgcgaaggatcgatgtcgtatggccttatcatgatagcgcctcagagtttgctggtacctagctgactgaattactgtattcaatcgttctttttccagtatatcaacatcctccagtctagtagcttcagctatgttttcgaagatcagccttggtgccccaaacctgagatcagcaggtagtactgcctccgaaccatagaccatgaagaagggagtatttccatgcaaagctcggctaggttgagttcttaagctccagaccacatatggcaactctctgatccacttccctgcgaacttttcattcttgtcgaagactttcttcctgagtgcttccaatatcattccattagccctttctacctgactgttggctcttgggtgtgctactgatgcatatttgatctggatgcttctttgttcgcagaaatcaaagaattctgagcttgtgaaattggatcccaggtcagttataatgctatttggtattccgaacctgaatattatatcttgtatgaattccactgccttagctgatgtcagagaagcgatgagtttgtactctatccatttagtgaatttgtcaatggcaaccagcaagtgagtgtaacctccttgagctttcttgaatggtccaatcatgtccagtccccagcacacaaatggccatgttacaggtatggtctgcagttgctgtgctagtaagtgctgctgctttgataagtattggcaagcttcacacctctggactagatcggctgcatcattctttgatgttggccagtagaaaccagacctgaagaccttcccaactagagtcctagatgctgcatgtattccgcattgcccagcgt

SEQ ID NO: 162104 - DNA, 804 bp, Zea Mays
gttgcatagtgtttatgagtgaaaagtttttcgaactgtatcgaattatcttgaccatgttttcggattttttttcgagaaccttcaaaacgtttcttcaagtactaaaatatgaattttagtttttctaataataattaaatacctaaaattcagtatttgcgaaaactacaaaatcttggtaaaactcgattatatatgtgtgtgttcctttcgtcgaactcgttctatgatttgtgtcattttcgtgaggtcgtcaaaccgcatttcctcctcgtgaacgtttgctgctcgcacacctgttacccctttatttcatctaccatcgcctacctctgcctaactcggtcttcgtcgtttactgtatcgtgcaactcatcgcacgatcgtcgctttggctcggctaggacgcaacctgcgacaaattttacaactgccttccacattcactcttttctataaataccgctctagtcatcgcaaaacctcctgtcttcccccagatccatatcgtttccccagatcgcaggcgtgaagggcagcgcttaccaggtacgcagacatccctcctcttgtttccaatcgccaaaccgcctctgatttcccgagacccagatcaaacgagcatgccccttcggttaccagcgacgcaggtaagccttctcttctcccttttccttccggcggcgtgtagcagccctttcccccaaggaagccctcccacggacgcctgtcttgaagcccattgccggcggatccgtccagccatggcggcccctggtgccgagctctggcgcacagagc

SEQ ID NO: 162105 - DNA, 446 bp, Zea Mays
ttttcttttcccctttgagcttcggcatgtcccattctttcaaagttgggaatactctaaaagctaagaattcttgcaccagatccctagtaccaatgtgctccgcaataactcaaaattcccccagtgcaatttggcatggactctccggtttcatgtcgcaccggggcatagtctctccgaagattaattctaatgggctttgaaccagcttctcctttttctcatcaactttgacataaaaccattcagtcttccagccagctggccatttggtacgatagttgataactggagacttcgcatctttgtgataagcaaaattgtagcagccgaagttttcgtgcagcccatcttctctagcttttgtctgataatgaagctcatgtgcccggcagaagccttcggcaaacggttctaccccctggcttcgaagggcccagatg

SEQ ID NO: 162106 - DNA, 853 bp, Zea Mays
cctagggactctagctcaattggatgggtcagagagtatcaggagcatccaaggatactgaaacgaggactcagagggcatgaacggacctgagatgcgctggccacggcgaggtcaaaccgctcggtgttcttgagtgatctgggggaaatcccaaattggggagttctaggggatgattcgaggcacaagttgcttcactggttgcacaactacctagcggagcaggcggggtcggcaatttatagcaggcttgagtggtggcgtccaatttcacgatgatgcgctagcggccggagaggaagaaggtcactggcgctcggggttagtggctttcaccgtggcagctctcaggagatcaccgggcatgcacgacgtgtttcactatgacgtggtctagcgctttagcacgtggcgcacagcggtgagcggccaacggcggcgaggtctatcccggccgcacgacgagcaagtgggtacggtgaaactcatctgagaccgagcccgagctaaactggtgccaagatctttacttcgtcgtggttatccacttatcggagagcacaaatcgcagcaacggtgcaaaccacggcgcaaagatcaccggcggcaagggggctgaacttgtaatctgtttcagttattgtaccatcagactcctttcagatgcttgacagagcagattcaaggcatcttttctccaaattttatgtgacaacctcataattcatctgcatcaaagttatagatctataatccatgttcacttttgctatagcatccctagtcaaattcccactagatcatggtcgaactatagtccaaagattgcccaatctcactgctattctga

SEQ ID NO: 162107 - DNA, 710 bp, Zea Mays
cgaccaagcctgtaacctatcgcgccacttcctctccttctgcaggtaacctgctccctcccctctgtcgtagctcttgtggcagctccttattttgtagcatctgtttcatcattatgtgtaataatttgtgctaacactagaaataggtggtgacaattgcgtgctcgcatcatggatggtaatgatgatgacaccatgtctattgactggagtagctttattattgagaatgctgaaaacaaggataatggggatcagggtgatatgtttagaatctgtgatgaggatgagatgtatgcgttcttgggacttgaagatgaggatgaggagatgaatcgaacccacccggaaccaagtaactttgcatctcattttacatcggaaagtaacagatttgatccaagtgatctagatgctgtcatgtcagttgatgatgaaaatgcagaaatggtcaatatattgcacgatgttgatcaccctgatctgaagttgggtactctatatccaccgatgagagagtttagactagctgtgaggcaatatgctataaatgaggagtttgagcttggaataacaaagtcggatagaaatagatatagagtgtactacaaagggaatgattgcacatgcccttggaaactgaatggttctacaagaccgaattctagtgttatggtactaaccttttcttctgtttctctccaatt

SEQ ID NO: 162108 - DNA, 688 bp, Zea Mays
aaaccgcaccgaaggggaaaccaatcagatcatcttgcctacacggttctacaaacaaatggtccatacctgttcctacaacatcccaatgattataatacaaatgagcctgcaagcgaaacacaccgtcaacattccgcccgtaaggcaaaattcgaaaataccaagccagaaaagatatagaattgtcctcgcccaaagccattggaatgcgatcatccccacaccactcaaccccgagtcgcttccagcatccgagcacacgtttcctgtagagcgggcgaagacatgacctctctcggctcagcgcatgtctcggctagctcctcagcaaatctatcggagatctctgtcagtctaactaccctcgtcagccctttgttttttgcctccaccttcttcttctttttcattggcggcatcttagccttacccttggagcacccctcatccaccccaccacgcctgattccacctttcctcttctgccccttgacatccctaacatcagtagagccttcttcaggatacagtccataccagaggttgttcagctcaaacacacgattcaatctaacatttgaaccgcgtatatcccagcttttcggtgtctcagtcttcgttaaatatttaccatcaattttcaccgccttagcctccatctctctaacgaatgtcgcaccattcc

SEQ ID NO: 162109 - DNA, 503 bp, Zea Mays
tgtagtgcgagtcggaggggagaacattgtttctcttcctgaggcagacgaagtggtggtttttccaatgtttcataaaggatgggctacgctttcccctgtacaaaatgttagttgaagtgttgaagagatttcagatattccttcatcaacttactcccgaagctttaattaaagttggagtttttatcttgttaatgaggagccaagggctggagccagatgtcgactgcttctgcaatatccacgaactatcctatcagacaaaggcagttggaaaggaacaatatcacaacattttttggctgctattacttctcataccacgcgagacaccctgttccaacctttcagaaaaatggcctggatcctggatgaagtagtggttttatgttaaatataacttggctgggagggaggatgttaaggatgtgattcaatgacccattcaattacacttcgacattaggaggcctagatgtttggtagccttcaacaccgtg

SEQ ID NO: 162110 - DNA, 881 bp, Zea Mays
gggagagtcgtataggacgtagagagagagatggagagtcgtatagaacgtatagagagggagagagggagagtcgtatagaacgtagagagagatggagagtcgtatagaacgtatagagatggagagagggagagtcgtatagaacgtagggagagagggagagtcgtatagaacgtatagagagggagagaggaggagtcgtataggacgtagagagggagagatggagagtcgtatagaatgtataggaggaatcgtataggacgtagagagagagagatggagagtcgtaggcagccgcttgatgtgcggcccacatgctgtgtgaagggaaggggtgccaactaggctcgcccgctactctccatgtgtcctccttctcacccgtccgcatctctttacttagtcttttttccgcgtctcactaaaaaaccatatcagagatcatgtgctaattctaatcacaattgtcattcatgtctctcttgcgattatgaccacagtaacacggtaactatggcagaggaaatggcgttgtatgcatgcttctcatttgtgcgagtggcaactaagtaaacaaattgaggaaatgtcgttcggtgtaaagtaatactttccctctctccctcttctctcttctctctctccctccctccactctctttcctctctcttccctttccctctctcctctcctctctcttccctctccctcctctctcttccctctccctctctcttccctctccctccctccactctctttcctctctcttccctttccctctctcctctccactctcttccctctccctcctctctcttccctctccctctctcctctcctctccctctctctcactctctgcagagacgcg

SEQ ID NO: 162111 - DNA, 461 bp, Zea Mays
gcttgtgctttgtgctctttgcttactagtatgtttaggagttatcggtatgcttagaattacatttgtataatttgtatgacgttgctaactagatttgtatgggagagctctttcactattttggcaccttagttgcttcatttagaatcttttgtcaggtgtttgttatagttagaggagtgtagtcttggctaaaccaaaacaacatttattccatatttatttgtgtcagccatcatagttagttttagaaaggactattcaccccccctctagtccaccatctcgaccctacacctaggcagttggatggtgatcggaaggatccagtgagatctcggcttcattaaatccttacccttgatcttaaatccaagggtctctgttgcgtaccgtttcgatgctaggacaacctaatctgggcggtctgtctttgatcggacggcgctggatccccg

SEQ ID NO: 162112 - DNA, 1023 bp, Zea Mays
tgtttgtataatgggatatgaggggctagacatagggatggaaagctcactcgttgcttggttcatagggaagaagggggaaagggaaatttggacctcttgtcccaccaattctatcctgtcaggagggtggatcatgctgaggtctgaactaaggtacctaacacaaaaagatcaatatctgaaacttgaaaggaccataggatggcaatacacactctgttcctgccaaatcatttgtggaactattagctattgagacaatgcaaacagacctgactactgataaagtcactattatgcaccccaacattatttgtttgtaattggcctaagaaaacatgtacctaaattatcttcattaatgcataacctcgaattaatgtttaatagtttagaaatcccaaagttattaacgtgccaaaataggtgaaatgcatgtaagtgtaaaggtatgtaatcccatccaacacaagcatcagaacttagccctcaatccctcatgatgtagacgaccaaacatggagccgcttcagtaagatgctcctcatgctaacattaataggaacagctgaaaccccattccagcctctgcacacgaacgaaccaacgatagcaaggggagcaaataacatggcagacagtaagacaagcaaggagcgagagaatgccgttgtacgtactgcaaagtggccaaggttgacgagcgtccatgccaatgttgggggcgcacccaaagacgaagagggcgaggatctagcaaaagaagatgatgtaggcggtcccgacctcggggtacatgaactacttagtgttcctgtttagatccggggggcggcaccacctgcacatacaactttgccatcgacacagggtgggaggggggctccgccatgatggccggggaagcgagcgccgtggcgagcatcgcggacgcagggcagagagggagatggatggcggcggttgcgcgggggcgggcgggggcacgaccttgcctcttgtggacgcgtcccttccagg

SEQ ID NO: 162113 - DNA, 522 bp, Zea Mays
tccgcagtgccaacaggcgtttgctggcggctggttgcttgcaacggaaggtgcctgaagggagctttgactctgttgactgtagcgtgatggagtgggtccagatggtttattgaagcttggtcccctgggtggaagcccaaagggtcgagctctctggtgatgttcttgctgttgcgctcggaggacttggaatttcctcttgatgtgccctttttcttcctcttttgccctttccacttggatagctttgttggagaggtgagagaagctgtggaagtcttggctggcgaggatggtcttaagctcgggtcttaatcctttcagaaaacgggccatttttctggcctcggtgctgacatcctcgggcgcgtagcgggccagctctgtgaacttgtgcacatactcactgactatccttccgccttgagttaactcccggaattcatcctccttgagttgaactatcccctggggtacgtggtgttcacggaaagctgcttcgaattctgtccaggtagc

SEQ ID NO: 162114 - DNA, 698 bp, Zea Mays
cagctagttgctatatagaaattagagatcaaagctctacaaggtgctctaacagaggctctgaatggggtttcccatggtacagtacactgaaaaagatcttccggttcatccccctcgccgccggtgacccgcgcgcccagattcgcgtggcgccgcgattcgtgccctctgtggcatggattatgattgaccatggaaaaatctttgccttggatgaactcagaaccctgtagccgctctgtcatccattcacttgctggcgacgtggccgcacggccattaccgcggccaccgccatttttcttggtcgtgccacgcctttggctatcttaccacgtcgtcgtgagtcatggtcgttacccagtgatcgtcgtggcttattaccccgcagtcgccacgaatcaccgtgccagtgctcttccctctctctggccgctagcgcgccttttcaaattcacgagccaccgcatttgggtcctataaattgagcgtgccatcggctctgctaggttatcacacacccaacgcattagcccatgcctcagatcatccaccagagcgctccaatttcaaagttaccccaattcagtcaaaactccgccatgagtgagctcaccgtggctagctctctacaggtccgatcatgccttcctcgctctcgtttcaacatccctgtgtgttgtagatgcttagca

SEQ ID NO: 162115 - DNA, 646 bp, Zea Mays
ccttcatatccttacgatacgcaaaattgtaacaaccaaaattttcgtgaaggccatctgctctgcccttcatctgatagtgcaactcatgcactcggcagaaggcttcagcatctgggctcatcccttggcttcggagggcgcagatgaagacgatgagcctaacgatagcgttaggagtcagctgatgaaagtatatttcgaaattttttaggacttcccctatcatctcatttaggggaaaacgcaaccccgctctaaagaagctcttaaaaaccactacttcatcattcttcggtgctggggtagtctcttctctggcaaatcggacaagtttgctttcagcttccccaaaatagcacagtttcatcatcatgggcatgtcgtcttcggacacagtagatttctcaaaatctagatggctaggctttgttgggatcaaaatattgtaatcttcttcactttcatcaacattttcttcttcaacaacagtatgttcagcttcggcatcaggagcaccttcatcaatagctccctctatcacaactagacctgatcgttgcatgagttctaaaattggagctgtctcagtgacctcggcctcttctccctcacgagacacccttgcagttgatcgcactctggc

SEQ ID NO: 162116 - DNA, 319 bp, Zea Mays
cacgccagagcaatctcctgcatgcctttattccccctatcaagctcccatgcgccctatccacgcatgtcgagcatcgccgccgccatctgccatgaacagagcaactctgggcaccccactactgtcaagctcctccatgagctcgtcatcgtccccaccagcaatcccccacctacctacatcgatctcatgccgccgcaccattcctgatcgtcgctagagctccaccgtcatgagagtttgaatacgcccgttttgtagaaagctccttgacttttgaattatttatgcccacacactcctcagatcaagaatc

SEQ ID NO: 162117 - DNA, 1283 bp, Zea Mays
cacaaggatactgtgtacctgatctgactggacctagggtgaaacatgttagcatgagtcatagtatccgaccttgtagctattatattcgtgtcatgggtgctgtggatgtctttaatgggaaccaatcttatctcgtggaggagtccgatctcggtgaaaggtcagagacggtggtcaagtcctatcttggcggtggtaggcagagttgtcctatctacggctctgggtgtccagtgtgtgtcatgggtcttgactcaatttagacttatcctgaaccaccccttgagtcatgttggttcccacacacatcacaatgtagctcatcatattctggatcttctttaggctctcgagggcctatgtgttgtcctacactaagagtagtgatctcatccagtaggagctttgtcgtcatgaaattctgtgtcagagtggcatagattggttgtccttgatatttgacaatctagatctggtcgtggacctcttggtcactctggcgcagttcatcttattgtggagtatattcttcatattcggaggaagggtgctcctgacgcctagtgtccgccatgaacacgaactaagccccccaacattcggagtctgagtccaaaaagtctaagtctaattagttgtcattgtgcatgctaggccactgtgcaaattggatctgattgttttgatgtttttaatcacaaaattgctagggcgtcaagtgttaatctaaggtgcctgagtatgtcactggtgaagtggaccatgccgaagaagatgtccatggtcgctggagtagtaggcatatacctaaggtttctcgacacgtcactgatgaacttgaggtcgctgaagaaaatctcctatcccggtgcaaatctcatagctgccatcaaacttgctatgatcaatgtgattattcctatctggcgcgccaactgtcgaggaatttttgcagtgaacttatgaagggtggatcatgagatcaagaactaaaaatgaatgcacaaagaacatgagacttatataggcttgggctctcaatatgagataataccttatgtcttgtaattatggtgtctattgcctacgcaactatgatcagatgatgtgtcctagattggcgctcctaccccttttatagtccaaggaggtgcggtagattacataaagcttatctagccattagctaggtaaggatgtaaattggttaaacgagcccttctaaaatcagagagatctatctctatctttatatgtgaactcctttatagatcgatata

SEQ ID NO: 162118 - DNA, 897 bp, Zea Mays
gagcctgtaccagccggaatacgtaaagtctaagctttttacttggtcaacaccaaattctacccctggcgaccctaatccctcaactaattgcactaatccggctcaggttttgtctgttcacgacagtggtgaaaaccggagataaaccaaggtgttctagatgattcaaggcggtctagttcaatcaaacgggtctgtgagcaacaggagacttgagggaggctagaacatcacacagaagggtatgaactaacccgtagaaggctggccacgacgagatgtctcacggcggcgttccaaccgatttgggggaaaacagaattactcgggctatggtggattactggccgaggttagagttgcactgggctcatgatgaggagacgaaagcaagggaggcgctcaatttatagagatcggccatggttattccgaatttgggaagagagtggagcacggctgcgacaagacattgtactggcagccccgttgtggcgccagccggtggaacgacttcgaaatggcaagtccgggtgtgccacagttactactacgtgctaaagggctacgacatggcgtaattgaggtcgtcggagtacaatgacgacaccggcggtccggccacgtcgcacgactacatgcgcagttgataagtttcacctcgtgaccaaatccactccccgcgagatcttttacttcccctactgttatccactacgcggcaagcatgaatcacaacgatcgtgcgtgaatccgggtgcgggatcaccggcggcgaggggcaatgaatctgaagaactttttcagttactgtacaatggggagccttattgagagtacttgacagagcactttgcagggctttgatctccaatttctacatggcaacatgtt

SEQ ID NO: 162119 - DNA, 545 bp, Zea Mays
gcgtattgccatatgtgccacatcagtgtccatgttggcataaatgccatgtggcaactattttcgtgacggattttatcctatgtggcaataatttgtgatgtttattttcgtcactaactgtgggcttgggctggattgtgtgggcttaggagcattctgtgacgatcacaaactgtcactgattgccatgacctatgatgattatatagaaacgtcaaaaaatacaatttgtgacccccattccatgacgttatcaaaatccatcacaatcttggctttgtgacgttttttcgctaatccatgacagaatttgtctgtcattgattaagggatttcttgtagtgtatgtacacgcgcagagggaggcaaacggacagtaacagtcaccatcaaagctacagttaccgtcagccagaaactgacgccatcagtgacgtctgttattagctgacagtcattacagcccgtccgttactagtcgtaacgcaagaaacagacagtaacggacgacaataatggacggtcatcactccatgcaaaat

SEQ ID NO: 162120 - DNA, 513 bp, Zea Mays
cggtaacaaaccacacagatctcgcctgggccacgccatcccgatagaatttagcccctctcgcagctacctctcccctacagccctgctttctctttccgcgctcgcaccttcttgcaaccgtgtcgcgccatgggtgggtgaaggacgcgccaccgcattgctctcacggggcggtggagtaccagccttggcccgggggtgctcactggtgctcggagagggttgtctgggatctgcgggcacttagctgggtggtccggcggcaatttcacgtcgtggtacctccgccgcagcaaggtggtcgcgcatcgtggccacgccatcgttctatttccagaaaggcaccctggtgactcactaatgcacgaggagcgtgtgcgtcatctctgggtatgcagaacgtggggaaatccatcgccaggccatacaccgtgaccagtcctcgttgtcgcgcagataaaggtatggatgctccccttgcttcgccttgatcatcgcagcgcgtaaatc

SEQ ID NO: 162121 - DNA, 644 bp, Zea Mays
tacagatgatgttgagatggatgccgttcttagcctactggccggagaatcatctgactctgcccgcactgagatgatggcaattgcaaatgggcaagagtttggcgaagacgaggagattcagaaaccagaaggtactcgtcggaagcattcatgacaagcgaaccatctagctgcacctaccgaggagaagaaaaagaaaaggcgactccgacggttgtcatgcctggaacaagacgctagcccctccacattattccttggtgatggcctagcgggcaccatacctaaggacaatgctggaggtcatgatgatgctcaggttgttggcggtgtgcttgataaggaagaagaggaggaagaagaagaaattccactgacccgcaagaatagccgtcgccacaggggcagcgacattcccatgcaatctttgtcagcacttgtcagccttcaagggttgtcaatatctgattttgaccaagcactggaagagatcatccctgaagaccttctatcagagcctcctgaagctgacaatcccactatctgtttagaggtcccagatgatggtcttctgccgcatgattctaccgggcaagagataacctgggtagcttctcgtgcctcgtcgaccttagagggtg

SEQ ID NO: 162122 - DNA, 680 bp, Zea Mays
gaagaacgccgccgctgacacgccattctctaattgggggtggtctggtgtcgaggagggagtcgagggcttccttgtgtgggcgcgtgcgcggtaacgtcaacctgggcgatcgagggccactggggtacccgtaattgctcgtcgtcgtgctcatcggacgacggatccgcgcagtgcgtgggtagtgatcttcttcgcctctatcctttggtgagtattgcccacccatttcgttatagctctgcgagtgtgtagcaacaatcggggagtatttgggtgcgggactgcgcctgggcgggtcaccggagtgttgccgccctcgctctacgcgccgccgtggcccagtgctggaggtaggagagggatcaggggtcgttggatcggttcccagtggctaggattagatcttgtggcctccgttcggcttaatcaatcacagccattgatcaatgatcgtgcggccggtgtgggaaagaatagatagtgtgccgcggatcgtcggattgggatccgacgtgtgaggtctatctcgggttcatagtgtctcagtctaatctggaccgacggtttcggatctaacgactataaacactacataccccttcgccgtgtcaaaattgctaaagggaccttgactaaaacaaaaatcaacccacggtctgcactggtgagagact

SEQ ID NO: 162123 - DNA, 493 bp, Zea Mays
ttggaagttcgatttattttgcttcagatagggacaatccttgatgaaatgcccaaacttcccatagttaaagcagttgttagatgaactaggtagggctgggaaacgagtactaggggcactcggctgaatattttgagtaggggcagcagttggacggataaagaccggttgattgaaaggataggaggatgggcgaggaaaagagcgatttgggttaaagggacggatcactagccttgatcgcttttcggatccttgagaggatgcctcacccccttcatgtccaaacctttttgtctttccctgccctgaattttttgcctccaccgagagtgttgtgctcacggctttgtttaaagtgagatctagacaggtggccatcttctgttgtagtcgattattcagacctctcataaaacaattcttctttttcaggtatgtgttaacttgctctatagcatactgagagagatggttgaatttggcaagg

SEQ ID NO: 162124 - DNA, 385 bp, Zea Mays
gtcactctggataggctcgccagagttagccccccacaactttgcgccacgtgcctcggtgctttaaccacgccgccgtgagtcatcttagcccatccggtgatcgccggtgagcttgccacggtaaatgccaccaatcgcttgcgccagtgcacctcttcctctccgaccgccaccgtgcgagctgaaattcacgagccaccgctcaagagccctataaattgagcacatccttggctccgctaggtattcaagcacccagcacatccactcgtgcctccaattgttcacctaagcccccgaattgcacacttcccccaaatcgggtttccgccactgtaaaaaggtcctcaccgtggctagctcgtttcaggtccgatcttgt

SEQ ID NO: 162125 - DNA, 271 bp, Zea Mays
catcccgagtgcactgcgacgccttctcccttgcttctcctctgcactcctatgctgctgcccataaggagctgcaccgccgctcaccactgtcgcaaaacccacggcctcagctttccccaccgcaggcgcctacctccctcagccgctcacgcccggacgccttcccctttttgctcatctctctatgcctctctctgctcgtgaaatcgccacgctgccgcgccttgctgttccacgtgtcgtatgctacctggtgcccgtgacgcac

SEQ ID NO: 162126 - DNA, 453 bp, Zea Mays
attttaagttcttcaacagaagcaacagcgctgaaggcacaaaagagttctgccacaactcctaagaggaggaggatggtaaatgtattagatgtattggaaacaaccgactccataagtctcgctcccatagggaatgttgccaaagctgacaaaacgcaacccaaagctgatactaagcaaatagaagttgaagctacaataacccaggaagaaaccaaggcagggcccatagtgcctgctgagacaaagcttgccacaaccgagcagggggacgaaggaataactccagatactaatatagcttttgagaaaagtgtggctaaagaagccaaatcccttactcccaaagcacgctccgaagatcttgattatatcattcgacatgctgcgggaaaaagattatccgatgaagaaatttttgaagccaaacactatgcccgagaactaagg

SEQ ID NO: 162127 - DNA, 459 bp, Zea Mays
aggcagagaactggtgatgtcgtggctgtgcacgagtgcggctccggtgaggtgggtcggacagctacaatgatgagcggtcgcacactgctgagcgagtagcaacggtgagtggcgtagtgcaaagcagcagagcacagagcgtgaatctgcgtgagcagagatgagggacgagggagaaggggctcaggtgctggcttttataggcgagagaggagagaaacggcggctggtgtcttcaatcaaccactaatggcgccggtaatgggaaagttagtggggagggagaaagggaaaggctagcagtaaaggtggtgccgagtggaaggacagagggcgcggacgcttcggctgggctgtgcggcaacgtaaatgccatgggcaggagaaccggcggcagcgcgtacgtccgatccggcgatgagcagacgagcagattgagccgtgtctgtgtgggag

SEQ ID NO: 162128 - DNA, 635 bp, Zea Mays
gcaaaaatagaaggagatactcgtggccaagcgccaacgcatcagcatgcaagccaaagtcaggcagctgatcctagaagaagagtagaaagccagagagatggaacaacaaatcatagaaatgcagggcgaggacccctaccattagcagcaggaacccgcgctcaacataaaccttcatcacccccacatgccagtctccgcaccagctgccttccatgggttaaattaccttgatgaacgaagccctctcgcaccacaactacagacctccccttggctacaaaacttcagagcaggcatttactcgaagtacaatggcagtgcagacccaactcagtacatcatgagctatcaggttgcaatcgcatcatctgggggacgacaccaccatggccaagtcattcatcatagccctcaagggcccagctctcacatggtactcaagactaccaccattgtaaattgattcatgaaagacactccgcgtcaaattcttgctgaattttcaaggttatagacccgagacagatgccctagcagaactctcgctctataggaaacaagagaaagaaactcttcaagaatattacaaagagtttatcttactaaaatcacagctaccttcggtccat

SEQ ID NO: 162129 - DNA, 1074 bp, Zea Mays
ttgattattcttcatgttgtcttgcaatgctggcatgtttcgcacgcctgctgtgccgtcagcatttacaatgatctctgaaatctatgattgcaagatgatcaatatgccatccaaatttcttgagcatttggtgtaccgcgcacatgatcaatcgcactgtcatgttccaactattagcaacaagaatccgtatggcagcttactctagtgctgtgctgatcaacaattggttgcaacaaacttaaaatttgtggctggagctggcatgttattggttaaggagagcaagatccactttacaaggatcttgtgcctgttgttgaggcgtatcccatgtgaatataaacgtgggcttctcatcgactaatttctttgaatcaacaaaatacgaagagcatcttgtgagtatattttttcgaactaaacttcagaagctaaagctcccaatttcagctgatcgtttttctgttttcgaggtcaagttaggagaagaaatagagagtagcgggcagtttgggaacatgatattaatcaaaaccttgctctttcatcaactacttttctgtacactttgtctcatatatacatcaaaattgttctgatgatcagccaatcctctaaaaggcggaagctaatcgcaggccatcggagttggttggttggggcatgacctttctacaggctaagagcattcagaagagagaccctgcattggatcagtctcctgaagacaacctgaacctggctctcaaggtcagcaatctccaactccaacgcttgcagttgctcctccctgtactcgactcttttcttctggaatgtcttggagacaagagaccacttggaggcgctcggcatcacgatctcccttgacagtaggtacaatgtcgactctagcatcgagagagcgacctctctcgcttcagacaacagcttgaccaccctgcagctttcagtgtcgtcaagagcaatgttgctgctggtcttcttgaactgcttttgcgccttcttggccaggcgggcataagcctgagccttggcctggacagacacgttgtttcctctcttcag

SEQ ID NO: 162130 - DNA, 592 bp, Zea Mays
ctggccgaaaacgagcgccggcgagcccaagcagtcgcgccccggctgtccccaagcgaccttgatcggcaaccgttttggcgtgtgtgcggtgcatggaggagaaccagtcaaaccaccttgcatgcgagatagagaatcagggaaccgcccatgcccctctgcgctggctgcatgtagcaaaaatcaagggcgtctaggagagagggcgtctaggagagaaaaaaggaattgtcattggacctaggcacatgcacgataggtttccatgcatggggccagccaataaaaatattgccctcaccccatctaagggtttaactttgtccaatcgtgttgtgccgtatcacattaatacacggtttatcaaatccacgttaacttttacgttagatgtctgattcattctgtttcagtcgcattaacttttcattctgtttcagtcgcgttaacttctaaataacattaactaagaattagtaacaatattttgttgtaacacacgtattagttagttaattaattaattgtttgtccgatggttattagaaagacgttccaatttaaaactaatttagggtttcgatttacg

SEQ ID NO: 162131 - DNA, 453 bp, Zea Mays
ggggatcctcggcttcggccatataaatgcgggccccgctaccaggatacaccccctcgaatccatctgataagccacgcccaccaccacggccgatttagcggtaagagagggagagagaaacgagaagacgagcgcaggatttggatcttcaacgtggaggcgggggcagaccacagtgttcttgcgtactacgctgagatccgtcgcgacatcaacgagtctacgggccggtatatcaccgtcgacaagcaaggagcaccatcgcgcaacaccttctgtgggcagctctgcttgcgctcctagctccactgctccagtatggacgcgatctggcaattcgttatcttccccgtaccgcgtaacacaaatcgcgctctaggccgcgttctcggacggctaagcacgccgctcgccagtgccgcacttctctggtgcgggcgcccaccatgc

SEQ ID NO: 162132 - DNA, 640 bp, Zea Mays
cacattcctagcagtgtgatgaagctcaagaaagaagagttcaggaagctccattagggtgccatttccgtgacggagtatctatacaagtttacagagttgtcccgttatgcccctgaggatgtcaacaatgataagaagaagtaggaagcctttctaggtggtcttaactctaagatcaagaccttggttgaggtcaccactcataatgactttaacaccatggttaacagagctatcaccattgagagaaacaggaaagcagagctcaatgactgcaaacgtcgattcgtgaacaggaagcatcaacagtcagaaaagttccagaggactcattttcctactcactctttccaacggagccaaagtgtttcatatttcaaagctcaacctggttcattccagaagccagctcagtcagccccaattgcaaagactcaaaacacctttcaaactcaacagtttgctggaagaagccaagtgagtaacccaagagcatgcttccactatcgtgacataggccacttcattgccaactgcccatacaagaaccagccagcaccatcggtcttttccaactcagtgaatggaccaaaacagccaactggagccaaccatgctgcaccagcaaggagccaac

SEQ ID NO: 162133 - DNA, 416 bp, Zea Mays
cgtatttgtagttttgtgacaaccgaagcggaagtatgcgtgccctcatgcatgagcatctgtgtgatatggataggggtagagatgtgggttcagttttaatttgtagcgaaattacttgttaagtatgcatggaaggaacctgtatggtcacagttgagtatttgtgtcttgtgcaatctgataacttctttgttcttggatcagttgatgcatatctatgagtgacttgtttgctatgccccctttgattttatctcctactcattcctggcatatcaatctcgaaaaaaaaaactattgccactgttctgtactccaactagaagactgtctaaacagtttacattttactgcattcatgggggttaccaaacttctgttgacagcacctaaacaccatgcctaatagtgaa

SEQ ID NO: 162134 - DNA, 598 bp, Zea Mays
atcagcccctctcgtccaccatagcccacagtcgctggaatttaccaaactcggtcactagtgccgccgtgagaagcttcaccatggctagagtccctctggtatgtttagccccctctggtatgtgttctagcatcctcatagtgtccagttgctcatagacttggccgatcaaacgctaccacagtagagaactaaaaacattgcgtcgacgttgcagaacgccgttgaggatgcccttcacgtcgatcggctctttcgtgcttcctacattaaaattcgcgtgagcactagaaccctggtgagccatgggtacttcccaagttggttgattgaactctactgcgttgtttggctcagaatgagcttgttgggccttggtgtccaccattaccgtggacagaggtgttccagggtcggatcgttccgcatttctttggaaacgtgctaagttagctgcggagatgaagccattgtactcgttaccaccggaacaggtcgccagcggtgagttcaggcgactccggctgggtgttcgactttctttatcattcctaccctaggagtagatgtggcatagtctagttatagctttccg

SEQ ID NO: 162135 - DNA, 405 bp, Zea Mays
agttctagtatttatttttgcactaaaaatccatttctaatatatttcctctgattttccaactctctggactgggcgcataattattaaatagcgcagggtcctcggcgctaaacctaccgagacacagaacactgagatatggaccgcgggttggtttcttaaaaacagaggggcttctctgcaaaatgcgcacggcgaaagggtatcatctaaatctagccgttcagattaggtcctacggcccagattacattagcctaacatcgagacggtacgcgcccagagccgtcgatcaaacaatcaacgaccgggatttaaaatgccgagatagactattgtgcgttcgatcccgatctaacggacacaacctaatctatcccagccgttcctacacgatcgacg

SEQ ID NO: 162136 - DNA, 725 bp, Zea Mays
gaagaggatgaaattcctctgatttggaagaacaaccggcgttacgtagctagtggggaaagtagtggtgttccttctcctgccttgtctgccctcattggtctgcaagaattatttctggggaactttgatcaaactcttgaagacatggttccagaagatctgttatcagagccgacagatggtggcacgatggatgtttgtgttgatgtgctcgacgccgggttggggtcatctcgggcagcgtcccgcgcctcatcgaccttggagcgcggtcttgagggtcaggaagctgacttggattgctctgctcccatggaagtgacttagggaccttcagccttagaggtggctgctgcagagaacttggccctcaaggatggtgttggcactcacccaacccccgagggtgttgccggggatgattcggctcggatgggtagcgcaagctgcgacccagcccccgagggtgttgccggaaatgatccggctcgaatgggtagcgcaaactatgacccagcccccgagggtgtccgagcgggttctccctcttgcacttccatggatgttcacgtagggtcttctcctccacactctggttgcatggtgatagcccaagcctttggtcaaggagtcgctttagaggctagcgtacccgacgacaaagttttgggttctgttgatgacactgaattggttcctgctgattcgttgcaagttgctcc

SEQ ID NO: 162137 - DNA, 983 bp, Zea Mays
ccagggggcacttatgaaaatgtgcacgcgaaggggtatggaccgacgctggccgtccgattagagactcacggcccagatcagatccaaagtgtgatggtcaggcgatcagcgcagaccacctatgccgtgatggatggtcctgatttaaaattactagatctattctaccgcgacagatcggaatcggacggcttcactcactcgagccatccggttcacgccgttctaatcccagctgttccctcatcatccaacggccacgcggagcgctcaaatgctccccccaacactgaccggcggcgaccccaaacacggcggcgccatagctggtgaaagcgaaagctctaatccctagcccaagcttcgatgtaaacggcgctacactctacggcggtgatggcgaatcaaggggaaggattctcaccaggattctcggcttcaagttctctgcccccgaagagataaaccagcggcggtgatactctgtcgatgatgaaattcgctgaccggtaaggcacccacagcccaccaacacgacgttccagatccacggggtcacaccgagtgccgatgacgggcgcgccacggacccgacgctcctgccctcacggccctcgccgtatggagctccggcgacgaaaatctctctctccctcacgcaatactccctttctcttaccgtgtcgaggttcttaggtggaggcacagaagggtcgagaaggagacgagaccagagaggattttaaactccggttgagattggtcagcggcggaattcgcggagtccacgcagttcgcccacaccgcgcttatttcgggaggtaggtgacacacctgagcggtcggacccacccgtcatcgtaatgagagcgcagtgcgagcgtgcggccgattacccgggaccacacgccagcgagaacgtgagacacgcgacgcgcgcgcgcgtaggagcctgacccgcggggtcctcttgtcagcgc

SEQ ID NO: 162138 - DNA, 573 bp, Zea Mays
cctttctgtctgaccatctatttgaggtggtatgctgagctccttatcacatgggttccaagtgattcttgcaattgctcccagaatcatgctacaaatggtgctcctcggtcagacataatagtccttggtattccatgcagacgaattatctggtcaatataaatttctgcatacttttctgtccggtgggtggtatgtactggcaagaaatgcgttgttttggtcaacctattcacaatgacccaaatagaatcgtggtggcgggaggtattgggcaatcccacaatgaaatccatgcaaatattctcccatttccaagatggtatgggaaggggctacaaagtgcctgccaccttcaaatgactggccttaactctctggcaagtgtcacactcagatatatacttagcaatttccctcttcattctggtccaccagtacaaagatcggagatcatgatacatcttgttgctgctgggatgcatggagaatttggaaaggtgagcttcatccaatattttctttctaagctcggggttcttaggaacaaccaatctgtctccaaaccat

SEQ ID NO: 162139 - DNA, 421 bp, Zea Mays
cacgggcatttggaagctcgtttgagttcgaagggtttggcgttgacccgaatctgctctgacattttgggtttcaggcctgcaatccgaagacatggaaggagacaccacgcgctccaaatcgagatggggtttgccctcccaaagcaacaaggcaattaaacggtgctgccgggaattgtggcgacacgcacgagaatggaacagaacgtttcgcgggtatttgactcctgcgcagcgcacgggcgaaaccttcttgtccttcagcgattggaggaggcaagaactctcgccccgcgcagaattttcgcgtcattgtctatatgatatagagtgattgttcttggatgcttttgtttgtgtggttttgctagcttactcaggcctagttttggtaatctagtaataaaatggattgaag

SEQ ID NO: 162140 - DNA, 506 bp, Zea Mays
aaaagatcttggcgccaggatgagcttagacccgatcactagattgttcaccatacccacttgttgtacgactaactaaggtgtcctcgccggagttcaccgccttcgtagccatgccacgtgctcaggagcgttaccatgtcgcaatgaaccgtaataggaagtctgtccatcgccggaagctctgcctcagtgaatgccacggtagatcgccgtggtgactcatcccctctcctcggccgccagcttctctacttaaattcgaagccacagttcatggactctataaattgatgccccagtgagctctgttaggttgttacgcgtccagtgcaccagccctcgcctccgattagccatcgtagctcgtgaatttcaaacttcccccaaatcgttcggaacgccgccgtgagacatctcatcgtggttagccctctataggttagttcaagcttctttgcttgatgttctagcatccatttagcctcctattgctcgtagacccg

SEQ ID NO: 162141 - DNA, 345 bp, Zea Mays
gttgaatgagcgcctagaggagcaggacactccttttggatccggaggtggctgagcgcctagagggcggcatggtcgtgcccgttctcgacgagcaggacactcattttggatcccgtgaaggaaggcacgctcctccggccggcgcccgcgcccacgacaccgtccatcacctggcgcgagggactttattcgagggcgcctctgatctctggcagtgagacgaacttgcgaggagggcacggggagggagacgctcgaccggggactacaaacagcatcactatcgtgggattggaacttcctttttttctcaaccggttcttcgtgtgcggtctggaatcc

SEQ ID NO: 162142 - DNA, 1181 bp, Zea Mays
ctcgatgatgatgtctccgagattggggttgactggtcccaccagtcagtggggatactctctagaatgtgtccgacgtcatgcttgacagaggcccttcgacactgttaccatggttcggtcgtggcttggttatgatctgtctcatcgtgtcgtcatggcttgatagtactaggtcacctcttccctcctatagatgtgttcgctagagagtcagttgtcgtcttgctaggttgctcggcaggcaggttgatcggcggccccgcctcatcgggttgctcatcagtgttgttcagcaagctggttggccgcttcgctgagttgctcggcaagtgggttggtcgacaatcccgcctcgatgggttgctcgatgggcgggttggtcgacagtaacgcctcgaggctgaaccggctggtgggacggtcagttagtgggccgtctttgataggccttttgggacttctttgggcacccggttcccaggtacccgacagtataaatcaatcctcgaggatgaaccgtgggacccactgcgtgccatcgcgaggacgtcgaccacaaactcgctacaacagtcggagtaacggatgacgccataccgggagtacggctacacacgaccctacgaagaacccaccaagacaaaccagggagccaatctttctctctccctctataaggtctacataaaaggtaaggcccctccttttcttagacacgagcacacttgggtaacacgcccaagcaatactacgatcaacactacactggagtagggtgcgaacccgaaccagtataaccctgtgtctcagatttctcgtcgagttccagtgattcaccattcagagcgagtccgcactagcacccctatcgaacacatatctcattacccctcggattccgaaaccatgacaagtttgctgcccgagacttgcagagaaggaatcgaagaactgaagaaacaagaaagagaaaggtcgctcagatttaagaatatttatcagtgctagtgtgctatattttgttagcattttgtcaattatgtttggcccagggtttggttatttcatggatctgccactgcacctaaccaaatcacctccactaaatccaccaaacaaattgcaatcacacataaaacaccattaaaaccaacaattgagatcgctgaataacccct

SEQ ID NO: 162143 - DNA, 603 bp, Zea Mays
cctagcctttgcctcatggaggacttcgctgacgtagtagactggattctggatggtttggacccctacggttggtcccgagccctcaaactcttgaccttccatcaccatcgtggaccaccaccttctcctaggggaactttttgactcccttggggatgttgtgtcgtcctttcaacgaccagcaccatgctcaccacctctgtagccgctgcaatgtataagtataacggctcccctggctctggagctactagtattggtagggacacaaggtgttgcttcaactcttgaaaggctcgttctgcctcctcggtccaagagaatgggccagacttccgtaatagcttgaagaagggtagcaccctctcggccagtcttgaaatgaagcggctaagggcggccagtgaccccgtaagcttctggacgtccttgatttgggccggaggcctcattgtctcaattgctttgatcttctctgggtttgcttcaatgccccgcgtgcgaaaccaggaatcccagcaacttctcttcagagacaccaaagacgcacttttccgggttcagcctcatgcatgttgcccgcagcttgtcaaagaccag

SEQ ID NO: 162144 - DNA, 782 bp, Zea Mays
taaaactatagaaaatattatttaacattatttgtagaagacagaagtttgaaatagaggatgatatgatctgctggggttttagtcactagatagaaagagagagctagagatatagatatagatttgataatcgacttaattatttaaccgccgccagcagagtacgtgattttttttaaatgtgtagctagacgtggggaaaagaatatagaaggtgctttctttaaaaaaaatacgttagctaaagattgttggactgagatttgttccccacgctaaaaatacaaaaggaaaaaaaaaaatacagcggcagcatcccgtacttcaggcatctcactgcccccttttcgtcatttttccataccgaaccacgctttgatttgcatccgacgtcgtctctctccactgtccagcagtttcctccccaggcagccccctgcttttgctgcatctgctcttggtccatggactcagcctcactgacagccgcaccggaagaagcgtgcgtacgcgtggcctgcactgcaaccattccacatgcttccaactcctggacgaagcttcctcttcccctctgttgcgtcaaccacaaaggacatcgccgtaacgtcaaagtccaagcaaaccttttttttttatttgcaccgaccgaccgaccgacgacaccgccaggtccgccaccaccaccggtacaaggcacgcactcccagaaatcgcgacacgtcgaaccacgcacgacgcacgcacgcacgcagacgcaggcgaagacggcatgcgcg

SEQ ID NO: 162145 - DNA, 925 bp, Zea Mays
tttacaggtcctgaagaccttctcctttgcacaacatggttgcaaataagcagtgaccctattgtgcacactggacaaagaagggaggggctttgggctcgaattgaaaaaagatacaacgaacagaggggccagtacccttgtagagttaacagagcactaagcagcagatgggacaagattagagctgatgtgagtaagttctcaggctactacgcaagagtattaagagagaaccaaagtggcttaactgatgacgacaaggtaaggcaaatcatatagtcaaatcatgttaattatttagtagtgcatacttgttactacatttctctaattcatgtaatatttgtgcagactttaaaggcggcaacattgtttgcacacgacgaacagaaaccattccattatatgcattgctggcataaactgaagggtgaactgaaatgggagagtatatgtcaaggacattccttccgaggcttaaatgcaaaatctattggatcttcaggtaatccatctgttgagccacttgaaactgatagtggttctgctgggttgacagccaaacgtccgagaggtcgtgattacagtaaatctgagagaaagaaaggggcatcttcctcatctacagagtacttaagccgtttgcaagaaatgacaaaaaaacaaattcagaggtcaattgaaaagtgtgaaaagaaagacaagagcacagaagaagacaaggaatttgagaaaaagaggttggaattggaagcacagaaagtaataattagacaaagggaattgaaacttcaagaactcgaatcggcccaatcacgattacagatgctgtgttcaacgaatgaggaagatgttgatccagaagtttggattctcatgaaggaacagaaaaagaagttgcagcagtttatttttaagtttg

SEQ ID NO: 162146 - DNA, 677 bp, Zea Mays
gacttggttgtccgctccgcctctcaaggttgctcggcacagacctggtcgcccacgccgccttgcaaggttgctcgacagggacttggtcgcccgctctgcctcgcaggattgctcggcggggacttggttgcccgctccgcctcataagattgctcgatagggacttgactgctttcgaaaagtcttcttgggctttgttctggcaccccgttcctgggtgtccaacaggaacccttgttgttgcgtgatctgaggttcctccatcctgtcatcaacgtgacaatgacgacgggaagagcagtgtctccgaaacctggctccgtggaaggacctgtgcaggttggtgcaaatcaggttttcagacaacgattatgtgactgctcgatgagttgatctgcaatgtgacgtctacaaacttcaatgactccgcaaactcagcttcgaccggcctagagcgatccccagcatgattaatactaagtttatcgctcttgtttcttttagatacgttcaagatggatgtaatctactacgtggatgttttttatttgttatgtgtagcttatccattgtttatgtagtaattgttttaggaattaattaatcttaaaagtgcataattatctaatatatttaactatgagtgctcaactagagatcatgcagagttgctc

SEQ ID NO: 162147 - DNA, 886 bp, Zea Mays
ggaaatgccgaaggaaactgccgtaggctccaattagggtggtttggtttatcttaagtacaccttttggtaccgaagccaaatttgacgagccaaatgatgattagctagacgctatagaggcaaccagtgatgagctacttggagcctactcgaggatagaggacgaggccatgactattgccttcggcgctcgagggaaatggagactgattagggtttttgatgtaattgggtttgtttaccctgattactgttttcctgtccgaaggcaaggggaaaaatgaaagttgctgcttcaatctcttctaatgcgctgaagccaaaaagggccaaggtcttgactcgtaggccaaagcctattgggacggtcgaggtgccaaagcttattgaaggtgccgaggctgccccctcagccacagaaatagctcctgccatgccaattgaagctagtacaggcccggtaaaagagcgagaatcagaaaagacagcagattagccaaaggcgcgaagccctccagctgtaacagggctgtcgaagccattgagtactacaacagcgactctaaggaagagaagaatggctagcgttttagatgctgttttagaatccatgaaagtgccaactcctgcttctgccaaagcatctagcgaaaaatctgaagatgcaagagaagcgattactgcaagcacaactaatattctcgccgaagttggaccttcgaaagctacgccaatagggctggtggaagagagtgttcctaaaaaatctacatctcctgctcccgaagcacctccccatggtgacttggaatacattgttcgacacgcttcgggaaagcagttatcgttagaacaaattgccgaagtgcaacactatgccaag

SEQ ID NO: 162148 - DNA, 835 bp, Zea Mays
ggcgatgtgaaaatatccggtgaggggtgaatccagtcgctggccggaccggccgtcgtgtcccgccgcggtcagtctcgctggcatcactggagctcgtcgtttttccggctgtgacatgtaataaccactcctccgcatcgtaagggtcgtggcaagccgccggttatcgtccatagaccagttccctcttgcgcgccacagtgagcaagccactgtgaaatatcctagccagataaccgtgatctcaatcccaaaaatcttgtccagttctatcgggacctatatattgaggatgccctctactccgcttcttagttacacgtacaacaaatccccagctagctcctatcgtgcaccaccgcgccccaatttcgcatttcccccaattcacttttccgcgccttcgtgtgtcgtcgcgccgtggactgccaattctaggtccgttcttgttctctttgttcatgtttcaacacctctattcactagtgatgctcgtcggttcaacccattaagctagaccatgctcaattatctagaacacctcgatttgtccatgaagttcgtcgtcgtcgcgggtgggagaacctagggctagattggtgcaattgaggcagggcttagaatcgtatggggtcgggggcgctagtccgacacttagcttggtcagtcggcgccgttcatggccggtctgagcaaagagatggccgacggcgagcacgccgttgccaaggttcggtttggagaagaaacaaaagtcggagggtctctatgcaaacttcagagagacagtgaatagtggctaagggttcttcaccgtttatttgaataatcg

SEQ ID NO: 162149 - DNA, 709 bp, Zea Mays
ttcgagccgatagcatttgcttgaatgtaagtgtggaaataagggggatagcatttcccgctaatctcatagtaatgggtactcagggaatagatgtcatcctagggatgaattggctagacaagcatcatgcagttatcagttgtgataagagaacaatcaagttgatgtccccactaggagaggaagtggtgaccgagttagtcccgcctaagcccaagaaagaaagttgttattagatgactgttgatagcagtgaagtagacccactagagatcatcaaagttgtgtccgagttcccagatatgtttccgaaggacttaccaggtatgccaccagagcgaaaagttgagtttgctatagagcttcttcctagaactgcccccatctttaagagagcttacagagtatctggaccagagttggttgaactcaagaagcagattgatgagctgtcagagaaaggatacatccagccaagcacctcgccttgggccgcccctgtcctattcgtggagaagaaagatggcaccagaaggatgtgtaccgattatcaagctctgaatgaggtcacaatcaagaataagtactccttgcccagaatagaggatctgttcgaccagttgagaggagccaccgtgttttcgaagatagatctgaggttaggttatcatcagctcaggattcgaccttcagacattccgaagac

SEQ ID NO: 162150 - DNA, 1208 bp, Zea Mays
tcctcagcttctcacacctctccaacaaagccatacaagtggaaagggcaaaggaagaggaaaaaggtcacctcaagaggaaattccaagttctccgagctcagcagcaagatcggcactagagagctcgatccttcgggcttccacccaagggaccaagcttcaatagaccagctggacccactccgtcacgtttcagccagcagagtcagagctccttttagcccccctcggtcgcaagcaaccaaccgccagcaaatgcatgttggcactgcggagaccccagtcacttcaagaataactacccccagctgaaggcaccaggacctacctactccaactcggtgaatggccccaagaatacctcggcacctgcctccaaggcactctcctccaacagtcagcagagcaagacccagtatcagggcagagcatgagttaaccacgtcgatgctcaagaggcccagcaagctccgagagtagtgctcggtgagttccttgtcgaatttactcccgctactgtactttttgattcaggagcatcccattcatttatagccactagttttgtggaaaagcttggcatcccctctacgcaactagaaatccctttggtcacccgaaccccagggtcagaccttctatgctagctcaaatgctcccaagtcagaatttatttatgtggggtagtgttcttggcagacttaactgtcttgccatcccaagggattgatgtgatcctaggaatggattggctaactaagcacaagggcatcataagttgcgcaagcaagaccgtccttctcactgaccgtcaaggaaaatcagtttcttgttaggcccaaccgtccgccaacgatccaatgatgtttaatctagcagcagaaaatatatccgtaatagaagaattcatggatgtattcccgaaagagttgcctggaatgccgcctgaaagaggagtggagttctacatagatctcattcctggcactgcgcccatcgcaaagagaccatatcgcatggctcccacagagttagcagaattaaaactccagatcgcagagctacaacaaaaagggtacatctatcccaattcgtctccttggggagcacccatccttttcgtcaccaaaaaggatggaagtatgagaatgtgtattgattaccgatccttgaatgaagttacaatcaaaaataagtatccactc

SEQ ID NO: 162151 - DNA, 349 bp, Zea Mays
atcggaccaagtttccatgggcactggaaccttagaaacccgctagcaccggaccagtctagtgaggcggtccagtgagccaacaatgtgcccagataacagattttcaagattttctttccagattttgcaccaaaacaaatcccaacatattaacgcataaatgaacaattattaggactggtattggtaccctcacaaaatctctcatatttttgcaaagtttgccattggctatgttgggggcctactctgccgaagattctcaaaccacctcagcttcgtcttaaggaaacgtgtttcaggaacatgtacaaaggacagacaaagctggcctttggccgaggta

SEQ ID NO: 162152 - DNA, 942 bp, Zea Mays
atgcattttacaagttctaacattcatttgggcattaaaactaatttctgatataaatttctgatttttaataccctctggattaggccacgttttctgaaaagtataggggcgcctaggtaaaaatcccgagtcacagagaacagtatagggtagactgcgggttgaatagttattaacctagggtctctttagaaattatgccgcgcgaaggggtatcttgtgttttcagccgtccgatctagagtctagggtttagattttatgaagcctaacgcattacgaaccgttcgattaaacctacggcccggattgactcatccaggaggtatccccgattagatctgcaccgcatatcaacgatctcacggacatctttcgcccaacccatcttctaatctcgaccagtcatctgagtatctacggcgacaacatcgtcttccacccaacagcccagacgccgtcttcctccctcgtgctcgcactctacggcggcggcccagccgatcccctacggctgaacaccataaccgagccagcacgcagttccgtgttcgccgtccaagccctaacttctacccggacgacctcgttcgataccccggtgttctgcgcgatactcgagcggcccactacaatctataccctgacgataccttgtgcgaaaaacatagcagcaaggatagcggaaaaagaactcaccccgccgagacaaggtagaggctgggcgcaggtgatgcttcacgaaagatcgccgccgaggaccctcctgcatagatggtttcgccccgtccgaagaactccaccggcagtcttctaatcccgcgagcaatggaggcgcgcccatgttagtcaccagggacccagcgacggtagtccaagcaccacaccggtgggttcgggacgtcgatctcgcccacgccgagcggaatttgagaggtg

SEQ ID NO: 162153 - DNA, 653 bp, Zea Mays
gacgatgaccgtccggccacatcgctgcgcaagtgggtacgatgactgggcagtaatagtgccccgacttcatcccctgcgcgagatctttcaccctgcgtagttatccgcacgccatcaggcacaaatcgcaacaccggcgaggatcgcggcgctgagttcaccggcggcacgttcactgcatctaaagatcttttcgttcactctaccatggctatcttcgtcagtctgtctgaccgagcaacttgcagggctttgttctcgaatttttgtgtggcaacttactaaaccatctgtagcaaagttgatctcctacaaaccagctttgattttgttatagcaaccacaatcaaatacttactggatcctactcgaaattgttcccaaagtttgccccggttcactgccagtcaaaattcagattcaggggtgactgacagcctgactttaagaccatttatctccaattttcgtacatcacctatgcttaatcacttaatcaaacttgttcccataacatagatctacaagtttattgtattgacttggggcaaaatcttcatagattaggaaatacaaggttccaaagtcagcttaatctcactgattttagagttagccctatggatgaccttgtgactttttcacaattt

SEQ ID NO: 162154 - DNA, 756 bp, Zea Mays
caaaccctaattcaaatcccttataggcaaatggagccctagagggaattatggcaaaaagtctatgtacattgtcatgacttaaactaattataaaagttatagtacacttaatgccctacaaaaaatagaaagagagtgaccccaaaaaggattcagaaaaaccccaaaaaggtcaccaaagagaagaacataaaagaaaaatcaggtttttctcaagttcaaaaccaaccctctttcaaagatcaaacatgttcaccttgttcccaaactcaaaaccttatggcccaattgacaaaatggcgcccaaatacccctagaacaccctggaaaagtttgaacccaaccctaagccatttgacatgacttggcatggcttttgtcttggtgtggacagctcggacagagccaacttctcacccccgtatctctctaccccgaccatatctttgcttggaactcacataaaaaaggtaggatttggtgcagagaagagaccgtacacgggggttttgctaagatctgcacgctaagtcaaccaaatcggtcgttgaaccctggcagaagtaaacccccacgtgttcgacgtgggctgacactcaggggcgcgtccagagcacgcccgcacgtgaacccccacgcgcactcggccgccctgtgccaacgcccgcatcgcggctataaagcccaccctagtgcacggccatcttccccattgcctcctctgtaccacgcctaactctcccgagctcgccc

SEQ ID NO: 162155 - DNA, 686 bp, Zea Mays
aggtctcctactgcaaatgtctggtgtcgcactgccttttcatggtagcgtctcagggtttgctggtatctgaccgactgaatgaccacattcagactttcctcctctaacacatttgatttcttcaagccgagttgcttctgcttctgtaatgtttttgaaggttaatctgggtgctccaaaagccaggttagctagtaacactgcttctgatccgtataccatataaatggagtattcccatgtaaggcttggctgggctgggttcctagactccagactacatacggcagttccctgatccactttcccgcgagcttttcattttagttaaacacttttttcttgagtgcctctaatatcatctcgtttgctctctgtacttgcccattagctcttgggtgtgcaactgatgcatatttgatttgaatgcacttttgttcggagaagtcaaagaattctgcactgggtgaaatttgattccatgtatgtgatgatactgttggggtacccaaatctgaagatgatttcctagatgaactccactgccttggatgaggtcagggtagcaatcggcttgtactctatccactttgtgacttggtcgatagccaccagaacatgggtgtatcctccctaaggttttttaaatggcccgatcatatctagcccccagcacgcgaacg

SEQ ID NO: 162156 - DNA, 614 bp, Zea Mays
atgcgtgtacttcatgttgtgcagctgctgtcggtaggtgtggctgagggaccatagagttcgcctagcagcatcgctgaccgaagcagcgtaggtggatagcggcatcagagattcatgaactgacagagtcatgaaccctctatcacctgcatccatcaccctgacatgaatgtgagtgatgtagtagcaagcccgaggaggctcgtacactcgccttgtctcatacaggggtcggacgtaggttcccaatgcatgcagaacatcctgcagcaggttagggaagtgccctgtctcgaacattgaggtataatgttcagtgacaagccataaccccacgtagtgaacctgctgttcatcgttagattcttcgttgatgtcctcttcttcttcgtcgtcgtcttcatcatcgtcactagagtcgtctgggtcatcgcctccgggagcaggggcttggaacgctggtggtggcggtgctgaagctaatgatccagctgtgaaggctagtgattctgccaatggggtgggcgtaggcagaaactcctccgagctatcttccagaataactccattctccacacgaatgcgagggagaaccatagggatttcctcga

SEQ ID NO: 162157 - DNA, 2379 bp, Zea Mays
gtttgttcaaaagaagtgctataaatagtgcacggtatggaaaattagtacactacagagaaaaggattagattgaacttataagcatctggatagaacatagattcctaatactgcaggatttgtataaaaacatggatgtcggtttctatggtatcaaacgaaccaatatgcctggcatgataaggcctataaattttgagatgcattgactataactttgataaataaataaaaaaggtatctttgtttgcggttcccaccttcacagcatccacattcttttgtttcatgtcagcagcacaatgcagatatgtgaatttggctacagatgtcacaaaggcatctctctgtgtctccatgcacataacagaggtaacatgcacagcagatctgaatccctgcaaacactgcgacgtggccgccttatcatcactctgatcaagtgtcacactgaatgcagccatcataggggcccaacaaacctccatcatgaatcttaaaattgttgtatcagtgataacagaaaacacagacctgcataaagcaaaagcttgagttacatccaaatcatcagcagatacaaagctatggtataacaatggtttgtgttggtcttactccgactttccactctttagtttaaatttctcttgtatggttttgatgagcaggtcgtttgctccaactaccctgtcatcagcctgtttccagttaacaaagctaataatattgtccaatcctagtagcttcatcacactactaggttgcttgttttgtggaactgatgaaccagcactcattttgatctcatttttgacaatttggtcatatagtgtacccagataagtttctggcaaatcctttccatcatctattcctcggttattgcgaatgaagtcagatttagacatctgcacattggaaatctcataaataaactaatcttgaatcaaatatgcttattatcatttgtttaccttatccttgaccatagtattgtgagcatcagtgttgagcatgattacagaataagcaagaacatatgcagtatctgcactggtaaaggagtttggattgcatttgcagtatcgttcagcaaacttttccatgatccgatcaattttctgtgcttccccaggcaacctgaagcctcgcaaataatacctaatagcttcaccgaagtccataccttcaaagtttagtgcatcaacatatgcatgcataactttgatagggaattcatctctttcacccaaatagtctccaatcattgttgcatttaaaccagcagtatttctcaagaaacaagcaacatcttctggtgtatgccctatcttcttgcttttaacgagaaaattaattcccttggaaggttttcggttaaacaaggatattcctttctggagaaggacaattattcttcattagtccaaaaatgtgaaaccctccttcaaactgagaacccaaagttctaaaccaagcatgaaaataacatatacctgaagttctattttaaaagcacgacgctgctcaagggagggagcaccagatacatctgggctaccagagtcagattgcagttcataatcaattccactaccatcttctccaataaggatgttggggttatctattgaacttaaagaacttaaagaagcttcagatatttttggtgaaaaatcaccaattctcagctgttggtccatccatgaacccattgacttgattatggttgcaaggcacttcactgactcaatacgaaatgtttggtcttgggctatagttaatgttgttgtagatcctggaggaacacctaaagcagtctttagaagtccattgacaaccctgcaaacatctcctgaaattagagatgccttaataaatggtgaaaagacaatgaaaaatgacgtttaaagagcagagctcagcgcaatacatcaatcctcacagcgtaactcaactcaaagtgccatgcaaaactagaaatcgggaactattgctttgttcgtttaatgacaaaacagaaggcattcatcaactaccaagttagaagttacatacctttcaaaaatatttggtgcatctacatcacaatcatagttcacaaagatatcaataagaacctgagattctttacagatcttctccaacaagtttagaactgtcattttttgtagaaagctaggttgatggacattctcaagaacccttagaacaagcattggaaagaatattccaatttcctctttcagtccagatctaaaccttgacagtaagcccacaaatatggagcacaacaactggaaaatactcattgctgacaaagcactgttcttcaataaggacaaacaaagatactgcttgattgctccaatg

SEQ ID NO: 162158 - DNA, 512 bp, Zea Mays
aatactaagcatatttgtgaagctaaacatgatgttacttaagaaaatatgttgttaacataataagattaatattgaaatggaaacatatgtaaattagaatcatccgacaaagctaagagatgtccatgctttgagaaccttctttagatcacgaccgcagaagtagctctccaagactcaacgaaggatgccgcaattccccaaatacatggcatgcatcctcatggttgacgtcgccaccataaacacggacaactcaattccccactccatcaatttagaagcgagcaagcaagcaaccgatcgctcaccccatatgcaccaatctggctcccaagcttcgttcgcatcagtaccaccagcactccacctgcagctaccaattgagacctccccgcctaagcagatcaattgattgtcagagtcagatagttggtggtatgggtaccttaactaacatggaatgatggggcgcgatgtagagtggatagcgccttcctacacggaac

SEQ ID NO: 162159 - DNA, 471 bp, Zea Mays
gaagttctctcttttgacaagggttgggtacggttcgaagtttgaaactggggtcggtgggtcccagcagtcaggcactcaggctacttgtgtaataactgctgacacatgacttttgcagacaatgctacagtgctactaaaatagtctactccgtagaagaaattgccatgcggctcgggagtcgggagtcaatgggtgaaccagaaactgtccaacggcgagacgccaaaatgcacgccctacactgtcctgtccgtccgtccacgcctcacacggtacgcagcttttacgcaggcagcgcgcgtccatgtctgatgcagagcctgacgtctcctctcgccggccttcctgtgtcactatttgtatgagcggagggagaagtagccggctacctcgacggaaaaccccagcaggatttctggatgatgcttggtggatgaaaggcaaggcacgtaaagccatgcatca

SEQ ID NO: 162160 - DNA, 721 bp, Zea Mays
ctactattaggaaggatgttgtagaagcacccaaaaagtggttaggtctaagaagacatctagaatgagcatgcatcatgattgtcgcatcattgtctcttgtgcaccaacatgcttctctcacctttattccaataataagaacttgtgagtaatgtgttgtattgctattttatgaaccacaaaaaaagtgatgtatgttatgctaatgaaaagaccccccctccaaacaaccttgagtttagcaagtgaaacctaaaaaatgcatgcttgtgttggtattttctaacccttgtgtgttttacccttgaagttacacctgcacatcttgtagacccccatagcttgaccgctagaccaacccaagtctccttgtgcacttgttgtgtcaaagaaagaaaacaattgttgtttggtgtctagttgcacaaactctatcaaggccatgtttctttccatagatcctgtcccgaatcttcataacctttctagtgctcatcctaagcgatctcatgcgactacctctcttttcacctggatttggtaatcttttccttgtgaatcatgttgtaactttatcatccaaatctctggatccttcattgattctgccccgttatctagttatccgctataacctgttctcaagtatcagatgttggtctatctaaatctctcgcttctggtcattctcatacccccttctccgaggatcatgaca

SEQ ID NO: 162161 - DNA, 533 bp, Zea Mays
tgattttcaatgctctctggattgggcctcaaatactaggaagcgcaggggctctggcgcaagaaaccagagactcagtgaatagcgcccccaggacggcgggttgattcctagattttctagggtctcttctgcaaaccggtaaagtgaaggggtacgggcgaaactgagccgcccgatcagaaacggagggctcagattagatctgggttccgcgtgaaccggtacgcaatgcaggccctcggatccaagatccatagccagggaacacacaccctctcacccattcgatcccgatcggatggccctcgcgaatttggccgaatcgttatctcgcttctaatcaggaccgttcgccgtgcatccaacggcgcccggacacccccttctcctcctaccccgcgacggcggcgcataccacccactcggcggagcatcgccggaggaacacaatccccgacaatatcgcaccaaattcccgaacccgaggctctaagcgtaactaaattgatgatgaatcgaagggagcaatt

SEQ ID NO: 162162 - DNA, 697 bp, Zea Mays
tcaagataatccatgaatacactgttcatcagattcataaagaaggtcggtgcattggttagaccgaaagacatcacagtgaactcatacaacccgtacttggtaatgaatgccgtcttcggaatgtctgaaggtcggatcctgagctgatgataacctgacctcagatctatcttggagaacacactggctcctctcaactggtcgaacagatcttctattttgggcaaagggtacttattcttgatggtgacctcattcagagctcgataatcgatacacatccttctggtgccatctttcttctccacgaataggacaggggcggcccaaggtgaggtgcttggccgaatgtaacctttctctgacaactcattgatctgcttcttaagttcaaccaactctggtcctgatactctgtaagctctcttaaagatagaggcggttccgggaagaagctctatagcaaactcaactttccgctctggtggcatacctggtaaatcctttggaaacacttctgggaattcatacacaaccttgatactctcaattgggtctgcttcactgctatcaatagccatctgataacaacttcctttcttcggcttaggcgggactagctcgatcaccagttcctctcctagtggggacaccaacttgattgtcctcttatcacaactgataactgcctgat

SEQ ID NO: 162163 - DNA, 427 bp, Zea Mays
cacgtgaattcgaacggagggagcacaggaggcccggtcgacatgagggcgctcatgggagtgctctgtggcggcgacgtgatgttctcgatgtctagctgcagtagcgttcaatcagtcgagcctgtgagcttcactattactagaggacgctaaaacatggctcagaagggcacgagataacctgagaagtgctggccacaacagggtgtctcacggcggcgacggtgaccagttttggggaaatccgatgaacttgcgctctggtgaatgagaagggtcggctgagggtggactgggtttgtaacagagagacagagcaaggggaatgctcaatttatagcgatcatccgcgtgctttgcgaatttggtacggaagtgcacatagtggtgaatagatgagtcaccagaactcatctaccgtggc

SEQ ID NO: 162164 - DNA, 506 bp, Zea Mays
cctgaacatcctgcattacaacaatatggctctttattagagtaaataagaatagtactacattatctacccacgtgtggtgttagttctatgtaccctatataatcagtccatgaggctcaagctcaatgcaatacatccatccaattacaccaatgacattctcctacatagtatcaatcgcccaggttcagtttagatcctaaccctagccgcagatagcttccacaccacgcacccccaagaagagattaatctccaccggaggcagtgtcgcccctttatgcgtcgaatccttttgatcccgtgcatcgacgactgtgctgggcaatctttgttgcgccatccgtccacagaagttcttcattctgctgatcatgtcttcaccgtcaacttgaagcgctatcagtgagtgcgagaccatcaccacccctgtgcgcgaggccaccattgcccatccactgtcgccgttgtgttaggattgctcactcctgagcatcccctcc

SEQ ID NO: 162165 - DNA, 488 bp, Zea Mays
tggttacaagttgcacgtcgagtctctgaaggttcatcattaaccacatgtcctcgaatggaacaaagacattttgatttgaaccaataaaagcatgggtggtatattgacactgatggtgccgatgccaactgaagatgcccgcatgtaccaattatgcaaccttttaatattagtcgggaccttccttagtttctcaaaagtgagtagtggtctgcccggcacatattttttaggtacgtttttataatctgccttaattggcttctttatctttgcggccattgcctcaaccttttttgcggactcctcgagatcggccaaatcaacagtgtctgacgtgaggctccgtccaatccctttcaaaagacgagctgtgccagcagtggatttactcttctttttcttctcgaacggggacactaattttggtatagaaactttagatttctttgatggtcgtggatcccttgatggctgtggagaag

SEQ ID NO: 162166 - DNA, 704 bp, Zea Mays
caagtccctagtggtgattgaggcaagtgccattatgagtcgtggaggtgaacacctatgaagtgttctcctcctcgtttgaagcactggactagtctccaggagggaccccaggagcgccatgacatgtcgtattgaggaggggagatgagtttgagcccctatattgatcataaaacaccaaaatccttaatcaaatgggtcgaggtccattttccttacagtatgcactccatcccctctccggtgactgcacaagcatcctcgtccccggcagacgtcctctttcccggcggtctcgcatgatgtgaattctctaggcccctaagtggtgtttggtaattaatgacaaccgattgcggactaacagttcctcgagtgataagattgcaggactgaatcacaaggtacaacaaagttcttgatgaatcataaccattgattgtggatcaagtgaaggcaaaggtaaaacataggtttttgcttttgccggtcagcaggtgtttagagaagaaactgactggattagtaggatagacagtcgtactattaagaggggtcaatgaacttgaatggtgtatgacttagtgcctcgtagagtacaaacgataatatgtgtataagggggtaacaacgctacggatttcaaaattaagtttttcttgagatagcgcaaaatcttgcttccctgaggtcggcggacc

SEQ ID NO: 162167 - DNA, 438 bp, Zea Mays
agccccttacgccggaccatccggatatgcgtacgcagagccgagaactgcgcaatatgcacagtttccacattcatcgcagcaacattatggtgccccaccagcaacacattataatcataccataccacctcatggacatagggctgaatactgttcggccacaagagagcctgagaggtatatggtaggagctggtgacattaataggacacctaacacacacctcaaacatccctgtgaggaaagccgacagagtgatgttaggcaacctgagatttccacccacaaactcaatggatggtcgccatacatggcggagaggatcagagacgaagtagctggggtgttcagggacaaactcggtgttagtgtgtcaggtacagggcaatcgtatcggaagccttatagccaccgattcgacaccgtgccatatcc

SEQ ID NO: 162168 - DNA, 575 bp, Zea Mays
cacccattgggatcagcttcaacatggacgccaccgttgggatcaacctcaggaaggaactctgctggcacttcatcacaaaccggagcagaaggaccggcatcctggtccaagcatgacagtcgctggagccgcctcttcttcttcttcttttcctcaacaggcgcagtcagacgactaacttggcgaggacgctttgggcgggtaccctcaggatttcggatctccactgttttgttaagctcttgtccaaccgtgatagccatcggttcaacatgggtcgagtcagaagattctccagccaacatactgagtacattatctatttctgcatcatctggacttgccggcatctcaaagtgaatctgtctctcatcattgggaagatcatgaaggggagcaaccagagcctcaacgtcttcagtagagggtcgcactctaagactcagaccaccatcactagtaggagggttggacacgaaattgaaatatgacctatgagatggaagattccaagcagaataggcaacaggagcaccaacatttgatatcttgcccctcaagatcttgtctag

SEQ ID NO: 162169 - DNA, 410 bp, Zea Mays
tgatcgcattctgattaaggtatgcttatcaagaaacaagaatattactatcgtgacactatccagattaattggctactgtactgctctgttcatgttattttaagcaagccttttccgacgccacaatttgtctagaaatttcacacacaagttgcatattccatatacggaaggcttcatctctagtgacaacttatatcaagtttagaaaattgtgtttggagcagaataaaccatataatacgacatattcatccactagaacagaataggaaagccacacatcggacaggagtcaaaaagttttattatgtctttggcagatgttctgtttattcatgatatgtctaaatgtcttctgtcaagtctggatactagagcaaagcatgtccaggaagctccaattt

SEQ ID NO: 162170 - DNA, 562 bp, Zea Mays
ttttaaatgagttctggactgggcgcataaaaaccagagaggtcaggggctaacttataagatttcccgagactcatattactgctatatggactgcgggttgaatctcaataaacccaggggttcttctccaaagtgggggtcgaaacggtatggtttagcttcggccgatggatcgcggatgaacgttcctgattagatcggcataactacgaaccggtatgcattgtggaccggccgatcccagatctacggatgcggtgcggacacccccgggatctaatctctaccacccgtcactcaatcaacggctcggatgggcgcccagaaatgatacgcaccaaccagatcaccgccaccccatgtgaatccaacggcccagacaccgtctaatctccaccgtctatctctcacccaacgaaccatggtcgtcttcttcctccccgcgccctaccatccccctttctctctcttcgtggctgtttgctcgccgacgaacggcgaatccggccctctgaccactattccccaacccgagatgtgctatgcaaggataggaaca

SEQ ID NO: 162171 - DNA, 1133 bp, Zea Mays
ctttccttcaccaagatacctttgacctctcctcgcgcctcaagtccctaagaccctaactcacactgccgccgcctccacctctccctaccacgaagttgctcgttatatacgcgccacggcgccatcgacctcgttgttcgcgtctgcaccatcgtcctcgccctgaactcacccacgttgtcgtccattatttaccacgagaggcccaatccaggatgagtggtcccagcagccgccgactcgagcggacccacgccgccacggccgcgatagacctctgctcctcatggaatgagcaaccactagctccgatgaagtggcgctaccactgcatatcgtctggttcactctaagcaatgccagcatgatggacgagagatgagactcgatagggatccgaggaggttgttggtatttggtagatgtcgtgcagttgaaacgttcgacatgatgcagcaccgacagacgtctggatggatacacatgcaatatgttcgatgaaatgcatgttcgagatgctgtgacatagaaatccatcctcacctccgtctttgtatttgatttgatatgtaacctcgaagatagcagcaacttgtgtttcttgatatgttaatttatattttcttgctatttttctccattttttgtgttttggtttgtcacaacaaaagacccagtattggaatcaatgacccacgttctcctgtagcaggcactatgaagatggcacagcagccatcaggcatggcgaggttgacagtagttgaggccacaacccttcccgatgtccatgtacgtgactaggttgctcacaatttgtttatacagagttaaaatcctcattaagttctccttgcttgttgatgagtttttttaataattgatatatccttcccaatgttttctttttatctttggaatcttgtgatggagaatgcatggagaagagtcagatgactacttatcaaactcataggtagttagaagtagttctactgcgagtgctaattgcttggtgagtgcacactggtggttcagccggtaataaacatatgatctccttgtttggctttccctgcttatcattgtataagaactataccatgtaagagatcgatatgcaaagttca

SEQ ID NO: 162172 - DNA, 482 bp, Zea Mays
caaggtgccaaaggtgcagccgtccggagcagacgacggacccgtaaagaccatccaggtcgcgcgcggactcctcccagaccacccgcatcgtgggcaatctaggggagaaataggaactcgcgctcgtcgccttcctccgggaaaatgtcgacgttttcgcatgggaaccgtcgcagatgcctaggatccccagggaggtgattgagcaccatctgaagatccaccccgacgccaaaccggtgagtcagaagccttgaagacagtctgttgagcggcaggacttcatccgcaaggaggtccggaagctgctagacgccggcttcatcgaagacgtacatcaccccatatggctagccaacccagtcatcgttccaaaggcaaacgagaagcttcagatgtgcatcgactacaccagccttaataaatcttgtcccaaggacccgtatccacttccacgcatagatcaaatcgtggactct

SEQ ID NO: 162173 - DNA, 638 bp, Zea Mays
gtgaaaagagtgagagagagagaggttattattaatcctggttgtgagctcgaaaaagaaatctgggccagctaaaaatctgtcttctggaaggggagacctctattccacgtcaaggtcgctagccacgtagtacgtcgtgagttcgtgaggacgaattttctggggaagcagatagctagcaatcgcgaccctgctgctaaaaatctttggcccgctttacggccagaagattgcgtggtcagattgcccgcaggatcggcaagcaaactgccagaacagggtacgcgcataaagtaaactcagcacctgcaggcccaagactcggccccatgaacgatcatccgcgaactcgtgacacgtgatcagacgagctctcactgtcagcgtcatgtcgtaaaaaggaccggatgattagcagcactacctctgatctgatgatcagaaccatgcatcatcagttggtccaagctagacacacagcctctgctggataataaaagtcaaaacagtggtgcggccggcggttccgtccgtgccatcggccatcgcgtgtgcatgcacgcaccccagaagaagttcctttcttccttctagttgcccactgttccgcacgggcaggcaacatcaacaacaac

SEQ ID NO: 162174 - DNA, 864 bp, Zea Mays
cacctgacaggcgaggccctcgcggcagactaatccctgcgctgcgcattttccccgttgccgctggtgcgcgggacccgcgttgtcaacgccatcttctccatcagctgcagcgcatgcgtgactgattccgtcgccggggaagcaggaacgagctgttgaatccacgcgctaacctcgcacccacgattctccgtcgcccgggcttcaaaagcagacccgacctctcctcgtgctcctccctttgactccttcttccagccgccaccagagacaaattgcgggagtccgccgccgtcgagttctgccatactcaccgctcaacaccaaagatctggtcccatacgttcgggagggtgcacgggtggcgctcggggaagaagccgggggatcgaggcatcttctgcacgggaattcttcgccgtatttgagtctccgccgcgggatcgcgccgtcgcgtgggcagactcatcaccaaacccattgtgagtacaaaccgtctacccgaattcaccatcatactagccccattttgcacctggcgactcgaccgatcgtgcaccgtgggacagcaggggggtagcgcagccatggcacgccgccgcggccttgggtttggtcgctggcattcatccaggggaggaagacgtagggtgcaccttaggatcgggcgtctacggttgagattaggcggaagaataccccttcgctacgtttagttatgaccgtagatctggatctgacggctagatacaaatctgcggtgataaaatctctaccgttgagtcttaatccaacgatcccaactgcatacggctttgccgcgctgggaatctaatcttaaccgtagagtttagatcgggc

SEQ ID NO: 162175 - DNA, 437 bp, Zea Mays
tccggtaccaaggcacctaccaaggtgctaaaggtgtggccatccggagcggatgacgtccctgtcaaggccatccgactcagcacagattccccctagaccactcgcatcatgggtgatctggaggaaaaatatgaactcacgctcgtcgccttcctctaggcaaataccgacgtgttcgcatgggagccatcgcagatgcctaggatccccagggaggtgatcgagcaccatctgaagatccaccctgacgccaaaccgatgagtcagaagcctcggagacagtctgttgagtggcaggacttcatccgaaaggaggtccggaagctgctggacgccggcttcatcgaagaggttcatcacccagtgtggctggccaatccagtcatcattccaaaggcaaatgggaagcttcagatgtgcatcgactacaccag

SEQ ID NO: 162176 - DNA, 690 bp, Zea Mays
gttgacctttaaaatatgcaaactagaggctctcgagagctaaagcactatggtacatttcattttataaagcaactaaggaagctgaagcaacagaatttgaagtgtcggtccgataaagtggttgataactgaacaatgtgctgagtcgatagactcgggggctgcatgatagagttgggaactcagctagaaacagaacaagtcagacatagacaattcaagacatccaggaagatttaagagaagagtcttatctgtctgggccaatgatttagccaaatgaaactcaaggggggctactgttaggaatatatactaggggtgcccagataaagtttaacaagaagggtgcatgcagataggtctatgagctcggccgagaacccatggactcgatcgtcatgatcgggagaaggattccaaaaacacaagcatgacaagaatcttaacagaacaagaagagatgatcaaggtcttaccagataaggcaaatatcatgcggataagaaagacacagttgtaatcgtagaattagattcatgtacaactaggaactcaatttgagtcggtatccaccatgtaaccgctaccctgctcggactataaatggacggactaggagtcctctaaggtctagtttggaaacacaaatcctctccaattccgaaggggatttgaggtttccaa

SEQ ID NO: 162177 - DNA, 477 bp, Zea Mays
aaaaatctcttcttcagataatctttttcccgaagcgtgtcgtataatataatcaagaacttcggaaggcgcttcgggagtaggagtggcagctttttcagacagaatctgttctatagcttcttcttccgctgccttttctccagtttccaaggatttctccttggcgggctctgaaggcccagcttcggtgtcggcctggctcattgtagcttcggcttcagtcagctttgtctcggtttcaatctgcgctttcgaagccttggcagttttccctggagtagagctggaagcttttattatctccagcacatctagtacactagccatcatttttctcttgggggtcgctgctagacctttttgtgtcttcggcacctccactcctgccgaatggcttaggacttctaatgtttttgccccttcgattctcgatttttcaattttgtcaatctccggcattgcagccggctcttc

SEQ ID NO: 162178 - DNA, 696 bp, Zea Mays
ttacaatagggctatggttggttacaacattttgagcactccgacagagtaggtctcattgtttgctctatctcccagtggacttctgtcgaggataagatcttcgacccgtggggtccatcgatcagcgagcgcactagaaaaaggcctctggtagcgggctcgctggtcagctggaagagataggtagcgtctgccctagaggcacctgcccccggacgaaactcgtgacgttgagcctgggtcgggcgtggcgaaacctgacagggggctaggcgcaccgaaaaggaaccactcggtgggtcccatgcctggcccgagactgacccgacataggtgacctggagcattaaatgtgcctagcgacgagccacgatagaggcgccagtccacttcccactcatgacctaagaacctcttgtaccaaagagcactcatgatctacgaacccctcagaccgcggtgcatttatggctcgcacacccctgacctgcggagcactcatgacctatcgagactgtccatattgcgcaggccgctggtagggcgcaacatgacgagccgtgtcgagtcccaggctacgaatggtagagatcggtatagcccaaataatggcactagggatccacattgaccgagtcatccgtcataaagaatacgagacagccatgcgaccctggggcccacgagcacgtg

SEQ ID NO: 162179 - DNA, 1053 bp, Zea Mays
cctaccacaacaccgaagcatcggggatcgcaggaagaaagggctacaccgtgcgtcgaacgacatcaccgccgccaccgtcgagggctcatcaccggttgtgtgtcgccgcgggtgaatcaccggcgctgggtccctgaaaaccggttggggagcttcgccatgttgctagaaagctgctagtatccccctctggtggtagccggctctggtgacatgccaattgctcaccgatgtgcgaatgcaatcgggtaatccacactctgacgtgggcaactcgcttgcgtctgcgtcggggccctggcgcgtggtctggtggtactgggccctcgggacatgcgggtggaagtcgtgccctgctattagagtttggtggtcggcgctctcggatctccccgttaacacccgtctccaccgcagctccatgttccgtggatctgggccatgcgactcttgattcacaggtatagacctgcaaactgtttctgcatagtctctgcctcgcttagctacattttacggttgggttggtctcttggttgttggggaggggcgtgtgatggcaatggcgccgccgccttgtgcctacgccgagggacccggtaccagggaagaagaaacactcttgaccgttggatcatgatctggcgcgcagacttagatgatgggcatctggctgtccgttttgcgatgatcggccaggattagaaaacacttaccctttcgcggggattgacccgtggccgtaggattagttgtcagtggccgagatttgatcgcaaccatattaaatctggtgcgttgatcggatcagatggccctggttgcatggcaattcttttaatactggaatctaatctggaccaattaaaccagatcgtgcggctgatgattgcctataccctatcggccatgccactttacacttaagcccctacacttttgttaaaccaacccgccatcctcccaagtcaaaacaaattacaaccgagccctagatctttataagctagcccctgcgctctgtagaatttgtaccagcagtccttagcc

SEQ ID NO: 162180 - DNA, 850 bp, Zea Mays
ccctctcagaggctggtacgactttggatattcagaagcctgccagtactcgcccgaggtgcccttgccgagccaatcaacctgatccttctgctgatgagcagaaaaagaaaaagggacgcctccggcgagtatccagtttggatcgggacattggtacttcggttcctgctgctgaagaaacgcctatgactgaatttattgacgctgaccccaatgggtgtgcccaatctgctgctgatcccaatgtggatgttccatctgttgctgatcccaatgtggatgctccatctgttgctgatcccaatgggtgtgctacctgtgttgctaatgaagacgacggggaggaagaggatgaagttcctttgactcggaaaaacagtcggcagttcatcgctagtggtgaaagtagtggagttccttctcctgttttgtctgctctcattggtctgcaagaattgtccctggcgaattttgatcagactctcgaggatatggttccagaggatttgttatcagagccagcagatgatggtgtgatggaggtttgtgctgatgtgcttgatgctgggttgaggtcatcccatgcctcgtcgaccttagagcgcgatctcaaaggtcaggagactgacttgaatcgtcccggtcccatggaagtaactgagggcccatcagccttagaggtggctaccgcagagaacttggaccccaagaatggtgttgacacttacccagcccccgaggatgttgccggggatgacttggttagggtgggaaacgcaagccactgcccagcccccgagggtgctgccggggatgatccggctcaagtgggcagtgcaaactatga

SEQ ID NO: 162181 - DNA, 389 bp, Zea Mays
agctggtaaaatattcgtctttttctaccttggttcggcgacggggatggatttatagcggcaataaggagggcaccaacagggaagtcgacgatgtggtcaagtcgcagcgaatagcagcacgaagggtgtggtcgttgcgcagtgataaaatccgttgaacgacgaatggcgatgacgtcgggcgagcagttacaacagtgtcaagcgacaacaaaccagcaaaccaggtggctgacttctcgacgcatgcaataggagtttcggcgaggtattgcgcagcacggtggcaagcagagatacacagcaatggcgggcaacagcttacgcggcgcagagtcacaaacgaggagtcgacgacgacggtggtgctgctgcgcgcgtaggca

SEQ ID NO: 162182 - DNA, 431 bp, Zea Mays
taaagattttaccgtttgcccgctcgactatccaattggatcatgggtggtagacggaagcaaagactgtttgggtgcctatggaggcgcagaactctctgaagtcttgattgtcgaattgtttcctgttgtctactattaatttagaggggacaccgaaatgacaaactatgttctgttagaatttttttgtgctgtttttgctgttattgtggagaccgttcgtgcctctatacatttggtgaagtattcaatggcaacaaaggcgtacttgaggttgcccttggatgtgggaagtgggtcgactatgttgaggccccatcgctgtagtggctaggtgtgggtaattagctttgttagctgtgaagggcctccgcctcatggtgaaaacttttggcaagctttgaacaaccgcaccacgtggttggctg

SEQ ID NO: 162183 - DNA, 443 bp, Zea Mays
gtattcggtggctcgcgctaccgacacctttgttgctcaaagctcatagtaggggttacaagcaggcgagagagggaggagctcccaaatctcttatgcatgggtaggattaaacactataggactggagttctaactaagccttagacgtcgcggtggctcacacctaggctccgacctctaggtcttctggtctcgtcgagtgtgtatgtttgttgtctcgtatgcgtcgtctccctgttctggccaacctcccccttttataggtcaaggtgggactcgtctatcggtatcttcccaaggaaggagctactataccgtggtaaaacatggcattctatcttagtaaagccgtgtttgttcattcgtgcatcggtcgtctgggcttccctggtcacgctctttatggcgagagacgtgatcggcgagggcctcggcaccat

SEQ ID NO: 162184 - DNA, 557 bp, Zea Mays
gccaggacgggaggtggagacacgtcggtggatgacggtcggagcgtgtagaggggaccgacgctgtcacatcgggcgagaggggtcctggtggccaaattcttcacagaaaaaccggtagtgtcaaactcaatggaacaagaattgtcggtggtgaaccaatggacagaaaggagattgtgagtgatgtgaggggctacgagaacgtcgttgaggtagaacggtccagggagtaccgaggcacctaaagaggtgaccggaagagtggaaccgtttccaacgacgatcgagatagggtgtgtggtaggaggtgggtttgagcgagagagcatgcctgtggtgggagtggtgtgataggatgcaccggagtcgatgacccagtcagaaggcggtggggccaacaccatggtgctgtatgcggaggcgagggcgacagggtcccagcctgcagcaaacgaggacaatagtgtcgtggtagacggtcccgtaggcgggagctgaggcggggcctgggtcggtggtggcacaccgtaaggaggcatgtcattggcgggcgg

SEQ ID NO: 162185 - DNA, 409 bp, Zea Mays
cggatatgagctcgtgagattgaaagccttcgtgagactatactgagggaagcccatgacttggattattctattcatcatgggagtacgaagatgtatcaagatttgaagtagaagttctggttgtatggattgaagagagatgtggctgcacatgtggctatgtgcgatgtgtgtcaaagagttaaggctgaacaccagagaccagctggactactgcatccactgaagatacccgagtggaagtggggagagattggtatgaattttattactggattgcctcgtacctcaaaaggatatgattctatatgggttattgtggatagactggccaaagtggctcatttcattccggtcaaagactacttataagtgatctcaactggcagagttatatatggaacgg

SEQ ID NO: 162186 - DNA, 1196 bp, Zea Mays
aaataaagaaaaaaagaaaaaaaaagggtaaaaaccatacttgggccgactccctccttttcagcccactccaccaccttctctgtgcggccgaaccaggtgaagggatcaccgatagggaggcccatgtctccagtctcgtgcgcgcctggtgtcctcgctctgactggggtaccccacttgtcaatcgcgcgtcatgcgccacgcaccacgctcctgcaccgactgctggggcccacgattccatcaccaccacataggggcacttacatctggggcctacctgtcagcctacaccacctcaactaacccgcgcatatgccggtgatgtggagctcaggcgggtccatttcttcctcctcccctctttcctctcaccttacttaaggacctagctgccagggaagaccattgtttccgtcgtcccgtgttccaccagaaggaccgttacgaggtgagggagagaggagtttgtgtgtgatttgggctgccctgggtgattcccatcgctgtgaggtgtctatcctaggtgaagggccgaggaggatcgtcatcatccagggtagcggtgcgtaaccgcaattgggaggtgaagccgcggaaccgaaggcaattcctcaccgttgatcgatttccgccgcgggcaactttgccccatgaccgggtacttctatggcgtcaaggccggtatgtcacccatccatgagctcaccatagtcttcgcattgtgtcgatgctataaaatttgggaatggttcctgtgggcgtgggcgcgcactcaccgcgaaatcgccaccgcggtggaggcctgtgctactctgcgcccaacatagggaggaagacgaggtgattgccattgatccagaggtgtgcagccacgattagacctcgggtacccctttgagttttagatctgaatcgtcgatgaagtaacgagcgatgcataatagatctgggcttcattaaatcgtaggcgtaggatctagatcctgtggacatcgtcgcgtaccaattcaatgtaatgtggatctaatctaggtcgtagaaagcagatcagacggctcagattggaggataccccttcggcctgtatgttttgcaaaagagtccctgttctttatttaaatcaacccaccgtccatgtacgactgttccttgagtctaggaagttttaccccgaggcccctatctttcct

SEQ ID NO: 162187 - DNA, 927 bp, Zea Mays
aacataagaaaataaaggagaagcatgctattgtcaatcaaacagcaacaggaggcatattacaagcgacttatcaaaaatgcagcgagttaacatgatcttagaaactaacaaatactatgtactacttacttactactactactgctaggcaatagaaatagagaaactaacaatggaattaagcaactaggcaatggaatttaaaggggcaactaagctgtgcaatggaattaaccaactagaaactagcaaatactactactacttctaggcaaccgaagaactgagcatgcaacaaatatcaagcatgtgtaggatgaactctctcctcaaagtctcgtaaagtgttagaagcatgctcatttgatctggtgttttcacaaacacagctgctgccttgatctgttcagtccgggtaaatccaagcttgcgtagctctgctactgccttatcccttaattttttcttgaagttcagcctcgcgctccataaccgctgtcatttttccaacattcatagccacaccctttagatcaccttggacttcatttaacatgtccaaaagagggtcacttgatccactcttctccttcccagatgtcctcctcctcttcacacttgatgatgctgaatcagtagaccacctaggggttctatagatctcatgccctcctcttcttcatgatcattaccatacccagtagcaagctcttgttctaagttcccaacggcttcatcaatcccttccgcaccttcaccggtagctatatcatttccatatatggtcgacaatgcatcaaaatatgggaatgcgacgtcatataggcctctagcttcaggatgtttctgcaaaataaaacagagcaaaggatcaaattaagatgctaccattaagccaaaatacatcacatagaaatcaaaatg

SEQ ID NO: 162188 - DNA, 544 bp, Zea Mays
ccggtgtccttctgtgggggtccggacttactgaggtgtggcgtctttctttgccacgtggcgccctttggcctgcccatctggtggggtcaggcgcggtcctccgcgtgcctaggagacgtcgcacgggtgcagtgtcttcatgctgtaggagagggtactcctgatttagggcggtcctcgtatgagatgggctcgggcgagacggatatggtggttccagggtgaggtgtcctcaggcgatgcggagacttgctcgaggcggaggttttggagggccctcggagagggggctcagttaggatggcgctcttatgggaagacccgtgaggcgggcctcgggtgaggaggtgacctggtctcttgccttcgggggtcacacttgggcaaataacctttcctgagcgcattttaaggttataatctgggtacccctaattatcacacccgacaactctccctctgcagctcggtgctaggcacagttaatgcggcacaatgggtcagtcctgggtcaggcgtggaatccactcaagtggcttcc

SEQ ID NO: 162189 - DNA, 717 bp, Zea Mays
gtttttgatctaacttttactcgtagctctactgctgagcccactccctatccaaaccgttctattcccgcccctagcgctagcccactcatgacttgctcgctccatcgatcatcaaatgatccgttcgatgacataacccgtccgctgccagtgccaccttacctcctcgtcacttgaactatcgtcttgtagggatcctgtccgtagtgccactacttttcctcctaatccgcaccgacagatgggcaagcaccacaacgctatctgccctcgctatatcactgggttccaccgcaccatcggaacgcggcaatggctgccaattgctgacatcgctgcatcgtcacctgccctccctacctcggcctattatcacttaaccttcatataattatcatgaaactaatgatctagtatagtgatttgtttctcatggtgttactacatctagaattttgtcccgcgtccgccactccaacgcctgaactagtacgccatcgtggccatcagattagtggtgtacggttcagattttaagatcgcctaatttaatctagcacgtgtcttcttggatcaatggtccccgaatacaaccaaaaatgacaccccatgctctatactccaccgtccgatcaaggatggacaatccccttcatcactaacctccagcaccggacatacaacgctaacacttcccacggttgcgaggctcac

SEQ ID NO: 162190 - DNA, 396 bp, Zea Mays
ttgggaaagtacgatacaccaacggtatacccaacacctgcacccagtagctgttcaccaccttgcacggtttttccgattgcttttcctcaaaatgaaaaagaacccctttcttctttgagtgaaccgttccccattccaccagacgctgtagctcagttgtggaaggaaaagctgtccggaacacgttagactgaaccatttgcaccttccaatcctgtgtcccaggtattaggcgcttcagttcagcagtaacttccacctcagtaagctcgccctcggtaactctgatcactgcgtcaaggccctccctctttgccggattcttgacagtcactggaatatggaaaaaacccagccccacagccgcgaatccgctgagatagatgcatccgg

SEQ ID NO: 162191 - DNA, 713 bp, Zea Mays
gtagtgtggacgtgccataatcgtccgatccagaatctagggaccggattagatcaaagccccacgaaccggtacgccgtgaggaccattgattctaggatctatgtcccgaaagtcgtccacctatgatccaagtcaagtcgcacgatcccgattcagtggcctagattttattaaactggatctaatcctaatcgctcattcctgatccgacgcacctgattatatcacccgaattattacccgatcccctaatttgagcccttcgttgatgatcccatggttcgcacccattctacccatccgagagaagacaacggccagggacagcgacacagttagcccgcatggcggcgcatcgacggcgtgcaccccaatccaaccctagtgccaaaattgctccacaaatatgctttacccgatgttgaaggtcatgcgagtaacatggacgtgttcttacctaaaatcgtggtgcaaaaccacaggccgacgacgggaatcagctccaccgtggacgaagacccacatcgaggaattgcgcgtgcgccaaaggttcccacggttggaagccctccccacgcatttcactgctccgagtgccacaccctgaccccctccgtgaagctccgtcagcagtatgcgcccaggtggatgccggcggtggaggcaagcctcccttcttccgccaacccccctccttcattgttgtgtcg

SEQ ID NO: 162192 - DNA, 505 bp, Zea Mays
ctctgtgctctcctgtagatcttcctcgccccacgcggcgaacgcatcctccgaaatccacgatgccgcatgcgcccatctcgccacctgcgtgtgcacgacttgttcgcccatgcaattcgccttcaatctctctccctcactgacacctcgaccgtgcgataatagagcacgtcacaacggcgacgcgagtatggcggaagtggggcgaccaaattcgcctgcgaccatccgtgaagggagggctataatactgggtcctcgtggtttgccttcgaccgttccattgccgtaaaccacgaaaccaaacgaaggtgagtgccgcagaaggccgggagagggagccacgtcctgggatcgtcgccacgggtgaacctcatcgcacctacggtcggagccaggcagttgtgcattggggcttctctggacttgttgggaggtggtcgtagcctctccgctcgggattgcttgtcggcgcctcaagaatttcttgctgtcgttatcg

SEQ ID NO: 162193 - DNA, 767 bp, Zea Mays
cctaggtggaaaagtaaatggatagagtggcaaacaatacatatgaaaccgccatgccaacttaaatgcaaattttagtattcaatttttttggattttactctgtccaatagtacacgaaataaaaggactattgtgttgcatagctcatggtctctgaactatggcttcatagggcacttatgaaacaatttcatcagatgaagcacgattggccgaacataatgctatcaagaaatcagaagccctaacttattcccacctagctcatgaaaccactaaattttttgagagatgcaaggttaggagcgataagagaccaggaaggaggacagaacatacctaagcctctttgatgggtgcgagcagatcccattgaatgtcatagtcgctttcattgatggccacaatggacaactgcgagcgagtgagaaaggggtagaataaaaagaaacgacaaaatcgcacaagaagcaagagatgtactgggatggattgtggaagtgtggctcgccatggttggcggcgcagtagacagagtcgcgggaggattgtcgtggggacgacggctctagccgtggggactgctcgctgcgcgaaattgtgggggcaggcacgagtgcaacagggataggcaggtgcacgcttgagaggggaggcaatgtcgacgaagaagaggaggaactcaaggcgtagctgtacatggagtatgcgagcatgaggagcaactctcgtagcagctatgtgagggagaggtgtcacacccg

SEQ ID NO: 162194 - DNA, 1017 bp, Zea Mays
aataatgggaatatatatgcaacttgaccaccctctctcagacattcagccaccaccctctctccatctccgagccctctccctctctctcccagccacttctatgcggtggcactgctgctccaccctccctcccagccacttctaactatggaatgaaagcaccaggtgaactagctggcaacaccgtagtcagtaaatacagtaagcctttttgacggagataaagggtgtcaaggaggaattatacaaatgacaatttgactaagcggatgggggagcacgttgttttgtaccccagtagaaatatttgacaagatctaaactccaaacgtgggcattaattaatgcaacttttagatactttaaacgaaattggatttctcatctgttgtcatccaagataaacaaccaagatgtgctgcaatcgactcaattacgccctgatgactgatgagccacacgtactaggatggatcacctgtgtaggctgtaaaatccttaacagatctaggtcatgcaacaagttataaaggtgatcatgctcaaaagttttaacgaagattggaactcttgaccagttagcaatggattacagctaataagtttacatgcatgacctgaagaagatcagaagaagtctaaacctctcgcatggttccataagtttaaatataaacagtgaaacacctgaacacacagagccagtccaaccaccagccggcaaaggtaacagttcactggcaagtaggtccacaaaatccttcctcagcccaacagtgagtgaccatggaaaccagatttacctaccccgcatcgccaccgccgcagccgccaaccaaattaagcacgcactcctcgatttctcccaggactagtaacttctatccatatatccattaaaaaatatcgcaaccatcaaccgacacgtgggtcccagaattaaacccatgcagataaacacttgcctaattatgctgccatggatggtacattacaggtatttattactttttt

SEQ ID NO: 162195 - DNA, 674 bp, Zea Mays
ccggttgggcgcgcgtggatctgccactgtgctgccatgtccgatggttcaccgaatagtgactatgcgctgttcgatgtgcactagacaggcactgtacactgtccgatgtgcccataaccggattttaaaaaaacctttcctcgcccgcgctcgaggccagacacttcatttcacggcgcgctgctcagggcctctgctctctgtctgcatttctcctccgccatcaccacccctcaccgtcggcgatcaccgtggctgagctttggcgagctctcctctctctctggtgagatctcctctctatgtttcctctctctctctctgttattctctgcagtgtgaagccctcacctctcacaccccctctcaatctcaaattcattcaaaatccttgtgaaatcaatgaatccaagtgtgtctaagtgtcccagtacacttttaagctttccctgcaggtttccatctccctttgagaggtttcaaaccctaaaagtggcatttccccacctaacccaatcctcgcacaccacgtgttcggtgaaatgcataaactagtcaaaatatctcaaattgaccccaactttttctagcacactccaactactaccagtacctctcacaccaaatttcacacctatccgatattccacacacatgtttcacaacctctt

SEQ ID NO: 162196 - DNA, 568 bp, Zea Mays
atttgtggaacactcgatctcacctcttacttacccaagctctttctagatctctaggaccatgatggtgtcggtgtgacagcttcgacagaggtggtagagcggtcgaaaggatcacaagtcaaacgtcccggttcaggtttttagtggagctataggaggctgatcaaggtgggctatggtactatcaaccaagtgtgttgacgtgctaaaaagatatgaaattgttgctggaaagattctcaccaaatcaatgtaaactaaaattttcagcaacacactgtaacacaatcccctttcacaatttttttacttctttctcttcttttttctttctctttttttattacactaatgggctgctaagatcaaatgcaatgacacaatataaatataatggtggtaactagcaacttgaggaactttaaacaacacaaggtaccagtaccgccaaagggttataggttttttgtggctttggactataggacaaaacaaaatataagatgtataaagactgtgataaataagtggatgacagtaagacctaccgtgacaatgaaagttc

SEQ ID NO: 162197 - DNA, 463 bp, Zea Mays
gtttgaggaaatttcaagatttgaatttttgggatgctacatataacctccctaagctttcttgaagggtccaatcatgtctaatccccagcacgcgaatggccatgttataggtatggtttgcagctactgcaccagtaaatgctgttgctttgacaagaactgacaagcttcacatctctggactaactcgactgcatcactctttgctgttggccaatagaaaccagacctgaagactttcccaactagagttctggatgttgcgtgtattccacactgtccgacgtgaatctcatctaatagctgtctcccagtaatcgaggaaatgcacttcatgaggactcttgttgcaccccttctgtacagtgtgccccctatgagggtgtaatgggccgactgtcttgcgatgcgttctactgcagccttatcattcagttcttcttcattctttatatacctg

SEQ ID NO: 162198 - DNA, 640 bp, Zea Mays
attgttggagaaatggtgtagccagccaagaccacaaagcctaaaatagttgaagccgaggtcccaaggccttaaggagtcaaaattgttcgcgaagaggaagaagaataagaaattgaatttgattttaaacatgttagtggtggggaactaagcgctaaagaggtggtcgagctgaaggacttggccttgtcactcaaatacccctctggtgctatgatctttagcggaagtgatcgcgagaagttactttgcaatcctgatcgggacgaagctagagcgttaaagaatttaaccaaaatcattggcttcccgaatgtggaaaaagagctaagtggtttgaagaagtagaccattgctcgaagcttggcctatacaaatattaaggtgagaaaaacttgtcctcctaacatatttcggtaagggtgtaatgtagtaataatttttgtttttggtaaaaaacgcagggtttattattgagcaaggctttaaagattcaacaagattcataggacgagcagaacgaagctatcattttgggactacaagccaaaaccgagaagcttcggaaaatgaacaataccaaagatgccaaatacaacccatgctgaagtcgttagccgaagctcgagaagagagc

SEQ ID NO: 162199 - DNA, 381 bp, Zea Mays
tacttgtgtagtcttgagtgaaaaccctaagtaacacctggggtgttacacaatctccccgccatggacgcacccacgaccgtgctttctccggcaatgtcctcacgcccgtgccccttttgagccccgcgccctggtcgcccacctcccctcgctcatttgcgtcctctgccaaaccccctcgccttctctctcgctctgcccatgcaagcagagagctccgccaccacccgccgtcggctgctgcccgttctgcggtcaccatcacgtccgtgctccatcccgtgccacggggagttccgcctcgccgtcagctgctcgggacacccttcagtgtgcccttcccctctctggatcatccggttcgcgctcaccggagcg

SEQ ID NO: 162200 - DNA, 354 bp, Zea Mays
gccggccagcagagcaacaaggaggcggccgtgggggagattgagctgcgcgccatggagatgggcggccgatcgccatgggagtgggcagggctgagctagaagaacagggagcagggaggagcgcacgctaggaagtttagggagatggagcgagctgaagatagagagaggaggggcggctggggaagacgaagcagcgacgcgtgccatgggagatgggagctcggccatggagctggaagccgagcgcaggccagggagcagggagactgccgtgcggggaaggaggacgcgggccaggagataagttcgcggcccgtgcgcatgaaaagatcagggggaagggtcggc

SEQ ID NO: 162201 - DNA, 827 bp, Zea Mays
cggatggtatgctgagcttcttattgcacgagtcccaagtgattcttggagctgctcccaaaagcgtgccacaaacagtgctcctctgtcagatacaatagtcttcggaattccatgcaaactcactatttgatcaacataaatttctgcatatttctttgtcttgtgggtggtatgcactggcaagaaatgactgtcttggtcaacctatccacgatgacccaaatataatcatggtgccgggaggtattgggcaataccacgataaaatccatgcaaatatcctcccatttccaagatggtatgggaaggggctgtaaggtgcctgctaccttcagatggctggccttgactctctggcaagtgtcgcattcagatacatacttagcaatctccctcttcattctggtccaccagtacaaggatctgaggtcatgatacatcttgtcactgccggagtgcatggaaaattttgaaaggtgagcttcatccaatattttctttctgagctcggggtttttgggaacaaccaatcggtctccaaaccataggatccctttgctgtcctgacggaagcattggtatttttccgccttctgtcgatcatctccttgataacttgaacacccttgtcaccaatctatgccatgactatttgctcatgtaaggtgggctccactgaaatataacttaaagcaccggagcaaacgacttctattttcaacttgcacaactcatcacatagggtggtgatccttgcatccatattcatacaattgcgctgggctttcctgcttaaggcatctgccacaacattggctttgcca

SEQ ID NO: 162202 - DNA, 802 bp, Zea Mays
tagagtgggatctattgctcgattggggatagttgctatagtcgatttggagctagatcatagggctacaagtttgctacagacgaattagcaagctcttatacgaaaatccaagatctgggcactacaaatccgtctgtcaggtgctctgaatcaggtcttcaatggtacagtgttcggatcagaacgctcgtttcagatagctcaccgccggcgaccgtgcgcccggattcgtgcccgccgcagtgattcgtgccccgcgcagatggataatggcaaggaggtaagaaatatcgcaccgtggatgaactccagccactattctactccggccgctgtacccgcttgtgtcacggccgcttcggataggctcaccggagttagccacctcgcgaccttgcgccaggtgccctggtgtcttaccatattgcagtagctcgcgttatgcatatccggtgatcgccggtgagctcgccacggtgaaagccaccaatcgcttgcgccagtgcacccccttctccccgactgccaccgcacgatctcaaattcacgggccaccgctcaagggccctataatttgagcacaccctcgtctccgctgagtattcaagcatccaatccacctacccgtgactccaattactcaccagagagccccaatttgggatttcccccaaattagtccggaacaccacgcatagtgacctcgccgtggctagctcgttccaggtccgttcatgctctctgatctcctgtttcagtgcccttatgttctcctgatgcacctcgacccattcaatta

SEQ ID NO: 162203 - DNA, 657 bp, Zea Mays
cggcagtgctactcaacattgaagttcattgctcactagaggatcggatcatccaaaagcagaaatccgacaaaggcatatttcacatcaaggaaaggatgaagagtgaacccaatagccgcttcaagcttgacaaaaagggtatattgtggtttgatgaacgactggccgtaccaatcaagagctccagaccaaaattttggatgaagctcaccaatccaaactatcgattcaccccggaagcaacaaaatatactgtgatttgtaatcaaagttttggtggacaaagatgaagaaagagattgcatcgtacgttgcgagatgtgataactgttgcagagtcaaggccatccacatgaagccagctgacctattgcagtcattatctatacctaaatggaaatgggaggagatcagtgtggattttattactggacttcctattactcaaacggggcaatgattcaatatgggtgattgtggatcgactcaccaattcaactcattttctgcctgtcaaaacaacatatcgaccaccgaagtaagcgaacatttatatcatagaaattgttcgactacatggaattccaaaaaccattgtgtcggaccgtgggacacaattcaccgctcacttttgggaacaactaccgaaaggtt

SEQ ID NO: 162204 - DNA, 590 bp, Zea Mays
ctgtgttcttggcggatctggcacagggtcactattctaacagaggacacccacgagtccgttgtttatgtgtcattcctcatccgcggacttgctcttcctgtttctccctttttccacggtctccttgacttctacgatttaaatcttacacatttgaatcctaactccattcttcaagttgccattttcgtacacctgtgcgaggcctttcttggaattctcccccactttggactctggaagtatctttatcactgtcggcccagcatggctggaggacagcaccagctcatcagtggtgccagtttggaacttcgccgggggaggaaagcggagtaccttgacattccccttaaggacaacatcaagggatggtgcctcgagtggttcaccatggagaatcacaacaaatctctcccccctcgaccaggaaggcagcctgacattcgcacacccagctgggaagagtacccttcttatttagaggtagccaatgccaaagtgctgcttactaaaatttgctcgctgaaggacaaaggcctgactgctgaagtcgtggttgccaactttatcttcaagaacattca

SEQ ID NO: 162205 - DNA, 563 bp, Zea Mays
ccgtcgcaccgatcgtctgtggacggctctgcgcacgcgtctgacaccggtatgattgcgagcttgtaattagccatcgttcctctaccgcgctggattagtgcgtactccttaccgtggccgaggacagcttgctcgccgctcgccggatttgcactacggccgtagcttggaactcagggaggaagacgaccctgtgccgttgatctctggatgagcggccaggatcagagagagttgtgaagtgttttgaaccgtgggatagatgttgggcaggcgagatcatcggtagcatactccttcgatccgagaaatgtgtgccctagatcttagatcctacggttctgagcgcgtacccattctatgaagacttagatctaatctgatccgaccgctcctgatcggacggtcctaatccgacggtaccctttcgcggttgtcattttgcgtaagaacccccgcaaaagagtgatgtcaacccgcggtcctaggcaagcgcggtctgagtctgctgatgttttatagtttagcccctacatttccttatattagtgcgcccagtc

SEQ ID NO: 162206 - DNA, 865 bp, Zea Mays
ccgttaagaacccctggctactgttcaacgtttcactgacatctacaaaaacaaccccgcgcttctatcctttctccgttcgaaatccatggcggcgaaccgcgtagggacgtactccggcgagcacctggaccggtcggagggagccaagactggcggccccgagtggtgaacaccgaattggatctcccccgaacaattcccctagcttaatttcatggttggtaaactatcaagctctgtccacgcggactgcggacgatgaggactattgcacgcgttccccgcgactagtgggctcctagttcaattcggtggtttggcaagcatcacggggttatgagaatactcaaacaagggagcagaaggtgtgggctgacctgaatcgcgctagccgcggcgagctgttcttcgcggtgtattcgaaccggtttggggagaatctgaaattagcgctctctggtggggggtttgggatgcaggtgggtgcagtagctgctggaatatatggcaaagccgagggggctcaatttatagatcccatcgacggtggtgtccaattttgcaaggtcgtgctggcggccggagggaaacagggatactagagcaggggatgggtggctttcaccgtggcgctttctcccgtgatcaccggttgaggagctacggcggttaccggtgagctggtgcggctagggatgacgtggtggaaggcttggagcgtggcacagccgcagtaaagcacgacaactctggtgacggccatgaggccacgtcgccggtgaaaaggggcaggggacagcgaggccacattagctcatgcacatccgcgacgagatctttacccggtgaacgaaatccatac

SEQ ID NO: 162207 - DNA, 399 bp, Zea Mays
ccgtacgtgaacacacaaacagaaagggttaggagacatacgggcttagcctgcttttagtggtggaggagtccactcgccattaccgccgcctaggagatagggtccttgtctttggattagggtttcggggcaacactaagcgttagccattttctgcgctcccctcctaattgtttatatggcgtcgtgtgatcgggcctacaactatggttagcgtgggccctcccaagggcccggattaaagaaatggttatttgggttaagctcaatccgtctctgttgaccagcagcacgggaaacacccaacaatcttctattttgttttctatattccttatactcaattttttttggattcaatccctcgacaagtttacacataaagaccaatgcgtg

SEQ ID NO: 162208 - DNA, 1369 bp, Zea Mays
aagcctgattacttctttcatatacaagggaaccaactctgaagctgaatttgtggtcttcatgggaataaagtgcgcagacttagtcaagcgatccactaccacccatatagcatccctgcctcgaggagaacaaggtaagcccaccacaaaatccatggtgatatgctcccacttccactctggaatttccaatggcttcaataaacctgcaggcctcttatgctcggccttcatgcgctgacatacttcgcaggcggccacatacttagaaacgtcaaccttcatcctcttccaccacaagttttgcttcaaatctctgtacattttggtttcgccagggtgaacggtgtaatgcattttatgagcttctctcaagatatccatcttcacctctgatttgtgaggcacacaaacacgacccctgaaacagaccaaatcattctcatcaatggtgaactcacggggtttaccatcgccgaccctttttcgagcttccttcaacaaacggtcctgctactgagccatgcgcactctctccagaagggaggattgaatgagcatccgagtctcctctctagcggtgccgacatagcacaaaacgactcccatatggtccagatatacgatcaaagtcaaggccacttttggaaccccggacctggtaagggcatccgccaccacatttgccttccccgggtgataatgaatggatagatcataatcctttatcaattcgagccaccgacgctgcctcaaatcagctccttctgagtgaaaatatacttgagactcttatgatcgatgtagatgtcgcaagactcgccataaagataatgcctccacgattttagggcaaagaccaccgtggccaattcgagatcatgagtcagataattcacctcatgcttcctcaactgcctagagccataagcaatcactctgtcctcctgcatcaacacacagccaagaccaatacgagaagcatccatataaactgtgaaacacttaccactctcaggcaaagctatgataggggcgttcaccaacttgttcttcaatgacttataactgacctcgcaatcgttggaccagacgaaaagaacacccttctccaagagtctggtcaaaggcttagcaatgctggaaaattttggcacgaaacaccgataatatccggcaagccccaagaaactttggatttcagagacattagagggtctcttccactccaccacagcagcgacattcttgggatcaaccgcaatgccctcctgattaatcacatgacccaggaaagccacttcagacagccaaaaagcacacttcttcaatttgccataaaacagattcttcctaagagcaccca

SEQ ID NO: 162209 - DNA, 374 bp, Zea Mays
gcgaaggggtaaggagcaaccagaaccgttggaccagacacgcgcggctctgattagaatcgaaccggtacggctcgggatcccttggattataaatgaacggcctagattttatgaggattgatttgctctgaaccgcacgatcaagatctaaaggcactgatccattcacgtgaacgggtatgcgggacaatatctctaccgtccaactcaaatcctacggccagggccctaaattcctcttcccctccaacaccgcgacgaccaccgcgttggccacggcggcgacctcgtcgcaggaatcacaatccagcgctccacacccccaaactcaaattaaacggcgcaacacgaaattggggacatagtttagc

SEQ ID NO: 162210 - DNA, 690 bp, Zea Mays
gaaggtttgaactgacctcaattgcactggccacgacgagggtgttcttgcggtgggatgaaccgatttggggaaaactcgaaaatcgtgagctctagcgaacgattgagggtgggagcgggtgctttggtttcgtgatgacatagcgcagctgacccgaccttcaatttatagagggcttaagcggtggtgctcaatttggccgagcagtgctggcggtcgaaggggagtaagagtactggtgcaacgaaacaggtggctttcaccatggcggctcctctggcgatcaccggacgtgcatagcatggttcgccgcgacgttgtaaagcatttggacacgcggcggacggtagggatgactcaacggcggtgagatcttatctgatcgacgataagcaaaggggaaaagtgcggcggctagccggattggtgtccagctccacggcggcgatgatttttctaccccgtgacgttatccatttaccctgggcacgaatcgagacgccggcggcacgaatagtgacggagagatcatcagcggcgaggttctgaaccttatcctcccggggcactataccatggcgaggatcattcaatgcacctgacagccaaagtttagggcgaattttctctcaattttatgtagtaacatgatcatcaccctttagcaaagttatagctctaagatcc

SEQ ID NO: 162211 - DNA, 408 bp, Zea Mays
ggccaacccctcggcctcggctctcggcaaaaaatcaacaagcacaagtcagcaacgccgtacaccgtcatgtcactcacaggacgccaagacatctcccttaggaataagacggccccgggcttcacaacatacatctcttaggtgtataaatagggcaatggtagttcttccaaaggtagccgaacactcagtagttttcctccaagtctttcgatattgtcgcttgactcaatcagttctagggacttggggactccccctctcccgttgtgcttgtaatctctactgcaggcaccccagtgcgagtaatataagcaccattcctcctctgctggaagtagggtcttgtattgtccgaaccatgataaattgtttgtgtcaactcgcacatcatttagattttgg

SEQ ID NO: 162212 - DNA, 755 bp, Zea Mays
gccgtgggagaacgggacctcgggtatcaatcaccagaggaggacctgaaggatgtcttcaccggggactccgactccggtgacgacagtgaccgccgaaagaagttgtacgtcatgtacggcgggagctgggagctcacctcccgtaggaacgtcaagtccctgcgccgagaggtcttttcggtggtcccgggggtcccgaaggctgctccacatagcggtcgaggagcaccaccatctccttcggggcatccgactgccccgacaacatggcaggggctagtgtactatcgctcatcatcgctcctgtcatcgccaacatgcggctgcaccatgttctgattgacggaggggccggcctcaacgtcatcagccatgccgcattcaagcagctgcagatcccagggtcccggctgggaccctcttgtccatttttcggagtaggcccacagccagtgtacccccttgggagcatcgcactcccggtaacattcgggaccgaggagaacttccgcacggagaacgtcctgttcgatgtcgcggaggttaacctccccttcaacgccatcatcggcaggtcggccctgtaccggttcatggccattgcccattatgggtatttggtcctcaatatgccgtccccaataggggtcctcaccgtgcgtggcgatcgcgctgccgtgcttgcggctgtggagaagctgcatgccctgacggcaaaggctgctcgcccggaagacggagggaggaacccc

SEQ ID NO: 162213 - DNA, 709 bp, Zea Mays
tccaccaacggaaaggctcccaaggcatgcctgatagaaggtttcaggccctgacggaactggctcgccttctccatctcattgtaagccacatgaggaacaaagcggaccatcttgttgaagcccacttcatactctgtgacggacttcttctctttcttgtaggattgcaaatcaatcttcattttctccaggaaggtgaccgggtagaacctcctctcaaactacctgatgaaaacatcataggacaagactcctagtgaagaagagtgagctgcctgcacgcccctccaccagatttgagcctctcccttcagcagttgtgtgccaaagcgaacacgatcaccatacacaatctcaaagacattcatcttatcctccacgtatgttagccaatctgccgcctcgaccggagtaccactgccatcaaaagtgtccaacttcatgcccatccattgcatcagcgaaagaccactgacgggaagaggaacctcagccccgccatctggagcagcacccgcgggaacagcgcccccgggcactcctccaccaccagcaccctgggcagcacccgcaagagcaacaggaatagcctgcctcagaatggccaactcctgctgcatggcctgcatcgcggctaacattgccgccggactcatcgagtctccactaggaacttgcgggctgccccgagccctacgaggcggca

SEQ ID NO: 162214 - DNA, 501 bp, Zea Mays
cgcacctgcggtcaccaaactaggtgaggacccccgccaagcctacggttacctatgtgaatacagtacatctagaatcgtagtggtcagtgcagttgtgggtgagcgattgctcgccgtcacgagctgtcaccgcggagccgctccgcagcatgaacaggatccgagcacatccaattcccttaagtgatagctctgtgtgatttgctagaggctccgctacctagatttcgagttgggggtaggaatcggggctctggtccgcgattgggtgttcctccggcgatgctccgccgtgtgggtggtatgcgccaccgtcggatgcgccaggggggaagacaagtcatcggccgcggattcgtgaatggacggttaggattaagtccatcatacccctttggtcaagagtatctgtgtccttagatcgtgatcggacgttccggtgtttgggttgagctctttaaaatctggtgcattgatcatcaatcggatgggagccag

SEQ ID NO: 162215 - DNA, 735 bp, Zea Mays
ccgaaggcgaactaggagagcgggtccttacccaaagtccggcgtcgagtcggtcggtccacggcgacccgcgaatgcgcaacggcggagacggattgggcgcgctcctgtcaccctcctgccccgtaatcgccaccggaacggaccagggactcgggcgaagccttcgggccgcacacggggatccaattgggtgccgagcacgaaggacgacggtgtctatctatttgcaacaatggtggtagtgggcacggggattccggcgaacagggcttgcgagcaaggacgagggggtcgcggccgtgtttatattcgggcgtccgagaagatcgcgcggcgtgaacgagtctgtcgctcagagcaggcccggtcccagcggcgagcttctcgcgcgggtaggcgagcgacgcgcgatcggttgaaggtgggagaggactgacgagtgggtcccaacggtcacatacagagtgaaaggagcgggcgtgagaggagatagtgggcagcggctgacagttggccccgcgcgtaagggaggtgatgacagcgtgggcccgcctgtcggcgccatcaccaggagctcggcttgcgcggaggaaagaaatggtgggccgaaatgtgggttccgaggcccagtaagctctctttccctttttctttttattttctgtttcatttcatttttaaatctccattttaaattcaaacttgtttgtgagcttcataactgagttaaat

SEQ ID NO: 162216 - DNA, 838 bp, Zea Mays
gggagatgccgaaggaaaccgctgctggctctagtgaaggtggcctggtttatcttaggtacacctatcactacaaaagtcaatttgatgagccgaatgatgactagcttgaagctattgaggcgaccagtgatgagctgctaggtgcttatacgaaggcagaggatgaagtcatgaacactgccttcggcgctcgaggcaaaaggagattgaaaagagtttttgatgtgattgtgttcatttatcctgattactgctttcccattcggaaacaaggagcaaagaggaaaatcacaacttcgacctcttccggtgggccgaagccgaaaaaagttaaagttctgactcgtcgaccgaagctgcactctttggagaagactgctatagtgcctgcttcagagaagatggaaattgagtatgccaaagctgcccctcggcttcggagataatacctgctgcgactgccgatgctattgtcggcccggtagaagaaatagaagcaaagaactcaaaggcagaggagcaaccgaagctgtagagtcccccaaccatgacggggttatcaaaattagcagttgttgttgcaacaactcctaggaaaggaaggagaatggccagcattctggacactgttctgaaatctacgaagatgtcaactcttgtttctactgaagcttccaaggacaagattgaagatctaagagaagtagccattgtaagggcttctcctattcgcgttgaagctggaccttcgggaactaagccagtagagctagcagaggaaagtcttccagagaagctaacatcgcctatacccaaagcatcttctcaaggtgac

SEQ ID NO: 162217 - DNA, 1225 bp, Zea Mays
gccaagagcgtttctaggaagggttgattggaccgttaaactatcagctgcagagtcacattccccaacttccagactctgctgaataaggcaattggccttgagagcaaaagaagagaactatctgaccataaaaggaagttttcaaggtcagtctagcagaaatactcgccagaacaactcacaaggttctcagtttcgctctagaaatcagggtggaaacaactatcaaatgcagcgctctggatagcaaggtcagagaagcaatcaaactcagaaccagcagaggaacaactctcagaccaatcaaaggtctggtggtaattcgcagactcatcaaggaagcgccataaacacacaggccaaaagcaccaacaatgcaccagtccaacccaatgttgtttcatgtgcggcgaacttggccattatgctaacaactgcccaaggcgcaaccaacagacacctcagaggaacagcagccagagaaatgaccagaacacccctgctcgtggatctaaacagaacaaaactccgcagaacgagaatcgaggaagggttaatcacgtgacagtagaatcatttcctgaggatgccgacgtggtgtatggtatgtttcttattaactccatacctgctttagttttatttgactctggagcatctcattcatttataactgagccattcatggaaaaacataacataccaaagtaccctcttaagaagatgctacatattagttcaccgggaggtgatatgaaggccacacactcatgcctccatgttaatctcaagattcaaggaatagattttctagtcaacctagtggtcctaggatccaatggtattgatgtgattcttggatgtgactggttgaaaagttgtgatgcagtgatacaatgtgccaaaggaacaattatgttgacaagtccacaggctgaaagattccaagttagcacatacacgtcaatagatgcaaaaggagagacaatggtaaatcatttggaagaaaagcccctggaaaatatcaaggtagtgtgtgaataccgagacgtatttcctgaggaattactaggtatgccacctagccgtgatatagagttttctattgaattattactcggaactgcacctatctcaaaaagaccttatagaatggatgtcaaacatttagttgaactgaagaaacaaatagaggaattactagaaaaaggtttcatttgcc

SEQ ID NO: 162218 - DNA, 351 bp, Zea Mays
ctccgttggtagggtatagtggtcaccctaagtcgagtaagcgtgttgatttcaagtccaatcgaattgaagtcagctgatagtcaagagtttgaatgcctttgaaaacaaaaactttattgatgatggattctccaattatagagtacgatgttgctctgatagcttttgaggccttgctaagggtaaaactttctaagatgctctatgttccatgagttccccacttccgtgccatccatttgagtaagccggtatgatctcggccgagtgacctctgatacaatgaatggcgcttcccatagtggcgacaacttgtgccgtccttcccccattagaattcggcgaagg

SEQ ID NO: 162219 - DNA, 717 bp, Zea Mays
tgcctggaacacaaatcgatgaaaagcacccaacaaccagatgataagatgcacaggtagaggtttgtggcaaaacaaacctgccacacggaggccttcgcaagatctggtttagaaacgctcttagcactgaccccatggaatgccggctagaggcctgacaacgcgggcgtggagcaggggcagtatgaggcgaggcggctctctagccaccgtcggcctcgtctctggtaggacaagggggtcccgtggtagatggcttcaacgtgtccgtgaggagaaggatgtcctctgggtgtgtcgacgcgggagcgacagagcaggcagagatagaggagagtgggatgcgggcgaggctaggtggtagaggtggaagaacggatggatggacggtgggttgaattttttagaagccaaagggttattttgtaaaatacacagggcacgtgtcaacgctgaaacggctgtgcctccgcgaaatgtggtcgtgcgtcgaaagggcttcaacttttaataacagagattccttgtcctgttactgctatactatgtgcgttcggtgtggccagctcaacactatgtcgtcatggcaatgtcgcgatggctagtttggtgacaaaaaggatcgaagggtggttgaggaggaaatgagctaatttcctcctctaatccctctcaactactttgaggaggaaactagccctatgagtttttaaa

SEQ ID NO: 162220 - DNA, 570 bp, Zea Mays
ggaaatggttaaccctatttccctttcagcagcggcgaaggaagcggtgacggcgacggcgacgaaggcagcagcaggggcagtgacggcagcggtgaaggaagcggcgacggcaacgccggtagcagagcgccaccgacataagtattattatagtatagtagtagtagtggtagtttagtagtagtataatgtagtttaagtagtaatgtaatgtagtgttggatcgagcggcagtaggctgaatcataatgagtcggtcttccttttgtaatgatccccaactgatggaatgatgaatgaagcctattttcatgccaccttgctgttgcgtattctgttcttttgtctaacgatctgttagctttctagaggtaatgatcgagtcatgttactttgctgcgaccaaaactctcctgagccatcggcctatccttctgcgcccaactcagtgtaccaacatgtacttttgtcgacgtcctcttggcccctgaaccctagttcatgttttctcctccgtcgctttccagctttctaagttcccacatcttttcgcgctttgtccctaaa

SEQ ID NO: 162221 - DNA, 744 bp, Zea Mays
ccttcttttctctcttctccttttatggcatgcgggcccgcatgtaaggcttctaccctaaatcatcaaatcacacgttataggaatacttctgctgcgaacgtcgctgacgtttctctggagaaaaaaaccgccgcttcacgcctgctaccccctcgcctctcctcccctcgccatcaaatcatcatgtcacttctccttccctcgtagcagccgtttcctactgtttcgtctctaccattaatggctgccattcgcaccacctcctttactatcctcggcgtcatcctagctcccatgcctggcctataaatggtgatgcgctcgttctcttcttcctctttgcctgtgagccccttcccttttcccctacttgctagattcctgcgctctctcacccacaaccactgcaacgcgcagcagctgctagccatagcctgctgcctcagctgctcgtcgtcaattctgtttcttgtcgacgcctcaaaaactcgtgccatcgtagccatgacacgcctcgacgagtcactgtgccccgtttggagccgctacctaccgccgttctcctgtgcccgacacctattgccgtcgagatgtctcgcttgtaccctccgactgcctggctgcactcgcctcgtcgagctccctactactgcactcgctacctcaccgagctccctccccgtcggtgttgaggatttccccagcgtctccctcaccgaagttccagctccctgctcgtcg

SEQ ID NO: 162222 - DNA, 370 bp, Zea Mays
gccacgctctcctcgctgcagctgctcaacctctccgcctgcaacgtctccggcgccatcccgccctcgtacgcgtcgctctccgcgctgcgggtcctcgacctctcctccaacgcgctcaccggcgacatccccgacgggctcggcgcgctctcggggctccagttcctgctcctcaactccaaccgtctcaccggcggcatcccgcgctcgctcgccaacctctccgcgctccaggtgctctgcgtccaggacaacctcctcaacggcaccataccggcctcgctgggcgcgctcgccgcgctccagcagttccgcgtcggcggcaacccggcgctgtcgggccccatcccggcctcgctcggcgcgc

SEQ ID NO: 162223 - DNA, 1153 bp, Zea Mays
atttgcttttaacagccgatcaatttcctccttaattctaccatggatatcgtagttaaatcgtctaggtggctgcttatggggcctaaacctatgcttaattggtagcctatgctcaaccaactccctgctcagccccggcatctcagtgtaatcccatgcaaaacagactctaaactctctaagtaaatcacatactttttgcctctgatcagctgttaatttagcacttacaaatattggccttggcgcccttccgtctccaatgtccacttcctccagcccgtcaacagatgagaatccatgtcctaactttccaagatcatcaaaatcatctaccacttcactcatattgtttttgcttaaacaatatttttctattctctcctgcaaccattttaaactatcatttttattcatttataacaccaagtcattgagtcgtgctatgtcagccggctttacatgaataggcacaaaactatctcgctctacactgatataatcatattctgacaagtctcttcctgtcaagcatcgcatgttaccatgctgccattccattggtgcctccatcagcacaacacatacagcagtgtctgcctcaatcacctccacctgatcgcctacccactgaaccaaaaactgatgcaaagtagatggcacacagccattagcatgtatctaatctcgccccagcaaaacattatacttccctttcacatccaccacaaaaaaaggttgtcgggatagttttgctgtctacagtgagttcaacagacataatcccttttgcttgtgatggctcccctgaaaacccactcagattcatatttgtcttaattagctcaccctccttgtaccctaatttggaaaacacggacaacgacatcacatttacacctgctcccccgtcaatcagcatgccccccattggcttcccatcaatgtgaccgtgaatatatagtggttttaggtgagacccctgcttgtttgatttctcaaacacagcacgctcagcccccaatgctagttctgcaatatctccctcagctgccctaaactcagtaggcaatacaaacaccatgttaacatccatacccactaggacttcaacacttttttcccatctgaatcgttattgctactgtag

SEQ ID NO: 162224 - DNA, 538 bp, Zea Mays
aaaaaaaattaaaagaaaaggaataggcctggtagcctcggtttgggccaaattcttgctgcttggcccatctccctcggcccactacccagaataccgcccgcacgcccagccatctgcgcattgctctgagatatcactgtcgtgtgggtcccatttttcaacacagctgtgcaacgttttgtatcactgccaggaaggcccaggtcaccaggaccgtcttcctcgcatcggactcacccaaaatccatgggatccggccaacaaccttgccgcaatctacgtgtacctctcaccagccccagctactatctcgcgttctataagactcggccagcgcctctcgtcctaggaatgagaaccctgggcgccgtcaatcgtggccgcactttcctccaccctagtattgcctggagggagttccaccgcacgccactcctctccgcgccaccgcattgccgccctctagcgtccgggggtactcttggaggaccggcggtgctggtgcaaccaagtgtcaaggctgagaaccgaccca

SEQ ID NO: 162225 - DNA, 895 bp, Zea Mays
aataaagcacttctcccaaatcaatatgggagaggggattttaaacaacagacataagatagtcatcaaggtaagatggagagacgacgaaggtaaaggtaataacaaacaacaaaggatggagttaaaaactcgcatgcgacaaggaaggggatacgaccaaggggaaatagataaagtgcaacgctcagattgagatgaaaagaggagattttaaagggtcggtataagataaacatcaaggtaattaagatatataggtgataaggataaaagtgatgatgatgaaaagcataatccatggacaaagttaaggcaagactcgcaaagtatcgaagtggggataacaatcaaggataaaataagtgaggttatgacagatgagttgaggtaaaaaaatcattaccgaatgaagttacaaggaattaacgagatcaccaaggatgtgcaaaataaaatgactgctcatggatcatcgagacacaagggtggtcaagggcatgtaaaatgaaatatcttaaacggaccttgagatataaaggtaggcataaaaaaagatgagagtatgaaagatttcaaggagatgagcataccaataccaagagacaagaaattgtcgaaagatagcgacttaacaacatacgaggaaagggtatcaaaagacaagaaggtcatggacatataactgaaatgtttaagtaggcggtagaaatttagaggcaagtattttaaacaagagtattaaagaattcagggatctgagtatgtcaataccaaaggactagagtttgccagatggtagcaatttaatgacgaaagagggaagaatccccaaaagacaagaaggtcatggttgggggggcatctacaaagatgtcgcaagcacaagagcgag

SEQ ID NO: 162226 - DNA, 855 bp, Zea Mays
tgaatttcaaatccatgtcgtccccttttgagctatgaggtgcatgagcaaaaggagccctgaattggtgataactagtgctctcataaaggcaaaggtatggaaaatggaactgtgcaattttattgattatcttgaaattccattgatagtgatcatagctgtgttcttgcatttcattggtaatatcgtggcttatgcattagaatgttgtttcttttggtgtacctaaagaaccttcttaactatgatgtgcttaagacatgatcgtattgtctttcaattggtatatgtgctccaatgatagttaagtatgaagcatgtctaagttgcgtgtaaatgttagacttcctgtgagtatccaattggcttgtgtgccactgaggcatgcattgttgtatttagtcaacctttcatttagccttcaattgatgttaagtggcttttcatttgatattcaaattggcatctttgtgtgatgaaagtgatagagtatgccttgaccaaggtatgttgtgatcccctctagttctaaggaagctagaatgtgcaaagtgcaagtcattcaaatacttgatgcacaacttgatggggagcacacataacttgtgtcttttgagactaactgtttcttgagcgatcttgtatagtctctaggtggaaaagagaagataagcaagaaatggagcaatctggacttgggtacctctgtaagtcaagaaattggtatctcaagttgtgagtaagtgcatatctttagattgctcatgctctataatatctggtgataatagatgcttaaatatcatggagccatgatattaaatgaactttgcaattggtatctttcaattg

SEQ ID NO: 162227 - DNA, 960 bp, Zea Mays
atcaatcaaataacgatcgcggtgtactaatactgctggctacgtaagtactgttatatgatatgatttcctggccgattaacaccgcgcatatccaacacatctcgtaccgccggtaggcacagctatctatgatcgtatgtatgtatatatgtatgtatgtgtagtcagtggcagatctacaccccgagccacccgtgttggaataataaaccttgtcacgttagttacgtagtcagtaagttaggtgcatgcattagttggtttagtgctgcacgagctccagaatttgtggacgccgtgcgtagtgtggctgtggtggagcgagtcacgcggtcacccatagacgcggatgctttcgagatgtacgaacgtggggatggacgcgctaaaatcgggcatcgtggagacactcgagtcttccctgtgtaatactttcagttgataaatatgcatcagaaaacgtcgcaacttagcgcggcaaaaatctctcttgagtccaatacagtgtgcatgtgtttgtgaggtccagtcttcttctctgaagccggcgttcgtaggacagtgagctttcgtatcccaacatttggtaccggagccaagtttgatacgtcatgtcagctccaacgggagaccgttccctgactccgcctcgtcgtcgacaatggagatcgccgccgcgtcgacgcaggaatggtggcgacagcgagcgagtggtggagaggatcgtggagcggatctcatcggctggacctacgacataccccatgctgaccaagacaaactacaacgattgggcgctcctcatgaagatcaagctgcaggctcggtgcctctggcgggccatcgatccgagtgatgacgtcagcgagccggaggataggctggcactggacgcgttatgcagtgccatcccgccagagatggtgtctacactcgccgtcaagcctacagcgaggc

SEQ ID NO: 162228 - DNA, 741 bp, Zea Mays
ggaaatcgttgcgtgcagtccaaaacatcaatcagtaaatttcagtttctatacaattcaagaatttgccgcgttctagatacttgaattattctaacactttgacaattgttagagttaaaataaccaagtgagaactaacaagtagacttactaatttttatccgtgtcatttcaagcactaaaagtaccatactcaatttacaacgcattctctatgacaatcattatcgaagcgcttttcacccaatagtttgcattttaacttagacatcacgtgagcattactaatttttacccgcgattataaccatgcgcaattgggctacaacatcccaaacgggtgcgagaaatctagtttctagttttaaccccatgattattccattaatcattttaactacttaatcggcatcgaccgacttaaccttcatctcgacggtccgagcaccacaattcacgaacgtctacctagacatctagcatcacatacagagtctactacttcacattgcaattcatacagaaccacaaagtgacaataataacacacaggtaatcgacctttctctacgaccttcagttaggtcgcccacagacgacatgatgactacgaaggcatgtcaccatttcatcacacccattcatcgcctatatgcgcactaattcttttcttgcgacacatgcactcaaaatcaatccacactacacaaaatacacttatctcttatttatgcgcag

SEQ ID NO: 162229 - DNA, 537 bp, Zea Mays
ggggtatgcaagaggattataagaggctagcatgtgcatttgataaatccgatgttgctaattttccatcgcacgagggtaagactaggaaaatacacgagattcatcgattgcaaattggcaagaccaatacctaccactttatgggatgccgatggacacatatcctagacaaccacaaccttgtgcgttggggtaaatccaccgatctccgcacggtcggaccatccgcgcctgagtgtggaccgtccggagtagtggtggtcggtcccattttttgaaccgagttaccgaattctgctccagggcccccacattttgtgcaaaccctaacagaccatttcggaccgtccgcgcatatggtcggacagttcgaatacatcattggacggtccagatataccccccggatagtccgcgcacacagccgaacggtctacatatcagaccgaacagtccggcacggaatatatagaatgtaatattaattatcatccctcatctttacacccgtctcaaccaaacctcctgttacac

SEQ ID NO: 162230 - DNA, 378 bp, Zea Mays
ccgagaatctctcccccttttatcggttgtgagctctgaaagttgaatatgccctgtttccctccaatccatccagttggcagcttgtttgccgcgtggtggagttcgtactgatgtaggtgagttggtccaacttttcgattttatatgggtgttcaactgagcctcttatagccctcgttttatccgcccgccgctctggaatgtaatacactccgaatttgatgtgaacacaaactctgtgaattccgacatgtatttatgatccgctgtgctggggctgccttgtgcaccgaatcagtgatcgggcaacgtaatacaaagagggagcgcttgatcatctgagctggttttgtacagaatgtcaggtatagccag

SEQ ID NO: 162231 - DNA, 519 bp, Zea Mays
caacactcttggataaggtgcctacaatcttcgccctggcgcggtcacgaatacatcctaagatttcttcatcgaccccaccgaagagtatggaccccggttggtaaccacaagacatagcgaattcttttaactctaacttatcttcctcagaaagttcctggccacctaggtgccgaaggtcaaaatccttctcttccgaaggggcatcatccattttcttccctttatcaggcactacggccatgcttttctctgcaatcacatatgccttctccgcaaccacatctgatataactttgtcaatttctgacattgtggctgtgaattctttagcttcggctccgccagcatcttcagcgtcggcaggaatcgctgctttcaccaatgaagctgaaggcggcgtttgctcaatcgcttgcattacattcacaatccgtcgcttcctcttcctccaaccttctcctccgtggccgaaggcattttcttcttctgtaaaagatttgttagttccaaccc

SEQ ID NO: 162232 - DNA, 429 bp, Zea Mays
ggatgatgtaatcaatgctctcttttaaagcttcgggagcaggagtggcaaccttttcaaacgaaatttgctctgtggccttttcttctgttgccttttcttcaaattctgcaggcttcgtctcaacaggcaatgtgggccctgcctcggtttcagcctgggtttttgtagtctcaacttctatttacttagtatctgctttgggatgtgttttgttagattcgacaaccttcccagtggaagcgggactaatggagtcggttgtttctaaaatatctaacacatttaccatcctccttctcttaggagttgtggtagaactattttctgccttcagcactgttgcttctgttgaaggacttaaaatccctggcatctttgttacttcttcagtttttgacctttcagccttatctttgtcaaccttca

SEQ ID NO: 162233 - DNA, 1080 bp, Zea Mays
taaaaatccatttataatttaattcctctggttttatactattatggactaggcctcaaataccagagaaggtaggggtcgcggcgcaagataccccagacttagggaacagtattggtggacgacgggttgaatctctatttaccaagggctcttatgaaaaatgtgttcgtgaaggggtatcggatgcccacagccgtacgattagagatcgagcgcccagatcggccctagtttgccactaaccggtacgtaatctcgtgcattatattagggatcaactgctaggatttaaaataatggtttagggcacacaaccgaccgatcgccatccaacggtgtagatccagcgactgaaatggaatccgatcttctaatttgagtcgtcggttggggatcgaacgatggccacagtttggctgactccctggccggaatagggcggcgctcgcaccctggccatgacggcggccatggccgagcgagcaatccccgcaattagcatccgaaacccgatcaatcatgatgctacacctaaggggaatgaaagtaaacgtgggcatgggcttcgtactgggatttgcattgcagaggcccagggctccggtgatgcgcggattggtggaggcgtggttgaacgacgaagaattccaagtgctgcgttaaccgattccacccaacgatgcctcgacacgccacggcacacccagacggaccaccacgacgggtttctagcgacagagcacgaactaaccaagtgacctgagagcggcgcggcgatggtcctaccgacgatgcggattccgcggcgcgagtatgcggaggattcactggagcacgcacggcacatgagggaaggaagggtcagcgcgaggcacgatacactttataccacggtgcgggtacttgccgtcgatgaaaaccctggaggtgggtgagctccatgtcgagatcgcggggacgatggcgcacggttgaggagaaatcgctgacgatgctggtccaccagtcagcccaagcatgcgcgcgccctacggataccgacatgtgggcccgcctgtaagccaaactgggaagcgc

SEQ ID NO: 162234 - DNA, 348 bp, Zea Mays
cagacggcaggtgagtaggtgacagacaggtaactaggtaagaaactgttgacatcgaagggtgagagtgatgtaaggcccggaaagactttaaaagggccgagacttggaccacttgattgcgcgcacccatacccatgatgaggccagactattttcctcgctcgagagggccggattaaaatggtgcacgcccggcccatgagggctttcgattatcttcaccccctcccgtaccgtactcctccttttctcccgccactcatcatctggaaaacaagtactacggggcaggactccaaacccacacttccaaagccgaagcatgctgttcgtgcagcgaacatg

SEQ ID NO: 162235 - DNA, 300 bp, Zea Mays
gacgagttcatgacaaatggaaatcaaatacaatttcaaagacaatctcactggccctaaagctttttgactatagagaagtccgtgcataatggaaatcagccgagtctcttgagtcgtgacgatcgaagatcacagtaccaagataataccctcacaagataacccttcttgtcagttgcatgtttagttccggctccgcgtacttccttctgctcgagatcttgcatactaacgacagcgcctgctttgctcttctcaaaagaaaccattctgttatcagaggcgttcaagtggcgt

SEQ ID NO: 162236 - DNA, 700 bp, Zea Mays
gaaatttcttccagacgctcttcaaagatgactttatttctatttgtggttgatgtcttgactactaatagttttgttgactactaatagttttgtgaggtgcacggtggtagatccaatttctgtgaattgtgtttcgatttgttggattagttcaccttaatctgcttaagaatactcttggtgtgatatagggtggcacgtatattacatggatctatgcagtatttcttactagtccagttatgtaggaggccgtctagttctacaggttggtttccatagtatatgaccatgttatgttgcatggcagatatgtgaacgccaaaagggtctaggacaatgggtgagtgattttgttttgttctgcaactatttatcttaatgttcttcaacaaaccattgagttaatcaccactgattgtcacaatgatataaaagtttgttgtcagttggtttctgtggaagtgtgggcttcaactcgttaagataaaaaatctcaaccttaacagttgttatggttcatctttctccaaatttttgtgactttgaatggagtgcttgagatctgtctgttcttaatatgtgcaatgacatggctgttgaattctgcaataacctttgtttaattctattgccctagctggcttgaaattgatttattctgttattcggttggattccttaaagataacagtag

SEQ ID NO: 162237 - DNA, 479 bp, Zea Mays
agtgcgctcgtccggttcctgtaagataatcgggacgtattcgcatggcaacctgtggatatgccgggagtcccaagagaacaggccaagcacaaattgaaggtgtatccacaagcaaggccaattcaatagaaactatgtcgtttcacgcctgataaaagggaagctattcacactgagttagctcgcttagttttagcagggttcattagggaggtactgcaccttgagtggctagcaaatcttgttcttgtactaaaaaagaataaagttgattggcgcatgtgcgtcgactatactgatctcaacaagcattgtccgaaggatcccttcgggctccctagaatagatcaggtagttgactcaaccgctggctgctctatgctctctttcctagactgctactccggatatcatcatatcagcttggcaaaagaagatgaggagaagacgctttcatcacaccatttggagctttc

SEQ ID NO: 162238 - DNA, 516 bp, Zea Mays
agagctgatcaaggactacgatttggaggtgcattaccatcctagcaaggccaatgttgtggctgatgccttaagcaggaaagcttagtgcaattgtatgaacatggatgcaagagtcaccaccctatgtgatgagttgtgcaaactaaacctagaagttgtttcctccggtgctttaaattatatttcagtggagcccacattacaagagcaaatagtcagggcacagattggagacaagggtgttcaagttattaaggaaatggtcgaacaaaaggtggataaatacaaatgtttccgtcaggacaacaaaggaatcctatggtttggagaccaattagttgttcccaagaaccctgagctcagaaagaagatattggatgaagctcacctttcaaaattctccatgcaccccgacagtaacaagatgtatcatgatctcagatctttatactggtggaccagaatgaagatggaaattgcgaagtatatatcagaatgtgacaccttccagag

SEQ ID NO: 162239 - DNA, 828 bp, Zea Mays
gggtgaaggggagagagaagagcgatcggatctggattgaaggtctgagattagatccgctcggattaaacctaaaccatcagatctcggacggacgcccgagatccaacagtcggggccagacatgtgcgcggtggcgccgctcggtttcgtggcgagggctcgccggagacgaggggggcggccacggtggggctctaggggcttagggaaagggtcagacacatttagggagacacggcgaacacgaccgtgggcgtagaaccggcacggggtaccagaggacgcagaccgcggtggggaaggtcccgcggcggcgcaactaactccggtgagcaattgtgcgggcaccagggcgatacttggggaaataaaagcataggaaggttgctcacctcgagtgcgaactccgggacacttggagaacggcggaggtgcggtggagcctcgggtcgacggtggcgggctccggctgcgcaagaaacgctccggtgagcgtggaccgggcaaaccagggaggggaagggcaaaccagagggttcccaagtagctgacggcgaggcgaaactcaccgaggcaacatacggggcgcgggctcggcgacggtcgtagaacggacggtggtcgacggtgagcggcggcagagctatctggtcgcgtgcgcagagcgagagagggggtgagagggttcgactgagggcacaggtgagcgagggaaagtgggcgagcggggcgtggggctcaaaaggggcgaggacgcgcggtcgtgggcgggaggttagggacgagctgacaggtggggtcggtaggacagagagagagagagag

SEQ ID NO: 162240 - DNA, 405 bp, Zea Mays
ctgcacctggcgctggatctccttcgtctcatctggatttgtatggtacagggcacggttaggaagagaagagccggggatgagatcaatctgatgctcgatgccacggagcggtggaagacccgatggtaagtccgtgggaaagacatcagcatactcctgcaaaaggttaaccacatcagggggtatatccaaagacggtgcatcatcaagcggaacaagcatacacgagcatacaagtgcataacagggcatatgagcctcatgtaaatcatcaaaatcagcatgtgtagcaagtaaaacatgagcattcaactttatttcagatgtaacaggtgcggctgatggagatttgacttgttgtgcaattttagcagcccttctaagatcaacttacaaaattag

SEQ ID NO: 162241 - DNA, 383 bp, Zea Mays
ctctctcaaggagagagggacaaattccatcttgactgaccatgcctcacagcatgcttcctggcaaacccaaaactacctttataactacccagttacggagtagcgtttgatagtccctaagtaggtcaatccacatcttgagaacatgcgacaatctaaggtctaaggacatagtatacatgttgcaaaaagagaactatattacaatatctcacattgggtcggtccagcctcatgtcatacattcgcccacattattagttcgacatctccatgtccatgacttgtgaaatgtagtcatcaactaatatatgtgctagtcatcgactctgaccagggacatcatttagaataaccatacaagtaaagaatctcacaaa

SEQ ID NO: 162242 - DNA, 750 bp, Zea Mays
gtttcccggagtagtattgatgggtatttaagcccaaaaaattcggacacccctagataccctaatcacttcacacgatcgcaccactctgttctcttctccctctctccctctattctgttggactctggcgaggaagactcgatgtcgacggccatggtggcaccgccgtggggctcatgctagctaatgaaggtattttctctagcagcttggaagcacaaagcctccagcctcaagaaaaccctagccgccacaatacttgggaaccgatctccctagtgcactgagcgacgagagaagctgtggtccatggcgactgtagactgaggcataccaacgaagcctatctctgatggcccctccaacccccgtcttttttactttttagaccttttgcgaaagttattcataactatgctatttttagtttaaattcataaaataaacctttatctcggcgctatcattattgacactaaagttattcatgtgtagtagcaggatgtgaccgcccaccccgctgtccgagaagaagcgtagctgcgcgtcgctgtccatgtcaacaggcaacaaattgatgaatggaacagggggcaacacactaccatgcctaagcttgtatagctgtccaatagctgcttatggtattttaactagctagctagctagtattttgtctcgaatactattctcacaggatacatacattagtttttaattcttttttatagcatttttaattatttc

SEQ ID NO: 162243 - DNA, 450 bp, Zea Mays
ctctcgcccgctgtgacagctcggggccgctctacacgtttcagcattcttccaccggcgcctctccacctcctgtcctggtctccaccacctccaccatgtggcatcgtcgtctcggccatccaggacccgacgtcatgaccaagctcactagcagtttacacccttcatgtagtaggggacgttttgagggcctctgtcatgcttatcagttaggccgccatactcgtcccccatttagtatttctagttctcgcgctgagcaggcttttgatttgatccattatgatctctggacctcccctgtactcagcatttttggatacaaatactatttggtgattttggatgattattcccattttctttggacttttcctcttcggttgaagtctgatacgctccccaccctcacccaattcttagcttgggtttccacccagtttcgtc

SEQ ID NO: 162244 - DNA, 682 bp, Zea Mays
gatagggaatctaatagagatagcctaaagtttcaatggtagaatgagatgatattagactggtgttatgttgttattgaaattttagaacatgaaccttgatccatatcaacttgagatcattgacccattagactcaacatatcaaattcataatattcccgtcccttagatgtatacatccctttttaaagtgtcgaccaacgatccatgaccctgctcctcaatccaatcgatccaggaacattttgactatggcccagtcccattcttatcgacactgcctgatccagtccgcttcgagacatgtcgcgacactcccctgcctcgcttgtcatcctcatgacgctagctagctcggcatgtccgatttcgttcgtcgcgatgatgtgacccgtccttggaggtcaacgagctgtcgaaccaacgtgccctatctttcaactagagacgtcccttgacctacccctttctcagcacacctgcccatcgaagagatcaatattcgataaggtacacccaatttttattaggctagtaagaacttaacagtatgtttacttcttttatttatttatttatttgaaattatatcgtgtattgatttaaaacttgaattcaatgcaactctagtttttacgatcttttgcttgatttgtcatgtggttttttggccccccat

SEQ ID NO: 162245 - DNA, 855 bp, Zea Mays
catcaagggaagatatagagtttacaaacgtaagggtcataacgaacaaaggcacaacaaaagatggagttaagacaagactcgcaagtggtaaagaagaggatacaaccaaaggccaaataggtaaattgccactctaaaattgagactgaagagaggagactttaaagagcaggcataaagataagtatcaaggtaattatcgagagatgacaagggttaaaggtagtaaccgatagatgcacaacaaaggagggagttgagacataacttgcaaggcgacattaagggaaagcaatcaagggagagataggtaaaacaccactctcaatctggtttggaaaagatgaggcttttatgggtaggttcaaagttagcatctagttaaagacataaatattgcatgggttaaaggcgataacaaacaatggtgtaacagaagagatagaggcatagaagaaccaagggtacaagtacaacaaagaatggagttaagacaaggcttgcacgtggtaagtaagaggatatagccaagggtgacataagtaaaacaccactctcaaattgagatgggagaggggagatttttaaatagcaggcatacgataagcatgaaggtaagatcaagggatgacaaaagtaaagggcataataggcaaaaacacaacaaaggttggactcaagacaatactcgcaaagtggcgaagtaaagggaaaaatgaaagagtaagacatgtaatgttcgaacaaaatatttgaagtgaaaattcattgttgagggaagttataaggaaacaatgagatcaccaaggatgtgtgaaataaaatgattgctcatagatcatcgagaaacaa

SEQ ID NO: 162246 - DNA, 545 bp, Zea Mays
tattatctttctgctctattctcgtgttggatatacagtagaaagtcattaaaatgcatgttaaggctacattgtactatctgtacatacttaaatcgctctaaatatttatattatgttgagcttttaggctcacgtcgagcgattaaattgtacagtgggtattcggacacgtcgatcagactacgttattaatcggttgagttaaggcattggctgagcattggctgcgccctggcaacatgatgcagtatttgtgtcatacgaacttggctgcgtcatgtgattgctatgtcgcactctagttttgtcggaccgctccggttgagtcggaccgtcatcaccgagtcacatatttttcgcatgccctgtaggcactgtccgtctgtcgtgatcatcgagccacaattgcgcctgttgcgcatgttgcatggacttatcgtgtaccccgattaccgagccataattgtgtctgttgcgcttattatgaaggcttgttgtgttgtcgtagccccctgatggccgtacatgtgttgacaccagac

SEQ ID NO: 162247 - DNA, 602 bp, Zea Mays
tgtagcgtgtcaatgttcagtcaggatggtgaggaccaagaatgtcaccccagtagggggaggcgatgaccaggaccctatttgccccttcagactggacaagggaaagtatgtctaccttgagcagcagggaggcaagaagaagagaaagatggatagagctagtcgagcagcagtagcagcagcaacaactgagagagcagagcagggaggccaattgaggatttgctctaatcagatcaccttccgtgtctgtcgcctctcgtctcagactcgctccactccagctcggtttgacccctcatctccagtcaccactaccactccaccttcctccactacgccagcttccgccactccagtgcctatcaccacaatcgctacgcctacagcctccaccacacctacttccaccattctcactccctctaccactccaccaattcctccacctcgtttccgagagcgtgacaagatagaggtgcgaccacttgctgaggatcctcggctgtctgaccttcagagggccactgctgccaaagtttgtcggttcagacgttttgtgcttgcgctctcttctttacatttatgcgtgttgttgc

SEQ ID NO: 162248 - DNA, 1314 bp, Zea Mays
ctcaggtgatgataattggtgatttttgtgcttccccttttttgctttgctcaacagttttaacctaccaccttgcttattaaacaggagacatatttttactgatttccgtgtatttcttctatacagctatttgcagaagttgatgtgaagctagtcttcaaggaaatttcatctaaatatttatgaaagcgcattgtagaggtattgcttgcacttgtcacctaaaatttcccccccccctttcttacgtgatcaatagcaggttgcttacttctttctattatatcgacttgcttgggttttttctgctaaaaaaacctgttacttgttagagatcaagctttatgcccatacttcttaattgcactgttgtggtcattgcaatcatgataatatctatcttgaatcatcatggattttcagtgtctgcatttattcggcatacatatatatggttacgtctgtgtaaaaacaatgaaagatcatatgtactttctacttcttactacaaaggatctgactttcttcctatatgcgcattgtgttttcaaatgtccctttgaactccttctgtagaatgtaacattgttgtccagcaactggaagccaatgcgacatgtattaactgccactggccatccaaaagtaaagtgaaaacaaaattgtagttgccatatttaggagaaaattctgctatgccgaaacatgatattaatgaaactaataaggtcagttcagaataggggtcctctcacagtctagcattgtgtatgtgcgccaatgcctgctatacatggctttgttcttctattgtgactgattattgatttttctagtgagctacaacattctgtttggtaatcacagttccttgggactttcatgtgatttaatatggaaatttctgtatggaatatcaatgcctcaaatttcagggaggaaagcgaagtgatggacggagtccttgggaacttcggcccatcaactctcaatgtggcttacttccaagagctcatggtagtgctctgttcacgaggggagaaacacaggtaaggtaatacacctcatttgagagtatgttgtatctgtcatctctgattgtcatagcatggcatgtctcgtggttttatttgtcacatatgctgatgttggtgtcttgctgatctgttcgatacctgatgatgtctacagaaatttgcgtgtgtgttctatttatatccatcccagttttatttgtaagaatcctactttattacatcaaacattaactgttgcaaaacctaatttggtgtgttttattgtggagtttat

SEQ ID NO: 162249 - DNA, 420 bp, Zea Mays
attcccttcctgattcttctctgtctccggtccggtggtccgctgctctgcgccttgtatggtcactggctcactcctcactgcctcactggtgcagtagtgcccctgctggctgcttggacatctataattttattctgttttcattttcctcccattctcgtcctccttctaacctgtccggttgcctgactttctctggtgctcggctggtccttgcttgctgttgctggtcgatctgcgcctctggtgctccggcttcgaaaggtatgtttaattttagcatttaattcttgtaattgtgtggatagttgctttgaaccttgtcactggctcactgactcactcctcactgcctccattttgttgctttgaaccttgtagccgttgaggtagccggagccgactgtacgttgtagc

SEQ ID NO: 162250 - DNA, 562 bp, Zea Mays
tgttctaccagttcatccacggtgatgacgcgtaccacaatgcgtgcttcaagattgccaagctaagacgacgagctgggatgggtttctgggtaagctctgtgaaggtggtcaaccatagccaacaacaagaccatgctagtgactaggtgggctggttgatgagttgcccgcagcgagacagtggaggtgagcactttaaaacatagttttgcagttagctttaccagattaccacaaaactatctggtggtcacgtatgccaataatcatgtttctagcatatgccagctcgtgatgacaagctcttgtttatgtagcacatggtcacatgctcatcttttagtttttggcatgccactaactggtgtctcaaggtggactggattgttaagtggagcagttgagtcttacaacaagccatgagaagcaatggccgtttttagtgttccaccgttccactcatcattggtaccttgagatttgagagttgtttagtgaacatgcttggtatgcgagtaatttttcatttgattattgcgtctggtacctcctaccattg

SEQ ID NO: 162251 - DNA, 309 bp, Zea Mays
atgtggcgtcgccgcgagaacaaggaatggtcgaggtggccgacaatcgagagaggacgtcgtggccagggtggccaagatgatggtgccaagtggaggctggaacagtggagtcaagggcgtagggtgggacaacatgagcgaagaaaggtggggcggggaagcgggaaagcgaatggggtagagggggccagagctatcgcatcgagcaaccacaatacgagtggtaagatcccatgttgtgagtctccaaggatcgaactccatagagcagcagttgttagtagtgaagcggcaggccgagagaag

SEQ ID NO: 162252 - DNA, 1026 bp, Zea Mays
aagttacttgccgtgctaaaggcttgggaatttctactggctgcattaattcaaccattctaggcttatgaaaagcttaggttcgtgatcaattcagtaagaaatgactttattctcctttggattggggatcttgatctgttggttactatagtagtagcaggtttcccatttcatttttcccttttcaaattccatttatatctgtattatttgctctgacatgcagtccttttccttagatacgatatggatccatggcaaaagccaattccagagtgcacttcaataggggctgcaaatgacaagcaaacactttaaaaagatctatgggacatcagtgcatttcaagccatcatcctgcatggtgcagacctataaccaaagtatcagattttttatagcatttttaaggaaataaggagctggacagtatcctactggtaacatgacagttttaaaaacatattgacatttcatttcaataacctctttaatacatatatatgcagctcactcattgctgtttaacaattgtaggaaactcccaatgataaaggtaaagagatcgagcctcctcttcatcggttagaaaaacagaaaacgaaatcaactgtgctcaactgcttttgttgtcttcagtataaacagaacattgtagttacttctctaaaattaataatgtctgataattaaacccaatattcattgaataaacaatagtaaaaacatatattcagatgcgatgaagccccaaaaataaggtgaatgtcttggctatcgtctcccttccgtctcttactctgtagtactcgcttggtttgcccaatggatcaagttaaaatgttaaaaaaataagcaaaagtagcagctctctgcctgtgaactccagtatcaactgccatccaccttgcccgcagtctgcggctcggcgctgcactcaactaccaccttctcccaaattttcactatttatttttctaaatgttatttatatcttcttttttgttctttagtttagttcat

SEQ ID NO: 162253 - DNA, 366 bp, Zea Mays
gcggagttctcgtataataacagccatcaggccagcatcaagatgtcaccgttcgaagcattgtatggacgaaaatgccagacccctctcatgtggtccaacgtaggggaaaaggcactagaaggacctgcctttgtcaaagaggctgaggagaaagttgccctgatccgcagaagattacttgaagctcagagtcggcagaagagttatgcggacaacagacggagagaactcagatttgaggaaggagacttcgtctacctcaaggtctccccgatgcatggtgtcagaaggttccaagtgaaaggaaagctagcaccgcgattcatcggtccctatcccatcatcggcagagtaggacccgca

SEQ ID NO: 162254 - DNA, 522 bp, Zea Mays
cgattatatttgaatggccattgtctagatatgaagcggtattcggcgatgtccgcacgatcagaaatcgacggctcgcgagatcaacggtcacagtttaatgaaacacagatcaaatccggaccatgcgttggacgatcaacggtccagaatcaaccatggaacgatctacttctagttcgatgaagatcctacggtgactgtgtgtcttctacctcatgctgctatacccctttctatacgtatgcgagaccccagtaacagtaggtacattaacccaacaccaccggcatggaagaggagtctcaccgtcgatggtggtgaggctggccgacgatggagcgcggatttcgcggcgagccgcagacccagtgctcgattccctcccctgcggtcgcccagaccatcgttcggctggacggtgatgacggcgcagcgagctccggcccggtgaggagccgaccacgcagccgtcgtgtactcggtacgcccgcccaagctctatcgaagcgcgccgccagc

SEQ ID NO: 162255 - DNA, 596 bp, Zea Mays
ggccgaagagggtatggggcaacatcggccgcccgatcaaaacccgacgggtgtgattagatctattacctcacgaagcggtacgcgatccagaccctcggatcaaagaccaaaggttaggatttaaaacacgcccgatccactccatccccacatcgacgatccgacggctgagacaggcacaagctgaaacggtacgcacgctctaatctacacggtccaactctcatccgacggcgcggaccaactcttccacctctatccgtggctgagcaacggcgacaaatccacccacggcggagtaactccggcgagcccccgttggccgcccattgcccctaaaccctaaccgaaacatactatgtgcagcgtaggataatgcgaacggcagataagggcaattaccggcctagagcgcgcgttggagtcggtcctcgacgtagagcggcaccgcggcggatgtgaagtccggcgagcaattacttgagccccggtggagtatcctccatcgcgcagccatagagaccctccctgaaccaaggcggggactccccgacccaccattgaggtcccatcggcgttgtggacgatgagtg

SEQ ID NO: 162256 - DNA, 872 bp, Zea Mays
gagacgtcttcggcgagtatctagtttggatcgggatgttggtcattcggttcctgttgctgaggaagtgcatgtgcctgaatttactgacgctgaccccaatgggtgtgatccatctgccgctgatcccaatgggggtgttgtctgtgttgctgatgaaaacgacggggaggaagaagatgaggtccctttgactcagaagaacagtcggcaatatgtcgccagtggggaaagtagtggagttccttctcctgctctgtctgccctcattggtctacaagaattatccctggcgaactttgatcagactcttaaagatatggttccagaggatctgttatcagagccagcggatggtggtgcaacggatgtttgtgctgatgtgctcgacgccgggttggggtcatcccgggcagcgtcccacacctcatcgaccttggagcgcggtcttgagggtcaggaaactgacttggatcatcttgttcccatggaagtaactgagggaccttcagccttagaggcggctactgcagaaaacttgatcctcaaggatggtgttgacacttacccagcccccgagggtattgccggggatgattcggctcgggtgggaagcgcaagccacggcccagcccccgagggtattgccggagatgatccggctcaagtgggtagcgcaaactatggcccagcccccgagggtgtccgagcggggtctccctcttgtacttccatggatgttcatgcaggatctcctccacactctggttgcatggtggtagcccaagctttaggtcagggagtcgctttagaggctagcgttcctaccgaccgagttttgggctctgctgatgacactgaattggttcctg

SEQ ID NO: 162257 - DNA, 446 bp, Zea Mays
aacatcttctgtagcagaaaatagtacctgtttgactcccttggaagaagaaattccttgctgctcagttccccccttcttttctcctctattttgtttagcatcatacattgacttctcctctgcagtagcgccattattggcctccccattgccatcctccgtaagatcatccatgtccattggctccgaattggagtcctccaagttcttatccacacgaaaacgaagctcatataaaaagtcaccaatgactacatccacatattgtgggataatattaggatctaataccaacacttggagtcgacaccgaccatattgtctggtaaaaagcatatccacctcctttgacactccaaggattgagccaacaacccatataactgggaaatctcttaattcctctggcaatccagtaaattggacccaacttttggcataac

SEQ ID NO: 162258 - DNA, 484 bp, Zea Mays
atatacttggaggggtagcttgtaattttagtgtcctcttctacctctcgactttggcgtgtaggggagcagggaacggtggtcgtggggctttgtcgatgtcgcgacacactagacgcagactccgacgagcagatctacgatgaacttcagcgcgggtaggtaatcggcaacaggtacaacacaggcggcgagagtcagcaacattatggcgtgaacagcaggacataacagagaagcaggagagcaatagggcgacataacagagaagcggcgcacgacgacgacgagtgagtagagctgcgtgcaacgaacagagaacaagggatgggaggcgagctgggagaaaggctagcgagtggagggaggagagggtgcggcgtcgcgacgacatgagctacggagaggatcgtggacttgtcgacgcaatgtagacgatgactaggcgaacgacagcgtggatagcgcacgacaacagagctgt

SEQ ID NO: 162259 - DNA, 706 bp, Zea Mays
ggcatgtagtataatttcaaaacatcattagacctaaatctcacacaacacaaaaaaacatagactgatggcatattcacgtttctctatatctccggcagtctccctattccactcactatcacacttcgtatttcaaattctactatataaatagtgcagtctacgggactagcgagacgcaaaacatgcatgcaacaataaggagttgctcaacaattcgcttgtattttagatgctgcactgatgggtgatggcacagacgcacagtactgtttcaggcatgcatgcaattttaaggaccatatgtggacatggcccagtgacatcttttctaggttcagtgaatcgatgaacctacgtccattcggaatgttgtgagcatcatatatatggcaggttcttttctcaattcgaacaaacgtctataagtcaaaagctagccgccgcgcgcatgcatgtggctctccggtccgtacgaatatcttgtgtaggtcttggtcttcgattccatctcgcatgctaattgcattcacgatttcatataagtttgctcagaaagctgagagggtttttgcagaaaaataggtcaaccaccgtaccagtttgaagaatatgcactgcaataatcttgttgcaactttgcaagctagctagacagcgagatatgcaaaacttcaatcaggaaacatggaatggactgcgg

SEQ ID NO: 162260 - DNA, 600 bp, Zea Mays
caaattattggggcttcaatattcggttgtgtacaagaaaggtacagataatagggttgccgatgctctctcccgcaaagtaacacatgatgccagttgtgatgcgctgtcagccgcctctcctcagtgggtcgatttagttgtggattcataccagcaggaccctttggctaaggagatgattactaaactttcagtgaacagtgcatttgttcctcatttcacactgagccacgggttacttcgttacaagaatcgtatttgggtcggtgatgatgacagcctcaaacacaagttggttgaagccttccaccatagccccattgggggacactctggcgtacctataggaatctcaaacaagcgtttgcttggcggggtatgagatccttcgtccattcttgggtgtcctcttgtgtgacttgtcagcacgctaagccggaacgttcacgccaaccaggcctgcttcaaccgcttctagttccccctacagcttggcacactatctcgatggatttcatagaaggtttacctaagtcccacagatttgactccattctggtggtggtggatttgtttaccaagtatgcacactttacc

SEQ ID NO: 162261 - DNA, 1861 bp, Zea Mays
aaaaattctcttatgtgttactggtttgttggatgatgtcagtgtatcgatgctctcagatgaggacttagaagaggtactatttttataatccagtagcattttaatgctattatgttagttattgctgatggaaaattaaatttagtgctgcatatgttctaaagtagtttgtcattactaagtagtttgtgcaacattggctcactaattcaatatttagtttttttgcctggttaaaagatatggtgaaataattatgcattcccccccccccctggtaacaggatgagtgcgatgatcttatttctttggctgagaaaggactactggaacgggctactgttgtaagatcatattctgaattcttctttttaatgcaatggcagaacctaaccatttgaatatatggcactggatggagcagacttaccatgctgttgaataaatgatttctttctttcacctttcacattcattgcactagcgatgagaatattttgtatttgcatgtgttgtatgtatgtgtacatttattgtgaataaatgttatggttctcattctaacatattcacatggctaattagtaacgcgaatctgtggctgtatcttgtcaaacaaatcatggattcctctagcaattccagtgctaaagtaagataattcatatacaaattcatcacggggatctatgctccttatgctctaaagaacgcttagtacaatacagaagggtgcttgatttgcaggcataaactggcttgttctttaatttttggatgttccccgggagtgtggtttatgaggggaaatctctgtggtcggcagttaagtacagtcttttacaactacctaaactctctattctgcttaattgaaatgcatagctcctgagagttcattaaaaatgatctaggcaattttctttggttgctctttcaattggatgtttagaacactagtaaatactgaggagttatgggggcgaactaaccagattgtgttgttaataggaaggaaattcactagtccatagagatgaaggaccacggtaatattttctatatgttatatgttagctagttagaatgatgtgaaatgttttgggtattgcgtaagtgttactttgtgccaggtcatgtcttggatgggtcatactctgtacttgttgatagttgaggatcaatttgtttctggttttccactacccccttctgctattaaagaaaaactttggacactggcaatcttgtaaaatgcaatgtgggccactattgcacaacaacgacaacaagagactttagttgagttggttaggtagcttgagtaggtcctgaatttgactatatgtgggagtgaattttcagactagggttaaaaaatctcttcgtatgtctaggtctaaggtctggctttagttatagtcattctcacatagggctatcgtgccgctgtgtatgggtggggtaggggttcaaaggttttctcaacatatatgagaagttattattaatacaatgcctagaagctatcttcttcctcataggtcgagtttttttttttataaaaaagccagcctatttccctaagtttgcacctattaatatctattagctggaaatacttaaaaagatagtgtgtcttctgttgtacttgagcttctaatttgcatatgctaagcttcttcttagttttctgagttagctccttttggcaggctgagttggaggaaaaggtggcaactgtacatacagacatagttaatcatgtaagtgcacctagcagttcagtgaatgccattggtttgctacttcatgcttgtgtatgttggaagggaaatgtatgcagatagatataaat

SEQ ID NO: 162262 - DNA, 498 bp, Zea Mays
cttctattcctgccatacagaacccaaagaattgttaggacaactaaaaaaactaataacatgataagtgttgtgctcataattgcctaccaaaaagatgatgatagctcgatacaaacaaacaatcaaataaagaaagaaatttattaactaagcgttgaactatgagctaacaaaatttcatcattgattgattgggcatcctcttttggaataagttgtttggacaccttatcacttgggatgtcaatataaactcgattttctcacagagataaatttgagaaatcacgccatgctagaactatattctgccttttggaaaaggagggagcatatgctcccttctatatgaactaagattacacgtgatggtgtcataggccaagtgagccaacatcaatatctacaaactatgacctgtgagtattaatatggaatctggaaagcattctctaatacaaaattgtgacatggatagcatatgcattggcagag

SEQ ID NO: 162263 - DNA, 1041 bp, Zea Mays
actaaagtagctcatttaatttcagtgagaactaattacacaagagccaagctagctgagttatatatctcccgcatagtctgtctacacggagtacctaagaaggttgtgtctgaccggggatcatagttcacttcctggttttggcagaagttacatgagtacatggacacgaagttgaactttagctcagcctatcatccctaaactgatggccagaccgagagaacaaattaggtgctagaagatatgttaagagcttgtgcccttaagcatcgtggcagttgggataagagcttaccctacactgagttctcttataataacagttatcaagctagcctgaagatgtcctcgtttgaagctttatatggaaggaagtgtagaaaccctttgtattaggatcagaccggtgagagacagttctttggacctgagattatccaagaagcagatgaacaagtttgaataataagggagaatctgagaactgcacagtcaaggcagaaaagctatccggatacccgaagaagactgctacaatttgaggaaggtgatcacgtgtacctaaaggtgtcaccgatccggggtatgagaaggtttaaagtcaaagggaagttgtcccctcgctatattggacccttcaagatcctaaagcgagttggggaagtggcttatcaactggagttaccaagccatctggctgatgtacacgatgtattccatgtatgtgagttgaagaagtgcctcaggtgccagaagagcaactacctatggaggaacttagtgtacaaggcgatctgacctacacggaatatcctatcaaggtcatcgataccttgactcgagtcaccaggaataaagtgattaaaatgtgcaaagtccaatggagccatcacagagatgataaagctacctgggagggagaggaagaactaagagtagaatttcttcatctttttccctgttcatcttaatctcgaggtcgagattccttttagggggtggtaggatttgtaaaccctaaaatgagaattctag

SEQ ID NO: 162264 - DNA, 1090 bp, Zea Mays
gagctttgcatggaaatactcctttcttcatggtctatgagtcagaagcagtactgtccgctgatctcaagtttggggcaccaaggttggtctttgaaagcatagcagaagccgaggctactaggctggaggatgttgatgtactcaaagaagaacggctgaacacggtaattcaatcagcacggtaccagtaaactctgagacgctatcacgacaaggccatgtgatgtcgatcctttgcagtgggagatctcgtcctccgccgaattctaacgggggagggacgacacaagttgtcacccctatgggaaggaccattcatagtagcagaagtcactcggccgggatcatatcgtctcactcagatggacggcacggaaatcgggaactcatggaatatagaacatctcaggaagttttatccctagttgtatttcaaaagctatcgggacgacaatgtactctgtaaaatgggaaatatatcatcaataaaaaggcttcaagaatactcagtttgttcatgatcgacctgcattcttacttaactcgggtgaccactatgccctgctaaacggagcaatcggcttaagtcggcaacgacttaagacggtgcaacatgctcgcgcttacttaactcggggtgaccactatgccctgctaaacggagcaatcggcttaaatcggcaatgacttaagacggtgcaacatgctcgcgcttacttaactcagggcgaccactatgccctgctaaatggagcaatcggcttaagtcggcaacgacttaagacgatgcaacatgctcgcgcttacttaactcagggcgaccactatgccctgctaaacggagcaatcggcttaagttggcaacgacttaagacggtgcaacatgctcgcgcttacttaactcggggtgaccactatgccctactaaacggagcaatcggcttaagtcggcaacgacttaagacggtgcaacatgctcgcgcttacttaactcggggtgaccactatgccctgctaaacggagcaatcgacttaagtcggcaacgacttaagacggtgcaacatgctcgcgcttacttaactcggg

SEQ ID NO: 162265 - DNA, 627 bp, Zea Mays
tcaaaacaatgaagacctatgacttagagtgtttggatagactaatgatatgtttgtctaagtcatagaagtgctcaagagtatagtcaaacgaagacaagagaaaagagcccaaaattggtaaagtcagactatttttgggtgcagtaggcctcagttccagagaaggatgcaaacgacctaggcgactagagcaccgaattggagttcggtgtgcaccggaccaaacttccagagatgctattttcgatcatgggactttggcacataacgagtctggtggtgcaccagattagtttaccagagagtctatttcggaagaagtcattggtgcaccgaaccgaggtatggtaagcactagactagttgtacaccaacaatcaaatgggatagaccaacattcggttgtggcactgacatggtgtagtctgatggcgcaccggacgatccggtgagtgttgatagctgacaacttttttcataatggatactaacaagataggagggtcagagctctgatgtgcactgtgccaaacactgtttgaggtccggtgcacatgaatcctatgcagttttgtagcggatcaccattgactatttgagtggttgggggctataagtaccacc

SEQ ID NO: 162266 - DNA, 1033 bp, Zea Mays
gtccaagtcagtgccacatgagccagtcatcacaccaccagagtagaactggaacgtcatgtctccgccatccactgccaccgagacaggctggtttgccacggccttcatcaaggcagcctcatcatttgccggcacatcctcgtagccctttatggttgcagcactatttgatccactcttgcacttgccatctgcagcagtgtaaggatagctggactccgtggttaggccgccgttcttgatgatgaacttgaaagcatcgtccatcaaaccaccctcacaaccttgatcctcgccatggacatcgcaatccactaactcttgttctgcaagagagacgagcttgcccgtgctgattttcacaatgccttctgtggcggccacggctgagaacgcccagcagcaacctgcaattgattattatgtctcgacttatgtcatcacactctagtttttatttccaccataatagagttgtcggaagtgttcgtgctactaaatatacataccacattgaccttgatccttgatgggagtgacggcacccttggtcctccaatcgatggtcgtcggaagcgcatcggcactaacattctcatacctaaatcctgtagggatcttcatattgctagatttgagacccttattagtcttggtagacctgaactcgtcgttggtgagatcggcgaactggttaaccccgagccagaacttattattcccaccagcgttgaacgactcgatgaactgaacgttagccttgaacacctcgaaccgccgagccttctcggaggcgtctttgtagacgcggctgtactgcgccatccactgctcatgcctcgccaccatgacagagtcgtcgctcaggtcgcgagcagccatggcagcaccacagaagaaggcgaagccaatgatggccgagatcgatgccttcagggtggccatggttgatcgctgcatcaggcctctaggaattggtcgcgcgctgatgctagcctgctgctgttgtgcactatgcctaatgatttcc

SEQ ID NO: 162267 - DNA, 499 bp, Zea Mays
cgcgacggcttctactaccgcgaggtcggcctccatggcgcgcggcacctcaaacgctggatctccctgcaacactccgtcgcgccctacctctctacctagccccgcgaccaccttgaccctccaaacaaagtcggcctatctcctcgtggccggtgcggcggaatcgaagctcaccagatgtggaattcgcggcatggccgccgttgccgctaggcatagaatttggacctcgccactgcacaatcgccggtaaatcctacacctccgtgtttgccatggcctcggcatcgtattgcgtcaaccaatttcggggaatcaggctccagggagttgaatcctggattccgacgaacccaccgccatggggtaagccggtgcgccgctgtctggccaccaggtttggggaatgctgggatgaccattgatctggccatgaacggccatgatttggggctccataccgatctggcaccagctcatcttgaccgttgatcgt

SEQ ID NO: 162268 - DNA, 802 bp, Zea Mays
agattctatatccaatttattcgcaatcgaagaaaaaagacaaaaaaatccgaattagtatccaaatccatcttgcaaatatgcccagctcccaataactatttgctaagatttcacttctgcgctctcagtctttctgccctcgcacaagacactagctggcgaagtagtgcggcacttcgggttgccaaacgcttgatatgacacatgatctccccaagtttccaaacaattgattttagacaataacatgttttagacaataatagggcctaaataacttgtgttgccttgattcttaataccttcaggggattgaagtcaactatccaacattggcgcccacctccgatgattccacgaccacatcagcatacactatgcagccgaagaaagcaacgacaactggctccatccttacacccatcgatcccaatcaagggaacgaagctctcatcagagaagcaaggaattagaagaaggccactagcccaccaccccaagaagaggaacttgatgatgagatcagcaaccttgaactcatccactagcaagttgagaagggcaaggagaaaatgcttcgtctttctaagcctcagatgaagattgatgaagtaaccgaagagatgcgcaacatcaaagcgcacgaaaacatgaacaactacatggaccaagattatgatgtacacaatcatgacaaccttcatcatgaagaattcaatgtctaggatttcctctatgatgaagcttcctcactgacaccagaattacaagctacaccatggccaccactgtacaggcc

SEQ ID NO: 162269 - DNA, 662 bp, Zea Mays
gccacgatgagcgctgatcgtcgtgattcgtgcaccgtggtaagaagataagcacgggcaggtaaaaatcttggcgcccggattgagttgggtctcgtggcggctaagcttgccgtactccccccagctcataggtcgatcggataaccttcgccgtcgtcgatctgtcacctttgcgcgccacgtgattaagctttagccgcatcgtgatgaaccatggggtgcatgtccggtgaccgccggagtgattgccacggtgaaagccacctgttccaagcacagagctctttttcccctccagccgccagcacaactttgcccaaattgatcaccaccgctcgagcatcctataaattgaagccttcagcatgttccgctaggtaattgtgcgtccagtaaaccaactatcagctccgatcattccccacaactccccaatttgggattacccccaaatcggtcgaagaacgccgcaagaacacctagccgtggctagcgcgatacaggttagctcgtcccctctgctctctcttttgagtgatctcacatacccatgatgctcgtcaacccatccgattgaactaaaccaccaccaatcgccgggaacgagttcaactgtccgcatggtctacggtcactgcgtccagagtaaaccaagtagc

SEQ ID NO: 162270 - DNA, 828 bp, Zea Mays
caaacactggtcgtctgattcactatctacgcctcggattagatcacgcatcgtcgaatcggtacacatactaggcggttggatcagtgatccacggctcgcatcaaccgagcccgcagatcaatcctacgtcgtccgatctcatctaacggccaggacgacgtcatccctaccgcgaccccctttcccccgacggatccccacggcgcagcccaaatccagcaccgccggcgacggccaatgtggcgtgccacagcgccaaactcaaattacacgatactacccgaagccctagcaattgcgagtcgactgaggtgcttcataccgaaagaggtggtagtagaagcgcgatccgcggcgatgagcggcccgacggagatccttcggccacggcaaggaattcccccaagcacggcggtcctccccggtcgaggctatcacggccgccccactgatgtcccagcgaggtcttagaccgaactccagggtcccggtggcagcgtacgcgatttgacccggcggcgatctcaccctctgctcacggtggtaatggtgatttcttggtcggcaccgcgagatggttcggtccgaggttttgaaggggggtccgcgtggttcagagcgctaggccgcgcgcgactcgggcgttcggcgcgcacgaatcgggcgttcggttgctcagctgcggccggtcatgtcggcatccgttgagctcacgcgtgggggatgacaactgggacccagcagcagagggcacgtacagcattggtgaccgacacgtgggccccatggaccaagcaacgccagcgtgcgggcgcgagcacagcg

SEQ ID NO: 162271 - DNA, 917 bp, Zea Mays
ctcgcacgtcttggaagattttagccgtgtgggattgctgcgggattgccaccattgaatcagccgacgcgagagaaataagagagggagagaagatcccctgcctgctccagcgattcccacgtcgggcgctgccgttgctttccctctgcgtgaaccggtagaccgccaagcgcatggccgaccggaggtacggcgattgctcgccgtcgattagcgccgccgcgggcccgtccttcactgcgaacacgcgcgtcttcgcctctaatcttggtaaagaaccctttccctctgtccgctttcagctcctcttcgcaatgcaccgatcggatttcgctattgggcgcttgggacagaaatcgctgtgccccggccatggcaccaccgtcagctcgggcagcgccgccgttctgctcgggtttatgggaagggatggtcgtggccattgatgataagatgggcgggtctgattgaagggcggtagcatttggttacgggccgtcgatcattgcacgggcggacgagatcagtgcccacatagtgttttaggctaatgcgtcgggtgtcgttcaattttgatcgaacggtcgaagattatttagattcggtgcttcgatctgaaacggacggctccggtcgtgtatgggttcataaagatggagatctaatcctagcggtctgatcatgatcggatggctcagtggtgtcgatacccccttcggatagccggttttgcaaaagaaaccccactatttttatgaataaacccgccatccctcgcgactgtactctgagtcttgggattgttacgcagaggcccctgcgtttctgtctaatacgcgcgcagtccagtgaccatttaaattgaataaatgatttagaaaacgattttttaatataaaaacaattcatagaac

SEQ ID NO: 162272 - DNA, 336 bp, Zea Mays
atcaacatcatctggatccccaccaacatctgctgaggaggaggcactggccacaaagattcagcttcaacatgaaccctatcagtagagtctgtaccagtactatccaaaggattgctacaaccatcgttcctactaacagaagacttcttaacagctgccctcttcctccccatggtggctggtcagtggtcactactcactggtggcttggttagtgtcgagataggctgctgagagcctgagagggggtagataaatagtgatgttgcctggtttaatcgcatcaccatttaattgcatcatcaatgaggcacgatgtggggaacagaggtt

SEQ ID NO: 162273 - DNA, 386 bp, Zea Mays
cgatgtttaacaccttgcctcggagtatcatctcgagccggctgtccaaatccacagcagggattcttctgttggtaacccgggtcagatcagcaaggcctcgatacagataggacgggtacgctctgacttttagtggctgaatgttcttgaaaatgaaatcggcgaccacagcttctgcagtcagacccctctctttcaacaatccaacctcagcaagtagagcccctgcctcagccacctccaggtctgtgggggattcggtccagcttggagtgcaaacatctggctgtctccctgaccgtggggggagggaattcccgtgattctccacgataaaccattccaggcaccatcctttgatgctgtccttgagtgggatatcg

SEQ ID NO: 162274 - DNA, 296 bp, Zea Mays
gtcatgagtgtccgcctcgttttcacgctcgacgggtactggcgtgcgcctgtgacatgagtcgtggaaccggggttcacaagtgtactagaccccgtcacaggcccttgcgtctgtccgcctcgctcagttgctcggtgggagttggtcggatcgtccgcttcacctggttgctcaatgggagttggtcggtccgcctgccttgcccagttactcggtgggagttggtcggatcatccatctcgcccgattgctaggcgagagttggtcggatcgtcagtggcgccttgctcttg

SEQ ID NO: 162275 - DNA, 419 bp, Zea Mays
gccgtagagggcagcgatgcaggtcgaagaggaggaatgtagccgctaaaagatgaacagtactagaggagaggtgttcaagggtgatgcgttgcagacagtctaatcctgcatgctcgtcgggatgggcaaggctccaggcctccagccatctctttaatcctgcatgccccgtcaggatgagcaaggctccaggcctccagccatacagatgcatgtatgtgccatcacatacacgcaccatcacgagttaacgcagcatgcaagcaagttagtgggacgagcctgttaagcaagccacagatcatgctgccatcacgtccgcaacgaaggcgtgttgagcagcgggcccacgcgacgcggtaggatcggcggcgcgcgacgtcaggtcagtgcagggcgcctaggcggattgagca

SEQ ID NO: 162276 - DNA, 514 bp, Zea Mays
gtttgacctagtgcatggcagcgggacacgcccgagtggcggtcctaggcgatgttggcgagtggcggcccgagacgcaagtgtcgtggcggccgtgacggccctaggcgcgagcaacggtggccgtgtcttcccgaggtgcgagcggtggtggcaaccgcgacctcccgaggcgtgatcggtggtggtggcgacgacgttccgaggcacgagcggtgttggctgcggtgaacgtctttggtgcatccaaagacaacaatctcctccgatgcggcgcgtcggagggcgtcctccttcaacgaccaccttcgatctgatggcgtgatcggtggtggaggcgtctttgatctggcgacctcgggatcgtcctccggtgacgagctatctgatccatgtttacgccatcaatgattatggtttatgcctgctacttacactatttatgcattttagtgacgatttttacgatgatgaatacaatttttttgtttcccataaaattgtccctaattac

SEQ ID NO: 162277 - DNA, 706 bp, Zea Mays
ttcagatacagagactggtttgatgaaccaaatgacaattggctgaaatgcattgaggctactagcgacgagttacttggggtatataccatagctgaggatgatgctttgtccttagccttcgggggtccgagcaagaaaaggttgagcagggttttcgatgcgattggttttgtatatcctgattattgctatccctcgcgaaagcagggaaaaaagaggaaaattgccacttcggcaatctctgatgtgccgaagggcaagaaaatcaagaatttgacccaccggccaagatatattgaaacggccatagtgccaacatttggtgaagagacattttttgctgccgaagtagaacaagctgctcccgccgctcggagcgctgaggaatcgactatagtgccgaaggtgcctatagttgagccagtcgaagccggagatggggcggccaaaaagccagagtttgaaaaaacaataatgttgccagaaattctgagcccaccggtagaagcagaattgccgaagggtgcaaaagctcccaccacaactcccaagaggagaagaatggctagcgtactagacgctgtcatggagacaacaagagcattgactcctgctcctataaaaaaggttgctgaagctgctacgactcataccaaaaccgaagctaggccttcaatgcctgctgagacgaagcctgtcgtaa

SEQ ID NO: 162278 - DNA, 316 bp, Zea Mays
aagcgataaggcagtcgcacaagctcaagtgccttcttcgttccttttagctttggcatgctaaattcacttaaagtcggagatgttctgttagccaaatattcttgaactagatctctagtgctgatctattcagccaccaccctgaattctgctatagcttgttggcatggtggccccgacgtcatgcgacacaagggcctagtcagtccgaagcttagagtcatcggacacataaccatttgcatcagcttctctctcttcttctcatcggccttgaaataaaaccattcactcttccagccggttggccact

SEQ ID NO: 162279 - DNA, 2582 bp, Zea Mays
tacatccttctaaaggtatatcagcgtcaaatgtcgaaagaaggcctgcaaaaagttattcagcaggagcaagcggacaataaaatgcaggttcaattatttgagtattcttttactctgttcaatatttttaagtgcgaaatatattgatttgtcatcatatttttacaggggaattctctttcaacagaagatctgcgcgatctttttatttttcatgaacatgtcaggttggatttgttcctctgatcatgtggcttctttatcttgttactagtagggaaagacattagacaacaacaaatgagttaaaaaataaccagccggaaccagctaatggttagtacaactggacttcacatattgggtagacgtggagcttagcttgaccaaacattagctatctaattttgtcaattgttttcagcaaatgacgctgaacatgttgatccgctttgcaaataatttctgtcagttgcggttcaatgaagttgctgtagttactgtaagcgagttaacacatgcttatagagagaggatggccacaaattagggtttatagaagtggaaccgatccttgtcatccaagcctatctcaacacaatcaagggcacctgggctatgggcctctaccagccctatcctatgtgcctgggactatggctgtctccagcagcctttctatcccacctgtctcactctccattttaaactccactctgtaaatagtgccgtttacattacaacatagtgttttgcacggtcatatgcacgttctatgcacggcctggccatctccagcactccctatcccagcttttattttaaactcatctttgtgaacaatatagtctatattaaaaaacagtgttttgcatgaccatatgcacgtcctgctgaagacagcctaagcccatccacgatacagagtctgcctagcagttaccatttacattcagttgtgaggagctgagattcaagaagagtacatgattgtattgtgtaaagcacaaattataattaagtgataagttatttggaaaagttagatcattatcatttgtttttaggcgaaccgatagtatgtcagtttcaagaataacagcaataggcaatcgctaacttgatgttggactaactagactcctaggcatttctcgagcttggccaaaatacactatcattagaatttccccatatttttcttgaacatgcaagtgtcttaatagaagaagaaaatgtttaacaaagacagaaaaagctgatacatatgtgccacacaaacaagagatgtgatacaaacaagaaaatttgtcagcacttgcaaaaggcaatatctgtgttcagtattgtcatttaaatgcagttccttgtacctttagttaataccatgtatcatattgttgcttaccttcatttgcacaggtctgaaatacataaaaatttgaagtgtagccgctgtgacaaggatggagatccagctttggatggtactggttttgcagccactggtcataaggcttcaatacctggagtgcaagattatgctgatattggtgggtttggtgagatatctggatgtttgcagaaaatgaatagcacacatcagcaggtaattttgatggcaccctatttatatgttgcctagctctgcagtagccagtaatctttgtttaacttgacccattggggaagactggacaaggcatttcttcagctttaaacctcaagggattcgattaattttctatgcccacttttttcagattggaagacctactgaagaagacttaggaagttggggacatcactgtgacccatcaactgtacctgatactatactgcagtgttctgctggcgaagaggtgacagcctaagaccctctgtgcatctgcatctcattggtttggttcataaatctaactctctccattccaaactacaagttttggcatttatatgtagcattacatatatttcactatgtatctggacatgatgtatatccaggtgcatagacaaagttatgcacttagaaaagccaaatcgacttataatttgaaacatagggggtacttattttaggattgtaagtctcagacccagtatctttttctctggatccacttgtttgtttctacatttatattgatacgcagctctcctgctttttcgaaaaaaaagtctgcatttgagaacaaacttttgcattacaaacaacatctatggcatctgtgctgcagattttagtttaaacttagttgttaggagataaccacgagtccacgactggtaacaatgcacatgtgcattttgcaggtttcttttgttttcaccaatcaggttgatggaaaacttgttccagttgaatctatggtgcgatcagcagctcatcaacaaaacggaatagcagccaccggagaaaaaggagtgcagatacccaattctcctagcaaacctggaaagcaatccttaaatggcaagaatttgaagatgggatttcatttaaagaattcgtctttgaaatgttcaaccaaatccagaccatcaccaaattgcttgcaagggttgatgaaaaccag

SEQ ID NO: 162280 - DNA, 749 bp, Zea Mays
atctacaactcgtggaccgagttagtcaccatgtggcctggccccacatgtgggccacaagaccgtggtggccaaacgccgtgcgcgcccatgcctcaggccacgcaacaacagttgacaacaacatgactagttcgtggtcatgtcgtttggcttgaggaatgcgttaacatcattctagtcccccttgagaattgaatagcactcctagctgacaccatggactcatcgcactcttcatgggttgcctggcctcacgggcttctaccgcttcttcatcaacaactacgacatcatcaccacaccatgaacatccctcaagcgtgttgccttccagtgtgctgatgtggcgactacatcctttgaggccttcaaggcggccctcacctatggactggtgctgcagttgttgagcatcacggcttcgtccatcatcgattgcgattcttcgggcattggttttggcgtgctcttgcccgatcgccttgtttagactgtggatggagccccagcctaccaaacttgccacctaagagcgcgagctcattggccttgtgaaggctgtgcggcactagaggtcgtatgtctgggaccggccagtggagatagaagattgggtccctaatgatttctcccctactagaatactacaacagaacctttgaatcttttagtcctgaacaagttgtgcaggctagtttcgaaatgcaacaagggaccacaatatcgatgatacagctaggcataca

SEQ ID NO: 162281 - DNA, 637 bp, Zea Mays
actctttcgtaagtgtatgcggtcgaaggggtataggtatatcagcgtcattcgatctgaatcgacaacatcgattaaacgtttctcagcttgaaccggtacgcgatgaccgccctaggatcgaggatgaacaaccacgatttaatgaagtgggattcgatcagaaccacccgatctgatccagtgacccggattgaaacgtgcgaagggtgattctacgtctaataacagtcacatgtgctcggatcaacactccacacagctcccacgcttcggggctgtggtgcccgattcccaaagtcaactaggtgataaatgatgcaggtgctaaggcgaaatcgatatgggtgctcttaccgaggattacatcgcgtcgtcctccgcccatcgagaagtgcgttccgcagtggcgctcccgtcaccggcgacgaattgccatggctctgtggtcccgcacactccactgcttccccgagcacgcaccatacacctgacagaacgccttcagtcacattggggattctggatggtggcggaggcgaatgatgtcgacgacggctatccttctccctttctccctctctgatcctcaccgaaggtgctctccaattgggtcgtcgcgatggttcgatttgat

SEQ ID NO: 162282 - DNA, 584 bp, Zea Mays
gcttaatgttggtacaaaatataaggccatactcctaattcacttaggtctaaattggtgacttagaccaactcagccatacacaacaactcgacctatataacaggttacttaacttatccacccaatctagaagcaaacaatcaaactacattctaactaatctcattcaacttataactacctactaaaccggctacactacctactaagtcactgcctacaaatctatcttaacctcttatccctaacctggttgaagacatcaagaccggagaagagaagatcaacatcgacaaggaaggatatgaatagaatcaaaacttcagatgaatcaagatccaccatccaagatgaagttttttctcacaataatctttcttgcctcaacctatccagcttatatcctacataaatagtagcgggatacctatgctctcctaattacccactattgactacaaaaaaatgagactctggatttttgaaccaattatagtctaaaagctaaattacaaaccaatccttctgtatcccttttcttacaaatctcgaggacgagatttctgttaagggggtaggat

SEQ ID NO: 162283 - DNA, 780 bp, Zea Mays
taatcttgttaaatgatgtacatctctaaacttgtaaagatgatgcatcataggttcatttcaaaccatatcgaccactgcagtgtgccacttaacaagttcaaaaatctaaaatatgcattttcaaaattcgtagacttaagcggcatccctctgcttatgcatttaactcaagatgtaatgtagcaaaaatttaaaacttagaaacaccaaacattggacacattaaacttcatgccatcttaagttagagactgctgctgctagccttacttctaaacaaaaagatacataggtctccacgaggttgatatctaagctctgatactggcatgtaaattaaattccacagagctgaaaatggctacaagcagtaaagacttctgcagatagatacagaataactcaggccaagctatagccatggaacctaaggtgacctgatcattaaaattttgtttggccatgctttagcccaaaagctcggcaaatttcaaaaataaaaaaccgtatgtccaaaaaagaacacgatccgaccactaaagatcctagcaagtaatataatcacagaaatgtaagagaactacccaatgcagaagagaagcttaaagatatactataccaacttacctaccaacgaaaacttgaactatagtactcaagtactcaaccagtttaaacaaataacctaattcctgttgcatttccctccagtgaataacaatggaaaagccaaacaatctgatgattgcttagttttgtcacaacacgatgtttatt

SEQ ID NO: 162284 - DNA, 383 bp, Zea Mays
cacccctcgggcgactggtagccgaggtctggtcctaccgtagccgtggttttcccgtcagctcccttctggcttggttggtggtggggcggcgtgccatccttaagggatagctcgcgttgttcgctgatgcaccgtgcgagtttgataatctcatagcagtcggcgacttggtggtggctcttggggtgcaccgggcacgtgtcaccgctgtaaccctggggccgtgggtgcttgtcgcgctcgccttggcccccggcagtggcggcagcaactgaaacagcgaaccgtggcttttcgtggccgtggttcttgcttctctttttcttcctgcctccgccctaggtgacgacatctgagtcgcccgtcttggtaacctttac

SEQ ID NO: 162285 - DNA, 626 bp, Zea Mays
cgaagactgccctccaaagtcgacgatgcgcgagattctgcccgggatacctctaatcccacgtctggagcgtcagagcaaacatccatcatatcatcaacagtcggttccaacagcatatctccaggaatgacatcctcaagggcttgataataatctgttatggataattcttgaaggctaacaagagcagacagagctggagaaggaatatcactatccccctactacctctgtaacgccggctattcttatgaattagtggaatttcttcttcttcttcatcctcgtcaaaaatgcgaacaataaatggtgcaggatcacacccattgggatcagcttcaacaggatcacacccattgggatcagctggcgcacgggtacactcattgaggtcagttggtgcaggatcacacccattgggtcagttttgataggatcacacccattgggattagctggtgcacggtcacacccattgaggtcaacttcagcaggtacaccaccattggggtcaacttcagtaaagacctctgttgatacttcttcgcaaacaggagcagaaggtccagcatcctggtccaagcatgacagtcgtcgaagccgtttctttttcttcttctcct

SEQ ID NO: 162286 - DNA, 865 bp, Zea Mays
tgcaaattgttctcaaccaagttattttattcattacaccatcacattacaagcataagactactacaggggaagactacacgagggcgttcttcgaggtgctagcgagttccttgtctaaggtgtccccaaatgccttgagaagatcatcgaggctggctagggatacatcttcttcgtcggaccagtcatcgattctagggggaggtagggctagaggggccttcttcttcttctctgtctggcatccttggctagtggtcttcttctggatcttctttttgggggcgagtgccttcagcttcttgtcaaagtctgtcttcaaggtccgataggcctcacgggtgttggcctcctcgccttccactatgctgagactctcctggagagatgccttctcttgcgtaagctctttgacttgctgctctaggctttccactcgggagtttaggtgggtacaacgggaggagagctcatcgtagtggttgtcgagggtgtggaggtatccggccatgtagacgatagtgggatcatcttctatgggatctcctcctgacagagcctggagtcttttcttccaggttggggtgtttttgttgctaggtggaaaatatcggaggggagtctcaaagatctctcagctatagttttggcacagttgtttgagggcttttcgagcaacgctctggcatgtgtctgggaagcggtgctcgatgaaggtaatttggaaaggagggtggtttgggtagttccggctttctcccaagtagaccgccatagagcacttttccattccattttcacggtactctttccagacatattcgggcttcttgcggatccccaagcgcagtgcgcagcttcg

SEQ ID NO: 162287 - DNA, 776 bp, Zea Mays
ttctgtcttgactgcgcagtcctcaagttctcccgtatcaagcgtacttgttcttctgcctcttgtataatttctggcccaaagaactgcctttcaccagtttgatcccaatacaaaggagtcctgcattttctgccatatagagcctcgaacggggacatcttcaaactggcctggtagctattattgtaagagaactccaattaggtcaaactcttatcccaatcgccaccatgtttaagagcacaagctcttaacatatcctctagtacttggttggttctctcggtctgcccatcagtttaaggatggtaggccaagctgaaattcaacagtgtgtccaagcactcgtgcaacttctgccaaaaccgagaagtaaattgtgatccccggtctgacacaatcttcttaggcactccgcgtagacaaactattcgagccatatacaactctgctagcttggcccccatgtaattggtcctcataggtatgaagtgagccacttttgtaagtttgtccacaatcacccaaatagagtcataccctgcaggagtgcggggtagaccaacaatgaagtccatgccaatttcttctcatttccactcaggtaccttcagtgggtgaagtaatccagtaggtctctaatgttcagcttttacacccgcactggattgcgggttaattgtaaatactcccacggactctttagtaagactggcgccgcgaaggggtatcactggatctggaccgtctgacctaaaatatgagatccagat

SEQ ID NO: 162288 - DNA, 789 bp, Zea Mays
ggacagcgggttgttttaacacaagtacaggggctcttgtgcaaaaagtatcggtcgaaggggtacgcacaattctcgaccctccgatctaggatcgatggcccagatccattcttgaaccggtacacccaaggtttaatcgtgactgatcacatactatccaaaggcccaggtttcgttgctacacgatctaatcgcatgcgttgattttcaatccaacggtacaaacgacatctccttctccacaaccccgccatacccagatggccaaacgcgacagcgcccacacgctaaggcggagccatggccagccgacagccccaccgaccccaacacgaagagaagggaagggcgcaagacggtggggggggggggtcttaccgaagattcgtagccacgagcactgcccacggtcgagctcaacacagcggcggaggatagttgtggcggctacctcacatcacacccgaccgccatgaccgaccaaaccaaactacggcgtgaggcggacagcgccgtttccgctcataccggcgaggaatctgtcacgttctgcgtggtactgcgcctgatgtcatcaccgacaccctccagcccatcccagagaaccacggtgccgcccatcgggtcccgacgaatggcgggagcatgggccgaccatggcggatccgcggcgagcagctccgccgaagaggaattccgtgcggcctggtacataatctggttcgcgacgagggacgagaggagggatgcagcacggtattataatctgggcgaaagggagccgag

SEQ ID NO: 162289 - DNA, 443 bp, Zea Mays
gcgccgccctgggttagcaggctgggggaaggagaggactcatgggtcgtccgatccttctcggttggctgagattagatggggggcgttgggtcgaccggttcgacttgcggccatgggatgagaaatcgacggcttgagtttagttgcgcgtaccgattcggtcaaatcgatctcgactggtgatcagcgtgtatgcggtcgtaagggaggcgacactgcgaaccgttgggttggaatcttacgctcgcggcaagtaccgaatcacgttatgatctggaccgtctgtttagatctgacggcccgtgttctgcgataccctttcggtcgacagctttacaaaagagcccctctgtttcctcagtatcaaccctcagtccttccctggtttagcctgagtctagggaattgttacagattggaccccgagttttgtattattt

SEQ ID NO: 162290 - DNA, 439 bp, Zea Mays
tcctggagcaacatggcttacgaatgttctactgttctactcctatatatgtgatggtagtgtcgtaacaggcttgcacatcacttgaaatgggcgtattatacgagcctcgcaagaaactgctcagttccatgcctaatagttagctctgtaccggcgtatagggcacttctgtcttatggttgtgtcgttgcatcctttgtctaatcctcaatgtgaatctggttatgctcttgttaactgggatttttaatctcattgctattgcagtacacttaatgtgaatgttatttgtcttttgtttaattagcctttgaaatggacggtgatcggagggtgatgtatgacgggtggagaaaggatggggcacattcgaatgaatggatggttgtaacaaaggcttttcttgagcacgctttcaaagatgcaactggtcgtc

SEQ ID NO: 162291 - DNA, 858 bp, Zea Mays
cttggttgttctcccaacgacttccttgttgtgaagtatatcgcctattggaaatcttgtgactactatgactttgtggtcgtcaaagtagtgccgaagcttgcgagcagttagaagtactacgtataatagcttgtaaacttgagaataccttatctttgggtaccgaggacttcactgataaagtaaatcagatgctgcactgggtatgtgtgcccttcttctacccactcgactaccaacgtggtgcttaccatgtgagtcgtggagcaaatatatagcagcagatcctcgaccggctgatcggttgtaacttggtgtggtggcttgagcactggtggtgtggtcagaaacttctttagtgcatccaaggcttcctgcgcttccatggtccactgaaatttgtccaccttcttgagcaacttatggaacgacattcctttctttcctagccttgatatgaatctgcttagcgctgccatgcatctagtgaacctttataccttcttctgtgatcgtggtggctccatcctcataatggcttcaatattctctggatttgcttctattccccgatggctgacgataaacccaagcagctttctagccggcactccgaatacgcatttctctgggttcagcttccatcgatagcgtctcaagctgttgaagacctgttgcaaatcctcaatgaagttgtttgagttttctgtcttgatgaccacatcatcaacataagcttgcactcgcttgccccagtggtcgactaagcatgtctgcatggccctcagataagtcgctctagcgttcttgaggccgaacgacatgtaggtatagcaaaacgctccgaacggtgtg

SEQ ID NO: 162292 - DNA, 545 bp, Zea Mays
agaaattaggggagatgttgactccaatgctttgccaaaaggaagaagcaaacgggcagcgaagaattatgtggtcacagtcttcatcctcttgttggcagagatcacaagtggcattttgcagcacatttttcttcaccaggttttgcttatggtcgaccttgccttggatgagagtccagatgaagattttcaccaggggcccaagtttaacattgcattccattcaacagggggctgttcctgacattagctctgtctgtaagagaaacgctttggatgttttgttggagttgggatagctcaagtgatgttgcactgcttagacaaggcttcagatgttgtaagatgccattgtttagcacctggtcgacagtgatctcggtgtttttttgcatggttcgtcagcgagggaaagcagtcggctattgggtcgttgtgcgtctagtcatctagccaaaagcaagtagtttttccattgccgatatttgtcactatctggacccgaaggtctaaccaactagtgaaataatgctgcatgtcct

SEQ ID NO: 162293 - DNA, 566 bp, Zea Mays
gtattcaaagatcaagttggatcgccagaagaatcaaggtccagagtttaggatgaagtctttccttattatacccttgccacaactcctacttgccataaccgtacctcatctgacctaatagatggctagacatacaatatccatatgttctaaatcgtctactaactgttatgtaaaaacttgaacaaaactttgatttccaaaactcgatgagaaacgaaaattctaaaccaaacctattgtatcccttttcttacaaatctcgaggacgagattcttgttaagggggtaggatttgtaatactcaaaagtgtaataaagagaatagagataatctcaatagtttgtggtctctactaattattgcatgtgatcaacactagttaaaagtggatgaatagaacaatgaacacaaaattaatctgtgcatcatgctgagtttttatttgattgtgcatttgtgcttaaaaaatgtatcattaatagcatatcaatggatccatagaattcaaagtctaacttgaaaataaaaccatgaaaatagaggagagaaaggaaaattc

SEQ ID NO: 162294 - DNA, 356 bp, Zea Mays
cgcctcgtcgcctcgccattaatgctcgcccagcctccgcgacaaccccgccactgtgctcgagccgtcctctcacccccgcctgcccgagacatcgcaatcggcgttagcgccattcccgccatcatggcgagctcgccggcgctcaccgtctcctccatccccctccctcccccgagcgcctataaaaggacccgcccgagccccgtcttcaccacacagcttcggccaccgccactgccttcttccccgagccattcaagcttgcgccaccgtgctcccttcatcgctccggtgagctcccttttccccctctagcgatcctctgtccaattaaactatgccggaagctccgc

SEQ ID NO: 162295 - DNA, 701 bp, Zea Mays
tttctctttttggattttgttttacccttctaaaccccatttagggttaagtaccctactctagggttttatttgcaaaatatcatctcaatacaacttgtttgaaatttttgcctagtgaatgcactctaggtgtgtcaaacatatgaaatgccaatgcttatgatgttatgcttaagttttagtgacagtaactctaggggtgttacaggacacatccgccgtcgacgacctgccccctcgaccaggtacctcaccgccgccccctcacctctcatcgtgtcgatgagctacgtcgtcgccgacttcactcgccgcatcccgctctatctcattgccatccgcatttctctcgcaccttccacctaacacgccccatccacatttctctcgccgacccgtaaaccctaaccatcgctggatttgggtcatcgcagacgaccttgatggcttcagactttaggggcccctcggaggatctttgcgtcaacccaactctcgatcgacagggcatgagggtgcaccttctctttgatattgtccaactcctcgtcgtttcggctgatggcgaaaccctccacaatcacggcaacatcgatctcatcaaagtgggagaccatatgccctaagaacatgctgctcccatggtatgccccttcgaggaccacatgctccacatgtttgggcaacgtctgcagtca

SEQ ID NO: 162296 - DNA, 725 bp, Zea Mays
ggaggtctctagtagttggattctaatgtaataacaaccatgttttatagtgcttgagagcagtatgtgaggtgtttcatacaatgacatatatggatgtttggccttaatggcattaacaaacgaggttgttgaattcgatgattgttgtgctcagtgttctaacgtacttggtgaagtgttgtttaaagactggggagctgcatccaaatttgatgatgggaaatcctagtgttgattgcacctatgacaatgcattgggtttcattttatattgttttatgattgttatcaaggtgtattgttttctttgataaattagtctgagttagaggttgtttcgggaaaacgtttttttcaagatggcatcaatgctactagtatattatatgagtctatttagggagtttgactgagttttaccgttggtgaatgtcttgatttgtagaaatggcagaattcgaggacaaattcttttaagggggtggaatgtaatgccctaaagattaaaccatatttataatccaaatatggtgtgtcctatggatgatcggaggccgtagatgtatagatctcatcaagatgattccgatcaatcactagtttgccttgtttggagtccggatgagtcttttcgagtgtcggttgatctgagccgttggatattaggattgtggaagttttattctatttatacctccctaaccctagaagccatgtcctcc

SEQ ID NO: 162297 - DNA, 669 bp, Zea Mays
gggttagtagaataaaagaaccctgaatgacatatctaatctgaccccgacctccatgaatagtcttgcctcatgtttttacctcaaccaaccctggcccccaaggggacccaaggcagaaggccgaccctaggtcttaatctcgtccaacctctgaccgcccaaagggttgaggcacaaagtcatgccttgcagagtccgccttgcctgacctaggggttggaggctgcactcgaccctcaatggtcagaattcatgggatcgtactgatgaccatccaggaaagggtacaaaagagtcaggctttgacacacatgtatggttcgaatgacaacacgagtgttgttagcatacgagctctaacattgaggagagatcgaatgaccattctagaaaaggcacaaacaaatgtccatcacctgcacaaaagctaatcatggctaaaccactcaatggcctgaaggacaactaaggacatgttgcaagacaagacaaggcacatcagtgtggcatgtgtggctacgttgatgtgatggaaggggacaatgtcagcttgcttgggaggtcctttggtcaacaagtatccaagaggacaagaaacaacatgacaatgctaggcctccgtctgtcccgcctaacccctagatttatgtaatagcacctcccttc

SEQ ID NO: 162298 - DNA, 550 bp, Zea Mays
atgcagtgagactcccagcgacgacctagaggtcttgcgttgcagccgagctcgattccgtgagcgcagttcaccaacgacttcttcctctccgcgcacactggtgaacgattgcccgggcggtggtacggggcggatgaggggtaaagctccgtctaaatagccgcatggagccccatcccacggcgacccggacagcgagggaggtagtagatggggcgcgcggtgttggcacgccaggcgtcgggtctgagagcagagagggggcgcgcgtgttctagagatggcgttcagcgcaccgggctgcaggaggaggaagccgcatagcatcggcttttatgcacaggaggggcaagtccgagtgaatgttgctggttcacggcgagaaatccgggcggagtttggttgaggcgcccgtggaagtcgcacatttggttggagatcgtttaggggaagaagataacaccgtcagctgggacccacgcgcaggagaccaggtgggcagtgggctgcgcggagtggtaagtgggccgagcagaggaaaaccggc

SEQ ID NO: 162299 - DNA, 816 bp, Zea Mays
ggactgtccggccgtgccatggtgccaaaccaaatttggtgttgaacaatgtgtaaactaaatttttaaaggttacgtttggatccacgttagccgttgctaaatactccgtaggtagttaccgaccactaattgctaagctagctaattatcaacagacactgggcgggcatctagtagacacgtcatctgagctcccaagtaaggaatactacacaactactctgcacatgcttaaacaatggcaaagtaaataatcaattaaagaaaaccaacctaagccagctgacgcccacacacaagtacacaagacgagagcggcagcgttaatagacgaccagacacctcaaaactggagcagaaaggatcgggcgagcgaaaaccaacccgtgttgcagggaaagatgcctactgccaagcactccaaatcaaggtgcataagggagagaattagcacgaaaccaggaccgatttatgatgagagggagagcagctttgtgagacacagccgagaaacaggggacatactactaaagcacagatagaaaaaaaaggagagaagaagagggtgctgctaaactagtttcaagacatgccagctgcggagccagtgctagtttcaactgatccatgcaatacgaacaacatctacacttgtctctctatgcacagtttattagaaactgttcgatccatgcagaattgcggatgctgactaataaagacccgttctaaaaatactctaatcattcttttaaattataagactttttatgctttttctagtatgtatctctaaatatagcgttgctagat

SEQ ID NO: 162300 - DNA, 702 bp, Zea Mays
gtgagctccaccttcttgtcagcaacgcgaaacaccttccggtttggccccagcctctctgtttcgcccagtacatgctcacctgagctttccccatgcagccgaagccccgccaccatcgacccgaggcatccctgcgtccctgctattgcttcggtgctccagagtttcctctcgaggtgagcaatccccccatgcccttatttccccgtttgttgccctatccttcgcgcgattgctcgccagagcaagtccgctccaccgttgggccgctccaccatggttcacgccctctggtgcccccgcgtcggcgttgtgcccacggttgagtccgtcatgtcgccctgagtgcgtccgagtccttcccagtaccctaggccttcaccgtggttgtgccctcgcctccggcgagacctcgccgcgaagacgggcagcatcgccgccgcgattagatcaaccaccctgcccgcacttgtcgttagatctcgagcgttcattcgagatcgggtggctaggatttaattagattcgagctaatcccaaccgtgcaatgtagatctggccgctcagatctccccctcacccgcgcccttgccgatgggcccgacctatcaacctagttaaccctcggccgctgaccgccctaacccactggtcagtgcgctcccacgcctacatccgcacgctcgcccgcggaatctg

SEQ ID NO: 162301 - DNA, 2247 bp, Zea Mays
cttttctactccttctgaaaatggagtttgaacttaaaattttgcagaaggctgaatgaatttcgtaccacctgtacacaacttttctgaaacttatgttaaggtaagatgaattgagcaatgagcactgattacctgagaaaagtagcaaacagttactgtatttgtagccaatatctgataattttctattatttaagctgcccaagaattgccataacgcttttgtgaagtgtctagcatggtctaacttggtactaacctagcaagatcaaccacccaagttcccatcccctgtttctcccaatgatcaatgaataactaactaccccctccacctccagtcaaacaacttatgaattaacgatgacaagcatcaagcaagcagtacctttcttgctggaatggccaaagtaaagttgctgagcacttggacgtctgggcgggatgggtatttgaagcttacatgcctgaaatctatgttgccatcaactttttctataatcacgccttcatcactagtcgagttgattttagatctcctgtctataatagttagtattgaaattgtggattcctgggcttttgttgaatctgttgccgttgcacttgtttgggaaactccaaaagctgtgaaaatcagagcaaaatagacctgccagttgcctaaatttagtcagttgctgaacaaaatgtcattgtttaaatgatcccaaatgcgtatctcttaccctaaaaacgtctttaaaagttgtttttccttcgtgtacgaacagtgcaccaacatagaaacaaagagcatatgtgagatacataattaagtttgataaactgaaaccaaggcctccaaccattccacttctaatgccatgtttcattgaagcttggcatttttggatgtatgatgtaattaccctcttctctgcacagaaagatgctactgtttgaatactaccaattgcctcggttacgacttgacttgcatcttcatacatcacctgttgcatttagttgttaggtgaaacctttgataagacattaaatcttactaatttttttgttgattgtaaacttcaaaatatatctacagttattaatattatatgaaaaactgcatattgtctaaaaagattgcacatattcatctgttttgaaaagtatcaggtatgttttgcttttttaaacataaatacgattacattcactgcaggaaattcaatattttcaccttagcatcttcactgaaccctttcaagaatttcacttgaatataattttgtgagcccattacgggaatcacacatatgacgatcagcgtgagtttccagtcagaagcaaatgctatggaaaaaccagccgctattgttactatacactgcactagtatggccaagttatctccgacaaggcgtcggatgttcaaagcatcaatatagagtctcgcgccaagggccccacttcaaaatgaaacagtaaaaatactaaaataatgtccaaacagttgtagaaaaatgtaagaaatttgggataaaaatgtttaagtagcaaaacctagaatttgaaggctcatcaaaccaagcaacttcttgatgtactatgctctggaaagacaaagagcggacacgttgtataagtttcccaccagcaaccccaaacagaaagtattccagttggattgaaatcagggcaatgactgcaaacagaaggcacgtcagtgcccaaaaccgagaatcttttcgaagttggtgtggtggatagtagaaagttcttataccaccagacatcattatactgaacgaggggaacagaagaccatgcacaaaggcaactatagcagctaataggagaactggtgcttctggcttattaagtttgaatagtcgtccaattggtgctttcttaggagccttgctattaccatgttcctggtcttcctgtctgtctgtaaaatcttgcctgttcaattctttagacagcccagtggtttttgtgaaggaatgatgtcctttgttcctgggagaatctctgcctgttgattgttccaaaggtaaacttctacttttatagattgaacctgacacgtcagtatctggaacctcatgcctttctgtagcatgtgcctgttgtaacctaataagctgagaataagctccatcagggtccttaattagcttgtcatggacacctgtgtgacatgtcaattggttaatttgttccaaaaaactgaattgaactacctctgttttt

SEQ ID NO: 162302 - DNA, 1012 bp, Zea Mays
ggccagagcagttgcttcggcttgattgatggctgttttagctccatgtttgatgatgtgggactgcttttgttatgtcaatgaatctcagttcagtttctactacttttgtgagcaccctggactgtattgggttgttgttttgcttcagacctataacagccatgcttgtgttggccctgctgacccatttaagtttcactgtcattaatgtgcagtgctacagtttcatccagctgttggtaattaatcagggccctttcctcctccatgtatgactttagcatcctgtgctggaatgtaaggggtttaaatttgcaggcgcgccgagatgcagtgcgcgcgatgatctccaccaccacttgccatcttgcctgtttgcaagagactaaattatcaacggtcgacaggtccattgtgacggcgcttggaggaccaaagcttaataaattcagttttaaacctgcggaaggaaatagtggaacccggggtggtattcttttactttgggatagcgacctactcgatttgtccaattttactatcggagaattccacatatccgcaaatgtctctcttaaggatcgtcatgcttccttctacctgacagtcgtctatggaccatcttgcagaggccgcaagcctgattttctaagagagatgagtgcacagaggcctccttcaccttccccctggttggtccttggggatttcaactgcacatacaaagcaagcgacaaaaacaattctagaatcaaccctcgcctaatgcttctgttcaggcaagctctcgacatttgtgacttgaaagaaattcctttgcaaaacaggaagttcacttggagcaatgagagacgacaccccactctcgtaagactagacatattcttctgcaactctgagtgggaggagattttcggaatatttggactacatgcactatcatcctcgatctctgaccactgcccgctgctcctatccaatactactatgccgaggcgtccacgttcct

SEQ ID NO: 162303 - DNA, 471 bp, Zea Mays
gtgcagacaaagcaaaaaacagtcatgctttggccggtcaaaatttgtcctttttggtggttataagccaaaaattgggaaggccattttggtcacctgagttcacttaagttttttttgttgttgaacagaatttggcttggctggccatcaacacttcggcatccaaccaaacgaaggccaagtttacttggcatggtcatttttttgcttaaactgcactaccataaactaaacacaccctagtgcaatcatttgtctgatcaaatgcccaacctttctctccacttgtttatctgcagacatccatgcctttgatgtcataaaatcaatctgttgtatcaccaatacctgaaattcatacataaagatccttaatgagtaaatatattttggacgacaacacatgttttgaccaaactctcacaaaagtacagctcccaggaaaactttcgcaataataacacacat

SEQ ID NO: 162304 - DNA, 447 bp, Zea Mays
ctcctatatctgttggtggtttccgctactacattaattttgtggacgattttactcgcttcacttggatttatcttatgattgatcgcactgatgctcctcgttttttccttcaatttaaaaatcatgtcgaacgtctccttgatgccaaaataaaatatgttcaatctgattggggtggtgaatatcgtaaaatgcacaaccaattctttactaatcttgggattgctcatcatgtgtcctgtccacatactcatcaacaaaacggtacggtcgaacgaaaacaccgtcacattgtagaaaccggtcttgctttattggcccatgccggaatgcctcaaaaattttgggatgaagcttttgtcacagccatctatcttattaatcgtcttcctactcgtgtcatcgacaatttatgtcctttagaacgactttttaaaactccgc

SEQ ID NO: 162305 - DNA, 277 bp, Zea Mays
gttgtgcgccaagttgagtgccacctcgggctggaagcgctcacaagggtctagcaaggccatggtgactacgacaacgcgaagaagagaccttgaaggcaaaggggcgcggagagctcggaggcgaaaggacgccgcgagtgggagagaagcaaggcatggctgctactcgagggatgaacccctctttaaaggcagactcccctgctctcgcctcgaagcgtcgtgagaagtctcccccgatgcacaccggggtatccatcccatgacacggggg

SEQ ID NO: 162306 - DNA, 577 bp, Zea Mays
atatctgatcagcccagatccaatgaacaacgaggttatgtgctatggtgtcagaaccgctcaattcggaatctacggtcacaatcaccttcctcccgatcaaatcttagccgatggatagaaatccaacggaccgaccacattcttcctcccctagcccacaagacggcgactctagacatccccacggcggatcttccgctggagctccagatttggtgctaccgcagtcccaatccgagaacccgcgtgtgcagcacgaacagcaggtcaaggcgaatacgacggagtgcaccataccatggattatcgcgatggagaagcctgccacgcggaggtgcaggtcagcggtggcataaaaccttcggtgagaaatttttccgcgccaaccgaaccaccagtccagacgagcagcagccaaccactagaggtctcgtgcgagcacccggggtccactagtgcacttcgatcggaccctttggcggagatcccagacgcgacggcgcacgatcatacttccctcttcttcttcgccgaaagtggagatgggcaggtagcctggatgacaggaagtccc

SEQ ID NO: 162307 - DNA, 621 bp, Zea Mays
atgtgcacatccattaccgcatgcctcacttccttcgtcccaacgcacccgcccgagttgccttcgcccgtgcccgagctctctggagttcccccaccgccactgccgcttggagctccaccccgaccgagccccacctgaggtaaactcacccaccgaacttacttttctctctccctcatcctctcttctccattgagcagtcatcggtggagactggcgatggcactgtgccgtcgtgtcagcgttctccagccaagcgtcactgccccacattcccctctctccagcgtcgccccctttccccctcattgggtcaacgacatgcggacctcgctcatccgtgtggcctcgcacctgccccaggtcgctgaccagcgggcccggtccttctagggtccccctgtcagcccgccatgctcatgactgcccacctgagccacttgttgtgggccctgcgcatcagcgtcgtgccatgcccttgggccccagttatcagttgtccgcacccactcgcccgccagttctaatctcggtcgtggatccgagatccaatggccgagggagatcgatagcccttcactcacgtttttgttaaatagcccctcggtttcctgagat

SEQ ID NO: 162308 - DNA, 526 bp, Zea Mays
aggccacttcctcaagggaggctccacaacatattcagcaccgtcacccacctcagcagatgatcggggagcttcacgagcgagtcactcgctctaggtcacaacacatttctcattttctcactcagcttttgttgctacttttgagctctgagatgttggacatgcttcatctgatcctaactgggttaatgctatgcatgaggagcttgaaaattttgaaagaaatcaggtttgggttttgatgccacctccttctaactgccatcccatcggtacaaaatgggttttcaaaaacaaacagagtgaggatggtttggtagtgagaaacaaggcaaggttggttgcccaagggtattgctaaaaaagggaattgattttgaggagacctttgccctgttgtctgtttagaggccattaggatccttttaatctttgctgcttcaaagggttttaagcttttccaaatggatgtcaaaagtgcctttttgaatggatatatagaggaagagctatatgttaggca

SEQ ID NO: 162309 - DNA, 1160 bp, Zea Mays
agttcttcgatttctgcgagcaaaagagcattcagatcaaatatgcctcggtggcacacccaagagccaacggacagctagaaagagccaacgggatgatattggaaacactcagaaagaaagtcttcgacaagaatgaaaagttcgcaagaaagtgaatcagagagctgccatatgttgtttggagcctgagaactcaacctagtcgagctttgcatggaaacacacctttctttatggtctatggttcggaagcagtgctacctgctgatctcaagtttggggcaccaaggttaatctttgaaaacatagcagaagctgaggctactaggatggaagatgtcgatgtactagaagaagaacgattgaatatggtgattcagtcggcccggtatgagcaaactctgaggcgctatcatgacagggtcgtacgacattgatccttcgcagtgggagacctcgtcctccgccgaattctaacggaggagggacgacacaaactgtcaccactatgggaaggaccattcatagtagcagaagtcactcggcctggatcatatcgtctcactcagatggatggcacgtaaatcgggaactcaaggaacatagaacatctcaggaagttttacccctagcaatatctcaaaagctattgggatgacaatgtactctgtaaactgggaaatgtatcatcaataaaaaggcttcaaagtccttgaattgttcactgtcaaccggcacacttacttaactcggggtgaccactataccctactaacggagcaatcggcttaagtcaacaatgacttaaggctgtgcgacatgctcacgcttacttaacttggggtgaccactataccctactaacggagcaatcggcttaagtcggcaatgacttaaagggcagtgcaacatgctcacgcatacttaactcggggtgaccactataccctactaacggagcaatcggcttaagtcagcaatgacttaaggcggtgcgacatgctcacacttacttaactcggggtgaccactataccctactaacggagcaatcggcttaagttatcaatgacttaaggcggtgcgacatgctcacgcttacttaacttggggtgaccactataccctactaacaaagcagtcggtttaagtcggta

SEQ ID NO: 162310 - DNA, 566 bp, Zea Mays
ttgcttggatccatgggaaactatgaggaaggaagttgctcctctcctgacaaaaagggtggatagtgaaaaaaacaaggccacacgagaggcctacttataagaagaaactcaagacaacaaaatgacgcaccttcggtccatcactaccaaggatggacatgaggagacagttcgactcccgatgcacaaactatgggagcttgcatcaataaagcccgggacagtccccacacgacttactctcgaggagtgataatcgagagacagtagaattaaatgttgtctgacccatcgaatagcccccaaggagaaacacactcccctcaggggcatgcgactactatcggggatctcagatctccggaaccctgggggccacgagtaagaggggacggatagagcccctcctcgataaatccacccctagatgactcacacgcgtcgagctagggggtccggtgaggcggaactaggtcgaggagtcagacagatcgtcgagggggtcgctcgagtaggtcccatgcaaccgttggactgctacccgccattaatgctacacatgc

SEQ ID NO: 162311 - DNA, 816 bp, Zea Mays
ccggcgagagtcgcgcccgtaccccggcgctctattcccaaatcccgctatcctaaatgcacaggaagacaaggcgagccgaatggggggttctaaccggtaatggagtggccgaatgtcttggccacgacgtggatggcttcacggcggcgacgaagtcgtcgacgagaaattacggtgcccctgagtatcctccgcgcccaccagacgcaaggacagctccaccgtcggtaggacacatcggtgttgacaaggggatcacagacggcttgtgaatcgcggaattgacctccaatgcccacggcggcgcgctcccctcctcactcggtgctacaatggcgcaaggcttaacttggggtggcttggtcgggaacggagattaggtggtgcggctcgtcttttatgggcgcgagacggtgcccaggtttatgcaacggagcccgagtctgtgccccggaattccgcggtgtctggtcagagcgggtccgagtttttcgcgaggaggaagaaccggtcgtagtggatggcagaagggccccaccaggcagggtgacagcgtacgccaggaagtggccaggtcgcgcgggcccgcgaggcagtgaatacggcgtggcgaagaagggggaagagatagagctgacggatgggtcccacgattcagtgattcagggtcgcgcatgagagagactgagcagtggggcccggttgtcggcgccgcagagcgggagcgcaggttgggccacgcgcgcgtgaatgggccgagtcgtccaaaatcggcccgggcgcctgtttccccttttattctttttcagttta

SEQ ID NO: 162312 - DNA, 481 bp, Zea Mays
cggtggttaggaaagcatggatgtatatatgtatgtccactttattatgtagggtagaagatgcctttaaagcatagatatgtttgggcaagaaaggatagggtaagaaaatactccatccaagattatggatcttgattcctttgaagatctggcttgaatcttatccttccttgatttgatgaggtcgatcatcttcaatcttctttcttgaagttgtcatccgaatttgggacatgtagtgaaggtagattcttaggtaaacaaaataggttaataggtggttatgagttaaataagtttaagcagagtctgtcttattgttttgcttctagattggttggataagttatgtaacctgttatatcagtcaagtttggtgttatcatcaaggataatgggtattggtgttaccataactagggacatagttgagataggtgtgggtacatgggataggtagattgaaccgagttttttt

SEQ ID NO: 162313 - DNA, 667 bp, Zea Mays
tatgacacataaactaagtgatttggagaaacagaggtcaaacgacgcgaaaacgacgtttgagcgaggaatagtgccatagaaggtttgatattctaaatggggcacgaaatgacttgtaattgagccgatacttcacgagtaggtatatatgagtacaaatgagtgaagggtgcacttggtttgaattttggcgaagaaagtggatttgtggcactcggctcggaatcgatagctataaatgggaatctatggaaaatggtgtatgggatatcgaattggcgtgaaatttagcgaatatgttacttgaggtttcatgaaggtgctggaaaaatctgggatcgatttgatcaattttagctggtttgggcatttcaccgagcacttggcgtgcgggttattggaatttgggtgaaatggctgtttgagtggtttaaaccctccctgaggagctggaaacctgcagaggaactcaaagaggcactaggcacacattcatgcactagattcacaaagatttgcatagattttgatttgagcacaaaaggtggagaggtgagcacactgctcacatgaaatagagaggaggaagaaaaggaggccgagcagctcaccggtgagggagatgagaaggccgagcaggagcagaagggcttccccggagctc

SEQ ID NO: 162314 - DNA, 513 bp, Zea Mays
tggcctgaagactagtttctggaaaagtgtttggattggtaatttgcctctgtctattcagtttcctgttctttttgacttgacctatgacaaagatgtttctgttaatgatgtttcacatctaattttgagtctcttactttcagaagaaggattgtgggtaatttgaggatgttattcgaagaaatgataagttgttgtaatcaggtgtctttgtctgatcaggaggataaaattgtgtggaatctgggaaaaaaggcttctcagttaactctatgtacaaaaagaaaatggaagatcaagttttgattccatataagttcttgtggaaatctaaattgcctcataaaatcaaggttttcttttggttagtggtaagaaataaaattcttactagggacaacttgaagaaaaggaactggattggttctttggattgttgtttctgtggtgtggatgaatctattgatcatctgttctttcattgccccattgcaaaatatatgtggagag

SEQ ID NO: 162315 - DNA, 638 bp, Zea Mays
cttgaggttctcctcggcgagagagatgttgctagccctgtcatcaagctcctgttgcagcttctgtagtgccgcctcagtcgcggtctgctcatcccgctgcttctccagcatcgcattataggctttcaacttctcatgaaattctgtgataaccacctcccgctggtccaagtgctatttcttcttgaccagcctcttctcctcccgggtcgccttccgctcctgctcgagcaccttctccaggtcttccttgaggtcctcacgcccctgctcaagatcggaccgctctgaagcaaattggcaggacacggccttggtacgttcctccagctgggtgcgccaatcaccaaggcgctggtgctcagtctcgagcgcctcccactcccgaaggatcgccgcctcagtctctcggagagcctgatgagcgcgggacagcacccaagggaggggaggcggcaccatttctggctcggcaccggtctggagccgtcgcccaagaatgacctctggctcctccggaatgggcgacgggatggaatcgggcacgcccccccgcggcttccgccgttgccgaaggtatattcgacgacatcgccgccgccgttgggtctgcggtagacgttggtggtgctgcc

SEQ ID NO: 162316 - DNA, 316 bp, Zea Mays
ctttggcttaggagctaagcacccggggaagtatggtaatttgcgtggtcgatgttttatttatttcgcagccaatggttgtatcttcgaccctagacaagtgttgagttttcatggtcccgagcgagctcacatttggaaaatgcttcaaacgcaacttcctccaattggagatttggaatttgtagcagagcggatcaatgcacgtgctcaaatgattttagaaatttaagtcgaatggtgttagcctgtttgacgtatataaattaattggtgatatgcgctgactaggcctcaatttcactgtctgttctcc

SEQ ID NO: 162317 - DNA, 399 bp, Zea Mays
gatttggaaatacaatatcacccaggaaaagcaaatgtagtggctgatgctttgagttgtaagagtcaagtgaacaacatcacacctcatttgatgtcacaggaattgtgctgggaaatggaacaacttaactttggtatgctcaataatatggaagcaaccattatggaagttgaatctacattggaaaaagaaatccgtaaaggacaggaatctgaagagaaaattaaggaaaataaaacttttattgggttgggtaaagccctagatttcacgaaagatgaacaaggcacattatggtttaaaaagagaatctgtgtacccaaaatcgaacacctacgccaacttattttgagagaagctcatgatttggcactctattcaccctagaagcacaaa

SEQ ID NO: 162318 - DNA, 533 bp, Zea Mays
actgattgcaagccatctcacgcaagaagcgtgtattatccgcggtggcattgaccaaggcagcgatagcctcggccaaagtcggtggtactggtggcaggttgggagtatcttcccaaccacgggaagaccccgcaccatcgtgtgcgcgagtccgtgatggcatctaaggcaaagaaacatttgggaaaaatataacatgccagcatacaccatcatattacattaccaaaatgtaataattatacagactccaacgtacaactcgacttcagtacttattttacataagtataacatttaaactatactattctagtcttcgtcatcctttgttgcttcatttcctgctgcaggagaccgttcgtcagcaaggttcatagaaggagggggcataaaaagatctccccatcaggtccttcacttgttcccgatggcccggctcccattgcagcagcgtcggaaggcacgtccgggtgcagtcgagcatacagtacatgtacttcctcatgtaaagtattacaatacacttg

SEQ ID NO: 162319 - DNA, 387 bp, Zea Mays
ggcgggaggaaatcattgggtgttggatagtggttgtactcaacatatgaccggtgatatgaggatgttcaccgaaatgagtgaggaaggttgctcaacctatgatagcatcacttttggagacaatcgcaaaggaaaggttaaaggtttgggtaaaattgctatttcaaatgactattctatttcaaatgtactcttagttgaatctcttaactttaattttctatccgtagctcaactatgtgatttgggtttgagttgcaattttaccgttgatgatgttgtcatctcaagtgttgagggtagcagtctaatattcaaaggttttagacatgaaaatctttatcttgttgatttttcatctaatgaggcaaaacttacaacttg

SEQ ID NO: 162320 - DNA, 405 bp, Zea Mays
ggacgcacctgcagacctgcttcggagttccctgatctgggtggcttgaattcgtcgttgatgtgtaattctaggacaggaaaggctggacaacagaggggatctaacctctgaagctctgcgcgttctgaagtgccaaagatgtcatcttagagaggggaacaaagtaagcgtggccaggacagatcacatatgcgcgggcgttgcttaccatggcagcttgtaagtcagggaagtgagtccagcgacgatctgaatccgatggaggcgcccaagctgatgtatgacagcggctcgaaaagagtcccgcacacaactatgaggtcctgactcctcactcctgtagaggtgaagtttgtctcccgcgcaccagcgcacgtcccctgtcccggcctcccgcagtgc

SEQ ID NO: 162321 - DNA, 807 bp, Zea Mays
ggtcaaaatgaaccaggcccatattatacattgtttggttctctttttttagcttggcccaattgggttgccaacagttttcacgtgtaaaatgaagctcccgccaaatttaaaaattttaaacgctattaaacaaattacaacagatttgaactaaaaatatgatttttacccataaaatgaactaattgcaatcatctaaatatgatttacaatcatttgaattacaatcatatgaactatagtatttgaacaccagctgatacatcttgacccataaacagaaacagacaaacgtgataaatatgaataaactgggagagcaccagaaacagccagaatcatttgaattacaatcatatgattttgacccataaacagattgaattacaatcatatggatgaaaacaccagactatgaaacagactatatggatgtttattcatatatgaaacaccagactatatgaaacagactatatagatcagtttattcatatttacaccagactatatggatgaaaacaccagactatgttattataaacagaacacctcctgaaactgggagagcacaactccatcccgccttaacataagaacagtcagaaccaccagaagaacaaacaggaactgaacataagaacagaaaccaacacactttgcacacagctccttgggcccaacagcaggtacaaaaacaaaacaaactccagtctaacactcatcttccagactacaagcacagacatctccttcaagatgaacagaagaagcagctccagtagacagcaataagaaccaagc

SEQ ID NO: 162322 - DNA, 1203 bp, Zea Mays
catacaaccgtgtaacgacgtttctcgtacgaatgaagtactctatacggcctcttacgtaagattgcgtaatgctgcaaccacatcttcaaggcagttaggtccttgaagaccctacccttttcaatcatcatgctaggaccggcctcaggagcatctagcagctcatcatcccttccttctgcatttgcctgatgagaaagactaagatcgctgaactcatgcactttaggatcccgaccgtctggaaaaacacgttgcaacatctcaatgtcactctctgtgagttcaccaaccgggcgatcatcatctgaatcagtagccatagcaaaggcatatggctcctcttcattcctaaactcaggactgttggaggcaataaaaccatcaccgaagcagccacgtgcctcggtctgaggatcaaccacaagagcaggggtctctcctgcaacatgtacaagatgatcagtcccacgtcaaatggaatgagcaaagtgctcatggtccaaaatgaagatgtaatgccaataaaacttactgcaattggtttgtgccaaagggatacacgcagcagaatctgtctgcaggccatctcctggctgacttaatgggatcaaattggggccagattgagcatcaagaacagttggcacgtcatcgatagcacgatcaaagtcttcagggggacggtctactacaaccggacgtaccacaacctgcatgagttgcaaatgggtcttcatagccgaagtaacataattatcccaatccagttgacagtcaattgggatgactcgtcttatgacatttggtggatgaccaatgttaagcactccgtcaaccgcaatgtcatcatcttcatggtaacctagcttttgtttagcctttgtaaacacatcactcaaggagggtctaccattgaatagtatcggcacgtgtcacatgtcaatgaacttggcatttccatacggatcttgttccacattgcctccatgatataagctcaaaaaattgtccatctatttgaaacacgaattaaacattcaatatacaccgtggatggttattgcctaaccacaacccactaattactagctacataactataaatataaccacaacccactaaaatactaaccaccttataactaactactaaataactaattataaattttaacagcacctcccctgcgcggggag

SEQ ID NO: 162323 - DNA, 410 bp, Zea Mays
gatgaagcttggctactttggtgaagttgaaaggaaacttgttcgatttgctggagaagaaaccaccccaacgccgaaggatgatgaagtggtagtcttcaagagttttttcagagcaggatttcgacttcctctgaatgagatgataggggaagtcgtaaaattttttgaaatatatctccatcagcttacccctaacgccattgttaggcttagtgtctttatctaggccctccaaagccaagggatgagcccggatgctgaagcattttgccgagtgcacgagttgcactaccaaaccaaggccagggcagacagtctgcatgaaaattttggctgctacaattttgcgtatcgcaaggatacgaaggctccggtacttagctatcgcaccaaatggccaaccggct

SEQ ID NO: 162324 - DNA, 854 bp, Zea Mays
gtcgtttggagcctggggctgtgtcagggagctttgtgtgatcatgcctggggagttgggcggcgttccgtgcgaggtggggcagtcaacagaccggttgctcctcgccggagcaatggatccaccctgtgtcgtgaaaaaggggtgtctgcactcctttatccggtaaatcctctcccctttagttcaccgcacaatctgggttgttgcgcacctcgtggtgatttgtttgggctgccaggcatcgagtattgctcatcgacggtcatggcaacatcgtagtgtcgtagagaccgtggttagcagtctgggcatgatgatcagggtggagaagtaggctagcagggtcgtaatagagagggctttgtgtagaatcagtcgtatcaagtattagagcctagggcgcggagcatacgacctctagccatggcgcgccgccgcgaaatcgtctctgggtcggtcaccaccgcatctggcttccagggttgaagacaaggcacgtccattgatttgatctgaacggctgggatcaaaccgtagatatacccttttagcactttaaatctaggccgcaagtcgtgcatccgagggctgggagtgggcactgtcgtggttggatcttgggcgttggcttcggatccaacggtcacgtttgtataccggttcacataatgcgccatctaatcgcgaccctcagagtaagatctagcggctcagattcaccgataccccttcgtttggcttatttactaaagagaccccgaagaaatcacaaatcaacccgccatccagagaaccctattcactgagtctcggtaatcttgcgccagagcccctgacttttccaaaaattg

SEQ ID NO: 162325 - DNA, 1045 bp, Zea Mays
acctggtagtagtggaggatcctgtgtacgaatggatgaaggggcaacccaaactcgcgcttgtagaaggacgtgggcatgataacttcatcgtccttgggtcggggcacctcgccctcaacttctagcctccaccctgagacatctttcgaggggagaaaccccatcttctctaagccacgaagatgactctcatggattgcataggggggaacgatgccatgcaagcaaaatggagaggcacaaaggagagagaaggaaaaagtagtccaagagggcacactcacaaacacgagaatacattaagctaaaaaaacaacaaaaaccctcccacttacttatacggaaatgcaggagaaaaggcgaacacctagatgctgtggaccctccacaaaatcagcgcgagggatcccctttaggccaatggtcaccttggccaaagagaatctttgtgattttgtgcaggaccccgctacttggggcaaggcgtgaaagaatgcgcgctagaggtcaatccagtaataagcaagatcgttagcctggtcggcacactacctgggctcaacacgacaagcgggtcgttccacgtccaatcaggccatccacgcctagcaaaataatgatgaccatcccacctcaccacgtcgagcaaaataatgatgaccatcccgcctcaccacaccactacagtaattattgggcgccaaccaggtaaaatttagaaacattcgaaatccccacgaggagcgaggggtgggctgagcaagctcccattgagccgcaagctaggtgactggcccataggtcattttcttatacccgtgtccaaggtcgtacctcacattctccagctaacgaggtggccacgaagcccccctttgatcgacaagatcgatcaaagggccggtatgggatcaaataaggaacgactggatcagatgcccccagcgggttgccccccccagtgggactactcgccgataccgtgcccggaaagggggtggtcagatctcacttggataacccgcttgtaactggacggccc

SEQ ID NO: 162326 - DNA, 1161 bp, Zea Mays
cggtgttgatccaagaatcctgtagcaagattgtagattgatgtatagtgaacatattctgttaaggaagacagccttgttatcaacaaaaatccggagataatgtgggaggaagatggtcggttctggcgactgaagaacaatcgccatggaacagtaactgagcagatcagaacgccagctcagctcgccgacgttgatcgccgcccgggtccgtgcacagtcgggaatggataacgtcggggcaggacaacccatacgtggcgccaccgccctagcccagccggagttactcaccggcggccgccgtgactcagcgaagttcgccgtgctgtcgccatacttcgatctctattactgtgcttcgttcttacgtggtagacatgcgtcaataatccacctcgtggccgcggaccgatcccgtacctccgcggctataaatagccgttaggtccacggcgaggtgttttcgtctacaccagtaaagctcagtagaagtcccaaattcgtgaaattccctccaccattcccaaaattgacagtgcatggtgaagatatacttctttacggacgtgtagccttaatcttgcctcccaattccacccgagaccgttgcggcttcgtttttccccttttctgttacccgcaagccaagaaccctcctcgctccgtggccagacagtcctggtaaggttctgcgcttctaaagtattgttttagcacctctatatgcccgtggggctcaccgtggcgaccaattgaccattactagcacggtgttatgggaacgcaagctcgacgtcgcatttctgccgtgcgcgtgagcagggcgttctctgagcgtgcgagccgaattgatggccataacagcacggaatagagtagaatttggttgggcgggggtcagcaggtgctcaggtctcccatggccgtggcgcagcgggggtgtgttcgtcctcgccgccgtccggtcagggacttattttttaaaagacacagaagtttggggggctgaggagaagatgtcagtgactcattaaaactagccgaggacttcttctcagatttatgaaccggcaagggcctttgtgcaaactgtaccgcgcagtcgcagtcaagccggattttactaaggcctgggctgtgttgggccggtttaag

SEQ ID NO: 162327 - DNA, 1129 bp, Zea Mays
ctgacctctaaggtggttgggtcggctagaccaatgggcacaacagaacttgttaccacgacatcatcagtccggggcattggtgacccaacatgaacatccattgaagcagcagagggggatccgaccgaagcaccctcgggggctgaagtaccagggcagactggcaggcttacctctgccctggccaggaaaccagcagaagacacttcgtccaggcactctacatgaacgtagacaactctgatttcaggcaattcaagcaaaaggtcctcaggaatagcatcgtccagcacactatcgatagcagacatagtcaggcctcagatactcatcatttcatcggaagcaaggctcgaagtgtcaccacaagctttagatcgccgttctcgacggaccaaggggagcgtttcttcttcttcttcttcatccccttcctccacctcatacctaccagcccacacaccactcccaccttccatgacatcctctagatcagcacccactatatcgtcatcaaggttcgatgcgaccggagcggtcactggctgcaggttcgatgaacaacgaagtcttttcttcttcttcacctctgtggactcagcccgagagtctgcttgacatgatcgcttgcgacgtgtacccttaggattaccaattttcttccctcatgcacttgactgctcggagctccactctccgactcaagtcgcgctgattcagatggctccccagccagcatgccgagaacaacgataatctcagaatcattagcagctagctacatcaagaaatgtttctctttgggcagatccctgtgtgcagcaagtatggccattatttcatctggggaaggttgcactctatggcctggattcccaccctcccctcggatgggtgggttggacacaaacttagaaaaagaactctacattaacaaaatagcacaatgagtacatggcatataacaaaatgacagaatagaatccagacagtcataacttaccaccgggggaatattccaggcagagtaagaactaggagctccaacattcacaacaacacctcttagcatcatttcaacatgtttcaaaacattttcctctaatatatgtttatctatcactcg

SEQ ID NO: 162328 - DNA, 341 bp, Zea Mays
aatcagagttgtaggagggggcactgctagatctgagcgtggagggagagaatcgaccagaggaatcgaaatctaggagtggaaatcgatgagtggagatggaacgaggctggaaagaaactcacggggtagctggaagcttctggttccctttctcacggtcacgggggagatatttttgagggcccacacacaggaacgacttgcttcacgggacaaatgccaagggctaggacgacatgcttcacgggacggagggagtaaagattacatgtctagaaataagtaataacagcatcatatgttttagataacatctatgtgaaacacaattctaaaca

SEQ ID NO: 162329 - DNA, 451 bp, Zea Mays
aattactcaaagtaaattgctcaaatataatatcagaaagtaaagcaggggtttagaagactccttaagttttcaatgaggtatcgaagagttgacactctccacttatccttattagacacccgcgcaagggtatcactctccttagtccgtccaaaaattaaatgttatctataagctggaaccactcacaaccatggacaactcctaagtcgagtcattgacaaactctctgggtgaacatcgtactctcaattgccaccaagtcatttaggttatagcgatcaccaagagtaaattcactaccgaaatacctttatcttttgatctcacgacctacataatagattcacttgcaaaaaatccttgatagttggcacgctctataggagaagtcacactaattaccatagagatgatggtatccatggttttcgcacaggaaagaagt

SEQ ID NO: 162330 - DNA, 379 bp, Zea Mays
ccaaacagacccttaagcggtttgtagttccatgagttcccttgcgcttttgatttggtttacggttagattgcaccactgtacaaaaaggaggattttgagtgagaatacctaattatcttgctgatagttgagtgaaaggtagtttgataggtggattttgagcaatagcgcttaagccaagtgcccatctaatatagcctgttaccgtacatgtaagtttatttgattcaagtgcacttgacattctataacatttatttatggactatcctctccattttaataaaggaaaacactagagggcagacctagtcctagaggttcctaataggtctagtgaagggataaaccgaggcaagccttctctcgcaaatcc

SEQ ID NO: 162331 - DNA, 434 bp, Zea Mays
caaccatataaatcatgcttgcccacccacaactcacaatgtgggactattctcaacactcaacccaaaaacttaagctgttaggaaaaggtggacaattcagttatatttcaacagttgtcctcgccaatccctgccacaacatgcctctcggccatcacaaaaccaatgccaaaactctccaccgccaccagactcttagagttgaatcaaaagctcagtgcatgctaatctgattggccagtgttgcttttggtttagtgggtgctttcctgcaaactacaagaatgcatctaactactcctgtaagcgtgaaggtcacatagctcgccactacatgcggcctcaggcttacatgtgctaagttgaatggccagtcatgtccgcatgtgctcctcccagagcaccctgatcagttaggatgtagtaggtgt

SEQ ID NO: 162332 - DNA, 693 bp, Zea Mays
cagaacatttaacagtctacatgtgcatacggtttttttatacgtacagttaacagcattttgttttttcaagtatacgcagcaacatttgatctataatgcaagttttgacatatattattttcaatataattgtgtacaaggacacactgttcatgccacccaacccacaccggatatgtcatcccaagcatcgcagctcgagacccagctgggtggtactcagtttgaagaaattcatgaaagacaacagcatatccatagagtactggagacttgtcctgacgaatcggatgttgttacaggacaacaggtaatatatccaactccaataccttttttactcatcctacgtacattgtttgcatattactttttagctggatacgaaccacacttttttgtcaacagaatttctattttgatgttcgaaacaacatgttgaggaacacaaatatcacacctcaaaccacaccagcttgcacccgtttgccgaaatttgacgtgacaccgcaaaacaatgttagcagtacatgtctcatgttataattccattttatgatacatactacataattatactaatcatatacctttgtgtagagaggtgaaatggcaacagaggaaatggaacagaatgacagtgggccagttttttatcagaccccaactcctcatgtcagtatatgaagc

SEQ ID NO: 162333 - DNA, 456 bp, Zea Mays
atgacactatcaaaccataggtcattggtctaatctaagtgtcactacagtttttacataagttagttcactggagaacagacttatccgccttcagtaatgcatttgttgtgttcttcccactaatactggtactaagctttttgttatgctgatgtcataattaacgatagggtggtcacttggtcactacgcgtgggccacgaaatttcgtcatgcagatgtaagtgaaaacttcgtcatgtagatgtgagccacgaaacgcgtcgaactcaggtggcgtttggttgagcacttgtaatggtaacattaatgtaaataaataacattggtatctattaccacgagaatgaaaagcgctaattgtttggatagatatggtaacgttttctatgggcagtgcgtgcggccacacttgccgtttccgttgcaggccgtgtttgcgttgcgtcgatc

SEQ ID NO: 162334 - DNA, 846 bp, Zea Mays
gggacacccttcggtgtgccctctccctctctgctcagtccagtccgcgctcaccggagcaatcttcgcgcagctggagccccgccgtcgtcgccccgtcgagtctctgtgcctctgccattgcttcgcgacaccagcgcttcccctcaaggtgagcaacctgcccgaaccattaatttggtcatccccgctctgttgctcgcgcgattgctcactgaagcaatccagcgccgccgttagcctaccttgtcgtggtctgcgctctctggtacccctgcgccaccgtgagggccatggccgaaccccgctagatagcccggatcacgcctaggctaaaccctgagcctctagtgcaacactgaaggaccgagcggcgccaccgcgcccaagtccgcccatgaccgttagatcccgaccgttcgtccgagatcggacagtttagatttaacccgagtggatctaatcccagccctccgatctggatccaactgcctctctctcttccccctccctcgcgcctctgcctctaggcctagctagtcggtccgccctgacccgctgacgccctggccccgcttgtcagccacgtccgcgcgctcgcgtgcacccgcgtgatctaatctgggccgttgatctctgatccgatggccaaggttaccccgtaccccttcgtgtgtaagtttttcttaagagaccccctagttttaggaaatcaacctgtcgtccaaagttttagcgcgcaggcccctggtttcttttgaatagccccctgtacttttatttaatcatagatttagccccaatttcatatttcaaactttaaaacttgtttatttcgtatctttt

SEQ ID NO: 162335 - DNA, 393 bp, Zea Mays
ccgtccatcctagcatcattagccttatcatcatttgttgtttatgttgttgcttgtgttgctgcttgtgcctcatgcaaacggtgtcactcgctgtggtgtggtcacatctcgtagcttgatatgaaaccataggtgcaaaggtagagtgtcatcgttcttttgtccttacatttatagttgttgcaatttctatatggccataacacatcgatactcattgtgtttgctgacaaactaaaggtgtggtcaataaattcctaagtcttcaccatccactcatgagagtgagccccactcttatttcaaccatcatacattcattggtgatcctcacctataatcatgctatatccacaagcaagagttattcacgcataacctccatcaccc

SEQ ID NO: 162336 - DNA, 1041 bp, Zea Mays
gccggaataatagacgcgcaaaatcgaagtcttttccaaaagactctccgtgcagaagtcacccacgggcgcggccggatcaacgaaggcgcgcagccttatcatacaaatagcggttacatacacacagcgagggtatcatatattacattggctcaaccttcgggatgatacccatctccctgtagttgaacagcattatccttagttcctcaccctcaaaaagatttcacagctccccctcacctacactcaccccaatcggcgaggacaacaattctcgcttaccagtcccgtccacgcgaagacgaccactgtccatctcactacgacaatgcctaccacttcacgacaattcactcactctccgtttcgccaccgcccttcgccgcctatacccagtactcgcgcccgagagctcctcggaaccctccgcgcgcggcgaaggctccgctgcagccacatccaacgctgcaaaataatccaagtcctcatctgaaggctcctccatccacgcaatcgaactcccagaatcattagactcaaaacacttagacacagagccaaacgaatcgtcatcagcagccacggtcgaagccgccacaaaatagcattgtcagtagcggttgtgtgcgcaggcccagacccaagaacctgcgcagcaaccgaggttcagtatcacacagacaaaatttacaaactcctcaacaccttttcagccacctgcgaaggcccagccacggctgtggagtccttggctgtcggctcggccaccaccttctgggcgtcttcgcccgtcggcgcaggggctggtgcggggtcttcgccggccgcagcaggcgcaggggtcatcgaggggccttcaccgggcatccgagggcggcaccggatcgacccccgcggcctcgggcagcgcgccgtccagaccaacaaggtcctcgacgtctttggcatgcgccatctgcagcaacagcacactcattcagcaaaaccacacatacccacacatataaccacacaaaaaaacagcctttacctgct

SEQ ID NO: 162337 - DNA, 964 bp, Zea Mays
gcacgcggcggtgcgtaagaggctgacatcgcgtgaaacgctctcagggcagcattcgcgtgtatcttttaaccagaagtaattcgtccatctccgttggcatctaagaatactatgaccgtctcgatgagagcttcgatattgcgcttctgaatcatcattttcacttcggctttgccaataatctatgaatttccttcttctaggagaacttcgtcttctctggtgatttacctcaattactttcttcttcattttgagttcttcttcgtcgactgtagtgttgcaagcaagttgaccgcccctgctgcatccacatcaagcaatggttgcacccctctgtgaccgtgcgacccctatgatgggccccctcgttgtgccgtcctggccacttcaccggcaccggcaagctaccactatcggcgaccttgccatacgcctgccgcctcgccatgatccggccaacaccatccccgcctccccttcgcacgggagcgcacgagcctgcgtcatgtcgcagagccactaccgccactccaaccggtgagccgccagcgccgtgtcgccattgcgtgtctgctctagtgagtcgtcccctgcatgatcccatcccttgctatcgctcgtacgtgcgctggtagaggaagaagaaaccatcccctccccacttggccacggagagatttgctattttgtcactctaatcatagacacaaatagtcccacaagtcgtagacatatgatgacataatagcaaatagcccatattagccctcggttggtcgagtgtttgtcgttttcgcgttgtgtgcccacaccagatcgaatccgttacacgagatattttgaggtcgcaaccttgtggtcctctgtgtggcttcaatccgaccaattagatcatgtcaggtcgtcccaaaccgacgcaaccctgtctcttgtgaaaagccccgtccttttccaaaat

SEQ ID NO: 162338 - DNA, 642 bp, Zea Mays
ctaccctctcacgggcagcgtcaacacaaggaagtcaatgcccccggggtagctgtttgctgaaaaatagcccctcgcgaaaggggcgccaactgaggaggctcgccgttgatggcgtccgccgaagaaagctcctagtccgcctgcagtggaagagcgagggagaccacagcctctggcgacgctcggactccgtccaaggtcagcgttgaacctagaaaaggcttggaaacatcgtgccccatgccaacaaccgccttgggtcgggagtcaaggcgatggtgcagagccaccaccgctggtcgcccttaggacgagggatcttcgatcgagaaaggttgtaggaataatgaaataaactcctcaatatggcaagataagagaaggggctagagggaatgacactagatgcttacaaattcaaaaagcctggctcaaccatgcatcagaggacactcgggggttgaaatcaaaggtggtcgtgttgctccctacgcctccctctaaacctccaaggcctggccaagccattgagcaacatccaaatcgctcagaaggacccctgcgcctagggacaattgatccttccccatccggtccagggcatagatcgagccttgaggggagccacccctagacgga

SEQ ID NO: 162339 - DNA, 469 bp, Zea Mays
tcttgatcacttgtattatatattaatcagtaaagggaaacccctcttattgcctaaaaaggcaccctgtttcctggcagcatattttttcctacacaagcaaggccaggataatcttgtatttatcaaacggcgttacatacagatgttgtgtgctctactactatacaagatgtaagttgggagcatggaacaattccaggaggtttcaaaatactacaatcatggctcatccccatgttgcctcctcttcccccttttcccatgttcattttgtttgtagcagagagtagtttgattaacatgtgctcgcagagatttttccctcctagagcagtgagattaacctgctgcgtgaagttgcagtaaattcagttcctttgagggtattagcaagtatcagctgacgcacatggcaatcaacttatgtaattaaaggtaccaatcatgctctaggagggagcatata

SEQ ID NO: 162340 - DNA, 327 bp, Zea Mays
ccagctctttggatttcacgagtcgtcgactcgacttcatagcttatgctacggcacctctgaccctcctcgtcgccctcacgacggtgtggctccgggtacagctcacgtcgcggctctgttccgcccgcccttctcagatgggtcgcgacgttcaccggcagatttcactacagcagccaagttcttatttgagcttatcagacggactcttctgccgaggatgggatacagggaggctaccacacatatccagctctggctccttggtgccctggtctctcactctgagtttgacgtcgtggatttccatatttgtgagatcga

SEQ ID NO: 162341 - DNA, 664 bp, Zea Mays
gcgggtggaggttggcgaggtggctgatcttcctagtgcgaggaccaagtgccggcgacgaagggtggtgttgaagcatagcgtgggcgaggtttcgcaaagtggtaggcaccgtcgaatggggatggagcaggaccgtcttcgagtagaccggtttggtaaacaagagctattgtcttcgccgattgggacgagcattggtgagggggatctgcagaatctttttgagggtgagtaattgaaaataatgttgttcaattatagggaggcgggcatcatcccgaaggttgagccgatttagtatgtggttccttcgctgagtgtatgtaactgcaacttgtattgtaatgtggcctgttggccgttttcgcgcacttgtgctaatccggctgcacccttaggcgacttttgcgtggagtgtcgattgacacacttattgcgcttatccggctgcacccttgggtgacttttgcacagagtgtctttttagtaaaagattttgattgacgcacttattgtgcttgtccggctgcacccttaggcgacttttgcatggagtgtctttttaataaaagacttcgattgatgcacttgaaaaaaaaaatccggctgcacccttaggtgacttttgcgcggagtgtcgattgacgcacttgttgcgctt

SEQ ID NO: 162342 - DNA, 703 bp, Zea Mays
gaacaagtccccaacagtaacgttgcacacctccccttttatagctcaagggggcgcgtacaagggtactaagccccaacatgtgggcccaggaatataatggatgtaatacttggagttgctggagcaatcttcttgcaccctgacatccgtgatctgcgtggtattggcgtgcaagggaagcttccctggcaacgcataactgatgatggacacagtgcaccttgcagcacgggcgtactgtttggtaatggactggataggcacgccgcctgcaggatggcctggacgccgcctgccagctgagtggacaggtcacaataaatgctgaggcggcacatcgcctgtcagtaaggtggacaggcagcgcgtcctctccgcaataaatgcagagaccgcgcggcccagaggccttacgtcaggctccgcccgctggcttacgtcacgggcaacaagccacgtggcagcaacgggtctccgcctgagcggggagcgcaagcgcataggataaagcctggacacgtgccagtaccggacccttgcttaggccagggtatcccctatcccgagacctcgttatgggtggcccggaccttacttggagggattaggaccccatccaagggacccgacacgcttacttgggagtcccggaccgtatcaaggggtccgggctatgcgtataggggtccggtgcttcctc

SEQ ID NO: 162343 - DNA, 591 bp, Zea Mays
tcaggcctgatatggtaaaggaaacaaaagagaaggttcaacgaataattcataatttgaagaaagctcaagctcgtcagaagagttacgcagacacacaccggatacccttgtactttccagttggagattatgtctacctaaaagtttcaccaatggtatatcacgtttcggggtaaaagggaagcttgcaccccggtatattggtccttttcctatccttgaaagatatggaccagtggcataccgacttcagttacccgaaaccttgtctgcagtacataacgtgttccacgtgtctcaattgaagaagtgtcttcgggttcccgatcgaaccgttgacgtaacagatgttgccctagaaccagacttgacatattccgagcatccaattcgtcttggatcaaaaggacagaattacccgaagaaaaactctcaagttttacaagatacagtggaaccaacattcagaagatgaggctacatgggaaactcaggactttttagaaaggaatttcccaggcttttttgcctcatgtaatttgtaaagtgtatataattgttgtaataaaggagtgagccccaaaccac

SEQ ID NO: 162344 - DNA, 609 bp, Zea Mays
cgcttcgcgcggccacgagtgcgccagcggcgcgctttgtgtacgaacggaaagctcccctctccctcccgccgtgtcgaccgacccctcggccctcgctgatccgctccgccgctagtacaacctagtgctgctgccggcaggtaaaattgttggcgtacgcgtagcgcggctcgcttctgctttctttctttttcgtcctccactactgcttttacttttcaggtgtacccaacattcaccgtcagtacgtgtcctgcacttgttcttctaatttaatgaaggggaaaatatactgaaacgtcaatagttaggagacgttcatcttttttctcacttctaaccactggccaaaacggcaaaacctagatcaaacgttaatgaataccggtctaactatcctagtcacttcacaaaagcacatacactaagaggcattcggcagagctcccacaaacggtaaaaatctaaactgctctatggtggcagtagagtgaatttagtctctattttgtactaagtataaagtaggagctaaaaaattatgcttctgttgggcatcaaattgagcaccggacgtgcctatgggccggacggtccgcgcaagcg

SEQ ID NO: 162345 - DNA, 567 bp, Zea Mays
taggaagtgagcgtatttggaaaacttgtctactacaaccaaaatacagttacccttgctggatggaggaagccctgatataaaatccatggtcactgtttgccaagcttgttcaggaataggtaatggcaaaagtagtcctgggtatttgaccctctctggttttgcctgttgacaaatctgacaaccactcacaaattcacggatgtgttgcttcatgcccggccatgcaaaactacttttgatcctccgataagtcacaggaaagccagaatgacccccaacagcactatcatgtagcgctgacataaccatctggtgtaattccttgtttgctcccagccaaatcctacccttgaaacagatgactccttgagttaaggtataatgttcccgttttgcaccagtggtcaaactctctattaatttctgggcagttgaatcctgcatatatccctgagtaacttgtcgtagccagctaggtgttatggaagacacagacaacccattcagctgcatggttactgaatcttgattcatgtctggccgtcgagacagagcatcagc

SEQ ID NO: 162346 - DNA, 304 bp, Zea Mays
ctggtatgtctcgggggcctatactggatgccacctttgatcatcctagggcagaaggtcgacataatgataaccgaccacctgagcctcacatcccgaggactggtgggctatcataggtcactatggatgaagttcaggaggaaatagttgaactatttcaggataaattatgtgtgagtgtgtctgaccctcgatgggacaccgttctgttccctctagggactagtgtgccatatttgtttttccaaattctcgagcgagggcagtagaagcactcacaaacacatgggccaattcctaa

SEQ ID NO: 162347 - DNA, 500 bp, Zea Mays
catcgtttgaatccgggtatgtggctgtccaaaaaaacagatttttcaggaggatgaacagcagcagtattagcagtttctggggatttttcgggagtaattagtgttaatcagtatgagaatcatgtagggctttttcttatctttccaacaagtacttatgcgctcgaatcggaattatattttaaaagttatcgctgtttgaatccgagtatgtcgctgcccaaatcagaaaaacagattgcaaggtttattttatggaccgtttagagataattagatgttagaatttaatcataaattgtatacaaaacttgtggggaattttatgtagtggtctctggagtttttgtttgacaccacggctgtcctaatttttaagttatggaattgttaagcagcgccgctgcagtttggggtgaggggagagttgttacccgcggcggggtttgagattgcgcgtaggtgcggcgttgtctttgaggtttttttatgtcaat

SEQ ID NO: 162348 - DNA, 453 bp, Zea Mays
gtcatgattaaatcggaatttagtgtgacatacaattcctgtctctgttatgcccactggatttcctcactcctataaaggaaaaattggtgctatgtggtcccttttgatgtacggcaaaaacaacataatcagcctactgtttgtacatttttgtagtttattcgctaagtgcgctctcatttctgctcatatggccttgcaggtacccggtggtgttaagtaagaaattggtcatcaatagtggtatgtgctctgaaaatggcgtttttgaatgcctctaggaaatacattttcttggtcatttgtttgatgcctacaacttccttctttgtgtgttgtttcctagtgatttgctcggcatactgcttttgtatagtctgttaatttttttggtgagtgcatgattatgtgaccctcttattttccttgttgaattttaccatgcctttg

SEQ ID NO: 162349 - DNA, 1313 bp, Zea Mays
ccatttaaattaatgcccaagtcacgtgtcatcctcaactaaatatcgcagccaaaaaaaaaacgtcgcaatctcgactaaatatcgtagcaacaaaatacggcagacaataaagcgcaattcctcacttcctatttagacttggacactactttgtatttttcttttatataaaaaacactacattgttaaggctaaaaatactagtaacagtttggtctcctaaagccagggaccactcaagcgaaaactgtgtgcatctagtctagaagagcagaatacacccagcgtttacgcagaagcctttggaaggaactgtgatgagtgatgagattgaggcaggacaagatccggatagtgatgcatcatgcgccagtgcgatggacgctgagccgctgacgcaacaaacaggatcgcctctgtacagcatcagcatggccacaaactcaactgctgcagtgttgctgtacgcagcaagccggatctgaattccgatcctggcccaaaatgaattgctcgttcatgcatgaagcagcagatcagcgatccgatcacgaatccggactgcctgcacggggacagctccatagtgccacgcacgatccatgtgatctgattgatgcgcgcggtgtgctccgccaatggccatggcgccacagcgaaccgtagcaagtaccacgaacgaagcagcgagcgagcgacgacgtcttctagaatcggacgctgagctagtgagcagcgagctgcctcccgacaaaacgccaactcgcttttcgccatgacgaacaaaaaaaggcgcagggaaattgcatacgatacgacagcgtctccccgttcggttcgtaggcccagcggcccaacccgcgtctgagaatccccccagttccttccttcccacgcgtcgaatggcctccggtcaacgagctacgtgcgacgacgtgagtacgtgacccccgaaacccacaggcccagaacggagcgcggagggcagggcagggaggcttactttggccctgacgaggcgtcgcgccgcggtcgccgccgccgccgtccacgcggcgggcggtaggcttggggacgacgggcggagaggaggtagcggacgacgacgacgacgaagggaaggagccgctgccccagcggccgccgaagacgaggaagaggaggggtagcgtgaggaggaagccgacgagcaccatctccgggcggacgccgccggagccgcgccacccgccgccgccgccggcacgcttcctgtcgtcgtcgggcggagcccgagggctccgcgaccgcttcacgtccatctccctccc

SEQ ID NO: 162350 - DNA, 510 bp, Zea Mays
ggggatctgcgccgtcggcatcccgccgtgatctgatctcccgcccgatgggtgactgatcggagggcaggcaggtcgagcatcctcggtgcaagggaaagaaggaaacgtcaggcccttctgaattctgatcgatcgatactcctcgatcccttttgctttctcggctgtccgtcttctcgagatcgaggccagatcgtactcctccgtcgacaaaaacagaaccggggtggcgtgtccaattttctcacgggaaagagaaagctgcgtgcccagttcagccccactgttcacgtcgccagttttgtttcttccattccattcccgtagtccgagcctcgcgtggcttcttttggcgtcattttttattttcaagcgttaaacgcgccatgtccagtacggcagtaccccgttgaacactgatctagagtctgatgtcactgagcgtgggcggcaggcacagcagagcgccgcttttgctctgctcgatcgatcaacaaacagctcaac

SEQ ID NO: 162351 - DNA, 415 bp, Zea Mays
gggaaagctagcgcggacttacttcgaatggtgagccaccgagactcaaacggtggatttgagaaggtgggttatacttgttcaggcttgcgccctaattcagtgtagtgccgatcattgtattgttgaggtggtctttcccttttatagttcaagggtcggactttacaacgatgacttgtattctactggagggagctcggtcggtggcccttgggtggcgtggttcgtagggtcgtgcgtagccgtactctcatcatagcatactatcttgtccgctcgttgtatgggtccctatagctggtctcccgctgacacccttgtggtagtgtgcgggggtcccgcaggtcaatcgtgcgtcgtgcggtcttgcatgtcgtcatgggcctgtgtcagtcattggtgtgcgtaggcg

SEQ ID NO: 162352 - DNA, 935 bp, Zea Mays
ccggagaaccctccttctatcagaaagagcgatcttgcttcctcctctaagagaaggaagaatatggtagtatgtaacatcccaaaaatttaaccccaaggttagaaaccctaatctcctagcccccgcttgattattccctagactccacctcataggacattttgtcatatgcatacaccatgattgttagtagcacctcacatagagtattttttgacacctaagaatatatagctaaatatttgttcaaaagaaaaaggagataaaagaaatggaaatagaaatagaaatggaaatagaaaaagaaaaaggaaaatcttctccccccctcggctgggccgaatccggcccaaccacctctctcccgcgcgcccacacttccccccctcgcagcccatctccgctcgcgcacccgcgctcctccctctgccgctgctagcccgaccccacccatcagccacgctcgccctcgctccctcgcaaccgccctctctctatcaagtgggccccgcttgtcagccccttcctcgcgcccgtgaccaagctatcaacgcgatcaccgccggccgccacacgctccatcgcttcgccattaacacgctcgctagctcggcttggcgccttgcgccaccgcgcactgtgcccgagctgtcccttcaccccgcctacccgagccatcccgtcgccaccactgtgcgccatcatcgccgtcgtggcaagctcgccggtgctcgccacctcaccccccttccccgccccgggcgcctataaaaggaccgcccaagcttcatccttcctcacaccggcctcggccactccctctcccctcccctgagtcgaatcgagctccgcgccgccgcgcccttcctccgctccggtgagccccgccctctggccaaattggccccacctacataatcccctacctccgc

SEQ ID NO: 162353 - DNA, 357 bp, Zea Mays
gggtaggcagccatggagagcgaaggcatgtgtgggggctcaacttccaaggagtgacagtgacttatggttgtcgaatattatggctctagtttgagccttttcgatgggtgaaagagtttgtagggggatttctgctttattattacatggatccgcctcattaaaaacctcaacccatcatgaggaaaagagtatgtgcctaattacaaaaatgcatgatgattacaagggatcaagaggagccctgtcgagcggagtcagcctacatataatatttccttaaattgtttatgttctaggagtgctcgagctctactcctgtttggccaattagtctgtaggaatttggtgaaa

SEQ ID NO: 162354 - DNA, 908 bp, Zea Mays
acaaactagagtagagataaaaattgaaaattaagaacacttgcgagataaaagtatttgtgtatgtgcagctccccctaaatatgtgcatgagttttgtgatattaatatttgcaacatatttagagagagtgaacaaccaacacaatacacaaaaactgagggatgcaacacaattatataggatgtgatgataaaaagagtagtattacacagacaagcccatcattgcatagcataagatatgaaatgttactactagctactacaataatgtcatcacatcacatcattaaaaagtttgtggcctctaagccatcaccaactgcatcacgagtcagacgaataataattattacaaaataggtgttcattacataaattaaaggtgctgctaagataagaatccttctccccctttttggcaacaagaaccaaaaaagaagagagccaccaagccatggatcaccactaaggaggatgatgcggagcgaagatatgatgcgccaggtgagatgcaaagtgttcttccccagactgatctaggggaggaacacttcctgaaggatcatggggcggaggatgagaagaggattgacccggatccccctgatagggaggcggggcaaactgctcacgatcatcaaagtattcttcttcttcttcatcgtcagctaacataaaaggcaccctataggcctgctggtgccactcattgatttctggaggaggcggatggagaggcacgtcaggcgagcgaggggcaaaaggcatacccatagaggaagcttgacgacgaagattgtcgtcagtctccctctgacgccttgccagctcatgcacatctgcagaaatattccggcacatagaaaagaatgctgcaatcccatgggccaggcgggcaccca

SEQ ID NO: 162355 - DNA, 668 bp, Zea Mays
tcattaggtagtcacagttgtattagcagtgagaacaaaaaggaaatcatcatgagacacttggcatgggcgcccgatggggcaggtgatatcaggtctggtgttgcgtgcgcgggtggcttgacgggttggataacgtcttgcttggcattggtgtgtccccccgtgcgacgtgttcttctggtgctctgctcgaggtgtggaaccgtctgcaaaatgggtagtttcttcgctcggggtccgaggcagtcagaagtcggagcggcggatcctcccacgtggtaatggtgggcctatttgataggcggcagatggttgggttcccttcaagggctcgaggcggttgggagatagagaggcgaatcctcccacgccgtggtggtggtgggcccgtttgacaggcaccagacgattgggttcccttctggggctcaaggcggtcaggagctagagcggcggatcctcccattgcttggtcgtggtggacccgttttttgggcaccactcttcctccctacatctgtgtatataaatagaagaaaggttccttgattcagttacgcttactgtctctttgtgctcttgcctccattcctaccctagagcctccttgtcctcgtgctctctacctgcttgagcgctccgcttactccttttccctacatcca

SEQ ID NO: 162356 - DNA, 884 bp, Zea Mays
agggattaattggacctcttaactatcaaatgcaaagccacaactttccaaatttcaacactctgctcaacaaggcaataggtttggatagtaagaggaaggagctaactgatcataagaggaagacctagtctcatggtcagtccaacagaaatgttcgctatcaacaaaacacctagagctctcatactcgcttcgtaggacaaaacagaagttaccagaatcaggcacaacgttagggacaatagacctagaggtacaaccagcaagggcaaaggtccgatggaagttaatagaatcacccgataaatgtcgtaaacaccctagctaagaccaataccccagttgcctcagtgcacccgaatggacatttcaagtgtggagaggttgggcattatgctaatgcctgccctaagaggaactttcatatgccacatgctaagaataactactaaaggtcagtctagaacgcccatgcacacaactcgcaaggcaaaaactagcaaagctagagtaagggcagggtgaaccatgtgactactgaattagttccggaaggtgccaacgtggtgcttggtatgtttcttatcaacttcgtacccgcatcagttttatttgactctagagcacctcattctttcataaccaagtcatttgtggaaagtataatataccgagttatcctttaaggaggaaggtattaattagatcattgggaggtgaaatgagagctactcactatgcccccgaatcaagcttgggctcaagggaatagagtttgtagtggaactaataattctgggatctggaggaatcaaagcgatacttggtttggattacttaaccaagtacgatggagtcatatcatgtgctaagagagtggt

SEQ ID NO: 162357 - DNA, 351 bp, Zea Mays
aacacattatgcaatcaagcatcgcacgcccatgcataacactcacttagattcctagacgaattggaacgcatgacacaatcttttctccaagccacaaggtggctgcatgataaggtatatgtcccattgcaacgttgggcatgtttgctagctaatcacaatgcacccttcgacgatatccctctagctcgcttaaacttctgttagctcttgcggccgatgggtgaagagcttgtgtcaaaactctcttgcaaagacacatggtacaagcaagtcttggatgtcttcatgttcggaaagtgggcattggttcaagacacaaacatgtgatcatcgctttgtttttcc

SEQ ID NO: 162358 - DNA, 655 bp, Zea Mays
tggatctcatattggcaggggcggatccaaggggtgggcaaggtgggccatggccccacctcaattttttaaccccttatacctaggtttaggtacacagcaaaataaacaaacttttgtatagttagcatggacaaatctaatgaaaactaggttttgatctatttttctctcgtcgcttcactgctcagtccactctttacctgagccatttgattctcttccctagagcaagcacactcccactcgtggttcactcgcttattcgatcatcgactgaccagtaagtcggtgacctaacccgcccgctgcagcgcaccttgccttctcattactcatcagctcgtcgactcgtcgggatcctgcacacaacattgatattttgcctactagtccgcaccagcagatgagcaagttgtgggtgggaccatggcgtcacatgtacctagctaacttattagggtcccaccacgttgtcgcaacacgacaatggctttcgcttgccgttaccgtcatctattgctacctcgcctcctgcactcgctcctcccacctgtcgtcgtctcaccaacgccatctcacgacaaattcgatgactcgctagaacgacgtgtcgatgcggctgctccgccctagtgcctcgtcctcagtcggt

SEQ ID NO: 162359 - DNA, 393 bp, Zea Mays
cccgttcatggcactcagcttggcgctgagctctgtgacgacctcctccctctggttcaaggcctcctccttcttggccaacctcttctccttccagctcacctccagctctcgggcgtacaccttctggaggtcctttttgtaatccctgcggtcctgctcaagctcggacctctcgaaggcgaaccggtgggacaccgccttagtgcgctcctccagctgggtgcgccagtcgctgaggcgttggtgttcggcctaaagcgcctcccactcccacaggattgccgcctcagtctcatgaagagcctgatgggcacgagacaacacccaggggaggggcaccggcgctgcttctggctcggcgccggaccagagccgccgccccaaaaccac

SEQ ID NO: 162360 - DNA, 598 bp, Zea Mays
aggggggaaacggcgggagcctgacaaacggggccgcggggaggtcgggcccgctagtcagcggtagagggcatgcgcaggtgcgatatcgcgggcgcgcgctgaaagacggggtcctccaggcagtgaccaagagtggggaaagaaaaggggaggctgacgggcgggtcctccttgtcaggaccaccgtctacctcggcagtgcgcacggtgtgagcgccatgaccggagtcggcgacttcgcgcgggcaaacagggcacgaggcggctgcagttggtctggcagactcggttcaacgacgcgggaccggaaccgacgatcaccggcgactaattgacagaatagaggaaatgggggagagagaagagaaagtccggcggggaaattcacctcgggtggagcagggatgaggacgaggctgggtgtaacggtggcggagcacgatcgcagacggcgaccgagctctaccggcaacgaattcgggcgcagggggcctggcgacgtggaagctccggcaggcttgaagaaccggcgcgcccagcttgggtgagtgggcagaggtgaaatgagcgaggcaggggggaagtggggtgtgcg

SEQ ID NO: 162361 - DNA, 633 bp, Zea Mays
tcttggaccaaggctacgctgaccgcgctgggtgaagctgcgatgtatagtagtaggggtagccctgggtctggacttgttaatgttgctaggtcggatagatattgcttcagagacttgaaggcaacaacttgttctaggccccaagtgaagttctttgcaccacataacattttaaggaagggaaggctttgcttggcggatcgcgagataaatctgttcagtgcagccaatcttcctgtcagcctttagatgtctttggtggattgtggcggtgccatgtccatgatagcctgaattttgctcggattagctacaattcctctgtgcgatacaaggtaaccgagtattttgccttggcgtacaccaaagatgcatttttccggattcaaccagagtcaggcttcgcgcatgttggcgaatgtttctgtgaggtttgaaaggtggtcatctttgttttttctcgcaacaactatatcatcaacatacgtgaagacgttgcggcccatctggtcctcaagaatctttttggtgagacgggagaaggttgagccagcgttttgagcccttcgggcatccgcacgaaacagtatgtgccgaagggtgtgatgaaacttgtgctagccttgtctt

SEQ ID NO: 162362 - DNA, 579 bp, Zea Mays
cacatacctgacattttatttggatgtcactaatatgtttgatattctgcctttgactctggtttgtataagttttatgatgtgtacctaacctgcactccccggagaatcatcaccttatggtctccaatccaagttacttcatcgatgctaattgtaaatttattaattagatgtaggtggaaaaaacatatttgtgattctaggttaattatgtgtgtttttagattacttctattagactcaggttccatagtgaacctctccacgatcaacttatcagaaccatactaccatttcaatatctgtattggccaaaagtgggagcaaaactgcaaagtcagatatccatgtcgttcttttttatgtacattgtccaattccatatcagcggtcgtagccactgtctgacaaggcatcctccatacacaatgtagagtctaaaaatcattgtcgccataatgaacaataataatgtctcctcaccgcttctcctccaggatgccggatgcaggtgcacaacaccatccacgccagcgctgtttccgtcgttgacgaccctgccgtccatacgcgtca

SEQ ID NO: 162363 - DNA, 748 bp, Zea Mays
ggctcctccaaaggtagtttttactgggatgaaatgggctaccttggtgaggcgatctattattacccagatggagtcattccctttttgcgtccggggcagtctggttacgaagtccatgcctatttcttcccacttccattcaggtatcgggaggggttgtaataggcctgcaggtttttggtgttcggccttcgtccgttggcagatgtcacatcgggccacatactgagctatttctttcttcatccctttccaccagtatctggttttgaggtccaggtacatcttggtagtttcggggtggatggagtaggccgagtcatgagcttccttgagtaggacttctcgggcttccccttttggtacacacagacggtgtttgaaccaaaggactccttggtcatctgtcctgaggtccgggagttgttccttgcgggctttctccacaagccttgtcgtctttgggtctagacattgagctttgcagatgaggtcttctagcattggtttgacttcgagactgtcgttgtttcccagacatgcatttagttgtgctgattctttcttccagtcttctagaaagttggttccttttattccgaatggttttcgactgagggcgtcggctaccacgttggccttcccggggtgatagtgaatttctaggtcgtaatccttgatcagttctaaccatcttcgctgatggaggttgagatctggttgagtgaatatatacctcagactc

SEQ ID NO: 162364 - DNA, 823 bp, Zea Mays
cggaacacgcaatggtcggtgccctaactcagctaacaccaaatcctaccccaggcgaccctaatccctccatcaattgcaaaatccgacttagattttgcctgctcacgacggcggtgaaaaccggagacaaaccgaggcgttcttggtgattcagtgaggtctagctcaatcaaaagggtctacaagaaacaggagacttaggggaggctaaaacatcaagcagagaagcttgaactaacctacagagagctggccacgacgaggtgttcacggtggcgcggaaacccgatttgggggaagaggaaaattgggaggctatggtggatgatcagaggcaagagctggtgcactgggtatgtaataacctagcggagctcactggggcatcaatttgcagaacccatcagcagtggcgcccaatttggagaaggcgcgctggtgatcggagagagggcaagttcactggcgcgagctgtcgtggctttcaccggggcagtgtctcaggcgatggacaagctacctaaggtggtttattgcgacatggtaacgcttctcagtacatggcatctgggcggcaagcggcagactctagcgaagtcatctggaccggccacaaggcaagtgggtacggcggccagctcacgacctcatccgcagccaagatcttttcactgtcggctgatatctgcactcagagcgcacgaatcgcgacgtcgacgaggatcacggcgcggagttcaccggcggcacattcactgcatctaaagatcttttcgttcactgtaccatcaggatcttcttcagtctgtctgacagagca

SEQ ID NO: 162365 - DNA, 588 bp, Zea Mays
cccagacggcctggtagcactccctcagtctctccacatcgctgacggctgggacccgcttgtcaggagtcgtcttccccaacggactctccgcattttggggcgacagacggcgccagcgctgctcccaccgcgatttcctccgatctggtagccccgtccgaggtataaacgccccagcgcgtcgccatccttggggtctatccatccgcctagtcaaccagggttcatcccctgtaaagataagtcgggagagagagagcagaagcaccgccgccggggattctcgacctgggcatcgctctggtctcggcttgcggttgcggatgctcgcttgtgtcgtccacacgtctccatgtaccttcccgaagaggatgtcctctgtgggtggactaattgcttgccagagaaatactcggccgcggatttgcagctcgccgtggaccgttcccaccactacacccttgctggtaagaccatctccgcatcctctgcgtcgtccttctcgttgcgatcgcattcgtgggttagtgttttaggcggcgggccatcgaccgaggcctcgccggcggccaacgccatcgtggg

SEQ ID NO: 162366 - DNA, 426 bp, Zea Mays
cgaagtttgatctcatttgatattctgatgcaaatatttttgccaaagaaggatagaggctcaaaggtactccaagatgaccaggagcttcggaggaaggttccatctaaaatatatcggaagcattcacaattcaatctagcacaaagaaaagtctggccaatctcaagcgcaatagggccagccccaagagttaggaactcagcaaaaatcctcttcaagcaacttccacccaccagctctaagaggggggagaggaggccaacgttctggaggaagattcaatggtcaaccaagaatgttgttttgtcttttctgtgaagataagggccacacaacaaagaattgtcaggtgaccagacaaaacagaaggaacttgtcgaagcatggcaaagccagccgaaggaggtctttcatacatcttcg

SEQ ID NO: 162367 - DNA, 788 bp, Zea Mays
ctaggctgtgttcagcgcccagagtcccatggtggttgccatggctggcccgccctgttaacgtgttctgggcacgccggcgaggtcgagttccgtgtggcatcgccaaggcggagttcaacgacattgcgcaggggcgacgtagatcgggtcgacgattgtgacacagaggcgtcgaggttgctgcagttcttggagaaaggggcttggcgtgggaggtggagctcatgtgatctgatgctgagcgcacaggccgagttcgacgcgaggttggagcacgggacgttcgtgcgcggcccggcagcaaggagtggcaacgacgacggcctggtgcaaggacaagcttgccggcgttgaggatgaagaccgagatgagcgcaaaagatggaaagaggctcggacgcccatggcttagaatctgctggccacggcgacaagatgggactgggctacggcgcactgcgcttccatcgctgggttccctcggcggcggccctcggttttatagaagcaaggggcggagtccgccatggagttcggtcgaggaggcctcgtgcacttcgcgcggccgagaatcatggcgacatcggtggagaggttttctgttggccaggctcccagattttcggtgccaatatcggtgatctggttcccgtgcggtaaagcttcgtaggaggcaactttgattcggcaacctgggctcacatagggggtgtgcagtttgtgatttggccgtgattggttcaggacatcagggcggtagtggggatgcgcacaggtcaagccgg

SEQ ID NO: 162368 - DNA, 385 bp, Zea Mays
acttttttttattgagcccctatattgtttcagtaaatgtgtcccaactctggcacagtgccgttgactgtccgagcttcaaactcgtcacgtgtatcactctgttgttgcgcctggcggtgctcttctggctgctgattgtgaggcaaggttggagccatgggtggtggtggtggtagtgaggcctatgcagcttgtgagtggcttgccgaagcaactaatgttgtgactgttggttgcccacgtactcggggatgtatggagtcatggagaatagcacgaagcagtatgcaggacctgctttggttgattctgtcgtgcttcagcttcagctatttccttttgtttttggatcgtgacttggcacgtccttgttgtatgtccc

SEQ ID NO: 162369 - DNA, 670 bp, Zea Mays
gggaatcccatgcttctacctatctcccggcaaacggatatttctttgttgtctgggagacagtataagaaatcatcttcattactcccgttaaaaatcaaggcttccttcggatatttcaactttcgcgcatagtgcctggcttccagaatttcttcttcggacggcttcttccccgaagcgtgtcgaatgatgtagtcaatattttcgatcaaagcttcgggagctggaatctcgatcttttcaggagcaatttgctctactgctttttcttcaggcgcgttaggctttgtcttgatgagcactgaaggcccagttttgacttcagcttgagtttgcgttgcttcggcttctgcttgcccggtttcggcttcggcctgtgatttggcttcagtttgagcaattttctttgcaggagcagggctcaacgcctttatagtctccaacacagcatctagtacgttggccatccttctcctcttgggagttgcggcaaaagccttttgcatcttcggcagatttgccttcgtcggagggctcagaatttttggcatccttattatttcttcaacctttggctcttcggccttatcaaccttatctttgactgccttgactatatgcgtcttcggcattacggtcggctcttcggcgctctatgtaattaaag

SEQ ID NO: 162370 - DNA, 822 bp, Zea Mays
cgctgttcctattgcgctcccgtcatcgcccgtcgctttactcttgcactctagccattaatagtcaacatgtcgcattcctcaactccgtctagtggtgttccagtcttgcaatgtctggtgattttcaatggcaccaactatcatgactaggttcctcacatgcgtctatatatgtgtggtctgcgtctttgggagattcttacaagtgatctaaagtattcgttctatcctattgcagcactctgcctatgtttacagagaaggcttctgatgatcagaagcatgagttgattgttgagtatgatgatattctattgtgctatgagtctgtgttttgtgtctaccgaacttggctagatgaggatgctcgtgctggtgctatttttgttgctagtatggatgaccaccttgttgctgaaattgttgattttgagcttggacattagatgtcggcttttcttcgtgatcgtaatacacttagtggacagtctacctatcttgctgctattcgttagtagcagcttttgcgctagggagatgctacgattgaggagttcttcactcagatgtctgctatttggcgtcagctcgatgctcttacctcttggtcctcagttatcactagatacgacttcttgaccaggcttagtgtgatgagtttgagcctcttcgtgctcagttgcttgctcatcacccttatgtctctcttatggatgctcttgctagtgtttgtaatgaggatactcatatctatgcagctggcttactacagtcctcttcagttttggttgctcattcttcggcatctccatagaatgt

SEQ ID NO: 162371 - DNA, 912 bp, Zea Mays
atagcttatgtccaacggccacggtcggaaataagagtatttttgaccctttacgacagagggatgggtaccgtcgatcataagcctacgaccgtctgtcgaaaataacttatgtctgatggctttaactgtcgaaaataccctttttactaaagtgatgaacaagcaccacccacgtatatgtatttcctttaatctgggttgctgctgctcgttggtagtagcatattattgaccaaacttctaccacgtcctacgtacaatcctgcatgtattagagtacgtctagtttcacatcagacacttattcacgttgtgtttgttttttcaaagaagaatgtaaaagttcatgtacccgagctccaggacatgccatttttgttttcttttgtttttttgcaagcaccacgtagcagtttaaagctaaattccactgaatctatctctatatgtgcatacactcagaacgtctccaagaccctccttaaaaatcatttgggaagtcaatgcatgattatgccaagtgatcgatgaacaaaataaatagagggttctatttttatcttcctctccagtagtttttagtaattagagaatctccaggactctgatgtataatttacttgctaaaccagagacaagttaacaaaataagcaccaaccttaatttaccccctccaatagtttaccatatgaactttctaaaaaaacgaattgtttggcgcatcaattccaggtcagtgcggccatccaccatgtccgtcgacagataggttgtcattctcggttcaccccatccaccatgtgtgttagtaccagaccttgtacattattccccatgatcttcatgggacagcgacggtagaagtgctacacaaaaaacatttgtcagcttattcctttggctttaat

SEQ ID NO: 162372 - DNA, 877 bp, Zea Mays
agattaaataaggtcaaaacactgctcgtaaaggctaaaaagtgcatgtggaaagaaggcagatgtgggaataaatgggactataattacttatggtcggatataattttaaatctaaattgtaaattataaatgttcagtaaatattttttccaatgaggatgcataccttccattttgcagtaatatggacccttttttgcacaatttactccgcaagcgtgacacgctagcactcgccgcagaaggtgattcctagggaattctagaatccagatctctagaacctagattttggataataaaatctctgcctgtatgagtcacttcatctctaatttaaaggcagagtatatgagtctaactgtgttcatcgtacagattgaatgttcctatacatgtaaatgatcttgtactggtttttcttcaatgttgaaacactatgcatacaaagatttgaaggattatgacgtcaagccgataactctgaatttccaaggctcctgaaaatttatgttgaacaaaagagtgagacaggcatgaggtttaccagtgttagttttcgcttcaaatagattacgaagtattacttacattattttttactgctgtagtgcagaataatcaagtataatttaactcttgtacttagtcatggccatggtcaaagcaaaaatatgaagcataaactaaaggatgaatttgttctagtgctgaaaaaccgaatatagttttcacccttgtacttagtcatggtcatagtcaaagcaagactgtcaggcataaacataaggatgaattagaaaatataattagccatgagcagcgagaaggatagacactttgaaaatgaagtatgtcaacatcgtggaagttc

SEQ ID NO: 162373 - DNA, 826 bp, Zea Mays
cgaagcgtgttagagggctttcagcactgtttgctcctttattggcacaagagatttaattcaggaacatatagcctttagggtatggccgcttgtggaaagctgggaaataccgaaggagaccaccaccgattctagcgaaggtggtctggtccgactgaagtataccttcagattcagggagaagtttgatgagccaaatgatgactggctgaagtgcatcgaagctaccagtgatgaactacttggagcatattcgaaggcagaagataacgctctgtccgcagccttcggaggtcgggggaagaaaagactaaacagagtttttgacgcgatcggcttcgtataccccgattactgttacccgctgcgaggacaggagaaaaagaggaagattgttgcttcggtcaccccagctgagcctatgccgaagagcaaaaaggtgaaggttctaacccaccgacctcgttatattgaaccggccgtggtgcctgaattcggcgcagggtcctcctcaggaaccgaagcaacacaaactgctccgattgcacagagcactgaagaggcgacagtaatgccgaaggtacccatagtcgagccagtcgaggctaaggttaataaggctgaaaagtcaaagattgaagaaataataaaaatgccaaaaattttgagccctccgacagagacaaaactgtcgaaggagcaaaaggcttctgctgcaactcccaagagaaggagaatggccaacatgctggatgctgtgctagaatctacgaaggttttaagccctgctgctatgaagaaagttgctgaaattacaaaaacg

SEQ ID NO: 162374 - DNA, 1107 bp, Zea Mays
ttgcgaataagcccctgcagtttttaataacccgaaggagtccaaaacactatttaaaacagtcactgacactttgcagaaataccctcgcacttctatttcttctccacaaacatccctggccacgacgcgctcgccgttcatccctgacgcggcccgtaccggccatcgccggcgatgactgctacggctaacaaacggagaggcataactgaccaaggacgatctaagaacacccatttatttgacctaaaccctactgggaacagtctgtccacgatcatggcggaaaccgagttcgtgaacacgcgttcccgccaaaccatggccgaattgagtaaacgggcgccacagtgagcttcacaagcgtgcagagtcatgaaaacaatacgtgaattggacagtgtcttaccagagcgggctggccacgggcgggctgttcttggtggcgcggcagaccgatttgggggaaattggtgattcaccgacaatggtggctaatcgagggtgggagcgggtgcttcggcttcgcaatttagagacgaagagctgtgcttggttgatttgaacagagggggttaggatgcggtgaatttataggcgcagtgagccacagccatggccatggtgataaccatcgccggccttagctggcgatcaacagcggcgtcgagcgctatcctttcctacgagcttgccacgttcccgtcgcgacagtaacgcgctcaaatcagtgagggcgtggatgaacgaggaggagcggcgccgatgaccggatatggccggagtgattagtggccgcgtggcggccggaatcatcacgctccaccgcggcgatcttacccggattaaaaagatctttgcgaggagatgcacaacgcgcgcccatcccgaccttggcgcaaatcacggcgcggattggtcttcggcggcgagggtctgaagcttatcctcccgggcactgtaccatggcaatgttcttcagtgctcctgacagccaaagtttagggtggattttctctaaagttttcatggcaactcacccaaatttctgcagcaaagttgtagagttacaaaccagctacatttagactatcgaaactaaac

SEQ ID NO: 162375 - DNA, 542 bp, Zea Mays
ggaggtgagtcatgagagggcaactcaacaggaaggtagtgtggtgggaaggtgtgtggtcagccatggcggagaggtacagtgatgatggggaggggaccacctgtggggaggtgcatggatgctcacaaagagtgttccgtgagagacgaaaagagatagaacgagaggaaggtaagtggatgtcacattgtctcaattgatagtcgacctcgatgctgagatccaaggcaccgattttggtgttaagatgcacaatattgagtctttgtctttatcagtgctagatcatcaccacgtccactgcaactccaagcaggttagcaccagtagtcaggtgtcgggacgtgttatctcgatgccatgattcacgatggtgagtctaggatccaaaatagaaattaaaacactcagatacctaaatgtatttttttgaaaatagtctaaaataaaaatttaggatggtgaaacaccaatatacaggatcaagtaacgtctaatctctactatataaagcacctgttttcacagtccacggtcac

SEQ ID NO: 162376 - DNA, 470 bp, Zea Mays
cgggtgatgggaagtacgggcatcatcattactctctctactctacgctgactcctagtcttcatagcctaacctctagcatcatcatcgtgttatgggctctatagggggagtcaggaataggctatgagtgaggcgcagtcctaggacacataggtcataagtggggatctggcctcgggcgcatagaccatgaatgtaaggtggaccggctcctttgcatgtcgcggcttggtgttaggcattatcagacgcaaaatccactcgagtggctccctgacgatccgtctaacccctcctcgtggttctgcctcatccggtgcctgggctcggtgccccgaggccatcctaggacgagtcctttcaggacggacttcttctttgccttccttctgactcgtggtcccccaaggtctcggagatcggatccttgaagtagccctcgagcccccgaggggagagtattttcc

SEQ ID NO: 162377 - DNA, 389 bp, Zea Mays
gggttgggttcttggagacggttgtgcgaccatgcgaaatcgttgagttgttgagccatctccctcaaactgcatgcgcacaggactgccgacgcatgatccagatcgcacatgccctgctcttgcctctgctttcttcaacatctcgcccagctcatcagatcggacacgagatgatcccatcacaacctattgccgagattcgatccaaagaatcacggacacggattccgcgcgcgtctaggcccatcttttctcggactcgacttgcttgtcgtcaccgctcacgcgtgactccgtgggctcggcccagcgcaaaccgaaaccttcttccccccgggtcgttccccttgcctttgggtcccacgcgtcatggcccttattccgta

SEQ ID NO: 162378 - DNA, 845 bp, Zea Mays
atgtttttacaataatagctattcttcttttaaaactgcttccgcagcttcgtttagtagtcgagtaacagcttcgtccataatagcttcggccatcttagtaatttcatcttccttttttgcttcagggtcggccaatgactcgaagggctccgggggaggagatagttcggctgcgatataaaacataaataagtccgaagtcacaaaaataaaacataaagttaaaagcaattaggcaatacctatccgcctttcgagttttgcagtctttttagctgcttttgttgcttctctagcatcgtgagtatctttttcacttttctttataatttcgtgggccatccctcgaccgccattttcccaaacatcggtgaaaaactttccaccaactaagctcgcttcagccgaggggtccttcgtgtcatcaatagataaagtagcttcggcttgggccaaagctttcacatgctcgcaacctgacttctccaaaatagccgcaattcctctagcacctgagaaggcgcaaacatccccacgaccgctcaaaatttcctcaaaagcttcggcttcgttgctgatccagtcaactgggccctcaggatcgcctctcacgaaattgtcctcgctggagtatgcgccaacattggcgaagctagtttttattttcccacacattctatgaatttttcataacatttttctcttgaagagcgaagttctacaaccgttttctcccaatagtttttccagtaatcgctggcttctcggtcagcttcggcgatagcacattttaattttgcttctgccagctgtttccgaagatcctcaatttcgcatttttg

SEQ ID NO: 162379 - DNA, 360 bp, Zea Mays
taattggaggcaggagcgggtgctttggcttcgtgatgacccaacggagctgatggcacgcttaatttatagggcccgagggtggtggctcttgaatttggaatggcgcgctaggggccggagagagaggagagcactggtgcaagagatgcgtggctttcactgtggccagaccaccaacgatgaccggatatgctaaggcaagtcactgtgatgtggtattgcgcttaggcacgtggcacccgatcagcaggcggccaactccggtgaggttatctggaccggccgtaaggcaagggggtacgacggctagggcgaaacagtgtcccgagcacatccgcaacacgatatttcttaccc

SEQ ID NO: 162380 - DNA, 1094 bp, Zea Mays
tagatccgccataatccgaatcggtacgcgttggccgcaatcggatcgatgatcaacggaccaaagccatccacgccagccctcggtcgtgaccgctagatctgatcctaacacccaagatttcatctagccgaatgggtatgcatggcgaaatctcagccgttaacatagaaatcggtggacataatgcttgcccccaaccttcacctccaccggtcatcagcagacggcagcgccagcatccctatggcggcgccatggtttccccacggtggaagtcgccagagttcttcgggacggtgccccattgctccccctacccctcaacaccgagattcgcaacgaggagaaagatttgaacacgtcggggatacttaccaccgttgaagggctacagagggagctggcctcatttgacaatggcaccaagcgcggaggtgagccataggtgagaactcccggccatgccctgccgccatcacaccagcagatgcgttgcctaggtgcagcgcagattggagtatccccagcttccctcataaggccattaccattgcttgactacgaccccgatgtgcactctctctcctttccattccccggatccctggcaaccccaaggctgcagcccgacatggtcaaagacaaccacaccactgcaacgaagcgacgggataccctagatttatagtccgaatgcaaggccgaggaacaacaaatcccattgacccgcctaaaacctcggcatcagttaggatttggtattcgccacaacggggaggacgggtctgagcgctgggggccacctaacagccgcagagaaaggtgcagcgcggctctcagcgctgacatggagacccatacggtcagtggggtaaggtgcgggtgcgcgatgaggagtccgtacacaagtggacccacacatcagcgagccaatcagagagcgtgcacggtacattggatgacggcgtgggccccttttggcagtgaacacgggcacagtcacagctggttgggctgcccggttttccgccccactggaccgagcaagatcaaggagggagtgggccaatcaaaggattgctggcccaaag

SEQ ID NO: 162381 - DNA, 887 bp, Zea Mays
ctcttcttcgctttgagaatatataagaatgtcatcaataaataccaccacaaactggtcgagataatccatgaatacattgttcatcagattcatgaagaaggctggtgcatttgttagaccgaaagacatcatagtgaactcatacaactcatacttggtaatgaatgctgtcttcggaatgtccgaaggtcgaatcctgagctggtgataacctgacctcagatctatcttggagaacacgctgactcctctcaattggtcgaatagatcttctattctgggtaaggggtacttgttcttgattgtgacctcattcagagctcgataatcgatacacatccttctggtgccatctttcttctccacgaataggacaggggcggcccaaggcgaggtgcttggccggatgtatcctttctctgacaactcatcaatctgcttcttaagttcaaccaactcaggtccagatactctgtaagctctcttaaaaatgggggcggttccaggaagaagctctatggcaaactcaacttttcactcaggtggcatacctggtggtcatttgggaacacatttgggaactcggacacaaccttgatgatctctagtgggtccggttcactgctatcaacaaccatctgataacaacttcctttctttggcttaggcgggactaactcggtcaccattctcctcctagtggggacaccaacttgattgtcctcttatcacaactgataactgtctgatacttatctagccaattcatccctaggatgacatctattccctgagtacccattactatgagattagcgggaaacactatccccttatttccacacttacattcaagcaaatgctatcggctcgaattctaccac

SEQ ID NO: 162382 - DNA, 546 bp, Zea Mays
caaaaatttaaccatagccgaagcttgacttttgcattcaaacgaagctccagtttggattctgcttcatcataagaagagcttcggaaaaaaggttattaatttccaaggaattttcaagaaatttaaaatcaaatggccagagtacgctccactgctagggttgagcgtgatggagatgagaccgaagccgttgaaactgttccgatttctgaagcaatgaggcgctctgggctggtttcatcagaggacacacctgctgccgaagcaacacaagctgatgttgaagaagctggtttcgaagatgagtacaactgtgggatgccaagtaaacctagtcatttggattttggaaagtccaccatctctgaagctgatcttcccaaaatggtgaaactgggctacttcagtgaagcaaaaaaggagctgattcgttttggtggagaggaaattactccgaagccggaaaagaatgaggttgtagtgttcaaaagcttctttaaagcaggattaagatttcctttgaatgggattattgctgatgta

SEQ ID NO: 162383 - DNA, 642 bp, Zea Mays
atccgaatcctttggtggccggggaaaaaagagattgaatagagttttcgatgccattggttttgtttaccccgactactgctacccgctgcggggatggggaaagaaaaggaaaactgctgcttcggccactccagatgagcctgcgccgaagagcaagaagttgaaggtccttacccaccggccatgttatattgagccggccgtggtgcctgagttttgcggggagacatcttcagctattgaaccaaatgagcccattcctcctacgtataaggttgaagattcgactataatgccgaagataccttcatccaaggtagttgagtcaaagactgataaagataaggccgaagaaccgaaagttgaaggaacaagaatgttagaagttctaatcccttcggtagaagtagcagtgccgaagacagaaaaaagttctgttacaacgcctaggagaaaaaggatggtcaatgtattagatattttagacacatcggattccaaatgccctgctcccttgaagaaggttgctgaagctgacaaaacgcaacccaaagctgatactaagcaaatagaagtcgagactacaataacccaggctgaagccgaggcagagcccacattgcctactgagacaaagct

SEQ ID NO: 162384 - DNA, 609 bp, Zea Mays
cctctagccggtgtcctagatcctacaccgccctgctacgtgtgggagaactcggggcgctactcaagccgaaaacatgccgccgtcgttgacttccctctacaccgccgtggggacctattggacgtggtctgggtttcccggtgacgtcgtgtgactactcgtgggcgcttcggagcctgattgccgagcaggctacgacaatttctcgccggaacaccatcctcgccgtggacccgctctcctccgttgatagacccaatgctgctgcaatctgaggtatggttcccctcatttagttcgtatcgttgtgcgcgttatgtagcacctattcctgacaagtttcgatcaccgggggaccaaatcacctatagcgacattggcgccaccgcgcctcgactcgccgccagtggttttgtgtgtcgcgggtgggtgaggtagatgaatggccgttagatctagatgagcggctgaaaatagaagatggttactatgggggacagatatccctcgggtccactagaaggttagaaggcctcgcaaacggttttgggcttactatctcgcaaggccatcccttcgtgggccaggggagaactgctggcggaa

SEQ ID NO: 162385 - DNA, 349 bp, Zea Mays
agtggccgacgagtggcttgcacttttctagtcgtcggtgccatgcagtacagcagtagtttctggtggccgtccgcacaacaacaatgaatgttgatggccgtccgttgctggccaccaacgttgatggtcgtccgttgctggccaccgacgccatgctggtggccgtcagctgctgtcagcattcacgggcaacgatagcggaccaaagaagttctctagacttagcggacgctcagaacctccgctattatagaggaccgtatagcgttcattgttggagcgataaagttggtgaagaaacgctaaatatagagttcagaacgctttagcgttccttgttggagac

SEQ ID NO: 162386 - DNA, 717 bp, Zea Mays
ccgtccttagctccagcgagctctgcgtcgcccgcccgagccacttgagcgccgaccaccgtggccagccttttccagagaccatagcctcacccaagcctctggacagcttcctcgagaagccatgaagcttctccaagcaaggattgaggccctgcctcaccagaacagcgagatcaccgtcgtcggactttggccgcccgccaccacgcgaataccgagctatcaggtgaaccattcttcaattccttgcacacatgccttccctgacccctagtgaagctcactgactggtttaattgaactctagagccctggataggccgaagccctcgccgtcgacgagctcccccgcctgcgcacgtggaccggcctactccgaccatccccggcgacgatccgcacatcgacgtgaccgtcacaacctcccctacaccctcgactacctcatcggagcaatctcgccgccggtaagcccctctgccctttcccccgccgtgggtactgtttaattgggggaaggacatcgggttaagtttagtaaaaacccagggggttttctgaattgtcagacacatgtgaatagtgacccgaggactagtctgtaaggaaacctgaaaacactcgccagggaccctgatgcaaagttagtttccatttaaccgttttgattaattctttttaatgaacagagaacttaggcaattcataacttga

SEQ ID NO: 162387 - DNA, 452 bp, Zea Mays
cacaagatggaatgaccatgaagtagtaaggcttatgttactatcatttactgtttttatgctaaccttgtctccctagtacgcaagaaccccatgtacatgaagatgagcctcgaagaggtgctggggaagttcgtcagccaacaaatgatggtaaaggacgccaaatcattggtgacatcgccaacaagagcctccccgcaaatgaagcgcaagccatcgctttcaaggccacgaacaacatggaggcactcacaggcaaggtggtgcaagttgaggcagccttaacgaagaggaaatggcacttgtgatcaagcgcttcaagaacacacttaagggacgcagagactccaacaagggaaaatcaaggggaagtgcgcctgctacaagtgaggtaagtgtggtcatttttattgctaattgtcctgataatgacaatgaccaggaaaaag

SEQ ID NO: 162388 - DNA, 421 bp, Zea Mays
cgattttactagaccctgggtttatatgggctcaagtatgaggtaatcactgtggggcaagtggtttgcatacttgatctcttataaatctggtcaagttgccatagggggcttctggaatgcacatcggtccagcaggccgagagttcggcctcttagctctggggacccgcttcaagcccccagccagggccctctcgcttcgagaaggaagcctcggtgcatcccgctataacaggacaaccgaggacgccacaagctcactcccccctacgaaggacccttcatcattgccaaggtgctgaagccgagaacatacaagctctgcaacaaggaaggagaagtctacgacaatgcctcgaatatagaacaactacgtcgcttttacccttaggcatataggcctaggcctaattgtact

SEQ ID NO: 162389 - DNA, 622 bp, Zea Mays
gttcaatactatgcagtactatgttcaattccaacagcaatttttgtggtttcgcagataacccgatttgaaacagttcgtagtgacctcgcccaagccattgcaaagatgcatgtatttgggaaggagttgaaagatttggccgaagacaagattatggattcgccagatacggccaaagatgtgtcagtgaacttcgcaatgtggcgcgtgtatgagcttgctcagccacttgaggacgaagcacagcgtttagaagatctcgaagctggtccatcgccaccattatctgagtggttcaacaaccaatttgctgaagatgaagatatgggtggtggggaatgggcactggatgatgtcagttctgaagagctttcagatcgtcagatgaagtagagtaatatgggtggtgttgaatggcactggatgtgttatttgtgtaagagttagcttgtgtaaggtatctgtgtaatagttagcttgtgtaaggtaactgaacttggtagtgaagtactgtgaacctgggttgtccattccgttgagtgttgaatggcactcgatagcttttgtaaggttatctgaatatttctgttttcaatctgaatctatgccattctgttta

SEQ ID NO: 162390 - DNA, 488 bp, Zea Mays
ttggctcttcgaacgaatcacctttgatttcggttggcctgactgtaggcaccttcggcactacagtagacccttcagcgcttcgagcggcgggagtggcttattctgcttcggtagtagaggaggtcccctcaccaagttcaggcactacggtcgtttcaatataccgaggctagtgtgtcaaaaccttcattttcttgcccttcagcacatctgtgacgaccaaagcagtagttttcctcttttttcctttcctcaaggggtagctatagtcagggtatacgaagccaattgcgtcaaaaaccctgtttaatcttttcttgccccgacccccataggctgcttacaaggcatcatcttcggccttggataatgtcccaagtagctcgtcgctggtagcttcattgcatttcagccagtcatcatttggttcgtcaaacttctctctgaatctaaaggtatatttcaaacgaactaatccaccttca

SEQ ID NO: 162391 - DNA, 941 bp, Zea Mays
atcagtgaccgcacgcttgtcctaaacctccttctggggctcaacgagtgctactcccacttgcggccgctgatcgtgcacacctgtccgttccctaccttctagcaggtgcggaacgactgctgctagaggggctcactgataatgtcgtgggtcactctcctgtggccttggctctcttcagctccacccaccctcgcccaccccgcttgctcctaccacgtcgacgccgcctccggattccggattatggggtgatcatcgccgtcgccgccgggggctcatggtgttctgagtggcggccgtggtggtggaggtgattgaggtggccatagcgccccttggccgtcgccccttggcatgctggacgaaaggcatcagagctttgtgtggtctgttcaatgtgtgtgatgtgccgcgctatgctggttgctggctgccatttgtcaattcagacagagacatcttagctttgaatgggtggatggacaatataatccctccgatgttcctgcttcctagacagcttcatttagctagcatggccccgattaagctcctcaaacgctagctttgacttgtttctttcacactgctcaacgacatactactgcttctgtgtcctttcttgatccaacaaaagagcagctctggtaaacaaattgtctgaaacaaaacaacagccaggacatgttctttgtgataaatagtgtgactgactatcaaaataagagacataagaggggatgttttcttttaccccccccccacccccgcgtcagtcttgaaacattgtattcaaagcgcgcactgctaatcgatctggtccagtagcaaaagacgtgcacacacggtacacattgctaaagattaagaccaacctgtcagtgccaaaagcctcttttcaacctggcacgtggtttaccgtagcccgttccgat

SEQ ID NO: 162392 - DNA, 488 bp, Zea Mays
atcccctcctgattcttctccattgcttcggctcctccgtcgcgtcccagcgccgcacccacgatccacgcgctcagggccttcatcctcgtgcatcccatctccatcttccccggtggagggctcggttcgccccttacgtctttccacatcggtaggaaccgccccacggcggtggtcccagtccatcctgctcgacgtgctcttcgacattgccgccgctggtaactgctagcaatggcagcccgtggctgcgccgcatcgacaagtccgtcagctgcgccatgcgtcgctcctcgcctccatggcccttcgcttccgctcagtcccgcaccactagatcccgctgaggtagggagagcagcagcagacatgcatatatggtcttctgggcgctacttggcgtactcgccctcgccgtcgaccatcacactcccctgcatcgtcgcccttcccattccctgtgctgctatcgtcgaacaagacaa

SEQ ID NO: 162393 - DNA, 704 bp, Zea Mays
gtctctggttatctggagttggcagtggccttttcattcatggttgcctgcactcatccaggttgtagcaatatcggtctctaggtgtgtgggggaggagatggatgttactattagggaagaggtgtttagcaggcatgttaatttcaggtatattttcaactgcgacatgttatacaatgtataagttctagcaactaccactgcaaatgaagatttttttaattccagtttggtatgcaccattatagatgtggtcactctaggggtagttgcaattctcaaatagtttgcttaaaatgtgtggccagggctaggtcactctcaaatattattttacattaactctagcttcaagaatggtactttatacatccattagttcgcctaaaatgtgtgggcattatgtagagatgtgccaatatataaaataaacttttaagctcaaacaacccctttgattgatgtgccactgctgatgcagtagcgttattgtgccaaatggatacatgaggattaggatgttaatccaaagtaggtgcaccccatgattaagctcctatgtctagatatgtatattacctatcaacaaatcttggcatccaggtttaaactcctcccgctgctcgccgatttaaaggtacgcacctgctgtcgaactatggctctaactgatatagcttttaggcccaacaacacctacc

SEQ ID NO: 162394 - DNA, 762 bp, Zea Mays
ggaatgagtagcacttgttctggacttcccagaacctctaaatgtattggcttgccaattcgccccgctattgtcggagcgtggtaaggtctaagttgttcatctcgctagtgccaaaatagaagtgggcgcaaaagcactccaacatatgctttcatgaggttatgatcctagacttgtggaaggtgtaccagctaaatgtgggtctagacactaaacgagaaaataatcgatcttgggcaaagctgctaaatgctgagttgtctatcagctcatgtgcccgatgatgcttgtgtcgtcgttaccagtaaaatttgaaaaactctggtaccttaaaatttggtggcagtagggatatcctatcgaactcctcggggtacgtcttggcgtaggcaatcacatttaactttggaaggatgccaaagttgtccttgatgaagtcttccagctgaacttacatgcgagtggtgcttgcacctccaaaaaaatggggtatggctgctgagagcaagtacgttatcataccttgtctgacactcaagcagtttctactcatcaatttccccttgttcagggcatcgtgtgtctgtctgccactcaagccccccttagaggcctgtagcgcagtttgcatatgaagcccttcggaatgtacatgagaggctgatcgtagatggatgggcctttgtgtggcatctcagagaaatagatgaggaacttcgcgttggtgccctcaaggacactattttgcatcaactccat

SEQ ID NO: 162395 - DNA, 290 bp, Zea Mays
gcgcaaagaaaccattttctacttttcactctacacctaagaagaaaatgcagggtaatgtgtttaccttcaatgagaaacgcgcacctaaaacggtggatcaggacaaaatgaatcaaactactgagtcgcctggtagtgagtctcctggttctgcagaagaaagagaaaacagtaaacaaccatctcattcacccctttctccaactgaagatgaagggactcaagggagtaaaagttccgaacaaagctttgcaaaaggtcagagtaccacattgtcattctgtcat

SEQ ID NO: 162396 - DNA, 1417 bp, Zea Mays
aaaagaaaagggaaaactctaaacagtactgggctcaaacaggcctgcgtcggcccagttagggcagaagtgcgcccatgcgcgcctccgcgctgctctggcggtcttgcgaaaaggacctcggtttgttggctaaccataactgggttctatcactattacactgagtcgctgacatactacagaaaaccccctgaggttctaatccttcactgtgctgagtccatgacggcgtcgagcgcggccgaagtccgacgagctgtctggaccggccgaatggggccatgactagggtctccgagcgactgacacgaaattgagtccaccccgaccatttcccccaacccaatttcatctacggccaattggttttctctggccacggtgaccgtgaacatggcggactgatgaacatgttcccgtgaattcatggcggtccagtacaattaaagggttcgggaagctttggaagagcctagagatgctagaacaatcaacagaggagtatgaattcacctggaacaggctgaccacggcgagcttggttctacggtggcggaaacttgatttgggggaaacaagaaattcgggcacactggtgatcgattgctagcgattcttggtggctgggtagttgatgaccttgcagagctggtgggggctttaatttatagggagagcgagcggtggtgatcaattcggtcgagccatgctggcggccggagataaggaagaatactgacgtcgtggattcgtggcctcaaccgtggcggtcattccggcgatcaccgtgcatgcgagacgcgacttacagcgacgtggtctaatgctttagcacgtggcaggcgaccgacgagcagccaacgccggtgaactgatctacaccgaccgcaaggcatggagatacgacggccagccagagtgacatccagctcacgacggcgaagatcttttgacccgcgacgctatcgacttaccccgagtacaaatcgggacaccggtggcacaaatcttcgcgcagagatgtcgccggcggcgaagctgtcgcactggcgatctcatccatttcagctattgtaccatcgcggagtgtaagcggtcgacctgacagagcactttggagctccattttctcccagattcatatggcaacatgatcaacgctctgcagcaaaattgtagagcaatataccatctacaacattgctatatggtgttgccacaaaaagccactggatcatgtatgaaattgggcttgaagttgatgtcagtccactgtgagtctgaaaattcagaccttaacagcctgacatcctgattttgagcatgattatctccagatttttcacaagaacatggcttgcactcttaagcaaaattgttctcctttgtttgctctacaactttgatgtggtgc

SEQ ID NO: 162397 - DNA, 1083 bp, Zea Mays
gcaggatcaaggtgaacaaggcactaggctctgacgcgagaacccacttctcccttggaacctattccctgactttgttcgagcactaaatacgctaagtgaggtcggaggggtccgagctcaaattaccaacatcctaccacacaccccagatgcggagggctattgacaagtgctcacccaagcggcgaaccaccttctccccctcactcacccactgaatgatcagcgccactccatcaacaatcggcgagacgcacggagcaacattaacacttcacgcggtcgtcggaatgaagaagagatgaggcggcgagaagagtacgatcaggatcatggtgcgctatcacacaaccatgccaccaggactgagtcagcagtggcctccaccaacggtccagccccgggtcgatcgagacgacacaacgcccgacatcagtcgccttctcggtaccgttgacatgatcatcaccggaaggaccgagtgacatgtggtgtctccgcccataccccttggctccgagcaatccaatggccgccaaacttgtcaacatcgacacatacgagcccaagaaagacccaggtggctggttgggtgtctatacgactgccgcccaggccgctagggcgacagaagatgtcatgacagcgtacctgcccattgccctggggcaggatgcactaaaatggcctagcatctacctcgacactgcatcaatgattgggatgacttcagccgccattttgtcgtgaactttcaatctctttccgacaaactggcacagccttgagacctcaagtccatcaagcgccagagcgacgagacactccgcccgttccttaggcattttcagaagatgaggaaccacatccctaatgtcatggaggtagctgtgatcaaggacttctaccgtggatccaatgactcagccttcatccgagccatcctctaaaaggcactcgccaccattgaacaactgttctgagaggcggacatctaaatcaccgtcgatgagtgagcctaggacctcatcgggggcatgaagcctgcacccccagcgccaaagaaagacataaaccagc

SEQ ID NO: 162398 - DNA, 846 bp, Zea Mays
ctcagcaggcgcagttgggcgactgacttggcgaggacgctttggatgaataccctcaggctttcgggtgtccactgttttgtcaagctctggtatagccgtaacagccattgtttcagtgggggccgagtcagaggattctccagccaacatattgagtaaagcatctatttctacatcatctggactcactggcatctaacgtgcctctcatcattgggaagatcacaaagagaagcatccagggcctcaatatcttcaggagagggtcgcactctaagacccagaccactatcaccagcaggagggtcagacacgaaattgaaaaaggacttaggagatggcagattccaagcagagtaggcaacaggagcaccaacatttgatactttgcctctcaagatcatgtctagccggctcaccagatcctcagcaggaattctcctattggtaacccgagtcgagtcagtaacgccactatacaaataagctgggtatgctctgtccttcaagggctgaatattcttaaaaacaaagtcagcaaccacagcctcagcggtcagacctctctcttttagcagacaaatttcagcaagcagaaccctagcttctgttacctccaaggtagtaggagactcaacccaactcagagtgcgcacatctagctatctccccgaccgagggaggagggactttccgtggttttccacaataaaccactcaaggcgccatcctttgatgctatccttgagaggaatgtcaaggtattctgttttccttccacggcgcatctccagacttgcaccacccatgatctggtgctgcccccagccatcccaagtcgac

SEQ ID NO: 162399 - DNA, 487 bp, Zea Mays
gttcgtcgggcggtcagcagaggagatcgtctgggcgtcagcaacgttggtgcgatgtcgcgaaggcagcaatctgggagtgtggggagaggatggagtggccgggattttatagtgagagaggaagaagagggagcgccgtggagaggaatggacagcggcagccattactggcagtgagaggaaacagccgccataaagaggaagtgaagagggcggacgactgttgatggcacgttccactacagggaaggcgagtagacggggagggaggcgaggtggtgcgcagaccggacgaggagacgagcaggctgtcatcagcaaatcggtggcggctggctctgccaggcacgcgcgcggcgcacagggttagggtttggggacttgggcccctagtgggccggctgggtgaagttggttttttttaattctaaaatgcatttttaaagaactcgaaaaatcataaaaattcaccgaaaatatttat

SEQ ID NO: 162400 - DNA, 768 bp, Zea Mays
atttgccaggcaaggacccgagcaccacccgagtagactaatgaggctccttagctagcatagggacacatgcgttggcgccaagaggtttctcccgaggcggtctctctttctctacttctctcttgcttccgttctactagcgccgacgagacgccccaatcggtgatggtggccaacacagcggtgggttgatttaggtgaggctccccccggctagccctttatacaccgtaaggcagatcgaatcacgaatttccccacccggcatcctcggtaaggtatgttttgatcatgtgtgacaagcgtccattcttgttatggggatagagacgactaatggagtggcccgtcctaacccaagcacatatggaaggagaagcgaggcccactggccagagctgcgcggcgtggaggcggactccacgtgaccgcgaggcgctcggtgaagaagacatggttgacatcctggccccggcgtccagtgaccctagaacgatgcacatgctgtcacccgagagatcgagtggtaggcccggagtgtcattcacaggagaggtccacgaggagatgagcgggtgccatatctgactgatgagagggtcccgcccgtcagtgggcgccaggcgtgtgtgtggggtgcgctggtgggctagtttgagggcaagttgggcctgctaagagtaaattggcccagcgctaggttttctcttttatttttttcttttcttttatttttagatttcaaatttgaattcaaatccaaat

SEQ ID NO: 162401 - DNA, 587 bp, Zea Mays
tggtggcaaaaggccgactcataatgagtcggctttgagtttgtgtaaccccttccaatatggatcaaggaattagttgcctcaaatgatcattgttttgctacttttctgtttgcgcatttgaaagtttgcccatatgtctgacactgctagcattttagaggtaactgccgagtgatgcttgatgctttcgtttgtctgagtagtgatctggcactttagagatagtgcccgacccaggaaaccccctttatactcgtgtcgacgtgccttcttgatttccaagccctaacttcactttttcccttcagccattcctctacttccctaaaattctgagcctacttgccccgctggaaagatcgcgatggccccccaagcggaagaggcagagcgccgctgctgcaatcatcccgcccatcgaccccaacagccagctgcccttcactggtaaccatatgtctgtcatctctgaatctgaccttcttcatctcgttgagattggggttttgcttccgaaggagctctgctcttggtggatctgccgcggtatcactgttccgataaaggacactcatgaatctgcc

SEQ ID NO: 162402 - DNA, 613 bp, Zea Mays
cagagacccaatacgatgatgaacttgaccacatattttgaatagcggcgggccacgcccatcatttactgatttatcaatttgagcacccattgatgtgaaagcaaatagacaattgtattgtctaatgctcttaatgaatttctttgatatatgatcgccgtcaaattttgcaagagtagctagaggttcgggtcttggtttgtacggaggaatactaattttgccacctttgcagcaattgttataaacaatagatccatcacgctgttttgatctaattctctcaccataccagaacacagctttgcagtgttggcactcatagtcaggctttccataatatgatcgatttggataacaagctgcagatgtcataaaaacatcatccacaagaataaagatgaagaagattagaagtgtgatgtttttcgcattgatgggtcgttgaaaagcttttgtcgatgtattttttttaacaatttacctttgagtgcctgtatgtattccttagtaatatgaccacagtgtaaactttctgttgtttgatttggtatgcctattttcagagaaaacaagcactatttgttagcttaattatgtgtggtgtcag

SEQ ID NO: 162403 - DNA, 764 bp, Zea Mays
ctagtatcccgtgccccggtggcgagcgtacaccgccatggcgccattgtcgcactgctttgcctcgactcccaggcacaagacctcgattcaactacggtttatgtagaggagaagaaatcgatcctgggagaggaagcctcaccggaaatcatcgcatggagcccccagaccacggcggatggtgaccctgcagcgacggcggggaaagtccaacagtgccccagattccctccatagatctgatgccaccacgagactgcacatgctctggtaaagcttccgagctacctcctgggactagaacatcggtctaggcccgggtcgtcgacggcggtgagctccatcctttcctctgcgtatagccctggcacacgacgcgggtgtccacctgttgatcgattgagggaagcccaggttatatagccccaaggcgtggtcggatcccaaccatccagagagattcacatagcactttcccaggaatcatggcacggacgcgcgggtcggcgagcgggactgggtttgtttcggtctatttgcgaggaagaaggaaacctgtcaagtgggtcccaagcgctagagagagatcggacggcgcggcacggtaaagaagaggtgggccacaggtggaaaagattggagtgggccgagtgagtttgggctgcgcgggggtgttgggccagttttggaaatctaggcctaggcgcgcagaaatcctttttttttctttttatgttctaattatttctactctcttttca

SEQ ID NO: 162404 - DNA, 701 bp, Zea Mays
agcccactagctgagatgtctagctcgtccttgatgacatgttcctcgacaacaaagagacccatgccttgtttcttgacatggagctccatacctttgtgcaagggaacctatacatcttggaatattgtcattaccttaagtccatgaccaattagcttagcaaccttggtgagatcattcctgattgcacctcattttggccacactctgtggcccaacaatggatacgtgcacatcacatctttcaccaagcactagacactattgtaaacattcaacaagattcataatcatttgctactagaagaattaaccctcgatgaaaaggcgacattgtagtccacaacattgctcttcactagagttctctcgtctacaagttttccccctctagcaatgctcccaacctcgctaattgcatgcccaaccccctaggcaccccttgtggccctatgtctggcaatgagggcaacctaacatacaagagcaatcatcagagcaatcatcatcattgcaaaaaagaacgacggtggtggtgactaggcacaccaagaaggatgaccaccctccttcaatccttagatgggtactatataagtttgtcttatccatgcaccatgtctagtccatcgcagttcagtgccatgaccatcgttctggaagggctaaacggcacccaagcattcaccgccttcccc

SEQ ID NO: 162405 - DNA, 498 bp, Zea Mays
tgttttgctgccaaaaatttgaccatagccaaagcttgttcatcgcactcaaccgaagcaccgctgttgattttgcttcgtcacaagaggaagagcttcggaaaaatttaaaaagccaacaacttcatcaccaaatggcaagggtacgctccactgctagggttacacgtgacggagaagaagccaaaactgctaaaaccgctccgatttctgaagtgatgaaacggtcggggctgatagtgccggaggatgtttttgacgaaggtgcatctgccgctgaagctgagcaggttggtgaggttggtgctgaggaagatgaatctgaagatgattatagtgccgtgccatctaaacccagccacctggagtttgggaggtccatcgttaccgaagatgatatgcctaagttgatgaagttaggctatttcagtgaggccaaaaaggagctaattcgctttggcggagaggaaattactccgaaaccggaaaaggatgagg

SEQ ID NO: 162406 - DNA, 429 bp, Zea Mays
attcgaggcacggtttgctggatgaggcgcttgactgcttaacggagccgagggtatgcgcaatttatagcgggcttgagcggtgactggtgaattggatgaattgcgctggcgaccgagaggggaatgagtcacggcggcgatctaccgtggcaaccgcagggcgactgaactacggcggtcattggatggttactacggctcatactgacgcgataacttccaaagacgtggcgtccttacgatgaacggcaaacccgccggtgagtaccgcacggccacgtcgccggtgtgtactgatgaacaagcaagcccacagtacattccagcccatccttagcaagatttttcaccccgtgatcgttatccgtgtttgatttagcgtgaatcacggcgttagcacgaatccgcgcttggggtcgccggcgg

SEQ ID NO: 162407 - DNA, 615 bp, Zea Mays
atttctttatagagccgagtcgtagttgtttctcgttgacgaacgtgggacagagatggacaggcaagcgaagctgtcacacccagttttagaaggcaaaccgaatgcgccgcgcctcccttctacggcggcgccattaccggcgaccaccaaattgacacgacaacagcccaaacaccaaaccaagagatgctaaacgtagctagggatctagtgagctcagcaaggacttcttaccgaaggattgtgtggcgtagaggaccactaccgatgtcttgcggcccggcggtgctttcccaaccccggcgaccaattccaccgcacagatcacatgtagtcgccgagctcttccctgcaatgcctgtcgtgttgcctcggacgtccagggcactccatgaaacagataaggggaggagacgtcgattcctagcagcaggttgactctcgggccgcttcacggccacgagggtcgacggggaagggtacgaaagacgaggtgttcaaggggaatgcgcaagacaacccaagggccccggcttttaatccccgagcacggaggaggccgacccggtcttcccagcatcacggcgcaaggttgttgcaacagctcgtccg

SEQ ID NO: 162408 - DNA, 582 bp, Zea Mays
caaaggccactcgagtggatttcacacctgacccatagactacccctgtcattaatgacagattgcattaaaatacatctagcgtcgggccacgatagagtcggtcctccttccactcatggtctatgcacctaggctagagcctcactcatgacctatcagtcgtagacctgtggctcactcatatcctaccgagcccgaggcctgagtcccttgacagtctaaggagcccacaacatgacgaggagcaccaaggcttaggatacgaaggccaagggttggcgtggagtaggaggagtaatgatgacgcttgggtcccccactgcccatatgcgtcatcccgattgaattgaaggagcacgaccagagagtttagacgacaagggcaaataccaacggatggacttctaccaagggtagaacacctcattttaccatgacacagtgattccttccatgagaagccacttgtaactagccccctacttagtttataaaagggggagggttggcccaactggtaaaaacaatactcgacgacttagctaggtagcgaacacccatttctagatttgttttggt

SEQ ID NO: 162409 - DNA, 441 bp, Zea Mays
cttatgcgcaggggcaaggatggcgcctaaaaagtggggccacctcaaacaacatgaggatctgccctttcgaccgagggtcaccttaggggtcaggcgagggaaactgtgtgccttgcaggatcccgccgcctaggacatcgttgaaaggacatgccacagaagttccaccagtaacggtcagggcggttagctagaccgacacgccacttgagcacgatgcggtaggcaggcccccatcaaaccgtctacaccaggaggagtcatgatgaccaccctgctttaccaggcaccgtagtaactgccttacaccaaccaagtaaaagtcgagacctgctcaaaaatcccaacgcagagcgagggggtgggctgagcaagctcccagtgagccacaagctaggtatgtgacccataggtcatttgctcatacccacatccaag

SEQ ID NO: 162410 - DNA, 282 bp, Zea Mays
gcagggcgaagacacggtctccgtcgatgagatctttggaggttggctcgtctacgtcggggacggctgaagcgcttgtccgtggtgacccatgtttgatttcctgcggggtcatggcctccgatccgtatagcaggcgaaaggtagtgaatccggttgcgcgacactcggtcgtgttcagtgcccagactgcttcaggtagcaggtcggcccatttacccttgtcgtcgagaaacgttttcttgatggccgtgaaaatcttgccgttggcgcgctccacga

SEQ ID NO: 162411 - DNA, 769 bp, Zea Mays
gtggtgcacagccgcagtagctcccattagtcgcttcggcaccttggactctatccaaaccatgctatatgaagtgtaggatgatatgaatagtagggagggctattaccggctcagaccgcgagttgaagccggtcctcggcatagtgtggccccagcagcggtgacaaggtacgctgacaaatccagccgcgctcgacacaactttggggttgaggaggtcgctagcaccctcgggtagccctcccgacttcaatcacgaaggttgagggtgcctccaaccgcaaatcaccgacgacgccgaccacttctcccttccccgattaccgtatgccctctctccctcgcgatgatggtggttagggctcgacaatggcaccgggacgacctggccaacctctatatctggagcgagagcctcgtagctaggtcaccaccagctacccgtgaggataacggaaaactcgaacaacctgcgcgcgttgcccgccatggttgagagggtgagattgctgacacacaaggcccaatgaccagactcacgttgacaggccgtgagggattgagttgttgacatgtggggtccacctatcggcgcagggatggcgcgcccgagtggggcttggctaggctggcgtgggtgaattgcccaagtgggccgacacctggtagaaggcccagtccgaggtcttttcttctttttttcttcttttcttttcttttctcttttgaatttttattccatgtttcaaattaggttaaactccac

SEQ ID NO: 162412 - DNA, 535 bp, Zea Mays
aaaagactagacccgacctcaaaagggttgtgcttgtggatcaataatctattgccaacgaagtggcacaaccgagcaatatacttgctaactcttcaggccgtaataccagcaagttgtggtgttcaatacagaaaaaaaaaatagcagagagcaagacgcacctgacaacggatgatccaactgaagtatctgatctatgatcataaattagttaggtagattgtccttttggcccaacatcattccagtttctcattaattatacatatcgtctccattcccagtaaggatttagtctgctgaaaaaactgacagagcctcagaaattgaaattcggggttgacataatcaaagattcaaacacatcgattgaaatacaagacccaccacagtacttacagtaggatttcaaacaagatgtaaaatggaaggcctttcttagcagagaacagagtaccaatcataacttacatgagatcaaacaagtatcattgatgacatggaaggctgagacaatgaaagtataatgaac

SEQ ID NO: 162413 - DNA, 429 bp, Zea Mays
cctcaaaacctcaatgagaaacggccatgacaccgagtcaaaagccttggaaatgtccaacttgaagaggatacgagcttgcctttgctggtggaggtacctagcagttcattgaaccaacatgaaattgtcaagaatgaatcttcttttgataaaagtcgtctgattaggtgaaaccaatgcattcaaatgcacaaccaacctatttgccatcaactttgtcaccagcttggcgaagctatgtatgaggctgatcggacgaaaatccttcacaagggctgcaccatcaatcttcggcaagagggtaatgaaagccgaattgagtagcccaaaatttctgaatttgtaatcccagacacatgagaccgccgccatcacatcaagcttgataacagaccaacaagatttataaaagcgacccatgaaacc

SEQ ID NO: 162414 - DNA, 386 bp, Zea Mays
gggaaggaagagggcagctgttaagaagtcgtctgttagtagcaatcctccccaactctccccaatcgtaggaaatgctgctttggatagtactggtaccaaatctgctgatagggttcatgttgaagctgaatcctttgtggccagtgccttctccccagaagatgttgatggtgatcatgtgccagtgccactaccccgaaaatctaaagcctctgtttccagggcagagtgttggaatcatatggataagcgggaaattgttgagaatggtataaagagttttattgctatatgtcattattgtaaaactgagttgagtgcagattctgctggtggaactggacatttgaatcgtcacttcaaatacaaatgcaattgaattt

SEQ ID NO: 162415 - DNA, 846 bp, Zea Mays
aagtaatcgagttttccagccgcggcgccgagcgcacaggcggcgaggtcccggtgatgaagacgcagacggcaaggcaggaataggcggggcgcggtcatgggagtggcaacagcgaccagttaggaaggagctttggtgagggaagaaggccgcattgggaaacctggagaggaaagagaacgcgtctggtcttcatggcggtggcgcccgacgacttggtttactggtttcctgccagctcgatggcgctctgctccctcttgtctgtgcccggcggctttctggtgatggacaggggcggcggccgggttttataggcagtcctgcgaggatcaagtccagggggggtcgcgggttccacggcgaggagatcggcaggagacagttgcgccaagctcgcgaattctgttgcgcacccacggaatccacgcggctggtccagtgtccagaggttgaagggagcactgacgcggcggacccacacgtcagcgcaaagagaggtggatgggattcgcgttgtaagaggctgacaaaggtgcccccccagcagcggcaccaggcgagagcggcccggccagggtgccgtggacttcaagagcgcagtggaagcgagttgggctggctggggtgtttttcggcccaaatgcagagctgacttcccccattcttttccttctttttttctgtgttttttttctaaattcataaggttcaattgaatttaaattactacttatttattgttaaaaactattagctatcctcccctttaactctatttctcctattttatttggggctctaatttgaattcaaagctaggcttgtcttaattacaatttt

SEQ ID NO: 162416 - DNA, 534 bp, Zea Mays
cggatgtggttgtgccgggcgatggaggtcggcggcgcccagctagaagcttcgagggagcgcgggagagaacagaagactgacagagcgcgtggcgaacagtttatagcgcacggtcacccagactccaaattaagcggacgaggaacacgcgctatattttagcggaggttttagcggttgctgttggagccataccggacgtccagatcctctatatttagagtacagggtgctttacagtctcttgttggagacagccttatagttgcggaagacaatatcccgagcggaggacaatggatcggtgagtttgttgcgatttcctaggagtttgttatgattcgggtccaggtgctacgaactcagctatggtggtttttcggagagggagaagctgacgaattggccccaccaatcagagacaaggcaccacgccggcgcgcaggtagggatactagagcgtggacccacccaacggtgaccaagatcctcatgcaaagaagaggagggggaaaatagagttgggccggc

SEQ ID NO: 162417 - DNA, 445 bp, Zea Mays
gcgacaacgaccagtttgggggaaatccgaagactggaggctacggtgcacgaaaacgctgatcaaggagtggaatgaagacttaatagagaggcggagcgagggcagtgctcaatttaaaggaatcggctgcgcgtcatgccaattttggccgacatcaaacacggcggcgatgggatatttcgcgggtgagctcgtcgtggcgccagccaatgcaacggctccgaaatggcaagtccgggcatgccatggttactactacatggtaaagggctacggagtggcgtaattgaggtcgctggtgtaccacgacgacaccggcggcttggccacgtcgcacggctacaggcgcagttgataagtttctccccgcgactaaatccaccccccgcgagatcttttactgccccaccgttatccactgcacaacaagcgcgaatctccc

SEQ ID NO: 162418 - DNA, 812 bp, Zea Mays
gtccgctccgcgcgttcgcctcaacggatccccggccatggcggagcgtaccgcgaacctcggggccgttactagctgaactctgtgggccataaagtcttcgggcgccctctttcctctcttcctctatccttctgcgcagacccgagcaaagaagcacttcaccatcgccgcacaccattagctagggtggagatggtccgccatcgctgcttgattcgcacggacgccgcgcgggtggttttgcacctgggcggggggatcgccgcgtctccgtggagctgccgtgtgcctcgcggaggaagtgctccactgtgtgacccttaattcctcaccggaattactggtccatcgtggatcagtcagcgccatggacttcaccactgccccctcggaatgccggtaagaacctcctacgaagttcgccgacgtgccaattccattttgcgggtgtcaacactagagttaagacactgtagtgacggaattgcccggcgccagccatggcgctgccactggtgttcgtacaccgttgggtggggattagtctccaccgtagctgcgcggtgagggaaggaagaggcagcgtgtgccgtcgatcgtgcgatctgcggttcggattagggcatagcttaccccttcgagcgagaaatcctgaccgtagatctagtcactagtggatgggatggaatcgggagtatttaaatctgagccacttctggtgaatccaatggtggctgttgcgtaccgattcgatcgtagtccgacttgatctagcgtgcccataggcgatcaaacggtcgctatcaccc

SEQ ID NO: 162419 - DNA, 502 bp, Zea Mays
ccacgatggaggccgagtacttaacgaccgtgcctgacaacaacgccgatttgatgccattttggaggtgatgcgggggtgatttttgaatgctccaaggatttcataactctggtttccacgtcgagaagccactcctcgtgctgccctcctgcctcctcctcctcgccccgctcgtctctgccgtccccacgccaagtgagcctcagccatggcctccctccgctaactcccagcccccgctgtttcctctctcggtctcggctgctgattttgcctgtgtgttcgtgcgatcgcaggaagcctgcgcttggggagccaccaccagcacccgtcggctctgaagctcagttcctctcagctactgccaattggttgtttccgtcaggtctcccgcctgctgtagtgtttctccctcttgatttggcacaactgttagtgaatatacagaggttaatcaatcaattaactaatcaattcagcgatggtggatggatatgct

SEQ ID NO: 162420 - DNA, 925 bp, Zea Mays
gctgacaaatgtttttgtgtagcacttctaccgtcgctgtcccatgaagatcatggggaataatgtacaaggtcctgtactaacacacatggtggatggggtgaaccgagaatgacaacctatctgtcgacggacatggtggatggccgtactgacctggaattgctgcgccaaacaattcgtttttttagaaagttcatatggtaaactattggagggggtaaattaaggttggtgcttattttgttaacttgtctctggtttagcaagtaaattatacatcagagtcctgaagattttctaattactaaaaactactggcgaggaagataaaaataaagccctctatttattttgttcatcgatcacttggcataatcatgcattgacttcccaaatgatttttaaggagggttttggagacgttttgagtgtatgcatatatagagatagattcggtggaatttagcttttaaactgctatgtggtgcttgcaaaaaaacaaaagaaaacaaaaatggcatgtcctggagctcaggtacatgaacttttacattcttctttgaaaaaacaaacacaacgtgaataagtgtctgatgtgaaaccagacgtactctaatacatgcaggattgtacgtaggacgtggtagaagtttggtcaataatatgctactagaacgagcagcagcaacccagattaaaggaaatacatatacgtgggtggtgcttattcgtcactttagtaaaacagggtattttcgacagttaaagccatcagacataagttattttcgacgtacggtcgtaggcttatgttcgacagtacccatccctctgtcataaagggtcaaaaatactcttatttccgacggtggccattggacataagctatgtctgacggcacctttcggccatcgacgttta

SEQ ID NO: 162421 - DNA, 557 bp, Zea Mays
ctttaagtttgaaattttgaaaccagatttaaatttataaaaagaaactagaaaacaaaatagaaaagaaataaaaaaaagaaagtagctcacctgtgccttggacccaaatctccagtcggcccaggtagccatccctgcccgcgaacgccccttggtcagactccaggcatgcggcccatctctacgccttctctttctttcttttttttctgagcagctagcacgtgggacccaatcgccatccggtcttcttcttccccgcgaagatagcgagacacgaacaaacctcaccggttctccaggatccgcgctgacctcgggagcggattgattgggctcgcgacaaagcctgagaccgaatccccgtaatccccgctaggacctcaccggttggactccgccgtagcactataaaactgagcgccgaatccgccattgtcgagaactggtcacttgttggccgtcaccatggatctcatccgtgggcaactccccaaccctggtgggtgttcttggagcgtcgcgggaagcctccgcgcatgtacgaatcctcg

SEQ ID NO: 162422 - DNA, 710 bp, Zea Mays
ccgaccgccaacccgtaacccgtcccgaacccgtatttttccggaaatccgaaaacgggcggatcaaatgtggaaaatggggcgggtcgggacgggattttttccgtccgttttcatccctaagcccactggcgcggccggaagcgtgggtccagcggactgctcttggggtcggcggtggaggagcgccagccgctgcacacggcgcggaggtccatgtagtagtcgatgtcgtcggtggacaggatacgatcggcgatgcggttgacgaggtccgccgggagcgacgaccagtccgccattttgcagctcggttggaggattgaagcacaactgcacagggttcatgcatgtgcgacgaattggatgggttcaagatataacccatcgtttgcagcgcattcgaggagctggaactccaaacgtccacccggtacaacggcggtggcggtcaatactccaattcttgggaagatgcggcatgcatgagcacgccgttccaatcatcggtattattacgaggggcgatcattgaacttccaagccccgatgacccacacgtcagttctcctggcttgcaattgggttccatgcccactctgcttgttttttaaagggctcgcacatttgttggctgggcagtggctggacactcaccgtccccacatcaatagacgataagaagaccgttttcaacagttgataagaag

SEQ ID NO: 162423 - DNA, 844 bp, Zea Mays
tatcactcccccctcactacctctgtaatgtcggctgttcttacggatcaacgggacttattcttcttcttcatcttcatcaaatatacatacaacagctggtgcacggtcacacccattgggatcaacttcaggatggacacacccattgggatcaacctcaataaagacacacccattgggatcaacctcaggaaggacacacccattgggatcaacctcaggaaggacctctgctagcacttcatcacaagccagagcagaaggacctgcatcctggtccaagcatggcagtcgccgaagccgccttttcttcttcttcttttcctccacaggtgcagtcgagcggctaacttggcggggacactttgggcgagcaccctcaggcttccgagtctccactgctttgccaagctcttatccagccatgatagccatcggctcagcatgggtcgagtcggaagattccccagccaacatactaagcacatcatctatctctgtctcgtctgggctagctggcatctcaaaatgagtttgtttcttatcattgggaagattccaaagaggggcaatcagagcctcaatgtcctcgggagagggtcgcactctaagacccagaccaccatcactagcaggagggttggacacaaattcagaaaatgacctatcaggtagcagattccaagcagaataggcaacaagagcaccaacatttgacactctgcccctcagaatcatgtccagtcggctcaccagatcttcagtgggaattctcttgttggtgacccgggtagagtcattgataccactgtacagataagctgggtatgccctgtctttc

SEQ ID NO: 162424 - DNA, 597 bp, Zea Mays
cactcagtgaccagcgccctagcttggccgacacctaatttcacccttagagacactaatccctcaactaattgcactagtctggcccggagttcgtctgtccacggcggcgatgaataccggagacaaatcgtggtgttctaggcgatttaatgtggtctagttcaatcaaacaggtctgcgagcaacaggagacttgagggaggctagaacatcacacagaagggcatgaactaacccgtagacgactagccacggcgagatgtcttacggtggcgttccgaccgatttgggggaagtaagaaattgggaggctctagtgaatgatcggaggcaagagctggtgctttggatgcgtaataacctagcgaagctcactggggcatcaatttatagagttcctcagtggtggcgcccaattttgagaagatgcgctggcagccggagagaggggaggttcactgccgcgggttaccgtggcattcactagcgcgtcgactcagaggacaggctggctacctattgcgactaacgacgacgtggtaacaaggcaatagcatggcaggctcgggttaacggcgatcatcaccgcgacgg

SEQ ID NO: 162425 - DNA, 1060 bp, Zea Mays
ggcggctgcgggcagacagagctgagaaccggagaggtgaacgccaaagtgaccggccgaagcggagaggtaccaacagggggtcctgacaaaatcgatggcaccactggagcgtgaagcggaggaggtggagcagactgaaccggaggtactgagataccagaatgctgaagcataagagccatgaatgccctagtctcagcccgatcctgaagtagctgctgctgaagggcatcctgcctgtcctgcatgttctgaaacatcgagagcatcctctcggataaccgggcctgctcggccgccaggtttgccagaatcgaagcaagagcagggtccatagcctgaggaggagcaggggcagcactagaactcccagcctcatgatcatgtgagcgtagaggcataggaggcggaggcggaaccccagaatcatcatcatcatcatcatcagctgctgtaccctgagtgtcaaactgtcgaagagctgcatcctcggcctgagagtcaaacacagaagcagaagctggcacaggaatctcaggcgcaggacggtaggatccaaaaacaaggcgtgaggcctcaagggtgctctgaaatcgagggggctgaatcagctgtgcaaagatgtggcacaagtagtgagcataaggcaaactgccgacgagcacgaatcccatccagaacggtgtcttcgatctcacaaatcaggaagtccacaacgtcaaactgagagtgggagactagggcaccaaggagccaaagctgaatatgagtggtagcctccctgtatcccatcctcggcagaagagtccgtctgatgagctcgtataagaacttggctgctgtagtaaagtctgccggtgaacgtcgcgacccatctgtgaagggcgggcggaacagagccgcgacgtgagctgtacccggagccacaccgtcgtgagggcgacgaggagggtcagaagtgtcgtagcagagactgtgaaggcgagtcgtcgactcggggaatccaaatagctggcggatctgactggcagtaattgtgacatcctctcgctcaaag

SEQ ID NO: 162426 - DNA, 1241 bp, Zea Mays
gtggtggctcggtgaaggaatatcaaccgaggcaatctgaagaacatcaccaaggattaattcaacaccactaataggcatcagaattccagcatccggtgcgccgacctctaaggcgactccctcacttgaagcatgcgctgctagtacatcaccagaatgaggtggagaagacccgatgtggacatccatggaggtatgagaaggggaacccgctcggacaccctcgagggctgggttgcagcttgcactacccacccgagccggatcattaccggcaacaccctcgagggctgggcaaccgctggcaccacccttaaggactgggttctctgcaacagccacccctaagactgaaggattctcagtcacctccatgggaattgaacgaccttgaccaatctcttggctctgaagaccgccttccaaggtcgacgatgcccgagacgctgcccgggatacctctaatcccacatctggaatgaccgagcagatgtccatcatatcaccatcagtttgctcggacagcagatcttcaggaacaacatcctcaagagcctgatcaaaatttgctagggataattcttgcagaccaacaagagcagacggagctagagaaggaatatcgctactcccccactgactctgcaacgccgactattcttacgaactaatgggacttcttcttcgtcctcgtcaacaatacggacaataaacggcacagggtcacacccattgggttcatctctggcagggtcacacccattgggttcagctctaatagggtcacacccattgggatcagcatcagtagggtcacacccattgggttcaacatcagcagggtcacacccattgggatcaggtccagtaaagagttccaccggtacttcttcagcagcaggagcagaagggccagcatcctggtccaaacacgacactcgtcgaagctgtctctttttctttttcttcccctcggcgggtgcagttggatgactgacctggcggagacgtttcgggcgagtaccctcaggccttcgagtatccatgattttttcaggctctgggatagttgcaacaaccattgtttcagcagagaccgagtcagaagaatccccagcacccatgtccagcatagcacttatctctgcatcacctgaactcataggcatctcaaagtgaacttgcctctcatcattgggaagatcaccaagtgaagcaaccagaacctcaacttcttc

SEQ ID NO: 162427 - DNA, 316 bp, Zea Mays
agcttgcctgctcagaacactaacaatccttttccttttttgtccttcggcacccttgttcaatcgctcataatcgggatattcgaagtttagggcatccatcacacgattcaaccttcgcttcggccgggtgccgaaggctgcagtcatcagctgatcttctttttagtgtaattttccaaaattttgttgcacatggtttctatcatttctaaccattcttgacatggccctttgaactgtttctcgaatttgaacttataaggtagtcgcacaagttccttcttctcctttatcccctttagcttcggcatgt

SEQ ID NO: 162428 - DNA, 839 bp, Zea Mays
gtcagagcaaaagtaggctggggatcagagtcaatctcggatctaggagagttggtgttgactctgacgctgtctgcggtgcctgagttgctagcgctggagctgaaacagagatggtcacgacaggagtagaaactgctgaaactggttgcactggcggctgagtacttatagctccgacgacctgagtcgagaagtccatggtaaccgaccaggatggagagaaaatcgtaccaaaggagtgtagcttgggtctggactggatcgctggcaccatggaagtatgtagagctagtgatggagcggattgtactggaggcattggaacactggtgtgctgaaggatacgagtcatgaaagcccggtgctccgccctatctaccagaagttgttgaagtgtgtactgattgatgtggcttaggaacgagatcgacaagcaggtagtttatataaagcactcaatttctacaacattttttgcttcatgaccacatttactaatttctgcaacattttcagatgtgatgtccttgactaaggtgttagatgcagcagccttcactttgaacaagaggttagtaagttttggattatgccttcagttttggaccatgtcctgctatactgttatatactgctaggagcatatcactagtagtaagttttggattatgcagcagccttcagttttggacatgttccaccgttatcactatcgatcttcacctatccatgtagtatatatcaatatttaaacatctatactatgtaaccactgctcgattgttgaatggaaaaaatggccagaggcactgatgtgagcaaaaaagaagaaaaac

SEQ ID NO: 162429 - DNA, 499 bp, Zea Mays
cattgtgcgcaatcaatttgggcgaagatggagaggacagtgcgaatttaacttcgactgagcttcactggtggagatgaaagcacctcgccgtggctccttgctcaatttataggcacggcggtccggtaattgattcgcggccacgaggtgggctgttagcgcatgtcgaccacgtaagaacgaggcacagtaagagagatcgacgtatggtgacagcgcgacgaactgcgatgagtcacggcggccgccggtgagtaactccggccgagctcaggagatggtgccacgtacaagttacccttttcccggcgttatccatccttcaccgtgcatgaatccgggcggcgatcaacggcggcgagctgagctggcgttctgatccacccaaaacactgtaccatggcacatcttcttcagtcgcctgaaccggccacgatccaacccaattttctctggattcttgttagcaacagagcgatctctcttaataaaattt

SEQ ID NO: 162430 - DNA, 436 bp, Zea Mays
gggatgaaatgtttgatgaggctaagatatattgtgagcaaaagaatatttcggtgccaaatatgatggatgaaataccaatcagaggtcgtgcgaagcgccgaaatgaaactactactttccttcatcattatcgtgtcgagattttctttgttgttcttgataaaatatgtgttgagatgaataatcgatttggagaatccactattgagatattgacatgtttctcatgtcttgatccaaagaataacttctctaggtttgatatagatagccttgttcgaggtgctcagatttatgatgctgatttctctactaatgactttgcacaaattagacaacaacttcagacttatattcttcaagtaagaaggcatgctacattctctacttgcactgatattgctagtttggcttctaagatggttgagacaga

SEQ ID NO: 162431 - DNA, 382 bp, Zea Mays
cgctgatggaaggtgcactggggcagatacattagcgcaatccctacagcttcaccttccaatggtcggagagtggggcgggcgccgatggaaggcttcctgggattgcgcccgtgattcacctcgctgatggaaggtgcgctggggcggatccattagcacagcgcagcgtgatcccctcgacagaggctttcctgggattacgcgagggttttagggcgtcaaggtgaagctgcgcgaggggaggatctctggtttgggggcgatgaccacgggcacggggtggagcacaggcgcggggcagaaccggtgcacggatgtggacgcctacaatagaggcttatagagtagtagagatatatgttgtgtgtatgtatatttg

SEQ ID NO: 162432 - DNA, 712 bp, Zea Mays
gcaccagcttgtggggggcgcaagtttggagatgcgccgtgggaggaaggccgactacctcgacatcccactcaaggacaacatcaaaggatggtgcctggagtggtttatcgtggagaaccacgggaattccctccccccatggtcagggagacagccagatgttcgtactccgagctggaccgagtcccccacagacctggaggtggctgaggcaggggctcttcttgctaaggttggactgttgaaagagagtggtctgactgcagaagctgtggtcgccgatttcgttttcaagaacattcagccattaaaggatagagcctacccggcttatttgtatcgaggcctcgctgattcgacctgggttaccaacagaagaattcctgcagtggatttggtcagccggctcgagatgatactcagaggcaaggtgtcgaacatcggtgctcctgttgcatactcggcctggaatctgcctccttccaaggcttttaccaattttgtgtcgaatcctcctgctagtgatagcggtttgggccttagagtgcgaccctctcccgaagaggttagtgctttggttgcctcacttggtgaaatccctgatgatgagaggcaggttcatttcgaggtacctttgaatccaagtgatgctgagataagtgccatgctggatatgttggctgaagattcctctgatgtagcccctgct

SEQ ID NO: 162433 - DNA, 801 bp, Zea Mays
tgcacactgtaacaaagttaaagctggtctattaggctacaactttgctgcagagcattgatctagtcaccctacaaaatcgggaggaaatttgccctaaacatgacctgtcagactgactaaagaagatcctgatggtacagtgaccagaaaaatctgttggtttagtgaaccggccgccggtgaccccgcgcgtggattcacgccggtgagttgattcgtgctcaccggtgcccagataacatctcgcggtgaaaagatcttccccgcggatgagcttaaggcactgtttcgtccggccgccgtgtccgctctaccccgatcaccttgaatcaaccctcgctggagttagacacctcgcggtcttgtgccacgtgccttagcactttaaccacgctaccgtgactcgtattgacctatccagagatcgccggtgaggttgccacggttgcggccaccaatcgtgtgcgccagtgcccctcttcctctccggccgccaccacgccaaaccaaattcactggccactgcttagcacccctataaattgacgacacggtctgctacgctaagttatcaccaagccagagcacccgctcttgcctccgattagcccccacagctctccaatttctctttctccccaattctgttttccaccaccgtggtagagccctcaccgtggtcagcgtattccaggtctgttcgtgctccctgctctcttgtttcagcatccttaggttctcctgatgctcctctacctatttgattgagttaagctgccctagatcaccgggaacacg

SEQ ID NO: 162434 - DNA, 635 bp, Zea Mays
ttttcttacacaatccaaggatttctcgaagcacctctccttggattcgcgaagctcctcaacatttttctccagcctagtgttcgactattcacttatttctcgactagcttttgcaacttcaaaattttcattaactttggcaagttttttctgaaggtcttcaatttcggctttataagcttcggattgagtgttaaattttgcttcatcttttttcacttttccaccaatgaaagaaggattttatctttttccatgacttcatttctcagcttaataacttctgaccgaaggttgccgagggctatcacgcagctttcatcttcaacattcttttgcgccatcaaagcgttgctaagaattaagccctgcaaggagatagaatcagcacgagaatacaagacaagataatctgtttttaagttcatcactttcgtaccttcagactgttgtatgcaaggctgtctgcaaggtcatcttttgacatggcggagaggccagcttcaagctttggaaaccccatatttttagccatctcccggcaaacggatattttcttgttgtccgggagacagtataggaaatcatcttcgtccgtgccgttgaacactaaggcccctttcggatatttc

SEQ ID NO: 162435 - DNA, 1197 bp, Zea Mays
aaaatggaaaagaataaaagggcttcatgggccgcacgcctgatttcggcccatttctcctttaccccagcgtggccatttcctctcgcatccacgcgctgacatgcgggcccatcccgtcagcttccctagcgcgcgctcggtgtcaccagacaagcggccccacttgccagcctcaacctccaccgcgctgtagatcttccccgtggcgcgcggatggctggagctgaagacccggcgccgactgccctggttcttgcaacagccatgtgcgggcccctatcttggcgggcgaccggggtggcctattccaccttcgccccaagtccgctagcccctttcccctttcttcgccgcgctgctcggatgagctcgacccgggcgcacttcgcagaatccgttggagccccactgcgcacgctcggacccggactcagcactgggtataaatcgtgccgctctcctctcgcccctcattgagccgtgcgattagccaaccgccgtgaatcggtcgccagagtctctccaccaccatgagccgcatcctcccgtgggcagagggctacacgtcataatcactggtgagccaacaaccatcttgttcgtcacttcctactcttcgcgcatggcgtgtatcgattggaaactgggtccgtgaggccggtttggcgaactccggtgaggtctccgccgtcgggcctgtgcgccgccgcgcgtctggtggagatgaggatggggtcggccaaccgttagatccggtaggaacgcatccgattagatccgtggttgatagcgtttcagtcgccagatgtagcttgtgcggtcaggattggaatcagcataccccttcatcaaacggatccgagccgtaggatggtagttcgatgaccaggattagagcgcatcttcataacaccctagccgtaggatcttaatctgatgccccacgttgggtgccggttcggagtgaatcaggtctaatttgcaccgtccatttgcgattgtgcggcccagatttgatcataccccttcgcgggtatgttttactaaagagcccctatagttttacggaattaacccgccatcccctcggggtgtttactgagtctagggatttattgcaccaaggcccctggactttctggtaatggtgcgctcagtccagataattagaaaatcaagtaaattcattaggaa

SEQ ID NO: 162436 - DNA, 457 bp, Zea Mays
gcgacccagcctctgagggtggcgctagtagcaacccaacccccaagggtgttggagcatgctccctctctactgcttccatggacgtccacattggatcgcccctagtccggtccgaggaggttgcagtgacgcacgtttctacggctctcgctggtcaaggcgctttagaggtcagctagccagacgccaggagcctgccgcctgctggtggggctgaagttaccccgagtcgtgctcttgagattgttcctgctgatcttccctcatcgagccatgcaccgactcttcctgcgttgggtcttcccctattcctttccaatcttcaagtgagtcaactttttgctctttattattcgtactggcgaattatcttttttgtttatctatccatgaccacaggattttgttgacggtgtatccgcccaactgagatcttgcggcgctactgttcccg

SEQ ID NO: 162437 - DNA, 399 bp, Zea Mays
gagagccgcaagtaccactatggacttcgcgcaggatttggacgccttcggtctcggtgacacatttaagcattggctgacgacctccttcttgtagagttggccctcaatcagtgcgaagtcccggcttcgatgtttgaggcgcttggccttgttgatgtcagttgggtggtagtacccctgtaggaacagggttattggtgctcgccagtcttcggtcataataaggttgactatgcggtggccctcgctgtcattggttatttggagcccttcggggctccggacggttggcgtgccgataacatggtagaacacgtcggagggcagggactcgcctctggcagcagacttggccaatgcgtcggcttcttcattcttggctcggtccacatgctg

SEQ ID NO: 162438 - DNA, 652 bp, Zea Mays
tagatcttcaatcctaggtagggggacttgttcttgatagtgagttcattcaaagatctataatcgatgcacgttctctttgtaccatctttcttctccacaaataacactgtggcagcccaaggcgaggtaattggtctgatgtagcctttctctaacaactcatcaatctgcttcttgagttccaccaattttggtctggacactcaataggctctcttgaaaataggggcggtgccaggtataagctctatggcaaactcaacttttctttcgggtggcatgcttggtaaatcctcgggaaacacatctggaaattctgatactattttgatagcttctgatggctcaatttcctcaatgtgggtggtgatctggtgacagcttcctttacttggtccagacaagaccaactcaactaacacttcctctcctgataaggacactaacttcacagtcctcttgtcacagctaaggcttgcttgatatttggttagccaattcatctctaagatgccatctatggttacatcccgggtaccaattactatcaaatcagcggggaactctatcccccttatttgaactcttgcactagggcaaaatctatctgtttgggtcctcccaccaatttaactaaccctcataggtg

SEQ ID NO: 162439 - DNA, 1019 bp, Zea Mays
aaaatcagagaatgggctcaactttggagcattgtatcttgcaaattctagggtttttgccctaggtcaccacatcaaaattgtagcccaattataggagcataactttgcttaagagtgtcagcagagttgttaagaaaattgtggagataattaagcctaaagattggctgtcaggctgattcagtctgaaattcagatattcagtgtagcagagccaactttgagtatggattccaccttgatttagtgctcaaatgtgttcaagtcctatagttgagttgtagctggtatgtagcactacaactttgatgcagagccttggatgagttgctaaggaaaatttagagaaaatgtgacctgaacttgctctgtcagtcaagctctttcttggattcagagcactgttcatcatcttcagaaatatcgcgctgtggatcaccccgccggcgataagaacgccaccgcggcgtgaccggtcgtcggtggtcgcggtaaagttccttggcaccgtggcaaaagttaccgaggtggcgacctctggttaagcggcgaccccgtgccctcaccggaagccgccgcgcggaaagcttgccagcgccttcttctccctttccggccgccgcgcgtcctcaaaattcaccggccaccgcccttgaagcctataaattgagggcaggggtagttgcgccatataatcgccaagctatagcacccactctcatctcctctcgctcgccgtagccccgcaattcgggtttgcccccaaattggtttccgccaccgtaaaacaccacctccccgtggactgtccgttctggtaaggcaccatccaaattgcgcgttgttcttatgtccctatatgctagtgatgctctccaaaccctctaattaaactagaagtccaccaatcattgggaacacgaatgaacttccatagccttcgctgtcctcgtggacagagggttgtagaactccaatcccgaaattaatttggggaaaatggtcggggtagtgtt

SEQ ID NO: 162440 - DNA, 525 bp, Zea Mays
ggaggttagttgggacgggacagggcatcgcacaccagtcctcacagagttggggatttgtttgagattcgcctacccggcgatggtgacagagggaggtcaagagatagctgctcattactgggctcattgggacctcaagccgtacgggaatgatgggacacacacaagtaaagtgtgggatttgttttgggtaagtctcttgtgatattcaaattgaattcagattttgcatttgtaagtctctagtgatctttaaatttgcagggccaatttcgcgtgtgcgacccctataccttggatgatccatatgtgtgtgaggtattaatggcttagcagatagagctataaagagcatgatgtataaagcacgattgagggccgtcacggtgtaccaaaagcgtcaggggaactattgtgacgcgaatatggcaaaggaaatccacccgacggctcagcagtacaaagagagtgaggtggattggttgagccaccattcggatgcttgggcgtggatgtgcgagt

SEQ ID NO: 162441 - DNA, 674 bp, Zea Mays
aaaaaaaaacccttccccccttcggctgggcccattctggcacaacccgcgccgcgcccgcgcttccccctctcccacggcccaagcggcccagccgcgcgcgcccgcgccacccctgacagaccggccccaccagtcagtgactctacctctctcccactcgcgtcgctctcccactggcagcccaggcccgcctgtcagcatcgtcgtcccgcccatgcctcaccggcgcgttcgccgccgaccgcctcacgccccgtcgcctcgccattaaggctcgcaccggcctcagcgagcaccccgccactgtacccgagccgtcccctcaccccttgcctgcccgagccgtcccaatcgtcgtttgctccattcccgccatcatggcgagctcgtcggcgctcgtcgtcccctccatccctctccctctcccggacgcctataaaagggaccgcctgagctccgttccttccataccagctccggccatctcctccactcctccccgagccaatcgagccagcgccaccgcgtcttccccgtcgctccggtgagctctgttctccccacccaagtgaattttagtcgaattaaccagtgcgtgaagctccgccacacgctcacggtcacagggcacccctccccacctcctattgcacccggcagcctcaccggcg

SEQ ID NO: 162442 - DNA, 358 bp, Zea Mays
ctgttccaattattttataggctagacatggaaatattttttagatgaaaatcagtgacatcagagcctgataatggcggaagctcaggtggaggtggagctgctgcacctacacctgttcttgcagcgaggccatataaacacaactcttcggtgctagaactaattgatttggatgagctacctagggatccagcaaaaaggaagagaatgtgtgactaccaccccaatcagcaaaatgaaataagaagaaagtatttactatgggggccttattaacctcacacttatgattttcctttcaggattattgcgggcaagaggcgtcgattcaatccagattggtttggccagtatg

SEQ ID NO: 162443 - DNA, 487 bp, Zea Mays
ccccgcctgtcaaccactcccctctttccaaacctcccacccacgctctctgtcgtggacgcgcccatgaccacgcgtttttcggccatgacccccacgtctgagctcttatctgcagctcacggtcactcactcactccactcgcttagttgcgccctcagccgagcaccctcgccctctctcttgctctgcgcgcgcgcccatggaactccatcgaaggatcgccaccattacatggccatcgtcgcgcgtctgtcgcgtctgttgccttggtgagcttcgccccttcgccggcaacacgggacacctcccgattggcctccaacctctctaattcgctagatccgcgctcactggcgtcttccccgtgcagccgaagcccaccatcgtcgactcgagcaatccctgtgtccccgccgttgtcccggtgctctagagtttcctcttgaggtgagcaacctccccatgcccctatttctccttttg

SEQ ID NO: 162444 - DNA, 293 bp, Zea Mays
cggacaaatggcccggaatccctccggtcggtctcgtcccgcggcgaatccacaggcctaggaggctaccagcgatgatgagggaggaaaagatgatgatgttgatctccctcctgctaatgcacccattatccaggggttagtgcttcacagagcgcaggcacgtcgctccgccaatgagtaggtcattgatttcactatcagcggagggtctgtccttcttcaggatatgcgcttccaaaatcctacattccatattcgtgatgtcaggattgatggtaattgcttctgga

SEQ ID NO: 162445 - DNA, 285 bp, Zea Mays
ccgccgatgacctttccacgccgcgatttgcgccggggtcgagatgatcgggcggcaagcatctccccacgaagacctctttgctccggataagaccgccgcggtggagggcactagctccggctgccacgcggccatccctccttccggccatgtccggtcaccggcgccgcccttctttgttcggccacgccatcgtggatttgactgccttacggccgtggttgtaagcgtggcatccttaggagtattctccttgcgccgttgcattggtgaacgccacgg

SEQ ID NO: 162446 - DNA, 807 bp, Zea Mays
tggcttcaatcttctcttgatttgcttctatccctcgatggctaacaataaacccaagtagctttctagtcagcactccgaacacgcatttttctgggttcaacttccatcggtagcacctcaagctgttgaagacttgttgcaaatcttcgatgaagttgtctgagttttctgttttgatgaccacatcatcaacataagcctccactcgcttgccccagtggtcgtctaagcaagtctggatggccctctggtaagtcgctccagcattcttgaggccaaacggcatggaggtatagcaaaaggctctgaacggtgtgatgaatgcaatcttctcctcgtcttccttcgccagactgatctcatgatatccggagtagcaatctaggaaggagagcatagagcagccagcagtcgagtcaactacctgatctattctagtgagtccgaagggatccttcgggcagtgcttattgagatcggtatagtcgacgcacatgcgccaatcaattttattctttttgagtacaagaacgggggttgcaagccactctagatgcagtacttctctaatgaaccctgctgacactaggcgagctaattctgcacggatggcttctctcttatcaggcgtgaaatgacgtagcttctgccggattggtcttgcctaaggatatactttgagtttgtgctcggctagctctctctggatttccggcatgtccataggttgccatgcgaacacatcccgattgtcttacaggaactggaagagcgcgctttcctatttgtcgtcgaggttggagc

SEQ ID NO: 162447 - DNA, 418 bp, Zea Mays
ccttttcttaacagtgaaagtgatttcccatctggctgttcacagcttgtgcattctaaaaaatcgcagagggtcgttgatgatgtttcttctgggccagattgtgctccaactagcaaagaaaagactgtctttccatatactggtcaaccagttgctggcaaaagagatctatttctaccacagaatgctcctgcgattcctcctgatggcagaatggatttggatccatcatttcctgggcctatttcaatcactcctgacagacagattagcccattgttttcagatcctttctctccaagagctgccagtaaactattcagttcaacacatccaaagcctctctccccaactgaaggtagaaaagacaggttttcatctgtccttactgctgtttctccacgtactggcaaga

SEQ ID NO: 162448 - DNA, 441 bp, Zea Mays
ttcgcgaagatgcgctggcggtcagagaggaagaaggttactggtgctcgagattagtggctttcaccgtggcaagctccccggcgaccaccggacatgcaagacgcaattcacagcgacgtggtacaacgcttgagcacgtggcgcacagcggtaagtggccaacgacggcgaggtctatctcggttgatcggcgagcaagtgggtacggtgaaactcatccgcgaccgagcccgagcctatctggtgccaagattcttactccgtcgtgattatcccctcaccagagagcacgaatcgcggcgacaacgcaaatcacggcgcaaagatcaccggcgacgaggggggctgaacttgtgatctgtttcagttactgtaccatggtggttaccatcagagtgtatgacagaccattttgttggactcggatctcgatttttc

SEQ ID NO: 162449 - DNA, 702 bp, Zea Mays
gctgaatggcatgaagcaaactatgagataaaaggacatgtaatcgctagcaacacgaagttgcgagtataccgagaggttattctaagaaaattttcactatattggtgtgaaaaccatagtgtgttcctgtcgaaccactttactcgttctatctaggacctctatgcttgtgccgcatacatctctcggaattgtaaatacttatagtcactgaattgactcgagatagtcctttgacaagtttggtatacgctgtaagctaaatggtaaaggtcggtcctgaatggacacatacacggggtttatgtagccgaactacactgaattccacccattgacatgcttaccattatctacctctgatctaccagaagtgagaagagtagacaaataactatgaaatcccacatcaccatagagcttgaagtgaaattgggcattaatatgtcattggtccttggcaccggaagatccataattattgacctataaactactagtgatgataatttgtgatagaaatatgaagatcttgtagagacctgttgtatcctctctactcctgatgatttcttcgtatgagagcagtattatttgttgttaaggtctggtcccagatggataccggtcttgtttcgttcttgccaagcagatatcatcatttgcttcatcaaaagctagttatatggtgattttttc

SEQ ID NO: 162450 - DNA, 764 bp, Zea Mays
caaaatttggagtaaaatagacttaaagtctggctatcagtcaaccctgatgactgaactatagccaccagtgaccttggcagaacattgagatcgaattggagtaggatccagtgattggttgggtatgattactataccaaagttaaagctggattataggacaataactttgatacaggaagattagtaagtagtcatatggaaaatggagagcaaggctcctcaaatcacgctgtcagaacgactaaacatgatggccatggtacagtgcgcgaaaagatcttcaggttcactacatttcaccaccggtgatccgccgccacaattcgcgcccgcctgggagattcgtgttacggaaagagtagataacgtcggggcaaggtgaaaatatccagtgcggggtgaatccgatcgctggccagaccagccgtcgtgtcccaccgtggtcaatcacgctggcatcactagagttcaccgttatccggccaggctacgtgcctcaaagccttaccacatcgcaatagaccgctttaggtagcttgttcatcacctaagacactgccccggtaaaagccacgatagaacttgcgccagtgatttcccctctctccgaccgccaccacccttccttcaaattggacgccaccgctgtagaactctataaattgctgcccccgtgggttccactaggtatttacgcatccaacgcactagcccttgcctcggatcatccactagagccccttatcttctcatttccc

SEQ ID NO: 162451 - DNA, 404 bp, Zea Mays
gccacgtgggtcccgcaccggtagcacgtcactgaatgcggaacagtgcatgcgatccgcctgcaactctgctgcaagagaccccagcccgcaggtaaactcgccatgccgtgcaggcgtgcagctcgatacggatcgccgacagcgcccaccgtacaccgcctgccatcgttcgctcgggtcggccgttgcgcctgcgcgtaataatgcaagtacagtagcgtatcaggatgaggaataaatactgcagatcccgttccgtatccgtgaatcgtatggttatcccagcgcccctacaagctcccctgcatattgtggcatctatactgtcaattactaccgctataatggtttgcggataaacaaactttaattgatgtgcacgtttgcctcgtcttctgatc

SEQ ID NO: 162452 - DNA, 509 bp, Zea Mays
ctgttttgaagttatgaggtaatgctttagttcatgttgaccaggactaattttggtatgtgtctgtgcatcaagactgaagcatgcaattctccctagacagtctgcttattgccactggcgaatgcactattcgatatattgcagagtaaatttataggtttgagtggcaggtttgagtgtttgacctttcagacaggcagctggttgtttcagcatttcaaataataaatatatttgacattgtactgcatatagatataaattttagatttggggacctaaggctttcactcaccttgatgttgtgccctcgtccacagcagccaaagaaaagaaaatcttgaatgaagcgaaatctgctaaacaagcaaaggagcatcatgttatcaggttatagatcattggatttagagtaggcagtagaatagagatggaacccaacaggagcaaacaaaagtaggtatatcactaaaaataaaattaaaataaagcaaaactgacctctg

SEQ ID NO: 162453 - DNA, 515 bp, Zea Mays
gggcaaagcaaatgttgtggcagatgccttgagcagaaaggcccagtgcaattgtataagcatagatacaagagttaccaccctgtgcgatgaattgtgcaagttgaacctagaagttgtctcttccggtgacctaaattatatctcagtggagcccacattgcaagagcaaatagtgagggcacagattgaggataagggtgttccaatgattaaggaaatggtcaagcaaaaggcagagaagtacaagtgcttccatcaggacagcaagggaattttatggtttggagaccgattagttgttcccaaggaccctgagctcagaaagaagatactagatgaagctcacctttccaaattctccatgcaccccggtagcaacaagatgtaccatgatctcagatctttatattggtggaccagaatgaagagggaaattgccaagtacatatccgagtgtgacacctgccagagaatcaaggccagtcacttgaaggcagcaggccctttgcaac

SEQ ID NO: 162454 - DNA, 879 bp, Zea Mays
cgcagaacctgtgacatacctaattcgtagtagcatatttggtggtgcgagcacgtgggcagaaggggaagcacgttgcaaattcctgatcgacaattgtaaataataagaacaagtaaagacataaacaataagaacacatacatgtaaaaaagaaaatacggatagaaccaacaaaaggagggcaaaaaagagacaaagcactattatgcagcagcaaaagcctccattcaggtgacgccgacatcagaagcaactattcccaaactgtaggtaagcaaaggaagttaaactaaggtagcaccaatatgtggtaagggtctatgagaggaagcaaaggacactaaatgatctcagaatatataaccaaaaaagaaccaaatatagacacaaccaggaaaagaagagcagtaaagaggtgaagggcatatgcaggaacacattttgacaaaagggtcccaccaacatcatccgggctgtagcaaggcagggtgttccatagcacaaagaaccacaactataaataagagagacaactaagttccgagcacacttcagttacaagcacgagatactcagcaacggcccgaacgaccgtaaacataaataaagagctctagggagctaagaagtccaagcacaattaagcctgaaatttctttttctcacccaactaaactgtatgtgaggaccagactgtagggaatctctgaatatgttttgttctaatgcttattgtgtaaccataattcaaaccattgattcaaactgttttgatttcaccttcgagaagacccaccatccgaagccaatgttgtttgtagcctaagaaataataaattgaccaccaaatttatatgtgaacccttttactctttg

SEQ ID NO: 162455 - DNA, 780 bp, Zea Mays
gtctgacagtgggttctggtgaactttggaatcgattcaagcttgattgagtaagtaaatgatcaaggtttctatagtcgaattggagctggattatagattaacaactttgctacagaagactggataagttgtcacataaaaattgaagaactaagccctctaatttgctctgtcaggagccctgaaggagggtttcaatggtacaatagtttgaagaagaccttgagttcattgaaccttgccgccggtgatccccgcgcttggattcgcgccagccgccacgatttgttctcggagcaaagtggatagccgaggggagtaaaagatcttggcgccaggataagctcggacccggccactggatggttcaccgtacccccttgctctacggccggccgtgatgatcctcgccggcgttagccgcttgctgcccgtgcgccacatagtttgtggtgttatcacgtcgcagtagaccaccgtaggtagtctatccattgcctgtgacagtgccccggtgaatgccacgatagataacttcggtgactcctcccctttctcactgcccgcccttcctcgcccaaattcatcgtattctcgatcgcactctataacttgatgccctagtgagctccgctaggttgttacgaagccagagcaccagccctcgcctccgattagccaccgtagcgccccaattcctttcttcccccaattcggttctccgcgccgccgtgagccaccgcgccgtggaccgccgtctccaggtccgttctcgcc

SEQ ID NO: 162456 - DNA, 272 bp, Zea Mays
ctcccaagtaatcaatttatgaatacaagcaaactgcctgaaaatggagttatgctagaatatcatttcttgttaaaaagcatcctccatttattctatgactgttatctacaaacctacatttgtggtagttgaaatggcagccatgtgcaatgggtttagttgttagctgaggtcttgaatttaatacatgatgcaaggtttaataatcagcattgatcaattgtctcaagtgcactggtggttagtgtgcagtttagcaggcctacttt

SEQ ID NO: 162457 - DNA, 761 bp, Zea Mays
tcgtcgccttttcgcaaggaggaacatggcgaaagcgccatgctaccctcggtgggcaaacgagcatgacgtctctggtgaactgttaacgggtgatccagtggaggcccgagccccatttgataggagtcggctagtggtcccaagacgtgccccaaaagtacttgtgggtgattcgcctggtcccggacccgttcgatggggtccgagggctccgatgggagaccgtcacaaatcgctcttaggggtctcggatatgtcttagggtatctcgagattgtagcccaagcctcgatcatgtacggacgtacccatagtcatccctgactcgtacccatagtcatccctgactctgtgctcttgggtgattgtcgaaccctgctaagggccaacctacaaacccctgatcagtaaagggctcggagcccatgtgctttggggtggttaccaaaccctgccgagggtttaaccttcgaacccctgatcagtatgaggctcgagcctcacatccttcacagggaagggagtccgaggggatgtatcctccctgctacctgtggaggaacgaaagatgacagagaaaaagacacaccttttcatgcacttaccctgaggaggcagagccgtgccccttggcttgtgttagccggacatgacatgcggcttgcaggcgagatttaatgtgacgggatgcgacgtctcacgagccaatcgttgtggcgcatgtgcacgcggaatttgaagagatgagcccactcctg

SEQ ID NO: 162458 - DNA, 528 bp, Zea Mays
gatgaactggaggggtgcatgcgtgtgaacagggtcctggttctgtggattccaagttggttcagaattctgaaaatggatatccacgcactacctctgtactcagtgctccagctcggattttggggatacggtcgagtgcaaaggtgtaccaggggaggggataactcaagaaggtttcaccgccgtagtgtttggatcgagtgagctggacacctctccaaactagtgactaggttgctgatgttttgctgtcagcacaccatgaagttcccagtgcttctctgtaacttgggcctgcgtggtgccatggtttcacggccacgtgcccaagctcatgcacgctcttgcctccccacgtaggccttatttggtggacaaacactgcatgttcaccgtgtttttcttttctgttgccgtgatcgtgttagcgcgtggtggagaagggagcagcagagggaagaatcagaggtagaagaagaagactggggaggaggcggcggccagaacagccagccacgaggtagt

SEQ ID NO: 162459 - DNA, 607 bp, Zea Mays
cacaggacataacccttatgcttgaaccaaaagtttttgagtccaaactattttattaaaaaattgttgctgtcatccctccatttcaaaaatgttttcccctttccttctcttagaagtcagatgaaggtccgctgccaaaccaggttttgctagaataaagatggtttccccaagttgttgagagcatgcatagtttgcctcggaatcaggagccagccagagtatgatggtcgtgaattcgtcaagcatggcacaaagaagtgtgtcgtgactgtatacattggatctagtccacaccatgtggaatggagtgtcactgctgcggggcacagattcagagacacctaccaagtagtcgcttgcaaggcattaagggccctatgtcaaatatatgaagaagaagtggctgacaccgcgtttagattctttccgccctttaagagagaccatccagtttggatggccaggatgcgtgcattggaagggcagcagctgcttgagcacgaccccatagtcatgtacctcactgcatacatgctcaccctggatgcacagtatgatttattagatgattgcccgagcagaagatgcagagaagcgcaac

SEQ ID NO: 162460 - DNA, 595 bp, Zea Mays
gcttggtcgctgtcaccgggccccgcgctgtcagcctctcttgaccagccgcacaaccttctcaatgcatctccttgtgtcactgctggtgggacccgcgtgtcggcgcctcaagatggagctgctggtcctcactgctgcatgggcccattagtcggagacacgggatggcgctagcgtgggtgtcgctgcgatgtgggacccggattctggaactgttcccctcgcgccgagcttgcctctgaccgcaacagatcgcggcgagctcgccgccggaaatctctcgcgctcaccgacatatggggaccccgggttagtcttttggcgcctgtctctttcagcgcgtgccaccgtcgcctgggccgagtcgttagggcctcctccccaacagaatcgcgggcgttccctgtagatcttctccgcttcgccatggtcttcgccgcgattctctctgggaagttagtagctagctgtggctctcgcccctatatatagcgccctccatggggatctcttaataccgaccgcgtgcgcatcctcaacacggctcgaccacagttaccgctgccgcgggcgttttctggtttaccatctc

SEQ ID NO: 162461 - DNA, 1449 bp, Zea Mays
tctgtggagtgcctcattagcgctttgtcctaggcagtgagaatctgcaaggcacacggtcttttctgctcaaaaccaaatgtggcccttggtttaaggggtgcatccttctgtgctgcttggggtggccccactttccaggcatcatccttgtccctgcacttctacataagtaaagggggagtgctcgaggttggttttgcttaccgcattcttacgcttgatcccttgcttcctttctcccctaaaagccctctcgttgttgtgcctcctcactattcctccttgcttccttgttcatgtccaacttgcccactacacgcatggcatcattcaccgtttccttgatccgagagagtcgtctccttggtttggagaagaaggggttcctcccctcgagagtgatctcagggtggagactgtagggtgagggtgaagcacctcatccctgggaagacgaggtggtcgtgaatgcatcattttatgagcgtgggttcagcctcccctgcatccctttatgcgtgggctcctccactactatcagctagagcgtggaggttcagaaccttcatcccaacgttgtccttcacatatcgtgcttcataacgttatgtgaggcgttcatgtggatcgaccctcactggaagttgtggcagtatttctttagtgcacgggtggccccgtcgcggcggtcagctgtatgttggctctgccaagattcagctctgttctggccagaaaatagagtacctcaatatccctattctttcctccatgtgatatgaaggggagtggttttttatcaagaatgtggttggaagtgccctattgttcaccgtcaggagctggtatcgatggaggcgtggcaccacagggcggaggcgagcctcaagagtgagttggagcatcttctgacgacgatctggatgttgaagcagcgaggtcttactggcgcatggctggtgcgcacctttatgcatcgccagatttagcccttgatggcctatcagaggctgatgcaccagtactccggtgtcaatgaccctgaccgccattcctctgtgccactcacactaaccgagatcaagcctcgggtcaaggttgtcatggcattatcatcgagatcctttatgaatgaggattcgccccttcctctctctaaggatgtcatgagcaccctggtaagttccatcttcccggtgttttttgcccctttgtctctctccgtttgttgccactcatgcggactttgcaggggatcggacccttagcgtcgtgtcttgttctgacatcttcatggtagtgcatgaggggacccataggtcagtcatatggagcactgatgcggcgtgcggtctttgcccgttgtgacgagcctgcatcacttgttgatgtgcgtaggcagacaaccgctatggtgtatctgttgcgcaccacccggtatttggg

SEQ ID NO: 162462 - DNA, 331 bp, Zea Mays
tctctaacttcagctaaggcggtggaattcatacaagacataatattcaggttcggaataccaaatagcatcataaccgacctgggatccaatttcacaagctcagagttttttgatttctgcgaacaaaaaggcattcagatcaaatatgcctcagtggcgcacccaagagccaacgggaaggtagaaagagccaacaagatgatattggaagcactcagaaagaaagttttcgacaagaatgaaaagttcgcaggaaagtggattagagagttgccgtacgtcgtttggagcctgagaactcaacctagccgagctctacatggaaaca

SEQ ID NO: 162463 - DNA, 485 bp, Zea Mays
gacaattgattgggccatcaactcgcgttatttcgcttgggactacaaagcgaaagctctagctcatgtggcaaagcttagtgcgtccctcaaaagcctgcaggtgtactataatactttacatgaagaagtgcatgtattgtatgctcgactgcacccagatgtgcctctagacgttgctgcaatgggagccggaccttcgagaacagcaaatgaaggacctgatggggagctggacctttttaggccccctccttccatgaaccttgctgacgaacggtctcctgcaacaggaaatggagcaacaaaggatgaagaagactagaatagtatagtctgaagtgttatgcttatgtaaaataagtaatgaagtcaagttgtacactagagtatgtataatcattacattttggtaatgtaatatgatggtgtatgctggcatgttatattttccaaatgtttctttgcctcagatgccatcacgg

SEQ ID NO: 162464 - DNA, 805 bp, Zea Mays
aaatgcttctgtgtcgaccaattctcctaattgtgctaggaactggcctatgtgttcgtgcatgctctttccctggtcacccgaaaattttgagaattcgggtatcctggttccctgtgggtatgggtggtgatcaaatcggctgtcatatggtttctgatatgactatcccctagggatcatgcttactccgagcttatctcggaacaccccagctattttcctccctcactatatcaatggcaaccagtgcgagaccaccggctctctggtcaaacataggtggggttggctggatattggcatgttgttccccccccccatttgtttgagctatgtggtgcattgtcgtttgccctatatggctcataggattgatcattcctttccggccttctaggcggggccggaaagctttcctgggctctgaattttgtattattgggctgatgcatcgcatagtgtgatgggaagtgttgctgggacaggtgaggattcgggtaacaatcctcctcaaaaaggtcatgcgcggactgtccgtacattggcccggaccatccgtggttatatgcggaccgttcgtcgtaatatgcggacagtccgactgggtagtttgaattttgcgcaaaacgatgtggctcgggcacatgtgttggtaattcattaaaaatgggcccgaccgttgctggcctggactgtccgcgctcgcgtgcggacggtccaggcatgtgcagatcggctgatttgttgccgatttggggttgctcagggtatgtgtccatcggcatcccataaaggggttgtg

SEQ ID NO: 162465 - DNA, 1035 bp, Zea Mays
gcagcagccacctctaaggctgaaggtccctcagccacttccatgggagcagggcaatccaaaccagtttcctgaccctcaagaccgcgctccaaggtcgatgaggcgagggaagctgcccgggatgaccccaacccggcgtcaagcacatcaacacaaacatccatcacgccaccatctgccggttctgataacagatcttctggaaccatgtcttcaagagtttgatcaaagttcgcgagagataattcttgcagaccaacgagggcagacaaggcaggagaaggaacaccactactttccccactagctatgtaacgccggctgttcttccgaattagagggatttcgtcttcttcttcatcattttcatcaacaacacggacaacacacccattggggtcagcgtcagacgcgtcacacccattgggatcagcttcagtaaattcaggcacgggcacttcctcagcaacaggagcagaaggaccgacaccctgatctaagctagacacccgacgaagacgtctcttcttctttttctccccctctacaggaaaagaggcttgatcggctcggcgagaacgttttggacgaacattgacagacttctgagcgtccaaagctttgtcagcctcagggatgggtaccaccaccaatgtttcagcaggagcggcatcagaagaatcctcagctaacatatcaagcatggcacttatctctgcatcactgggatccaaaggcacctcaaagtgaacctgccgttcatcatcaggaatttcttcaagcgaagcaaccaaagcactaacttcttcgatagagggtcgcactctaaggcccaaaccgccatcaccagcaggaggatttgacacaaaatgggtaaaggccttggaaggaggcatgttccaggccaagtatgcaacaggggcgccaacatttgataccttgcctctgagtatcgtttcgagccggctcaccaagtccacagcaggaattcttctgttggttacccgggttgagtcagctaggcctcggtac

SEQ ID NO: 162466 - DNA, 766 bp, Zea Mays
ttttccaacaatcttaatcgcctccacctccacctcctgaacgaaggcagttgtgtcccgccttcgcaaagcgatggtgaaggcagggctctgcaccatctggtcacccaaagacggcatcgggcgaagcctgactttgcccagaccccacccgtgagccagcgaccacacactataggcaacgaactcttcaactaaatctcggtcgctgctcaaccgagttgcatcgcgaagggcctcctcattcttatccctttcttcactttaaattgtgggaagtccacataacaatgcgagcacaagatggatgggggcaaaccaggcaatccttcgacaccccacttattcttggcacaaggaacaatctcaactacttcgaccaaagtcttcccactcggcgtgaatgtgcaggacccaaattgcgcaatcagtccacctatatttttcttctggcaatgcaatcaataattcttagcgaagacctcaacagacggctctccgccataggaagtcaccgcccaacatacttcaccaacgccaccatagcgttcgatgtcaactaatgaatctgaatttgaaatttccgcataacttctgctatgaatcgatgcgctggcaagcagagtccagcagtgaaaagggcctcgaacacaaccaactctccttccgactcgaggacatcttcagcccctagcgctcgcccaactccattcccaaaataaccaaacgctgcatctcgtgcacgcggcccgagtaaatcctcgat

SEQ ID NO: 162467 - DNA, 557 bp, Zea Mays
caagaccaaggggggctggcacacaaccagaaaagatggtagaccaggagttccatgatccatgccattcgccacgcagtgctcagttacctagcacgttggtgcagattaaaaaccactcgtcgagttcatctggactgcagctaccaaaacataagcatccaagctggggagcgggtggggcacgcacgtcagcgcccacgtggccgacgcggggtcctaaagacctaaactatcccttccctcgacgagtccgcggctccccctccctaccgctccaggcgcgcagcataaaagcccgcccagcgcaccccaaccacgccaggcactaccagcagtcaccagaggcccccgatgccggcctcaccgtcgcgccccgcgccgtctccggccacgcctccctccgccgtagccactccgcgccgccggcgccgcctcgtccaggggaatcccaaccaaaaccagcaccactcgccgtcgccgtccctggcgccggcctccccgttccccttcttcccgtcgtcgccgtcgccgttccaccggttcctcccctcccc

SEQ ID NO: 162468 - DNA, 432 bp, Zea Mays
cgggtgtgaccttttgtcttccttagatgcttattctggtttccatcaaatccagatgtctagggaagataggaagcataccgcttttgtaaaagtggatgggctttactgctatgtcgtaatgccttacggtctgaaaaatgccttgccaacatttgtgcgggcgatgagtaagacttttggggacctgatcagggacaaggtggaagtatacgtcgatgacattgtagtcaagactaagagagggtcgaccctactggaagacttggccctggtcttcgacaggctgtgggcaacccacataaagctaaacccggacaagtgcgtctttgatgtctccgcagggaagttgctggggttcctggttttgtaccggggcattaaggcaaacttggagaaaatcaaggcgattgaagcaatgcggcctccggc

SEQ ID NO: 162469 - DNA, 535 bp, Zea Mays
gtctggaaggaataccgcgagaacggaattgagaaatgctctatggcagtctacctgggagaaagccgaaactacccaaatcaccctcccttccaagttaccgccactgaacaccgcttcccagacacttgccaaaatgctgcccaaaaagcccttcgccagctatgccaaaactacagcagggaagtctccgagacacttcttcgctatttcccacccagcaacaaaaacacccctacctagatgaaaagacttcaggccttatcagggagagatcctaatgaggatgaccccaccatagtctacatggccggatatctccacacccttgacaaccactatgacgaccttttctcccactacacccacctaaattcccgggtggaaagcctagagcaacaaatcaaggaattaaaagaggaaaaggcgtccctccaagaaagtctcaaaatagaagaaggcgaagaagccaacactcatgaggcctaccgaactctgaagatggactacgctaagaagttaaagaagctcgccc

SEQ ID NO: 162470 - DNA, 435 bp, Zea Mays
tatcagatcaaatgtttttgagttaatacttttttagcataaacacgacatatgttaataatttcccgcttgtcgcgtctttcgtgcatgttgcgtgtcgacgtttgcgtgtcgtcgtgccgtttgcacatgccgtcgtcgcgatttgtgtgttgttcgcgcgtgctgttcacgtgtcgtcgttcgcgcgagtcacgattcgggcgctttaaggaaattgtttattagccacgaattgttagctattcaatatataatacgccataaactcgtttctattcgcttcagtcgcgtcaactctatagcaacgtcgattttgtagtagtaatgttatctagtcatgtcgcaagtttaattgattaattaattatctatattttcggtattctatagttattcaaaaacaaccttctaattaaaactaggatgtagttt

SEQ ID NO: 162471 - DNA, 288 bp, Zea Mays
cggccgtggacagagggtgaagggagggaggggacggaggcgctgatatcgtctgaagacggcgccgtggagacccgagtggaggcaggtggatgaagacgctggttggctagcagcctaccaccttcgacttcgacgtgcagcctcacggacccgtcggtcggcgtctccggcctcaggggctactaatccatccttatcgaggggccggttgtggcccacgcgccatggacggaggagcggtgggtggggaggcggggcagcggcggtttcggagggaggagcgag

SEQ ID NO: 162472 - DNA, 1007 bp, Zea Mays
ccctagcctgcaggcggttgacctatcgtacaacaacctcaccggcaccatccccaaggtgctgttcgggctccagaacttgaccaagctgctgcttctcaacaacgagctgtccgggctcataccgccggagatcggtaattgcaccaacctgtaccggctccggctcaacggcaaccggctgtccggcacgattcccgccgagatcggcaacctcaagaacctaaacttcctcgacatgagtgagaaccacctcgtcggtcctgtgcccgcggccatttcggggtgcgccagcctcgagttcctcgacctgcactcgaatgctctgtcaggcgcattgccggacacgctgccacgcagtcttcagctcatcgacgtctccgacaaccagctcgccgggccattgagctccagcatcgggtcaatgctggagctgacgaagctgtatatgggaaacaaccggctgaccggcggcatcccgcccgagctcggttcgtgcgaaaagctccagctgctggacctcggcggcaatgcgttatccggtggcatcccgtcggagctcgggatgctaccgtcattggagatttcgcttaacctcagctgcaacctgctctcagggaagataccgtcgcagttcgccggccttgacaagctcggcagcctcgacctgtcccgcaacgagctctctgggagccttgatccactcgcggcgctgcagaacctcgtcacactcaacatctcctacaatgccttctctggcgagctcccgaacactccgttcttccaaaagctgcccctcagcgacctagccggcaaccgccatctcgtcgtcggcgacggctctgacgagtcctcccggcgcggcgccatctcgtcgctgaaggtagccatgtccgtcctcgcggcggcaagcgcgctgctcctggtgtccgcagcctatatgctcgcccgcgctcaccaccgcggcggcggtcgcatcatccacggcgagggctcgtgggaggtga

SEQ ID NO: 162473 - DNA, 632 bp, Zea Mays
gcatgcaagaccagcaaattaaataaagcaatgcaatgcgaatatagaatgcaatgcaaatatgcactgggggaacattcgtctttcacaagtgagcaggcaaggtaggcatggttccacatgagctgatccacacccaacaaaaggatttatttggccaacggttctcagctggagagctcactaggacccagcaacagaaggatttatttggccaacggttggattgttttgtaactccaagcccacaagtttagcaaccgcatcgattgatgaactggagcatcaaccatatcacccctagctagcttcaccttcttcacaacgggccggggcccggaaacaaaagttggttcttgcattgtgccaggtagggtaaacaccaaacatgtcagccactaggaccacatcaaacatcggaataagctacgggacgcagcatcgtgctcccaatgcgctcttagaaaactcagccatcgtttatcgcactaggaagatctggaacatcaaagacaagcagaacatgacaaggcccccccactacacgtcttaacacccagcatcacgccctccctttaaattcagacaccatctcctgccccagagtttagaccagagtttgttctcacacc

SEQ ID NO: 162474 - DNA, 1146 bp, Zea Mays
ctatgggcggaagtgcgcccgcgcccacgcgcctgtagattttgcacgaagggccccgcggttttgagtatccaaaactgagtccaaaacactatttaaacacttgctgacattttacaagaatcccctcgaacttctatttctttccaagtcgaggtcctcgacgacgacgaacgcggcagagctccggcgagctcgtagactggccgaatggggcaaggactagcgcccaacttcggccgaaacctaattcacgtcctaacgaatgttttccccaaactaattccaaaagtggctaactagttgactctggccatgtcgatcgtgagcagagcggatagttgggcgcgttaccggcgatcagtgggttcttggttcaattgggtgggtcggcaagcaacacggacgcatgagaatgcttaaacgagagagcaggcagcatgaactaaccagaattgtgctggccgcggtgaggtcgttttcatggtgttcttgagcagatttgggggaagtttaaaattggagctcactggtgatcgactgggagcaatactgggtggctgggtgtgtgatgaccttgcggagctcacggcgggctcaatttatagggagcgaccgcgagaacaatgaatttgagcggcagatcgtgatcggtaagaacaaggtgagtcactggtggccgctcaacgtggcttttaccgtggcggcacctccggcgatcaccggacatgcgaagcacggttagccgcgacgtggtaaagcatctggacacgcggcggatgacggtgatggttcaacggcggtgagaatcttatccgagggatcggtgagcaagggggaaggtacgacggctagccggagtggtgtccagctcaacggcggtgatgatccttctacccaagatgttatccacttgccgcgagcacgaatctagacgccggcgacacgaatcacggcggagatatcgttggcggtgagatctctgcactggcagcctgatccaattcaggttactgtaccatcgcatcccacatcagttagcctgacagagcaacttcagggcaaattctctctagatttcgcatgacaactttatcatccctctgcaccaaagttgtagagctacaaaccagctataattttgcc

SEQ ID NO: 162475 - DNA, 894 bp, Zea Mays
ccaattttcaactatggaataaagcttatttaaaattattgattgctatgttagcttaatccaaactatgcaaaccaagacctctatcggttattcctcgatattcttctaaattatagcctaagcttgtctttcacagtggtaaattattgaaaacgtctgatgcccgcccgccataacgcatgctagacagagggagcccacaaccacctgtggcaaaacacatgcgtaaacaaatcataagactgcctctagccgcctcagcatttgtgcatcctggcaagccccacctacaccctctgccctgagacaaccttgtcgtgcacgccgagctgctatattaaagtgttgggttgcagatcttgaagtgatacctcagtgcagaaagccactccggcaagacctcatgcacccgcctgagcacacaccagtcacttgtcacagtcacaactaaatgaatgccccaccatgagccaagttaccctgccaacctcgggatgttgcgactgcactgtggcaacgtcgccactcatagtacgtcggtcaagactccctccattataaattgtcgttcctccgcctataaatattgatgcccttgccgcggaacctcacagtccagccaccatatcattgtcaccccacatccgaacaacgcgtgccttactcttcaaaccagagaacaagccatcaccgtcgatttgaatcgtaggtgagcatgccataatcttcgacctctccctccatcgaagtcattcttaaactatagaagttatgcccttaccatcgattaagacaactttccccatggccatcacttgcccattgaaaatatgcaaggaaaatctcgcttaaacaattgtcatataataagcataaccaagtgtctagaag

SEQ ID NO: 162476 - DNA, 357 bp, Zea Mays
ctctctctcgatggcagtaattgagatagatggggtcgatttgatttgacctagggacagagatggagggcaggacccagattcaacgcgaagggaagaggagtgcacataccgggttggtgctcatcaggggcggacccagaatcgcggcatcacacgtgggatctgtctgcctagtgtggaggaggccgtgcgggggagagaagcctgctcgtcgcgcctcctcgagagggcgacgacggagataaccagatcttgggatttggggttggtggggagagggggacgcgacgagagggacgacgagagagaggaacaagcggacctttgaaggctcaaccgagctgaaggaaggct

SEQ ID NO: 162477 - DNA, 654 bp, Zea Mays
cccgcccacgatgtagtgcggcccgacggtaaaattgatgcgccggcgagcaattcaacggcgaggaagccgcgattgtgcgaataatccacccggaatggttcctggtcatcggacagcacacccaaaagactcgccaaggcccgagatctagcaattcctatgaagcgccggtaaggatctccagcggcggcccccaacctcaccgcccggcgagcagccatcgttgcaccaattgaccttcaagcttaacatctccatggttcccatcctgcctgcccagctaactgcataggtttcgagcgggagctggatggatgacaggggcacaaatctatctatggcgccgcacgaactgagccaggggaagggggtcacggtttatatggccgcaagcacccgaagtccgcgcaggagcagggaacgaccgccgagatcagcgcggataatctgctgcggccagcagagacgatcacggccaggaaaaacggagcccgattcgcgcgttgggttcaacggactgcaatgtgctggtagaagatcgagctgggagaggatcctgccggcggggcccacatgccagggaaaaagactgcctctgcgcgcgatgggagaccggacacggcagcggacgcgacgcgcaaacgacacaag

SEQ ID NO: 162478 - DNA, 1155 bp, Zea Mays
gtcctgacggtggatacccatgaggcgattattttcatgccttttctcatccggggactggccttgccagtttctcccttttttcgtggtcttctcgatttttactctttgaaccttacacatctgaatcccaattatgtgtttcaagttgctgtgtttgtctacctttgcgaagctttccttggaattcttccacactttgggctttggaaatacctttaccattgccggcccgggatggctggagggcaacattagcttgttagaggcgctagtttggaactttgccgaggtaggaagactggatatcttgacattcttttgaaagatagcattaagggatggcgcttcgagtggttcactctggagaatcataacaaatcgcttcccactcgattggggagacatcccgacgtctgaacgcctagctggacagaggtcccaacagatgcagagcttgctgagtccaggggttgcttgccgagatatgtgtgttgaagaacagaggcttgaccactaaagctgtcgttgttgactttgttttcaagaatatccagcctttgaaggatagagtctaccctgcttacctgtacactagtgttaatgacccctctcgaattaccaacaagtgaatatatgaggacgtgctgagttgggttgactcaatgctgagggcaaagcttcgaatgctggtgctcccccttcgtattctgcctggaatcttcccctgtggtaagcgctgttgcatatgagttcctatatttgtcatgtgtagtgtccttaatgtgttgttttgtcgccgcagaggtctttttcagagttcatatctaacccgcctgtccaagacgacagtccagggcatagagcacgaccttcttcaaaagatattgaagccctcattgctatgtaccgaggtctccctgaagaagaaaatagactcatctccagatgcaagcgattgctaatgaggctaaagtaaatgttgttcttagtatgctagctggcgagtcatttgaatctatccacactgagtcggcgagtgctgcaactgggcgtgccttcgatagggatgagggagcttgcagtcccggtggtgtccattgcaaacggacacgtcgagcagtttattcagccatgtctgctgaggggaagaga

SEQ ID NO: 162479 - DNA, 523 bp, Zea Mays
gctgaggcgaagatccggttggctgagattgctgttttaaaagacaagggtgtaaccgctgaggctatggtgatcgatttgttttcaagaatagtcagcctctaaaggacagggttcatcctgcatatgtgtatatcagggtcagagatccttcccgggtgatagacaaacaaattttagaggaaaacatcttgaatcgggtcgagatgatgctaaggggtgccattgtgaatgttggtgctcctcgttcttattctgcccggaatcttcctccactagtaagttctgaacatttgatttcgcattcgatgcttgccgaattattgtatgcctcgtgttgttgcattgttgcagagtccttttcttgagtatgtgtctaaccctcccatccatgaagagggttgcagttctagccataaagtgtgaccttcttccgacgagatagaggccacaattgctgtgtaccgagattttcctgaagaggataagcagactcacatcatgatacgaccgcctactagtg

SEQ ID NO: 162480 - DNA, 462 bp, Zea Mays
gaactcttagtcgatagtagaaattgttttggcttatatagagaggtggtgacatgccaaagtagtcatcgcttcctctatatcttgagttgggtcaatacgcgttatgtgttcatgaattgggaagtaagcgcatgatggtttcgagttagagattagtggtttacgggtcgtatgatttggtcgatgtgtaaaaatacatgtgaatatgtatgtttataaaaatgttgtggtatatgttgtgtctcagatttcgataataataggctagccgacgagtatgttgtatagcggcccaggttgttgctcaggttaatcaacttgttagatggctttagttaagttcgtggtcacgatgaattgcatgctgtagtctaaatgcgtatgtttatgatcgcggatgaaaagtattagtgctcatgtgatgtctaagttgaaatgcaaattattgggtgaaaagcg

SEQ ID NO: 162481 - DNA, 794 bp, Zea Mays
gatagcttcatctcggaggtgatctgtagtgaacttttctcaggacagttacgaaagtaatgaccttcacgtccacattgatagcaagcctttcttgaagttatttcttgactttttccatgtttccctttttgtttcttggacctgatgcgaacacgaggctgaaactgtgtgcaagtaatagtccatccatcaatgtaacactcctgtgtttcttcttggggctgggcatccttgtgatgtttcctttttggaatacctgacaattcatcgtctgacagtgcatatgctattagttgttcttggggagaccattgtcttttaataccagaaaacaaaattcggttcttctgttttgtagtttcactttcgtttgtactgatctggcggcaaggaattccatagtactcacaacaacaacatgttccaaggtcacttgtctgttggtttggttgttcatccttttgtgtcttgaaggtctgttcatcagctgtttcatttatagtgttgttttgacttgtcaacacaccacattctttgcatttagtgacatcacttgtcgttgacattccaaggtctgacatctgtatgggtatggaagaatggaagggacaaaagggttgagcaaagatagattgtagagagcagagaaaacccatctatctaaggttttacctagctaactgatgccattatggacaaaagtcacacaatacaccaacaatcatttcaaagaagcaagaactcaagcataccagcacaacacaatccaattctactcattcaaccaaaac

SEQ ID NO: 162482 - DNA, 924 bp, Zea Mays
aaaaaaattgtttaagtgttttcaggaatttcagagatcctttgtgaatttctctaggccacaatacaactctatttcaagtgaaattttgtgtgcttccatactttgtgtttttggatcagtggtaaaaaattcagaatatttcgagctcttttgatggtactccttttgaaacgcgcctttgatttctactagtgctgaaaatctgccctatttatagaactgtcattcccactagatacttgtacctcctttcttgtgctttggtccatctattctattacattttctaggccagcaactaggacgagtacttggaacacttattcagcattgctatctgttactgacttgtgtgccacatatatatatttagtcagccttcccatagctccaattttctctcgagcagaacaggtactcctttgcaatcacacccatgctcgttggacagtcacaccggtcaccgtttgccacctgcagtactggtaagaacgttgtaagagcggggtaagacacttcataatttgtattccaccacctccaccaccacccctgagagatagttgtagggttcacattatttgttgcctttttgtctctgttttgtgctaacaatgacaggaccaaagaatcaaatggacaaggacaaggggcctaaacttaacgacgatgagtgtgtctctcaaatggaattgaaggagatgatgcacgcgatgactgaagcttttaaaaaatactaggactctgcctcaatatcccatgagcagcttgatcgatgagttgctaaacttgttacacgcatgaacgtactggaggctcgtcccccaccaccaactccagccccagctcactctcctatggacgacgacgacgatgacgacgatgtttatgcatcgctgcgacaacgcctcacacgtaatc

SEQ ID NO: 162483 - DNA, 391 bp, Zea Mays
gttcaaacgcctgttggccgacctaaacgtgcatatcttgccaaggatcctatgtagcgtctcttcaccgtgccaaggtcttcctgtcatgtgtgagtcccgagtgaagatatggcctgggtgagaagatattgtgccgtgaagatagctctatcaacaatgtccaaaccgagacaaaacctatgtcaaatcatgtcaaactattttggtttgatttcaaacttctccaaagtgttcctagggtattttggcgccactttgatattcggactttatggattcgagctttggaagacagggaacacatctgaactttgggaaagggttctgaaattcagatttctgaatttccaaattttcccatagggccttagttcatgggctgatttgg

SEQ ID NO: 162484 - DNA, 645 bp, Zea Mays
gttcgccgagccctatttatcgagtacgacactcgacaaagactttgacgaatatgttttgctgggtttgcccacccgattccggtagtgtagggcagggcgcaagttagcaattcatcgactgaacctagaacgcatctgcatcatgcactgaaaataaaaatctgaactgaaacccaaactaattagtgacagatagtaatacatatttttctgatgcaagcataatttatctatcatggtcctgatactacactaccggccgtccggccggtattttcatcaaccaacacatggcattcccagagagaattatatgagaagctagcgaaggcagcaactacagtggaggagattagataatggaactccaatagagatggaaggccacaaggggataagcgtatcaacaattcgacggggaaggagaaacgggccacacgtgttgggttgaggcggcggcgacagcttgggggttggggcggcggctagtagcctggtagtgactgaactactccagcggcaaacggccaacggcgatcttccttcgtcctccacctctgtgaacatgtacggctacgcccctcctccaatggttccagccccaggccacgctgcatgggcccctctcctacggagtatttt

SEQ ID NO: 162485 - DNA, 716 bp, Zea Mays
agctaaaacaatataaaggatgagcgtgttcatatgaaaaatctactacccctagttttccctcgcatgaacctaatacggagccacccgcatctaacacattggctacaaatgggtcatcttggacccaggcattgtatggtatgccgatgaatatgttcatagcatcaccgcagcagcagccgcctggcatgcaatcagctttgaacataattagaccatctggctacctcacggatcgtctgacatcctttatcgaaccgtccgaccctacacaagccacgcgcagaccacccaggaagtgccatatatggccgaactatctgggtataaccccgtaccgctcggcctagtcgcggaccgtccgacctcttactctggaccgtccgggtatgcatacgcaaaacacggagtgcacaatatgcataacctttgcacccatcatagtagcactatgcaaccctaccggcagtatattataaccatgtcatgccacctcatatagcacaggatcgaatattcttcggccacctgatagcttgagagatatggggcaggagggggtagcactaataggacacctaacacgcattttggacatccctgggaagaaagccgacacaataatgcatagtaacctgaggttttcatccctaaacttaatggatggtcactagatgtggtggaaaaactagggacaaagtagctaggttgtt

SEQ ID NO: 162486 - DNA, 552 bp, Zea Mays
gtccttactgcgtcattttgtccctgcagaggtctttttcagagttcgtatccaacccgcctgttcaagacggcagtccaggccatagagcgtgaccttcttcagaagatattgaagccctcattgctacgtaccggggtctccctgaagaggaaaaacagactcatctccggatgcaagtgattgccaatgaggctgaagtaaatgttgttcttaatatgctggctagcgagtcatctgaatctgctcacactgagtcaacgagtgctgcagctgggtgtgccttcagcggggatgagggagcttgtagccctgacggtgttcgttgcaaacggacatgccgagcgggttatccagttgtgtctgccgatgggaagaaaagaaaaataaaacttcggcgctcatccggcttggagctgggggctgactctgccgcttcggacctcgatggtgacccgtcaggtaccgatctcgaagatgatattgagagttgtggtggcactagagccggtggacatgtatctgaggaacaggaagaagataatgaagaag

SEQ ID NO: 162487 - DNA, 391 bp, Zea Mays
gggagcggtgctcatcgtcacaaaatccttggtgtgattacaattggtatcagagcccacattgtcgctgctgcctgggagagctttgggcctcttagggggtgggatgtgagagaccggtatgcacgacctgggttagtacaacatcgccaagccaagggggtcatgatgcccttataagggcgggcctccctcctctctcagcctaggttttgagagcgaggtgcccgtttgaataggctatcacgagcgcatgaacgcccgacgctggcgatggtgggctttgggcggactagcccaggggtgcgttacacttggtatcgaagcgttaccaccctaactccacctccggtcaaaggtacttccaaaatctcaccaccggatgcttttc

SEQ ID NO: 162488 - DNA, 1117 bp, Zea Mays
gcgtcggtggctcaaattgattaaagattatgatctgtccattcattatcacccggggaaggcaaatgtggtggttgatgccactagcaggtccggggttccaaaggtggccttgcctttgatcgcagatctggaccgtatggggattgctttgtgctatgtcggcaccgctagtgaggagactcggatgctcatttaatcatcccttctggagagagtgcgcgtggctcagcagcaggatcttttattgcaggaagctcgaaagagggtgagcgatggtaaaccccgtgagttcaccattgatgagaatgatttggtttgtttcaggggccgtctttgtgtgcctcagaaatcagaggtgaagatggatatcttgagagaagctcataaaacgccttacaccgttcaccctggcgaaaccaaaatgtatcgagatttgaagcaaaacttctggtggaagagtatgaaggttgacgtttctaagtatgtggccgcctgtgaggtatgtcagcgcgtgaaggccgagcataagaggcctacaagtttattgaagccattgtaaattccagagtggaaatgggagcatatcaccatggattttgtggtgggcttacctcgttctcctcgaggcagggatgctatatgggtggtagtggatcgcatgactaagtctgcgcactttattcccatgaagaccacaaattcaacttcagagttggttcccttgtatatgaagaaagtaatcaggcttcatggggtgcctaagtccattgtttctgatcgaggctccaactttgtatccaaattctgggagaggcttcacagtgcattgggtaccaagctctcacttagtgacgcttttcaccctcagactgatggtcagtcggggcgaactatccaaaccttggaagatatgttgcatgcttgtgttctgtcttggaagggtagctgggaggatcatctcacgttggccgagtttgcttataacaacagctaccagactagcatcaagatgacaccatatgaggccttatatggtaggcggtgtatctcccctctgtgctgggagactatgggagagagatctctggttagtcctgattgggttcagcagaca

SEQ ID NO: 162489 - DNA, 430 bp, Zea Mays
tccgcgcagaagtcgcctaagggtgcagccggactagcacaacaagtgcgaaaaaaccaaagtctaccgcgaagactatccgcgtagaagtcgcctaagggtgcagccggactagcacaacaagtgcgaaaaaaccgaagtctaccgcgaagactatccgcgcagaagtcgcctaagggtgcagccggaccagcacaacaagtgcaaagaaaccgaagtctaccgcgtagattatccgtgcagaagccgcctaagggtgcagccggactagcacaacaaaagcaaaaacgacaaaatgtccgcgccaagaccgactatatgcgcaccagcacagcataacaaaacacaccagaccaagtacacaacgccttcgcaggcatagccaagtgtgcgggggcacacaacctcatcatacaagcctttacacata

SEQ ID NO: 162490 - DNA, 352 bp, Zea Mays
gcctccgctcaccatgcacctactctcccactcacactgcatgcaagcatacaactatgcaagctacgggtgtccccctcatccactcatgctgcatgcaactagcctcccaagctaggccctgtggctccttccgctcacgctgcatgcgttcttattgaggcaattttttgcatgtgttcttaattaaaataaaaatttgaagaagctaagtgtagcccagttggtcgacagtatgcatgtacgcccacatccgatccctcaagtccaagtcattgtcgaggcaaatttttgtatgtgttcttaattaaaaacccttaattagaaacccttctatgttggtcatgttttt

SEQ ID NO: 162491 - DNA, 1038 bp, Zea Mays
tgtttctcaaatttaaatcggtaagggagccgaacaagttcgtactttttacccccttctttttcttaggcattccccagccactagaggtcagaaatattctatttgccaagtactcttgcactaaatctctagtgatgatttcagctgctaccactctgaactctaattcggctacctagcatggggagccaagctgcatgtggcacaagggccttgtcatcccgaagctcaatctcaatggactcattaccatagtcattagcttctctcttctcttctcgtctgcctttatgtaaaaccactcgcttgtccaaccggtcggccacttggtacggtagccgagaaccagggccttcgtatccttacgatacgcaaagttgtaacagctaaagttcttatgaagaccatctgctctggccatcgtttgatagtgtagctcgtgcacccggcagaaagcttcggcattgggactcataccctggcttcggagagcccatatgtagacactaagtctaacgattgcattgggtgtcagctgatgaaagcatatctcaaaattttttaaaacttctccaatcatctcatgcaggggaagcgaagtctgccctgaagaagcttttaaagactacgatttcatcatcttttggctctggaatcacttcttccccgacaaaccggacaagcttgctctcggcctccccaaagtagcccaatttcttcatcataaccatgtcatttgccgtcacattagatttaccaaattcaatatgactgggtttcattggacttagaatagtgttgtcctcttcatcttcgttctcacttcctccttcggctacgatctgttcagcttcagcaacagaagtaccttcggcaacagccccctctggcacaacaagacccgatcgcctcatcacttctgatattggcattatttcggtcacttcggcctcgtcaccctcatgagacaccctagtagtggatcatactctggccatttcaatgtttacgattctttaagacaaagctaatttc

SEQ ID NO: 162492 - DNA, 303 bp, Zea Mays
ttaaaccataccgacgcatcttatcaaaagctttgcgcaaatcagctaaatgagaactaaactcagtcgattttactacaatatcatcaatgtagacttccacagtgtttcccaacagctcatgaaagatcaaattcatagccctctgataagtagcaccggtatttttcagaccaaatgtcatgacaacccactcaaataaaccaatgaagcctggacatataaaggtcgttttagacgcatcttcttcggccatgaaaatctgattatatccggcattaccatcaagaaagctaataattc

SEQ ID NO: 162493 - DNA, 837 bp, Zea Mays
gcaaatatcaaaaattgcacacattatttacaaaagttggcatcacgcatcaagtttcctgcccacacactcatcagcagaatggctccgctgaaaggaaacataggcatatagtggaggttggtcttgctctattagctcatgcatccttaccactaaaatactgggaagatgcctttttgactgctacttatttgattaatcgtactcctagccgagttattcagttccatactcccttagaacgtctccttcatatcaaacctgattattcttctctgcgcatatttgggtgtgcatgttagcctaatcttcgcccatataactcacacaaatttcagtttcgatcaacccagtgcgtcttcttaggatacagctccatacataaaggatttaagtgccttgacccatcaacgggcagggtgtatgtctctatagacgttgtgtttgacgaagctgttttaccctttgaaaagatgcacaaaaatgcatggtgcagactcctagaagaaataaatctccttcctcagactttgctaaattctaatttcttgaatattgggggtaattataatgatgactatgtgacgaattctcctacttttattaatgagactggcccagaaactagcagcttgcaggaacaagaaataacagatcaagacacacatcaacatacgacattcgaagctagttccggtatggcaccaactgaaacactgttgcagtctaaggcagttactgctgaccaagtctctttgcacgaaccaagtagcaacacacacccagaatgtgaggatattgcaatcctgtctgataaagtgttgcccgagcagt

SEQ ID NO: 162494 - DNA, 597 bp, Zea Mays
caataagtacgtaaaggtcgaagtctttcaccaaagactccgtgcagaagtcgcctacgggtgcggccggatcaacgaaggcgcgaagccttgtcatacaaattttggttacatacacacagccagggcatcatatattacattggctcaacatcatcctcaattcctcaccctcaaaaagatttcgcagctctccttcacctacactcaccccaatcggcaaggacaacaattctcgtttaccagtcctgtccacgcgatgacgaccactctccatctcgctacgatgacgtctaccactttgcgacaatccactcactctccgtttcgccaccgcccttcgccgcctatacccagtactcgcacccgggagcccctcggaaccctccacgcgtggcaaaggcttcgctgcagccacatctaacgctgcaaaataatccaagtcctcatctgaagactcctccgtccatgcaatcgaactcccagaatcattagactcaaaacacttagacacagagccaaacgaatcatcatcggcagccacggtcgaagccaccacaaaaatagcattgtcagtagcggttgcgtgcgcaggcc

SEQ ID NO: 162495 - DNA, 802 bp, Zea Mays
ggtgtcgtcatcgttgtccttgcacaccgacgacgacgaggcaatggtcatagcggctgcgactacaggcaagggctcacgctgggcaccactgcgcagttacttgaggaagctaaaggattacatgacggcataaggcataacgcacacacgcacgcggagcatagagctttgctaggagtgggagctaccctcactcacttcttgccggtcaaatcttgctgcctcgcttaccctacttgactcccagtaaaaaagactctcttttgggagagacttttcaggactaggaggaggagccaaagtacagggggcgaggatcccaacaggacagtggagtgaggaccaactatggatggaggaggatgacagtgccccaaggtgctggtgttggtgatgttgtagttgcagcatcaatgccagatatagatgagatgatcagcactgcagtagaggcattcgagttcgatgggggcagactggcagagaggggtccgtcaggacgtcacccgtgccgctgcctccagcagttagttcatcgatctcttcatgagtgcttccattaaaaccattatatccaacattaaagattgagcattctgtatctgaccaatttccctaggtagtgagtagtgaccccgccaatgcatttgaaagagagatcaattgtaattaggtttgccattgcagttattctagggaatattgagccgcagatattattctggcttgcatcaaggtacaaggaattattgacccgttaagtgcatttatgtgaaggtccaggaactccatattctgc

SEQ ID NO: 162496 - DNA, 759 bp, Zea Mays
gctgatcggatgcttagtgggggtcagtcattctatattcctcctcttcggatgcacatcaagaggtggtcccgttaattcatggtttccagtggagggactctacatcattggctggatattgagctccgcggccttctgtttcatctttggggtttgcatacgactgagcaacttctcgtcggacattgccttgttcatgagctgcaccttgattctattggcagttctgatatgtctacgttcaaactgagtgtttggtgtgataatcctggtgatctgccttcgttattggatctccacatggaggagcctccagttcagatggccgccgtcgccagacagtcggaatgaagaaagtgaccaggattctaggagtcagcagaagcatcgtttcaattcccagtcttcatcagaccgtgcacctgttcacactcacatggggccgcacgtccatttaagctcagcgactggcagaccagttaatgacccagttctcctagctgatgcggttaatgctctggtggcgcgtgcaaactcctcggtttctttcttaatggcagtggatgcctcatttccgacactggtaggaccagttgatgcgccagctctccctgatgctttggttgtagagctagcggcgcctgggtctacctcgtttcctgcagtggtggggccaactgctgtgccaactctcctggatgcttcgggtgcagagccggccaagcctggccctgttctcttctctgatgatgccgc

SEQ ID NO: 162497 - DNA, 1416 bp, Zea Mays
tatacatgatgtcttatgcagtggatatctaccaccagaatatatagacaggaaagtaatctcaaataagcttgacatattcagtctgggtgtcatcatcataaagattataagtggacctacaggttacacccagtgtgctgaaatgccttccaaacaatttgttgagcttgtaagaaaacttgctacaaatggtgatcaattgtattttttgtggaaatagcacttactttttttaatatatactcaattttctatgttccgaatccaaaccatcaggtacatgaaaaatggaggaataagttacaaacaacaatggatgcagctgcattggagacatattgtgaacaagtagtgagatgcattgaaatggctttaagttgtgtggagaccgatcggcacaaaaggccgagtataggggctattattgatgagctaaataagatggagacaaataccgaccaggtatagtcactgatgacactttcatttctgattatttaatgtttatcttactgttaaaatctagccatgacataatacgaaggaagttatatcagccaataaatcttcataatcacatcatcaacaacctacatgtttggtacagagctactaatgcatgagatggacggttcaaaccacaacggctccttttttattgtggaactccacgttttggacaagaagtgattaatgttttctattgaagtagtaatatttgttagtaagacaactcatttcacatgtcttttcactgctctgaataaatgaaagaggaaagtctgttttgcacagtgaatttaggcatttacaaagcgtacacaatatttcaattttaccaccatgttacaccacatttaaaattgtaactccaacgttttgattttcccattaaacattttagctttattacatagagaaacaacaaaactgccaaaacattattgcctgaattaaattaatgttttcctaggttctgatatccacgtttaaaataccatctccaggtattttcagtggatatatgctcgactccagcacaaacacaaccaccaccccttcctgattctagccacagcacagaagaaacaagcaacacaaagggagttagcagactgggaccgagagagtacgtacagagcacaatgcgggacctggtaattgggataaccaagtcggtggtggagggggtgatcagcaaggcccagtcggtgatggaggaagaaaatatgctacttattagcatgcagcatgacctccacttcatcaccgatgagtttcagatgatctattcattccttagcatcactgatgaggagcgtatcaacaacgcggtagtgaggatctgggtgatgcagacgcgtggtctggcctatgacctggaagactacatggatgccttctcctgcctgg

SEQ ID NO: 162498 - DNA, 407 bp, Zea Mays
ccgaagtctgttgtaagatggcgaaaatgctgccctctctcgaagtggtcccgcgggggtttttgaaatgtgacggttgatgagatgttttactaggggactgttgagttcctgaggtgctgtccctggcctataaaaagctgggtgcgggctggaactattcacccatttgagcgcgcactgaagaaaccctagctatttcctctgcttgcttgccctcttctgctctcactctgccggagatctagcccacatcaagcagactgcccgccgccgccgacggtacgtgactgtgtcattttcttcctcatcgtcgtctgtcgtaaccgcgtcgtcgtctgagaacaagattagtgattcggcggcggtggtggacctgcagcctaggcatatagtcgaatttgggg

SEQ ID NO: 162499 - DNA, 736 bp, Zea Mays
ggagtatctccatgaatctcttgttcgtcagaggagtcagattcaacaacagaaggattcctccgacgcaccatccttaaaaagagaagatagaacctatgatgagcaaggatcttaacaaacacgtagagacgcatatgatattgagcatgcacttcaaccgttcatgcgagcggttcaactacaacgaacaatatcaaaccgctaaactctaacaatgttcatgacaaatgaagataatctaagtgttgcaaacacctaaactaaaatgtacccaacaaatgatacactagataatcaagaacgggtgagatcgagtaaaaagaaatgaaatagggcaatacctcaatccgaagtttgaatcacagaaatcccaacaagatcgagggagatgatggagaaagccaagatgaacggatctccaacaaaacttccaaagattggatggcacaagtgggttttggagtggtgaaagtgtgaaggagagagagaggaaaatgtgtaggcggtgttggctgggaaaaaagaactgagaagaagagaagggaggaaggggagagaaataggggaggcgtcggctggtcaacagactgaaaaccggttcaaccgattataaaaccggttcaaccggtttccggcagactgcgcagtaaaagcgtgcagaaaaagggattgactgcacggattttctggcaaactgacagcgcagtctgcgagactgacggcgcagactgcg

SEQ ID NO: 162500 - DNA, 647 bp, Zea Mays
agagaaacagttctttgggccagaaattttccaagaagctgaaagacaagttcaaatgattagggagaatctgagaatcgcacaatctagacagaatagttactctaacacccgaaggaggtagttagaacttgagtagggtgatcacgtgtatgtaaaagtgtcaccaatcaggggtatgagaaggttcaaggttaaaggaaacttgttacctcgctttattataccctttaagatcttatagcgagttgggcaattggcctaccaactagagttacctagccatctgtatgatgtgcatgatgtgtttcatgtatcctagttgaagaagtgtcttagagtcctagaactaccaatggaagaactcagtgtgcagggtgatctaaattatacatagtaccttaccaagatcatcaataccctgacttgagttaccatgaacgaattgatcaagacgtgcaaggtgcagtggagccaccatgcaaaagatgaagttacatgggaacaagaacatgagttgcaagctgaattcgcccacattttctctagctcgtcttaatctcgaggtcaagattctttttagggcgtagaatttgtaatacccaaaaaattggagaaataaaatagtccttgtgacatattattat

SEQ ID NO: 162501 - DNA, 306 bp, Zea Mays
ttttcggatttccggaaaagtacgggttcgggacgggttacgggttggccgtcgacgggagcgggacggaaacgggaaatgctattttccgttcggattgtcgggatcccgtattcggtcgggatatttccatatttattccggatttaacccgaagcggagtcacaagtaaaggcctaaatctaccaagcccaacccaacatcccaacagcccaacaggatacagcctacaggcttgggctccacgcgacgcgaccacgctactcctgcacggctgcactcggtcagacgatgcaaattgctaaa

SEQ ID NO: 162502 - DNA, 458 bp, Zea Mays
atccctggttgggtgtgctgagtcttcgccatgtaaaagaaaatagaatcttcgctgttgtgggcctcgacctctgcccctgcctctggttgcattattgtcgtggccttgatgtagtgggtaatcatgacgacgagcggtgccccagtctactacaggtttgcaatgttgtgcacctgggactgggtgcggttttgccggcctgagtctggatgcaaagccctgacccatgtcctactagactggtggagtgtccttgcgctttcgcagtgactcgattttcctttggtggagctcttctaaccggccgtaattttcgaagagctgatataactcttgcaagtttttgggtgggtctcttacgcagtggctatatagaacacatgcacgaaggtcgttgattgcgtagtgaatagctatgtggtcatcaaccgaaggcagctacgactttaacagga

SEQ ID NO: 162503 - DNA, 815 bp, Zea Mays
tgcaaaaaaatctcctcaagttgcttggaaatcagtttgcaggccaaaaacccaggggggtcttggagtcatcaaccttgagtggcagaataaagcgctccttatgaaacgccttcataaattctttaatcgagtcaacatcccatgggttaacattatcagggacactcattacagcaactctctgccttcaactaaaccagttggctcgttttggtggaaagatattctcaaaatccaagattccttcaagaaaattgcccaagtggaaattggaaatggtaaatctacgctcctttggcacgatcgttggaatgggcagcgtttatctgaaaagttcccggagctttggtcttttgcctctatcaaagagattagcattcgtcaagctcggttggcgtccccgaatgaaatgttccatatccccctctctgctgaagctttcgagcaacttctctcacttcaggacgtccttggtaatatacagttgcttgatcgcaatgattgttggcgatgtaatgcctcttccaatcggttttcttctcagaaggtctatgctcacttgactggcacctgtcaaacgctccctctcttcgtttggttatggaaatctaaatgtcaacctaagcacaaagttttcttctggttattgctcaaaaatagactgaatactcgctcccttctcaggcgtcgctcaatgcctttagactcattcacctgcgacaactgtattctccagattgaagaaaggcctattcatcttttcttcaggtgcaactttgctaagagatgttggcttcttttgggtttcctcc

SEQ ID NO: 162504 - DNA, 863 bp, Zea Mays
cagaaatcttctctacaattagagtagagagtgttgaagccggtcttaatagatcatccgtatatttctaccttcgtattgaattctctgcaatggtacgtgtcttgaaccttttaatgagtgccgatgttgctagagtatctttttgggaagaaaggatagcaggctttttcaactcaaccttaaatgccgctacgtttcgaaggaaagcgtgatccataataaagattgtagaccagcatgctaccatccatactccgagccctgttttgcaaaactgaggagaaaaaacaatagggcattcgagtttgtagtaccattaccatcctttgacccttagactatctctagcagatatcttatatcaaactttattctacaaataatattaaacattgtaatctacggttctgtgtacctattttacattattcgttggagtagactgtcttcggtggatcctataaaataagaaatgcgacactgtaaaatttaaaatataagataagataaatgatatgtaaggagagctgttgaagataaacttagtttatatttggaagcacatagtttttaataaaccggtttatataaattgaggtagtttcaaacattatgtctatatcatcgaggagagataagtttaccctccacctactgtatccaacatgggatgtatccctattcctgattgcacgaaggcagatatcaacatctaatctatcatcgacttgatttaccgagaggattaggcacaagacacagcacaaagcacctatcaaaatccgttgcttttccaccacccactctcgcatctccgctctctccttctccacaagaaacaattccatcacacaaagttt

SEQ ID NO: 162505 - DNA, 834 bp, Zea Mays
ctcgttcaattaaaattttagggctacagtgacctgtgccttcatccgtgtcttcactatgtatgaaatagaatgtgccaaacctgtcaataggattagagcaaagttacacatggattcagatttatagtatatagaagttcagatttacctactataagacttctaacctctgaaggctttgtgaattttatgatggatggtcagtagcagaaacttacagagaattctcattttgatggaacaacgtcacatgtctcattagaaaggggtgaaggctgatttggaacatgcagaaccaagtataaaaagttcttgtgcactagatcaaacattgtttaatagaaggaaacatgacacatttattaagaaacggagcctaaatacaccccattgtaccatcatgtgtcctaactatgtctttctcttaaaataccgtgcaatggtgtgtaggttgtacatgcccttaaactattgtggttgtagcatttccagccgattggttgatgctcttaaagtgaaatagtgtctagactggcacagatactactaggtgctagtgtcatataatgacgaccctacacaattaggtattatagtgtcatgcctaatggaaaggcactagtgctagcataacacgattactaatagtaccaatttcgtgtcgtgtggcccatttagccatctatacatgagactctttgggtgtgtttgatttgggttttggttttgacttttgacccctaagagccaaaagacaaaccaaaaggaagcatatttttgtaaaacttggttttctcgtagtgtaaaattgaaagcacctctagacctgct

SEQ ID NO: 162506 - DNA, 548 bp, Zea Mays
tctcctttgaatatatgtgcatcttcatttatcatcacatgtgactggtcatgtttaaaaatgagtaaaacttcactacgacacaaataaaccattgcatcattttggatttttgtttatgcattaaaagcaataataaaatgaataaaatgtaatgataatgtgatgaggatttagaataaaccctaaatcgagaattgatttttaaatagaaaagaaggaacaaatattatgagacaccaaaataaatccataaataaataaattgaccccacattgatatattcaaattgaatgattaatttggatacaaaattcaaggtcatacttgagattcaaattgggaattgaaaataggagaagaagaaaattagagaaaagataaaggaattttaacctaaatgggccgcagccacctattttggcccactatacctttctcacccgcgcggcctggctctggtgatggcgccgacatgtggggccagtaggtcagtcgcacgcgggcacgcctggctgtctccttccctctgccgtgcggggtccac

SEQ ID NO: 162507 - DNA, 520 bp, Zea Mays
ggaagaagaagaaaaagaggaggcttcggcgagtgtcatgcttgaatcaggatgccggaccttctgctcctactgccgaggaagtgccagtggagatttttactggagttgatcccaatgggtgtcacccgactgatgttgagcccaatgggtgtgactttgataatgttgatcccaatgggtgcaatccggccagagctgatcccaatgggtgtgatgttcgtattattgacaaggatgaagaagaggaggaggaaatccccttaattcggaaaaacaatcggtgttatatagtcagtggggagagtagtgatattccttctccagctttgtctgctcttgttggtctgcaagaattgtctctagcaaattttgatcaggctctcgaggatgtggtccctgaagatctgctgtccgagccgacagatgatggtatgatgggcgcttgcactgatatgcctgatgtcgggttagagttatcccgagctacgtctcgtgcctcatctaccttggagcgcgg

SEQ ID NO: 162508 - DNA, 273 bp, Zea Mays
ctcgtgcctgcctgccactggcctaatttctccagatttggtgggtggtttgcactccactgattggtgatcggtctcgttttgcgctgtttgatctttgttttggttgccaaatggggaggtatagcagcttcttttgatctgccttttgggccttcttctcaaaccccgttcccattttgggttcatcgtttgccttttcgaatcatatattgcttagtaaggatcaaaactttagtgattcaaatatcgatcaatgttcttgcctgtcgc

SEQ ID NO: 162509 - DNA, 345 bp, Zea Mays
caccgatgagttcgagcaggcggatccggagtcctattccgaggagtacgagctctcattcggcatcagccactcgatcagcaccgaggacggaattcttactaccatatcaatctcgacatccacaatcctccacacatcactggtacatacacttccaggtgcttcagttccaagccttgccgtgctgagcttgatgtctctggtgcatgccagcttaggtgcacatcaggtgtttgaggaattgtcatcctgcaccgacaacgtcttcaccaatagcatcggcttcacacccgcgctcatggcttatggtattgatattcgtgtaatccatgctgtcaagtc

SEQ ID NO: 162510 - DNA, 598 bp, Zea Mays
aaggcacgggcgaacgcggccgaggggaggctctgacaatcgctcggggcgtgcgcgggcgagcgctagtgtgcgctctggcgtctggcacaacgtcgagcacgaggcagcgccgagagaggtcgtgttcaagcgcggattggctccaaatctttgagattatggccatgatcccgttgagagatctcttcccctgacattcctttgttgtttgtgtgtagaggcttgcaggtttcgctgactggatcaagagatatggaggggtgaagttgggtttgtctcactgccgagcactgggagaagatcccgggtttgacgtgtccagggcacgcgtcccaatgccatcttctggtatgaggtagaggggttagttagacacatttttgtcaatgggagcttagagttttgagatagagatcaaggtgaacgcgctcggttttggttcaaaggctgaaaattcagaaatctgaatttcagatttccccattgaacctccactagaatggcttgcttggagtttttaacaaactattttggccaaacttttataatctttattgtagcttagttagtgtatttcaagttttataattggctt

SEQ ID NO: 162511 - DNA, 564 bp, Zea Mays
gaaacaagaaaaaaactctacacatgcatctaacacatctagacaataatagacagtgatataagaattggacttcatatgaacaggctagtcactcaccaataacaactttagactgctccagttctgcaattctccttccaggcttctctaatcctcggtcttgcattgttgctttcagcaggaaagtctgtgcagaactaagaatcttgtctctggctgatgttgtatctttctctttagcagcacatggagaagatcttagcgcatccatctttatattagccttagcaggagatgttttcagcctcttctgtttcaatgcaacaataggcttatcaagatcaatgtcatcttctgttttaacctgattcttaatgccacatccttccaatgtgatttttgaaatcttccgattcttagctttacactgagtcctgagatccttgagtaatacatcatgacaattgtgttcactatccttgtcactgacagaaccaacacttagttcagaatcaattacttcagttttgatcctcttaaaagaagaaggatccctgtcag

SEQ ID NO: 162512 - DNA, 543 bp, Zea Mays
gtagggcctgctcttgctcgaactaggataaatcttgtgtcttcttgcatcactcatctggacaggggcacgcagcacgaattcacttgttggttaggaccccagttcccaaaacactgacagttggcgtgccaggtaggggggcgctgcctattgatagcacattcccattaaggatccggatggctaatcctgaacaccctttgcaactcgacatggtgatctggtttgggagtcttaagttcatgtccctctgctttgattatgacatggtgctcctcccacctaaacatcgcaccaacaccgactaccgtctctcccagccagggggagcacgaccacacttgctcccctgtccagacaaggggcacccagacctttgtcgctgtccttcttgccggaggacacgaaacaaccgcaaccacatcgcgggtagcactccctgcctagctgatgctttcggactggctgacgatgcagactccctagcgagggacctatctagcgttagcctcatgcctagaatgatgacgccaacacatg

SEQ ID NO: 162513 - DNA, 661 bp, Zea Mays
ctggaggtgggtgtagcccccgagctttgagtggattactgaaaataatctactcaaaggtcttcatctaatgctttatagaaatctttaacttatcatcgtctcatgccttagaactcaacattatatcatcagcttatgcttttagagatcaacctgttgtcttcaattcctgctttagaaatcagcagcgcgatctacccatgtcctgttaggtttgaaatttatttgatcggcgacagattggacgtctggtagatggctcttggctggtcttcatttcgcttcgtgcttcaaagcttatgttgattagacttgtacttcagtagctatatttggctttcctccgatctccatcgatatctttcttctatcttgatacattcattgcatatactgtatggatgtgactgcttggcaaaatctattgaaaattcctggatgtcccctccccaatgggtgtaaccaagggacggcttggtacactgagcatttagcaaactgcccttgagtagtaacttgacgtgacctcagggtgtaatcatatcgtccaagcagttgaccttagtccaaagggtgtcgtgttacatgaaagaacttccctcctctatatattgaggaaaattccagcttgttccgagcatcctttcgcttttccgtc

SEQ ID NO: 162514 - DNA, 271 bp, Zea Mays
gtagttgacttgcgagttagacaggtagactactcggggtcggggcagccaaggccaggtgggtcccccgaactcactcacggtcacggcaaccgccgccgcgacgccatcaacggcatcatcccatttccacttggatcccaacttcccaagccacctctgcttctcctccgtctcgtcgtcggccatgacacccgccggtggcgccaaccactccccggcgccgcgtagcctggtattcgccttctacctcaccggccatggcttcggc

SEQ ID NO: 162515 - DNA, 408 bp, Zea Mays
agaaagtcttcgacaagaatgaaaagtttgcaggaaagtggatcagagagttgccgtatgtggtttggagcctaagaactcaacctagtcgagctttgcatggaaacactcccttcttcaaggtctatggtttggaggcagtgctacctgctgatctcaggtttggggcaccaaggctgatttttgaaaacatagccgaggcagaagctactagactagaggatattgatatactggaggaagaacgattgaatacagtaatccagtcagctagataccagcaaaccttgaggcgctatcatgataaggccatacgacatcgatgctttgcagtgggagacttggtccttcgccgaattctaacgggggaaggacggcacaaactatcgccactatgggaagggccat

SEQ ID NO: 162516 - DNA, 357 bp, Zea Mays
ttgtggtgtttgaaatagatgttgaaacttgtgcaacagctctgttatggcttccggtaactcctcctgactttcttcctgcagagattgtaacttcagtaattgttccactccttcctgtcttgccaacgcctctagttgtgacatggacagggcgctgcactgctgtaacttgggtgaaaccccttgcagatgtacccttgctccctggtgttcaaattccatccacttttcagcccagtggactgccattggactatgctcctctagccagtccatgcctaggatcagatcgtacccacccagcggcaacaccttgaagtctgtacggaacgtagttcctgcacacagccataa

SEQ ID NO: 162517 - DNA, 408 bp, Zea Mays
caacaatttatagagtcctacgacggtggcgaccaatttgaaggaagtgtgctggcggccggagagaggggaagtcaccggcgcaaccgctatcgtggcttttacaggggcagtgtcttaggcgatgaacaagctacctaaggcggtctactgcgacgtggtaaggctttgaggcacgtatcctagccagataacggtgaactctggtgatgccagcgcgattgaccgcgacaggacacgatggccggttcggccagcgaccggattcaccccacgctagatattttcaccccgccccgacgttatctactcttcctgcggcacgaatctcccagacgggcacgaattgtggcggcagatcaccggcgtcgagatcatggcaccagagatctttatggtcactgtacc

SEQ ID NO: 162518 - DNA, 673 bp, Zea Mays
cgtcaatacaaaatgtacaaatttgatgaaaagcataatcaagttcttctatattttgatttgaaagtacctcaacagggttctttttaaaactcagaaaccttccctaattcatgttagaaaaactatgaaataaagatattagaaacatctcaggtgttagattgggctgatcaggcctatcatatgtgctaatcagacctctcatatgtgttagattgggctgatcagacctgcctcatatgtgttgatcaggcctaccatatgtacctaggcgtttatggtagttgatcatagattaggcaaggatctccattgcttggctgctttctataaaccttagatgaccttgcctatatattgtacaccccttgtacctctatagtcaatctaccattccctaagccatatctcctttcatggtatcacgagtctaggtttcaccttggcttccccctcttccgctgcctagcgtgtcggctctcagtcctactacgtctgcatggcggcttcctctgccacgtggcacctactctcctccccctcccctcgacaccatcccccacgccaccacagtcgcccaaggatcatgtcgtcaagacggccgtcggcaacaccctcctcgccgactccgcctctactgtgtccactgtccaacaggacatagggcgcc

SEQ ID NO: 162519 - DNA, 523 bp, Zea Mays
gacgcgctgggtccgttgcatggcagtcgttcgagggccgttggcaagtctggcgctacgacgtaccgtcgagaggttgaagtcgtgtcactgtttgattcttctagcaggtgctacaggaatagtagactgagtggtcactggtgttgttaccccctccgaaggatgtagcactggtcggtcgagtatggcaggcgagggcttggtgaagatggtgttgagtagatggctttgcgtggtggttgacactgttgcaacatctgctgaaggttcacgcacagcagctgtcgtccgagagaaagcgccgacgttggagtccgtcgcagcctcgtcgttgtagcccgcagcaaccgtgctgcagggagagcctaacatcacatggtcctccgtagactgcaccaaaggcagtagctgcatagcagggcatgttggaagagaatcgagaatacttttaaacgctcgctgcactgggatgagacttacgctatatgcgaagttcatcctgctgccatcccagacagca

SEQ ID NO: 162520 - DNA, 377 bp, Zea Mays
ccaactctggcgacggcggcgcaaggatcattgcggcgagccctcgccggcgcgatgtgcattaggcgcacacgtgcctaaccatcaaatgtgagcgcatcaacacatagcaaagatgagggcgaagacacggagaggggctcaccggcagtggtgctgtgtggaggtcggaccgcggtggggagcttctcggcacgaactcttgctctagtgaacaattcaccccgcgctaaggtatcgcgagcgtcaatccttcctccatttggatccacacacctagctgaaaggcccagagcactcgccaaatgtagaacggtgatggaagtccctccctattccctgcgctttctccctcctctaccaatggcgcgcgcgac

SEQ ID NO: 162521 - DNA, 571 bp, Zea Mays
ctcaagtttgtaatgatctccccctaggaatgaagaagtggtttcctgctgatcttttgttgcatgctctgttcctgcatctgatggctcattagcattttagaggtaatgcccgagtgatgctttcttttctgcgatctcatcttttcccgaatcatcggcctgccgctatgcgcccgacttagcatgtcaacccatatttttgctgacgtcccccttgcattttgaaccctagttctttctttttcctccattgctttctagcttcctgagttcttgagtccgctcgcatcgtttgagaggtcacgatgaagcccaagaagagaaaacagagtgctgctattccggtcatcccgccattcgactctaatagtcaactccccttcgccggtaaccacatgtctgttatttctgaagctgaccttctgcaccttgttgagattggtgttcttccgccaaaaaaattgtgctcctagcggatctggcgtggagttactgtctcgacagaagatactcacgaggctgctatcttcatgccatttctcatccagggactagccctgccagtttc

SEQ ID NO: 162522 - DNA, 581 bp, Zea Mays
ctccttccggtgtggtagccacttgagtatagtagatccacctagttttcctttcgcctttgttttcctgagtgcttgccacatttcccttgccttgagaggtgcttccaaaagccttttggaagtttgatttattttgcttcagatagggacaatccttgatgaaatgcccagacttgccacatttgaagcaattgttagatgaactgggtaaggctgggaaacgagtactaggggtactcggctgaatagtttgtgtaggggcagcagttggatggatgaagataggttgcttgaaaggataggagggtgggcgaggaaaagagcgatttgggttaaagggacggatcacctactttgactgcttctcggatccttgagaggatccctcacccccttcacggccaaacctttttgtctttccctgccttgaactctttgcctccaccgagagtgctatgctcacggccctactgaaagcgagatgtagacaagtggccattttccgctgtagccgatcattcagacctctcatgaaacaattcttcttttttaggtctgtgtcaacttgctctatagca

SEQ ID NO: 162523 - DNA, 403 bp, Zea Mays
atggactgcgggtttaattcgtgaaactatggaggttctacgcgattatgccatcgcaatttttcaaacgacgcaaatagattcgggaactcagaaagctagagagcggcggaagaaaaaataggaactagggttcagagctcaagaggacgtcagcagaagtatggtttggcatactaagtcgggcacaaagggggtaggccggtagctcgggagaagctttggttgcagcaaaacaacatcactcgggcattacctctaaaatgctagtgaaacgtcagacacatgagaggagtacgcagcagcagattggcacaaaagcaggttttcattcaccaggggaagatcattacaaaattgagatcgactcattatgagtcggcctcccacccctcgatcatta

SEQ ID NO: 162524 - DNA, 470 bp, Zea Mays
ccccgctctcctgatgtacctctccaccctcctcctccagatgtcaacgagtggtaccaacaggcatatggggtgccttttacgacagctgatgacgtcgaagaagaagaaacttattttgatgatccggagcagtttgttccgcctccgtatcacggggatccgggccaatcgtcctcttaccctccgccctaggacccttctggcagtgctcctcctccagcccagtctggagaggaacactttgcctctgacctggcacaccacctctttgctcctcatcctcctcctccccactggtgatcattggattggcgcttctctctctctttttggttcttgttgccaaaaagggggagaaactttattatgcagtaccctttatgcagtacccctttatttttgtaatgaacaatcggtctgtaataactatttgatgcatgcatggctcgaatgccataaacactttt

SEQ ID NO: 162525 - DNA, 482 bp, Zea Mays
cccaaaccaccctcccttccatgtcaccttcatcgggcatcgcttcccagacacttgccaaaatgttgctcgaaaagcccttaaacagctatgccaaaactacaatagagaggtttttgaaacccccctttgctacttcccacctagcaacaaaaatacccccacctggaggaaaagaattcaggccctgtcagggagagatcctaccgaagatgaccccaccattgtctacatggccggatacctccacactctcgataaccactacgacgacctttcctcccactgcacccacctaaactcccgggtggaaagcttagagcagcaggtcaaggaactcaaaaaggagaaggcgtccctccaagagtgtctcgatatagcagaaggcgaggaggccaacactcatgaagcctaccgaaccctgaagatggattacgataagaagctaaagaagctcgcccccacgaagaaaatccaaaaga

SEQ ID NO: 162526 - DNA, 315 bp, Zea Mays
ccatgaggcataggtgagaagtcgatgagggtgatggtggtggtgaagagaagtccccagcgatggcggcaactttttcatcattttcttcttcacttgaagaagacccacttgatgactcaatgtcagtgagccagtcaccaacaatgtatgcctttccatttttctttttgtggaacctcttgtgcttcccatccttcctcttgaagaatatcttttcctttttctcgtcatcactgtcatcttctttcttgcccttgaacttgttcttcttgggcttgttgcattgatgagcaagatgaccaagctctccac

SEQ ID NO: 162527 - DNA, 799 bp, Zea Mays
gcacctcgctgccggttaaccgtgcgatcagattcgtgtcgatcgccgtgattcgtgtcgcctggaggtggattgcgtttggccgtataaagatcttgtcgtggatgtgttcgggacattgtggtcacgctgtccctcgaccatttgcgtcggcgacgtggcctaacggccgtcaccggagttggcgtccttcaccgcgattgtgccatgccctaggcctttaaccacgtcgctactaatcgcaacagctcgccaatgaccgtcgtagcccctcagtcggtgagtgccacggtaaaccacaccggtgactcatctcttctttccgaccgccgcgcgtctccatcgaattcactggccaccgctcaagcacgttataaattgagcacaccctcggctccgctaggtagtcaagcacctaatcctgcaactcgtgcctcaaatcatccacaagggctcaccaattcatgatttcccccaaatcggttctccgccgccgtagaaaggatctcaccgtggtcagtgcacttcaggtccgttcatgtcctctgccctcttgtttcagcacccctacctgcccctgatgcttctcgactcgaccgattaggctaggaccccttagatcacctggaacactccatgttgtccattgtgcctgctgtcaccgtggatagggtgatgtagagctcaaatccagcaattaagcgaggggaaatgtttgttaagggttcaaattggtgtctgccacatgggagcaccggtagttgagtaatctggccggtgtaggcacgcaggagctcgg

SEQ ID NO: 162528 - DNA, 946 bp, Zea Mays
ctcctaaaactccaaaccccaatagcacaggacccagaagaaaagaaagaaaaaggaataaacttcaacttctcttttcttagaaaattgggtatcacactctacccccgtaaaaagaattcgacctcgaattccgtcgcttctatcggaacgacaaaagaaagattagcgaagacaaagaaactcacccataacgaaaagtttggggtacttctaccgcatcagctcctcaagttcccaggtagcctcgcgctcggactgattagtccacaagaccttaacatacttaattgatctccttctcatgacacgcaccgaggactccaagatatgcaccagacgacactctagagtcagatcctgctgcacagcaatcggttccaacttgatttgttggtctggatcccgcaaaaacttcctcaacatagatacatggaataccgggtgtacccctaccatgcaatccaacaattgcaagcgataagccaagctgccaacccgggctaagatagagaacggtccaatgtatctcaggctaagcttcccggagacaccgaaccaaacaactcctctagtaggtgataccctgagaaggacttgatcccccactgcaaactccaagtcccgcctcctcacatcagcataactcttctgatggctctgagcggccaaaatattctgacgaatttcccgaattctcagatgtctgctgaacccaatcaggaccaaacagagatctctctcctaaagtatcctagcacaaaggggagatacaccgcctgccatataaggcctcatatggtggcatcttgatgctagcctagtagttgttgttataagcgaactcgaccaaggcgagatgatcctcccagctacccttccaagacagaacacaagcacacaacatatcttccaaggtttggatagttcgctccgacttaccatc

SEQ ID NO: 162529 - DNA, 666 bp, Zea Mays
aatagaaagaattacttacagacaccagcagctcatgagacttgtcgaaagcctgtcgatgtaatagtgggtgtagttcatcgaagagaacatgcataactccatagccatgaaagtaccaatgctcaggcttatatctgacaacaagcaattgctccttcctcttgcacgcattcatgtaccactggtttatgttgaacatttgcgtacccagtgatggccagtcctttttgccgactagactcctgccccgcttataggtccggaatatatcatgctctagtgtctccatcggtgcaatctcgcggagctatgccgttgacatacatgcgtcggccaggaatatttcgagttgctccgaatcgatttgttgaccgtacgctgctagaagctgattatcaaacatcaaacaactagcggcgggatagattgcttagattacatcccgagctgtggaacatctttggctgcactcttccctttctgcgtcctatacgcctgagctgactttacgagagaagagcggttatagtccgacaacggcggggacttacgtgtgtcacgctgttctttctcccttagggtgacttttctccttagttgttgtcatgctatgtactccggcttaggcaggtttttctcaagttccctcttctttgcatttcc

SEQ ID NO: 162530 - DNA, 915 bp, Zea Mays
ggagcattcagatcaagtacgcatcagtggcacacccaagagctaatgggcaggtggaaagagccaacgggatgatactcgatgcactcaggaagaaggtgtttgacaaaagcgagaagcttccagggacatggattagggaactgccatatgtagtctggagcctgcgaacctagccgagccaagctctaaacggaaacaccccattcttcatggtgtatgggtcggaggcagtgctactagtagatctaatctttggagcacccagattaacctttgaaagcatagccgaagcataagcaaccaggatagaggacatcgacgtactagaggaagaatggctaaatgtggtaatccaattagccagataccatcagaccctaaggcgctaccatgaaaaagcggtgtggcatcgatcctttgcagtactagacttggtcctccaccgagtactaacgggggagggacgacacaaactgtcgccaccatgggaaggaccgttcatcgttgtagaggtcacaggactaggatcctaccggctcactcagatggacggcatcgaagtggggaattcatggaatattgagcacctcaggaaattctacgcctaacaatgcctcaaaactctttaggacgagttgtactttgtaagcataaggtttcatcatcaataaaagcttccattttccaaggcatacaagttcttgatcaacaactgacctaggttggactcaactcgaaattagtacggcacactcagggtgatcactataccctactaacggagtaatcggcttaagtcggaaacaccttaagttggtgcaacatgctcacgcttacacaactcagggtgatcactataccctactaatggagtaatcggcttaagtcggaaacgccttaagtcgatgcgac

SEQ ID NO: 162531 - DNA, 1430 bp, Zea Mays
cgcacggacagaatcccgaggcaagctcgagccgaagtgggaagggtcgtacatagtcaagacaaaggcatccccaagtgcttacaggctagcaacatcatccggcgaagacttagaacactcatggaacatcgatagtcttcgcaaattttacatttaagatccaaggcccaagcacctttgtaattctccaaactatattatttaggcacgcactcttttcctcccgggggtgaggtttttaacgaggcggcgccatgtaatataccaacgaaaagcccccgcaaaaaactccatatgtcattaccatgtgtcgaaacagaccgctacgacgctcttcgacattcgacatatataaagtcaccacgataggtagcatagactaccctcgcgtgcgacaaatccgcgcaaaagtcacctaagggtgcagccggacaagcacaacaagtgtgcaacatgaagtctttactaaaatacaattccacgcaaaagccacctaagggtgcagccggacaagcacaacaagtgcgcaacatgaagtctttactaaaagacaattccgtgccaaagccgcctaagggtgcagccagacatacattacaagtgtggcatacgaagtccttacagcaagtcatccaagcaagacccacacattgccgcggcaggcgaagtccccaactcatttcacaacaaacaatgtaatagtttacatacacacagcagagggccaccggccacattgcacaaataaatatctaccgcattttgctgccctccctcttaatcgcgagccaggggagggcagcgtcttcgctcactaccgcgatacaagagcgagggcagcatacgcgctacattggctcaaccttcgggataaggcctgcctcacgaaaattaaacaacatcatcttcaactcctcaccctaaaaagatttcatagatccccctccccaatacacgacccagacgacgaggacaacaaatctcgttggccactccgatctacccgtagacgggttcattccatccccatctgatgacgtctaccacttcgtgacatctcgccatcactatgcttcaacaccactcttcgatggcggtgctccacggacctcgccccagccgggggatcagacgcctcgcgcacttccagtagcggcacagcctccgctgcggccacatccaacgcagcaaaataatccaaatcctcgtctggagactcttcagtccacaaaaacaggctcccaaactcccccacatccgatgaccaagacccagtttccgaaccagacatattttcattaacaggcattgcattcgcagccgccataaaattaatatcatcagtaggggctgcttgcgtaggcccagacgtcggaacctgcgcagcaaccgactttcagtatcacaaaaataaggtcctaaaccca

SEQ ID NO: 162532 - DNA, 704 bp, Zea Mays
agcgtgcaatttcaatcttcattttagtccaccaataatgttgctttaagtcttgatacatcttagtacttcccggatgaatggaatatcgactaagatgagcttcgtccagtatttgttggcggacttcaacatcctttggcactactttgcgatttttaaaccatattactccttgattatcttttctgaagcaatttgccttgccgacttccattttctcatgaatgtacttcatacccttatctgttctttgagcgtcaataattctttacagaagaactaactcgagcttcacatttgtcaaaatttcgtgctgcactatccccagattcaacttctccatttcttgacatatagtggtgtcaggtgctcttactgtaagacaatgacaaaaagtcttgcgacttaaaccatctgccaccacattggcttttcctgggtgataatggatttccaagtcataatctttgatcagctcaagccaccttctctatctcatatttagttatgactgggtaaagatatacttcaaacttttgtgatccgtatacaaatggcaagtattacccagtagataatgacaccaaatcttgagggcatgaacgactgcagctagttccaagtcaggagttgggtagtgttcttcatgccggcgcagctgccttgaagcatatgctataactcacccttctttcatcaag

SEQ ID NO: 162533 - DNA, 593 bp, Zea Mays
gaaaaacataaaatcatggcttaggccaattatagacattaaaataaactaaataagctacaataaagattatgaaagcttgtccaaaatagtttattaaaaactccaaacaagccattcaagtggaggttcaatggggatttctgaaattcagatttctgaattttcagcccttgaaccaaaaccgagtgtgttcaccttgatccttagccctaatcctaatgctcccattgacaaaattgtgtctaactagcccctctatcacatgccagaagatggcattgggacgcgagctttagacaagacaaaaccaaggatttgcctcgggctcgggcagggagacagaccagacttcagagctccaaatctttgaaaccattaggcaaaatcctatgaccccacacaagatcaatagcttgtagggaggagaagaggttttgtgcactgaccaaggcgagagcaggctcggatgaatgaccacacgcaccagaacttgggtagaatgaacgcgcacacgtgtttgaccctggtcggcacgccggcgttcgcccaacccccgtgtgcgcttgcctcagcgttcagtgaagtccgtc

SEQ ID NO: 162534 - DNA, 318 bp, Zea Mays
cgcgccctgctttgcttctctgccagttggaccacgatgttagcccgtccttcgctcaccgtggggatcggaacaggacctcaagcgctcgggtccgtggggctcggattgagctgttgcaactaaatcgaccgagatctctggcgatggggggaggataaaacctggggcctcaccctcctccatccagccgagcttggcggcagacctgaaagcccgccgctcacccacaattcccagctgcatccggcgctggcgataccaatccaagaatccgggcaccatggtggagagagatgaagagcacccctgtgcgga

SEQ ID NO: 162535 - DNA, 353 bp, Zea Mays
attgagtgtggatgggatgcgctctcgccctcgccagtggcatgaggcgtgcaccccgcattgaatgcacacggtgcgccatgcctgaacgcatgggctatacaattatccgtgcattaccaaggcaagaccattgactcaatgcattatttgggcgccctcattgtggcctctactgttcctcgtgtgttactgagagcctgcgcacgacagcgtaacaggctacacatgtgtttcgactaaacagggcaagaggataggataccaagagcatgcacgacaaccaagaggagatacgcgcctagaaggtctagcacaatcaggtctagacgacgcctcatgcttcgtattat

SEQ ID NO: 162536 - DNA, 623 bp, Zea Mays
cgatggcaaccgccggatcccacaggcgcgccttccatcctcgcgaggacgaccgtccatcccgcagaggggaacgagccaaatccgcgccaaattcgtcgcctcccttcggcaccgagaggggaacgctcttcaatctcatccatcgccgcctccctttccttcaacggtgccgaagatggactccgcgccaaatccgccattcaatcttcgtcgtctcccttccttacgccgcgaggtgaacgggatcccctacccatcctccatacacgtcgccataaaccatatatatcaaggccaccagactggagttcctctccttgcggcaaatcctccacgcgtttgtaagttctcggagtgaatcaaacgcaacaaggatcgcgagctgctggtgggtactgaacggcgcaacaaggcactggtcggcaacaagtgacgcccagactggagttccactccttccaagcaaggattgtggtcggcgcaacaattttctggtatgggaatttccctcacgccctgcattcttctgtaattactgttattagtcactcttagtcacacaccacatgaatacacaattttctgtccattttcttagtcactctcgaggattcttagtc

SEQ ID NO: 162537 - DNA, 682 bp, Zea Mays
gtggcctcgctcgctagtcacgctgggcattcgggttagcccgaatttttgggtcgggtagtttgggcttttgacaattcgggcttttcagaaacaatacccgaatatgtacctaatttaagcaaaacctaaaaattcgggtatccaaaaaattcgggttcgattacgggtagcctatctacccgatttcgttgcagatcaatgtgacatcaaatatttacacatgtatttttacaaaaatatcaggaatcaaacactagaaaatgagcatgcagttagactctagaaccggaagcacactggaaaatgagcatgcagtcagggttttgagtcataagcatgcagtgagagtagaaaataagcaaactaggaaacatttcaccgtgaaactgatcttgattagttgaggaaatagcaaactctagaaccggaagcatgactgatggttggccggttgggtgatggactactagctgttgcagtccggccaggtgctacggcagtactgcaccacggcgtgctggcacactggacggaagagcaagagctagtatgtcaactgggcaaagaaaaacaacactagtactggtactatagacgcatgtggtgatatttgtatagttcgggtatttgggtatttcgggtatcggatgttgctatccgattaagcccgaaataatat

SEQ ID NO: 162538 - DNA, 815 bp, Zea Mays
tatgtgtaagttctaggaccttattgtaatgcttttaatataattctggacggtgggttgattgcatagaaacataatggtccttttgcaaaacgatcaagaacggacggactcgattagatcagcctagagatgaatcggtacgtaatctagaccgctagattacgaacggactttcgggatttaatgagcccgcgacctaatcctgtccgcccaaggtggatctaatggttcgggtcacataagccgaaggggtatgcatcgttttaatcgggaacgtccatcggaatccgacggtcgaggcatccccaaccatgaatctaatcttggtcactccactaaagatcgacggctacctatgcttctccttccttggccaacagagcacggcgacgccgccctatatcatggtggaaggtcaccggagacttctgtctcggcctgtcaggactctaaactccaaatcgaaatgtcccccgcaatccaaagagtgaggcaaatacattgaggagattctcactgacgtcagaggtgcggaggatgttgcccatggaggagggcggaacaacggtcctgcaggagtccggcgagcaattcacgcgcctagaccacgaatcacccccaacatggacatgagcgcgatactagaggtacggtggtgctttgtggctaatccccaagggcccgacgccggcgcacgcgcggatcaatagcggcacacgatctcctctttcttctcctcactgctctcgatctccctccgtcaatggtccatggtggtggtgatgcagagcgcagccacagaggcgtccaag

SEQ ID NO: 162539 - DNA, 447 bp, Zea Mays
gaaagcgagggaagacattaaggaagtcattatgcacccatttggtctcgcttcggcctccgaaggccgaaggtcgaaattgatgacgccatcgaagcgtgtcagaaggccttcagtactatttgctccttcattggcacaagagatttaattcaagaacatatagccttcagagtatggccgcttgtagaaagctgggaaatgccgaaggagaccatcactaactctagcgaaggtgatttggtccggctgaagtatacattcaggtttggggataagtttgatgaaccaaacgacgactggctgaagtgtatcgaagctacaagtgatgaactgcttggagcatattccaaggcagaagataatgcagtgtccatggcctttggaggtcggggaaaaaaaagactgaacagagtttttgacgccattggcttcgtttaccccgac

SEQ ID NO: 162540 - DNA, 341 bp, Zea Mays
cgaggcggggctattctccggcgagggatctatggctaacgagggctctattccatccgaagcacgatactagccgtcgagaggaacatggcgaagctaggggagaaggtctcaccgggagcgaaggtggggacgaggtcggacacggtgttgggcgaatcgctggcgttgaagtccctccggtgagaaactgtgtagcctccggtccacaatcccaccaggcaaggccatgacagacatcctggtggccttatttatccgcacggcccatccccgagggatctacatcgacgagccagagtcttccccatggcgaacatcattctcacacttccacccat

SEQ ID NO: 162541 - DNA, 658 bp, Zea Mays
ggatgaccaagatgcctgtgccaaagagaaacaggagaagcaacaacaacaagagcgtagtgtgtagtggccggaggagcacgaacaacagggagactgatggtgtagagcaacccaaagctattgcacctgatgatctcgttcctggaagtatgatccttaacagaggccaaacgggtcaaactccatggaacaattattgtcagtggtaaagtgacgaacaaataaaagattcttaatgatatcaggagtaacaagcacattattaagaaaaaacgggtcgggaagaaccgtgtcgtctactgaggtgaccggcatactggacccatttccaacaatgatggttgaaggaatagcagaatttggaagtaaaaaatgagagatgttaccgagatctggcgtcgtctgattcgaggcgccggagtcggcgacccattcggtgatcgacgaaggctgctgaagggtcatcatgttgaaggattgggccagggacggctgatcttaggctccctgccacggagtccatggaaacgaggcagacgcctgttgttgctgggcaccatagggctgcgctggagtagtgatgggggccagcgggggtgtgagctgaggcacccccacgagcggtccaggggcagtgacgaaggcctgctgctgt

SEQ ID NO: 162542 - DNA, 466 bp, Zea Mays
ttccgttcataccgaggatccagcgtctgtacatgacagaggaatccgcgaaacagatgacatggcacaaaatggaaaacgatacaatcctgacaagatggtgcacacttccgatggtgaagcatggaaacactttgatgccattcaccgtgagaaagccgaagagtctcgtaatgtacgtgtcgcgttggccacagatgggttcaatccctatggaatgagcgctgccccatacacatgttggcccgtttgttatcccaatcaatctcccccctggtgtgtgctttctgtgccttgtacatgtgtaagattgagaagatatttccactcggcttcttcaatccaatgcagcatttgattcttcatctcccctatgaggcacgaatggggggccgtgcagggacgttggtgctatccaatcaagagatgtctaaatacaatgatggcaacaatgaatcgaacctta

SEQ ID NO: 162543 - DNA, 1544 bp, Zea Mays
caaagccttactcaagaaagctattggtcggcccctctgcattagaaccgcccccactccatcgtcacaagcgtcagtctctaccacaaaaggaatattaaaatctggtaatgcaaggaccggtgtggacaccatggcctgcttcaacctctgaaaagccatctctgcctctgatgtccattggaatgcccctttttgtaacagcctggtgagaggcctagcaatggcaccataaccctgcacaaaccgcctgtagtatcctgtcagaccgagaaaacctctgagatctgtgacattcaacggcttgggccacttgagcatagcatcagttttcgtggggtcagtcgctaccccattcccagaaataatatgacccaaatatgacaactcctttttaccaaagacacacttcctttctttgagataaaatttgtggtgtcgcaaggcagtgaaaaccagccggaggtgctccaaatgagattgccaattggggctataaaccaggatatcatcaataaagaccatgacaaacttgcgaagaaaaggagctaacaccaaattcatggcacactgaaaggtggccggagcgttgataagaccaaaaggcatgactcggaactgatagtggccctgatgagttttgaatgccgttttaaactcctcggagacacccatgcgtatctgatggtaacctgaagtcatgtccagactcgaaaagatttcagtacccgccaattcatccagaatttcctccaccactggcatgggaaaccgattcttaatagtcatatcattcaatttgcgataatcgacacaaaaacgccatgtaccatccttcttctgcaccaagaggactggagacgcaaacgggctcacgcttggagtgatcaaaccggatttcaacaagtctgccacttgtcgctcaatctctgtcttatggtgaggggaatatttgtagggccgagcattaactggtatggaccccggaagcaaaggaatgtgatgatcaaatggccgagatggaggtaagactgtaggtgcctcaaaaatatccatgaattctcccagcaacccttgcaaatctgtatgaatttcgttgatgctcactgcagtcacctcttccaacagagcaaacacccagatatcatttccgcgcaaccaccgctccacttgtaaagaagatacctcctgcaccacttgttgttgtggatgatttcccaccaactggacctcgatccctttgtccacaaaactgatcacctgagcttcccaatcacaatgcataggactgtgccttctcaaccaatcatagcctaaaatagcatcataggcccccagccctagcaccctcatatcattctggtatgtgtgtccgttggcccaccactccagtgatcgcaccattgtgtcactatacataatctctccatttgccaccctcactttacatgaagcacaagggtgcacggtcaggcccattcgatcgaccagctgcttgttaataaagctcgtagaactccccgaatccaccaggaccaacatga

SEQ ID NO: 162544 - DNA, 907 bp, Zea Mays
cccatctaacagttgaacgtcaagaatgtgttccttcatggccacctcgaggagatggtctattgtcagcagctgtctggctttattgactcctttggtcctaatcatgtttgtcagttgcagaattccctctatgaaccgaagcaggctcttgggaatggttccagtgctttgacacatacatacaccgcttcgagttcatcgcttcagcctccgacacgtccctctttgtttacaaagatggagacaatgttgcctacatgcttctctatgttgatgacatcgtcctgatcgcatactcgacacggctgttgtagcacttcaccatgcatctccacatcgagttagacatgacggacctaggtgctctcatcacttccttggcatcttcgtcacacgctccactaacgacatcttcctttcctagcggtagtatgccattgacctcctacagcgggtaggtatggccgagtgtcacactacatcaactcttgttgacactcctatcgatctctcttccactgacgacacgcctgctgctgatccgatcacataccggagcctcgtcggcgctttacagtatcttatgctcactcatcccgacttggcatatgttgtatagcaagtacgtctctttatgtatgatccccgtgagccccatctcatgttgatcaagcatatcccccgatatgccaagagcacactgtcctataaccttcacattggtactggcccgattcaatccttgactgcttatagagatgcagattgggctggctatcctgattcccggtattctaccttcgaccactgtatctacctaggagataatattctcttagtcctcaaaacgctagacgactgtctctcgctctagtgtcaaagcaaagtactgtgtcatcaccca

SEQ ID NO: 162545 - DNA, 716 bp, Zea Mays
gcagattcactggaatggtaaatcgttgggactcgaacatggggattgagacagagggtttatactggtttagtcttgtgccctagtccggtatagtgttgatcgtagtattgccttggcgcgtgttacaactggtgcgcgtgtgtagaaggagggggtctagccctcaagggtagaaccttaaagagaggacttgtattctattgatgagagtgtgatgcatgttccccttgggtggcgtagtccctcttatgtcgtccgtagggtcgtgcgtagcgtactcctggtatggtgtaccgctccgctcgcccgtcatgcgtgtcctgtagcgagtatggcactgatgacctcatagtagtgcatggcgggtcccgtcggtcagtctcatggggcggtcgcgcatggagcaaccttgcttatcatcataatccttgtgtcaccctccgtcgtgtgtaggcatacacacagtgtggcatatcgtcgtgtccctcccggtacgcgagtcactgtagagaccccggtgctgaggtcccccacgaccgggtttgaccgaccccacccgacagcgaggtacatttgggaccgtaagtgggggcatacaattatgtcaaacagcaacttcccgacgcgccttaggtgtgccacacgtatgtccagacgtagctcagggatgacatgtcttgtagcagctgacgtgggtcagcagtaccggactg

SEQ ID NO: 162546 - DNA, 464 bp, Zea Mays
gcacctgggttctcgacgtcgaggacggcggccatgacgcggtcggacgcggcgtcctgcgcggggccccagtccgtccacgcgtcctcgccataatgcaggtccgcaaacagggccactttgaacactcctcctggcccgaaccacagcggcggcagcgagcagggcgggcgcgaggctgcgccaccacttgcacaatgcggatttgctcgacggcttgggcggtgtggtcctgggagcatcgggcttggcgcgttcttgtctggtgaagccccgcgttcggagtcggagggaggtgggcgacattcacggcgggactcgcttggttgacgggatctacgcgctggtggtaggagatcccttgatggcggcacggatggcgtggggcggaggcgttcgtcgcggagccgggatctacgcgctgggggaggatcgcggaggagagggggggcgcgggcagacag

SEQ ID NO: 162547 - DNA, 517 bp, Zea Mays
cggtttctgccgccagggcgtgcaacttctcgatagctgcaagcgcagtggggcggtcgccccacacagtgaggaccccagcacgggacgacatcttgaggaccaagtacccgtaatgggcaatggccatgaatcggtacagggccagcctgccaatgatggcattgaaagggaggttaacctccgcaacgtcgaactggacgttctcagtgtggaagttttcctcagtcccgaatgtaaccgggagtgcgatgctcccaaggggatacaccggttgagggcctactccggagaatgggcgagagggtcccagtcgagatcctgggatctgcagctgcttgaacgcagcatgactgatgacgttgagcccagctccaccatcaatcaggacatgatgtagcctcatgttggcgatgacaggggcggtgatgagtggtagtatgccagctcctgccatgttttcggggcagtcagatgccccgaaggagatagtggtgctccgccaccgctgatgtgg

SEQ ID NO: 162548 - DNA, 683 bp, Zea Mays
caagcggcggatggaagtgctacggcgagaaattgccgatgatgcagtcggtctgttgtcgcgctcggtgctcggcgagcatccacaaatccaaacgaagcccctggactccctctcggagcacgagcgacgctgacggcacaaagtgaccacggcggcggcggatttctctagtcctgcgttcggcgctcacgagaacggtgtggtttgaggggaggaataggatccagctgggaggagatgagtttgccctttatgcgcgcggaagagtccgcaccccggtcaatccccccatcacggacccaccgaatcgagcggactccggtggattcggctggctgcaacagactcctaaacgcaggggaaggagacgcacctgacgacagggtcccgctgccagtgtcaacgagcggatgcaggcgcgcaccagagaccgacatgcaggccccaccagtcggcgcgtgcaagctgaagaagtgggctgcgctggtgaaggtttctggtgggccgaatgtggtatagaggcccagttaggggtacaatatcctttttctttttagttcctatttccttttctcccttttcaaattcaatttgaattcagatctaattcaaaccttttggcccttccttacaattttatattgtgccattaaagtactgactttgaagatacttatttt

SEQ ID NO: 162549 - DNA, 632 bp, Zea Mays
ctaagaaaaatctaaacttgtgcaacaataggcaaattaatttttacccaactattaatgaagtataacaccagaggaaaatacataacctattcaaaatatgaggtaacaccgattacccctaccccatgaaaaaggtcacataatccaagaaattctaccaccctttcccttaagcaaaaagttgccaaattctagaatgattgctcttgcacaaagaagaagatagaaaaaaaattagaaatctgttgtttgacatttttcaagtatagtgctagtagaaagcactcgtgtggcccagaactttagaaaatcacaggaaaatgaccaataggtatcaatggctaaaacttggtacaaattcatattatagcacctaaatgctagcaaaaataagccttagggaataatccactgttagaagagagttgtagttcaaagcaccccctctgccctaaaacttcatatttttgtacagagtgaacccttaacattttaagcctcaatttttgataatgagagatatacaccagtgaggagccactatacttttttacagaattttttggaaatttaaaaaactagcttgtagttcaaacccaccttaagggcataaaagaaaaaggaaagga

SEQ ID NO: 162550 - DNA, 460 bp, Zea Mays
gatttactctcggtttttcccactcagacaaactgaccttaaggataggatatatccttatccctgacacaaaacccttcaggtactgcaccaaaacggcagaggggtgagaggagaagaaatcatgtaaatggattttgcccaaattcgctcggattcctgacctatgggcgtttgatactgactaaaccaaactagcccacctattcgaccagaggcctgagctacagagcacgccaacccacgctcagcttgtgctctgtgtcgtgtcagacagcgcagcgtcgcacccttgaccatgcctataaagctagcccaaccccatggatacaccctctacgtttccccaaaccctcagccgagcgccctcaccaggatttcaccaaaaccgggagcaccgccgccggccattgtcaacagagccggtcacattgaactgccacacccggctacatttcac

SEQ ID NO: 162551 - DNA, 540 bp, Zea Mays
ccgagacacagcaaaaccaggccatggactgcgggttgaatctctaaacttataaggggttttctgcaaagtggttacgcgaaggggtatcgcggcatgcgagccgcacgatctaaatcggacgtgcgggattagatggagttccatatgaaccggtatgaaactacggccgtccgattaaagatcgatggtcagggttttatgaagtgagatctaataggggtcgaacagatcgcatccaacggtccgaattggctcggaacaatgcctcacgctggatcaaatctgaaccattcatccagatccgagggtcacacgctcatcttctagatctaatcctggccacacgtctacaatccaacgacactgatgccatccagccgaaccggtatctctagatctaattgaggctgtccatgcgatgatctacggcgagggctactatccccaatcccggtcacggtacccggcggcgcccaggtccgacggtggagaccatgccggagttacggtcaacaggagcctcgatctcgaatcccc

SEQ ID NO: 162552 - DNA, 662 bp, Zea Mays
ctcgtctggaagtagtaggccccgatgtggtatctggtcttctcggacttgaccagcacgaagaagtagcggaagagggaagtgcagggggccacacctacaaacatctcgcagaggtggacgaagatggctgcctggaggacagagtggggcgtgaggtgttgaagctgaagctcgaactcctccagcagcagcagaaagaagggcgaaatcggcagcgccaacccacaagagatgtaggaggtgaacagcacgaactccccggcggcgagatcgccaagaggggcagcgccagcacggattctcccggcgagccctgacgcgctccacccaagcaggtcacgcaccaggttaagtgcttcctcagactgaaagcggtcaggatgaccaagcgaagccatggcaagtgcggcggcgcgagcgtggagcagagaagcacgaagacaaaaaggcgcaaccagttgggagagaatgcgaaaaggtaactgctgcacgcggggtgaatcctttttcaaggaaacctgaatccttgttcatggaaacgcttccgcgcgcccctaaatcaccgcaggaaatcccgctcgacgggtaccttggacccaggcatcccagtctatgacacgggggcccgggtccacaagtcatacagtttgtgatccgga

SEQ ID NO: 162553 - DNA, 437 bp, Zea Mays
ctcttgatagattaattgcatgtatgttgcatctatatatgtgtacgtacgtacgtacgttagttgttgacgtgatgcatcgatcctctatatatagaccacactgagatcgatcgatattatgcatgattagttgctatatctacctatcctcttagcttgacattgttgttgtggcaagaactttcgacgggagtaatgctgtcgatcgcgatgccaagaaaattcaattctcttgccatatcacagtttggtcgacctgaatccggccggccctcctggagacgatgatagctagctagattcctggattggcagtcactctcatcgtctatctagtcgctgctgctgcatgcgttatgcatgcatgggcagtcgtatctcatgcatgcatgcatgtaggagggcatgctcgacggtcatagagagctctcatg

SEQ ID NO: 162554 - DNA, 299 bp, Zea Mays
ctccaatcgatggtcgtcggaagcgcatcgacgctaacattctcatacctaaatcctgtagggatcttcatgttgctagatttgaagcccttattagttttgatagacctgaactcgtcgttggtgagatcggcgaactggttgacaccgagccagaacttattattcccaccagcgttgaacgactcgatgaacttaacgttagccttgaacacctcgaaccgccgagccttctcggaggcgtctttgtagacgcggctgtactgcgccatccactgctcatgcctcgccaccatggc

SEQ ID NO: 162555 - DNA, 941 bp, Zea Mays
cgtcctctgcatccttttgagccttcagagccatactgaggattagaccctgccaaacaaaagagcgaacaaacaataaaagtaagaattaccaaaaatagcttgaaaactaccaaatacgaagctaaaatatgcaaaccttcaagctattgtaggcgagactgtctgcaagttggtcctttgtcatagcggacaaaccaagcttgagcttcgtaaatcccatgttgttcatcatttcgcggcaaacattaacctccttactgtcgggcagacagtagaggaagtcgtcttcatcatgccctctgtataccaaggaccctcgagggtatttcaagtccttggcatagtgttctacttcggcaaattgttccaatgataactgctttcccgaagtgtgtcgtacaatgtattctaagtcaccatgggaaggtgcttcaggagcaggagatttggatttctcaggaacactttcttccaccagccctattggtgcagcttttgaaggtctggcttcagcaagaacattagctgtgcttgcagtaatcgcttctcttgcaacttcagatttttcaccagttgcttcggcagaagcaggaactggcgccttcacggattctaaaacaacatctaagacgctagccattcttctcttccttggagtcgctattgtaatactcgatggattcgacaaccctattacaactggagggcttagcaccttcggctgttctgttaccttttctgatttcggctcctttattgggcctgtactagcttcgatcgacattgctgaagctgtttccatggctgagggggcaccctctgcactttcaataagcttcggcacctcggccatcccaataggcttcgacctacgtgttaagaccttggccctctttgccttcggcgcactggaagaggttgaagcaacaactttcctc

SEQ ID NO: 162556 - DNA, 779 bp, Zea Mays
agcacaacaagtgtgttaatcgaagtctcttatttaaaagacactccgcgcaaaagtcgcctaagggtgcagccggaatagcacaacaagtgcgttaatcgaagtctcttatttaaaagacactccacgcaaaagtcgcctaagggtgcagccggaatagcacaacaagtgcgttaatcgaagtcttttatttaaaaggcattccacgcaaaagtcgcctaagggtgcagccggaatagcacaacaagtgcgttaatcgaagtctcttatttaaaagacactccacgcaaaagtcgcccatgggtgcagccggatcaacacaggcgcgcgaatacggccaacaggccacatcatacaaattacagttacgtacactcggcgagggcatcatatattacatcgactcaaccttcgggatgatacccatctccctgtaattgaacagcattatcctcaattcctcaccctcaaaaagatttcgcagatccccttcacctatgctcgccccaatcgacgaggacaacaattctcgtttgccaacctggtctactcgaagacggccacgctccatccccatatgatggtgcctaagactttgcgaaaatgcacccacactgtgcttcgacaccacccttcgctgcctatacccagtactcgcactaggaagatccccggcaccctccacacgcgacgaagactccgcaacagccacatctagcgcagcaaaataatccaagccttcatctgaggactcctccgtccaagaaaacgaactccca

SEQ ID NO: 162557 - DNA, 294 bp, Zea Mays
cgccgagaacttgccgcaggattccacgagaaacaacctcaagaagatcttcggcgtcatcggcaggtcacacacgagaacacaacctctgaccgacggcccatgtagtttaattagtttgttctatgcatgttagcctttccatgtactagtgtctcttaaccgtgtgcgcaacgagtttttttatagcatgaaaaacatcagaatctgccatccgcaagaacccggctctgcaagatcatcacccaggtcgtcagacacaaacacaccagccagtaacaaggtacttacttg

SEQ ID NO: 162558 - DNA, 689 bp, Zea Mays
cgggaagagcgagactgtggataagaaagggaacatagacgatggactcatgagtgtcttccgtcgaaacagtaactccacggcaaatccgccaagaacatagttcttttggaggtaaaaccctgacatccacaaggtgcagaagatcaaactctaaaattacagacatatggttacccgcgaatggcaactgactattagggtcgattggcgggatgataaccacggtggagctctgtttcttccgtttcggcgccatcgcagattcgtcggcggaacgaatagtagcgaaatctaaggaaaacaggggagtggtttgaggtagaaatgtgaggttagggctcaaaaatcaaaagcatacatcgacatgagtataaatggggttttcccgggttgggcgccatttctaaaaagtgccaagtcaacactcgggaaaatgagacttcagacataactcggtcgttacctctaaaacaccgacagtgtcaagcaccactcggctgttacctctaaacgctgacagtatcaagcgccactcggccgttacctctaaaacaccgacagtgtcaagcacgactcatcaattacctctaaaatgccagtatcatcagttatcgttcggtgattatttctaaaaacgccgacagtggtaggcgtaaagactaactatcaaacgattataaaggagg

SEQ ID NO: 162559 - DNA, 312 bp, Zea Mays
tagtaccaagatgtatcaggatttgaagcagtagtactggtggtatggactgaagagagatgtggctgcacatgtggctatgtgcgatgtgtgtcaaagagttaaggccgaacaccaaagaccagctggactattatacccattaaagatacccgaatggtggtgggaagaaattggtatggatttcattattggattgcctcgcatcccgaaaggatatgattctgtatgggtggttgaggatagattgactaaagtagctcacctcattcccatcaagactacttacaaagattctcaactagcagagta

SEQ ID NO: 162560 - DNA, 453 bp, Zea Mays
tcttcaaaatcataaaacggatgcgcctgcatggctgcatatgggaaaacaaaaatactctaggtcaattgattccagagttaatagtagctccatcttaagaaatgctagtttaagaatatgtcacgtcacaaaaccaaatactctgtattgaggattgggtcacatatcgtgggtcgagaatgtgaagtaagcatgtgaacttaaagcaaatatagttctactaccatgatgctaactttcaaatattattatggagctaaatgctcaacgggctacaaggcaaaacatatgaactaagttcaaagatgaccctatgccacacaaatcattgaaaacactaaagaaagtagaatcatggaactcaatccaagtatgttaataagtagtacctcacattcacttattagtaccccagccataccatgaaacaaaaaatcagttcgataacgt

SEQ ID NO: 162561 - DNA, 615 bp, Zea Mays
atcctattcattgcttccataaaagcagcaggggcattagttaagccaaaagacatgactataaactcgaaatgcccatacctggtgcaaaaagctatcttctcaatatcctcctcacgaatcctcaactgatgataaccagagttcaaatcaattttagagaacacctgggcacccctcaactgttcaaatagaacctagcggatatttattcttgattgtcacttgatttaaagcacgataatccacacatagcctcttgcttttatccttcttctcaacaaacaataccgggaaagcccatggtgacctgctaagcctaatgaaacccttacccagcagatcctccaattggtgtggtagctgattaccgaggccctggtgtcctttcagtacgcaaaattatagcatccaaagtttttgtgaaggccatccgccctggccttcgtctgatagtgcaagtcatgcactcggcagaaaccttcgacattggcactcatgccctggcttcagagagcccatatgtaaacactcagcctaacaatggcatttagcatcagctgatgaaggtttatctcaaacttcttcaaaacctctcctattatatcatataga

SEQ ID NO: 162562 - DNA, 1763 bp, Zea Mays
aaatcaaatgtgcaaacaagcattgcacttattcgttgcgttacatgagagacaagccgttatgcagtcaaatacagaggaaagccacacacaagtccaaataccactgtgcagagagggagacgcatgtagaacaagctacccaccaatgcacaggcacacactcaatcgacgccacaagcagaatataaatgcacacacacggatacaaaccgtgggagcgagggactcgatgatgaaccttgagttctccctcccgcgccaacccttgtccttcctgatgtgtgtaggcaatctgtaacgctatcctcttttcccgcgcttcttgctgctcagtacttctggctccccgggaggtttgtagtgtgtataatggatcctatctccgtctctatgtttgtcgatatcttctttcaccttgtcaggtagggagtgcccgatgagctcaagtttcttcaacctcgtaaggttctcgatgctggagaaagtcttcatttcggcgaaggcccacacgagcttctcgagctgaggagaagacccagcctcgaatttgatcccggtgaccgtagggcatctcacaacaagaacattgagtcttgggaactcgtccttgttgacgtcgagttggcttccatcgtaggatccatgtgagagcaccaagcagcgtatgttttccatccttgcgagtgcccgcagatcaccttgcttcagcattgtaccgtgaagagtcaccttggacacttgtttggcactggaaagcaattcgggaagcaacacctggttggtggaggtggtggtttgggtaggattggcagcgctagcagtggtggtagtgcgggaaggggcagggttacggattgtgggggtggaggaggggacatggtcggtggcgacagcggaagcggcagttggggcagagggtgcaggataaggggctgttgcggtggaggggacgggggcgttggtgacaccagcagcagtagcagggtcagtcttgtcgctgtccttgttacatttattcagctcaagctcctctagtttcttaaggcgatccactccagcgatcgattctatgatttcaaagcacagaacaaccttcaccagctctggagctgctgtatcttcttcgaagctgatctcaatccagttggagccctcaacaagtaagtactcaagtttctggaaccgaacctgcttgaatgcgagtttgttgccgggatatgtgttgtgccgaagcttcaggcaccgtagcatgtgcaaattggcgagggccaccaggtcgtcctgcgtgagcaaggtgttactcagagttaacttgatcagtggagtgctcttgtcggtcagctctgacggaagaatccgcttcggtgttatgtgtacgtctccactgatgctgaggctctcaagaaccttgggatgctctttcatgatcttcttctcatcgcggcccgtggaagagccttccagctctcttcgacctctgatggtactgaaagtccccttgtggctggtggtggcgtcaagagtaatcgatagagaccggaggcactcatgcaggttagtgacagccttaagcagtgtgtccttgtccttgacattgataaccaccccgagctttctcagctgccatagccttccgatgccttccaagtctttgtcactcttcaccctgacattggatagcacctccatgtctgacattttgtcgatcttcccaggaaccaggacatggccgtgggtgcgtggacttggatttctgtttc

SEQ ID NO: 162563 - DNA, 664 bp, Zea Mays
ctcgccccctctctcaccctgcgcacacaaccaggcagtccaccgccgctcaccgaagtttgccgcccgttccacgaccgtcgttgagccctcgccgcgcccgttccctcggtaaactccgccacatcacccacatctcgggacaccctttggttcgtcctttccccctctggtttgcctggtccacgctcaccggttcactgtcatagctccgccaccgtcgacctgtgccctcaccgtgccccgaccactgttcgtgtgttcctgggacttccctcaaggtaaccgtcctagccccgcccttattttcccctgtctcgcatgtacctgcccgcgattgctcgctggagtattccgcgatccactgaggactcccctccaccgtctggtcgcctcagtcctgttcacacaaaccagacctcgccatagtgttcgccagaccctccctaacctcaccagctacctggaccgacctcttgcgccctaggagactcagtttgcctcgcctctagcgacggcactatcgtgcccgtggggggcgtcgtccctggctccccgacggagacaaagtcccctggcgcacatcctgtccgcccaaccctaataggatggcccgattttgattaggccagatctaatcccgaccgcccgatccagatctgac

SEQ ID NO: 162564 - DNA, 356 bp, Zea Mays
aaataaaaaaagagaaaaaaaacaaaagctcacctgttgcttgggccattttccctggccggcccaccaaacctaatcccgcacggcccaccaacacgatcgcgcgtgcgcttgtctcgtcgctgtcgcgtgggcccaggatgccaacatcacactccactctatgcgccctcacgcctggctccctctgacgtgtgggcccgcgtcgtcagacatctcttctccgcgctacggactcagaagcacgcagaactcgcgcggactcggccgaacggcgcacgcggaattcagatggagctcgctaggtccgttcggtgcctggggtctcccgaggatctcggtcgtcagctcacccc

SEQ ID NO: 162565 - DNA, 795 bp, Zea Mays
ggatcctggttcttcatagcggatcctattgtggggaggggataatgccatggcagggacttgaacttcagggggattccttccatcaagccgagcttccagggctgcgatccttgagtgtgcatcctccagctccaagtgtacccttgagaggtccagggtagcactatccaggtcggtgttcagacctgccaccacaccagctagggtgttgaggtgatcttcatcagctccacctggaagaatgctggtctggctttctccacgaatacacaaaggaagatgcctatacttcgtgttgtgcttctgctgcaggtaggtgtggctgagggaccacagagttctcctagcagcatcgctgaccaaagcaacataggtggatagaggcgtcagagactcatgagctgacagagtcctgaaccctctatcacctgcatccatcaccctgacatgaatgtgagtgatgtaatagcaagcctgaggtggctcgtacactcaccttgtctcatacaggggtcggacgtatgttcccaacgcatgcagaacatcctgcagcaggttagggaagtgccctgtctcgaacattgatgtataatgttcagtgacaggccataaccccatgtagtggtcctgctgttcatcgttggcttcttcgtttacattctcctcctcctcttcttcttcttcttcgtcttcatcatcgtcaccagagtcatctgggtcatcacctccgggagcaggggcttggactgctagtgtaggcggtgctaaagctgacgatccagctgcgaaggc

SEQ ID NO: 162566 - DNA, 368 bp, Zea Mays
ctttcgagctccttcccttacttgtccagggaccagtatctatcatttgttgccttagtccataggctagcaagattgtagtctctaacacgttcaggtacttgttccctactccttcccatcatcctatcaagtggcccttgagataccctctggctggaggatccaccacccctgtcataccttgcaccagccctctgactaaattcgtgctccacacgtgactgatgcagagccgctttaagttcatcttcatactcatcgttcccaaaatgggttcgtgctacctcatctgccctcagctgctgcctaaacctagaactcttcttttcctttgtcctatctatgtcaagttggaagtatgcctt

SEQ ID NO: 162567 - DNA, 994 bp, Zea Mays
gtaaatgtgcttttggggtgtcggctggtaagtttttaggatttatcattcatgaacatggcatagagatagaccctgaccgaattaagtctattcaaaatgtgggacctccgacctgtaaggtcgaagtgcagaagtttctcggcaaggtgaattatttatgaaggtttatttctaacctagccgggaagattgatgccttcacccctatccttcggcttaagaatgatgttgaattcgcttggggggcagagcagcaggaagcatttgatctcattaaaaaatacttgtctttggctcccgtattaaaagcaccacgagcaggagtaccattccgattatacattgcagctgaagataaggtcattggggctgttctgacacaagaaactgaaggaaaggagcatgtggtgacatatctaagtcggaggttggtggatgctgaaacgaggtacacttttattgagaagttatgcttatgcttgttttatgcatgcaccaagtgtagatgttatttattgtctagtcattgcactgtttctagtcaagctgatgtaattaaatacatgttgcataacccaattatgagtggtagaattggtaagtgggcttatgcactcatagaatatgacttggcctatgaaccattgaaatctatgagaggccaggtcgtagcagattttattgtagaacatcggattaatgatactcataaactagacatgtcatacctcactattactccttggactttatattttgatggattggtttgcaatgaagggcaagggattggcattgtacttgtttcaccaagtgatgtctccttcgacttctctagccgattgaaaacttattgcactaacaatcaagccgaatatgaagcccttttattcggcttggaacttttaaattatatgggagtaaaacatgtgaaggcatttggtgattctcagctggtcgtccaacaggtgttagaagaatatcaatgttt

SEQ ID NO: 162568 - DNA, 613 bp, Zea Mays
aatagattgatggccacagtatgaaagtatgttgacattgcaccgcgacacaacattcatgcaggagtagtcatggaaacacgcacgcagtgtcttcatccttcaggcagcctgggtcgaaactttgtggtgcacacgtggcttagatgtctaccttgttggtccccatatgcatagaggtgacccaatgcacaagcacgctggtgatgtatgcaatctgctctagagattgtatcttttatacgatttggcttctagttccaattgcttttaatccatcaggacacctaggagactgatagggagtggccggcaacgcaactcgactacaaggtgtggtttgtcttcgggtggttccacatgttgtgcttttagttgtcatccttatttgcttgggctcctaccaatttgcgcgttgccagatgagagtgcaaagtgcaccgttatcaaacaccacgaccacatgaagaaacacctcggtgagcctaaggagccatagggtagagtgtacctaaagttgcccaaaatgagccccgtgtaatattggagctactccaatggccttgacatgacaccctattgccagcgtcgtatgtcgtcaaagcgaaccagg

SEQ ID NO: 162569 - DNA, 882 bp, Zea Mays
tgaacttgcactgtgcgcaaaaccctcttccacccctctgtcacggtcaatcccaccattgctttgccctcgccttagtggtgactgtgcagcgagccaaaaggactcgtcctctggattctcggagggaatggccttccatcgtgttgattagggcccttttctccctcatggcttcacggcacaacccattaatcattgggagattatggtacgtactgtcactcgcccgcaaccgtctgctcatgatgattgggtaattgtcctggtccaaccgctacctgagcatgaggtcaatttccaattttttctgacattgttcgagagtaccttttggagattagacatgttcagattaggagtgttcagcgctcccacttgggtcaggctttggtgaggtttcgattcatttttgatagggataatctcgtggctatgggtccgcagcaagctttgggctttactttcactatgagtagacacaatgcggcttggaatcaacgagcattattttttaatcatgaatgttggttgttgctccttgggtttcccctggatttttggtcacacgagcacattcagaactctattggttcttttggtcgggtgctcatgtgggatccggacatttctaatgctactagattgcttgttagagcacgtgtgacttctctgcaggaggttccatagtttattgtgttttcagtagctgaaggttttcatggggtttcttggactgttcagtgtgacatagtgcagcagttcatgcttggtaacatgcctgaggatgaagaacctgtgcctccgtatcctcataatgggcatcaacttccggtggaattttttggattggggcaacctgtgcccaatttccaatttgac

SEQ ID NO: 162570 - DNA, 428 bp, Zea Mays
tgctgggcctcgcgtgcagccacccgaccccagccgagcggcccaagacgccggccatccagcagatcctgctcgggtccatgccgccgccgccggtgccgccgttcaagccgtccttcgtgtggccggccaccgacgcgggggcggggctggacaccatgtcgaccacggcgggcaccaccacgagccagctcagcttgacgtcggcgtcgacgtggagcggcagcttcatgaaaggcagcctgaggcacgcgttcgagcaagaagccaccgattccttggcgtagccgagctatatacggtataattcttcttagtgctctcgtaacacagcaacctgttggccacgatggaattgtcgtcatgtggtcactgtggaggttaattgttcaaagcagagggacccccacgatcaaaggccggagaaa

SEQ ID NO: 162571 - DNA, 732 bp, Zea Mays
caaaggtagttttactagaatgaaataggctaccttggtgaggcaatctattattacctagatagagtcattccctttttgcgtccggggtagtccggttacaaaatccatgcctatttcttcccacttccattcaggcacggggaggggttgtaataggcctgcaggtttttggtgctcggccttcgtcctttggcaggtgtcacactgggccacatactgagctatctctttcttcatccctctccaccagtatctggttttgaggtcaaggtgcatctcggtagttcctgggtggatggagtaggctgagttgtgagcttcctcgagcaggacctctcatgcttccccttttggtacacaaagacgatttttgaaccaaagggctccttgttcatctgccctgaggtccgggagttgttccttgtgggctttttccacaagtcttgctgtctctgggtctaggcgttgagctttgtatatgaggtcttctagcattggtttgacttcgagactgccactgtttcccagacatgtattcagttgagctgattctttcttccaatcttctaaaaagttggttccctttattctgaatggttttcgactgagggcgtctgctaccacgttggccttcctggggtgataatgaatctcaaggtcataatccttgatcagctccaaccatcttcgttgacggaggttgagatctggttgagtgaagatatacct

SEQ ID NO: 162572 - DNA, 458 bp, Zea Mays
agcgtgtagtgaaattattagggataaccgtcaccgtttgtttcctgtttttgtgtttcgatggcaggcgacgacgaagaagcaaggatccctactaacttcaatgaatgtgttagccgccaagatcttgaggcaaacaacaagatcctgaaggagcaaatggaggagacggtccacaagtcagtgcatgatgccttcattaacatgaaccttggcaagacttacgagaggctggatcgacaattgtcccagatcgtcgacagacttgctgtgttggagacgcaacaacaagcaccgccaccaccacctcctcgtccacgccttcccgatgatgcggtgtttgatgaagaaggtaattatgatgaagcagccaccagagatttgcacctacatcgccgtcttcatcaaaacaaagaaggtatgccacaccgccagcaaggtaataacaatcgtgctcc

SEQ ID NO: 162573 - DNA, 1018 bp, Zea Mays
ttcaagaaaaactgccctagaacttggctgtcaggtgcactgaatgagctctcccatggtacagtgcctgaaccagattagactgccagcgtggagctctcactgccgacgactccctccgccgcgattcgtgtcaccggcgtcgggattcgtgcctgagtggatggatagcgccgcggggtaaaagatcttcaccgccggtgtgctggacgccactccgatgactcaccgtcgtaccccccctgctttgcggctggagcagataggcttgccggtgaaccgccgcctctcggccttgtgccgcgtggctctgcctttccaccgcgtcgccgtgactccctatggtcgtctaatcgtcgccggtgaggtcgccacgacggtagacacgagttcatgcgcgccagtaactccctgcccttccgaccgccgcgcgtcccattgaaattcccggccaccgtcgttgagccctataaattgaagcccccgccagccccgcaaggtcatcacccacccagccaccgagaatcgctagcaatcgtgcatcagtgagcttgaatttcagttttctcacaattcgggtttccgccaccgtgaaaccaacctcaccgcggccagccccgttccggtcagttcatcctcccctctccctcgtttgagccttctcataactctgtgatgctcgccgacccacgcaattgagctagaaaccctctggtcgccgggaacacggttgtctcgccggaacactctcggtcaccatggccagagccaaccaggcacccatttgcgaaattaggttagggggattgatcggggaagatccaatttggcattagctgctcggggacgccagtacttgccccaatcggccggcctacgagctcaccggagctcggccgcgttcaccgtcgtcgtggacctccccctgcgaagaaatagaacatggagggtttttgcgcaaactgtcagtgacacagaaaaatagtaactgaacctatccccagttagtcaaaacccc

SEQ ID NO: 162574 - DNA, 690 bp, Zea Mays
cttttcttcgcaagatcaggtccccgaccacgaagggcagagcggctgctccagtgagcttatacaggccagagtaagcaaaggctaagcttcttacttgatcgacaccgaattctacccctggcgaacctaatccctctaccaattgcaaaattctagctcaaaatctctctgtccacgatgacggcgaaaaccgaggacaactcgaggtgttcccggtgatctagggtggtctagttcaattggttgggccgataagtatccttagcacacaagggtgctaaaacgagggtaatgaggatgttaacggacctggaaacggcggttcacgacgcggtggttcacggcggcgcggagaaccgaattgggggaagtttgaaattcgcgagttacgttggctaattggaggcgagggctggtgcactggacgcataataacctagccgagctcactagggcatcaatttatagagttcatcagcggtggcgtccaattttgagaagatgtgttggcggccggagaaaggggaggttcactggcgcgggttaccgtggcattcattggcgcgtcgactcagaggacaggcaggctacctattgcgaccaacgatgacgtggtaacaatgcagtagcgtggcaggctcgggttaacggcaatcatcaccgtgacggccgcgcggccacgtcacg

SEQ ID NO: 162575 - DNA, 541 bp, Zea Mays
gccacgccaggccgcaccggcgagggagtttggtgcgagctccttggccgccatgatgtttgcgtagtgtcgaggaagaaggaggcgaagaagagggagaaggagatgatttgtcacctacacatgaagaacagccgagcaggcacgcaaggaagaggaagacgatgcgagaaagacgatggggctgctcatccgacgacgcgaggaagacgacgaggcggccccttagaccacggagttataatgcatagagaggaaaacgcgtgggctgctcctgtgtgagaaggaagagggaaggggttcatggtaggggcgtacgattgtatagaaaggagagggtatgtatagaaaggagagggcgcgagaggtggttgtcaatttcatggcgactcttgtcctggccgagcgagagagacagctgcgcggtgagttgcacgagacagggttagacagagttagatgggtggtagacagggttagataaaattagatgaagacggtcagagccggcccgtgggcccaagatgacgaggtggacgcc

SEQ ID NO: 162576 - DNA, 766 bp, Zea Mays
gtcgtgatggttctatagtaactgcggatggcgggttaattctacaataaggcgaggtctctttcacaaaagcgataggccgaaggggtatgtttgcactggggctgatggatcttggatccacggtcaggattaaatcgcggcttaagtgaatcggtacgccactcgctagcattgattccgagatcaacgactcaaaattaaaatccccacgatctattgagaccgcacgatccaagatctaaggttaaaacctatctgaggcgaggggttataccccgatgcaatcacatgcgttcattaccggatcgacgatacctgttcggctgtcatcaccgaccgacctgccatggaggagtgagcaccaacggcggagccattaccggcatggctccgcccggcgcccagtctatcatccatgccacggatctgacgctacttgcaacaagggcagggggaatacggctgtcaaggttttaccagcgatgggtgaggggtcgcgatgtccacgacgcaggatgccccgacgccgccttaggatccccgaccagaaattctccttcctagggtgagcgaatacgactgttgatggggacgtgggttatggatcttccgtcaggaggggtaactttcgatttggtggagatgtcacacagacgatccggcttccaatcaacacgactagaaccccgcaatcgcaacaccacttctcctctggttatcaaccgtgcactgcgcgattgacctcgccacgagggctaattcc

SEQ ID NO: 162577 - DNA, 746 bp, Zea Mays
acacgtgcgatacaaagaagctgcggatttggatgaccacgtacgtgaaggagcaaatcttatcccgaaagtagccagaagcggtcaagcggatgaggtaaaagctgaattccggctgtacatcctggctgtctggcggtggggcagtttcgccataccagccgcgcgcggctattgttggcgtggatgcccccaaccccagattcttctggccacgcacccgaaatccacacctcacaaaccacgcagcggaggcgacccacaaaaaacacgcgcggcaggaggaaggcgaggaagcatccccttgtgcgcgcccccctcatcctctcaatcccacggattcgccggggtaatctcgccacggccgtgctttgacgccgaattcgtgctctgtaggttcaattgaccccaccaccgcccgctgctgcttcgtttctagctcgagagagtttagtgggttgcttgattccgaagctccgagctcgtgggattgaattgagcccccccaagatcagaattggagcagcgggttttggtttcctgcttggtgccgctgattggagtacgcttcttttgtggtggttgagaggctgctcggcttccgccgaccatgtccgtgccggcgatagccgtgtacaccagcccgcccggcgccgtctacgcgccgccggagctcgagtccagctcgcgcggctcggcgccgtgcgcggccgcggcgtccccgtcagcgccgagctcccaccgcc

SEQ ID NO: 162578 - DNA, 600 bp, Zea Mays
acccggcatgacattgccgcctccgcgccctcgcttggatcgagagcgaggtggagtatctccgtggatttcctggtcatccgaggagtcggattcaaccacagatgggttccttcgacgcaccattctaagaaacaagaaatagaacctatgatgagcaaggatcaaacatgtttgagtagaaacgcataagatattgagcatgctcttcaaccgttcatatgagcggttcaactacaacgaacaatatcaaatcgctaatctcaacaatgtttgtgacaaatgaagataatctaagtgttgcaatcacttaaactaaaatgtacccaacgaatgatacattagataatcaagaacgcgtaggatcgagtacaaggaaataaaacacggcaatacctcgatccggagattgggtcaagaactcccaatgagatggaggaagatgatggaaatcgccgggatggacggatctccaacaactcttccaaaagtgtgagggcacgagagagtttttggagtggagtgtgaaagtgagagagagtagaatgagagggcagcggcggcttgaaaatgagtctgagaagggaagaggagagaggg

SEQ ID NO: 162579 - DNA, 825 bp, Zea Mays
ccgccgttaatcaacgtcgcacccccttaccacccgaccgcgcacacccacgtgatgcttttgtgtaggacgacatcattgatcacgacttgatggctcgtgcagaagcacgaggcgattactcacggatttatacaggttcggcccgctttgaattgcgtaacactctacttcctgttggaggcattgatgttgatttctggagcgtggggattataagctgaagattgtgggtgacggtgagctgaggttgtgggtgatgagagatgaaatggtaggggtccccttcggccttatatatacgaccagagagagttatcccattacaagtcatgattactatctacttgcttatctcctttatcgcagatcgcgtccctgcaaatccggagcttctatcgtctagccgcccgagctttcgccgaatgccaagcccttcaggtgtttacaactgcctcgcccgacacatccgggctttgtcggcgcttaactcggacgtcagtctccattaacttgggtcaggcctacctaggttgttggccctatcctgcaaatccatcccataggatgactcaacaagaagcctatcaggcggcccatgacatgttttaatgttcatgagtacctgggggatatctatcccccacatgtagtgaatgttgtataagttgattcaatcaacagctacaaccctagccataggcacaaattatttcatttggaaaaccttctctccacctaaagtcaaagtcttcatgtagattatatcataaggcaagatcaatcacaaactaaacctgctcaggaagaaaatactcaacaacg

SEQ ID NO: 162580 - DNA, 519 bp, Zea Mays
ctatgtttgctctatcttctttgttgtctattatagaggagcaggtggagagccttggcgatgaggagttggcaattgtggccagccggttcacgtggttccacaacaactgtatgagtcggtggcgtggtaggtccaaggacgaatgctacaattgtggcaatcccgaccacttcgttgccagctgccccaagaagggcaaataagagtctggcccgcgctaccatcactctggtcggtgcaagggcaagtactcctccggcaagtacaagtccaagggaggattcgacaaggaggcgctcaagaataagtacctttagaaggtaaatgtcaaggagtgtgccttcctcgcctccctcagcgacctcgaccatgaccccgacgatgttgtatcttacttgagcgacgaggagactgagagacgggtcgaggacaagctgaacaagctgtgcttcatcgccgacaccgcaggaggcttctgcaccatggcacttggtgaggacgcggtcagcaccagcg

SEQ ID NO: 162581 - DNA, 431 bp, Zea Mays
tcagtgttgaatatgaagaaagaatttaaaacttaaattcgaaattgatatcagaaaaagaaaatagaaaagaaaacacaagaagccacttgggccgaattccctctcctggcccatcacgtttccttcccttctctcctaattgggccatcgctcggcccacctgcgcctcaccgcgcgctcccgaagctggtctctctcaaaaacacgccgtagactcataccgccatgtgggtcccaccttgtcagctcattcctctccatcctaacagacctgtcccgtagctcgcgcgaccttctcgccaccgcgacaatcgcgcaacaaccgcgcgttgccgggggaatcgggaccgggcgctccgtgggctgggggataaaagctcggcctccaccgcgcccttccctcatcagctgccagcgtgcttcaaacc

SEQ ID NO: 162582 - DNA, 358 bp, Zea Mays
caagtgcaccaaaacacctaagggtgcgaagtagtccaagagacgcatcatctatccgagcaaaaagtcacctaagggtgcaaccggattagcacaataagtgcaccaaaacacctaagggtgtgaagttgtccgagagacgcatcatctatccaagcaaaaagtcacctaagggtgcaactggattagcacaagtgtgcaaaaaacacctaagagcacgaaattgtccacgaacaagtcgcctaagggtgcagccgcatatgcacattgacacacgaatcaaaccatcacccatagaaaaaggaaaaagctccagtatattcaagaaccgaagactcgcatagtcgtcccttggtta

SEQ ID NO: 162583 - DNA, 585 bp, Zea Mays
gtggggttctagtcgtgttgattggaagccggatcgtttgtgtgacatctccaccaaatcgataattatcttcacctgacggaagatcgggcacccccgttcctatcaagtggtattcaaagactcaggtattaccgtcaggcttaccctagtttagtttagttttttcatcctataactccagataattgccatacaaaaaaatatattccgttgtcctagaacccttgtttagccttgcaatttcgtttcacattgctttgttgagtttgtgtccgtgtcgagtcttgttgctggtttaggtcgtatcgtaatcgtagttcaaccgctccatcgctgttatttgtttccgccgctatcccatccaccttacccagattacatgtcgagacaccacattactcgatttgccctcgctagccgccctgtgtgaattctcgccacgctagctctagattaggttgcaagccgcattgcattgcagcccctccttgtttcatcatctagcgcttacctattgcttatacctgggaggtttgtgcccctgtgctctatagccgctgctacggttcctaccaatttgtg

SEQ ID NO: 162584 - DNA, 721 bp, Zea Mays
cgtttttagtcgtcgccgacttaagccgattgctccgttagtagggtatagttgtcacccaaagtcgagtgagcgcgagcatgttgcaccgtttaaagtcatcgccgacttaagccgattgctccgttagtagggtatagtggtcaccctaagtcgagtaagcgtgttgattcctagtccaatcgaatcgaagtcaagtgatagttaacagtttgaatgcccttgaaaatgaaaactttattgatgatgtattctcccattatagagtacaatgttgccccgatagctttcgaggtcttgctaagggtaaaactttctaagatgctctatgttccatgaattccccacttccgtaccatctctttgagtaagtcgatatgatcctggccgagtgacctccgatacaatgaatggcccttcccatagtggtgacaacttatgccgtccttcccccgttagaattcggcgaaggaccaagtccccactacaaaggatcgatgtcgtatagctttatcatgatagcgcctcaaggtctgctggtatctggctgactgaattactgtgttcaatcgctcttcctccagcacatcaatatcctctagcctagtagcttctgcttcagctatgctttcgaagaccagccttggcgccccgaacttgaggtcggcgggtagcaccgcttccgaaccatagaccatgaagaacggggtatttccatgca

SEQ ID NO: 162585 - DNA, 400 bp, Zea Mays
tggccctagcatggtgggataccttcagcgcggccgtcagggacgctacctgggcagaatttgaaactgctttccgtgagcaccatataccccaggggatcgttcaactcaaggaagatgaattccgggaactaactcaaggaggaagatctatcagtgagtacgtgcacaaattcacagagttggctcgttacgcgcctgacgatgtcatcaccgaaaccaggaagatggcccgttttctgaaagggctaagaccaaaactcaagaccatccttgccagccaagatttcctcaacttctcgcacctctccaacaaagccatccaagtggaaagggcaaaagaggaagaaaaagggcacctcaagaggaaattccaggttcttcgagctcagcagcaaga

SEQ ID NO: 162586 - DNA, 825 bp, Zea Mays
agaagggtgagagcggacctggagatggctgaccacaacagagtgactcacggcggcgcggagagtggatttgggggaaattccaaattaggacgctacggtggacgattggaggcgagggctggtgctctagcttcgtaacaaccttgcagagctaacggtgcactaaatttatagcctccgggagcggtggctccaaatttgaggaaggaagctggcgggcgaagagagggggtgagtcactagcgagcgctattgtgccattcacagtgcaaggacttacggctgtcactagttatcccacacggcttgtgacgacgtggtgaaacgactgagagcatgtcataaccgagagaaacggcggcacgacggtgatggtcgcgcggccacgtcgcggcgcaagtgggtacggcgaactgagcggtaacagggtctgagctcatcccaacgccaagatcttttatcctaagtcattatccacgcgccattgggcacgaatcacagcgccgacgtggatcgcggcgcgggttcaccagcggcggggttcagtgaatctgcgatcttcttcaggttactgtacaatgggaatttcattcattgcgcttgacaaagcgatttaaagggcttggttctaaaatttttatgtagtaagtcactaatccatctgtggcaaagttgatcttctacaaactagcttgaattttgttatagcaaccagaatcaaatactctctggatcctactcgaaattgctcccaaagtctgtcccagttcacttaaccaaagttgtactcctatcatggctccacaagtttgatgtattgac

SEQ ID NO: 162587 - DNA, 986 bp, Zea Mays
ttggtaggctactaagcactgacttaatcaaagtcaggcgtcctccgatagacaagtgcttccctttccaactgccaagtctcttctcaaagcgctcttcgactttagcccagtctctatttttcagctttcggaagtggattggaataccaaggtaattgatggggaggttacccggtttacatccaaagagttctgtataaagttctaaattctcctaggcagccccaaaacaaaacacttcactcttatggaagttgatctttaggcctgaagcttgttcaaatgcaaatagaagaagcttcatattgcacgctttgtccggatcatgatccataaagagtatagtatcatctgcgtactagagaattgagagcccgccatcaacaaggtgagggatcattcccacaacctgctcatccgttttggccctactaatgaacacttgtagcatgcctgccattatattgaacaagaggggagataaaggatccccttgccggagtcctttttttgtttgaaagaaatctccgatatcgtcattaacattcaccgctacacttcctcccgaaatgaaggtcttaatccaagatatccatttggacgagaaacccttcatcctgagagtttgatataaaaaaggccacctcaccttatcataggccttctcaaagtctatcttaaggattacaccactgagttttttccgatggagttcgtgtattgtttcatgtagaattaccaccccttccaggatattatgacctttgataaaggtcgtctgcgtcgggctaacaaccttatctgctactgaacccagcctattagtggtcaccttggtgaatattttatagctcacattcagaagacagattggcctatattgttgaataatatttgcctcttggaccttaggaatgagggtgatcactccaaaattaaggctaaacagagggaggtcccccttcgataaatccttaaacatt

SEQ ID NO: 162588 - DNA, 703 bp, Zea Mays
gaaatcttctttccactggcggcaccttaactcagccgcttgtggagaccgtttcatgttgaacagttgtgtcttttcaactatccctgtagccttaactcagccgcttgtggagaccatttcatgttgaacagttgtgtcttttcaactgtccctgtagaattgaaacggcaatcgccgaacacgaagcggtgaattttgacgcctctttgctcctcgaagttcgagtaaacatcgatctagttctcgattttaatgtatttaaatggtcatcggccacatttccattcatcgcaactcagaaaaaactatggcgtctagctttacccatgtcgacatcatcgagtgattcctctgcttcttttgtctcccattcttctagtcgtgaaccaacccagagtgggatcctatagcggcatatgaaaaacaggcacctttgcactgggatgcagatggatgggactttgcagttgcatcggaatccgacggtgacctcaccgacggggacgacttccagttcctcgttgacagggagctagactccgacaccagcactgagtggtcttggacgtacgacggagaatcgtcagatgtggagtccttggacaacgatgatgacccgatgtctggacattggatgggcatggtctcctccttcgacgaagatgacgagaacaacgacagcagcagtgactacgacagc

SEQ ID NO: 162589 - DNA, 542 bp, Zea Mays
gaataacacaacaagcaacattgaaccaattgcaggagttgactataacaggaatggaggtgtgcctagcttagttagtcagggtgacaggtttggttgtgcattccaacgacctagattcgagtactgttcaacttaggtttgggtggcaatttcttcttctcaatgaaaaaccaactagttcctcctaggttggatctgagaccaatgacatttcaaaaaatgaaaccttccactctcagatacatttggctgctttcttaatacattcaaaatcatttggatgactgctgtttagggatattgcctgcagcaacaatatacaaaaagactagtaccacctttcacttttactactagtctactaaaaggtgaccagaggcagtgaaatgtgaaagtaggtccgcaagttttctccagtgaatttgacacaaccactcaaaaattgattacacttacagcagaggggtgctctaagaaaatgaaacatagctcaaacttaataacctcctttgctattaatgtctcagaattctctaatg

SEQ ID NO: 162590 - DNA, 971 bp, Zea Mays
tattgagtagtgtcctactcaatatattgaataataaacaatgagatgccttgtgttgacgagtgatgtatgtccggtgatgtatttattagtcctttatttttaggcgcaattatattctagaaattggtgagcaatacttgacacacttgtggatggtccccaatattggtgtcgagcattccaatcatggattaatgccgcaacaacttttgatccgatcctcctaggtacgaacatcatttctaggatatgattaataaaaaatgaacgagatgcatacaatatatatgaagcactagttataaccattacttatgggtgtcaccggttgctgctgtagggtctacatggtggactagagggggcgaatagtcttttctaaaacttaatcgcgttggctgaccgaaataattgcggaattaaacttaaaggtctagccacatccgagatatgaccacggcgaggtggctagaacttgcgaccacgacaccacatgcgcatggtgttactaaccatggcgaggcagcctgggccgatagcgtgatggccacagtacgaaactatgccgaaactgcaccacgacacaacgttcatgccggagtagtcatcgcaacacgcacgcagtgtcttcaggcaccctaggccggaactatgtggtgcacacgtggcttagataagcgtctgccttgttggtccccatacgcatagaggtgacccaatgcacaagcacgctagtgatgtctgtagtctgctctagagacggtgcctttgatacgatttgacttccagttccaatagtttttaatccaacaggacgcctaggagactgacaggaagtcgccgagatatgcgacacgcagccgaagcggaacgcgcggcgcacacagcaggcgcgcgagataaggaaggtccggaagaggaaggtccagaagaggaaggtccggcagggggctaagataagggaatag

SEQ ID NO: 162591 - DNA, 468 bp, Zea Mays
caacaaaccacgcagttgcaatcattagttgcaaccaatattgaacaaacgacggtggagcaacaatttttgcttgtttttttcttaccggatggaacagctgggctgcatcaggagtgaccagcaatccaggtggaattgaaggcggtggcgtcagcaacgtcttgtgatgcaagggatcacctgatccgccgcgtacacccgctcccgctgtcgcaatcggatacggcaatatcggatcagccccttcagccacaacaatctccaaggatttaggggaggagcatcaaggcgattcaaggcgcggcagcaacggtggggccatggatctagggttagaggatcggaggaagaagaaggagacggcggtggcgcggggacagggatgcgcgcggcggctgcggggggcagggaggcgcgcgaataggacatgctgaggcgtgctcggggtgtatttatatattacgc

SEQ ID NO: 162592 - DNA, 941 bp, Zea Mays
gatgaagcaacgacttcggtacttgagtcttttggcctcggcttcgtctgtagggtggtagtgtccttggaggtacagggtgatgggggccctccagtattcagtcatgatgagacttataatcctgtgccaatcggggtcccttatgacggggcttcgactatctagaagaaaatgtccgatgacatagggtctcctcttgtagcggccttcagtccacatgttggattgaaaaacccttgaattgcttctctcgacttcgcacgactaacagatacttgaggaagactggctctcgggttgtacaatctttttctatgtggtcggccatgactttggaatctgtcatgactatgcaagtcttaacgccgagtccctaagtttgcagagtctgaggatggctgcttcgtactctgctatgttattggtacatttgtctgtcttgagagcaaatcttagccgagcagcatatctgtacttggcgcctgatgggtctgtgattatcgctgttgcatcggccacacatgacaccaggcgccgtcacagtggattgtccaatgtgtttctaagtatgggtgacaaaatggtgaaggccccgtccaatctactataaagtcagcgaggacatgtgatttgattgaatttctcggctcgaagactatgtggtatccagagagttccactgcccacttgcctattctggttgtagcttttgggctattgaacaggtcgttgaggcttcggtctgtggccactcttatcttatgtgctttgaagtagtgacacagctttcgtgatgctatgagcaaagtgtaagctattttctccatttccatcatattgcatttggagctgctgaggacctctaagtctaaatatacatgctactactctagttttccatccttggccttctcctgcactaaagctgcactaactgc

SEQ ID NO: 162593 - DNA, 537 bp, Zea Mays
cagggaagtggatcagagagttgtcgtatgtggtttggagcttaagaactcaacctagccgagctttgcatggaaacactaccttcttcatggtctatggtccggaggcagtactacttgctgatctcatgtttgggggcaccaaggctgatctttgaaaacatagctgaggcagaagctactagactggaggatattgatatattggaggaagaacgattgaatacagtaattcagtcagctaggtaccagcaaaccctaaggcgctatcatgataaggccatacggcattgatccttcgcagtgggagacttggtccttcgccaaattctaacgggggaaggacgacacaaattatcgccactatgggaagggccattcatggtagcagaagtcactcggccaggatcatatcggcttactcgaatggatagcacagaaatagggaattcatggaatatagagcatctcaggaagttttacccctagctagatttcaaaagctatcggggcagcattgtattctgtaatcggaaa

SEQ ID NO: 162594 - DNA, 650 bp, Zea Mays
aaagtgacgaggtggagaaaacaatcaagggtaagataagtgtggttccgacagaagagttgaaataaaaattcattaccgaaggaagttacaaagaatcaacgagatcaccaaggatgtgcgaaataaaatgaatgctcatgaatcatcgagaaacaagggtggtcaagggcatgttaactaaaatgtcctaaacagccattgggtatgaaggtaagcatacctaaaaatatgagagtacacaagactccaaggatacgagcataccaagacaagggaatagaagaaaaaaacaaatgataacgacttaacaacaaaatagggagggatctcagaagacaagaaggtcatggacatataaactggaatgtttaaataggcaatagagtttttagaggtaagtatttgaaacaagagtattgaagaatctaggggtacaagcatgtcaatactaagggaataaagatagtcaaaaggtagcgatttaatgacggaggagagaagaatcccatcagttaaaaaggttatggtcagggggcatctacaaagatgtcgcaagcacaagagtaagatcagatctagtagattgagaaaggttagaccataatagaataaaatacttttggcaagggggcatatagaagcataac

SEQ ID NO: 162595 - DNA, 679 bp, Zea Mays
aaacaatgatgattttttaaagagatgtcatagactattggatatgagaaagatgttaaattgttgtaataatatggtatttcattcaaatgattgatgttgtaataaactttcttattacaaattacactttttgcaaaacaaattacaccctctccgcattgatttgtattcaaatggttcaatatgtggcagtattgtttcacttttgcaaaacaaattacaccatatattttctaactgtggaacaaggacaggagtacttcctcaatccacacaaacactacatatcacactataacaccactgctacagctggaccataacaataaattatcttctcacacaagaaaatggttaatgccacttccactgttctacttatagagtacaacacgaccctttcctttttggtttgatttatgcaatgctccaatatatttcttcttccaactcctctctagcttggcattacacttatttaaagtatttgcatgtaatggatgctatgtactatatacattttttactaggacacattaggtttgtggtccttagtactacagaatagcccaactacagtagaaggcatgaaggtgccaacctcattcactttcttctcatattaaatgctattcaccaattttgaccatttacaccaccatttcacatgaattgc

SEQ ID NO: 162596 - DNA, 423 bp, Zea Mays
gagagagttgatctttgaagtaggagacttcgtataccttaaggtttcaccaatgagaggaatgaaaagatttaaggttaagggaaaattatctcctcgctacattggcccattcaaaattttggaaagaaaaggagaagtagcgtatcagttggagctaccccacagtttatcagacgtgcatgacgtatttcacctgtcacaactcaaaaaatgcttaagagtaccggaggaacaattacctatggaagaactgaatgttaatgaggacttgacttattcggagtaccctatcagaattttggaaacatctcgcagaattacatggagtaaagttatcaacatgtgtaaagttcagtggagtcatcattcggaagatgtgaccacttcggaaagagaagatgaactcggagcagaattccc

SEQ ID NO: 162597 - DNA, 500 bp, Zea Mays
ggcaaagctgactatactggaggcacaggaacaccggtgtgcagaagaatatgagtcataaatgtccgatgctctgccctatctgtcaagagctgctgctaaagggtgtcctggtgatcctgaatagtctaaaaaatagatagcatccgctcggacaacaactgcttgataactgcctgacgagcctgcttagctaccaagtgagcatgttgttgggtcaatgactgaataatagctgccagggcaagatcagtcgctggaggtgtagctagaggaacagcactggaaccacctgcctcgtgatcatgtgagccaggtgccacagaaggtggtgggggtggaatctcaaggtcctcatcatctgaatccgaagaggtatcagcaaccaagggttccataccctaatcctcaaactatcgtatcgcctcatcctcaacctgacgctcgaaggccaaagaatccaaaggtgtagtacctggggcacgagcactggtgtgaga

SEQ ID NO: 162598 - DNA, 704 bp, Zea Mays
ggcagaatgcacccatgcgcgcacgcccacgcggcggttttgcaccgaagtcctcggcgatttgaaaatctagtaaggaacccgcacactatttgtttgtctcactgacctttgcgaaaaacccccctacgcttcaattccttcagaccccaaggtccacgacggagagcagcggagaacggagctccgacaaactcataccggccaagatacttaaggactggtgctctcatttggctgagacataattcaacacctatcaagcgtttcccctcaatcaatttcaccagtggagctctaaatcgtctggtccacgtagacaacgtagacaaaggaggaacagaagtgttcccggtgatctagggcaacctagctcaatcgaatggttcaaggagcatcaggaggacctaaggatgctgaaacggaagagtagagagtatgatcagacctggaacaagctagtcacggcgagggctctttcacggtggcggagaacagatttggggagaacgagaaattagagaactatggtggctaatcgaaggtgggaatggttgctctggcttcgtgataacatggtgcagtagaccaggccatcaatttataggggcgctaagcggtggccagcgaatttggtctcgcacggtggcgtacggagaaggaagaggtcactggcacaagagctgcgtgtcttttaccgtggc

SEQ ID NO: 162599 - DNA, 478 bp, Zea Mays
ggccggcctagtagagacatataaaagacgtaattctgaactgtgaaggacagaaaagaaataaaccagagtttaccacttcacgtgcgttcaccatttcggtgactgtgcggagccggtgcccaggtcacgccccggcggaatcgtcggcagccaaaggccgtgacatccaatttcccaacaaaacaaatcaagaccatcttactagaagatcagtgctaccaagaacataattaactaggtctgtgacaccaaaagatggatgcctgagcatctcttcctcccctatttggttttccttttccttctatcccttctcccaaatcatgaactcgatacagtggtaatctgcgatagtgaaatgatttagaggcagactggtatggcggcttcgagtggaggcatgctacagtacaaattgattctctatgttgggtggtgccatttggatgctccagtagtccagaagtatacatag

SEQ ID NO: 162600 - DNA, 979 bp, Zea Mays
ctcttgactcagccaccttttagactcaccttcactgttttcttcatatgaatactcttcactggagtcatgatatggactccctgggtcatctaggttcggaacttcatctaccaattctgcagggttaatgtgtccaatccctccactttgtagtcctagcttcttagccctgatattcctcttcacctcattggcatattttctgaaatcaattgcttcatcatcttcccctgaactgtcatcttcaatgggttggaagtagtctttatctaatgattcagtttcagtgtcttcctctttatcttctactggaaattcagcaaacctattatcttcaatttgcttgctgctgccaccatcttcatcttctacaatttgcttacccctgccacaatctgctgcatctcctagactgactccttgtgattctttggaaggttgctcaaccatttgaagacagacaacaacttcctcaacataaatttctgcaacaccagcatcagttatgtgactaaccattgttaggcaagatgcatcatcgactagcagtacaagaccattgctcaattctgcccctggcttcaaccaatgtaaacgcataaagttcttactgacaacatgatctgctaggtggccctgtatctctggaagagaaaccttgtccaactccacatatgacaaatcacatttgcctcctacatactcaagcttcccttgatttatcacaaatcccccactatgatggaacctaattgacaaatgatccaacctacatttcataaggaaatgttaatacacttcctaaatcatgcagaccttggactacagctacgtcgtcatccatccacccacaagatatggaccttcccccaaaaacaatctgccaactccaaaactaccagcgacatggacaagtgggtactcacctctcgctcatgatgcaaagtgatcagacgagcagcgtccgatcatgtac

SEQ ID NO: 162601 - DNA, 378 bp, Zea Mays
tttttaaacataaggcaagagctttgcaattaattgaacacacccacccctctccacaccgggaataagcatcaaacacaaaccactatgcaccaaagctttatagcagtatcccatgtagacttgtcacttgtccttgatctctatcaaaaagtctatcatggatggcacttttgcactaagttttgtgagtgcgtgagtttattgtagtgtttttgtgtgtatgggcaggctctgctttcataggggctccttacccccctctcattttctcatattcttaatataaaaatatgcagctcttcttcgtttcagaaaaaatacagttatccatgtatttgatgttatatgatacaatattctgtgggtttcttgtaa

SEQ ID NO: 162602 - DNA, 534 bp, Zea Mays
cggcagcctcggtcctggttccgcccctgatccagacaactaatttttaagggaatggatcgatagaaaaaaaaaactaaaaaggccattcatcgtgcccgcgtctttttcatgtacaaccacccaacaaacagcgcgggaaagcggggccgcaagcacaggcgcggcagtgccgtcggcccaccaaacgcaccgttggcccgaccattccgcatctcctcctaggcggaaggcagcccacggcccatattacccagagtagacgaacgaccggctcggctcgcgtattatccattgcgtcccagggttgaacacgcgcggagacctggggctggctgatgtcgacgacggacgacatttccaaaaggtccgagaagatgatgagcttgcatgctaaaggtagctagccatggacgaatctgtggtctgctgcattccatgctcatttaaccattgtactactagtaaacatactgtaacagctactactaatcatactgcattccatgttcatgccgctttcttcgtagcgtt

SEQ ID NO: 162603 - DNA, 327 bp, Zea Mays
tctctgctgcgtactcaggaggacagctccctgcggccttggtccgcacggagcatctcggccacctgcgacgatccctacaatttcttggcgactgctgcactactatcggagctcaaatcttggcaggggcaagctctggtataggagtatactagctgttggttgctgctgtcgctatggaggagtagacactacattacacacttcgctggcttgcgcgtctctatctcccaatctcccgccatgcaagctactaatgctgttgcctgctactacctctgtgtaagcttgtactgtagtaaattttaggtttcaattaatttc

SEQ ID NO: 162604 - DNA, 477 bp, Zea Mays
atgaggccgaggagtttgatgaatcctactatacctcggctcctcctcctcctcctccctatttgggtcagggacccattcctagtgaccccagaccatccggctccggtcacttccttcctcctccctacccgggtcagggacccattcctagtgacccaaggccttctagcaccggttaccaccaccatcctccttctcctcctcattagggtacgtcttctgcatctagttttccctctggtgatgagccccctcgggactcatcattcgaggaagacaaaatgcagactttctttccggactacccttcctattctccatcctatcctcctcctggagggtattgattcctatgctctctctctctctcctcgtttttggtacttgctgccaaaaggggaagaaaatctaaaatctatggatagccaagtcattttttggttctttatttctttcttgtttattgttttgttt

SEQ ID NO: 162605 - DNA, 300 bp, Zea Mays
aaacacttctacttcgtttagaatatctcaaattgtttgtgctgattataaacagttctaccttgtttagctcagtaactaccacaccatgtttgccgaaacatatcatagtaatgtctgaatgttgtgcatgaattgtctgcgtatataaatcattattgaccatttccatccctgattcatgtgctctatttcagctaaagaatataaattaattttaaggtgttggttacctgtcccctttcatatatgtcttaaatgtcgctttgcatgatttgaaactacctagctgttctaata

SEQ ID NO: 162606 - DNA, 461 bp, Zea Mays
atacccttatctgtccatggcctagtgtctatcccctattgacgtggtccagagcttacgctaagattgtagtctctaacatgctctagtactataatgactaggtcccaaccatcatcctaggcaatgggccaaatccttatggtgcctcctggcttgacctagatccatcacccctatcatatggtgcaccagctttttgtctgaattcatgctcctctcgagacttaatgtagagcagcctaaagttcagcatcataatcatcatcttgttcttcaccataatgggtttttttgcttcatttgtccattgcctctaccgaatcctttgtctcttctttccctttgtcttgtctaactcaccatcaaggaatgtatttatttcaggaggaacgaagggacaattcttgacatccttgccttgatgtgctaaatgctcctttaaacgagtagcatcgcca

SEQ ID NO: 162607 - DNA, 835 bp, Zea Mays
gtgtttgccaagtaaggcgaagtggggtgtgccgcaagtaagtgtcttggtgggaagaatatttaggagatatgtggcagtaccaagagcagcagcctagaaagtgggagggatgctggcttggaagagaagcgtgcggacgacattattgatggagcgaatgatgcgttcggccttgccattttggggggaagtgtaaggacaagacatgcgtaaaagaactccatgggtggagaaaaaatcgcgagcgttgaggttatcgaattcgcgaccattgtcacattgaacaccctggacggtgacaccaaattgtgtgcgaacataagcgaaaaaatttgtaagggtggaaaaggtgtcagacttaaggcgcaagggaaatgtccacaaatagtgggaatagtcatcaagaatggccagatagtatttatgaccagacacactagtgattggtgaagtccaaagatcacaatgtattaattgaaaatttcgagtggcatgtgatgaagaagaatggaaaggtagacgaacgtgacgtcctagctggcaggcatgacataagggggtatttttattcggggtacaagggatggcagaagactgagctagctgagtgaggactgtagatcctggatgtccaagtcgttgatgccacaatgaagaggtggtagcatgaagggaagatgttgtgctcttgagtgggtagagtgggccggagctatcacaccgaaggatcacgcgccgagtgggaagatccttcacagagcagccaagagggtcaaattccacagaatagttattgtcagtggtgaattggcgaacagaaattaaatcttta

SEQ ID NO: 162608 - DNA, 544 bp, Zea Mays
atccagtgtctgtacaccttcgcgaggcgcaccacgggctcgagcgacgggtggtccggcggtgtgcaccttcttgcgaggcctcttctcccagcgcttgtcaggttgctggttcatgtcgcgtcgtggcacgggtggtgtaggtttcgtacctccgatgaggtcctggtcccgctcatctgcggtgatgcctctcgaaacagttgttcggaggtggtgggcgctttctgtagtatggctcggatgaaggccgagtcattggatccccggtagaaatcttcaatcaccgctgccttggcgactttggggatgcggttcctcatggtctgaaacctcttgaggtatgaccggagtgtttcatcgttctggcgcctgatggatttgaggtcccatggctacgtcggcttgtcagagagagactggaagttggcgatgaaacatcgactgaagtcactccaatcgtcgatgcagtgtcgtggctgatgtcggagccactgtagtgcgtcttgccgtaggacgatgggcaaatacgctatcattacat

SEQ ID NO: 162609 - DNA, 821 bp, Zea Mays
gtgatgtctgtgtctgctacagctgctaagggcaaccgataggtgagctcattaagctttcacaacattattttaaggcagtttacatcctggcgaggatgcttcgtgatttcggcggactagcaagggtcctcttccgtgaggtgagtccctgcccttttcttttcttgtgctgttcttagatgcttgtgtgcccatgttccggtgcctatccattaacctgatgttctgtattatttgctttgttgtttcgtgttttccagtttagttgctatgaggcttgtgtgcggctatagaatattctagatggaaatagcagcggtgtgattggaagaacagacatttggcttgcacgattatcaaatgccactatagaatatttgtaggtcgagataatacagatgtgaccggtaaaacaggcaggcatttaacttgcaagatcatatgatggcttaggaattcatgtgctgcactgctgcatttgttgatggcatagtcgaagctttaagctggacctgctggcctgcctcatgcttgtgtgggcatggctcagcctggtgtctgccctttgagctcatgacgattgtctaatttctattgtttggcaacagaacaagtttggtggcctcccaggccaaggtgtctggttcctgtttcatgctggcccttctggttcggtaacctttgtctttctggctcctaccctgttcttatgcagtcctgcttgtgcttctgtgtaaccttcctggtcttatatgccccttaaattacaatggttgctcttttaaacagcttctttcatttttccacataaagcgcag

SEQ ID NO: 162610 - DNA, 432 bp, Zea Mays
ctttcccgttcgcggtgccatgtatggaaagtcggccatatccttgattccttggatgatcggtgatttggagcctgattctccctgatttctcccttataagagccgcccgagctcccgctgtcgatcccatgctccatcactccctcccatgccctcctgccctttgtccacgctcgtcatcgtagtcgcgtcgcccatgacgtgtggccaggcacctctgatggtcctccatccacgctgaggccgtcgttgtgaccccaagagccttttgttgcttcctcgagctctccaaacctcagtctagccccgtcgcagtactctgccctcgtcggcgcttagcatgccaccattctttgtcaccatccatcctcaccgcctcaatcccctcggtaaggcttcggtcatgcccgccgttaccctagcttcctc

SEQ ID NO: 162611 - DNA, 518 bp, Zea Mays
gatggcgacaaaaattaggccctatctaatctattatgatttaaccttgtgggtgattcttaatgctggtacaaaggataaaaccatactcctaagcctaaattagtgccatagatcaactcagccatacactcccaataagttacataatccatctatgtaaacctattaaaaaaaagtcatatccacagaccctagctatcttaactacagctccctagctcagatggagataccaagattggagaccgaagatgatcaacctcatcaagaaaggataagcaccaactcaagtcttcaaggatcaagcgggatcaccaagatgagtcaagatccacaatctaggatggagtccttccttaccctacccaaacctatccatgctttggatacatcttttatcctacataacaaagtagctatatatatacccatgctttcctaatcacatgataatttgtgatattaaaaaaaaacaaatcttttggtattaaaaccaactagaaactaaagcatag

SEQ ID NO: 162612 - DNA, 645 bp, Zea Mays
cttatacaatcaggtttcctttgtagtttagtagttaaagtgcaatcagaactttttttagaagtgcaataagaacagaacattatgtgcggacaggaaggactatataggcgttgtttatatagatctccaaaaccagtgagacaatgttacggagaagatcttctagtacacatataattcaatctaacgaaaaatcatggcttgacaatgccatgttctatatagtctttcgaataaaaaccgagtaatgtggatcaatccatgattagctctacttgtcgtctcatattccctttaggaccgtgccctaagttttgaggctaaacctgcaaaaccgatatcggacagtttaaggctccatcaccaaacagtttaaggctcgaccaccaaacagttgcaggttgtgtacaacgtacgcacccatctaccctgcacacatgttccctcaatccttaaccacgtcaatgacgcgattcgtattgttatgtctttacgcctatcagtgccctcaggtgttagtcaccgtatctagtcactcgacttctctagtccctcgatcaagtctcagactcctggtgtttatccttcatcgttcccatacgatcccacttgacctccatctttgatgtcgaccatcacctc

SEQ ID NO: 162613 - DNA, 536 bp, Zea Mays
atgttagaatgtgttcttggcgctaaaaactataacgttttctttctgttgttagaattcaacagttgtcatgaatgattgtagaagtaagtgcagtgcgctggttttggaatctttttctaatttacgctagttgatcagctggtaaggcatagagatcgccttgcgagcatgttacactaagttgagtaagcgtgaacatgttgcaccatcttaagtcattgccgacttaagccgattgctccgttagtagggtatagtggtcaccctaagttgagtaagcgtgagcatgttgcaccgtcttaagtcattgctgacttaagccgattgctccgttagtagggcatagtggtcaccctaagtcgagtaagtgtgagcatgttgcactgtcttaagtcattgctgacttaagccgattgctctgttagtagggtatagtggtcaccctaagtcgagtaagcatgagcatgttgcaccgtcttaagtcattgccgacttaagccgattgctccgttagtagggtatagtggtcaccc

SEQ ID NO: 162614 - DNA, 613 bp, Zea Mays
attttatgctatcagctctaactatcatggcttgtcaggctattgtttggacaaaattggtttatgcatgagtcatgatgcccaaaaatgttgagtcaatttatgttgtgcctgtcatatttgtcgttagggaatatttagatgcttgtgtttttctattgctgatttgtatgctcatagcttagagctacctgacactacttgattccagctagcaagcatgcttattcaaagcttggttagaaactcttgctctatgcttgtatgtgaatcagaactgttaaaatgaaggattgaacatccactaataagatgttgtgctttattcaaagcttggttagaaactcttgctctatgcttgtattcatgtttgcacgctttgagagcagatgtttactctcatcgacatctgggtttccctgtttagtattgtctctgatgtgttccagtgtactgaatctccagaccttattttcttagcggtataatcactttcaatattggcaaaacatatatttttgtcatgtaaattctcgactactcatttggtttgaatctttgcttctgaactacatctgctggtcaatgagttctttactttctttagtactct

SEQ ID NO: 162615 - DNA, 499 bp, Zea Mays
actggaatgaatcaatttggagctaaattcatcaagttatgaatttcctaagtttgggacattattttgcattaaaagattttctgtatttaatttattagatttctgagttacttggactgcggccactatttaacagaaacccagggggttctacgcaaaagacaccaagactcagaactcccatagtgtggactgcgggttaattgtggaaaacagcgaggacatatactgcaaaaataccacgcagattcaacgtgctcggttctgggccatccattttaggatctagggcccagattagatggactaccccagcgaaccggtacgtgatgtgagtcgttggatcttcatcacgcggctacttttaatcggagcgaagggggatgcagtgatcaaaatcccacgcgtcggattcaaattgggcgaacgacatcatccaaggccgaaccgcaacatgagatttaatcccagccattcacatccgaacgaatggcca

SEQ ID NO: 162616 - DNA, 352 bp, Zea Mays
cttgatgggatcccgctgtagcatctacattgaccacaaaagtatcaagtatatattcacccaagcggacctcaacattagatagaggagatggttataactgatcaaagattataacctggaagtgcactatcacccgggaaaagaaaacgtggtagccgatgctctaagtcgcaaatctcaatgcaactgcttaactatggattctcgcatcaccaccttgtgcgatgaaatgagcaaattgagcatggaaatgatttctccggggactctaaatcatatctcaatcaaaccaaccttgcaagatcagatcatcctggcacaacttggggacaagggagttcaaatcatc

SEQ ID NO: 162617 - DNA, 990 bp, Zea Mays
tgcatattgaataatcgggaaatcctgttcaccaatatccggtaaagggagcttgagaagattccgcatcctagctttattgatgatgctctaaagaaggtcaactgccaggacaaacaacaggggcgaaagaggatcgccctgcctaacacctctcctgcaatgaaagggcttaccaggaactccattaagtaacaccgaagacgtgccagagtgaagaatgctccgaatccagttgatccacttagggctgaaacctttgtggatcagaacctggataatcaactcatgctcaaccatgtcaaaggctttctcgaaatccagcttgagcacaatgatctctttttttgaggagtgacaaaggtgaatgtattccaaggcccaggccaagcagtcttgaatggacctccccttgatgaaaccatactgattcttgtgaattaacctgggcatgaacggttgcagacggtttgccaacagcttcgttaagattttcatactattgtttagaagagaaattggcctgtaatcccccaccttcttaggactctctatcttcggaatcaaaacaatgaaggacccgttaatacttctgaggcagacctgaccatgataaaatttatcacacagatcatagaaatcgggggcaatgacatgccagcacttcttgatgaaatttgtattgaaaccatctgggcccggggatttatctgaaggtaagagttttatgatgctatcaatttccagtttagaaaacggagaatctagcccctgaagatgctcattgctggttaaaagttctgaaagatcaaacccgatgtctgaaaagtcggacgagcctagtctgcacttgaaagcctcccagagaagatcagacttatgttcatgctcaaggaacgtgatcccattgtcatcagtcaaagtagggattgaatttttcctgtgcttaatggtggcatgggcgtggaagaagcgagagcaaatgtctcc

SEQ ID NO: 162618 - DNA, 699 bp, Zea Mays
gtttattaaaaaggttaaacataaatgattaaatggaaaactactttgcaacagggtccctggcgggtgttttaagttttccttacagactagtccctgagctactattcaattgagtcactgacatctcagaaaaccccctggattcttctaatcctaacccgaggtccttcccccaaattaaacagtactcgcggcggaagaaagggcggaggggcttaccggcagcgagattgctccggtgaggtggccgagggtgtaggggaggtcctgagggtcacggcgatgtgcgggtcgccgtcggggatggtcggagttggctggtccgcgtgcgaaggcgggggagctcgtcggcggcgagacgtccggcttatccagggcacaattgaccaatcaaacgggtcagagagcttcaccagggatcaaggaaggggtgtgcgcgaggaattgaagaatggctcaccggagtgcccagtccacgtgcgggggcgggcgaccgaagtccggcgagggtgatctcgggcttccggtgaagttctgccaggtccgagggcttggaaagcttcacgggccaatagcggagctaaccgaagcgctggcgcgacttagacgcgactggagagagctggccacgttggccgaggctctgaaagcttggcgggcagtggcgcggcgtgctcggggcgatttccggtgatc

SEQ ID NO: 162619 - DNA, 351 bp, Zea Mays
atttgattgaagtgtagttgcaaacagtaatttgtgggagaccaaacagcggccagcgccagatccggccagcgccacttgttccgtacctcgacggtgacgatggagaagacagggagcacgccagagctcggccgaacatggacactaccaccgcgtcgaggaagcgagcttcaccgccatcgccttcggacgagatccgtttcggacctttggcggcaacagaacgacgatgatggagaagacggggagcacgccggagctcggccgaacatggacagtaccaccgcgtcgaggaagcgagcttcgccgccgtcgcctttggccgagatccattttctgacctttggc

SEQ ID NO: 162620 - DNA, 490 bp, Zea Mays
cattaaccgattcgtccttcccctgtcgaagggccactaggtctaccagatctaattcatagtcaccggagaaaaagtgatcatggaatttttgttctaaatcccccatgataaaatagaattaggaagtaaagtgacgtaccatgcaaacgcggttcctgttaaagacaatgaaactaaacgtacgcgaaatgcttctgtgtcggccaattctcctaattgtgctaaaaactggcctatgtgttcgcgcgtgttttttccttggtcacccgaaaattttgtgaattcaggtatcctggttccctgtgggtatgggtggtgatcaaatcggctgtcataaggtttccgatatgattgcccccagggaccatgcttactctgagcttatctcagaacgccccagctatttcctctctcactatgtcaatggcagccggtgcgagaccaccgggtctttggtcaaacataagtggggttggctggatattag

SEQ ID NO: 162621 - DNA, 591 bp, Zea Mays
gtgctgcagcgatggccgtcgtgggctccttgccacgcagagagggagtgcttcgatgccgctgacaccgctatcgccatgcgctgggttacaggtgtaccggaggcgcatgctgcggctgggtcaacgcactgcgcaatcaagggtaatgaccttatcctcgtattcctcatcttatttgctctgtgtggctatgtcgaattggggagggatcaccagagcaggtggattgggatcgcctgggagggcgccactgtcgaagcaagcgccgccgtggtcagctcggtagaggaagaagagccgataaccgttggatgggaaaaggacgtctaggattagatctggtatgtgttggtcctcgaccgtcgatcttacagcgaacgactgcgattggaaccagccattccagcgctgacgtgggtcggtagccattgatctcgcgatccacggctcgggtgtgaagacaggttttaatctaatcccgaccctcaatactcgatcggatggccgaagtcttttcataccccttcgcgctggcacttttgttaaagagcccctctggatgtaggaaatgaacccgcagtcctgcgc

SEQ ID NO: 162622 - DNA, 936 bp, Zea Mays
cgaagtcttttatttaaaagacactccgtgcaaaagtcacctaagggtgcagccggaatagcacaacaagtgcgttaatcgaagtcttttatttaaaagacactccgtgcaaaagtcacctaagggtgcagccagaataacacaacaagtgcgtcaatcgaagtcttttatttaaaagacactccgtgcaaaagtcacctaagggtgcagtcggaatagcacaagcacgataatccaagtcttttattcaaaagacactccacgcaaaagtcgcctaagggtgcagccggaatagcgttaatcgaggtctctctttaaaaagatactccgcacaaagtcgcccacgggcgcagccggaccaacacaggcgtacgaatacggccaacaggccacatcaccatacaaattacaattacatacacacggcgagggcatcacacattacatcggctcgaccttagggataatacccatctccctgtaattaaacatcattatcctcagctcctctccctcaaaaagcttccgcagatccccctcgcctatgcccgccccaaccggcgaagacaacaattctcgttttccaacccggtctactcggagacggccacgctccatccccatacgacggcgcctgccacttcgcgaaaattcacccacactatgttttcccaccacccttcgccgcctacacccagtactcgcaccaggaacatccccagcaccctccacacatggtgaagtctccgccgcagctacatccaacgcaacataataatccaagccttcattcgaggactcctccatccatggaaacgagctctcagattcaccatcagactcaaaacattcagacacagaaccaaacaaactatcatcggtaggcactacggttgaagtctccgccgcaaaatcagtattgccagtagcggttgc

SEQ ID NO: 162623 - DNA, 729 bp, Zea Mays
ctaaagtctagcttggtgcccatagattgctgaaggatcaaccaaaattttgaggtgaattgtgttcccctgcctgacattattcttcgcggaataccatgaagtctaactatttctttgagatatatccgggcgagggtggttcctccaaaggtagtctttacgggaatgaagtgagctaccttggtaagatggtcaattataacccagatagaatcgttccccttttgggtttggggccgtctgattacgaagtccatgcctatttcttcccacttccatttgggcattggaaggggttgcagtaggcctgcgggcctctgatgttatgccttagttcaatgacaagtatcacaccgggccacatactgagctatatcctttttcattcctctccaccagtatctggctttaaggtctaggtacatcttggtagatcctgggtggatagaataggttgagttgtgggcttcgtctagcaagatttctcatgcctctcttttcggtacacatagacggtttctgaaccaaagggctcccttttcatctgtcctgagatccggaagttgtccttgctagccttttctgcaagtcctgccatctcggcgtccaaccgctgagccttgtgaatgaggtcttccagcattgatttaacttctatactgtcattttctcccaaacaagcattcagttgtgccgattctttcttccagtcttctaggaagtttg

SEQ ID NO: 162624 - DNA, 1011 bp, Zea Mays
aggttacatatgaaacgtgttagcccaagcaagaaaacaaagctgagtaagtgatctcatatcatcttagttcataatagacaacaaaaaggcaacatctctaactagatgtctaacttgtgatttgttaatgaaacttgtcatgaagattaaagtacgttgtgtgcgtagataattattgaaccaacaaagatcatcatcaacaagtagcatagttaatacattgctacaacggtgtaccaacctacctgaattgtaaattctatattaagcgcaagcacaacctgtcaacatcgtatcacattgcaagaccactttgaatcattgctaggtccaatgaactcttgacttcattttttattactaggttcagctgaacattataaaaaataccacgaatgaaatctaatgtcctttttgatttactgtttttcctacattgtgggaaaaattatagcttcataccatggttgatcgtacttttgcccaccataatatcaatgtcgtcgttgctctgctcttttctggtataatgaaagaataaaatcaacaaatggatcccgagctgtcatctacaacaattgttgtaaaggcggcaaagtctacctacctccttataggcctaggcttgaacccttattatcactggcacgatttgatggtgattcatcatctaagaggttggtgcaaattataaggcaatataactgttcatttacatttacatacacgtgtggccatattgatagaacaaccaatgatggtcgcggtccaccaatcttcaaaacgaatatgatcattattaacaccatataaaaagcctctaattttttgagctttatgtatatgatactacacatgaagttagcaatgggacacgctcgatttctcatgatgatgcttctgatatctccattcaaccaggaaatgttcatgaattattgaaaatattggatggaattatattatgttgtcttttttgcatgatgatgcttctgatatcttaggttt

SEQ ID NO: 162625 - DNA, 631 bp, Zea Mays
ccaccctccaggcaggactttgagtgaacaagcaggagatttattatttgttctgattctgggcgcaggatcaagatgtggcccgcaccggcctcgtccactacctgagtttctgacatatcatcacatcacaccgactcaccgagggcgaggaggcaaggactgatgacctctgaagctgctgcatttcacccatctttctgccatccttggttggttgcagtccttcctccaccaaaagtcactgcagttatggcgctgcggctcactgtcccttcttcaattcactcatcatgcatgtatgaggtcctttctcagttttgtgttccagtcatgtggcgaaagcctgtgtgcatcttcttgatttccgccgaaccctaggtggtgttagatgctgctgcaaaccttgaatgctgcccaactgtaagcaataaaagggattgccatactagacggcttgcaagtgtacagtccgcgcctgtgtccggcgttccccccagacatgagggctatcttgaattcagtgggggcacccgttcggttgtgtttcttcagaaaagtatctttcagttctgttggccttctataagttctaataagtggcacttcacttcggatctgactatttatt

SEQ ID NO: 162626 - DNA, 471 bp, Zea Mays
atatgtgatgggcgttaaaaaatcctatgaatttatggttgacttgctgcttatagttagcacggatgcagcctcgccgcctcttgaacgatcatatgtcgagttgcttaaaggtgcttatgttccacctgcctagattattttatctacgtattcctaaagtaatccatgcatcctggacccatctttgcatgtagagacctacaaagttcactcatactatggtggcccatcagacgagtgcccacattgtggcgccgttttctggtttcaggaacgggtcaaaagcgtgtctgctgttgcgcagcgtaggcttgtgtacaatctttgttgcagaggaggtaagattgttctggagccttacaaatgtccaccgtctcccttatgtgacctactgcgattcgatggtgataatcgtgccagaaggttccttaggcaaatccgctcatacaattcccttttcgcgtttac

SEQ ID NO: 162627 - DNA, 425 bp, Zea Mays
gttggatgtaggttggggttttttgcaattagcgggcttaacttggctatccaaaatattagccaccccctcgataaccaaagatggacaacgctagtcaaggatagataacgtcataacgagattgactcttagagtgtgcacaagatacagaaacattataataaagtgggaatatatagagatcatttttttatttaaataagtctcaaaatggtggtttaaagaatgagttttaaaatgatcctaggagatgctcaatatatggtttatttctagactccgatcctgttgagaaagaaaaaagcagccgagactcgacagctctatagaggagggagacaagtaaatgctatcgcatccaatcgaggaacatcacagccttgaccgacggctccagatgtcccctcccaccacaagatgat

SEQ ID NO: 162628 - DNA, 625 bp, Zea Mays
cctacatgcatgctccaattaacttattgggttgctggtgatgcccccaattaactcgcgcgacctccgaaaagggcacgtacgtacgccactacaacaacttgggttgctggtgatgccccatgcaacgtggtcgacatgtttcactccggccgggtctctttggcaaaaggtgcgcttcgactttactactacgtactgtatcagtaccggccgtagcaaaagccggtaaaacccttggatcctggcttcttcacccgtgtcgatctcaagcggccgacttcattgtgcatttctgcccacgtgcgacgtagagctgagaacgggccgggtaccagtaccagcagcggcgaagcacggagagcaatgccaataactgagtgatggtggtgctgttaatttggcacatttcggtgcatgcatacacatgcgccttatctgtttttgtagcattgttcaccaaactagtaagtatactactactagtctctagctgctgctgcgtgattgtgattttggaaacatatatatggacgtccgtccttgcttgtttggccgcaggaaattcgtataattaattaacttttagcggttaaaatcaacaataacatctagtatatcatct

SEQ ID NO: 162629 - DNA, 1325 bp, Zea Mays
ttgatggctgagggtgggagggaagatatgtagacctagctagatatcatgatagaaatagaatccctaaccctaaccaaggttgggagtggtattaatatttgagttagatggaccaaggactcatacaacaaggggccaaaatagaacccctacacaacacacacaatacatttcaacaattatcaacatcaacttcttgtacaaactagcattgatatagtctggaaaaatggcgttgggcaagccggcctatcccattttttatcctcgtaggtcgcccgttgccaagcctagactgcacgctagagcaaggaacacaaaggctgaggtcgcagtagctgtcaatggaaaagcttgaggtcacagtggcctttgctagggaaataacgcacgcgtggacccaacctcctttgccatagatatgctcaccactatggatctaacgagaaaactaatcattggagggcgcgaagctttacaaagccaccggagagggcgaggagagaggaggtgaaaggaatccagagatgaggggatgggagacggggcgaatttagtggttggtccatatggaccatgacacttcataagaatacaagagagcagttagcgtagtggtctaaatgatgtgttttaaactaaccggttaccgttcatagtttaaatcttgatttatttcttttccaaaaaatttcccgccacattctagacatgggttcaccacttatgggagagaggtgtagtcaggataatcagagaaagagagggaaggcgagagtgggaacataggctaggattttctgattatatagtcctaggttgttcgggggttaagatgaaatatgctttttacacagacgatagcaatacaaatatttttattttaaaaatacatttacatagtttaactatttaacttactatatgttaaatactcttccttatattgtacgtgctttcgctaacaataaatacaagggtttaagagaagggaaatgataagagatgtagagtaagaattgatcgatatgtacaatgcaataaagaacaagaaagaagatcactgttaatctatgaaccgtggtatgtttgataaactctaaaatcatcgcatgctcacaaaaatatgtccactttgtcccccctccctgaaaacagaacaaggtagtagtcacttgtttaaattaataggcatttataatggcatgcataaacggattgtttaaaatttaattggaattgatatgtcatccagaagcactctagttaaggaagaggctattgaaatggattagagaaattcaataaactggatatggcat

SEQ ID NO: 162630 - DNA, 1196 bp, Zea Mays
caacaaccctgaatttacatgctgactttttcttgattgtgcactcccaacttgaaaatttaaactctataaaaaaatctaattcaaatagaaagtaaaatagaaagaaaataaaaaagagaaaacctagtgctgggccgatttccttccccgtggcccatctactccttatcccctttccactcgcacggcccacttccaatttgcctcgccctgcagccgtactctcacacgtcgcacacccatatgtctctgagtcatgggcccaggttgtcatccccaagttcgcacgtgcccttgtcactgcctcgcgggccccgttgctcaagatcggcatccacctcgtgctgatgctcgcgggcagataaaagactccgctgaaagcgcgccaccgacgtaacaaccctcccgaccactgtgcacctctcggggtataaagatgaggtcgtgcaccccccatcatccatggagcgcagaggatatcagagcgagaagagaagagaagctccaccgcccggaagagaagatggtcaccgcctgggaactgcacctgtgacgctgtgtccgggattgggccagcaatcttcgcaggggcacctggatggtatggacacacacattagacgagattagtgatgttgtcatcgggtagtgctcaacggacttgttcacctccaccgtgccaccatcctctgtggtctgcaagcgttggcatcccaattcttgataaggtaccccccatggagattgtcttactccctaattcatgtagagcacttcggacgagagtttggcgctcggttgtgcgggtagattaacctcggcaatggtgtgccgccgtcgtgccctgttcccggccgcgagttcgaccggaggtagaagacgccctctgcgccgtttatctcgtggtggatggctgtaactggatccatggttgggacatcctcagccgttgatgtgtggatgggcgaaccggatcagagctcgcataccgcttcggcgggatttaatctggggcgttggcgctcgatcggacgaccgggatttctcaataccccttcggcctggccatctttcaaaagaacccctgccgatttagaaattaaacccgccgtccggggctgtgggaagaatattgcggataggtcccagaatttttaatttgaaccctgatcttcctggaaattgtgtcccca

SEQ ID NO: 162631 - DNA, 544 bp, Zea Mays
ccggtggatttatgcaacgaccggtgctcccgagcggcgtacaccgaattaaaccctccccgaacgattcccctaacttaatttcacgattggtaagctatcaagctctatccacgtgaaccgcgaacgatgaggacaatggtacgcgttcccggtgatccctggcggtccggttcaattaaaggggtcgaggggtttgcggggtacctaaggatgctagaacaagcagcagagggacttgagctaacctgaatcttgctggccacgacgagctgatcttcacggcggtggagatcagtttggggagaatttgaaattcgcgagcgctggtgaatgatcgagggtgcgagcaggtgctatggcttcgggatgatctagcgcagttgcccaggccatcaatttatagcgctcgcaagcggtggctggtgagtcgagcgagacgcgcggcggccgggaaggaaaaaggcactggcgcaagcgctaggtggcttctaccgtggcggtctctccggcgatcaccggacgcccctagcgtgactatctg

SEQ ID NO: 162632 - DNA, 571 bp, Zea Mays
ttattaataactacaccaagttgcaggggatacccacaccttggtgacaaagatccaacttcattacaatcatcacgacaagaatcccaaaatatgataagcaaactaactctaactaaaactgactaagactaagatactgaattaagcattattacagactctgactctgtcgatctatggattcaaatctatctgggtcctgcagtcaagggtatcataatcgaagcgaccatggggcggcgaacgataagggtgctgaatcccgacaggggcgggagaaccaccatccaaatagtggcatgctgcgcactcagcatgcaattccgcaacctccacctgaaccttgcccaactcgtcaagggcgtggtctagctcggtgttgagcatggtgcccaggttgaccatgttgttcaacctgggatttccctcaccaacggatgagacaatcacacctccagcacggtcggtcgaacgacaagagtagtacttcaggtcgaggccgtcagctaccccgctgaacaatgagcaatactgagaaagtgcacgtcgtacttcatcctgcatggct

SEQ ID NO: 162633 - DNA, 417 bp, Zea Mays
ctcagctcacgctgctccgtgggctgcctatgggaccaggatgtaagaagctccctctttgctggtgttggtcaatccaatctactgggcgcggagactccccaaccgattcccatccaaccttccgtgatcttctccaacgatctccggaggtggttgcgggagctggggaaaactgggtcagaatcctgtcgcgctcgggcctataaatccatggtcgtgaccccttgaaaccaaaccagatcaccatggtgagcatcgaagaactgaggatgtgccaccatcgtcatgctccaggctgtggggtgctcgacattctctggggagggctgagtgcttcgacgccttcctggggtgttccctgggacacacggtcggggtccgcgacgtcacggtggcaggtttgcagaacctcac

SEQ ID NO: 162634 - DNA, 702 bp, Zea Mays
cgggggcgggtgcgtgggcgcggaatgcgtgcggccgataggtggggccaaagggtcagttgctcaggcgggtagcaaggcgcgcgacgggatacatgtgggtgtgggtgcgtcctgacgagcagggtagacttgtcagcgacccgagaggaggggagaagggtttggcgtggagaagcttacagtgggccccagtgtcggggtcgccgtctacctcccgtccgtgcatggcgtgcgtgtcgttgccagggtcggcggtgcacgtgggaaggggggacgttgggtggtggtggctggctagaggaccacggtacgatggcggaacgcagtcgttggccctcaccggtgagcgagcaacggagatgagggaataggggggagagagaaaaagaaggaacgaccaatggttttacctcgaggtgagctcaaacggggcgaggcttggatggcggtggcggacctcgggcaagaacggcggggtcggctcgtcgtgggggctccagtgagtgggtggctcggcgggtgcggcatcggtgagctcggagcgacgactagctacgtgggcgagagaagtgaggcgggggaaaggggcgacgtgcataggggttcaaaatgggtcgaggtggcagcagtttcgtgaggagggcgctgcgtgggccaccttcctcggtgtgtgcacgcgcagggcaggggaggtggtta

SEQ ID NO: 162635 - DNA, 561 bp, Zea Mays
agcagggaagctactcgggttcatcgttagtcaccgaggaatcgaggccaaccaggagaaaattaaagccatcttaaggatggaaccaccacgattgcagaagaaggtccaaaagcttactaactgcatggtagcgctatgtcgcttcatctcacggcttggcaagagaggcatgccattctacaaattgctcaagaaggtggatagattccagtggactctcgaggctcaagaagcattagaagcactaaaaaattcctgactgtgccaccgtcctgaaaccacccaaccgagctagcctaccgaccagctgaagatttgttgctatacatctcgtgcacgacacacgttgtaagcaccgcattagtagtcgagcggatagaataagggcacgcacatctagtccagcactctgtatacttcatcagtgaagtcctcgggccctccaagatcagataccctcaagtgtagaagttgctatacgtagtactcctcaccgcgcaaaagttgtgccactatttcgatgatcacaaagtcatagtggttacaggcttctcgata

SEQ ID NO: 162636 - DNA, 543 bp, Zea Mays
tggctgcaacggaaaatggccacctgtctagatctcacttttagcagggccgtgtgcacaacaatctcggtggaggcaaagaactcgaggcattggaagacaaaaaggtttggacgtgaagggggtgagggatcctctcagggatttgaaaagcgatcaaggctagtgatccatccctttaacccaaatcgccctttttctcgcccatccccccatccttttaagtagtcggtcttcatctatccaactgttgcccgtactcaaatcattcagccgggtgcccctggtactcatttcctagctctacctagttcatctaacagctgctttaaacgtggaaagtctagacagttcatcaaagattgtccttacccgaagcaaaacaactcaaacttccaaaagacttcttgaaatacttctcaaggcaggggaaatgtggcaagcaatcaggcaggcaaaggggaaaagagaactagatgagtttactatactcaagtggctactacactcgaaggagagcctgtgatgatgggtacattttcc

SEQ ID NO: 162637 - DNA, 475 bp, Zea Mays
ccaatgtctgagagaacaccgcctttatgccaaattgtcaaagtgtgatttctggctgaaggagattaaattcttgggccacactatctctcaagatggcatagcagttgattcagataaggtgcaagaggtgatgaattggaagccacccacaactatctaccagattcgaagttttctaggattggccgggtattatcgacgatttattccagatttctcccgaattgggaagcccatgacagaattgttgaagaagggagcaaaatttgaatggggtcagaaatgcgaagatgcttttcgcaccttgaggcaacatctgaccacaacacctatgttagcacagccctacagcattaagccgtttaatgtgtattgtgatgcctctggcactggactgggttgtgttttaatgcaagacaaccgagtcattatctatgcattaagagcacttagacctcatgagcaaaattac

SEQ ID NO: 162638 - DNA, 541 bp, Zea Mays
tcgagaagcatcaagagcacacaggaatgctaaaacaagagcgaggagggcatgatcgaacctgtggagagctggccacggcgagctcacacattgcggtgttcttgacagatttgggggaaatcccaaattagagctctctagtggacaatccgagacacaagtgggtgcactggatgcgtgactacctagcatgcttaatttatagggcccgagggcgatggctcttgaatttggaatggcgcgctggcggccggagagaggggagagcattggagcaaaggattcgtggctttcaccgtggcaagttcaccggcgatgaccggacacgctttagtggtttactacgacgtggtaacgtcctaaggcacgtggtgcacgatcgataggtggccaactccggcgaggacccttttgcccgaccgcaacccatgtgggtacagcgagctcaccgtcaaccgggtccgagcctatccggtgccaagatttttaccctaccgtgattatctcctcgccaaagagcacgaatcgtggtgatggc

SEQ ID NO: 162639 - DNA, 1775 bp, Zea Mays
accctcaagaggctgttagtatgtgcatacatggcatgcaacaacattggtcgctcgaggtgtctcgacgcgaacctagagatttcagctccctcagttcggcagtggccgcaacaaagctggagtttgagaagtctcctcaaattatggagctttataagaatgtcggcctcctagacaacacaaagaggttcaatgctacaatgaagcctaacaataataataacaaactgaaaatggctgagacaaatacaacaagggttggttcgtcagtgccgcaaggcaatgtacctattctaggtgctagaaatgaagttccaggaggccggcaacgtccttcaatgcaagaattactcaagaagcaatatgtgttcaagcggtcaatgattaaaggttttttcaatcaggtgttggaacatgatcacattaaattgccagaccctaagagacctgatcaagtcgggatgacaaacaaccctctctattgtccataccatcgttatgttggacacattattgaggattgtgtggcttttaaagagtggctccagcgagcaattgatgagaagaggttgggactccaacctgacgctataaatctagattatcatgccgctaatatggtgagcattagatcaccatcaaagagttctatgggaaaggaagattgggttccgttgacacagctagaacatgagtttgctagcgtgcaacttactcaagacgttccaaaggttgacactaaccaatggcatgtcatgatgcatcatatacctccatcaagagggtatcaacatcatgaagcaagattagttccaccctactttaagcatgtcgtgtcacataggcaacatgacccaagtcatcgtcgtctaccacaaaggtttgtgccactgtctgagggggatgagcaattcccgcgacttgcccgaaggtcaccaactctagcacaattcatgcccaaaagctgggggcaggcatcccactccacagtgcaagaaagagaacctacaagagaagagtgcaacgtgagcctccaacatagcgacaacacaggtagtagctctgatgaagggttaaccattcatgaacaagagatatttcaagctgaggcttcttcaacaagtgctaataaactagaagtagatatgaatctacgaagtggcaaagtcttgccagaactccaaaatctgcgcaagaagtccaaagaaaaagatgtttgcctgaaggaaaacttaccacaagttgatacaaggaatgcaccaatgaatgatggagatgctgcgctcaaggttgattataatgtggttgcacacctcaagcgtataccagcactgttaagtgtgtatgatgccctcttactggttcctgagcttcgccaagcacttattgaggcattgcaaaaaccagaagtttatgaaatagacatggcaaagcacaacctattatgtaactcgatagaagccaaccaacttacattttctgaagaggataaagtactagaatacgatgatcacaatcgcccgctatacatagaaggaaacattgcttcagcacatctgcggcgtgtacttattgaccctggctctgcagtgaatatcttgccggtccgtagcctaacccgggctggatacactttggatgaccttgaccccactgaagtggtgatttgtggattcaacaatcaagggacttctgcccttggcgccatcactgtgaaagtgcaaatgtcttcattcagcttcaaggcacggttctttgtcattgattcaaat

SEQ ID NO: 162640 - DNA, 417 bp, Zea Mays
tccctagatatggtaacaccaatacccattatccttgatgataacaccaaacttgaccgatataacaggttacataacttatccaaccaatctagaagcaaaataacaagacagactctgcttaaacttatttaactcataaccacctattaacctattttgtttacctaagaatctaccttcactacatgtcccaaattcggataacaacttcaagaacgaagattgaagaagatcgacctcatcaaatcaaggaaggataagattcaagctagatcttcaaaggaatcaagatccataatcttggatggagtatttccttaccctatcctttcttgcccaaacctatctatgctttaaaggcatcttctactctacataataaagcggacatacatatatacacccatgctttcc

SEQ ID NO: 162641 - DNA, 327 bp, Zea Mays
cgatctttgtggatgatatctatggtcagtttttcatatgcatatattctccaaagatcaagagtgtatgtttaaagctccaagaggtagcctcccctgcatggcgccttgccggggcttggccaaagcttcacgatgtgtcatttcatgttcaacgatacttctctgagtggtgagcacgtagacgtagaaagattctttggatcaacatcacaatgcagcagtacgaaacctggggaggtagagtcaggtcgttagaagtctttttttcttctctttatttgcttttccttgacagcagttgaggtatggagcacttcactcttc

SEQ ID NO: 162642 - DNA, 448 bp, Zea Mays
cccggtacgaaaccaggaaccccagcaacttccctgcggagacaccaaagacgcacttgtccgggttcagctttgtgcgggttgcccgcagcctatcgaaaaccagggtcaagtcttccactagggtcgaccctctcttggtcttgactatgatgtcatcgacgtatacttccaccctgtccctgatcaggtccccgaaagtcctactcatcgctcgcacaaatgttggcaaggcgttcttcagacctagggatcacgacatagcagtaaagcccatccactgttacaaaagcggtatgcttcctatcttccctagacatctggatttgatggaaaccagagtaagcatctaagaaagacaaaaggtcgcacccggagttggaatccacgatttgatctattcacggaagtggatacgggtctttgggacaagccttgttaaggctgg

SEQ ID NO: 162643 - DNA, 280 bp, Zea Mays
gccaaaaggcaccaatgaggtggtgtcttgagtgcttcacatggaggaggatggcaaggtttgttagaaaataatcccagctcgtttgtgtgcgcgttgctgttgtgtgcgtctgctctatcttgtggaccccaattttctgaaaagaagttaaatttccttttctcttttctttcatgttctgtggcattggggtttggagtttcaggaggcattcctcagggaaacagtagatcttttggcattttttccgctggggtcgggagctcagatgggagag

SEQ ID NO: 162644 - DNA, 448 bp, Zea Mays
aggtggctgatcgtctcccaggatggaatgcagcattaatacatctggcgggcagaaccatcttggttaaagcaatccccttatatcatttcattgctttgcattgtcctaggtgggttatcaaagcgattgataagattagaaggggtttttttgtggaaaggtcgtcgaaacgtcactgcttggttggttgggagcaggtatgtaggccgcttgatcttggaggtcttggtatacataatttggaaattttgggttgggctttaaacatgagatggttttggttaaagaaaactagttttgatggtccatggaggaatgtgcaggtgcagcccaccccaaggctgcctccgtggtctcggtagttggggacggctctaatacgctgttttggtcggacaattgtgttgaaggctactcctagccaactcttgcccctgctctagtg

SEQ ID NO: 162645 - DNA, 528 bp, Zea Mays
cacgtcgctctaaaaaatcgtggccatccgatctaggatcctcggttcatttcttctcgctttcgcgtgcactcaaggcctctcgagacttctaccgaggctactaacggctgctacaaccacgaatcctactctggaccagaagcttccagagcatgaccagagcggattcggaagctccgcaacacgcatcccaaatcccccgaatcccgacgcccacctgaacccattcgcgcggacccgtggtggcggccccaggcagcgtggtgcatgacgtacacttacctcccgatatcctaaaggcatggtcatcctgtcccactgtttttttcacgaatctgagattcttggctgttggagtttgctatttttgcctgttcttgcaatgctgtcaccttcgttgcgtggtctagaagacgttccttttgcccagtatgaatggcagagctgccgtcgctttctttttgaaactgtttggcagtccgtgtggtctgtacatgggtcctatgtacaagacggcgataggct

SEQ ID NO: 162646 - DNA, 893 bp, Zea Mays
aattaatcttttatagttagagttggcagtatgttgtgccttgactaaaggatgcataatagatccttggttcattactttaggatacatatttgtatgttgtttggcttctcttgcctagctaatacattgagaactattaaagatctgcgcgacgatttatgctaaaattcacacttatttacgctgttttggtttacgttttacgcaaaaatctgcccgagacagaacccgcgcacgatcggacacgcacgatttttacaccgtaatttttgggcctcattcgtcattatgaaacagatctacgatttatgctaaaattcgtacacatttacgctgttttggttcacattttacgcaaatatccacccgagccagaacccgcccacgatctgacgcacgcgattttcacgccataattttcaggccacattcgccgttacaaaatagatatatgatttacgctaaaattcgtaatcatttacgctattttggttcatgttttacgctaaaatctgtccaagtcagaacccaattacgatgggacacacgagatttttacgccgtaattttcgggccacatacgccgtttcgaaacagatctacgatttacgctaaaatttgtattcatttacgctgttttgtttcatgttttacgctaaaatccgcccaagccagaacccgcgcacgatcgaacacgcgcgatttttacgccgtaatttttgggacccattcgtcgttataaaacagatctacgatttacgcaaaaaatcgttatcatttacgctgttttggttcacgttttatgctaaaatctgtccgagtaagaaccgtgcacgatgggatgcacgctggtgcggaacgtggctatacctggctggggcttcctggta

SEQ ID NO: 162647 - DNA, 675 bp, Zea Mays
acactggtttgtgttgcactctgatctactgctctgagtccctagagggcctttcgggttgatctttggattaaaagtcacgtactcgcatgatgagaatttttagtggttcccattcaccccctggtcgcctcaccggtcctacaattggtatcagagccggttaaggatttcccttccctaatcagttcgaaatccacataggcgacatggaacgaggtgctggcaaacctccgttcttcgatgggaccaactacccgtactggaagattcacatgtctgcgtatcttcagagcatcagataccaggtttgggagatttgcctcgatgcgaatttctatgctacaagtgattggatcactccaattcaaatggagttccatgattcgaacaataaagcttgaaatgctttgttctcgtgtctatcatttggtgagtttgagtgagttgagcatctgactatgactcatcagatctggtttaccctcgacagattccatgagggcaacgatcatgtgaagactagactatttgagacgtacaggcgagagtacgagaacttcacacaattggctggagagaccatcgatactatgttcttcaggttccagccaattgtgaacaagatgcgtgccaagaaggcacaacttccctataacgatcatgagagagcgt

SEQ ID NO: 162648 - DNA, 481 bp, Zea Mays
cgtatggctccggaagaggagaaagttcagctgcaccaagatataagttttttgtcagatacgaggctaaagtacttacgaagctaaaatatgacaaacgtacatatacgcctttcgcactctgtggattcctcagcttttcttgtttcctctgaagcaagatgagtttcttcttcgttttgcctagtagctttgtctactatctctcggtcgtcgttcatccacacttcagaataaaatttagcaccaaggggcatagcttcggttgaaggttctttgatgtcatctgctgaaactgagaattctggctgaattacagccttcacatgttcatagccagctttttccagcagcgacacagcccccgagctcctacacaggcaccaaaatcccccctgccagttagcacttcgtcaaatgcttcgattcacccttaatccatctgatcacaccctcgggatctccacggataaaatttcgc

SEQ ID NO: 162649 - DNA, 503 bp, Zea Mays
ggaagatggatgacgtttggtaaatggaaaaagaccttcatcaaaaatgattgcacgagagatataaacatgcccagaagtgacatcaaggcatttgtagcctttatgaatggaactatagccaataaaaacacactccttagatcggaaagagagtttggtgctgttatagggacgcaagtgtggccaacatgtgcacctgaaaatgcgtagcatggaataatttggatgtgtatgaaaatcctttctaaaggagtggtattgttgatcacacgactcggaagcctattaattagataggtggctgttgaaaaagcttcatcccagaattttaaggaacatgggcatgtgcaagaagggctaaacctgtttccacgatgtggtgatgcttgtgttccacggaaccattctgttggtgcgtatgggggcaagacacacgacgaccaatgccaagagaacgaaaaaatttattgtgaacagattgatactccccaccccaatca

SEQ ID NO: 162650 - DNA, 1351 bp, Zea Mays
tcggtgttgaaggaggcggtggcattgccaatggcaccaccagagcaggttcggtctataattcccatcaaagtcgccgcaggcaagagtgggttggcattcaagacttgcacaatcgagggggaaggagaaaaaatttacttgggtagggtgggcacgcctgtgatctactcctacaccgatataggtaaggagattgtaggcataatatctgatggtcaggacgtccaaactgtcgagaggtaccactcctatgtccattacatcctctcctttgtttgtatattattgtgtgattaaaggtgttgttgattatgtatactgatgaaaggtgttgttgggttgcattctttttttatagggggtactactgcgccactttcaagtgttacgggcctgggatgtctcccatgttaacctcaactctgacctatgtgcaggcaatacgctttaccaggatacactacatctcaggggagtcgtggatcccgtccctaccacctgctgaagaataagctattgcaagaagcatttagagtcatatatgctactaggagcacccctaaagtcaaaacaagaaagttgttttgtcagacatgaattctgcagtactaattaaattatccacatttgttggccatgatttttaatttgtattacaccgcccacattatttatcaagggtttcgtctacatatataaattgtatatcgtctttgactttttcatgtgcatagtttttttaccgtgcacgtaaatatagtgtatgcctccctctctttggtgcacatgtgctggaggagagccagagcagaggtcgtagcattcggtgttgataggtaggccggccgtaggcggcataggcggcggccaccgcaatgtcgatggccgaagcggtgcaggccagcctgcccatccgacgatccagtgctcaaccaagatggagcagcaagatatggttgggtatagctagagtgcagttggccggccagaacaatgctaggcgagagagggaagtggtggtgataggaatgtgagaggagagggattgttatctgttaggtcttatgaatatggaggaccggccggcaacaaacaaaaaagtgaacactcatcatagctgttgttgggcagggattcttttcgatctcgcgtcctctggttgagagatatatatgtctgctgctctcactatatagagggccggccagccctgctagctagctagctagttcaagttctaggcacggattggatcggatcgatcaacattaatttaattacttaattattagttcccgacgaaattaatatatgttaaacaaagactttaatttttattatatcctta

SEQ ID NO: 162651 - DNA, 973 bp, Zea Mays
ggatcttgttctgtcgccaacagcatcgtctccagcaccagcgctcccgtcaccgtctccagcaccgcttcccaagggtgttgttgatgtccagcaagtgaccaaccaacacctgatggcgacgcgcgctaagcgtggctttcgcgttccagccctgttccatgctgcacaactctccctggtgcccaagacctatcgtggtggcctcgctgatccgagctagcatgccgccatggaggaagagcatgtcgcccttcaacataaccacacttgggatctcgtgcctcggtcacctcatgccaacgtggtgacatgcaaatgggtcttcaagcacaagttcaatgccaacgagacactggagcggcacaaggtatgatgggttcttcagggtttcacctagcgtccaagtgtggatttctttgagacattcagtcctgtggtgaagccagctacggttcgcacaatcctctccctggtactatcccagcgatggcctaagcaccagcttgatgtgaagaatgcttttctacatggcactctgtccaagactgtgtactgcattcagtcatccggattggaagaccctacacatccagatcttgtttgtcgattgaacaagtccctctatggttgaggcaggctcctcgcgcatggttcaactgatttgccacatatttgctctcccttagttttgttgaggccaagtcagacatgtcacccttcgtctttcagtgtggatccgacattgcttatttgctgctctatgtcgacaacattgtcctcaccgcttcctcctctgccctcctgcgtcatatcatcttagccctgcaacaggagttctccatgaaggatctcggtgtgctgcatcacttccttggtatgcatgttcagccctcagacgatggtcttcttcttagaagcagtacatggtcgagctccttgagcccgcagggatgtcagagtgcaagccctg

SEQ ID NO: 162652 - DNA, 1058 bp, Zea Mays
ggattctggaaacggagatcctgaaggagagcagaacctccactagcagtgaaatcagttactggctcattgccagcacgccgagcctccgcccggtggagaaccaacccacgagtcacaggggcgtgggccgggagaagatcaatttcatcatccttcccgccttcatcatcactcgtagcctcccacgcctgcggattcgtcgcaggtcgggaccgaccggaaggattccgggttgtccgaccgcgagcactttgagacccggaggcctcagcaccttgcatgacatttccgcttcctcgcccacgcttggatcgagagcgtgggggagtatctccatgtatttcttggtcatcaaaggagtcggattcaaccacggacgggttcctccgacgcaccattctaagaaaaaatagaacctatgatgagcaaggatcaaacacgtttgagtagagacgcataagatattgagcatgcacttaaaccgttcatatgagcggttcaactacaacgaacaatatcaaatcgctaaactcaaacaatattcgtgacaaatgaagataatctaagtgttgcaagcacttaaactaaaatgtacccaatgaatgatacattagataatcaagaacgcgtaggatcgagtaaaagggaatgaaatagggcaatacctcgatccggagatttagtcaagaaattccaacgagattgaggaagatgatggagaacgccgggatgaacggatctccaacaaatcttccaaagttgagagggcacaagtgagtttttggagtggagaaggtgtgaaggagagagaggaagaagagtgggcggcggcggctggaaagtgaaactgagaagaagagaagaggagagagggagagaaataaggggggagtcggccggtcagaacacagaaaactggttcaaccagtttctggtcaaactgtgcagtaaaagcgcgcagaaaaaggtgttgactgcgcgaaatttctggcagtctgacagcgcagactgcgaaactgacagcgcagactgcggcgcagtctgacggcgcggat

SEQ ID NO: 162653 - DNA, 798 bp, Zea Mays
taatcaaacaagaaattaggtttaacctgtcacttaaaccaaacaaggaacgagtccgacccaacctaaaaaatagatcggttttgaagcaacccactttgttccgaaaccaaacgcactacttgagaatgggaggaggcggcgacggcaggcgacgcccgtgccagcatcacaatagcgtgcaggaggaaggaggggctcgtggcagcgtgcggctggcggtttgcgtagtctgttgtgtgagaaggtagtgacagtctcgctgggccattgaaacgcaatcctacggtgggatattaaagagctacatgaataccaccaagattaggaacgcgttcgagcgaagcgttagcgacaatatttcttcctcttttttgttctctacagccatacctcatttttaccttgcgctcgccactgatccttagtgtggtaatgtgacgaggaaggtgaccatattctgttcatccttcattcatccctcatcacaaaaccaaataagagacggtgcagcttcaatccacttcaaccctataatcaaacaagaaattaggtttaacccgtcacttaaaccaaacaaggaacgggtccgacccaacctaaaaaatagatcggttttgacccaacccacttgttccaaaaccaaacgcactactagagagtgggaggaggcggcgacgtaaggcgacgcccgcgccagcatcacaacaacgtacaggaggaaggaggggctcgtggcagcgtgcggctgacggtttgtgtagtctgttgtgtgagaaggtagtgacggtctcgctg

SEQ ID NO: 162654 - DNA, 696 bp, Zea Mays
cgcgattcttcctcgtcgagttcgtcgcatggtgtgaagtccggagctcgcctgaagtttccccgaacccgcccttcgttcactcatggtgagctcacctcttcctctctccatccctaccctcctcgcctcttgtcgtgctcgtcgctgcactagctcgccgtggccgaagtccggtcgaaccagcccaggccgccgttgagccgctgcgcagacacgccgccgaagtttgcactccctctgtggttcatcactgtgaggagaagcccatcgcctacccctctctcttccgtgccctcctcggtgctcgccatggccggccttggttgagcccgttgcggcggtaaggccccgtggccaagctcccctgcgcgcaccgtcagtcgatccgcccagtcgtgtgtgcaacagcagcctcgccgccatcgcgcaacctatgcaggtcgtcgaacccagtcccaaaaccggtcgtcgtgcttatgcatccacgtgtgaatagtgtgttgtcggagtttagacgacgttcgtctacgtgtagacaacccccgtctacccctgtctacccccgtctacccccccccctttgtttttctcttgcgtgcacatagcctcgtcgtagtgttgtcgtgtgtcgtctcctcgcgttgcacgcatcattttgtgcgtcacgcgtgtcgccgcacaacgccaatccgc

SEQ ID NO: 162655 - DNA, 740 bp, Zea Mays
gtcgaggaggggcggcagccgcggccgggacttcgcgccggacctcggcgccattgccgagtaaccaaccgtccgtggcagccagctaggagaacgggggaacctaattaacagcagtcgcgtcggcagcccgcggcgacatgaaaatgaaaaaaaaaaacacatccatctgtagctacgcgtaaaaactgatctactggacgctttgactaatgctagtgtagtgtaggtgtagtagccgtgtaggaaaagaaatgcagtccatcttgcatctggtgtgtacgtagaatactagtacgcgacaggctgtgcgtgtagattacgcacgcgagcatgcaccgcgatccggacgcccaggaggccaggacccgggtgtgtgtctgactctgactcccggggcccgcattgtgatgagctgagctgtaagccgctgggcctgggattcgtgtatgccaatcagccgatgtggcgagccaatgaacggcaaacgagtcaacgactcggatttgccagcctgaggagcagattttgctatgcaaaaaaatttgcgtttgtcttgtgctgcaatatttcgtatttcctcttccggtcggctgtatgtagaaggcgtacgtagagctgtatacctgtatagtatggcttggtttggggtggccggcttggggaagcaacgtgcacaattgggtacgaggacaaggatgggggcctgcctgcctggctggctggacaccctcgtcgtt

SEQ ID NO: 162656 - DNA, 453 bp, Zea Mays
ttccaagttgacaaggtaagcaaataagtacacaagaggaaagaaaataaacagggtattcactttacaaagcaaatggaacatatgaaagatggtaatgcccaaagtttgatgagatacaggataatagttcagtcaaaggcacatacaatttttgcttgagcattgaggaagtagtgttacttcaagcttcataaagtgtcatgcctgaagtgaggcatacacctgttaccatgcagaatgacttagccccagaagcaccatcttctcaccctacagaagggcaatgttagtattcagaaacttggaacaacagaacaaagagtaaaaaaagagactatctatgggaagaggacctaaatggccacatctttgtgacaggtctgttaacttgtttaaagtgtaagtaagataaagctgcagggaatactgaatcttatttcacatctcatt

SEQ ID NO: 162657 - DNA, 679 bp, Zea Mays
agggtgcagaagaatgttgaagaagtttgggactccaaagaaagatgctacgaaacatccatagaatgcgcgaagaaactgaaagatagctttgcaaaagatgggagcatactcttcgaagcaaaaatttatttgtggtgatcccgaaggggttatcagtggatcgtcaaagaggccgaagcttttgaagaaatactcagcgatcgtggggacttctgtgccttcgccggtgcaggaagggttgcagcaattttagagaaggctggatgtgcatatgttaagacagtagcccaaccagagtttgttttctcagtatatgacaccaaggatccctcagctgaagcctctttgctaagcggaatattttactatgatgtttggatgaagggcggtcgtgaagtagctgatgaaatcattaaaaagagtgaaaaggaatctcatgacgcccgagaggaggataagcgagctgaagaagctgctgaacgcgccacgattataggtactttttatttaaagctttttttcattgttcatttctagcttcgaaattcatcatcaaatactttattacagtcaacctttctccaccaccggagccgaacaaccccgaagctgacccagttatgaaagaagctttagatgtaatgaaggttgccaatgaagtcgttgacgaagtcgt

SEQ ID NO: 162658 - DNA, 511 bp, Zea Mays
ctcggggtaaaataccacagacacagagcacagtcgcttaggacggcgggttgattcacagatattccaggggctcttttgtgaaacagacaggccgaaggggtatcgttgcgcttggaccgcacgattggagatagacggtccggataccccgatggtctcatacgcaaacaaaccattgatgggtatatcaacggtaccgatcttatttttcgatattgaatcacagtcaccggatcacgatcggacggttacgcctatccaatccaagcggtatgctgcaacagatctgacccgcacattcacggatcgacggctattaacctatctactaacttcgcctcaccgacccgcggcacagagactctgcacggcggcgcggcaatctggcgcagcggcgccatggccgggatctcccaaagcacagcaccgcgcgcaacgcactgctccgagatattctactcgatgcactaagcgtgatgaatgcggtgaacgcgaacttaccccgcgg

SEQ ID NO: 162659 - DNA, 661 bp, Zea Mays
atcaaacatggcatcatcgggaagacgaggaggtggtggtggcggtgcttgttgttgcgtctccaacacagcaagtctatcgacgatctgggacaatcgtcgatccagcctctcgtaagtcttgccaaggttcatgtcaatgaaggcatcatgcactgacttgtggaccgtctcctccatttgctcctttaggagcttgttgtttgcctcaagatcttggcggctaacacattcatcgaagtctgtagggatcattgcttcctcatcgtcgcctgccatcgaaacacaaaaacaggaaacaaacggtgacggttatccctaataatttcactacacgctcctctcaggtggaacacaggaacacgctctaatgtatcttaccaagctcttaaaagtgtctgacgaaatacaagaaaaggatggtacaatcggaggctggttcatgatacttaccaagaggtagtgaaaccgtgattgcaaggtcaaatctgtattgatcagaagatatagtatgtggagctgtaggacaggcacaatatgcatgtgaatgtggaacaaaatcgaatgcagatgagcgaagttcaataaatatccaaagcacaagtcacaattgctggctaagagatgtatccgaggcgtagcacaacaaggttggaacaag

SEQ ID NO: 162660 - DNA, 623 bp, Zea Mays
aactaggtgtaagcctaattccctttcaccattgccggctcacgacgatacgacgctagcgtgacctaaactcgaattcaatcagcgctacacgatgcacaagcaaaagggaagagttcggatagctgctcaccgacaattgtgacccgcagtgccttggccatgaagaggtgttgttcgccgtcacggacgcgctccggtgtaaaatttgccggtgccggacgctctcaacccgatgccgatgtcgcgaaaacaattgacgagtcgaggtgaagctccccgaccaactcgctccacgcggcacacttatcccggcgaggtccctcacgtccactcacgacagcaatggcggtggcgatttccttgcggagtggtgaactacgaacacaggggtaagggggcctgtgtccatgttttatggaccggtgattccgcgcagttcggccatccgtgcaacgcccacggtgaggtcgttgagggagcccgccatcaccggcgacagactcggtccgcgcggtcgtggcgaggtgggcggtcctggccaaagggcccacaagacagtgcaacagagacaggcgcagggctggcaaaacggacccacatgccagcgaggagaattcgtg

SEQ ID NO: 162661 - DNA, 1196 bp, Zea Mays
ccttttcgtctcgagctagtgtcacctcactaacggaagcggagacctgctggctgaccatttcgaggtcttcaagtgaatgcgccaatggctgcagcgagggggaaaaaagtgtgaagtccactagtgacagcaaattacgaaataaaaagtggagagatgagagcaaggtacccatggtgtcagctttggttgctcatcagaaagggacacagcgagaatttgctccagtgtttggatcatcctgcatctgccaaagaggtagagaagtatgggatgatcagaccaagggggtagcatattattctagcagtaggggtttgttaatgtcaagttcagctgtgacataatcgttgggggggaattgcaaggcacaatgagctaggacaactcacagttcgtcggtgcatcttcctcgctcacgtggaaggacattttcggtctcatgctgaaggtactggagctcatcctgcagctctgttatctgcccgatcaaaccatatgatgacacatattctggtgacgttgcttgggaacctacaaaaaatttttttgaaaagctgaatggattactccagcttgatagtcaaaagaacatcccaagtacatgtggatataggaattgtaggtggagccagcttactcgagtgactgctaaggatatccctcacagcatgaagataagaatcactgtcgtcaactgatccctcttcaaacatttcagatgctgcttgatcaattaaattgtaccggccctatatatccatgtagtagacactctaatttgtaagaacacaagtggaaatgataagaggctaaataatatgctgtcttaacggatgaactcggctacaataccaggcggccatcaaaagctgagaagtagccctgcaattccaattctacagctttcagaaatgagtaggcactcgatatttttatctgttcttcgagctggcaggctatctttagaaataggtgagcagcaagttgattgacaagatggttgatgaactgcaagatataaagagtgtctacgtgaccacttatcaggtaaaaagatgggttgctacaagcaattgtcaaactcataaggcaccttcttctgatgacttatgtagcagtcctggcgcagaagctttaaattgtgatctcctagaaggtcatgaattcatagttacaaacatgccatacta

SEQ ID NO: 162662 - DNA, 516 bp, Zea Mays
ggattctaggtacttcttccgctcgcgtccaatctcattattgcaatccattcgcaagaagggaactttgtcagccccgccgtaaaactgcttcatgaactcatacacttgagtcggcttcattccggcttctcgtatctgagcaatcagatgtctgtctgcatctataacatgtcgttgtgacctcagcatgtgcttcttttttggtgtcgctaaaatatgattgtgatcaagttcaaccttttgcaatgtccaaattccctctctgctgacattaaactttaccagagctttgcaacctgtccttgtagtggcatttgacgatcccatttttgcatgtccttggctgctacaaactataactctgttgtatatagttttatctgcacgacgctttataacgctctttctaatgctgaacccgacaatgccagcataggtgttgtacatctcataagcatcattctccgaagcaaaagacatcccaactttaggaacgatcacaactggtccatc

SEQ ID NO: 162663 - DNA, 501 bp, Zea Mays
tcgaagatgagagattagtggttcggctgtgcttccgaggataacggtgagcgtgcagagcctcgctcagcttcacccataccagagagaggtacaagagaagataatccggaaaatcaagcaaaatgatgtttctgccaaagcctgtaataccttcgaatatttgtcgctcgctattcatttttgaattaaaatacgataaataaaaaaagaactgagagtgagtagaaaatatctggtcttcgttcacgcgagccaccaattccgatgcaaatgcattctttgccgagttcagaagaccctcaaggcatcatcggctatctgctccagatttgctcgggagcttgttgcagttgcagtggaacttgagatccagatttcagaagttacagcctttaatttgattgctgcagctaccgtgcgatccgggtttagttttgccccgtgtgaattgtgttggggggccgggcgtgaaagccaagagcagtagcacatgcacgc

SEQ ID NO: 162664 - DNA, 456 bp, Zea Mays
tacaagtggtctaagccatgtcgggtgaaggatggctccacggaggatgctttatgccttagcacaaatgttgatcccttcgccttgtggtgaccgtcgaaaacgtcttcgtcgagatgtcgacttcgtcctgcggaggtggccttcccctgtcatagtgcgggaaatggcgagcccctcttcttgcatggtccttcgcacagtcgcctttggcagggacggccgaggacctccttgctgataggtagtgaagtctcttgctgttctggaccctgcgtccaaacatggttaactcttgccgagtaaatctaattgaggtcgggttcgactttcgttccaacaagaagaaaaataattcgacacatactaacaaagttgacacaatatacttgcggggcacacgaaacatggaaacaaaacattacgatgtactcccttcccttcgttctaatttat

SEQ ID NO: 162665 - DNA, 874 bp, Zea Mays
aatcatcatgcgaccctcagaatgagatcattagcccggtgatggcattcaatgcattgtttgatttgaagctcgttctttagaactacacgatgcatcatcataagccttacactgttatgcatttggattaaaacaagaggtactatgtaatatggaagtaaggttgtctttatagggtatgagcacacaagaagaccaacaatgacaactagatgatacaaaaatggttcaaccccacacatatctaacaaataagaagatagaacaatcttagtgtaggacacattctcatcgtcatttagcaagacaaaactcctctgacttggctcaacttagttagcttcgggtaccttttgcttgaagtagtttgccaagaattttcagcggactaagacaagaaagcatgttcctcctatttctccttttgtttgtggttgtttgcttttgctagatcaatgaactcacaaagcaaagtattgtcctcatgctccccaccctcattggcctccacaatatgagataacacgggacatgcatatttcttttttctgctcctctgcctttattttctcaaacatgtcctatgcatggatacacaaaaacttagccatgtaaattaaaacaataacaagctaacaaaacaagtacaatggtgaacgactcactagtaaatctaggcaagctagaaaagtatgttctttcatgatctgcatttgaacctttttagcaccccttgccctctcctttctttattttgcttggcagccaccctacttttggactctagttggtaccctcttatgtaaacttgaattatcggctcaagtacacccattttacatgcttgacgatgtagcttctgctcctggta

SEQ ID NO: 162666 - DNA, 463 bp, Zea Mays
gtcttgcgtgatgctcatgcagtgaaactgcatgtccacactgttgtagctgtcgacacctcggtgtccttctcgccgtgatccaattaaaccaggcagtgtctacctcgctgctccgtggacttagttcagtaaagccctacctctctccccgaatttagtagacctcgccgtgtgttactgcgttccatattccgggtgctagccaggtctgtcgcgcgctgtccttgcccttaccggtgaccacgctaccgacatcccacctccaccatggtcagcctagcacgatttatttatatgctttaagcttagtgttctagtacttgcatagggcagtgaagcttatggacatgtctgtttttttgtcccgtagcgagtcgattggaacgccgccacgacgccgttgatctttgccgtgagccactccatcatcgaccgttctgtttgcgctctccccggtcat

SEQ ID NO: 162667 - DNA, 1049 bp, Zea Mays
tgacctcttctttcatgcatttgttagaaaagagattgtagggcatcataaaaactggccaacatgagtaagaagtggaattattgtagtaaggagtgaatccatccgtcgataaaccaagatgaacactcctagggtctcttgcaaattctagatcaaaacgatcgagagcctgccaggcctcgccatctgagggatgcaccatgacatctggatcttgaccctgatgatccccttccttatgccacctcatttgctttgctgtctcttgatttagaaagagacgcttaagccgtggagtgataggcatgtaccagagttgcttgatcgacacctttgtcgtaacctcttttccatcctcatctagcaccaccgcctatcttgacttactgcagtggatccaatgtgtggtattttcatgctccttctagaacaacatgcaattgtcctcgcaagcatcaatcttttggtagttcatgccaagaccagcgatgagcttcttgcaatggtacaagtccttcggcatgttatgattcggtgggctgatatcaataatcagtttcacaaaatcgttgtaacagttgttggagaaggtgtactttgtcttcatcgccatgagacgtgttaccacccgcagtacgctcacattggttccttcatacactttagtctctgaggcttcaagaagcttgtagaactctctcacatcctctagaaaagcttgattattctgtagttctgggtactcattcctaatatcatccaacatctcttccattcggtctacatcctggtccccattcgactcaatagtatggtccacctctcctgctcatgccataccagatagttcggcataaagccatgtttgaaaacatgatatgagagctccacttttttcaactgaaccaagttccgacattttatacacgggcacttcgctaaacaagcatcaccagcaaatacgagtgccacgaatttatctgcaactctcacccatgcattagagtgcccatgagtgacactgtcgaatcatcgtacatcgccct

SEQ ID NO: 162668 - DNA, 457 bp, Zea Mays
tacaccagcgagaaccccgccagcggagcgacggggcgtggtcccacataaggccaagcccgagattccctatgtaactgaagctcgatcagccatggcctccccgacgtggcaaactccattttccactttgcccactaaggtgtggacacggttcactcggcgaaaagagatgaatgctccagacaagggctagggagctccgtcgataatcattctggctactctgcccttaagggagaacgggaaagggtgcaccactgctcccacacccttctttcttagatgtcctcttcattcaggggagagtggagacgttgcccatctccgacaacgaacccaccgtgctggaggaggagcccccaacgcgatgcgcgacaatgacaaaacaagcgccgtaatgtatggcgtcaccacgaagctggagagcgtgatctggctcagcccgtttctcgag

SEQ ID NO: 162669 - DNA, 516 bp, Zea Mays
gcattaggtattcgagaatctgctattagttgttctttgggagaccattgactttttatgctagaaaataaaatctggttcttctgttttgtagtttcactttcgtttgtactgatctggcgacaaggaattccatagtactcgcaacaacaacatgttccaagatcatttgtctattggtgtgcatccttttgtgtctgtttatcagttgtttcagttctagtgacgttttgacttgccaacacttgctggtatgaggaggtgagttgagatgctttctgtattatcagagcttatgcttgtaatagcttctctaagtcaactatcgagtgtgaggttgtggttgatgtcatttggttatcggtagtctgctgaggtgctataaattctgctaaatcaacttgttggagtctagctaccacttgagatgttgcttgtagaaactgtgcatgtgccttcttgaactgttccatctgatccttagctagaggagttgccaatacaatgcattctttg

SEQ ID NO: 162670 - DNA, 678 bp, Zea Mays
acccaaaatcgagcactaagttcatccaatcttactgttattggagaattcagacttaaatcgacctgacatcccatctttaggtctgattttctccaatttcttcataacaactttgcttacattcttaagcaaagttgttctcctttgtttgatctacaagtttgatgtggtgacctagggcaaaaaccctagaatttgaaagttacaaagctcaaaagttgagcccataacactgttttctagacttagagtggaatcacaattggggtctttttgcaaatttgtccaaaactgagggtttggcttgcaaatcttcataaatgtgaaccttgtgaccttatattgtagtttttacactttagtccaaatgggcactacttttgcacataggcccctagggtttaaatttagggttttccagggtttcaattagggtttttggtatctcaggggtatgaatgtaatgtagatccatctttggtaacattctatgattgttttacttaaaccttagggttttctcaatttgggtcatgttttccctttttggtccctgtttagggttaagtatcctattcctgggttctatttgcaaaacaccaaaacaatacaacttgcttgaaatttttgcctagtgaatgcactctaagtgtgtcaaacatatgcaatgccaat

SEQ ID NO: 162671 - DNA, 769 bp, Zea Mays
tgctacgacctggcgtttcatagatattagtgactcacatgccaagtcctattctataagtgcataagcccatttaccaactctaccactcctgattgggttttgcaacatgtatttaatcacatcagttttgatagagctggagtgcccaatctttcggtgaggtggataatttcgattggtggaggaggtgactctcgcgatccgactacgaacgaacaggtcatggcgcttagcaatcgtagaaccaactccaaatggttattaaccttgctggtgacaagatcaacctgaacacgaagttctattcctgcgagcaatcgaagaaacaagcaagaacaagatgtaggcaaaactgaatatcaatcactcacgaattggggttcacgatggctgtccacaggtggtcgttgagcacaactgcagtacatatgtttgcacgatggctaaacttataaaaaacccactctaggagggggcgcaacccctggttaaatagggaggaggaggtgggcgtccaccttcccacaaggtaggaaattaggcacccaatttgccacacaatctcctgcccacaaggcaaggaataggcgcccaatcagccatgccatctccttgatccccattccttatttaggtggtgcagcaccttcttgattatttctttccaaactaaaaagatagataggtggcgcaggacctagactttattctgggcaaattcatcatgagcatagatggcgcatgcactttaggaaacttctggttc

SEQ ID NO: 162672 - DNA, 418 bp, Zea Mays
gtgatctccatgagattcaatttggggatcccatttaatctccgaccgtgttcagagatgatcatcaaccagatcgaggtcttttccgatgcggatcaggtcgaagtttggatatgtgctccgcgtagcaattgcattatgagattgcccgtgcaaaattatgaattatgatgggctcctaacccgctttgcggctaatcatcagttgcattaccacgtggagaacagaaaaggagtcaaaataattagttgagatgtgtgtgcggtttgatccttaaactttggcttttcactcgtatctcatggcccagagccagatcccttgctttgtcctgctgcgtggttgtattgtatgtggagctcctaaatctccaaaagtaccatgtccaaattgaagcattattgttttcaggcaaag

SEQ ID NO: 162673 - DNA, 379 bp, Zea Mays
cggcggtagagttcatcactcatcaaaacatacttgaaagttgtacgccgaatgttcttatctgtcttgatattgggatttcgtaaataattagttatgggcgtcctccaatcacttgtatcggcttcattatcagccgaatcaattaggagaactttcctggtaaacccggacggtccggagtcttcgctcagacggtccacgacctggggaaatggccctgcaccgttatcagattttcggtgttgtgaaatctccctcgctttattcgataacctgatgcatcctgtgccaaattgttagctctatgattctcaactctagagatatgtcgaatactgaattcgtcaaaagaatgaattatgccccaacatttttc

SEQ ID NO: 162674 - DNA, 1000 bp, Zea Mays
agaggatttctaggggtgtagaggggatgccatgtttttccataaaactagtggctataaatgaatgggatgctcctgaatcaaaaagcacagtagcgggagtaaattcaacaaggaacgcaccgagcactactctcggagcttgctgggcctcttgagcgtcgacgtggttaactcgtgctttgccctggtactgggtcctgctctgctgactgttggaggggagtgccttggaggcaggtgccgaggtaatcttggggccattcaccgagttggagtaggtaggcccgagtgccttcaactgggggcaattattcttgaagtgactggggtctccgcagtgccaacaggcatttgctggcggttggttgcttgcaactgagggggcctaaaaggagctctgactctgctgactgtaacgtgacggagtgggtccagctggtctattgaagcttggtcccttgggtggaagcccgatggatcgagctctctggtgacggtcttgctgctgagctcggagaacctggaatttcctcttgaggtgccctttttcttcctcttttgccctttccacttggatggctttgttggagaggtgcgagaagttgagggaatcttggctggcgaggatggtcttagccattttagaaaacgggccatcttcctagtttcggtgctgacatcgtcaggagcataacgagccaactctgtgaatttgtgcacgtactcactgacagatcttccaccttgagttagttcccgaaattcatcttccttgagttgaacgatcccctggggtatatggtgctcacggaaagcagtttcgaattctgcccgagtagcgtccctgacggccgcgttgaaggtatcccaccatgctagggccatcccagaaagttgatgagcagccaattgaacacgctgattttcggggcatctgatggcttccagtttcctcttgatcgtgcgcagccaatcgttggcatcgaggggattgctg

SEQ ID NO: 162675 - DNA, 609 bp, Zea Mays
ggaattgatcaacctgcacaaatacatccaggaaggtcaagggttagttcagaaccacaaatgaatcacacaaatctcccatccactaggatggaagcgttcctcacttcccagacttagttgcttcaaaatatggccaatacaagggctaatatgcaggctcaactcaataataatcatcagcaccccaccagccacctcctaggaacaagtaaaggggattcatgagtcacaagcctccaagattcactagttctctagatcccctataggctaatgaatggttgaaatttgttcaaaagatgctcaatatcatcaatacaatgattgggagaaagtcctatatgcatcaggtcacctcactggctccgctgctgattggtggaacacctactgtgctgcccacgctgtcgctcacaacatcacatgcattgagttgactacaagttttaggagctaccacattccaactagactagtgaagataaagaagaagaagtttatctcccttaagcagggaggtaggtctatgagtgagtatagagacaagttcattcggttgtttagatatgctcctaaggaagttactaatgacgagaagcgagagtt

SEQ ID NO: 162676 - DNA, 308 bp, Zea Mays
atctgtttgaggaagtccacaaggcaccaaacatgtttggtgaatactagatacacaaagcactggacaaggtactcaaagagggttgcaacacaactagagagagccataatgcaccatacgctcaatctccattagttgccaatggctagctgacatggacacattagatatgtgatgagtgtgttgtaattctatatcacttccaacgactagttttagatttaggggctatatataccaccccaaccgactatttgagatatggatatgatgagcatatcaagagagtcgaaactcatctttag

SEQ ID NO: 162677 - DNA, 462 bp, Zea Mays
aggtgataatgatgaaaagcatagtccatggacagagttaaggcaagactcgcgaagtggagaaaataatcaagggtaagatagatatggttccaacagatgtgttgaagtaaaaattcattacccaaggaagttacaagaaaacaacgagatcaccaaggatgtgcaaaataaaatgactgctcatggatcattaagaaacaagggtggtcaaagacatgtaaactgaaatgttttaaatagacagtagaaatttaggggcaagtaattgaaacaagagtatggaagggatacgagcatgtcaataccaaaggactagagttcgccagatggtagcaactaaatgacaaaagaggaaaggatcccaagaagacaagaaggttatggtcagggggcatctacaaaggtgtcgcaagcacaagactgagatcagatctaatagattgagagaagtatagacca

SEQ ID NO: 162678 - DNA, 730 bp, Zea Mays
attagtttctttgtagttgtgtatttcattgaggtagttcagctaattggcttcattacaagaagttgttttctttgtttcttctttcattaaacacaatacaatactaattattctcgtttttctacaatacctttagcgtaccgtcatccaactttggacatcagcaaagctaggttcatatatttttcatttcaatgttatgtgtgcaattacatttgttcatctactcatttttccatgtatgtttatgtagtaatactaaaaatagtgttcatatcaactcagcttaggaacatgcatgaattatctgtactacaagccaaactataggttgtttactcattcgtgcctataccattagtgagggaagtaataaacatagtggaaatctcacattcctccactacaattgtaggaggaatggctaacaatgatgtgaagctgcttggaaccaagttgcataacctgttttcctcaaccgagcatggtgcttgcaaaaattgtgggttggttgactacgtgtttaatcatcttggcgacgacctcacccttattaggactttagaagcaattcttgaagagttggacatcgttgagcaacctgccctggtgttgaaggacaagattgacctagagatggataggttggaagaagaaattgcaagccttgaacacaatgtctccaagccttgcacccctactacgaccctcacctcattgatcccga

SEQ ID NO: 162679 - DNA, 480 bp, Zea Mays
ttgctattctaataaatatcggatgaacaattaattaactaattaattaaaacttgtgtcgtgacaaaataatgttactaatatattgacgatattattattaagctaacgagatgaaatgaatcaaaactggatcgtaacacataatatattgaataactaatagctcatatattaattacgaagtggcgcacgtgattggtcgaagctaaatcacataaagggccacggagtttgcagccatggaagatcatcctgagggagttttgtattggatgtagggaattgtgcgtgcaggaggggtgcatggctgcatgcacatgcatgtgtggggctcaagtagttttccttaaacgcacgccaaagggataaacaccatgcatgtgggtcccaccggtagctttttctccctcctttctctacacaactcacacacgacacgagtggagtagtgggtgagtgccgagtggttacctttct

SEQ ID NO: 162680 - DNA, 451 bp, Zea Mays
cctatgataaagccatggacaaactgaagcgtgcaactcagttgttagcaacgagatccagcactgtcacttctggggaaactgtgacagagactcctaggctgacacaggataaaacatggtcttcctctattgttaaggacggtaccgcttagtcttggcccatattaggttgaaaacgtcttgactatggcacgatacgagccgttctggcctttgtctcagactgttatgtgttcactgcttgctgtaatgaaaacatctgatttctcttattaacatcagcgttatacgtcaacctaagtcagttgtgattacatctgttgtccttttgtacgagcatgtgttacctgcgtaaaccaacttctgatctaggtcggttgctccactgatagggcttagaagtcacccttgacttatatgcatgagcatgtaatgccagtttaagtcg

SEQ ID NO: 162681 - DNA, 761 bp, Zea Mays
ctacttctgaggtactaccttccaccgatgatcttgtcgctgaggtagaagagctaaatgctacattggcgagtcaggataagttgcttaggtaggttgctcatgagaggagagagttttagatccaagtacgagagcatgtttagggaacttgagtctgctcaagcttcagtcgtggtgtctgactagactgaatgtgatgagtgtgctcttcacatgtcaaacatcaccactttggagaccaaatatgctaccttactagatgagcgtgacaagttgagatcaaggtctagcctgttgggttcgtgtattgtttgtcctggcttgcagactgagctcacagagaaagacgataggatagccttgcttgagaagtctagctcaatgagtgcccctgcacctacgtagtgtgcactctatgagggtttgcaatctgcttttgagtcccgcagatacaacaagacaaggatcaaggaagaaaacacataccttcgatctgtcttgagctatgtgtcatgtagtgagccctagttaggcatgatggcctgtcagttcaagaggggaacttgcggaccgaggttaggctttgctactaaggatgggagtgtcgctcgcattggaaaggttggtgagtgcagtggtttgagaccatcagagaaccctacaacgactcccaagcttatcaaaatgactccacctaagcttatcacccctttgagagatggtgtgattgagtagcctttgagagccctgtgacagcc

SEQ ID NO: 162682 - DNA, 642 bp, Zea Mays
tttgtggtgtcatggtttctacacaacgaagtgagagcatgaacaaactagtgaagagctgtcatgtagatgcaagcaccccactgcatgtatttgcaaaacaaatgatgaaactgttacatagcaagaagatgaaggagtcgaaggaagcattggtgtgcaaggtatggaaaaaataaatactttaatatacgacgttgttgaatattcattagatttaattattgtagggaaataaagcaactgatatcttttatatgtttgagatcaaagttgcaagggcatacactagagctgttatgaatagatttgaggaggcaatgaaatatgccacgacgtacaaaatatcccaagatccagagggtggaccaaatgattgggtggtgcaacacacgaataggtcatgtagaattgtgtggggacaacaccagttcaaaattgtagcaaatgtggacgacggtaagtatagttgcgagtgcaaaaattgggaacatacagtttagttttctactcctaataatattagtaatgtatatgcaggctgggtaaactgataatacattacataatgatatatgcaggttttctttgtgtacacctattgaaagcctttatgcaccttcagatagatcaaataccaaa

SEQ ID NO: 162683 - DNA, 1406 bp, Zea Mays
catctttggggttgaattcaaccttgatttagtgatcaaatgagctcagtccctatagtcgaattgtagatggtatatagctatacaactttgctataggtcacgggatgtgttgtcattggaaaatcagagaaaaagtggcttaaacttgctctgtcagttcgtctggctgatttcgccatggtacagtaaactccagactggagaagattacgattcccccccccctttttgctcgtcgccggtggcccgtcgccgttgattgccggtcgttgtgattcgtgcaccgtggccatcggataagtcccgcccggtaaaaatcctcgccgccggtgagctggactccactccgaggactcccgtcgtactttcccccttgaccggcagccgaagcggattaactcgccggagaccgccgcttcccggctgtgcgccgcgtgtccaagcttttccaccgcaccgccgcgacttaccctcgctctccgtggctcgccggagtaattgccacgactgtggacacgaatccaccgcgcccgtggtcttctccacctccggccaccgcgcgtcctctccaaattcactggccaccgcctcccctcgctataaattgagtgtccccgccactccgtaggatagttacgcatcagttgcaccaaaccttgcaccggattatccaccagtgactgagaattgctcgttttccccaatcacggtttccgccaccgtagaactcgacctcgccgtggtcagcccgattcaggtccaatcccaccctcggtttccttgtttcaacatccttgcttgctcttgatgctcaccgacccgttaaatcgaactagaccgccatgaatcgacgggaacgcacgcattggtctgccttgtccacggtcgtcgtggctagaccaaaccttgtgaccattagtgaaattatgttgggggaaatggtcggggtagtgctaatttcgtgtccgctgctcggagaaccctgccgttgccctaatcgaccggcgtagatgctcgccggagcgcggccgtgcgcgagcgccgtcgtggacttccaatcgtgaataggtagaaacgcaggggtctttttgtaatggtcagtgacttggttaaacagtgaaataacatgttctcagttagtcagaaactcggggccctttctgcaaagccgccagggcgcgggcgcgcgcgggcgcgttttgccctggacctgggccgtctgggccagaaccggcccagttctatttaatccttttctttttctttttccaacagagctttagaaatatgtagaaaaatgtagaaaaatgctaaaattgtgaaactaattttcctaggcttgttattttccctagaatttagtaaaaatagttttgtgatttttagtggaagtaagaaatttt

SEQ ID NO: 162684 - DNA, 821 bp, Zea Mays
cagagattggcggcgagatttccggcgcgccaagtttctccactctcctctcctggctgcgagcgcgcgagttgagttgctccaccggtccccaaccgccgctcaccaaaccaaactgctgatgcatacagtacgtacttctccgtatgtgtgtgtgtacacgcaaacggcaactgatgctactactaccgcacgaaggctccatgggaaacggacggcgactgcgaggaagacgacgacgacggatcgtgattggtggggggagagtatgcatgtacgtgtacgttccccgggttgaccgtgtcatgagatcagacgcggcatggatttttttttaaaaaaagagaagatcgcggcaggcatgtgacgggggccgtcacgggtcttaatcaagcagcggtcctcgacgcgttgtgtgagaggggggagccagggaggggcgggcgatatgccggtgtcaatcttttgcagcaacgtgatgtggttgtctgggccgtcagctagccaggggggggtgcgtaggaggaggaacggatggatggaggacgggacgggacggagccaagggagggaggtgtgacctgttgcatgtgtccccctcttccctacacttgattgcactacgatggacagggtactttttcctcgttcgtccatacatacccatgggcgctgcgctgtcagctctccgttggatttttttttttttgcatattcaagactggatatggattgcattttgatctctctctgcactcgatagcttgcttgatcgagaggtttgttctgtttgcttggattggatatatattcttactgcg

SEQ ID NO: 162685 - DNA, 763 bp, Zea Mays
agttggactgtcaggctgttaaggtctgaattttcagacagacagtgcaatcactacgactttgggcataaattcaaccttgatccagtgctcaaccgagtttaatccctatagtcgatttgtagctggtatgtagcactacaactttgctgcagagatctggatgtgttgccacagaaatttggaagaaatctggccctaaactatggctgtcaggcttactgatggagcactcgcgatggtacagtaccctgaatcagatcagaccgccagcgcagccgcttcatcgccgacgaccgctcctcgccatgattcgtgccaccgttgttgcgattcacgtcgccggtgaccagataaggccgtcggtaaaagccatgcgctggacgccactccggtgacccccccaccgtacttcccatctgccttgcggctggaaccgataagaacgccagtgaaccgccgtcgctcggtcttgcgccacgtgtccgggcgctttaccacgtcgcggatagttacgctaggagcgtccggtgatcgccggagatacagccacggtagaagccacctagcgcttgcgccagtgccttcttcttcctctggccgccgcgcatctcgcccgattcaccagccaccgccgttgagccatataaattgaagcctccaccagccccacaaggtcatcagctacccagcctccgagaatcgttagcaatcgttcgccagagctcgcgaattttgaattcgccccaaatcagttctccgc

SEQ ID NO: 162686 - DNA, 384 bp, Zea Mays
agactcggtctacggtttgtttcggtgccagtgttatttagcatccggttcagcgaaggagatacggctggaacgtgggtctcgcgtggcagttacaagcgattcaacctcaacttcagctctgtttgttacgcaggtggtggtaggaattagcttgcttatgtcacccatgatgatatggtgatgtcattttcggcaagggaataaagaaaggggaaaatcatgtatggcaaggacgtgtgggctggtttgagccaaggagatggcccaacggatggagattttttttctcatttctattctatttgctaattctattttcatatttgaactcaaaagttaaatcccttttaatctaagttggagttttaacttcaatccaaa

SEQ ID NO: 162687 - DNA, 628 bp, Zea Mays
acagggcatacccggcctatctgtaccgaggcctagctgactccacccgggtcaccaatagaagaattcctgttgtggacttggtgagctggctcgaaatgatacttagaggcaaggtgtcaaatgttggtgcctctgttgcctactcggcctggaacttgcctccttccaaggcctttacccatttcgtgtcaaatcctcctgctggtgatggcggtttgggccttagagtgcgaccctctgccgaagaagttagtgctttggttgctttgcttgaagaaattcctgatgatgaacagcaggtttactttgaggtgcctttggatcctagtgatgcagagataagtgttatgcttgttatgttagccgaggattcttctgatgccgctcctgctggaacattggcggtggcgcctctcccaaaagctagtaaagccttgttattcagaggcctgtcagtgttcgcccgaaacgcccttgccgagccaatcagcctgcttctcctgctgatgggcagaaaaagaagaagagacgtcttcgccgagtgtctagctttgatcaggatgctggtccttcggctcctgctgctgaggaagtgcccgtgcctgaatttactgaaactaatccc

SEQ ID NO: 162688 - DNA, 606 bp, Zea Mays
atataagcatcaaggtaagatatagaggtgacaagggtaaagatgataatcgtgaaaagcataaccaaggatagagttaaggcaagactcgcaaagtggcgaagtggagaaaataatcaagggtaagataagtatggttccaacagaagggttgaagtaaaaaattcattaccgagggaagttataaggaagcaacgagatcaccaatcatgtgtgagataaaatgatcgctcatggatcattaggaaacaagggtggtcaaggatatgttaactgaaaggtcttggacagtcattggggaatataaagataagcatatataaaataagagtatgtaagaatccaatgatacgagcatgccccgacaagggaatagaaagaaaaaaggcagaggataatgacttaacagtgaaataggaagggatctcaaaagaccagaagttcctggatatataaactagagtgtttaagtaggttggagaaattcagatgtaagtatttgaaacaagagtattgaagaatctaggagtatgagcatgtcaatactaagggaataaaaatagttaaagggtagcaattaatgaccaaggagggaagactcccaac

SEQ ID NO: 162689 - DNA, 841 bp, Zea Mays
aaggtggaagtcgccaagtaagagctaggagccttggaccgagatgaagaggtcagagagctcagctaaggagggggagtctggatggtagccaggggcatagagattgtaatggtaattgagccgtcaaagagtgacgaggagagggtggtggttgaggaggaggttttctgagggcaagagacaatggagaagccggagggtcccatgcagtgataattccgccacgggacccgtcagcagggacgtattcgaagttgctgacattcgagggaaggaaggcacggctagaaaagtggttgggattgtgcaacttcgattcgtgaatgcaaatgatgacagagggcgagcagcaacagacaacggtgcacttatccaaatcgcctaaaccatattttattagatttaaaattatttaactctaaaaacactagtattttcactgtgctcttctttaggacggaggatgagtaaagctgttgcccgtttttatacagaatgcgtggcgtcattcgatctcttcataggttcgcgtatcatcggccggactgtttccatcccctatgtgtcgtactcgtccatcacgtgaaaaagggccctaaagcagaattgcaatgcgccggccgtctcgatcatctctacggtgtacacacggtcggttgctgcaggtcgtcttcttctcttcgatgaatcgcacgagccaaaaacagccggccggcggttaggaatcctgacctgtggctttggcgggtccgtacttggattcgcgttctgatgtctaccgaaaatgtatagccgtgacacgcgcactttgcattgcagtgattgcctagaaataaag

SEQ ID NO: 162690 - DNA, 409 bp, Zea Mays
tatgaaatccatactgatttcttcccatttccattctggtaccttgagaggttgtagcaatccaaggtcctggtacatcttggtacttccagggtgaatagagtaagctgaatcatgagcttctctcaaaataagttggcgcaagtgctcgatttcgggtacacagattctcttcttaaaccatactgtgccttgttcatcttccgtgaaatctggggctttacccaaaccaatcaaagttttaatttccttaatcttctcatcagattcttgtcctttacgaatctcttcttctaaagtagattcgacttccatcaccgttgcttctacattattgagcaatccaaggttgagtcgttctatttcccagcacaattcttgtgacatcaaatgagtagtgatgttattc

SEQ ID NO: 162691 - DNA, 365 bp, Zea Mays
agccatgaagacggcgatccggccaaagggatgaggaatctagttgagaaggccgcagtggtggtggatccggccgggaaagccgcgacagcgatggatcatactgtggcgacgacgaagaagggctgggtggcgggttggcttcatccagacaggggcctgcaccaggcctggcaggggggtttgacggcgacacaacaagagaggcttaaaggttggcgctgctggcatcggcgcggacagggagtaggtagccgacgcgatgatggggggttgcacgggtggagtcgtcggcttaggggtgagcgatgagggagtcgatgacagctccagtagacatgggaagagggaggaagccacatcga

SEQ ID NO: 162692 - DNA, 830 bp, Zea Mays
cgggacctggtgctcagtccattctgatatgaagtcaaccagtgtctgagtctttatcgccatgcgcggccggaactctatgtcatgagcccttagcttgcatgcccacttggatatccttccaatagcttctttgttgtgaagaatatcacctatcagaaatcctgtgactactatgactttgtggtcgtcaaagtagtgtcggagcttgcgagcagttagaagtaccgcatacaacaacatttggacttgaggataccttatcttagaaggtctaaggacttcgctgatgaagtaaactagatgctgcaccgagtatgcgtgtccttcctccgaccgctcgactactaacgtggtgcttaccacgtgagtcatgcaggagatatacatgagcagatcttctaccggctgaccgggcgtagctcggcatggtggcttgagtactagtggggtggtcaagaacttcttcattgcctctagagcctcttgtgcctctatggtccactgaaacttgtccaccttcttgagtaatttataaaatggcattccttcctcgcctagccttgatatgaacctactcagagctgccatgcatccagtaaggctttgcacctttttctgcgaccgtggcgcttccattctcatgatggcctcgatcttttccagatttgcttcgattccttgatggctgacaatgaatccgagaagctttccggctgatactccaaagacacacttttttgggttcaacttccactgatagcgcctcaggctgttgaagatcagttgcaaatcctcgatgaagttttctgagttttctatcttgatga

SEQ ID NO: 162693 - DNA, 613 bp, Zea Mays
ttttcggctgagggcgtctgctaccacgttggccttcccggggtggtagtggatctcaatgtcataatccttaatcaattccagtcatcttcgttgacaaagattgaggtctggctgagtgaaaatgtattttaggttcttgtgatctgtgaagatgtgacatttgttcccaatcaggtagtgcctccatatttttagggcatgcactatggatgccaattccaaatcatgtgttggataattctgctcatgaggttgagtaggcatgatgcataggcaatgactttctcattttgcataagcacacatcctaaaccttgccttgaagcatcacagaagattacgaaattctggtggatatctggtagtgtcaatactggcgcggtcatgagtttcttctttatgatttggaagctttcctcacactttggggtccacgcaaatttattatctttcttgaggagctcgaccataggtcttgctatgctggagaatcctttgataaaacggcggtaatatcctgccattcccaaaaagcttcgaacttcactaacgttggatggttgcttccatttggatactgcttctactttggatgggtccacttctattc

SEQ ID NO: 162694 - DNA, 616 bp, Zea Mays
gagggtgaggtcatcatattggttatcaagggtgtgaaggtatccagccatgtagacgatggtgggatcatcctcaataggatctcctcctgacagggcctgaagtcttttcctccaggtgggggtattcttgttgctgggtggaaagtagcgaaggggggtttcaaagatcactttgttgtagttctggcatagttgtcggaggggtgttcgggcaacattctggcaagtatctgggaaacggtatccggtaaaggtgacttggaaggaaggatggttcggatagtttcggctttctcccaggtagactgccatagagcatttctccattccgccctcgatatactccgtccagacgtattccgacttcttgcgaattcccatgcgaagcgcatagcttcgcaacaggtgtgggaacccttccacctctgagcagtaggatgtcctaatggtcagagagtcttccatctggaataggaaaagaagggtctgttaaaatcggggaggaggagagaagacttttcttggggaaagaggtatttcctttttagggcaagttttagggtcagggctgcgacctacggccagtcctatgggctctgataccacctgaagc

SEQ ID NO: 162695 - DNA, 502 bp, Zea Mays
gtgggactgctcgtcgagaccaaaccctataaaggggcagtcagatctcacttggataacatgtttgtagcttgacgaccccttccctcacgctgaccaggtcgggaaagacgtccctctcctcaaaagggcccgaaagcccttctagggggagacacatgcataacaaagaatcggcaagtgtcaacgactaactcggagggccggatcaggaaaggtcaataggaggcaagtcccaatctctgtttaggaaaaagtaaacccccaagcaatcctcacggatcactcagggcatgggggctgcatcacactgatgcgcatgcgtgcatttaggccacgctcctgcgggtactgcctccgggcaactctgtatgggtctatccctagaggttatgctcgccctggcaggaaactttgtactagtccgtccacggagaccacgttccaattcagagatcgctgcctccgtgcaactccatgcgggtccaagactacgccgctc

SEQ ID NO: 162696 - DNA, 671 bp, Zea Mays
cccacccgtcagccccatcctcttccctcgcaattgtccactccatagaggccacgctcacctcgtgcgttccatgcggataaccaccgcccacaccccacgaccctcgtcccacgcgcctcgctcaagcttcaaataaggaccctggacccccagcgcccccactcctcgccctgcccattctccccaaccatcatgcagcagcgccgccgccgtcgcgatggtcgtcgcctttgtcacggtgagcttcgcctcggtgccagtcgcttgggacttgcccccaatttccccctttctccctctagttggcctatcctcgcccacagccatttcttggtgcagtattagagccaccactgtcgttcgaagtcgccactttagcgttgccgcctctgtggggatcccgagtctcgcattaaggtaaggaatctcccctgccctctccattcccctcccttactctctatcatgcacaatttcttgtcgaagctccccacactgaagtcggtcgtccgatccccgctgctcaccctagatctaaaggtttgattctaactaacctgagcctaaacctaactatccgcccgaggcccaacggtccacgcccgcactcaagccatccccgcacccgagacaatctatgccacgccctcgagcgaggcggagaattc

SEQ ID NO: 162697 - DNA, 326 bp, Zea Mays
gaacaccgggtgttcatgcacaactatttactagccgcacgagtacggggcaagcgagaggatcgaaaagggaactcgtgacatcgccagccactgatcgaccgacttttgcaccgcttcattcgcggaatgtgtgattatcctcgttggtgaacggcctcaagcaagccatgcagaacaacggcctcaagcacttgccggcatgccgagcatcactacattcacactagctctctacgggacacggcgcccccagcgacacgtgaattggtgacaggatatcgtacgtgactaccaccccttgggctttaccacgtacaccgccg

SEQ ID NO: 162698 - DNA, 624 bp, Zea Mays
cgagcggcgccgctcctctccgcggcggtgaggtcgccggagttgaggcaggcgcgaactagggtggctctagggtcatcggagttgggtagagagggagagggcgccacggctaactcaatgacggggaagaggccacgaatccacgggcagagaagggagagcggcggtgagaaagtctcgggtgggccagaggaactccggtgagcgattccggccacggggaggggacttaaggcacgctaaggccttggctaacttccgtagaggcaggggcaccttagggactaacaccgaggaactactctgtgctagatcggccgaccaccacgcgagtacagcggaccaccgcagtcgagtaccggcgaaggcgaaattggacgaacacagggcgcaataaaagcaattgtgcacagggacgagtgtctcaccttggggcggagcttggggaggcttggagcaggcttcagtgagctagatggccgggaacgcgggcgcgggtctccgacggcggcaggcggcgaggactgagcgcgagagagggcgtgggtgtgcgaaatgatgcgaggggcgagtgcgggacactgtcggggctctaaaaagggagttgggcgtgtgggcggg

SEQ ID NO: 162699 - DNA, 502 bp, Zea Mays
gcacacacaaatcagatctgactctgcagtctttcagcataagaaaagatatatggaaatcttcatagcactgaacaaatgatcatcttcactgacagcctctcataaagaggaaagtggaaataaagggattacccaactaaacaactgacattattaataactgcaccaagttgcaggggatacccacaccttgatgacaatcatcacaaagatccaacttcattacatgttcatcatgacaagcattccaacatatgataagtaaactaactctaactaagactgactaagactaagatactgaattaatcattattacagactccgactctgtcgatctatggatccaaatctatatgggtcctacagtcaggggtaccatactcgaagcaaccatggggaggtgaacggtaagggtgttgaatcccgacaggggcgggagaaccaccatccagatagtggtgtgccgcgcactcagcacgcaattccacaacctctg

SEQ ID NO: 162700 - DNA, 944 bp, Zea Mays
aaatacccacgacggcgatgctctctccctcttctcccccaaatccgcgtcgggactcaactaatccacgaaattccgggcgtcgttatgatcgtgctcacctggtcgtggctataagctagctgccgtgcaccttctcctttccctgccttcctccacgcgtggaccaaagcaagcgccgccccccgaaaagcacaaaccgagagaaagagagccgccaccgggaatctccgcctgtactggcgaaccaccttcgacgttttggcctagaacttcgtcgtcgtttgtgggacgttgcggtggtagtattgggctcggagcgtcgccggtgttggcttaatttcttcccggagacactgcgtgtcgtgaatccgcctaacttcgaggagagaagaattggctgcatgactctcggtaataagtccttccatacttccatcttagccctagcttcgtgctgcaagtgtcggatatgtgttctaggtagaaattggggaataggctagtgtccggagatggtgccgccatgggggagctgttctccggtgactggtgaaggggataatgtgaccgggaatagcgtgccgtcggattcctcgcggacgatggtgatttacgcacgcgtacctcttcgccagtatggccctaaagcgttgatctcggatcagacggtggtcgttgcgtaccgtttcatcacgctagcgatatgatcctggccgtagatttagtatcacgtggtcctggtcgaaacataccccttcggccaggtaaatttatcaaagagaccctacagtttttggtaatcaacctgcggtccagaatcaggcatactaagtgatgaggacatcctccactattactcgttggcaaagatgcaattggcccagttggcccaattgtagtctgacggtgaccgtgtgagcctcagaattatccgacctcgc

SEQ ID NO: 162701 - DNA, 979 bp, Zea Mays
gtggatttgccgggagtcccgagagaactgaccaagcacaaactgaaggtctatccccaggcgaggccgatccgacaaaagttgcgttgtttcacgcccgacaagagaaaaattattcgtgtcgagctagctcaattagtcacagcaggattcattagagaagtactgcatcctgagtggttagcaaatcctgttcttgtactcaaaaagaatgaagtggattggcgcatgtgcgtcgactgtacagatctcaacaaactctacccgaaggatcccttcagacttcctagaatagatcaggtggtagattcaatcgccggatgctctatattgtcattcctacactgctactctggataccatcaaatcagcctggcgaaagaagacgtggaaaaatctgcattcattaccccatttggagctttctgctatacctccatgtcgtttggcctcaagaacgctggagcgacttactagagagctattcaaacatgcttagccaatcactggagcaagcgggtagaagcttatgtcgatgatgtggtgattaaaacaaaaaactcagaaaacttcatcgaggatctgcagctggtcttcaacagcctgaggtggtaccggtggaagctcaatccggaaaaatgtgtatttggagtgccagctgggaagttgctcggattcattgtcagccaccgaggaattgaagctaacccagaaaaaaatcgaggctatcatgaggatggaagcaccacgatcacaaaagaaagtgcaaaggcttactgggtgcatgacagctttaagcaggttcatatcaaggttaggagaaaaaggcctaccattctataaattgctcaagaaagtagacaagttccagtggacctcaaaagctcaggaagcccttgatgcactgaagaagttcttgaccacaccgccagtgctaaagccgccacgccgagccatgctaaaccagccggcagaagat

SEQ ID NO: 162702 - DNA, 399 bp, Zea Mays
aggagtagcatcagaagaatcttcagccagcatatcaagcatagcacttatttctgcatcattaggatccaaaggcacctcaaaatggacttgtcgttcgtcatcaggaatctccccaagcgaggcaaccaaagcactgacttcttcatcagagggtcgcgttctaaggcccaaattgccatcagtcgcaggtggatttgacatgaaaagagtgaagactttggcgggaggcaaattccaggccgagtacgccaccggagcaccaacattggacactttgcccctgagaatcatttccagtcggctcaccaagtctgcagaagggattctcctgttggtaacccgagttgagtcggctagccctcgatacagataagctgggtggatcctatctttcag

SEQ ID NO: 162703 - DNA, 509 bp, Zea Mays
cgttgggtgtgttgatggatgtaggcagcaacgtaaggaaggtgatgatcttgtgaccattgatttcccaatcgacggccaggactagaagctagataaccttttgccggttaaatccatgtcgcagaaattagatcggacgatccataggcaatcaaacttcattgaatctgtgacgtagatcttggaatgaacggctctaggtgcgtaccgattcaaacccttcgcgatttaatctggtgtgtccggtgttgatcggacggccctgggatcccgataccccttcgtcgttacaaattcacaaaagagactccgtagttttttagaatgaacccgcagtccacactgtggggaagcctgagtcttagggtaattgtgattatggcccctgtgtttttctgttattggcgcccagtccagagctcggggaaaatcaggaaaatgaatttagaatttgattttcaatacacaaataaatccagaaacttatataattcatattaaattca

SEQ ID NO: 162704 - DNA, 795 bp, Zea Mays
gtgcattgatgtcagctctagatgcctcatattgtgcattaaatctttttggtcttctagggaccgaaaagtgctcatttctatgtgcatgtggagctatgccatggccttgaggggccataggcggtagggagaagttttgcagtggcatgtggagggattgtgcatgataacctatatcttgtttctgcgtactcatcattggatggtctggtataaaacacgaactatctaagatacttggatggtctacacctatagccggatggttcgagcatgtgtgctaacctttgcgatgtgtatgatggccatggcacgactctaggtggtttgccgtaaagatcagaaccaactatcggtggaccagacagtccgtgatcaagcccggactgtccggtcgtgcacaacgaataagtttgtcccaaattagtacgggatgttgtggttgaccggtgtacaagttcatcggcatacgataagatggctgggtttgtgaatatccatgtgtagccgatgagttgtgtggtagctgtagcatcaacatcatgtgatggaaaattgtgagtgatagatttttcaaacgtgtgtttcattttcctaaaatcttcttccatgccccatgtattgctttaattgatctcgctactcatcatgtaatgtctagatgtcatctggtttacttaaatggagttttgcgacgatgataggagagatgacattttgatatccccttgcttgatgatcttttagtgtcgatccatcatatgaagtgcgctatgtactttgttgtcgcct

SEQ ID NO: 162705 - DNA, 1015 bp, Zea Mays
tgggacctttgtccagctaggcattcgaacatcgggttgtctcctcgatcgagcgggaagcgatttgttatgattctccatggtgaaccattcgaagcgccatcccttaatactatctttcaaaggaatatcaagatattcagtcttcctgtctcggtgaagttccaaactagcacctccaacaagtcgatgctgccctccggccattccagaccgacaatggtaaaggtacttccaaagcccaaagtgtggaagaattccaaggaaagcttcacaaaggtggacaaacacaacaacttgaagcgtagaattgggatttagatgcgtaagattcagagagaaaaagtcaagaagaccacaaaagaagggagaaactcgcaaggctagtcctcggatgagtaaaggcatgaaaataaccgccttgtgggtatcctccgtcgggacagtaactccccgccagatctgctaggaacatagttccttaggcggcagaacaccgatttcaacaagatgtaagaggctagcttcagaaacaacagagacgtggttaccagcaaaagggagttggctatcaggatcgataggagggatgactagcgtggtaccactctgtttcctcttccggggcgccaacatgatcattcaaacaacgcggctcaagaacaaaacacgaaaagatgcaggagctcagtaagctagggttcaagggtcaagaaaatgtcgacaagagtacaagtaggcacactaagtcgggcacaaaacgacaggctggtggctcgagtgagttttgggcgcaacagagtaaaggggctcagtcagtatctctagaaggctaagactcatcaaaagaacagagtgcacaacaacaaaatggcatcaaacaaacttcattcatttatatgtcggggatctttacaaaaggaagaaggccgactcattatgagccagctaattacctccttgattcaacactacattaccactactactaaactacattacactactactaaac

SEQ ID NO: 162706 - DNA, 491 bp, Zea Mays
cttcggggaaacgtctgggggaccatagggctatagcgcgctggcgggtcatggccgccgctgcgggctgcgccaccgcgtcgggtcgtgaggcaaaggggtgatgttgactcgatggccgttgattcccatgtggacggctaagaatagatctcgtgcagctgaagcctaagtcgttgattcgtagatggtcggttagatttgatcacgacatgaatcactgttgttcgttgatttctgatcgagtgggtgatatcggatgaggcttaagtaaatagaggtcgtagatcttgtaacctgcggtcataaatcgataccggtttgggtcgtggtggatctaatcgggaccctagatttcagatcaaacgaccatagcgtcaccttacctctttggccgcataactttgtgaaaaagccctcggattttaatggattaaacccgcagttctggcataggaagtctgagtcttagaaatatttgcgcagaagtc

SEQ ID NO: 162707 - DNA, 556 bp, Zea Mays
aaggacatctgcagttttttaggcctcgcaggttactaaagaaagtttgtagcgaactttggcatcctaagtcgacccctgaccaacctattaaaaaagggacaagtgtttgtgtggcattcagaacatgagcaagcttttttggcattaaaacaagttttaatcagtgcacccgtgttagctctaccggacttctctcagcaattcgagattgagacaaatgcgagtgacaatggaattggggctgtcttacaccaggctggtcatcccattgcatttgtcagtaaggctctcggtcctcgtcatcaagcactgtccacatatgagaaggaatgtttagctatattgatggcagtcgagcactggagatcctaccttattaacattgagttcatcatccgaactgaccacaaaagcctaatccatttggatgaccaacgtcttaccactccttgcctccttggcaacaaaaagccctgaccaagttgctgggcctgcgttacaaaatcagctataaacagggacacaccaacagagttgccgatgctctatctcg

SEQ ID NO: 162708 - DNA, 394 bp, Zea Mays
tgctcatggagtccgatcgtgaccttagcttcgtttctgttcagctcacgaattgctggtctgttcatgccaaaatcatacagagatgagatggtagagttggtaagcatgatgtatgtacggattttattgtctgatgtggagacaagtacaaagtggttggggaaagcattgatttatcttttttgctgggtcgaaaggtctttagcctagttgaacatcatatatcgcagcgctgatactgttagacggtccacggttaatcctagatgatctagtcctcggagggtctgggttggcttgttaattcggaccgtccaagattagatcagttcgggtgagaggcttagtttgttgcaagatcttctcggtttcttccgatatcttgttggac

SEQ ID NO: 162709 - DNA, 614 bp, Zea Mays
ttattgtttatttctaaacactaaggtacgtgtggtctagtggttggccccaaatttctggagcaggggtatggttttgagttctcgctctgcactattttttatataattattatttatttctaaacattaaggtatgtgtggtctggtgttagctgcacgggcgaggtcgggtgctgggtagacgtcatagctggctgcgcaggaactagggtccatagagtagtagctgagagcactacgcgggcgttgtgcgtggggcccatagggcacggtgtggtctagtgttagttgcgtgggcggggtcgggtgttgggcatgtgtagtagctgtccatagaatagtagctgagagagcactacgcgggcgctgtgcgtggggcccatagggcacgatgtggtctagtgttagttgcgtgggcggggtcgggtgttgggcatgtgtagtagctggctgcgcgggcgctgagatccacattgcagtagctaatagagcacgcgggcactacgcgtggggcccacagggcacagcccccgaggcggggcgcgtggggtgggcctagagtgtcagcgcggtggtgacgtggtagcaccaggtgcccatattaagttttt

SEQ ID NO: 162710 - DNA, 340 bp, Zea Mays
gagcattgtgttttacctacttttcccttggtcgtatcctcttgtttgtcgcttgcgagtttttaactccgtcctttgttatgcttttgtttgttattgcttttacctttcccatctctcgatcttaccttggtaattacattatgtccgttatctaaaatctccaatctcccatctcagttcaagagtggtgttttacttatcctgcccttggtcgtaacctcatctttgccatgtgcaagtcttgtcttaactccattctttgttgtactcatacccttggttcttctgcacctttacctctcctcttatacccttgtctattactgcctttgaccct

SEQ ID NO: 162711 - DNA, 274 bp, Zea Mays
tgcagtaacagattttcccactaagccatcagcaatccaagtgagaaaagactgagaacccatccagtttgataataggtcgcttagtaatatgctataatcaacgtgtagtgttctttttagattgaattttcaattgttgacaggaatagaaacaaaacgccaaaagatatgctttattctgtttcagttgcaaaaggctctgaaaggcttcttgtatttttgccacagatctagattctagaaacaaaattggttacaatgggaaaggctt

SEQ ID NO: 162712 - DNA, 293 bp, Zea Mays
gaagaatagttattcagggcaagcctccaagatcaagatagtgtcatctgcatattgaatatccgagaagtcagtcccacatgcagtcggaagtggaagcctgaggatgccacagtctctagccttgttaacaattgaatgaaggagatctgctgccaggacaaagagaaggggggacagggggtccccttgtctgacgccgcgcctgcagtgaaagcgtcttccagggacaccatttaaaagtacttgggatgtaccagagcctaaaatcaatgagatccagtgaatccatt

SEQ ID NO: 162713 - DNA, 460 bp, Zea Mays
acaattcaattgtcttccttcagtactttctctgcaacttcgtttagaagtttgtcgacaacttcgtctattgctgcgtttaccaccctaaattcgtcaaggattcccttcagcgatggatctgcttcgggggcacagtaatcacctcggctagcaagcacttcgtcaaaagcctcaacttcaccctgtatccatttaattgctcctttgggatcgccacaaataaaattttggtcattcgagaatgcacccaccttagcaaacatactcttcagcttatcacaacatcgaatggcaacaaaaaaaccatcttcttttgatagtcgaagctcttcaacattcttttggactctatcccgctctgattcagctatcttccgtttttcttttcaacttccaaattttcattaaattcatcaagcttcccttctggccttgacacttcagatttgtgtagctc

SEQ ID NO: 162714 - DNA, 481 bp, Zea Mays
cgtgcttccgaccgtcatccccgcccttggaaatctcactcacccgctcgtcccgcctgcggcaggctcatcctagggtccctcttcctgcaggccaaccaacagctaggcggtgctccgcccacgacccaagctgctccgccctgaccccacgagcgactccaccctcgtgcttccgcctccctccgctcgcacgtgagtgctccctccacctgctcgtgatttactctctctcggccattctgttccttcttgccctcattgcctttctctcagtatgagtatcgccatcaaccgtggaagccaagtggtgatgttgttgatggtttaaagcaaggaaggaagtagcagaggaaggcatggtagcactgaggcaaagtcccagcacttcttggcttcctcagggtaagctcttctcattcaactttctttggggcatgagcatctactactaggaacgttaaaaatatttgtagtatgc

SEQ ID NO: 162715 - DNA, 546 bp, Zea Mays
ccttaagtcattgccgacttaagccgattgctccgtttgtagggtatagtggtcaccctgggttaagtaagcgtgagcatgtcacgccgccttaagtcgttgccgacttaagccgattgctttgtttgtagggtatagtggtcaccctgggttaagtaagcgtgagcatgtcacaccgccttaagtcgttgccgatttaagccgattgcttcgtttgtagggtatagtggtcaccctaagtcgagtaagtatgcagattgacaataaacaattcgagtgcctttgagaatgaagtcattttattgatggtgtatcttccaattatagaatacaatgccgtcccaatagcttttgaaatctagctaggggtaaaacttcctgagatgctctatattccatgagttccctatttccgtgccatccatttgagtaagacgatatgatccaggccgagtgacttctgctattatgaatggcccttcccatagtggcgacaatttgtgccgtcccttccccgttagaattcggcggaggacaagatctccc

SEQ ID NO: 162716 - DNA, 673 bp, Zea Mays
cgggcatctcccattgttagtatctctggttacaaatattacttagttgttcttgatgactgctcacatcacctatggacgtttcctttacggcttaaatctgacatgttttccaccctgtctaactttttcgcctatgtgtctacccagttcggcgcatgcatcaaggctgtctagagtgacaacggccgggagttcgacaactctagcgcgcacaccttcttcctcacacatggcgttcagtttcgcatgtcgtgtccctacacgtcctcgtagaacggtcgagctgagcggattattcgtaccactaacgatgtcattcgctctcttctgtttcaggcgagcatgccaccttcgcattgggctgaggcgttacacattgcaactctcctcctcaacatcttaccgaccaagacactggatttttcgactctgcactttgctctcttcggcagtgcaccgtcgtacgataatctgtgtgtctttggctgtaagtgttaccccaacctttcgaccactgctccccacaaaattgccctgcgctctaccctctgcatcttccttggttattccgctcaccacaagggataccgatgtcttgatcctacctcaaatagaatcatcatctcccgccatgttctctttgacgagaccgcttttccctttgctgagc

SEQ ID NO: 162717 - DNA, 884 bp, Zea Mays
taataaattaatatcaatggattgtcaatagatattatttcattgccctctaaggacctgcgtaataaaggtgttgacacagtgttgctaatgaagatcacatagccctgatcatttatgtccttttatggcctaaactttctcttacctaacattcccgcattggcgcattgttgctggcaatgccatccatgtatatggtctactgcatgatgataaaatccaatctagtttggcatatgtgtggtacatgttaccccagttcatgtaagtaagagtaaaatgtgcttggggtccctaaccttgttccatcacatgagtccacttctagttgcagattcaggtacctaaaatttataaaattaatcacttcaggtcctgatcacaccatacggtatgagagtgtggacatgatgtgcacatgacatactgggtcagtggatctaatcttttgagggggatacagttggatgaagcccctactgtggtattttctatttctaatattaaagaacggaaatttctctcttctctcactctcccccacgtctgtccatttctcacaccccctgtccgctcatcatcttttttctccctctttccttcggtccagcatccctcgctctcactgttcttacattgagtttagagctgcaaaatgttcgttgttgtcgcacaactcatgtgatggtctggctacctcagaccgtatgcgtcatggcgtgcgggcgggtgtgtggctcgccttccacctttcttaaactcacaacatgtgcacacaatagtcatctatttaagttgattcaatctcctatcaatttcccatatgggattaatttttcattgcactagcatttattatgggacatggaatctatttgatt

SEQ ID NO: 162718 - DNA, 605 bp, Zea Mays
ggccgaattgctccaagaccggtgcctagactaaggccaaaccaaattcatgaccaggggagcattttccccaacataattgcgcgaatggtcaagaggtgtgctctggccacgggggtcgtgaacatggcggctagctcgtcgtgttcccgacgattgggggcatctacattcaaattgatggcttggcgagcatcactgagctatgagaagacttaaacaagggagaaaagaagatgtgctaaccgggagggggctggccgcggtgaggttgagcttcgggtggcggagaatggaattggggcgaatgagaaattccagagcttggatgaacgattacgagtgggagtgggtgcgttggcttcgcaattacctagcgcaactacctgggtgctcaatttataggaaggtaaggcggtggtcgcgaattttggggaggacgcacggcgaccggagataaggaagaaccctggcgcacgcgaattagtgtcctacgccgtggcgacctcaccggcgtcgatttgacagcagtaatgagttatggcgacgcggtggaaaggttaagccacgcggcgcacggccgggaggcggcggtcgtcggtgag

SEQ ID NO: 162719 - DNA, 1932 bp, Zea Mays
ttagtggaattatccaggtaataaacacaagccgaagaatgcacagtatgcagaagtttgcggatgtcaggtggcactttgtaagaaacaagaatccattatgcattgcagggctatggaatgagttgaaaacaggtaacataagaagccctctataaagaaacacctagtacgtagtagacaaatgttagacctctgcaaagcccacttggatggttggttacagaaaaggcttacctggatctataaaaaaaccagtcacgatttaaggcccctcaactggaaaacacctattatgggggttaagaattatacaactgtgatatactttatatctttgaatttgccttgatctagccttgaccatgattttttttcacaaaatttcctgtatgtcaccaatgcaacctgaaaaacacacacccaagttggctttgtcacttgtctgtatgaactaggaagggatttgctaggggaaaaaatcaagaaccagttcaagtttgaaacagaaaaattctgaaagttcccaaacatgctcctcttggatgccaacctgaatgccaattgcaaatcagctggacagacaattggctggcaatctcggtgaccagaagggctcttaaggacacgagtgtgtacagttgtatcaacgccttgtcacacagtgcgtttgactgccacaaccagcgcagttgctttgttatctggcaccttctaacaactctgtctttgaacagagcaacaagtttattagaaaaacatggaaagatgaacaattttgatgaaagtaggcacagtttgtgatgccaatttgatgaggtcgacatggctgacaatcccagatctttcccatggaagcatgacaaatcttttaagtttgtttatgtggacagctggcgcaagcctgacctcatgatctctctaaatcttctagctgtccgcactgactaaacaagtcacctcacatttgatttaaccgatttcccaaataaagaaccaactcaagttatcagatgatgtaacagtgcagggagcatgtagcttaaccccccattctgattgatatataattttatattttacatgatggagtgggatctgaatgtgcttgtgggtatcgatgattaggctcatattcaatccctagaaaaagtgtgacagctgggactaagagactagccatgtgtgccattctacttctgagccttgactgcaattttaagatgttccaaaaggtcagcttaacattctattctactaaaatgttttcgtggcaggaaccccacacagcatcaaccagaagagacgcatttcaggcattaaaatagccccagagaacaggtcattggaaggtcagaaatggtaccaatccgtttttttttgtctgccgatatttctgtcagagtcgggctttgtttgtgatcagtttcagatcattgtgtcgatcagaaccttaagcaggcagtccatttgccgcctaatcacagatagcacaagattaacattgcatataaaagttcttgacaacatggtcaattcattcctggtgacatggccatccaacagaagaaaaaaaattgatattgctgatcaacgaaacagttctggacccagattggtcagggaatcagttggtttgtttattctacacctggaagggcatcgaagaaaatctctctttatttctcaccagaatcttcagttgtcagaaggccagctaaagaagggcaaagcttcagatgcatacgcgcataaactaaaagtaaatcatgttcctgtttttgtacaggagaagggatctgattgggcagtggacctggctacctagattttcttgaaatttaagaagcctcagtatcgtgtatttacatgttctttttccagtacgatagatttacttttccgtaaagtggcgtaaaccgtaagtatttt

SEQ ID NO: 162720 - DNA, 354 bp, Zea Mays
ggcaaaacaaggtacgtctaggtcgtaaacgatgacggtgaaacgatgacaaggatgttgctcacaggcaatttctttacatgcccatttcacctagactgaattgactgtttcactctaacagaatggccatgcacatgcggtggcacaaggaagttgagagggaggacaaagaagtgatggcacacccttaagatggagacgcatagatggctctatacaactttgatttagagtttgcaaaggatgcgagaaatgttcgtattgggctagcgactaatggcttcacaccttttggtcaatccaccgcatcctattcatgttggcccatgtttgcaattccataaaatcttc

SEQ ID NO: 162721 - DNA, 861 bp, Zea Mays
tgagcttcacggcgcaacctggttctccactctcgacctgcgagcggagttccatcatatccaaatggcttccaaggaccaacacaaaacggcatttcaaacccaccatggtcatttcgagtttaaagtcatggccttcggattgtctagcgcaccctcaacatttcagggagcgatgaacaggactcttgccccactgctccggaaatgtgcccttgttttctttgatgacatattggtctacagccatacatggtctgatcatattcaacatttggagttagcattcagtcttcttcgcgccgatcagtggcaaattaagttgtccaaatgctcctttgcacaacaagaaattgcatatttgggccacgtcatttcagcgcgaggggtggcaacaaatccatcaaaagtggacgcagttacctcatggccagtaccagcaaactgtcgagagttacggggatttctcggccttgcgggatattaccggaaatttgtacaccacttcgtggtgatctctaaacccctaactcaattactgaagaagcacacaccttttgtctggactcaagaccacgatcatgcttttagtacgctcaagacagccctgtcctctgccccagtcttgcaactgcccgacttctcgtccccgtttgccgttgaaactgatgcgtcgggatcaggcattggtgcggttctcagtcagaacaaccaccctctcgcttttgtcagtaaagctctgggaccaaagaatagaggattgtcgacctatgaaaaggagtacctagatattctaatggctgtcgaccaatggagaccctacctcctgcacgatgagttcataatttacactgatcagcg

SEQ ID NO: 162722 - DNA, 516 bp, Zea Mays
aatagctcgagtccgactcaaacacgatcaacttttccaatagtattttaagccataatacaaactatggtccaagctcgacctggataccatttaagttcaagaatactgcctctatttaccaaaggacggtctcaagactcataccatccactctcacaatagtcaagagggataccaagataaagtcccgctgacaagcgttcaacaaggtatagtcctcacctccacatccgaagagaagaccatgcacttcgtgtactcaagaattcttctgattcttcccacatagttgtctccatgcaatcaataccatatcaaaccaaaaagtctctcaccaacattatataagcaacgaccattgagcaagtcagcaatgcaagatcatgcaacatgcacaacaatgtatccgtgctcgacttcaccatgaagtatgtgatcaacataaagacaagcaacaacaataaaatgagaaagagaagtggacttccaccatcgccgacacaatgtacacaa

SEQ ID NO: 162723 - DNA, 642 bp, Zea Mays
atcgcttactgtcaccgccaagcggggcccatgcacctgccattgcccatgcacgattactcccttcactcgctggcgggtgggcccagcgtcgggcgtcttcttcctaagtctgattcaaagccaacttgagtttgttgcagaatgccgtcgggaatcatggggttctgattcagacgaatccccacctcatgctccgccttagggtctatataaaccacccacgaacccccctccttgttcccaactgtgctagaccgtcgtcgaggtatctctcatcgagctgatggggaggatggggaaaactcacgaccaccgtcaacgcccctcaacctcaaagctttgcggtgcgtggtgggtggccatgggcattcgccacgacgggtgggaagctttcaaggaagtctggtgtgcaaaaccgatctcatcctcgggtaatttctcgtcggagatggggcgccactgctagccgcctattaccgtggccacacatcaccaccatgtcgatctaggtaatacccttgccatcttgtgcgccataggatccattaagtgtagcaccatactatttgggtagaagatcatcggtaataccgtgattgctcgccgtggttgttgctccgccgcgatgacatagttcac

SEQ ID NO: 162724 - DNA, 405 bp, Zea Mays
cagagattccgaggcgcggcgacctggatgaaggcagagcagaaaggcaggggatccgagcgagcgaagggcgggcgtccttaccatcacagcagaacagcccaagcccgggcggatctcggcggcccgcggcaggggacggaggcggcgacggctgctgcgccggagagtggaggagaggcttcacgcctccgaggtagcggcgatgcgcaagatggaggagggagggggcgcgcgcccgtgcgtttgtttgttccacttccactccacgaccacgatggtttggtttccttccactcgggcggagacgaggtagggggagaagggaagggaacacagctgcgtcgaaggagacgctttcttttcttctttcctcccgtctccttttgcttcctccgctccgcc

SEQ ID NO: 162725 - DNA, 841 bp, Zea Mays
ctcgcaacagggcagctaagatgtataaggtccaatggagcaatcacaccgaggaggaagctacatgggaaacagaggattatctaaataggaactaccctgagtttctacctagaggtgttggtacataaccatacccccatcacacctcactttctgtatcaagataccatcatacctccctattcataagaaagatggaccatgtagataagtgttgttaggcttccttctgaaattgcaaggaggatgacattcaaagagccaattggcaaaaaaactcagtagttgtactatccctgtctaggcagtagagttacgcacctccttacccattgtagtctcactcgaatctcgggacgagattcttttaaaggatgggggctatatcaccccaagtgttactcagggttcctactcagctctcacaccttttacctgttatcacatatggttagtagagcaagagacatcaaacttaaggacccaaggtttataattaagtgctagtcatcttagagtacctaccttagcctttcatgcacataaaaaggggataaatgcttaaaccccaagtctacccactttaaaacaaatagagcaccaaaagaaataagtgagaaggcaatgtaaatgacattatcatgacttcggctaattataaaagttgtagatcaccaaaattactacaagaaatagtaatgaagctaccccaaaaaggttctacaaaagatctaaaagatcactcacgtggagggcttaaaggaaaaatcagcttttctataagtcattttcagccctttcaaagatcaaccgtgttcacctagttccaaaactcaaa

SEQ ID NO: 162726 - DNA, 939 bp, Zea Mays
caaagacccagcgcataatatttatggaactttatactcacattcttatatttgtttgcagccttcacaaacctgcaatctgaacacgtcacaaatgatgtcttgccttttgtggatgtacatcttggtcagtcacaaatgatgtcttgccttttgtggatgtacatcttggtcacctctgtttatcgcttttgtggatggattgttcagctggctttagtagatggaatgactctgcacttgtagttgcgtaatgtttgtgcttagctgtctggattgtgccggccaagagttggctctaggtaccttgtaaatagctctggtttggttgcctgtccctcactgtatcaactagccgtaaacttggaccatgtaatcttattctgcaccagtttccagctgaaacaagcctcaacgtcatgctatggtgcacgtttaactgcggtgctacaactttaatgtgaattattttcgagctacctatgttctatgttctgttgagtatctgttttctttttctctgaactaaacaattttgtttgagatttagtcatcctccatttactttcattatagcgtgtataactgtgtattcatattttcccagtgccggatagggcgcccgaaggggcgccgcctgatctagtgttatgcaatgcaagtggaaggtagcggtgaccacgggcagctaaaaggaacgttattggcgacaggatttgactatctgactgagtactacacaacatcgaaccaaacgccgaacgcgaaacattatcgggttgcactgtgaaaatacgaccggtttcggcgcaaattgaacgaaacaaaaagtcaaacactactaatctaagttcagttttggaatcatgcacttgttgtttgtggctactgagactatcttcagcagactctctattccactccttatttcaaacttca

SEQ ID NO: 162727 - DNA, 581 bp, Zea Mays
gtcatcttctaccttccttttctgctatccatgcggcaatggagcaagcagtgccgagcatcttctcaatatgtcaccggccggctccaactcctcacagaaaccgatgacgacttttgtaaatactcgaccacgtggtgcagtggtttcgagttggcatagctttgtgatctggtggatgagatggatgaggggtatggttcgtataaatagtccgggttaggatctcaagattgtaacagaatcctaatgttttgcatgagatcgtaactaattcgctattcaacgagcggagaccgcaaactaatcgctcggccatctcacagtgacacaggaaaaaggatttaaaaaaaataacgtcaccacaaagacaccctacatcagccatgggaatccacctgtcggcacagcctacggccagcaaatgggctgcacgatgccccccatgaaaatttgaaccaagggagatggccacggtaggccctatttgtttttttttaatttgtctttttctttgattttataattcttttccactttccaattttcaatttcaaatttggttgtgatttcaattcaaa

SEQ ID NO: 162728 - DNA, 470 bp, Zea Mays
ctggaaactatgctgatgttagggagagctaggaaccgagggtacacttgagcgatggcccactagtcagtgagaagcttggcacaatgtccgaggtagaggagaatagtggcacgacgagaaggagtggcggtgcggtagtggcgtagctagtgagtgaaagggaggaactagagaaagcgacaacggtgggtggtggaagaaggctatggaaaaccatctcacgagaggacccaatgcgacgggggaattaaaaatggtgtggttatgggcacactagaccatacatagggtcactgaaccgtcaacggtgcaaagtctagtgagcaccggaccacaaacctaggctgaggaaaaccctacagccaatgtgcaatggaccgtccggtgaccaggcccagtgcgccaatagtgcacccataatttttcaaattttgtttttcttttctggattttgcaccaaccaaatc

SEQ ID NO: 162729 - DNA, 653 bp, Zea Mays
gaaactggaagtttgttcgcttaaagcaaggaggagactcgatgatgcaatacctcgccaaattcaaccatctctcctagtatgctatagagcaagtggacacggacttgaaaaagaaaaaatgtttcatgagaggtctgaatgatcgactacaacaaaagatggccacttgcctagatctcacttacagcagggccgtgagcacaacacttttcattggaagccaagaatttggggcagggaaagacaaaaaagatttggcgtgaaggggctgaaggatcctctcaaggatccgagaagcggtcgatgttgataattcgtcctattaacccaaattgctcttttcctcgtccacccgcctatcctttcagacaatcagttttcatccatcccactcctgcccctgctcaaaacaatcagccgagtgcccctggtacttgtttccctgccttacccagttcatctaacatttgctttaattgtgggaagtctagacacttcatcaatgactgtccctatccaaagcaaaataaatccaatttccaaaaggcttctggaagcacatctcaaggcaagggaaatgtggcaagcactcaggcaagcaaagatcaaacggaaactagacgtgtctactatactgaagtggctaccac

SEQ ID NO: 162730 - DNA, 1063 bp, Zea Mays
tctgcagttgcttggttggatggcttgaggactgggggagtcgtcagaaagttcttgagtgcttcaaatgcttactgtgcctctagagtccactgaaatctgtccaccttcttgagtagcttatataatggcatgcccctttcgcggagtcgtgagatgaaacgactcagggctgccatgtagcctatcaacttttggaccttcttctgtgatgttggaggctccatccataggatagcgtcgatcttctcagggttcgcctcaatcccccagtgactgacgataagacctagcagcttccccgctagtactctgaacacatatttgtccgagttaagctaccagcggtagcgcttcaagctgttgaagacttgctgtagatcgtcgatgaagttctccgagtccgtcgtcttgatcacaacgtcgtcgacataggcctccacatgtttgccttagtggtcagctaagcacgtctggatagcccgctgataagtacccactcttgcaattccacctcatcctatatatatatatatattattcagatggaggggaacatgtgttctggatccaagagttctatgactatgatgagttttaggtctgcgatcaaccagtcaactgtggagggtttgctggtggattaatacaccgtatcagcgttgtaataaatactttgttcgttattaataaagcaccgtgttttgatataatccactatataatgtcgctatacatgtttttctcgatttgattacatgcatagtggacattcagttttatgcttaaaactaggtgtgacagatgaggtctctagaaacataaaggggatatcccttgacatatgctttttacggatgatttagtgctagttgacgaaagttgggaatggttaaatatgaaactagagttataacaggagactatagttcaaaggtttaaggcttagtagaactaaatccggatatataaggtatgacttggttactactacacatgaggacaaatatgttagtttggaaggttaagtagtgtcaagaaaggttatctatcgaggtttagg

SEQ ID NO: 162731 - DNA, 410 bp, Zea Mays
cgctgccactgccagctagccacactcccctgggctggccgggctcctccctccctcctccagtgtccagttgtcactggatgatactaccctctgcccggctggggctgatgcccgatggcctgtcgccgcctgtggcttgagtctgagcagcggacttggacaaaagctttccatcccttgcttgtagtgcggctgcctgccggcccccctctggcgcctgcctctatcaccctgaccactgctcagttgcaacccaagaacccatgcggccatgctgctggggcctggggtgcgggccgtttccttggtcgcttccccttggcccgacgactgcttggaggaggaaaaaagttggaatcactgctctgcatgcatatatgctcctcgctcttctcctctacgtaccc

SEQ ID NO: 162732 - DNA, 956 bp, Zea Mays
ctcaaaaggtgccatctttaaactagactggtagctgttattgtaagaaaattctgccaaggaaagacacttgtcccaatccttcccatagtgtagcacacaagccctcaacatgtcttccaaaatctaatttaccatttctgtctgaccatccatttgagggtggtatgctgagcttcgtgttacgtgggtcccaagtgattcttgcaattgctcctagaaacaggctacaaatggtgctcctctatcagacacaatagtccttggtattccatgcagacgaactatctggtcaatataaatttctgcatacttttctgcccggtgggtggtttgtactagcaagaaatgtgttgttttggtcaacctatccacaatgacccaaatagaatcgtggtgacgggaggtattgggcaatcccacaatgaaatccatgcaaatatcctcccatttccacgagggtatgggaaggggctgtaaggtgcctgccatcttcaaatgactggccttgactctttggcaagtgtcgcattctgatatatacttagcaatttccctcttcattcgggtccaccagtacaaggatctgagatcatgatacatcttgttactgcctgggtgcatggagaatttggaaaggtgagcttcatccattattttctttctgagctcggggttcttgggaacaaccaatcggtctccaaaccatagaattcctttgctgtccaaatggaaacatttgtatttgtccatcttctgttcgatcatttccttaatgacttgaacacccttgtcaccaatctgtgccatgactatttgctcatgtaaggtgggctccactgaaatataacttaaagcaccggaggcaacgacttccatgttcagcttgcacaactcatcacacagggtggtgatttttgcatccatattcacacagttgcactgggccttccgac

SEQ ID NO: 162733 - DNA, 750 bp, Zea Mays
aacgcctccagcccgagaccgagccagaggctctcttttccctctgtgctctctggatctctgccctctatggcgattccccactctgctcaccggtggtgattgtcggcgatgtgttcctgtgactttctccagcgtgggcacctctgcctcctcctctcagtgagcagccttgccttccctctctctatctctatttcgctggtcagtgagcctgccaccccttgattgctcaaattccaaattccttccaaattttgtgaatctttgtgcttgaatgagtccctagtgccacattatatccccctgcaggttcctagctccttagggagggcttcatattctcacatgagcttttctccaaaaccctatttccccgcacaccacgtgctcggtgaaatgcccaaaccactcaaaattgctccgattgaacccaaacttttcaggcaccttcacgacaccttcagtaacattttcatgcaatttcaagccaatctgatataccaggcatcaatttcacacatttccctgtttcgagcgatcgtttccgagctgagtgcccaatttccattttctttgcctaaattcaaaccaagcacacacttcactcatattcacccatataaaactattcgcgaagtatcggctcaattccacgtcatttcatacctcaattcgaattccaaacctcctatggcactatttctcgttcaaacgtcgttttcacgccgtttgacctctcgatcgcca

SEQ ID NO: 162734 - DNA, 763 bp, Zea Mays
tggagatgctcttagtacggagggagtattttgttaagctacatagatatgtgcagttataagatttaaattgttggtcaattcattattaggaatgaggagatagagatgagacttgaaaaggtgaagctcattggcatcgagttggcacgagcttaatggcgagctctattattgaacgtcttctcaccgatctagtgtaggggcataacgaaatggcaggcgatgataccaaaccttggtactacccaatcatgcatggtgttgcacccattgcatagccattcaaccaaaggccgtcatgggcggcagtgctggactgctggccgaacagacacggtttggatcaagaactgatcaggccaggcagaataggacactgccacacactttgtcgcaccattgcacttgcacatgaaacatggtttaacacagatacaaaacaagtggcaaaaaagatgttcatcggcagcacagatttcaatctcgagctatataacacagcaatgtagatcgaaatcagagcaacatgaaaggccaaggccactacgagactgaaatcaggcattcatctttcactacaagaaacacagctcatctcccacacgagagaacatcatgacaccgatactcacccatggataaggttgctgccagtaccttgttttatactagatcgtaaaatagatgtgacccggacagagtggtctgcagacccacactttctgcgcggtagtgtcctcaatccactttcatggccttg

SEQ ID NO: 162735 - DNA, 743 bp, Zea Mays
gtcgaagttgagccattgatccactcggctaaaggtgatcgggaattccgaccaccggtagggagccggggtgctggtggttgctaccagtgcctgtcggtcgttgagcttctactgccttctattctcctacgacccgtgtcctccgaagatgacgttgacctccctgtcaacacgcgatgatgcttcgcccctcccctttcctattgctgaggctgcctgggctcgccaggccctcctcgtggtgggggaggtggtagaggctggaatggtcggccattcccgacggaatgcttgaagtctctgcaattccgcagggtgtggcgcatatccttgtggtacgaacactgggcgtcgaggatgtcgtccagcgttcgctcgcctccgtggggtgcccatcgggcacgagagatgggtggtccggcggcgtggacctcttcatgtggcctcttctcccaacgcttattgggctgctggttcgtgtcgcgccgtggtgtgggtggtgcaggttttgctcccccgatgaggtcctaagcctatttgtcagcagtgatgtagaggttcgcttctcgaaacagctgctcgaaggtgatcggcgccttctgcagtatggctcagatgaaggccgagtcattagatccctggtagaagtcttcaatcaccgctgcctcagtgacttcggggatacagtttctcatggtctagaatctcttgaggtacgaccgaagtgtttcctcgccccc

SEQ ID NO: 162736 - DNA, 566 bp, Zea Mays
ctctctgccgctggtgaagagtagacttgagtttatgctctggcaagtgtgcagacgcctgttgagatccttttaggaccagcgactagctagctagggggcttgtgtgtatatccaacaagaggttctttggtttgactgtgtatcccatacatactattattactacagctttcttgcattctcaaaatgcacaaaagggatcgatctactgttaatacatagtaacactcattgcctaagctaacccgctgcactttacttgcactccagaaagcaaaggcaggcacatttgcaggtttgctattgctgcgccaagctagaccacacagcacagctgctgcaaaaaagaagaccacaccaggtggggatggggctgtgccctgcatggagaatagatagagcagcaaaacaaaacaattgcatctttttttttctctcccacagaacagaacataccctaccctaccaaacggggcatcaaaagaagaggggggaatattaaagctttggagtgatgataggtactccggaactccggaggggccatcatcccctgtttgcag

SEQ ID NO: 162737 - DNA, 654 bp, Zea Mays
accaaagctagtgcccaaatatcattgcccttgcgccacttttctacctgcagattggacacttctaccacttcaccacattgtccacagttgcccaatagttggacatgttccccatcatcaataaacttaatcaccctaatctcccaatcgcattccattggactgtgcaactctaaccagtcataacccaatatagcatcataggctcctaagtcgatatcagtcttgaaagaatgaccattggcccaccactccaaagatttgaccattttatcacttgtcatagcttccccattggctaccttaattgttgttgctacatagttggtcactggaatattcagtttgtccaccatcctcttactgataaaactagttgaactacccgagtttactagaatgaccatcacttggttgccaattagtgctcagactaccatgcattcttcatacattgcaccactgagagcatgcaatggcagcttgtattcttcctccacttgctcctcctattcaatcttgcttaacatctcatcagtgagggtcatgcctaattctttacgcaattgcatctgaatcttctttgggcatttagtctggtgaccttgctcaaatttctatccacaagtaaagcaaagcccattttgtcgc

SEQ ID NO: 162738 - DNA, 1523 bp, Zea Mays
acatgatcctgaggggcaaagtatcaaatgttggtgctcctgtttcctactcggcttggaatctgccacctcctaggtcatttttcaatttcgtgtccaacctcctgctggtgatagtggtctgggtcttagagtgcgaccctctcctgaagacattgaggctctggttgctcctcttcgtgatcttcccaatgatgagaggcaagttcattttgagatgacagcgagtccagatgatgcagaaatagatgttgtactcaatatgttggctggagaatcttctgactcggcccattctgaaccgatggctgttacgtttggacaagagcttaacaaagtagtggtcacccgaaagcctgagggtactcacccaaagcgtcctcgccaagttagccgttcaactgcgcttgttgaggagaagaagaagaagaagaagaagcggcttcggcgactatcatgcttggaccaggatgctggcccttctgctcctgtttgtgaagaagtaccagcagaagtccttcctgaggttgatcctaatggtggtgtacatgttgaagctgaccccaatgggtgtgaccttgatgaagctgatcccaatgggtgtgatcgtccagaagctaaccccaatgggtgtgaccatgcagaaattgatcccaatgggtgtgaccgtgcagaaactgatcccaatgggtgtgaccatgcaccggctattgtccgtatctttgatgaggacgaagaagaggaagaagaagttccgctaattcgtaagaatagccggcgttacagaggtagtaggggggatagtgatattccttctccagctctgtctgctcttgtcagccttcaagaattgtccataacagattttgatcaggcactcgaggatgtcgttcctgaagatatggtgtcggagccgactgctggcgacatgatggatgtttgctctgaaattccagacgtgggattagaggtatcccgaccagtatctcgcgcatcgtcgactttggaaggcagtcttcggtgtcaagaagttggtcaggattgcccgactcccatggaggtgattgaggatccttcagccttagaggtggctgttgcagaaaacccagcccccgagggtggtgctggcggttacccagccctcgagggtgtcgccggtagtgatccggctctggtgggtagcgtgagctgcaacccagcccccgagggtgttgcaggtaatgatccggctctggtgggtggcgcgagctacaacctatcccccgagggtgtacgagtgagctctccttcccacacctccatggatgtctatgtcgggtcgtctccaccacgatctgatggggtgattgcgatgcatacttctttgacttcgagcaagcaagtcgccttggaggtcggcgagccagatgcaagaattctgatatctgctagtggggctgagtcaacccccggcgatgctcttcaaattgttccggttgatcttcctttgtcgagctacaacacaacttctcatgacttgggat

SEQ ID NO: 162739 - DNA, 408 bp, Zea Mays
ggaggatggatccacaagagaagaggttagagaggcgcgccaccacggacttgtcatcggcttgaatcaccaccaacttgtcgcgcctccatggacttgtcgtcggcttgaatcaccaccaacttgtcgttggcttgaatcaccaagatgggttgggttgggtatgtcaagagttcaggtaggttgggtgggatttgggagaggacggatcaaaggagtgtaatttgatctatacagcaaatacacaagaaccgtatgtgtacaagaagctacgtgggacacgagacgtagttaatggcaccatactacttttcaaatagttaagtagcattggtcaaattagatgaatagtaatggtgtttctccaaagagacagaattgtaatggcaagaattttatcaaggtgca

SEQ ID NO: 162740 - DNA, 720 bp, Zea Mays
gtctggctgtcagaccaccctgagactgaacactgactgacagtgagttctgaggaactttgggctcgattcttgtgcaaggagataagcaaatgggcaagatccctatagcaaaattgtagctggtatatagagctacaagtttgttacagatgaattagcaagttctcacatgaaaatccaagatctgggcactgcaattcggtctgtcaagcgttctaaacaagtttcccatggtacagtagctgaaaaagatcctgggtttagatcccctcgccgccggtgatcccacgccgtgatcctcatcgccgttgcaattcatgctctgtggggtgcagataactcttaagggtaagaaatatcgcatcgtggatgaactcaggccactgttccgcttcggccgccgtgcccgcctgagtcacggccgattcggatgaactcaccggaggtagccatctatcgaccatgcgccacgtgccttggtgtcttaccacgtcgtagtagctcatattacacatgtccggtgatcgccggtgagctagccacggtgaaagccaccaatctcttgcgatagtgctctcctcactctccgaccgtcaccgtgccatctcaaattcacgggacaccactcgaggatcctataaattgagcatgccatcggttccgcaaggtagtcaagcacccaatccatcaactcgtgccttcaattgttaaccagag

SEQ ID NO: 162741 - DNA, 415 bp, Zea Mays
tttggcccaaattggaaccaacacactttttggcaaatccactcgagaaaagaggtgtgatctagcaaagatcgaccacatatggtcggttcaaaggatcgctccgatatctccccaagcaacattgtgaagctgactatggagaaactatcggctaaaggtctacagagattcgaggactacaaaagacagctgatcgaggaggccagggagaagtacctggccaatttcaaggtggaccggcatcagaagatcgtctagcaagaggagtgtgacctatcgtctcttcgacccactgcaccgcccccaatgtaagtaaaacagatggtgttcaatctcaaagaatttatgtggttgaacagtgatagcaattgaaacaattaatagggggtatgcaagaagattataaaaaatg

SEQ ID NO: 162742 - DNA, 389 bp, Zea Mays
caagtccctagagatgattgaggcaagcgccaatatctaagacagagtgggggagcgtgtgttcgtctacgtgcgtcgatgagtggatgctgatgtcttcgatcttctccctcctccatggagggaccgctgccctatttatacaccaaggggagtgtccttagtgaagtcgggtcttgtattcgaagaagagatgcctggcgtctgatgtgatggtgaactgtgcagtagattcatgcctgctgacttctcgtagagagccgaggccgagatcgaggggttgtccatacgcccgaacccccaagggagaggccgcccatgccgtagtggctgtaacaacgccagggtatgggtcaaaggctgcttacggggtgtgtcatcgtcctgcg

SEQ ID NO: 162743 - DNA, 406 bp, Zea Mays
gccttagtgactctccgttgatcgccggaatgaccgccacggtaggagccacgaatccattgcgccagtactcttcttcctcctccggccgccagcacaacctgctcaaattgaccgctgccgctgtcgctccctataaattgagccccccaccagttctgtaaagtcctaagctaaccagccacctcgaattagccccgatcgttcgctgaggtccgcgaattcggagttcccccaaatcgatctccgccaccgtaaaacccaccccaccgcggccagaccattccggtaaggctctgcgcctctccactattgttctagcagctatgtaggcccgtaaagctcaccgtagcatccgcttgaccaattcgggcctggataattgagaacataagatcgacgccgc

SEQ ID NO: 162744 - DNA, 427 bp, Zea Mays
ctttagcgatcatagggaagatttcttcctaggtggagccgttatgcggtgcagagtttcctcttggtctgcaatgcatcaggcggttcgaaagtagaagactgctcctggactgaaggtgatcatgctcttgaaggtgactgccatggagtcagcatttatcaacgtcgcaccccctacctggcacgccagctatcggtgttcgttactcgactgcgcaccacggggttccccacgtgatgcttttgggcaggacggcggcgttgatcgtgactcgatggttcatatggtgacacaacagaaactcgcgcagaattatataggttcgggccgcgagagctgcataataccctacttcctatggtgattcttggatcggggagagattacaagttgggaactatgagtgttgtgggtcaaggtgaga

SEQ ID NO: 162745 - DNA, 643 bp, Zea Mays
tagaaactaagttgatatactcttgctttgtttctagatggcatgtacccgtgtgaccgccagcaggaagagtaccataggacacatttgcaccaacactagagtttttccacccccttcactacctgaggaggcccccttgcacatcaccgctgaggacatcttaaggacacagagttcaacgattggttccttgagccagaggacgaatctccacactttacctttgggtttttaatttgagtcaaaatctaattggtttttgttcttgagttgcttcctctcatccttactcttttgattgagtttttgagttaattcttggctttgcaattttaggatgtgtcttgggtttgatctttggtttaaaaacactcgtagaatcattgcaacctttggtatgagttgatccaattcagggactagttttctacatatttgcacttttgacaaaacctcaatttggtttgagttttttgatataggttagatgttttcatattttggtgctcaaacttatcaagtcatttctccttcttctattcttgttgtctacaaaatttggaggcaatcagagcaaattttgtcacacgacactaccactccacgcgtgtcactgtcagatttttggccgacactgtcg

SEQ ID NO: 162746 - DNA, 898 bp, Zea Mays
tgtttaaactaaaaatcatgaaactatttttattaaattctagggaaaataataagcctaggaaaattggtttcacaattttaggatttttctacaatttataacaaatttcccaagttcttctgaaaaagaaaaagaaaaagattcaacaggactgggccggtttcagcccaggcgacgcaatccagagggaaaggcgcccgcgctggcgactttgcacaggggtccccgaggttttggctaactgaaaacgagttcctattactgtttcttgtgtcactgacagattgcagataagccctccaccttctatctcttcgcagacccaagtccacgacggcgttcacgcgcggagaggctccggcgaggtcctggaccggccgattggggctatgaccggcgctcagctttggcctaaaccaaattcactacctggagaacgtttcccctaacctaattgcacaaataaccaactactgagctctggccacggtgaccgaggacaaggcggcaagatcggcgtgttcccggcgaccagaggacttctagtgcaattgcgtgggtcggtgagcatcacagagttatgagaaagctcaaacgagggagagaggaggatgaactgaccggaaagggggctgcccgcggtgaggtcggtttcgggtggcggaaacccgaattgggggaaaaccagaattagggctcgctggtgatcggctgggggcaatactggttggggtggtgcgtgataatgtggtggagctagccgcgggctcaatttatagaagaagcgagcaaaggtcgtgaatttgggcgctgacgcgcggcggtcattccggcgatcaacggagaggctagaggaagtcatggcgatgcggtggcgcggttaggacacgcggca

SEQ ID NO: 162747 - DNA, 935 bp, Zea Mays
agagtggcagatgccctctcacgccggcccaacctggatcaagatgctccccagctgcagttgaatgctacgtcagtatcatccgtgataccgagttggttgaatcaagtgctaaaaggatatgaacaagatacgagtgcccaggagttattgagtaaactggccacaggagaaaaacttgatcactataccttaacgcagggaatcatcaggttcaaaggaaggatctggctgggaatgaatcaagagatacaacgtttggtcatgtcagagttacatgcaagtgccattggtggtcactctggtttcccggtgacgtatcgtcggatcaagtctaattttgcttggccgggcatgaagcaacaggtccgggagtttgtccgtacctgtcggatatgccagcaagccaaacccgaaaggattaaatatccaggactccttctgcccctaccaattccagatcacgcctggcaagttgtgactatggattttatatccgggttacccccctccaaaagaggcaactgcatactagttgttgtggataaattctccaaatatgctcattttctggtattgaaccaccccttcacagcccttacagttgccaaagtttacttgtcagaagtgtataagctgcacgggctccccacagctataatatcagatcgtgaccctatattcactagcaagctgtggagagagttattcagattatcgggaaccaagttgtgtttgagcagctcctaccacccccagtcggatggccagactgagcgggttaaccaatgtctggcgacatacttgcgttgttttgtgcagtcatgtccgcgtcattggccaagctggttaccccttgctgaattttggtacaatacttgttaccatacgtctctgggtaaatccccattcgaagtactttatggccacttacc

SEQ ID NO: 162748 - DNA, 845 bp, Zea Mays
atccttcatagtgtcccagagcatgaaggaccccggggacttagactcatgagcaccccgaggcacgaggggccccagggggctttgaattgctcatcagtaccatggggcacaaggggcctcgaggacttagattataacagagacatcaggggcactagggacctcaagccttagagtgccccggggcatgggccccgcctatgatggtactagtgattgggctgacttcctaaaccgagatcattgagtattggtagcggatagagatatggctttcattgggcactaacagtgctaaattgctgaaacttgaggtgcatgagatgatttgcattaaattagaagtatgaatgagaactgccaaaatcaaaagtattcatggggatttgaaatatcagataagtataggtggtgcagtacaatttctttaaaatggcaatagagggttgcttatgtggaataaggggaagaactatagctaaagaaagaagggctatgacagaaaattcatcatttattaagtccttaggaaaggtatgttatatttgtatagttataaatgtagaagtcactgtgctcattgttgatagaattaagaaagaatcagaaatttttatgtcattaaaagttcagacggtatataaataagtaaataactaggaagaaaacaagccatttcttcttaataagaagggcacaactggaggaacagtttctccactacttcataataaacaaaacctaacctgaggatatgtaaacattcagatgctgtgttcaatgcagatgtcctactagagaggcctttcatgcatgcgccttcaatcgagcatttgacaagc

SEQ ID NO: 162749 - DNA, 493 bp, Zea Mays
aagcgcaggggtcacgttgtaaatatttccaagacacagttcgccctacgcaggactgcgggttgattccaataaagaacaaggtctcttatgcaagaaacccggccgaaggggtatcgttgtatcgtagccgcacggtctgatctgggcggccaggattagattaggttgacactctaatcggtacgcaacgcacgccgtaggatcaaacatcgacggcacagacttcattaaggcgagatatgatcacgacccccatctaaccaccaacggtcccgagccatcctttcccagatccaatcccagccgtaaactccaaaatctatggtcgtgcacttctctctctctcactcgatcctgaccacggcggcgacgcaagtcctcgcggcggggcacgccggcgagagaacgaaaacgcgcctggtgaccctaaaccccacgtcgattacaccaaattggaccagagaaaatagctagcctgggggtgcattca

SEQ ID NO: 162750 - DNA, 917 bp, Zea Mays
ccacaagaaagtgccacacgtgagaagctccagaagcttgcttctccctgcacaccacctgattcgtacgaatcataccaccgtgaccatgtgacaaaccgtgcaagtactaattgttgccattagctgacttaaggtggagggaaaggattaggatatgtgtgcacggatggtttgggggatttttgtttcactcaaatttgcgggaggaaggctgctgatacaggggagacgaaaaaattggggaagtattggcagtctgttggagagaagattttgtcttttttctttaaaaaatcgttttggggctttttagctctcttggagttgctctaatcatgcttacagcctctaccacacctacttccacaactctcgttccctctaccgctccaccggttcctacctcatttccgagagagcgacgagatagaggtgcgattacttgctgaggatcctcgactgtttgacctttagagagccactgctgtcagagtttgccggtttagacacgtgccagtggagtccaggtttccaactcagagagatcatgtcgtagctcctctcttcagtatccaaactcaggagtccttctaccgcacccagctgacagctcagatcgccttgagggctcaccgtcgattaacctgacagctttccattcagtagctggtacagaggttgagggccacatcacatacctaccagttctgtactcattgctgacttttggtcgatacaaagaggagtaggccagagtattttatgctattgtttagattgactccggccatcagtggatgaagtttcgcttcgagcatgagtacgtcactatccatactactcaaatcttagagctctttggattccctaagtcgtcgacgaggctccacagtctttgttatggtaactcagac

SEQ ID NO: 162751 - DNA, 869 bp, Zea Mays
gatgattatagggaaggaggcgttgctgaacatcaaaaaatgtttccttcttaccatgttctaacctatatgcttgtgagtcacccatacatttcggacaacgcagtatgccgtggacacaccaaccagaaaaaatgccatatgctagcagatcatgaattgaccatagatatgttgcacgtagagtaaaacgacatttcagatgactatcatatgcctcaaccccctgccacaacatttttagttcttcgatcaatggttccataaatacattgatttttgttataggatccttcagacctggaacaatcatttggtgggttgatatcaataattagtttcacaaaatcattataacagttgttggagaaggtgtactttgacttcatcgccatgagacgtgttaccacctgcagtatgctcacattggttccttcatgcactttagcctctgaggcttcaagaagcttgtagaactctttcacatcctttggaaaagcttgattattctgtagttctaggtactcattcctaatatcatccaacatctcttccattcgatctacatcctggtccccatccgactcaatagtatggtccacctctccatgctcatgccataccagatagttcggcataaagccatgtttgaaaacatgatacgagagctccacctttttcaaccgaaccaagttccgacattttattcacgggcacctcgctaaacgagcatcactagcaaatgcgagtaccatgaattcatctgcaactctcacccatgcatcagagtgcccatgagtgacactgtcgaatccatcgtacatcgcccttcttcgatcgtcactcatattcaaagctaaagaaacgac

SEQ ID NO: 162752 - DNA, 629 bp, Zea Mays
ggattaggcctccgcagcaggactcagctcggtaagagcgtgcccagctccaggtacacaatattgcaaatcagaagcaaccaggagagaactcccctcgtcgttcagactaccccccacaacaaggccgcgatggcaatgctaccagggactgaggcaggggctgaggacctcagcaacatagaagattttattgtcttttccatggcgaagactcagcacacccaaccaaagactgtctgagaccaaagcaacaaaagaccgaatggccgggagcacgccagctgacaaccaaagagtcatcgctcatacctaacaaccccaataatacaatcaacatcaatatcaaaatgaacacccctattaccccagcagcaaaactgtaacctctttccatagcaacaacgccttcaacactaagtaatgttagtgctgccacctccatcgccacaacatccaaacaaacacctacccccacaaccaaaacaagaagacttcgtagacccacccttcaaggagtgattcacgtgatcaccggagggtccagctccgatttcgagaacaaaatagcaaaaaagggatcactactgaagggttaatcatgtcacagtcataggacccgtcattag

SEQ ID NO: 162753 - DNA, 542 bp, Zea Mays
aaatatttttacgaagccaacacaattcgaatggatcaaattggagttaaaacaaaggagatatgattttccgaagttgagggaattatttttatcctaaaatcattttcttcatcaattttatctattctatttaatttctgggccgctgccacaattccagcgaagctcaaggggtcgcaagcaagttttcaggacctagctgtgatggttcttaagaccaggtaggaccgcaggttgattgaataaaaccacaggggcccttatgcatatttccccagccaaaggggtatcaagcgactgcagccatccgatcaaccaacagcggccatgattagttcaaacttataagcgaactggtattcgcgggtggccgccagatcacgatccaacggaccggatccgaactggtgaaggggtctctagacgcctaatctcaaccgtccgttaactatccaatggcccgaggcctctcttcttcccttatttctctctctcccccaccggtgccagcccgacggcaggcacggcggcgccatcgc

SEQ ID NO: 162754 - DNA, 272 bp, Zea Mays
gaactcgatgctggaccccctagtgatcatgtgaatgactccacgatacggctgatcagcgaagtcttcctgttttggtgcttgggggtgatttgggtggtggatgtttggctgatgcgggtgcggaggcgggagtgggggtggtacgacttgtacctcctagtggtgttggtacgcatggttaggtggatgctgagcggggccatggttatatggttgtgggaggtggtgttgatatgtgtgcgcgacaactcttgggttgtcggctggtt

SEQ ID NO: 162755 - DNA, 399 bp, Zea Mays
gttctcaggctccaaaccacgtatggcaactctctgatccattttcctgcaagcttttcactcttgtcaaatactttcttcctgagttcttccagtatcatttcgttggctctttctacttggccattggctcttgggtgcgctactgatgcatacttaatctggatgctccgctgctcgcagaaatcaaagaattcagagctggtgaagttggatcccaggtcggtaatgatgctatttggtatcccaaacctgaatattatgtcttgtatgaattccacagccttggctgaggtcaaagaggcaatgggcttgtactctatccattttgtgaatttgtcaatggcaaccagtacgtgagtatagcctgcctgaggtttcttcaaaggtccgatcatg

SEQ ID NO: 162756 - DNA, 750 bp, Zea Mays
ctttgcaacaatagcaagttttgaacttagctaatttccaaattaaccatatttttctaactacttaatatcataatctcggatcaagttttaaagtgttttaagtgaaatttcaggttttgcctttagccccctatgggtgactttcattgagtcatcaaccaacactaagaattcatctgcaccacggtcaatcaaaaaaatagatagatcatccactacacccaagaaaaattgaatcaatatctcatccaaccacactaaggatctcaactcctagccattgtgctcgggaacatgaagaataagaaacatgagcatatgagaggggaaggaagagagggcagggccttactagtgagaaggtgacagagatagttgccctcggagttgcgtggtgccgccacaccatcacttcgcgccatcacctctttgcctcctatgccaccagcaatgcgactttgccttgcgtcatcttgcctccttgtgtcgtggctaggatttgatagtggttcatttcaggatggggagaaaggggaaagtccaattcgggtcagttttgtttctggattgggtcggaacgaacagctccaatgggcctaaccgaactccaaatcgtgatgactcgttccacctgaaatgaggccagcaatgggcagatatagccgaaatgaacgaggtttgaacaatctttgcttagaatatgtaggttctctagaagggtacatgctggaccttaataagatgtgt

SEQ ID NO: 162757 - DNA, 855 bp, Zea Mays
attttggcctagtaggcgcgcttgcacgggccggcctcggcactgtgccatccacgcgcgcgactagcgcttgtgattgccatgtggggctctgtcttcagccgcttgtgcgccctttgcgctgactggcaagtgggccagggttggcgagacccaccgttggcggaccgggtcactgactgctagggtacctgtgtcagctcgttcccctccgctgcaacagactcgcgcgaaattgccgcgcgcgccgcaatggtgtgggctgagaacttcgccggggccagcgccactaaccgccccacctcgccactataagaccgccgcaacccgtagccgacatgccctttctccatctccgcacgcaccaccaaaagcaccatggagattgtgttaagggaggctgccattggtgagtcgaatcctcggagatatctcggccaattgtgacctggggggagaaccacggaccaacaggcgcgttcgcgaaggaatcgtgggggcggaacatcgggctggcggggcgaatttcacgtcgacgtgcatcaccatcactgtgtcgccattactcgtcggtggagctcggctcttcaccatctaaggtattatggcgcggaatgtgtttgggaggttcactgcatcacttagtagggtttggattgggttatgaagcacctgggtgcgtgatgaggtagctccggcgggcggaccgccgtgaggcttgggcgccgccgcgcgtacgcctgggatgggggaaggcaaaatcatcgccgtccaatcctctgtggagggttaagattagaagtacataccccttcgcgtaggattagatcctggacgttggagctagatcgtacg

SEQ ID NO: 162758 - DNA, 911 bp, Zea Mays
aagcgtgagcatgttgcaccaccttaagtcattgccgacttaagccgattgctctgttagtagggtatagtggtcaccccgagttaagtaagcgcgtcggttgacagtgaacaattcgagtgcctttgaagtatttttattgatgatatatttcctagtttacagagtacattgtagtcctaatagcttttgagatatagctaggggtaaaacttcctgagatgttctatgttccatgagttcctgatttccgtgccgtccatttgagtgagacgatatgatccaggccaagtgacttctgctactatgaatggtccttcccatagtggtgacagtttgtgtcgtccctcccccgttagaattcggcggaggacgaggtctcccactacgaaggatcgatgtcgtacggccctgtcatgatagcgtctcagagtttgctaatactgggccgactgaatcactgtattcaatcgttcttcttctagtacatcgacatcttccagcctagtagcctcagcttctgctatgttttcaaagattaaccttggtgccccaaacttgagatcagcaggtagcactgcttccaaaccatagaccataaagaaaggtgtgtttccatgcaaagctcgactaggttgagttctcaggctccaaacaacatatggcagctctctgatccactttcctgtgaacttttcattcttgtcgaagactttctttctgagtgcttccaatatcatcccgttggctctttctacctgcccgttggctcttgggtgtgccaccaaggcatatttgatctgaatgctcttttgctcgcagaaatcgaagaactctgagtttgtgaaattggatcccaggtcggttatgatgctattcgatattccaaacctgaatattatgtcttgtat

SEQ ID NO: 162759 - DNA, 988 bp, Zea Mays
gtcctgcacccgcaaggcagcctcaccctccaccaccatggagaaaaagatccccgacttccttgaccggcgatctggaagcaattgcgccagcaaggataacgtgaactttggggaacttcccaagaataccacctccttacccgacggcgcctgcaataacactgtcttccaaaaacaggatataactgcacgatactgggataaccaatccatacccaagataacatcgaatgcccccaaggaaatcaccaccagattggccgaaaagacctcatcaacaagaatgacggaacacccctgacaaactgaacagctactaatggagccattagcagaactaaccaaaattgggtaacctctgcaccgaaagaccagcccacgacacaaaatcctccgaaacaaacaaatagctagcgctagagtcaaaaagagcatgggccgcaaacgaatcaactaaaatcgtacctgtcagcacgtctccttgctcactgccatccgcagcgggtagcacataagctccagaaatacccgcagaagaggaagctcccagagtgaaattaacagaagaaccccactgagccgccgggtgaggcagacgtggagctccaaactgagacggcataggagtagacggtgcaggagtaggcacggcccagatactgaggaaaaccctgcattggcacgaactgagaagtcccaggcacataaagatgctgcagaggaagaggaactgaaaactgctgctcggcacttgacatcatgttgatagtgccctgagaagaggaggaagtcaccagctcccatccgagcttcccattaggattcctcctacacaccacatccttgtggtcctgattgcagatagaacacctgccactccactggcactctgcacggcgatgcacatcaccacagcagaaacacaccagccccagcccaggcttaggaacagcccgaaacctctgagtacttcctcccgaagtac

SEQ ID NO: 162760 - DNA, 794 bp, Zea Mays
ggctaaaccttcctcgagcggagcgagagaaagacaaagaagggtatgtcgtcgcggcaggcgatcctcgcgtgcacggccaggtctgagcgcggcatgtggtatagaaggatagcaggagatcatgatcgtgcgcgtgcgagtttccatgcagaagaccgtctggggatgcaagatccctcgtcgaagatgcaaagctgtcgatctgtttccagccatatgcaacctcgccttcacctctacaactgtggtgagtcacccgatctaatcatggccccgcggtgcgtagaacctcttgcatgaaatttagttcgctggaaaatctgggtcgtgggattggagttggccggcaatggcaccgccgccctaggcgctctcatccctcgcgtccgtcggccggagtgaagaagacaaccgggatccattgatccgggagcgtacggctaggattagatcgtgtatacccgttcggccgggacgcttcggggccgttagatccttgttgaaggacagggatcggatcgcaccgtaataaaatcatggcctttggatctggtccgtgggctggcattgcatgcgcttcatgatctaatctggacggtcaaatagcgatcggacggatcgagttagacggtacaccttcggcttgagtttttacaaaagaaccctcgggttttcaagaatccaacccgccgtcctatgcgggggaaaactgagtcttaagcaattttatgagttagaccctgggttctctgttattgtgtgcgcagctcaggactcagagaaaataggag

SEQ ID NO: 162761 - DNA, 1030 bp, Zea Mays
cgcagactcaggacatagtgccagaggatggcgggttgatattctgaaacttcaggggctctttaataaaacaccagggctgaaggggtacggggccacacggccgtccgattagaattctagggccaggatccaatcggcttgaatcgaaacggtatacaactaaggccactggatctagaatccacggcaatcgctcgctccacacatcattaaatcccggccgactaactcgagatcgacggtcccagacaaacgcgcccgaaccgatacttggttttcaatcagagtcgcgcatagagcatccaacggtccacggtgcatcttccctagccctcgccgagtaacagcggtgcccgagctcccacggcggagagccaccggaagaacatcaatccgatgcaccgagcaccaattcctccaatctagataatctacacgttgtcatgaatggcccgagcacgtggacagaacccaactaaagtaaagcgtgcgcgcgagccctggccacggcgcacggcggttccaccactccggcgagcaatcgccaggtgacgcgtgccttttattgaacgattctagttgcaaccagagtaggaggtacgagcgtatgtccttaggagtactcacagctagcggagcggcggaggtagccttccttctccagccgacggcggcgaagccccccctgtgacgatggcgtatggcagcggagaggagatccagtgcgcgaggtcgcgccagagggtagaagaggcaaccagttgtggctaggttaacggcgtggggacccggcttccttatatgcgcgcggaagcctagtcgcacaggtctgccatgccgaagaactcggcatccgttgcgcgagttaggtgcaggggacgcatctgaccagctgggccccatccgtcagatagctgtgtgcgcgcggaatggagggagtactgggccgcgcggtgggatcactagatgggccaaattgagtaccgaagcccaggtagtcatcccttattttatttttttattttat

SEQ ID NO: 162762 - DNA, 781 bp, Zea Mays
tcgacatatttgtctcccacatttaataatgatctccgtcatttcccaaaacgaaagattcattgttccgtattcctagcacaatgatattgcgcgctttgctaggaatttcatcatcaagatgaacctcttcgtgaggcaaatcaccatcagggtgaattaatcggaggagagttatcacagaccacgtgaatctgcaatcagagcatatgctttgactaaggccaatagatcatattcgcaggcgtccccgagaatagatcaaattccaataagtcaaatgtggatatgatattaatcccgggtatatccacatatacattaggtagaagcattcaaaccaatatggttactcctcaacgatttctggcaaactccatatacacaggagtacactccgaacgacgggttcagtttggcttttgtgcgtttaatagaatattgaggcattacactatatgggcattcctcccctaatgccgagatgttctaaaagcatacagataaaatccccaaccacaatcatccagttgtgggcaatgtatgctattgtggtgatttatttgggaaatcttacgcacattacagataggggttttatgcagtgagattttgacttagattaatgtagtggcatgaatactacatatttgtccttcaacgtgaaggattagtctcaacttccagcaagacacgcaacaacaagtcgctttgtggttacaattctgcaaacttactgttattatcaccaaatatacagtcaatcatcaggatttagact

SEQ ID NO: 162763 - DNA, 302 bp, Zea Mays
tctctcatggtttgcctcaacgcccgttggcttcaagcttcgtgagcatgtggttgtggtatcgttcgtcgtgccatagcagccgcctggcatcaccatctgcccacacgtgcggtgtgccctcgccacccgctgcgctcaaccgtttgtcattccctcggcccgcacccttggcccctcgccctcggcctcgcgtggctgcacgacagcgccctgccatccgcagccactactctactatctgactgccatgatgtcgccctcttagctcgcaagtcacaccttgtcgtgcgtcgcctccg

SEQ ID NO: 162764 - DNA, 513 bp, Zea Mays
gccctttgcaaccccttcccataccatcttggaaatgggaggacatttgcatggactttatcgtaggatttcccaatacctccaggcaccatgattccatttgggttattgtggataggttgaccaagaccgctcacttcttgccagtacacaccacccacaggacagagaagtatgcagagatctacatcgaccaggtagttcgtttgcatgggataccaaggactatagtctcagacagaggagcaccatttgtggcacgattttgggaacaattgcaggaattacttgggacccatgtcatacgaagctcagcataccatcctcaaatagatggtcagacggaaagggtaaatcagattttggaagacatgttgcgagcatgtgtactacactacgggaaggattgggacaaatgtctttctttggctgagttttcttataataacagctaccagtctagtctgacgatggcaccttttgaagccttatatgggagaaggtataggaccc

SEQ ID NO: 162765 - DNA, 689 bp, Zea Mays
cttgattttgagaaggctttcgacactttagagcatgagctaattttacaagtcctgattcataaaggatttggacccaaaaggcttaactggattagaaatatccttcaatctggcacttcctcggttttactcaatggagtcccagggaaaacatttcattgtaaaagaggggtcagacaaggagacccactttcaccatttttgtttgtcttggcggcagatcttcttcagagtattattaataaagccaggcatctaaacctgcttcagctacctctgccagacagatgtggacaggactttccaattgctcaatatgctgatgacactcttttgataatggaagcctgtccaaagcagttatttttcctaaaagcaatcctcaattcctttgcaacttcaacttgtctcagggtgaattataacaaatcaagcatgtatccgatcaatgttaaccctgggaaaatggagattgtctcaataacgttcaattgttagaccggatcaatgcctttcacctaccttggacggccattgggtctttcaaagccacgacatcaacactttttacccctaattcaaagaattgaaaagatactgtcatgttcctctaaattcctatctcaagttgggcgattggagttggtcaactcggtattctcagctttaccaaccttttttatatg

SEQ ID NO: 162766 - DNA, 1063 bp, Zea Mays
atgaatttgaatttgataatttttatataattggagtaggatgaaaaaaatgtatgcttttatttcagattttttttgaaaaatttgttaattcatatacaccatatatatatatatatatatgcatatgttcccttaattttctaccaccctccgtccctgttcatatcccttcaccacccggaccgacatttcattttccattctatttccatgaggccaggcgatgcaggccctcacaggcacacagcacaggcgtgcaatgcgctctcagcggcccgttggcgtgaacaagatgcaaccgttagataaggccaggatttgcgtgaaaacgacgaatcgcagacgatgacacgacagggcactacagccggccggcccggtcgtttccgttccgttatgttcctcgatctctccgtgccatgcgagtgtaaacacttgtactaactggtagtggtagtgagaggctttgcccccatgcagctccaagaagcatggtcacatgcatgctactctctctcaggcctacctgcaatatacagctgctctctcggctttgggagaacgaggcaactcacaacagcagcagcagtagtgactagtgagtgatatatgcaaggagagctggagcggcacaaagacgacgatggaaagaaagaagggggagagagagaggagatggacacccaggcagctagaaatgcctgcctggctgccactcgccctctcatccatcatctaccacctcaaaccattgctgctgcaataatatactaattacctgtattatatcatagagcatgagatgaagccccccgccgcgcgcgtcttggattccaactagggcggagaaggggaaaagggcgccgccggcagctgcgcaatgatgccggcagccggcacgcccgctgctttctctttcccgggcggcccttttgactccctcccgggcccccctcttcatctctcagtcagtcagacagacggcagggccagtcgtaaagaagaggaagagctttacgtagtacttagcaatttgcactgctaatgatatgctggccat

SEQ ID NO: 162767 - DNA, 844 bp, Zea Mays
agcaatagtcaggatacacaaatccgatcacatcagaaactctattcagtctcctttttcctcaagcactgaaggccatggtaatggcttcgtcttctgcctttgtgtaggctcctagtagctcatcactggttgcctcaatagcatctaaccaatcatcatttggctcgtcgaactgacttctgtagcggaaggtgtatttaagataaaccaaaccaccctggctggagccagcagcagtttccttcggcatctcccactcactcacaagaggccataccttggaagtaatgtgttcttgtaccaaatccctggaaccaatgtaagtacatacggtgttgaaagccattaggcacgcttgcacctcattcccaattgcaattgatggtcttctaatgccgaagcgcgaccatatgggacgttgaatgatgaccctcacatcctccctctaattcagatcattctttacagagaaccattgcttcatccaagagcctggccacttcttccgaaatgttggcacgagataattttcctcagagcagggcacgaagctataacatacgaagttgttatggtattgttcctttccggttgcctttgtctggtagtataactcatgaatattgcagaaacatctatcatccggctctagcccttgactcctcgtagtctatataaaacccccactttaataaaggcttcgggggtaagttgatgaagatatatttcgaatgtcttcagaacttcaaccaacaccttgtgcagtgggaagcgaagcccagctttcatgaagcttttaaagactaccacctcatcagcttcgggaagaggaacgatgctt

SEQ ID NO: 162768 - DNA, 872 bp, Zea Mays
ataaataaaaaagggaaaatcctgttgctgggccgaatccctccttttcggcccaccagggaactcctccacgcagcccacctcgctataccctgaccccacgggcccaccgtgtagtctccgtgtcccacgcttaccagttcaccaccaaatgggtccggggcgtcagccgtcgcgcacacacaactcaccgccatgtgggaccatgccgacatgccgatgctcttcactgcgcgctgggccgctcatttccatctctggccggtggtcccgtgctgccggggtcatcctcctctgatggccgcgggcttgtaactgaactccgaagctgccgccgccgcctgattcgttgacgcatgcgaggttgttacaaccgcctgggcgaaatcccctcaccacgtgcctcgaccacggtataaggagctggtcgccccccaggttcgtttcttccatcgcagagaggttgtggagagcggagattgggagagatcgtgagcgccgccgcactcggagagagagagagagagagaggaagtcgcggatcggttgggggagaaagagagggatgatggtgctcgcgccgtcgcgatgccgctgtcactgccatgggtcggagggagaaaagcgtcgccgccagggagctccatgccgcaccacctcgccatgtgatggacaactcgaggtgtgtggaggtctgccgccagcgggtttcgtgcgtatgttgccgttgggtccatgccgtggacctaggtgtccgcctgcaaccagggagcgtgcgcgggcttgcaatcgggcgcgggcgtcgcgagggccctagactttcttgccgtcgtaagcatccgccgcggaatcgccgctcgctactggccatg

SEQ ID NO: 162769 - DNA, 481 bp, Zea Mays
tacgaatctgaaacattagggttctaaaacattttggatatgaaagtactacataacacactactagcttgttcaatcagaatcacaatctataagtaactcatcttcagagtcattcgtcgtgcaatcctcaacgacaacctcgttccacttaatgcattgtccagtatgacacttttccgcgtttctcttataataattggcttctgcttcatctgcagctcgggagaatagctgatcctcagccttagtttcatcgcacttctgcttgtaataagtggcctctacctcttcggcggcctgagacataaactcgtcctcctcttgagcacgtaatcctgcctcagctagtgcgatgagctcactcaacattgatgtgtcctcctcctcttccccatgtaatcctgccttagcaagagcgataagctcactcaaccttgatgtgtcctcctcctccatcagctccaccgttgccattttt

SEQ ID NO: 162770 - DNA, 303 bp, Zea Mays
cctgtgctcatcttcccctcttcctcactggtgagctcccccactgcttccctctctctgtttctatccagtgaagctcagttcctcccacgtcttgaaaatcactcaaattcactccaaatctatgaatccaagtacacgtgtgtgtgccttgtgccctattatgttcccctacaggtttagagctccctagagagggtttcatccactaaaatagtcatttgaccctcaattcaaaaccccacacgccacgtgttcggtgaaatgcccaaaccagtcaaaattgctcaaatggaccccaac

SEQ ID NO: 162771 - DNA, 485 bp, Zea Mays
cgccatcgaatatttttaccaaatggatcgagggtagagtagtctccacaataatagcgaagactgcacaaaaattcttctggcaaaacatcgtctaacgattcggagtcccatccgagctaactgtcgacaacggcaaacagtttgacaaccaggacttccgggaattctgcagttccatcggcaccaaggcagtgttcgcctctgtctaccacccacaatccaacggtgtcatcgaacgtgccaacggcaagatcttcagcgctatcaagaaaaggctcatcgacgacaaaaagggtaaatgggcagaccaattacccgaagtcatatgggcgcttaacacaacagaatgccaagcaaccgggttcacacctttccgcctgatgtacggatcctaggcaatgacaccgcaagagttaaagcatggatccccccgaacaaactaatcagccgtccccgacgtcgacgaatcaacctctaaagat

SEQ ID NO: 162772 - DNA, 579 bp, Zea Mays
ttgaagctgaggttgataaaaatagctgcagatttcattagggaagtaaaataccctaagtgggtttctagcattgtgcctgtgcaaaagaaaaatgggcaaattcgtatatgtgtagattttagagatttgaataaagcgtgcccaaaagatgattttctgattccaatttctgagatcctcatagatgtcaccatggcatatgaaatattttctttcatggatggtttctctagatataaccaaataaaaatggccctagaggatgaggagttaacgacatttcgaacacccaaaggcatatactgttataaggtgatgccatttggattaaaaatgcgggcactacatatcaaagagccatgactattgtccttgaaggtttattatatgatatcgttgagtgctatatagacgatatagtcgtaaaatctaagcatgagcaagatcatctagaacatttagcaatagtatttaaacgacttaggcaacataagttgaaaatgaaccccatgaaatgcgcttttggagttgcgtcagataaattccttggcttcatagtcacaaagcgtggcattg

SEQ ID NO: 162773 - DNA, 999 bp, Zea Mays
ggtcaccctaagtgaagtaagtgtgagtatgtcgcaccgacttaagtcgtcgccgacttaagccggttgctccgttagcagggtatagtggtcaccctaagtcaagtaagcgtgagcatgtcgcaccgacttaagtcattgccgacttaagccgattgctccgttagcagggtatagtgctcaccctaactcaagtaagcgtgagcatgtcacaccaacttaagtcgttgccgacttaagctgattgctccgttaacagggtatagtggtcaccctaagtcaagtaagcatgagcatgtcacaccgacttaagtcattgccgagttaagccgattgctctgttagcagagtatagtggtcaccctaagtcaagtaagcatgagcatatcgcactgacttaagtcgttgccgacttaagccgattgctccgttagcagggtatagtggtcaccctaagtcaagtaagcgtgagcatgtcacaccgacttaagtcattgccgacttaagtcgattgctccgttaacagggtatagtggtcaccgtaagccaagcccaatcgaagtcagctgtaagtcaagaatctgaatgtctttggaaaatgaaagctttattgatgatgaagccttcagattacagagtacaatactccttcaagagttttgaggccttactaagggtagaattttctgaggtgttctatgttccacgagttccccacttctgtgtcgtccatctgagtaagccgatatgatcccgaccgtgtgacctctgatacgatgaacggtccttcccatagtggtgacagcttgtgtcgcccttcccccgttagaatttggcgaaggaccaagtctcccactgcaaaggatcggtgccacacaggtttatcgtggtagcgcctcaaggtctgctggtacctagccgactgaattactgtgttcaatcgttcttcctctagcacatcaatgtcttccagcctggttgcttctgcttcggctatgc

SEQ ID NO: 162774 - DNA, 656 bp, Zea Mays
actgcatggggaggaatcttgtgagcgcggaccaaacgaactagaggggttggggacaaaccgaggggtgtcccgggttgctgtcgaagaggcggaactcattgaggcagtgggcgcggcagagactccacggcggccgcagaacgagcggcggaccatggagagtggcggtggagcttccttggtgcgggtgtagagcgagagagagagagcgagggagttcggctggggcgcaactgggtgaggggagtgaatgagtgggcatgagctacgaaaaagggctcaggcgtgggggtcgtggtcagaaaacgcacggtcgtgggcgcgtccacgatggagagcgtagacgggaggttagggacgaggggagtggctgataggcggggtctgtggaacagcgagggtgaacggcaaaccggcgatcaactgctgacagggaggtcccaccgagcaatgagcgagagcggccacgagcgtgaacggatcggagtcgacaggtcagccccactgggcagcgagggggagagagggaagagtgcgcgggcatgagagggagatgacaggtggggtccgtctatcagggagagctggcgcacgggcgcgggggctgggccagctgggctgtcttgggccgaaatggccttttctttttctag

SEQ ID NO: 162775 - DNA, 618 bp, Zea Mays
gtgctcgaggcaaactccggcgaactgtgttggtgatggcgaggaggcgaacgtgaagacggtgtgggcaataggtgtgcgagtgacaactaggggcacgagcgcactgcgggaatagcagagtagaggaacggaggagggatggggagacacgaaatggactcggcaaggtcgggggcacgcattttatagggagaaggaggaagccatgacatctatggtggggagagaaggcgaccaccatttatggtgtagcagcagtgggacgagagagagacaggcgcacgatgcactgggagggggagagaatgtcaggagacgattgagatcaagtagaggaagacaactgccacaatgaagaagcaggagctggatgatatcgaagcacgaccacgttgatagaggcgcaacaacatgcgtgtgttgagccagaatgggccatgtaactgccttctgggctgggctataatggtggcgatataaacacattgtaacaggagtcaggaactatgagcgatgacaatcaatacatttcctctcgtcgccattctctcctcttagtagtcttcttctcttccgatagtctgcttcctcttgctacctccgatctctctcctc

SEQ ID NO: 162776 - DNA, 975 bp, Zea Mays
actactactactagacgacgaactgacttgtcaacgtcagggatcggagcggagttacgcgagacactgatcctcccatctgtcggcctgcgcgcctcgcccgggccatgtcagtcagctggaggaaaattcagcgggccgcgggcgggagccaggcccccaggcccagctccatcggccatcgcccaccgaccaccgtcatcctcgggatccgcaccatcatgtgcatgcacactgatgtgtgcgcactgtgcgtccgtgtgcttcctcgctgccgcccacctctgcgtttagactagcccgtagcacgtactacgcagacacacgaccgtcatgtgcatgcacacacacgagtgacgagccccatgcgaccagctgcgccgtatagaaaaaggttaagccacggtcgtcgtcgtgaataatgaaggaagaagacaaaggccgtgcgtttcgaatgttactacgatagtgagagggaatgagcagagaagaggatgggcagagcgcaattggccaacgcctcaacgggtgggccaccgtgtgtatgggccgggccgagccaggcgaggaccaggccaaggggacaaaacgggggtaaacgccatgagcacagtgtgtgtgagaggagaatgacgacggagttatttattgctccccggcccggtagttctgcctagtctatttttctctcgcctgctgcctgctgcctgctgcgtcgtcgtcctcggctcctcgccccagtcggccaggccaggccccccagctgactgatggcctcaccttgggagcggagatcagaatgaatgcgcggcatgtagaggcgagccgtcccatcgccccgcttgcattgtatcgccctccctgtatcgctcggcatgtagaggcggcggcgagcggagatcgatcagaatgaatgcgcagcgccagtatgtctctgtgactcgccgctgccgcattcccgcatatgcgtccctg

SEQ ID NO: 162777 - DNA, 764 bp, Zea Mays
cagttagctgttagtaactgctaagaagattagctgtcaacaagctgtgatttgggcccattaatcggtcttgtaaggaggaatcactcctataaatacttgtattgggtgattgagaaaaggggagaaaatataactgaataccagactcaaaatccattttcccaactgactcacctgctgacgccctcggctcagcgccgtagtaacctcaccgccgctagaaatctcacaccggagtggaaatcatctcccacggccagggagtcatcacatcgtatcagagccatcggagtcggtgatcgttgaagagaagacgcaacgactccttctataaaaccatccgtgcagacctggtttctactggaagccatggatgagagagatcgagcagtgcaagggaattgggaccgtatgtttgaatctggagtttatgactggaagactgaaggaggtggagagagtccagcaacaattgttgatgcagtcagagctggcggcagtggtggctgaacaagctgctgttgagaggaatgatctgtaccggaagttggaggaaacaggttgagaagtatctcagttgaggttggaacagatgggaagagagctgggtgaaacatcgccttctactcaggaacaaggaggaaatgtccgaaggaatcaacaacattctcatggtgatcagaatcgtggaaatcaatagcgaggcattagaggtgatcctcgccagtctgctgattcaggtaatcaagcaatccccaaac

SEQ ID NO: 162778 - DNA, 492 bp, Zea Mays
cacaccaagaggcaggtcacactacacctgtgctcgcatggttttgtgataggctataaggtctggtatctccacggggagtcacgccttgaacgagcagcagaagtagaagttgatgacggtgaagatgttgataggatggaccatatgcttgaggatctgcagcctgaatcggccccaaatcaccatgattcaccaacaccggaggttcagaggttcttcgacctccttaaagcgtcagaagagcctcttcatgggcataccgatgtgaccgttctcgaattcgtgacacaactcatgtcaatcaagtccaagtttgcattctctattaattgttacaaagagctcgtggatttgattagcgaggttcttcctgtgggtcacaagattcccaaagacatgtaccagtctaagaaattgcttgaaggtcttggtatggagtatgagaagattgatgtttgtcagaacaactgcatgcttttttggaaggaa

SEQ ID NO: 162779 - DNA, 766 bp, Zea Mays
gggttgacatgatgctgaggggtgttgttgtaaatgttggtgctcctcgttcttattctacttggaatatttctccactggttggttatgatcacctgatttcttattcaaccgctcactgaattgttgtatgtcttgtgcttattgtactgtttcattgatgtagagtcctttttctaagtttgtgtccaacccacccatccgtgaggaaggttgcacctccgacaatagagtgcggccttctgaagacgaaatagaggctataatcgccgcacatcgagacctgcccaaagatgaaaagcaaactcttgtcttgatacagtcacctgccaatgattctaagatcgatgttgttcttggtatgctgaccagggagtcgtctaagtcagcacaacttgagttggggtgtggagccgcctagtagtcatgcgatggagggaagaaggtaggtaatcttgagggtccatggtgcaagcgattatgccaagcagatgcttaggccgagtccacagaagtcaagaagaagaagaaacttcggcgttcgtcagacctgtagccgatgacagcccaggtcgagccgaaccctgatgataacctagtggatgctagcctagaggatgttgtggaaggtggaaatggggtgaaaatggctagatatgtggtggaggaggaagatgatgaggaagaagaggtgctttccttggttcggcgcaagcggcgctctaggactcatagtaacacctcaagccttgctgctgcagccaag

SEQ ID NO: 162780 - DNA, 1395 bp, Zea Mays
tggagctttgcatctttcaaattatagggtttttgccctaagtcaccacatcaagtttgtagcccaatcataggagaacaactttgtttaagggttcaagccatggtcttatgtgaaatttggagaaaaacccaatcaaagatggactgtcaggctgcctgaaatctgaaatacagattaacagtgttatgacatgaagtttgagcttgattttgatttggatccagtgactttttgtgagtacacattatagcaaagatatagatggattatagctctacacctttgctgcagaaagttgatatagattccacataaaaactgaagaaaatgaagctttaatatgcggtgtcaggttcatctgactgaaactcctgatggtacagtgccctaaccggatcagatcgaccgccgtagaaaagatctcaccgccggcgacctctttgccgggattggtgccacggtcgtgtgggtgttgctcaccttgaaaagatcttcaccgcccgtgcgctggcgatctctccggtgacccccgtggccctctctccctctttgcggccgagtggattacctcgccggtgaccgccgcctcccggccatgcgctgcgtggcttagcctttccaccgcaccaccgtgacaccttaaggctgtcccatcgtcgccggtgagcttgccacgccgttggccacgaactcacgcggccagtgcttcttcttcgcctccgaccgccgcgtgtctcgtccaaattcgcggccaccgcccatcctccctataaattgagcccgtgtccagctccgtgaggtagtcagctagctaaccaccgctaatcggccacaatcatccactcgtctgctcgaattcggagtttcccccaaatccgatttccgccaccgtgaaaccaagctcaccgtcgccagcacaactccggtcagctcccgtcctttgcttccttgttttagcattctcatgcatctgcgatgctccccgacccctttaattgaactagaccgccacccatcgccaggaacacggctatcttgtcgcgatgctcacggccaccatggccagagctccatagttgattaatagccaaattagtttggggaaaaggcttagggtcgattcaattcggtgtctgttgctcggagaactcagtcgttgctccgttcggccggtgtaagtgctcgccggagcgcggccgtgcgtgagcgacgtcgaggacgtgtcgggtgaagaaatagaacatcaggggcgtttctgcaaatcgtcagtgactgtgtataatagtgattggactcgttcgcagttagttaaaaccccaagggcctctgcgcaagtctgccagcgcgggcgcgcgcgcgggcgcctttctgccttagctgggccgcctgggc

SEQ ID NO: 162781 - DNA, 388 bp, Zea Mays
ccgggtggtagggagtgtatgcttgcaaggaatcaacgaaaggaaggttggattacctggaccgagggaaccggcagacgggacaaatccggcaaggtgttctggcttattcggcgaggtatcgttcggttcgagcagctgggaggctttgctagcctctagggaagctggccgaggagctagattagatagggttgggctggagtggccggtctaaggtggtcggcacgtcggcaagattgcagacgacgccgctgtggcgaaaccgcccagattattccagctgaagtgcccaagtctcgctttagagctacatagagcacacaccgcatgcattaggcttctcttggtcaagtgaaagtctacagctggttattcttggtgatcg

SEQ ID NO: 162782 - DNA, 1071 bp, Zea Mays
gtcgactctagatggtgtgcgaggagacacaagcgattatcctagtcgggctactcaaggccctacttccagcagagaggatgagacttatattactcgcacggtggtgcctgtagtaggggtttacaagcataacgggagatgggaaatccccaagtccctagagataattgaggcaagtgccaatatctaaggcagagtggaggagtgagcgttcgtctatgtgtgtcgatgtgtgggtgtcgatgtcgatcccccgtccgtggagggaccacaaccctatttatacatcaaagggagcgtccttagggaagccaggtcttatattcgaagaagagatgcctggcgtctcacgtgacggcgtactatgtagtagattcgtgcctgctgacttcccgtagagagccgaggccgagaccgaggggttgtccgtacgcccgagccctcgagggagaggccacccatgccgtagtgattgtaacagcgccagggtatgggtcaaaggctgcttacgggatgcgtcatcgtcctggcgtgtgatgacgtcgagattcctgcaacactcatcgaaatcagagcccctgcttggttgatgcagaagtctttccgagacgttaaccgagccgtccctcgacgtaatcagtggccgaggccgagctcgggcgatgcggagaactcgctcgagggctgagcttgacgtcgggcgaggcagataaatttcctgaaggttggacccggggtcgggtgaggcggagaggttgcgcccgaaggcccgtctgctcggctttgtcgtattaggcgtcccatcggagggcgtcaggcggcatgcgtgcatgttttggcacagtcgtaatcatactgctgcgcttgacgtgatcgctgtcttgtccaccactgtgctccgctgtcacagcgtaggttggcacacacattaaatgcgcatgtctcctgcgtgttttcgggtgccttgtcttatctgcttgaagctggctcaggcgagacagactgggctgagatgacctcgagcgaggcggagtgagtggtgtcgacgtcaccctcgggagatatctc

SEQ ID NO: 162783 - DNA, 570 bp, Zea Mays
cgataacgaactgtgatgttattaatagcatgacaatctacgcacatacgccacatccatctttctttggaacgagtaaaacaggaaccgagtaagggctaagagactcatgaatgtatcctttatcaagcagcgtctgcacctgtcgctggatctccttcgtctcatctggatttgtacagtacggggcgcggttcgaaagagaagctccggggatgagatcgatctatgctcaatgccacggagcggtggaagactcggtcgtaagtccgtgggaaagacatcaacatactcttgcaaaaggttaacaacagcagggggtatatccaaagacggtgcatcatcaagcggaacaagcatatgcgagcatacaagtgcataacaggcatatgagcctcatgtaaatcatcaaaatcagcacgtgtagcaagtaaaacaggagcattcaatttgatttcagatttaacaggtgcgactgatggagatttgacttattgtgcagttttagcagccctactaagatcatcttttaaaatttggtcaggggtcattggatgtataactattttc

SEQ ID NO: 162784 - DNA, 290 bp, Zea Mays
tgactggcatggcaccagcaccatgcgtttattctttgaactatgttttagaacaaggtccctaaagcccatggttttcaaatcatccgattaatcgcgatttattgcgattaatcggccttgtcggtcacctgcaggcgattaggtccaacgacctgattaggtgacctgctggtcatggattttttagagcccaacccagctcacctgctgctctaaaaatgcgttggtttggctgcaaaaaactgagccatgtcggccctggtcatccctgccccttcatatcccaa

SEQ ID NO: 162785 - DNA, 503 bp, Zea Mays
gcaaaagaaggaagaaaaatagaagctcacttagatgaccaaaagccaaacaaaatccaaagcaggtcatccagagtgaggaaagcttggtccccaaagaaataggcaacgactcaacacaaccaagtgagaaaaatggctagtcttcaacaagaggtagaagaggggaccaacactactagccaacagacaaagctaaatcgaagcacaaaagctgaaatcaaaggtagttcctctagaaagaggcctcaacacaactagcaaaagctccccatgactcagaaactccccctgacaaaacatctctccctgaagcacaacttaaaaacctaatagaaggtcagtcatcctcgacaaaaatagtgtaaacaagacgaactccccaaattcttccccaattgcacatctccaagatttaccccaaaggacccaaaatcacaattcttcttaaagcttctccccaattacttttcttgtacttctccccttgttgacaagtgcac

SEQ ID NO: 162786 - DNA, 570 bp, Zea Mays
catgaacgaacctgtagagagctagccacggtgagctcactcacggtggagttttgattgaattgggggaactttgaaattggagtgctctggtggacgatttgaggcacgagctggtgcgttgggtgcttgactacctagcggagctgatggcacgctcaatttatagggcccgagggcggtggctcgtgaatttggaatggcgtgttggcgggcggagagaggggagagcactggcacggtgatttgtggcttctaccggggcaaggtcaccggcgatgaacggacacgccaatgcaagttactgcgacgtggtagagcacctaggcacgtggcaaccgatcgacaggcggccaactccggtgagcttatctgaaccgaccgtgagtcaggcggacacggcggccggggcggaacagtggcctaagttcatccttaacacgatatttcttaccccgagcagttatctgcattccgctgagcacgaatcgcggtgccggcacgaatccgagcgcggggtcgccggcggcgagggggactgaacctgaagatcttttgcgcactgtacca

SEQ ID NO: 162787 - DNA, 555 bp, Zea Mays
ttcacacttgaataagacaaatgcacgaacaatatagcagaatacgaagccatcatcctcagattccacaagctacgagacctaggggtgacaacatgcatagtcaaaactgattccaagatagtcgccggccaaatcgaaaaggactgctctgccaaagaaccagtgctgttgcaatatctctcggtcgtgcgaagccttgaaaaacaattcaaacgattaacattgcagcacatagatcggaacaagaatgaagaggtcgacatgttggcaaaagcagtagcgaaaggcgacccacgaccatctgacgtgttcttccacacaatcggcacaccagctgtaagaaaccctgaaggcctgcagataacaccagaccccgacgaccgcagaatcatacatatgataatgaccgaagaccaaagcgaagccaaaaggtttaaacacagaagtcgtggcttcgctgtgatagatggacaactatacaagaagggaataagccaacccatgctcaaatgtatcacaatagtcgaaggcatagaactccttcgcaaaatc

SEQ ID NO: 162788 - DNA, 1457 bp, Zea Mays
ctgccaccttatccacaaaggccagcaacacctctgtagaaggcttacagattgtgagaggaagtcccaaataagtgcaaggaaaagctttaactgaacaagagagagtttccacagtaagagccagctcatcatcggaacaatgaataggggagaccgagcttttagccaggttggtccggaggcctgaggcgtgaccaaataaatcaaggatgcgtctgaccgcaatcagatccagaatgtgaggcctcaagaaaaccacaacatcatcagcatagaaggaaacatgatgcctgacctgctgaacaacaataggttgtagcaaacccaacgaagtggcataattgattaaagaattcagagtatccatgactaggataaagagcattggagaaagaggatctccctgcccgagaccgcgacgatgaataatgatgtctccaggctctccattgactaaaatctgagtggatgaagtagacagtaataaacaaaggagatcccgccaacgctgaccaaatcccattttacttaaaacctccaaaaggaacgaccaagaaatagagtcaaaagccttggagatgtccaacttaagaaggatatgtggttctttcttcctgtgcagcgacttcacaatttgttggacaagcataaagttatcatgaatcctcctccccctcacaaaggcactctggttcacagaaaccagtgagggaagcaaaggggtcagtcgagtagccatgagcttagctaccaatttggcaaaactatgaatcaaacttataggccggaaatccttaacctcaacagcatccatcttcttaggcactaaggagatataagccgtgttaagcaggcgaaatttgaaaacatggccacgctggatgacatccaaagccatcaacacatcacctttaataatattccaacaggatttataaaatagacctgtgaaaccatccggccccggggccttatccggaggcaaatcttttacaacagcccacatctcctcctcaataaacggagcatctaatgcagataaatcatgattgtggatggccaactcatccaagtcaagagtgtagctcctctcctcagccttacccaaaatgttctcatagaaatcaaaaacagccttctgtttatcttcttgtgaggtgaccacctgatcaccaacgtgcagcttaggaatgaagttcttctttttcctgtatttagcctgctgatgaaaaaaggaggtgttggcatcaccctcctgaatatacaaaatccgagaacgcagccgggcgatggttctcaccagagaggccaaaccaagacaatgaagcttcaacttccgtctcagccactcctcatcatcagcaagagccctttcatctctttcaatttcccaacgatggagaagctctttagcaatttctaattgtgatatgatgctcccaactttcctctgg

SEQ ID NO: 162789 - DNA, 873 bp, Zea Mays
agcagcatagccctagggcagatggtctctcactctgatgagatcgatgcagccgtgatcacggaggacttcaccgccagatggagtgacaaggagctagaccgtattgaagaacaagttcgccctcacgcccgattgatcgtgagctaggttgacatgaagttcctcctggcgggcacttggagtctagggccgcccaccggcgtctagacaccgttaattcattgtcttgtaacaaactttgtttgaatgatgagaccaaacatatgttcatgccttttggtgtgatgttgtttcttgcttaagtactgtgcccccatcatttcctcaagtcaggggtcctgtggcacgttttcacagagtgatccctgtttcccaccccctgagcagagtgtgctgacttggttgccatgttctgcttactcgggcgtgtggacgaggacgagatcccgaaaagacttgcaaccagtagcgtatcctcagacctggctgatgcacaatagaggaaaagagctcacatcccgccgctctcactctttttcttgataagtacatgattcatgatccacactgggtgtcacattttttttggttacgaatcctgtttctaagatctttttggcgcccctcttcgctaacatctctgcgcttttctcttgtcgactgtcctggccgttagtcggatattgagagagagcacgaggcagtcgatgagcatgccttctgacttgtcggaggactccgtccgatacaagcgcgtttggatgcgccgaccgtgtttgtcgaggtgtcctctatgtccttggcagacttggaggcgcttgagctggtctcgagagcacctagggtacctcagggcacagtctcctgaag

SEQ ID NO: 162790 - DNA, 451 bp, Zea Mays
cctccctctctgttctgttgtacagaggttcccctctccaccctttgtgccattttccaaatcctgtgaatcccagtgaatccaagttgtgaaatgtgttcccttgtggccattgagtgtccttgcaggttcctagctccttcgggagggtttttccacctcaaacagccatttccccgaaaccctaaaccaccgccctccacgtgttcggtgaaatgcccaaaccagccaaaaatgctccaattgaacccaaatttttcaggcaccttcacaacacttccagtaacacttttgccaaatttcacaccaatctgagattccaggcttcaatttcaccaaattcctcgttttgagcgatcgtttccgagccgagtgccctaatctctttttcttcacctaaattcaaaccaagcacacacttcactcatattcacctatataaacctactcg

SEQ ID NO: 162791 - DNA, 507 bp, Zea Mays
ccatggtggtatgctcccatttccactttggaatttccaatggcttcagtaaacctgcagggtgcttatgctcggccttcacgcactgacatacttcacaggtgaccacatacttagaaacatcaaccttcaaccgcttccactagaagttttgcttcaaatctcggtacatgttggtttcgccagggtgaacggtgtaaggcgttttatgagcttctctcaagatatccatcttcacctctgatttctgaggcacacaaagacggcccctgaaacgaaccaaatcattctcatcaatggtgaactcccggggtttaccatcaccaaccctctttcgagcttcctgcaatagacgatcctgctgctgagccgcatgcactctctccatgagggaggattgaataagcatccgagtctcctcgctagtggtgccgacataacacaatgcgatacccaaacggtccaaatcagcgatcaacggcaaggccacttttggaaccccggacc

SEQ ID NO: 162792 - DNA, 968 bp, Zea Mays
tcaagttctagcatatatttttgtattaaaaatctatttttccaattcaattactcaatttaatacagctctagactgggcctcgaatactgaaaactataggggcttcctagtaagtagctcgagactcagacaatggtgatactggacggcgggttgattcttaagttttctagggtctcttctgcgaactggcaaagtgaaggggtatcggccatgatgggccatcggatcagacccgaatggcccagattaggtacgtgcacttaagtgatcagtctgcaatgcgagcccttggatcgggatcctacggcccatagccaatccgtgggttggaacgcagagccaaatctacccgtctgttcccaaaccaacagttccgatttaaagaaattcatcaccgcgccagcactaatcccaagcgcccaaccaggatccaacggcccaggttacaactaagccaaaagcgcgcacatccgatcttggccgctggcttctaatcgtatggctaggaacccttcttcaacctcaagtctcccaggctgtgcacctcccgcagcggccagcccctctctccgacagtgcacagatcgtcgccccgcgcacaaccatagcaacgaataaaacggagcacgaaagggggtctcaccgccggtgaagtgaacacggccaacgatgtcgctggtgaagtgtgcggttcaatggcgcgcggtgatgtcccgatcgaaatcgcctctgtgcgatacagagaatcgccgagtcctgcctcttggcactgccctcacggtacactccctcggagtgcgatggtgaacctcgcccagcaaccgcaagcgccgcagcaacctgtggtctgcttttcctccacggtgcgccaggattactaggtaggagcggtggctgcaaagacttttccctgcaacgatgaccaggtttatagaggtaggcgaagctggttggtatcccgc

SEQ ID NO: 162793 - DNA, 784 bp, Zea Mays
ccgcgccggcgtgatgctgcgaggagctagcggcggccgccgccgccgctgcaggccagtactcctccgacagctgcgtcgcgctgtggcctgcatggaaggtcacagaggttggttactctgctcatctgtgttttagccatgctctgttttttttctttccctggaacaaagaagcagagatatgcactttgcgtatccgcaatcgcaatacgacatcttgctctttgaaagcaacctgattagtgtgaagtttatttatttagctgtagacatattcgattgtgtgaaaataggcatccataaagccattattaagttggtcccgtttgtttgagcttctacacggcttgtcggcgtgaaagaccaaatggttgatgttttctttttcctgatcacatagtagacagcgagctggatgaggcaagtttcttttggctaaacagtcagccatccagcatctgcaactagccaagcaaaaaagacacacttaggtcaacctgctgaacctgacagtcagacaacaagggagcctgtccgaagtcctggaagattttcaaatacagctaagcttgcccttcttcatgaatatcgtaatcctgttaaactagacaattaggacgactatgaatgatttagttttcaaagcaatgcaaccaaacttgcagacaagtcgaagtgccctccaaaaagagcttggccagctctcctttagagctaaacagagatcgagccacttttttgagtcatggtgccaaagtctattgtaattgctgtccttttt

SEQ ID NO: 162794 - DNA, 868 bp, Zea Mays
ctcctcctgtatgttaatgacatcatcctcaccatctccggtccaactctcttgcatcacattatctttgcactacagtgtggatttgctatgaagaattttggtcaatttcatcacttcctcgggcatcgctgtcgaggtccgtccagatggcctgttccttaagtaatgctagtacactttggacatcctagagtgtgctggcacggtggactgtaagtcgtgtgctacttcggtggacacacatgcgaatgtttcctcatgtaatggtgcaccggtcaatgactccactgcctactggagtcttgcaggcgtgctccagtacctcaccttgaccaggtcagacatatcctatattgttcatcaggtgtgtctccatatgcatgaacatgatccatgggatccacacctgatcattgtgaagtggctccgttgatgccttcatggtactctcgactacgacattctactatgacgttcttctccgagcgagcttgtcgtctcaccgactaggcggggtttctggacacgtgccaatccgcctccgactataccgtgttactcggggacaacttcatctcctgattgttgaagcaacaactcgtggtctcctgcttgagtgccgaggccgagtaccgtgccgtggccaatggagtggtcaaggaatgttggctctggcaactctaggagctccacaggtcactcaccatgagtaaccttgtataccgcgatactgtcagcgtcgtctacctctctatcaaccctgtctagcaccagctttcgaagcatgtcgagattgatctccatttcgttcgtgagcacgtcgccatcaaggatgttcgtgttctccacgtcctgacaacttcac

SEQ ID NO: 162795 - DNA, 558 bp, Zea Mays
gcattctcgacagcgttctatgacgatgacgtgatgttctcagtgctccactgcggtagcgtttgatcgaccaagtcagtgagcaactggagactatgaggatgctagaacacaaactagagggggctaaacataccggaggggctctagccacggcgaagcttctcatggcggcgatggtgaccaactccagggaaacccgaagcgtacgagctatggtggatgagaggggctgtctgagggtgggttggacgcgtaacagagaggtggagcaaggggaacactctatctaaaggagctgattgcttgcttcgcgaatttgggatgagagtgcctacgacagtgatgagatattctcactgggctcgttcaccgtggcgcgcatgtagctcaatgatttgggtacttgtttcaccgtctgccacgctcgctatgacagggtgaagcaaagctacgcgtggcacatcatgggcgaccaacggatcaggatggtggtaattccaccacgacaccgggcaagtgggcattgcgggtcgaccgactccgtgcccaagttct

SEQ ID NO: 162796 - DNA, 597 bp, Zea Mays
agcttgcagataggatcattattccaacctcgcttctgaagattattggccgttagaatttttttatggaggagggtccatgcaaagaaccgacatttaggctccgtcttcgccttccaagctggagaaagtttgagcttggcaaaactcccgtggaactgagccaggtaagcactcttggtagagtattcgccatctgattttgtctacttcctcaatatttatatggacttcatggatggcttcccaaagtctcacaaattcaattatttcagtttccccagaaaccggagaaataagagaaatccatgtattgtcgagtagggccttttgtaccttaatgtttttgcgctttgccttaatgaagagtgggggcaatgagacgcgccgccgtgccattaatccaattggagaaccagaaagaagcaagggtcccattgccaactgtcaccgaagttgaagcatgaaaaaagttctatcttctttggtacatggggtgtcaagccccgtccaggccctgtcccggtctttccattggaaccaggtatttaaatggcagaaatagccaaaaaaacgaggacaagcaggattcaaacc

SEQ ID NO: 162797 - DNA, 1553 bp, Zea Mays
tacagggcgcctaccaacatcatgaaatatttgggagaatcgaaccccgtatctagctaggagactacaggctgacgtgtcaggcgggaggggtggaccatgacgacttcataatccaaaacctccctctgtacttgccagactcagcacaagcatggctcgaaaacctaaagcccaggtgtattcacaattgggctggccccaaggaaagtttcgtcggaaactttagggcacttacgtgcacttgggcaaccccgtgggacctcaagaactattgacagaagtcggatgagatcctgagagactacatctaacgcttctcacgactgtgcaacaagctgactaacctcgctaacgtcgatgttatcagtgccttcatctcgagaaccataagcaagactctagtacacaagttaggacaaaagagcccacgaactatgaaggagctccttgatatcgtgaataaccacacgccaggggaaggcgcgatggaggcaatgtttgaccactgcaagcaaaaaaaccaaacacgacaaaggtcctgactaaggatttggaggcaacctaacaagaggaagaaaaatcgcagtcggccaaaatggagggaagcctctagccgaggaggccactaacaacttcgaaaaattgctcgaggtcccatgcccaaaccattgctacccggtttgacatgcaaggattacaggtttcttaggaattcctaagcaaagttacaccacccagaaaaggcccgaaccccgtaaggacggtgagcaggagagaaggggtcccactttccctaacaaaaccggatgcctactgatctttagtgggtccgactactacgcaaggcactgaaagcttgagcgacgtgagacatttagcgttcggccaccgatcccagcgttcctcgaatggtctgaccatgctattaccttcaactgtttcgaccaccccgagcatgtccctcggccggggcgatatccgatgttgatacgactgccaaaagttctcatgtatgggggcagtgggattaatatcatctactcagccacgttcgacgccatgggcctcgactaggattggctcaggccgatggggggctcatttcatggtgtcatacccaggaggcaggcgaccccgctcggatgaatcgacctgccagtgacctttgggacaccagccaacttcaggaccgagactctgccctctgaggtggttgggttcaaaggaacctatcacgctatccttggaaggctgtgctactcaaaattcatggtcgtcccaactacacctacctaaagatcaaaatgccgggtcccgctagaaccatcaccataggcaccacgacacaacacacatatgaatacaaagtcatgtgctatgacctagccgagggagccactactgcataaggaagggcgtacggtacacattgggtctaagctctccccaaaataggaaagtgtgcttgttgacttcctccatgaggaaaaagacaactttgagtggaaaccatttgacatgaggggcatcccgagggaagtcgccgagca

SEQ ID NO: 162798 - DNA, 483 bp, Zea Mays
gacgagatctcctattgagaaggatcgttggcgcacagccttgtcgtgatagcgccttagagtctgctgataccgtgctgattggattaccgtatttagccgttcttcttcaagtacatcaatgtcctccagcctggtggcttcaacttctgctatgttttcgaagatcaaccttggcgccccgaacttgagatcggcgggtagcactgcctctgacccatagaccatgaagaaaggagtgtttccatgcaaggctcggctgggttgggttcttaggctccaaacgacatagggcaattcccttatccactttcctgcgaacttttcattcttgtcgaagacctttttcctaagtgcccccagtatcatcccgttggctcgctcaacttgcccgttggcccttggatgtgctacagacgcatacttgatctgaatgctcttttgctcgcagaagtcgaagaactctgaacttgtgaagttgga

SEQ ID NO: 162799 - DNA, 853 bp, Zea Mays
ggcttggcgagcatcacagagtaaccagagtgcttaaacaaggaagagggagcaatgaatcaacctggaaagagctggccgcggtgagattgggtttacggcggcggagagtggatttggggcgaatccaaaattcgcgagttctagcgaaggactgcgagcgattagcggtggctgaatgcgtgaggatgtggtgaagctcacagcggggtcaatttatagagccccgaggcggtggcgcttaatttgagcggatagcggaggcagccggagataagggagaacctgggtgcggtgaatccgtggctaacggcgtggcaacctccccggcgacgatgggatggcccaggggagtcatgacggcacggtggaaaagctaagccacgcggcgtacagcgagaggcggcgttcaccggcggttttatcggcccagccgcaaagaggaagagagagccacgggggtcaccggagtgatctccagctcaccgccggcgaggatcttttaccgtgtgtccttatctgcccatcccgagcaccagttgggccggcaatagcacgaatcacggcgaagttggtcgtcggcggtgggtttgttggcgagctgatctttttcagtcgtggtactgtaccatggtgaacacttcatcagagcagctgacagagcaacttcagagccccttttcgccaaatttttagtgacaacacaagtcaagctctgcagcaaaagtgtagagcaatactccatctacaactttgtaatatgatgatgccacaaaaacccattggatcatgcttgaatttaagcttgaagttgatggcatcaatctgttagtctgattttcagactgaatca

SEQ ID NO: 162800 - DNA, 606 bp, Zea Mays
atccactagagggtagtagagtgtagagactggagtctcaccgagtcaattagctagaccttttaggttacctctggaaaccatctttcctttatcgcctccacagctgctgccactaactaaaacgctctccaaagctctagttctagttccccctagacttcgtaacatgtgggcccaagttcgtttcagagaaaacgtaacagtctctactctctagagtatgtaacatttggttggttggtgatggtgatgcccaaaaagatcctcggatatccagtgcaggggtgtatcaaggtgttcgcaaaagatcgtgtaaaatagagagtttgtcctgtaaattacaccgtttacatagcgcatcggttttctcccctcatacgcaactcaattttccaatacgaagagaagtaatagtaccactaagggcaagtacaaatccaatgaatatgccatgtcttaagtttattttaggggcttgagtgaaagatacaccaaggaacaccactttcttcttttgtactgtttttttttcttaagtgcaaggaacatcatcttgagatgcattgattatggataggttttacatacggttcatcatgtcac

SEQ ID NO: 162801 - DNA, 347 bp, Zea Mays
gagtgaaaagccaataaagttgaagagatctatggaacgatacaacgagagagacacagcgatcaccgtggaatcctgaagggggcgctgttctggtcatcattgtcctgtttgaccagactggttcataagcaatggcaacattgctccagtccttgatcttctctataaaacaaacagccgataaaagtccttgatcagcctgaaatttcgtatggggtccaaaaacttggtaacttcaaagaaaggcactaaaagttcacatgaacaaaagaaagggcagacccaactcccacatgagtgtctggggagaaaataaacccagacagccggcctctccacatttc

SEQ ID NO: 162802 - DNA, 933 bp, Zea Mays
acaactagattatctcggatccagattctaaaaaaaaactatttagaaaaaagttgtcccacgcagacccaattgctatgcatgacgacatagtttggatcgatagatgatggaatgtgccgaacctgtccgtggcgttacgggtgtcgtttatttggtccgtgcagtcgtgtggacgcatgcattttgctaaatgctcctagacaggtagcagatcatcactggctagctcgatccgttggctccattatatatctgtgctgtgctgtgctgcttcagcctgacacagacagttacttagttctctccatttacatgcaagttatagatcgatccttgctttgccgatcaattttgtttatcgatcattaccacttcttccgggtaactctttcgcctccctgaatctctgtcggcaacaaagattctgaattaggattttgatccacccataatatattgtacataagtagtatcatgtgcgacttcttttggctgtcgccggccgatctaggcgacctctcggacgtcgtccgggagagcctgcagcctccaccgccacaccaccaccgactgccggcggccactcctgcttcctcggccatctgctcgtcgggctcccatcatctgccggaggaagaggcgttgctgctgctgcaagctcgactcaacttcggtggcgacgatcacgatgaagcgcgctcgcagctgcagtcgcagcagcagctggtgcatagcagtagcggcatggtggagctcatgctgggcagcaacggcagtggcggctgcgcttgcgatcatgcagctgcgctgtgtccacatcaccatccagaggcagaggaactgattcctcggcccacgtccgggccgcagcaacagctgtgcgcttccactcgttccagcttcgtcgagaggagggacgatgatgctccc

SEQ ID NO: 162803 - DNA, 609 bp, Zea Mays
gatcctacgctgctagggactataggtggactcatgtggcctggcttgagttcaaatgatatgcattctgttttcttcattttgttcatcatgtcattaatagccttttgtaccctttcattaatagtctcttcaagggtccttttcgtcttctcgtatttcctatatgacgccgcatactctggaaatgcctctctccaggaaatcttagaagagattccccgagcccgtccagtgtgttcaggattgtctagtgctgcagttagtacgtcattctccctccgaggcttaaattcgcccttctttctcttatctgcatattcttgaatttttgtcgaaacttcgcctaccaattctggatgcaaaagtttgccgtcctcactcaaacatgcccgacctaagatccaacgaataactcgctcatcgatatcttttaatattgggtccaaagtgtcgttagctatagcttcctcgattatcttgttccactgcacaactttatggtgatatccggttgaccccaggcgatgggggtgtttgttcatcttcactctctgagaattagttttgcccagttctttggcctttagttcgatcttcttacgaaca

SEQ ID NO: 162804 - DNA, 877 bp, Zea Mays
atcatattgtaagacataaaagtgccacggttgctacagttttggctacagtacctttaaatgtatcattccgtagggtgcttgtcggtcaaaacctcactttgtggtataatttagtggcaagtatattacatgttcagttgagtgtcgatagggatatttttaaatggagtttaactaattctgggcagtttacagttcaatctatgtatatgagtcttattaataatgggaatgtttttaaccataaggaaatatggaaacttaaactgccacttaagattaaaatctttatgtggtacttattaaaaggagtagtgctgacgaaagataatttagcaaaatgcaactggcaaggtagcagtaagtgtggcttctgtaatttggatgaaaccaatcagcatttatttattgactgtcatgttgctcactttatgtagcggttgatatcaatctgttttggtttaccaggacctagatctgttaaacatttctttgggaactggttgatgggggtggatttaaatactaagaatctcattattacaggtgtctcagcattgtgttgggctatctggataagtagaaatgacttagtatttaatagagcacaaatgtttacttatttgcaggttctattcagaggaactcattggctcagactttggacgcagctgcaaagaagtgacgattcagcgaatctgttaagaagagcttgtcgacatctggagacgatggccatgcacttttttgcttatcggggttggaggttttctaataggattacattgtattgatcgttttcctttttaagtgagtgttgaatcggtgaggagtaagggagagtttaagtcttttaggctaaatgtttttgcct

SEQ ID NO: 162805 - DNA, 846 bp, Zea Mays
ctctgttctcgtgcctctcgctaggtgaatttgagcgagttggacacttggctacggctcacgagatctggtccaccctcgagaatttccatgagagcaatgatcatgtgaagaccaggctctttaagacgtaccagcaagagtacgagaaatttgttcagttggctggagagaccatagacaatatgttttctcggttccagtccatattgaacaagatatgtgccaacaaggcacaattaccctatgatgatcatgagaaagctctccagctactccatgctctagatcagagggtttgggaggtgaaggtctcggcgatcattgagtcgtccaactatggactctcatcgtggatgagctattcagcaagctcaagtccatagaagttgaccaccagaccccggccaagattgagaaccctggtgcacccaccatggccctggtctccagaggtggttgctcctctaacccctcacctattatattttctttgtgttctttgttgtctatcatagatgagcaagtggagagccttgaggatgaggagctagcgctggtggccagtcgattcacgcagttccacaacaactgctagaaccggcagtgtggtaggtcgacggatagatgcttcaactgcggcgaccccgaccacttcgtcaccagttgccccaaggagggcaagtctgatgctggaacgcatgaccactgtggtcgacgcaagagcaagtgggagtacacctcgacaagcacaagtccaagggaggatatgacaaggaggtgctcaagatgaagtacctctagaaggccaagatcaaggagtttgccttcctcgcctcccttagg

SEQ ID NO: 162806 - DNA, 375 bp, Zea Mays
aaaataggaaatctgtactgtagataacactgtttgcagagtaaagtttgaagtagaaaatgggataggggagctgttggggtgtggggatagcctaattgttggagcatatttctttttagtgtcctaaacactttaaatgatgtagtattttagtttttaggagactatttttaagtcatcttgctagagatgtgggctatgtgatattatggccttatcaacaaccgacccacgtgaaattctacctaagttttccaaaggaattacaaccaacccatgaatttaggtgccatatttcctgttactgatacgcatatgaataggttcaagggtcggacgcgcagccgaagcggccccaaaacatcagcaagc

SEQ ID NO: 162807 - DNA, 470 bp, Zea Mays
tcatgagaaactcattctcatacaagagactatataaaattactaagataaagtaatagtctcaacataatcaagatatagaaagaggctccccctagagatatgcgtcaagtatttgaattgaatggatgcatttactttaaagacaaatatggagaagcattgtacattttgatcaaggctcataaattttgcaataaacaacttaagcctagcattctcataatgaaagggtttagaatactcacaaccacagatcttattatccaagtaggtgttgttgttcttgatgtcctccactttcatttgagtgtcctccctttgtagttgtttccttttcctttcaaacttattgaaaatactcaagaaagatgttaatagcacaagggagtatatgatggaagatgattcttttagataggaggtaaaagcaattcatcatccataagtcacacagacatgaagtaaat

SEQ ID NO: 162808 - DNA, 441 bp, Zea Mays
ggggaattggccctgtaccggttattagattttcggtgttgtgaaatttccctcgctttatccgataacctgatgcatcttgtgccaaattgttagccctgtgattctcaactctagagatgtgtcgaatgctaaattcatcaaaagaatgaattatgccccgacacttttcaaggtaactatttagagtaccatcaaaacattgatattcttctaatacctgttggacaaccagctgagaatcaccaaatgccttcacatgttttactcccatacaatttaaaagtttcaagccgaacaaaagggcctcatattcggcttgattgttagtgcaataagttttcaatcggctagagaagtcgaaggagacattgcttggtgaaacaaacacgatgccaattccttacccttcattgcaaaccgatccatcaaaatataaag

SEQ ID NO: 162809 - DNA, 672 bp, Zea Mays
ctttctatatcaagtacggcacctgttctctccaaagaacgtggcttcggcctgcgagtcaaaactttagctcttttcggtttatgcgcagcagaagaggatgaagttgccacttttcttttcggcctttgctttcgggcaggaaagcaataatccggataaaaaatccgatcacatcaaaaactctatttagtctcctcttgctgcgagcgccgaaagtagttgtcatggcttcatcttctgccttcgtataacctcccaacagctcgtcgctggtaacctcaacaacctctagccaatcgtcattcggctcgtcaaattgacttctatagcggaaggtatatcttaggtataccagaccaccttcgctggagccagcagcagtctctttcggcatctcccagtcatttacaagcggccaaaccttgtaagcaatatgctcttgaaccaaatctctggtgccaatgtaagtacacaccatgttgaaggccatcaaacatgcttgcacttcgttcccacttgcaattgttggccttctgatgccgaagcgtgaccgtatggggcgctggattataccccttacatccaagagcccggccatttctttcggaatgttggcacatgatacctcacatcagaacggtgcacaaagttgtaacatccgaagttgtt

SEQ ID NO: 162810 - DNA, 763 bp, Zea Mays
gacctccgtcaaccccacggtttattcggtcacgattgttgcgccacacctcgggctacaaaaccaggcacatccgagtcgtgtgccatcccccttcctctattcctccctttttaccatgaacgacgagagagagacacggtgggaggagaccggagggtacacttgcgccattgtcgtcgactgcaccgtggccaagctcgccgccctcaccctaacctctggtaagtgcacgggcctgttctttacatccatagggtcgtgtgacaccgatagggtggtagttgggtcggtggttggccggcaattgctcatcgggcttcaaccatgacgtagagccgccacggaaggtagaccaatggcgtctcgggacgattcaactcgtgtgatggttgtccaggttgggcgtagtcgtagcttcgtctagagtatatttgattggaatttgggggctcaatgtgtagaatggggcttccccggcgaggtcaccaccgccctggggttcgccggtgtgaattggtggggggcgccgccgggtcgcgaagcggatagggttaggcagatcgtgtacgtcggttgtgcggtctacgactctgattagaaactggagatacccccttcacgacattaaatcgaggtcgttgatcaccgatctgacgaatagaaatagatctaggaatcctcgtcgttggatcctaatccctcggttctggttacatcctgagttagccacggcgaaatctaatcctggccgcgcgatttg

SEQ ID NO: 162811 - DNA, 1069 bp, Zea Mays
gtttaaataagctctggactgggcctcaattaatgggaaacgcagggacctcggagtaaaactacagagacccagcgcatagtgactaatggacggcgggttgattcccatttttcccgagggcccatatgtaaatcgagcggaccgaaagggtatcgcgagcctaggaccgtccgatcgggactcgacgacccagattagacccacgctacattgaaccggtactcactctcagccgtcggatgcaagatccgcggatcacgatttttaaacgctctaaactgctcgtgtgcgcctgatttggatccaacggtcgagcacagccctagctacactgagccacaggttcgatccggaccgtccatcttataatctacggcctgcaatgcatcaccctaacccttaaccggaaccgttgattacaagatcaacgcccgcgcctttctcttcctcatgccgtgaccaggcggcggcgctccgcccagggaggtgacgccctcatcgaagcaaccatgctccacgcggtgaagttcgccggagcgcgacgatcaaatccccaggtgcccgactacccttgtaactgggtgtagtagagagaggaagcaacagggaacacgatagaggggtgtattacctgcaatgaaccgcgcggaccccctggccatgacatcctgcggccaacggtgaacggaccgttccggcgagcaattgcggtgctccctgggaagattcgtcaccggagcagtcaccattagagtcacaggaaccaagcgaacccactgctcccacctttcgaagcagcgcgcggcacccacgagtgccaccaacggcggcgcagtccacccggttctacgacaatggtggtgggttacgaaggatagaggagaaccggtcctaggcctacggctttatagccccggggagtccgtccatggcgcccacaaccacctacgcgaagtttgtgcagccgccagctaggttccgagtccagcgcctaatttggggaaatcgattggaggaacgcgagatccgcggggaagggacgtcccgacacccagccccacatggc

SEQ ID NO: 162812 - DNA, 994 bp, Zea Mays
aatagcaaatgaaagaccctccatctaaggctccagcagagtaggcggtatctcggaggaaaggaaggacttggaccagttaaatgaatcctcctgaagcaaaatcgacataaaaaagggcgaccactttttgtaatcttcactgaaatctctggtttgcccacaggagcaaagtaatttgcccatagcctgtaaaattgtgccatcctttttatctccatgtgcaattggaagaccgagtctggttgccaatcctgagcaaacataaaattcatctccacattgttataaacatggttaatttgcccctcctgatgagcatatgggagtgggacatcctccagttcttggtggttcccctgaataagtggaccatcaacctcttgaagcccatttggaggcacgacacccagagcgatgacagtaggaacattatcaggctctaccggcccaaccaagcccaagccatccaaaatctgaccattctggactggagcacccgggtttaggccaatagagctgtccaaagacaggccagagtgatggttgctgatctgctgctcctctcgttgaatgtcctgctgaatctgatgagcaggctgagcattaacaatccactgatcctattctccctgaatattgtcttccggctgagcctgaatattctcctctggcgggaagttaaggtccaaacccacagcaggcataggttgacccaggccaaaaaaaagcgagaggaaactgctgaccatctttagggaccaccaggactggatcttcatcttggggttgaccaccaagcagattttgctgaatgatctcgcattgcacagtccaagaatccccaaaaaaaccttctgcttcagaaaagacaatgaactgagggacttcttcaagcgacgtgacaccaccctaagcagagtcctagtcacattgtgcctgtcctcctcccacacaatcaatctgtcgaatgaaccaatgacagcttgcaagt

SEQ ID NO: 162813 - DNA, 301 bp, Zea Mays
cacggatgaaccacagctgagctagctagctagtagtctagagcatggaggaggagcaggtggtggtgccccagaatgggagttaggttttctgtgcatggcggggccagaatcctctctggtttgcctccactgacatcattcgatctccttctcctcctatccaatccaatcacccttttggcggacgaatcctcgatcgataggcaaggatgcacacaccgcacaggacgcctcatcatcctacttgaagacgctagcacgcaactgcatgcaagacggcaaagaggctttgggccgg

SEQ ID NO: 162814 - DNA, 440 bp, Zea Mays
aaaaactctgaaagcatctacataaaattccccactagttttgtatacaatttacaattaaattccaacatctaattagcccaacacagtccacaagataaaccctgcaatctatttttggaccgcaacctacccagattcaaacaacgatatctaccaaaatataactccgaatcgagcgcataagtactcgttggaaaggtatgacaaagctctacatgattatcatactggttatcaccagttacccacgaaaaatccccagaaactgtcaatactactgttgttcgcccacctgcaaatctatttttttggacagcaacatacccggattcaaacaacgatatctactaaaatataactccgaatcgagtgcataagtactcgttggaaaggtatgacaaagctctacatgattctcccactgatccccactaatt

SEQ ID NO: 162815 - DNA, 653 bp, Zea Mays
tgccttatgagaaacttgttctcatacatgagacaatatgagatttctaagataacgtgctagtctcaaaataatcaagatatagaaataggctccccctagagatatgcatcaagaatgaaggaaatgggtggatgcactcacttttaaaagcaaatagggagaagcactatttatcttgatcaaggcttaaaagatctgcaataaacaacttaagccttgtattctcacaatgaaaaaggatttagaattctcacaaccacaccattgatgcttttgacaaacttattgtccaaataggtgttgtttcacttaatgtctttctctttcatgtgagtgtcctccctttatagttgactctttttccttccaaacttattgaaaatactgaagagagatgttaatagcacaagggagtaaaagatgaatgatgatttctttatagagaaagtaaaggtagttcatcatccatagatcacacagacatgaagtaaaatccttgacattagtgcacattacttgaaaagaggaacatgcactatttagacatttgatcaagcataggaatttacttcttcatattgaatttattaatcattacttaaaagcaagtcaatatgagaacatatatagcaaaggtatgaaatagattc

SEQ ID NO: 162816 - DNA, 535 bp, Zea Mays
tgtgcgcctccgcgggagatccggtgtgccgtggtctgctcggacgcgtcatcctcctcggtgagttccgtgtcccggtgattcgcctcgctattctatgcgcatagcacctttcgggtcgaggtttggggtcgtggctcgctgaattgtccttcccggccaaggtctccgccgggttgggcagcggcaccgccatggctggtagtagcgggagtagaagatgtggtgttgaccgttgatcagccaacggacgcgcgagatctgaagccacgccttccttcgcgggtgtggtagatgtaccgtccgatcgaaatcgtggggtccaaattgttgtctgcgtaattaaatctgggccacggattggtgatccgagggcccgggtagcgtaccggttcgcttaaagatcgattgaatctgtgctgtccaaatctaatccaacggcgggatctggccaaaaccccttcggcttgcacgctttgcaaataagaccctcgggttaaggatttttgaacccgccgtccacctaggttacatc

SEQ ID NO: 162817 - DNA, 894 bp, Zea Mays
tctaagtttgagagccaattcaactgagatccagtgcaaatttgtgaatgatttccataacaaacttgtagctggtaggtggcactacaactttgatgcagaaggctggttctggtgccacataaaaaccgaaggaaatcaagctccaacatgggctgtcagatggactaaatggcgatcccatggtacagtagcctgataggatcagaacgccagcgcggcttgctcaccgccggcgacctctttgcgccaaaatccgtgccgccgccgtccgggttcgtgcgcgataggaaatggatagagtcggagttaaacggcgcatatgtggcaccgttccctgagtccagccggagacttcaccggcagccaccatgaccattgaattttgccgcggtgtcgcccatgcctccatctccctcattgtacctctttccaacgtggtaggcatgcgcttgcgctactatccttggccagggctcatctgttgggccgccgtgcctataaattgagcagggagccacggtgaggtgctttcatctccaccagtgaagctcagtcgaagtcaaatttgcgctgccctctccatcttcgcccaaattgattgcgcgcaatgaaaacacaacttcttacggccctgtaacctcaatccccaaccccaatttcaacccgagctgccgcgacgccgatttcccccaaactggtccgccgcatcgcaaagaatagcccacccgtggctgggtcactctggtgagttcctattcaattcaagtgtcgtttccatgcctctgtatgcttgcgaagctcatggtggcgcccgtttgctttgatcaaccatggtctggcgggaacatgtactcccgtgctcggtttccgccgtgcacgtggaccggtcgt

SEQ ID NO: 162818 - DNA, 914 bp, Zea Mays
cggggagcgcaactccgacgagctagaccggccggagggggccaagaccggcgctcagctttagactaaaccaaatccgtgacctagagagcatttccccaaacttaattgcacaaatggtgagctatcaagctctatccacgtgaaccgaatgggtggtggacaattgagtgcgttcccggtgattggtgagcccgcagtccaaattggtggttcggtaaacatcgtagacatgtgagaaagcttaaacaagggagagggagggttggactaaccgggaaggggctggccgcggtgaggtgatggcggaaacccggattggggaaaaaccaaaattcaagctctcggaggcacggttgctaacaattgttggtggctgggtggatgatgatgttacgcagctaggggagggctcaatttataggaggagcgagcggtggccgcaaattttggacgagacacacggcgatcggaagtgaggaagaatgctggtgcagtgaacacgtgttcaccgccgtggcagtaactccggtggtcgacggggagtttagagggagtcacggcgatgcgatggcgcagttaggacacgtggtggccaacggcgatggcacgacgatggtgagcactttacccgcgagcggtgagccaggggaggagtacagcggctgaccggggtggcttccagcttgacggcggcgaggatattttaccccgagaggttatccacaagtccggtgcacgaatccaaacgccggcgacacgaatcgcggcggagggatccgtcggcggtgaggacagccgcgctggtggcctgatccgtttggttactgtaccatggggaaatggtattcagacagcctgacagagccatttggagcaccatttacacccaaatttctatggcaacatccacg

SEQ ID NO: 162819 - DNA, 631 bp, Zea Mays
aatgatgctctgaccttgaggagaagtattctgaaagtcaagccgacttgacccagacttctgcttttttagacggtgcacgttctttgaattcctctctgaatgctcagcttgactccaaaaagatggcacatgaggtaaacttccttgttgaccctgtagtgttattgttgccttggtactgaatgttgctttctgttcgtaggaggagaagcgagcagtcgttgcctctcatgacaatctggacaggttgaaccgtgatgccagtaactccttgaccatggctctctggtaggtcgctcccacgttcttgaggccgacggcatggaggtatagcagaatgctccaaatggggtgatgaatgcaattttttcctcatcttcttttgccaagttgatctgatggtatccagaataacagtctgggaaggacaacatagaacagccagcggttgaatcaaccacctgatgtattctggggagcctgaagggatccttcggacagtgtttgttgagatcagtatagtcgacgcacatgcgccaatccactttattctttttgagtacaagaataggatttgctagccactcaggatgcaacacttctctaatgaaccctgcagccactaagc

SEQ ID NO: 162820 - DNA, 531 bp, Zea Mays
aagccctagcttcctgaggtggtttttccgaaccctgccgagggcctatccttcgaacctttgaacagtattcctccttgcttttttccttcctgaggtgagttgcccgaggtagaagacgccttctttcggttaactactgaggaaataaaggaaagagggatagagtgaagagggcgtaccttttgaggcggaatgtgaaatgacgctcggcgcgtttttctcggagggggcacgaccattcaatgcgacgggatgtcctgtcagtcagccaatcgtttgcgacgtgcgtgtgcgagagattcgaaacgactgtcgtccgactattacgatttgcaccttggtggcttcgcccgtccctataaattcgcccgagatggacgcttcggaccgttacctttgttgctttagccttcttgctttacatgccatcttcgccttctgctcaaaagagctcttcgtctcctcgccgtcttcttcctccatcgtgatggccgagaagataagcgtccttcctcctcgtgacccatg

SEQ ID NO: 162821 - DNA, 379 bp, Zea Mays
caacggcaagcagtttgacagccaagacttcaaggatttctacttctccattggcaccaagcttgccttcgcctcagtataccacccgcagtccaacggagttgtggaacgcgccaatggaaaaattttcacagctgtcaagaagatgctcctcgacgaaaaaagggcaggtgggccgatttgttacctgaagcggtctgggcgctaaacacgactgagtgcagggcgactgggttcacccctttccaccttctatatggatcggaggccatcaccccgcaagaaataaaacatgggtccccacggacagtctcgtcaactgtccccgacgtggacgaacccacttcgaaggatcttatcgacggagcccgcgtcttcg

SEQ ID NO: 162822 - DNA, 675 bp, Zea Mays
ttttagtatgtagagaatatttttatgaacctaacgcaactggaacggagtaaaacagaattaagacgagtaagttatgccataaacaagtttctaggtttcctaattatttattttaactctctaaaggtttccaggggtatattttaaaagtccagggactttgatgtaattactttgcacaaacacgcacgccgagttactttcctttaaagacaggggcctctttgcaaaaccaatctcggattcctgcacaaggacacgtggcgtcctatgactggctgagatcgtgccacaccccggtgcacatggtgaggcgcacaggatccaatccgcacaagatccccaccaccacacacacgtgcatacaaatgagatcaccctggaccatcggatcgacgatcaacggccacccgccccacttccagtcaagaccccaaactaatctagatcgtcggttaccgatccactggccaaaagctccctggctccctgcccaaactccggcagcccgaggcggcgccaaacaggccccacggcggcgcaccaccggggacacgcgatcggacgcctaggcaccccaaacgcatacccaggcggttccatgcgatgctgggagcaaggcgaatcgaaatggggaggactcaccatgaatcgtgcagcgtagatctctac

SEQ ID NO: 162823 - DNA, 788 bp, Zea Mays
ctccagtggggctactcagaggttggtctagccgcatagaagctgtgtgagggattaattggagggaaactagctgaagccatatgaattccttgtaggccgaacaacaccaccgcagggccgcaactcactgcattcagaggtgtctgtgcctctagggtcggtgagtatctacccttgcgatttgtcattatctgctcgatgtatagcactttttgtctaaaagcttgaatcctgatgtcggatctggcgaacaccgacgatgtcgccaccacggtgatgcccctcgccgccgtggtttgggatcgggtggggacaatggcttttgggccgttgattccacaggaacagttaggattacaatagaacgtaccggttggggtaggatggatctgcatcgctggatggggatcaaatgtgtatgattttatcttggacattttagatcctgatcgtcggtctggagttgagcggctgagatttgtttgtcttaccggattcggggtgcgcgcagatcagtcgttggatcgtgggcgtagagttgggatcagatcttatgctcattaaaccatggccctcgatctcagatccggtgagccatgttgcataccggttcacggggattgggtgtcgatccatgctgcccactgcccacatctgatcgaacgacttagtgagcgataccccttcggcccgaccaccttactaaagaaaacctggacttatttgcaattaactcgcagtccaccacgggttaaggtaagtctgggaatttttgcaagttagct

SEQ ID NO: 162824 - DNA, 501 bp, Zea Mays
cttaccggtggtcattgttgtggagaaataaagtgctcgaatcagctgacaacgaatacgcatggacatatagcaccgcctgaatctaataatattggtgtggagagcattcacaccaagagtcaatcatttagtgagccaatcattctatatgtgatgtccgacgagactatatgtgatgggtgtgtccttcacttgttgaacctcgccactttgtagaacaagtatgcaaccctgctagatgagagctgtcagggaaatgatcctcggtccctaggacccaccgattagtgagcatgctaaggaaagagtccctgatttctagggcctgttagctagtgagaagaggcagatacatcaacccttaaaggacccgatcccggtcgaacccagcggcaccaagcctagggtcgggtgtggtggaacctgtcaagggaggccgagcgtgtcggaagagaaccactagagtggatcccacgcccagcctcggactaacccgcc

SEQ ID NO: 162825 - DNA, 464 bp, Zea Mays
tgcaccgtcttaagtcttcgctgacttaagccaactgctccattagtagggtatagtggtcaccctaagtcgagtaagcgcgagcatgttgcaccgtcttaagtcgtcaccgacttaagccaattgctccgttagcagggtatagtggtcaccctaagtcaagtaagcgcgagcatgttgcaccgtcttaagtcttcaccgacttaagccgattgctccgttagtagggtatagtcgtcaccctaagtcgagtaagcgcgagcatgttgcaccgtcttacgtcttcgccgacttaagtcgattgctccattagcagggtatagtggtcaccctaagtcaagtaggcgcgagcatgttgcaccatcttaaatcttcgccgacttaagccgattgctccgttagtagggtatagtggtcaccctaagtcgagtaagcgtgttgattccaagtccaatcgaatcgaa

SEQ ID NO: 162826 - DNA, 903 bp, Zea Mays
ttcttaatatcctgtgaagtgctcatgctcatgccaaagagtcaaaagagcatgaaacgtctatgtgaagttatgcaggacccaaagaagatatatcatgaagagcgaatcacatccaaaaatcttttgagacatattcaagattaaactcaatactcaagaatcgagatcttggttgacttttatttatgtcattgaatataggaatcgtcatactatcaagagggatcaacatatggtattggcgttgttgctaaagctcacactctttatttttgagtgaactattttatttcagctccactgtgattgaagtgggctgttcaaccagtccttggcccacctcaaccttgtttctctttggtctccagtaagtacctttactgcaactgttgtggtgattggtatttaagcatatgggatgggtacaacaatcttgtcgtcattttacaggacaagtggaaacttgtttaacaatgaccccgctccaccacctccaccatcaccactagcaccaaatacccctccctattggcaacctgatgttccagcttacccatccccatacttatatttaaactctactcgcgaacggtgcagtctacgatgcagaacaatgtaaaatagtacatatgggtaaactttgggtaatctgctggagtcggcctaaagtctaagatacccagccgaaaatggtggcagacactccaaacttggtgatggtgcagttgcaggaatcgtaatatgtttgctggatgttggtgcaatagttgcattccttgtaatcaaaaggaaatcttggaggttatcatggggacaagacccggaacaaaatgaacctctcagtcctcttgcttctggacttaaacgtaagtcttaaggtagttgtgttttcatctttat

SEQ ID NO: 162827 - DNA, 771 bp, Zea Mays
gcgactacgtgcgcgaacagcacgctgacgcgcaaacgatgcagcgtgcgaacaacaacaaacgaataaataaaagtatttaagctggtattaaccgagtcaattaacatttgtatttataaaagcacgagttaaaactatagactcgttctaattaaattcttactttaataactgaatactaaacaattaatcaagtatttaacatgaacgatatggcgaagtgatcctattgaagcgtgccaattgcgatttacatgaacgacacgtgcaaaacaacacatgatttaacatgcggaccggacgcatggcggcgcgcgcacgaacaagaaaatagacgacgactacacacatgacatgcgcggaacaacgggagacggacacgcatgacaacacgttaccaaatatctaccgacgcataattgaaattataaactagattcgattgaactgttgtttttatactaaacactaactagacattccatacaacatctaagtggttaaaaatcacattactatgtatttacaatcgcataattaaactcataaattcgatccgattgaacaattactttattactcgacaattgaacgagaattacttagttaatacgagcagctaacatggaaccatttaataacgcgtgcggcaatgcgcacgacatacacgaaacaatgctcgcggcacgcgtgaacgacgagcgactcagcacgcgaccaagacgagtagaaatgggtttacgacgcattatatatcaaataactgac

SEQ ID NO: 162828 - DNA, 792 bp, Zea Mays
gtttttaacgaggcggagtcatgtaatatacaagtgaaaaatcccccacaaaaacctgcgtcgaaaaaagaccgcgccgacggtcttcgacattcgaccaatacaaagtcaccgcgaggctcagcgctagccaccctcgcgtgcgacaactccgcgcaaaagtcgcctaagggtgcaaccggactagcacaacaagtgagaaacatcgtagtcttccgcgaagacaatccgtgcagaagtcgcctaagggtgcagccggactaccacaacaagtgcgaaacatcgtagtcttccacgaagactatccgtgcagaagacgcctaagggtgcagccggactagcacaacaagtgcgaaacatcgtagtcttccgcgaagactatccgtgcagaagtcgcctaagggtgcagccggactaccacaacaagtgcgaaacatcgtagtcttccgcgaagactatccgtgcagaagacgcctaagggtgcagccggactagcacaacaagtgcgaaacaccgtagtcttccgcgaagactatctgtgcagaagtcgcctaagggtgcagctggactagcacaacaagtgcaaaaaatcgtggtcgtccgcgaagactatccatgcagaagtcgcctaagggtgcagccggactagcacaacaagtgcaaaaaatcgaagtcttccgcgaagactatccgtgcaacaattgcctaagggcgcagccggacgaagcttaacaagtgcgaaaatgactacaccaaactgtccgcgcaaagaccgactacatgcgcacgaga

SEQ ID NO: 162829 - DNA, 608 bp, Zea Mays
cccaagtcaggggagcgatgtcatggcttgacggaggaatatcagcaggaacaatttgaagaacgttgccagaggtgagttcagccccaccggcggatactagacttctcgcatctagctcactgacctccaaggcgacttgtttgttcgaagccgtagaagcatgcatcgccgtcgccccatcggatcgaggtagagacgacctaacatggacgtccatggaagtgtgggaaggagagctcacctgaacaccctcgggggctaggttgcagctcgcgccacccaccagagccggatcactaccggcaacaccctcgggggctaggttgcagcttgcgctacccaccagagccggatcactaccgatgacaccctcgggggctgggtaactaccagcaccaccctcgggggctgggttttctacaacagccacctctaaggctgaaggctcccctgtcacctccatgtgagtcgggtaactcggaccaacgtcttggcattgaagactgccttccaaagtcgacgatgcacgagacactgctcgggatacctccaatcccacgtctgcaatttccgaacaaacaaccatcacgtcatcagcagttggc

SEQ ID NO: 162830 - DNA, 709 bp, Zea Mays
tctggtgattaatagtagtagtatgataaaaaaaaggctcggcagtgcttttggcatactaggagctactaatgatgcaaacattgtgtacttaggtttgtcagataggagtacttaattataagtaactgtgaggcagcagtactgtcctaatccatggtggctttgttgtccccttctccatcacactactagtagtattagtagctagtagctagtagcaataagtacaccgcctataggcttcggtcgcttcattccaagaggccaaaacaaaaagggcaagacaacgccggcacgtagtaggctataggcagctagctcctgcacctctgctgcagaccatgcacacacacatgtaatgtttgttcaggccgtggtcacgtctcttcgcaacatttactcacccccatttactactacgtactgcgctgcacactgtactactctctaggacgtaccttcctcatgcacgcagcgaccactaattctcacacacacgcgcgctacggtagtagttgcttgcttggagtcagaggagaacggagggtacgtagaggagctgggaggaggaggagcaacagaatggtaggtactttttctccgttgggaaggaagaggcaaccggcaaggcgtgtggtgagatgacaggcagtttgaactttggagtccgtgtcaaaaagctttgaaaagctttgtcttggtcacg

SEQ ID NO: 162831 - DNA, 498 bp, Zea Mays
ccgctatcaccagcaggaggatttgacatgaaactggtaaaggccttggaaggaggcagattccaggccgagtatgcaacaggagcgccgatgtttgacaccttgcctctgagtatcatctcgagccggctcaccaagtccacatcaggaattcttctgttggttacccgggttgaatcagccaggccacgatacagatatgcggggtatgctctatctttcagtggctgaatgttcttgaaaatgaagtcggcaaccacagcttccacagtcaaacccctctctttcaacaacccaacctcagcaagcagagcccctgcctcggtcacctcctggtccgtgggggatttggtccagctcggagtgcgaacatctggctgtctccctgaccatgggggagagaattcccatgattctccacgatgaaccattccaggcgccatcccttgatgctgtccttgagtgggatgtcgagatagtcagtcttcctaccacagc

SEQ ID NO: 162832 - DNA, 1097 bp, Zea Mays
cggggatttgaataaccagtaaagaaccctttagcactatttcactgtctctctgacatttacacaacacccctcgcacttctgtttcttctccaaaccgaaccctggcaacggcacgctcgccgtcggccatctcttcgcgtgaactcgccccaaattgcgatgactgactaaatcaagtgttgcactagcatccctgatcccaggcaaacctagttcatcccctaattgaggtagtccgacccagaatcccctctgctcacgatgacgacaagtaccgagggaagatcgagctgttcccggcgacaaggtacggtagcgttcaatttctaagtacggggagcatcactacaccctaaggaagctagaacaaacggtaattgggctggaactacctcaggcgacgctggccacggaagagctatccacggcggcgcggagaacaaatttgggggaaaacccgaattaaagcactatggtggacgatcggcggcgagggcgggtgctttggcttcgtgacaacctaacagagctaacgacacactcaatttatagtgtccgagagcagtggctccgaactttgaaagggaaggctggcggtcgaagagaggggtgagtcaccggcgcaggttatcgtggctttcaccgtggcaaagcctcctgcgatggacggacttactgctatggttcactgcaacgtgttaaagatactatgcacgtggtgcatggacggtaagcagccaacgcaagcgaggatcatctcggtcggccgcagaccaagtgggtacggcgactgggcggcttgatccatccccctttcagatgttttacccctccgtgactatcccctcatcagagagcacgaatcgtagcaccggcgcagatcacggcttgtgggtcaccagtggcgaggtgggatgaatctgaagatcttttcgtgcactgtaccatggccatcttcttcagtcgttcagacaacccgagttgaggaacaattttctccaatttttatgtgatagcccactaatcctcctatatcaaagttattatcctttaatccagctttaactttgctatagtaaccataacctaacaat

SEQ ID NO: 162833 - DNA, 438 bp, Zea Mays
atcacctattcaccccctttaggtgactctcatacgccatgtttgattgaaccatcgttgttagggatgacaagtgtagagcgctcggtgaaggatgttgcaattgcatggagttgacgtgtggagagggggttttgttgagcagtggggtgttccttggcgtctgtcgaagatgaagaggtgcatctaaaattgatcgccctagtgaactccgaaaaggtggtgaagagtagtgtcccaccagtcagagagccaagaggcgatcagaaccatagatctggtggtgaggcctaagtaacacccttgagtttacatgtaaatgtattaataattagacggtccatttgaaaaccaatcattgagttatgtcgattacaagctacttgataatgtcctgattgcttacataacaaacatcaataggctgacgacacggat

SEQ ID NO: 162834 - DNA, 678 bp, Zea Mays
cagtaaaagcctaattctatggactcgggaggaggctacatcgtgaagctcaactctgtcaagaggaacaacttagaaaatcaaatataaatcttagcaaacaaagatcaatacgagagtcaaatctcccaagctaataactctgcttgggaaccagactcaagggccaatatggggtatccaagagcacttcaacggataagactgaaagttccctttgcttggaaataagatctggatgtcacctagagagtggtgaatatgcgaataaaaacttaacccccaaaaatagaaattcttactctagtcgaagattgatcacagcagaatgaggatcacgtgaagtagatcgcaacggtattgaagtccctgtctcagtatagcctgcacttcaaaaacaacttataccaaggataagtagtgaagtgcaaaaaagcaaagcaaacaacacagtgagacatagaacaacacagagcagagcaaacacgagacacggggatttatcttgtggttcgaccaagcctgaaatgtttgcttacatccatgttgaagttagccaatccttggcttggagtatctcactccatcctctagttgctcagatctgtcaaggtgacagacagaggattccactatgtcgatgagtcggttacaatagagccgtggctgttctcgaca

SEQ ID NO: 162835 - DNA, 780 bp, Zea Mays
gactatcagacgcttaggagagagcttttgcaatctgtcagaagaggagctggctgacaaagctctgaagaaaaagaagaacccacctggctgtgttggccctaataagtcagggaaaaaagacaagggggataagaaacaagactcttcagatgatgacaactgatctgttgttgctgcttcgggtggggttattttgcaggtctcaagttcgccaggctttttggctgtttcggccctggcgtctttgtttgcttgttgtgttgaagaactctgtggtttcgggtagtgctttgttccgttctaacagatacacttttgcccacccagtaattgggtttgggttccttttcatcaacaaacctgatcctctcgatgaatagtcacattgctattaatttttccgactggtccgttttacgttttaatgtccgcggtattaacgcggtggctaaggggaatggtattcattgtgtgattagggaatccaattgcgacatcatctgcttgtaggagacgaagaaggaattttttgacagggctgacctcagaaggttctgtcccaattcttttgatgagtttgcttttgtcccctcgataggaaattcggggggtttcattactgtttggaatagttcgaagttggttggcagtgctatttttcagaacgagtatgctctctcggttgagttttctgctatttcgtcggatgaatcttggattgtcactaacgtttacgcgccctgttctccgcatgggaaaattgaattcctccactgg

SEQ ID NO: 162836 - DNA, 371 bp, Zea Mays
accaggtcgtgcgaagcctgtcagaagttttctccccgctcgggcaacccttcgcagttcacaaagctaattgcccacacatagccagttcaacgctgggggctggatattgtcgggccactacccacggctcaagggaaccacaagttcaccttcgttgccgtcgaatatttcaccaagtggatcgaggcgagggcagtatccaccataacgtcgaagactgccagaagttcttctggcaaaacattgtttgccgattcagagtcccgtctgagctcacagtcgacaatggcaaacagtttgacagccaggacttcagggacttctgcttctccatcggcaccaagcttgccttcgcctcggtatatcac

SEQ ID NO: 162837 - DNA, 1132 bp, Zea Mays
agctgggggatctgcgcccactcccaacactgggggtgacacagggggtgcgtccagctccatccccccgcctgctccgaaggagatggaggtggtatttgggtgctgactccggttgggtgccgagcaagaagcggcgccagtccccctcccccgcatgctgtcccgcgcccaccaggttcttagtgaaactgaggcagcaatcttgcgggagtgggaggcacttgaagctgagcaccaacgcctcagtgactggcgcacccaactggaggagcgcaccaagacggcgtcctgacagttcacctccgtgcggtcccaactcgagcgggaccgcaagcagtacaagaaagatctctagagggtgtgtgccagggagctggaggtgacccagagggagaagaaagtggccgggagggaggaagccgtgacctagagggaggccctcatgatggagtaccagaccaagctgagtgctctggacaagactctggaagcccagcaggcccagtaggtaaaggccatggaaaggctgcagaaatggcagcaagagctcgagggcaaggccagcgaggtcgccctcaccgaggaaaaccttaaggagaaggagctgtccttggacaagcaggagatgaatctcgccaggcgagagatagatctcgccttcagggaataaatgctcgtccagcgaggcgagttgctggccgagcatgagctcgaagcagaggaaaaggagaggaagctggaggagcagatctaccagttcgatgtggcgcaggcggcgccgggtccctaggaaatggaggccaccagaaaggccctcgaagatctccaagcagaacaccgcgccggggtccagcgcattgccaagtgggccggcaaggcaagcacgacactagtgccactagggatgagccccatcctagtgtcggagccaccagtgtcgatctccgatgccctcccggtgttggactctaccaccgatcgcctccggcacctggatcagatcctcggtgcccgcctggaggtagagggcagcaagctctaccgggcggtggtcgactacgtcctgacgtgcttccggagtcatgaccctggcatatccttggcgccggtgatcgatggtccggtagcc

SEQ ID NO: 162838 - DNA, 997 bp, Zea Mays
gcatgcgcactcacgcacgttgccgggtttctcggccacgacgcccgcccacgcgcccaactctcttcttatagccccaccggtgccccgcacacacccctcacctcatttcgcacactctcaccctctctcgcgctctgccctcgccgccagccgccgctggagacccacgcccgcgtccctgaccatccagctcgctggagtccgcgccaagcctccccgagctccgccccgaggtgagacacccgtccccgtgcccaatttcccttattatgccctgtgttcgtccaatttcgccttcgccgttctcgaccgcggcggtccgccacgctcgcgcggtggccggccgatttattctggtctagttccccggtgttagtccctaaggtgcatatgcctctgctgaagccaacccaggccttaacgggccttaaagtcccctccccgtggccggaatcactcaccggagtttctctggcccgtccgaggccacctcaccgctgctctcccctctctgctcgtggattcatggcctcttccccgccattgagttcgtcgtggcaccctcttcccctctgcccaaccccggcaaccccggagccaccctagctcgtgctagcctctgctccagcgacctcaccaccatggagaggagcggcgccgcccgcagccatctgttttcccttagtctgatttccctccgtccgatttagatcaaacggcttggacccgctcagaccccctcggacccgctcggacccgttcggacccccttcggacccctccctgtctgatcttgatcgaacggctcggaccccctcggacccttgtagccgtccgtttcccctctggcgctgggccccctcggtcagcgcactctccccctctgtcgctgacactccctatcccgccagtcagtgctcgccccccccccccgcgcgccctcgaccgcagatctaatctcggccgtcggtttctgatccaacggttagttcac

SEQ ID NO: 162839 - DNA, 401 bp, Zea Mays
ggaggagcttcagaggaccgtggctctacggttggctatggtgcacttgggagagcactagttaaggccggtgtgcttggtgatgaccaatgagaggggcacagaggagcttggcacagaggagaggggagaaaaggtagaggatacgagcttggcgtagaggaaaggggagcagaggagcctgctgccttagacaagcgcagagaaggaggaggatagcaaaggaaaagatggggatcaaggtgtgccgacgactaaatgaagaggcggacaaatttggtcgtcgcttcaaatgctaagccaaacaggcaatgtaaatgggccctaaaatgggctaaacgtcacttagagccacgtcttggctgttccgtttaggtcaaacaacccatttacacggcttg

SEQ ID NO: 162840 - DNA, 1240 bp, Zea Mays
ctttggaaataatgatttgggtttctttcgcatactagaatttgattataagttagaaacaccggatccagccccgactgccctcatcaaagtaaccgagggaaaacttacgcttgcggtagtgcagacggaactggctcgtttcattactaaggactggacttgggaggctttgccccatagtgaggaatccttcttggtggttttcccttcggttgaggaattacagagaatggttgatgtggacttcactcttaaaaatcatggtgtgactctcactatctcgaaatggaaagatgctagtgatgctgatcctagttaccagcttgacgaggtatgggtccatatcaaggggccccccatgcttggagacactacctaggattttgggctctaggctcggtaattggagcgaccttggatgtggatatgtatacatatagaaaaatgggagtgattagagtgcttgttggaatgatgaacatagatcctcttccccttaccactgacattgtctttggcactaaaggatatgagatcacttttgttttggaagatgagaaattcacccctgcagaccctgtggtgttcacagatgtcccacgctaggatggtgatggtggtggggatattggagatgaccaatatgacaaaaacccaggtcatgcaaagaagaaacaaagaaatggatggagtgttggtgggtctggtgcttcatcaagtggaggagatagggagggggaaatgatgtacctatgcttgatgctgctgctcttcccctcacaacgactctacatagacctacaccattcatccaaattgttggttcatcgagtcaaatgggtgctctttcccctttaggttctcccaggctggctcggccatgggggccccctttgcagcaggcccttggagctttggttgcatcagggtatggccctttctgtagtttgatcaactctgatggctcaactgacgctgcagatcactcgttagaattgtcaaaatattcaggggttcagaacccggtttgtgaggtgggagcaggtacattgctgacacctgttaccactcagattgacttgtgcgtgactatgggaaatgctacttcgaataacgctgatctgagaaaggtaactaatgacatctcatatgaacctatctctttgtctccatccatgcagaataaaatgataatgcctattgtttctcagggaatgtatggttccctggtgcagga

SEQ ID NO: 162841 - DNA, 478 bp, Zea Mays
tgaaaaacgccttgccgacatttgtgcgggcgatgagtaagactttcagggacctgattagggacagagtagaggtatacgtcgatgacatcgtggtcaagactaagagagggtcgaccctagtggaagacttaaccctggtcttcgacaagctgcaggcaacacgcatgaagctaaacccggacaagtgcgtctttggtgtctccgcaggaaagttgctgggctcctggtttcgcaccggggaattgaagcaaacccggagaagatcaaggcgattgaggcgatgaggcctccggcccgcatcaaagacgtccaaaagcttacggggtcattagccgcccttagccgcttcatttcaaggctggctgagagggcgctgcccttcttcaagctgttgcggaagtccggcccattctcttggaccaaggaggtggaacaagcctttcaagagttgaagcagcacctggtgtccctacca

SEQ ID NO: 162842 - DNA, 488 bp, Zea Mays
aagagctccaccagcgcaaggtcgagtcccagaggaaacccaaagaccctccgcagtccagtcgaacgtggacgagaccctcgcagtcagactctggtcgggacggccgcagtcagcagcaggtgcacaacatcgccaaccagcaccccgctggtgaggctcctcgccgccaggattacccccccagggccgcggcaacgtaactcgtggtcggggccgaggacgggcgcaacagccgcgcaaattttactgcttgtttcacggcgaagactgcgcgcacccaacaagggactgcccggaaacgaaggccaccagagacaggatgtctcgggcgcaaccagccgacaacccaagagttatcgcgcacacatatcaacaactcccacaaccatacaaccacgaccccgctcagcatccacctaaccacgcataccaacaccaccaggaggtacaaatcatacctcccccactcccacctccacacccgc

SEQ ID NO: 162843 - DNA, 983 bp, Zea Mays
ctcgaaactctaaacgtcaaaccctaaaccctatgtatcaaaggataactcctatggctttttgaccattatggtctctacaaaagacccaagattgtgatttatgtccaacctatagtaaaatttaaccaaaagagtagcaaaatcaagaaatcgaaaatttttaggctgaaccattgtagaattgaagagatattgcaatttatccaggccatatcatatggctagagatagataaaatttgcccaacccctaaacacttaaccataaccctcaaccctaaacaataaacaccaaaccccaaacacttaaccctaaaccctaacaccaaaccctaatcatcataacctaaaccctgtgtatcgaatgcttacacctatggattttttaccattaaatggtttccaccaaaaacccaagaatgcgatttgtgtccatccaatattaaaatgtaaaccaagtaatagtaaaatacaaagatcataaaaaattaagtgcaaaccatggtaaattatagagatagtacaatttatccaaaccttaataaatgtctagagacagaaaaagttcgcccaaaccccaaatcctgaaccctaaacactaaacactgaaacccaaacctcttaactcgaaactctaaaaccctaaaccctatgtatcgaaggataactcatatggctgtttgaccattatgatctccactaaagaaccaagattgtgatttgtgtccaacctatagcaaaatttaaccaaaagagtagcaaaatctagaaaacaaaaattttaggcaaaaccgtagtaggattgaagagatagtacacttttatctaggccatagtaaatgtctagacaaagataaaattttcccaaacccaaaacacttaaccataaccctcaaccccaaacactaaacacaggaccccaaaccaaaaaccctaaaccgtaacgcccaaaccctaaaccctatgtaccgaatgcttaca

SEQ ID NO: 162844 - DNA, 685 bp, Zea Mays
atggaaggtcgccatccccgtgcgccatccttgctcggctgctccaaggaaggaagggcgtcgtgtggaggacccgccctcgctctctgcgcccccgacgccccgccatcacattctccgcgcggtctgctacaagaaaaggtccgcgtgtggagatggaaggtccgaccccgccatccccgccctcgctctcctctctcggctctcctctctctgctggatctatggccgccagctccgcgcccaccagccgcaaattgcccgccatctcctcgatttgcattatccaataacgagtgatccaaacaaatcggcgttcgtcctcgccaagacagtgttccgcgcttccgttcgctccgccgctcattcctttcctccaccgacccccgggggctcacaaggtaatatttcacctccttccctctctttccctcgcggccgtgcctctcctcagttgtctcaatcagcgggcgcgtacatatctttcgcctgtgctgccgaatcctaggttttgcgatcgtcgtcgtgtgccgaacgaatttgtgagcgtttcatgtcgttgttgttgctcatctgcctggcatcaggcacgaccatgtgtgtcatgtggcagtgttgtgtttcctgtccgtctcggcattgatccccctttgcgtttcagtgggttcatggttcgtctggttgg

SEQ ID NO: 162845 - DNA, 372 bp, Zea Mays
gcctttgacaactagggcccatcggtaagctgggggagaaaggaaacgtctgccctaggagcatctacccccaaatgagccccatgccaccgagggcggggtcgggtgtggcagaactagacagagggcgggtgaaccgaaggaagaccaccgagtggatccctcacctagctcgagaccgacccgtcataagtgaacgatcgcattaactatgcttgtcgtcgagccacgatgtaggcgctgatccacctcccactcatggcctacgagtcgctcgaactgcagcgcactcataacctacgaacccctcgtactgcggcacatttatggcccacacgctccctgtcttttcgacgtactcatgacttatcg

SEQ ID NO: 162846 - DNA, 350 bp, Zea Mays
gcaaaaatttgattgtagcagggacgtttattaataccactaactgattacacaagctgactgctttctctgtagcaggcacgtttataagttgctaccgtactcttttgctggccaatatggtaccatttatttgcgccgcggtagagaacatgtgtcgaatttatttggctgaccgatatgaggcccatctatcaattcaattgtataccgctaaggcccaatcgctcagtcagctccactcccgcggcatccctcaccacggcctccacttctccgagtcagttcccctccgcgcccacaacccccgccgcgcacacccccactcccgatgtgtccgccccaacgcc

SEQ ID NO: 162847 - DNA, 1344 bp, Zea Mays
aaaattgctctgtcagactggtattgaacaactgaatctgaatctgatagcagaagtggtcgtcagtgttgttggccgaacttggggctcgaatttaagcatgatctagtgagaattcgactaggacggctataacaaagatgaagatgatctagaggtctacaactttggtgcagaaggatgatgatgttgccatggaaaatttggagaaaacctgccctaaaccttggctgtcaggcgcactaaagatgaattccatggtacagtgcatggatcagactaccagctcggtcagctcgccgccgatgatccgtgcatagattcatgccctcaccgtcgtgattcccgatcggaccgactggataacgctcgggttgagtaaatattgtcgacgtggatatattccaaccaatagtttactccggccaccgtaccgagttgccacggtcgtttcggatgagctcgccggtgatagccgattcacggccttgcgccacgtacctaggcacattcaccacatcgccgtgactcactttggccgtctgatcatcgccggtgagagctgccacggtagatgccacaaatcccttgcgccagtgacctcccactcctccgaccgccgcgcgtcgtcgtccgattcaatggccaccgctcttgccttctataaattaatcacatcgtctggtccgtaggataatcacgcaccaagccaccaagtattgcctccaatcgtatacccaagagctctaattttggatttcccccaaactgagtttccgccaccgtagagacaccttcaccgtggccagcttattccaggttcgttcaagcgctctagtcgattgttctagcgtccttaggtcctcctcaagctcctcgacccctctgattgaactagaccgccatggatcaacgggaacacattgttccttttgattatccgcactgtcaccgtggccagagcaaaccgggtagccattcttggaattaggtgaggggaaacgctcactagatcttgaatttggcttcggccaaagtaggacgccagtcattgagcgaattggccggcacgcgagctcgttggagctctgcacgtcgccgtccaccgtcgagggcttcggagtgtaaaggaatagaaacgtaggggcttttctacaaatgtcagcgactcagtcaaatagtgtcgcgaccccgcttcaggttatcccataagacaagcccctttctgcaaaatcaacacacgcgggcgcgcgcgggcatagtttcaccagttgttgggccacctggtctagattcggtccaacactattcatgacttttttccttttctttttcttccagagt

SEQ ID NO: 162848 - DNA, 767 bp, Zea Mays
taggtctgagaagacgactagaataagcatgcatcatgattgtcgcattataaatgtctcttgtgcaccaatatgcttctctcacctttattccaataataagaaaatgtgaataatgtgtgtattgccatgaactgcaaaaaaaatgtcttatcctgtgtgtcatgatagtcttgactaggttgtgttatgtgcttctcttgtcttgctatctaggaaatgttttagttgttcaaacttttttttaaatatatataaaatgttgtttgtttcgctcatgaaaagacccccgcccaaacaaccttgagcttagcaagtgaaacctctttaaaaacaaaaaataatttcatgcttgtgttggcatttcctagtccttgagtgttttatccttgaagttacacctgcaccgcttatagacccccattgcttgaccgctagaccaacccaagtctccttgtgcgcttgttacgtcaaaaaaaattgttgtttggtgtctagttgcgcaatccctatcaaggccatgtttctttccataaatccttgcccctaaaacttcataacattcctattgatcatccagctgatcttgttgcctacctctcctttcgcattgatctggtgatctctttccttgcgaatcatgttgtggctttatcacccgaatctccggatcctttaatgattctgccctattatccggttatctgctaaaactcgttctcaagtatcagacgctgatcttgcctaaatctctcatttctggtcat

SEQ ID NO: 162849 - DNA, 358 bp, Zea Mays
cctgttgggtctcctgcgacggtcaccccaccgccgactgcttctatgcctcgcacgagattacagaataatatccgcaagcctaaaattcgtactgatggaacagtcacatattcagtggtccgtacagcctcttctgagcctacatcttatattgaggctatgaaacagccaccttggaaggaagcaatgattgatgagtttcgagccttattggtcaacaaaacatggcatctcattcctcctcgcagtgatttgaatattattgattgcaaatgggtttttaaattgaagcaaaaggcagatggtactattgatcgtcacaaggcccgattggttgccaaaggatttactcagg

SEQ ID NO: 162850 - DNA, 429 bp, Zea Mays
ctcgacttagggtgaccactataccctgctaacggagcaatcggcttaagtcggcgacgacttaagtcggtgcgacatgctcacgcttactcgacttagggtgaccactataccctgctaacggagcaatcggcttaagtcggcgatgacttaggacggtgcgacatgctcacgtctacttatcttagggcgaccactatgccctaccagccaggcgatcggcttaagtcggaaaacgcctttaaaccagcatggaacacttgctttcgcgttgttcagggtgactactataccctaacagtgaaacaattagctcttcagaaaaaataacgttttacttgttggcaccaggggcgtgttctggcgccctgtccacaaaatatttgagttctaacacaaccatcacaagcacatagaattcatattaca

SEQ ID NO: 162851 - DNA, 546 bp, Zea Mays
ctaatggtgaacaactttatgaaaggatgatggacatgatcgcacataaaaagtgaagtaacagctgctcaaaggttggactgtcaggtggctagtgacttagtctactcagaattaagtctgaaatcagtagtgatgcaaaactgatgctgccgccttgggactgcgctaaactgatgttgccgcaacgcaattaagcccaaccgaggcaagccatgccgtaattactacgcccaaagctgagcctactctagctaggaggaaggaaggggggcgaggagacggatccggatccctccccttccctttgagaagcagcgacagcaggcagccaacctagcggagctagtaagtagtagctaggcggcagccagccagccagccactcggcccaatttggccgagcaagtacaggcgttgttcctaggagaagacgagtacttaggcggccgagcaagtataggcccaatccggcagagcaagtacaatccggagaagacgaggacgaagttcctaggcggtcgtcttcttcctccctgccaccgt

SEQ ID NO: 162852 - DNA, 903 bp, Zea Mays
caaaggtcttcatgtttatgcttttgaaatcggcacttggctttagaggcattgtgaatctgttgggtgcactaaaagtacacccaatgggtgtagcccctatgctttgagtggattttagaagtaatccatttaaaggtcttcatcttataccgttttaagataatttttagaataaccaagtgatgacatctgtccatgtcttgttaggtctggaatcaatttgatcggtgacaagttggacatctggccggttgaaacagaggacccttggctgtacaccactcaacactgtactttaatgtttttgttgattggacttgtgccttggtaaccacatttggacttcctcccatttcagtcgatcttctctttttgtcgcggtacattcattgtgtatattttgcaggtatcgctacttcagaaaatcttgaagattctgagaggtacacccaattggtatgcccaaagggtgtctgcttcgtgaaaggtgtttatcacgttgtcctgaagtagtaacttgatgtgacggagcggtgtaatcatttgcctaggcagttgacttgagtccaaccggtgtcatgttacgcgaaacggtgccagtcgcctgactcatcttcaggcggtttgaattgattattgaattcttgcgactgttcggtgagcggggtaggaagtggacgatcaccccttgatctcttcaaatagcccccttgcctcgggtactttcttcactcgcccttgatcacttgctctcttcttcctccccgcttctccccttctgcacgatcatgggcaagggcaagagaggcaagggatggcctcgtcgcgctgatgggaagtgcaagcgtcctccgagtccacccccggaggacttcggtgagtcggagtactcgaaggagg

SEQ ID NO: 162853 - DNA, 304 bp, Zea Mays
caaggtttcgggtagttgaagtcgatatgccactggtccacactgttcaagtatagggaatggaccaatgtaccggggtgccagctttcctttaaccccgaaacgcgataagcccttcattggtgaaatctttaggtagacataatctcccacgagaaagtataagggttgtcgtcgcttgtctgcataacttttctgatgagcttgagctttcttcaaattatgaattattctttgaactttctcttcggtctctttcaccatatcaggcctgaagaagtacctttcaccaggttcagaccaa

SEQ ID NO: 162854 - DNA, 509 bp, Zea Mays
cgcgcggcggcgctaccctctgcggcggcgccatcaccggagatggtggcccctgagccctagtgcccgaaaccccaatcctccaagtgctacactatcaccggacgagagtgaatgcagcgcatggcctactcaccagagacggacgacggaggagagcagtcatggcgcacggcggagacacggcggagacgcaaccctggcgagaaattcacccacctccgcggcttcccccggccctaatccgccacggaaacgttccacgtgcctaggcagattccccaaaccccttgccgacaccagaatggtagcgaagggtcgaatcagtggcgacggtgagctgaccccgcgcggcgaagcactgagagccaaacggcggcgtggatgcggctgggtggggtgaagtatggtcatggcaacgagcacacgcatttatatggtcaacccccaacggtccgagcgagtcctgcgccgggtgtggcggtgagatccgcccatgccgcgcgaca

SEQ ID NO: 162855 - DNA, 469 bp, Zea Mays
aaaaaggacaataagtttgtgtggactcccaaatgtgaagaaagtttccaaatcatcaaagagaagcttacaaccgcaccagttctgactctaccagacatacaccaagattttgtcatcttctgtgatgcttccaagcaaggcttagggtgtgtcctaatgcaaaatgagaaagtcattgcttatgcatcccgcttactcaagccgcacgaacagaactaccctacccacgatctggaattggcagccatagtacacgccctaaaaatatggaggcattatctgatcgggaacaaatgccacatcttcactgatcacaaaagtctaaagtacatcttcacgcaacctgacctcaacctccgtcaaagaaggtggctcgaattgatcaaggattatgacctcgaaatccactaccaccccggaaaggccaacgtggtagcagacgccctcagccgaaaacccttcgggg

SEQ ID NO: 162856 - DNA, 369 bp, Zea Mays
gtggttgtagttgttaatgtggctcaagactcgacacctgaagatggtgccaatgtattctttatatagatgagccatgcatggctgttacacagttggagaaaaccaggggaagagatagagatgcagctccaagaggataacaatcctagctatctgataagcacaatatctaataccttctaataccccctcaatctggacgcatggaagcaacgttcagattggtcctaaacaatgaaaacgatgaagctggcaaggcttttgtcatcacattagcaacttgatctttcgttgaaacaatacgaacgtccaactgtctagtagccacacgctcccgaacaaaatgataatccacctcaatgtgtt

SEQ ID NO: 162857 - DNA, 510 bp, Zea Mays
gacgcggtgaagcctcgggtcgacggtggcggactccggctgcacggaaaagactccggtgagcgcggactgggaaaaccagagggactaggggcgaaccgagaggtgtcccaagttgctgacagcaaggcggaactcaccgagccaactagtgtggcacgagctcgacgacggccgtagaatggacgacaggcttcagtgagaagcagcggagctacttggatgcacgtgcagggcgagagagagggcgagggtgctcggttgagagcgcaaatgatcagggggaagtgggcgagcggggtgcgggctctaaaggggtcggggcgtgaggaggtggccggaaaatgcgcggacgtgggcgcgtccacgacgggagtgcgcgggcggaaggttagggacaggcgcctaatgggtggggtccgcagggcagagagagggaacgagcgcctgcctgaggggattggcgctaggccggccccacagtgtagcgagagagagagagagagaggc

SEQ ID NO: 162858 - DNA, 468 bp, Zea Mays
atgacatcaacgtgcagaggtcagacgagatcctcatgccgggtttccggttccatcccaccgacgaagagctggtgagtttctacctcaggaggaagatccagcagaagcctatctccatcgagcttatcaggcagctggacatctacaagtatgacccatgggatctcccaagtaagaagacaccactttcttcagaacttgacctttctgtggatgcatgtcttggagttctatcatgtcttggagttctatcattctatgagcttatcaggcagcggtgaatgatgttgcatcttctgcgtttctgacgtctcaactgttcctgtccatcgacagagcttgcgagcaccggtgagaaagagtggtacttctactgcccaagggatcggaagtaccgcaacagcgtgaggccgaaccgagtcacagcggccgggttctggaaggccacagggacggacaggccaa

SEQ ID NO: 162859 - DNA, 432 bp, Zea Mays
gctacctttaaatgactggctttgattctttggcaagtgtcgcactcagatatgtacttagcaatctctctcttcatcctggtccaccaatataaggatctgaggtcatgatacattttgttacttccagggtgcatggaaaattttgagagatgagcctcgtccaaaattttcttcctgagttctggattcttgggaacaaccagtcggtcttcgaaccataaaatacccttgttgtcctaacgaaagcatttatacttatccaccttctgattgagcatttccttaatgatttgaacccccttgtcactaatatgtgccatgattatctgctcttgtaaggtcggctcaactgagatataatccaaggtacctggggaaaccacttccatgtttagcttgcgcaactcgtcgcacaaagcggtgacctta

SEQ ID NO: 162860 - DNA, 1645 bp, Zea Mays
attgaagagcccagaacattctatgatgacctgcaagcacgggccaaacacgtaagacgaaagaatatacaaccatagccaaacaattcagtcgtgataactaacatctccaacaactcctagaacattcacggccaaaccaacacaccatgatgtcccacccctcccctcgtactcagtgatatatatcgccgccacccttcgcgaaagcacttgtagagacaacgacaaagcgagaagtcgaggcgcagctgagatggtgtggggttagaagccggtacctaggaacgcgtggcgtgccatgaagtccatcagctgcaggacgccgaagcccatggtggcgtgcacgagtaagagggaggtggcttagagacggccatggggaccgggcttcctggagtcgaagcagtggaaacggtgctggaggcaaccttgaggtcgagctggacgatgagatggtggaatatgaagaggaggtagagggcacatgcggaggttgcgaggcggcgagcgtgaaggcgagagcgcaagcggagattacggcggtgggtgcgaggcatcatcaagcaatctgactttgcagtgccaactaatgagaatgttgtatgtcacaatgtcaggatgcacattttcgttgggtagcttctctagaagatttaaagcagcatgtgtccatcccactttgcataacccatttatgagtgtattgtaagtcacaatgtcaggtgtcagtccttgattcagcatctcctttgagagctctagtgcatcacatacatttcccgccttgcagagttcattgatcagcatgttatacgagaaattatttggcttaattccctttgtcaccatttcctcaagcaacgccatactccaatcaacattcccctctttgcagagggctttaatcaggccattgtagctaataacatctagctggcaaccatgaagtagctaataatatgttctgcctcctccatctagtcattgttgcacagatgataaatcattgtattgtacgtgcaaatatccggcttgcacccctgactcttcatctcttggacaagccttgtcgcttgatcaagcttgccatccttgcataaggcatatatgataccattgtatccttgggagttcatactaaagcccttggctaacatctgatccagcatagctcttgcgtcatcccacatgccattcctacaaaatgaatgcaacaaggtagagtaggtcatgatatttggtgcacaactgttctcctccatcttatcaagcatccgcactcctgaaccaaatctcccaagcttgcaaaggccatgcatcaaaatactgtatgtgtgcacatcagacgggcatccttttgaacccatcatctcatacaactttgtcaccctggccagcttcccctccatcagacatccacagatcaccgtgttaagcatcaccacattcacctctggcaacctcccgagcaacgtgcacgcctcatcggcctgccttgttcggcacagcccctgcaggaggaacccatatgtcatcgcacttggcatgcatccttgcgtcatcatcctgtccaccagcctagctgcctctcgcacgcgcctgagcccgcacagcctgagcaccaggtcgttaaaggtgttca

SEQ ID NO: 162861 - DNA, 929 bp, Zea Mays
aatggtgcgtcggaggaacccgtccgtggttgaattcgactcctctgatgaccaagaaatacatggagatactcccccacgctctagatccaagcgtgggcgaggaagcggaaatgtcatgcaaggtgctgaggcctccgggtctcaaagtgctcgcggtcggacaacccggaatccttccgggcggtcccgacccgcgacaaatccgcaggcgtgggaggctacgagtgatgatgaaggcgggaaggatgatgaaattgatcttcccccggcccacgcccctgtgattcgtgggttggtcctccaccgggcggaggctcggcgtgctggcaatgagccagtaactgatttcactgccagtggaggctctgctctccttcaggatctccgtttccaaaatcccgcattgcgcattcgtgatgccaggattgatggaaaccgcttttggacgcttcatcatgtggatttttataattccgtgatcctccccaagaagcatcaacctattctgcttcaacgctatatcaactgggaaggttgtgaggccattggggatccagagatgacacaggcattgagggcctgtgaaaggaaaaagatgaagagtatcatgacattccaatatgattggaatgatgaagttattgcccaattctactcatctttgtggatcaagccagctgacgaggagagtccatacaactacccttatctgaacttctacattgaaggtagttggtataaggtgagctaccgtcggtttgctcacattcttggtttttctgacaatgatatctctggcgacaagatcaagatacatgatttccgccagcctactagagatgaagccaaagatcttcatctctccgagtctgggaagtattgggagtctacaaacatgcataagtattatcgatacatcaactccc

SEQ ID NO: 162862 - DNA, 744 bp, Zea Mays
gacatcagtacaacagacagcttttgaggccctcaagcaagcattgtcttcagcccctgtcttggctttaccagactttacacgcccattttctattgaaacagatgcatcaagcacaggcattggagctgttttgcagcaagatggccacccgttggcatttgtcagcaaagctctcggacctaggaatttggggatatccactcatgagaaagagtacctcgctattttattggttgttgattagtggcgtgcctacttgcaacattcagaatttatgatctacacggatcaacgcggcctttctcaccttatagagcaacgactccatactccgtggtaacataaagtttttactaagatactcgggcttaactatcgcattgtttacaagaaaggtgccgacaatactgcagcagacgctctgtcgcgacggccacaccaagttgcagactgctattcagttttgatggcatcgcccatgtggttacaggaagtaacagatgcatacaaggtccatccccaagctatgaagttgcttacatcattagctatttctgaccaggctccttacatgcttaaagatggaattatcaggttcaaaggccgtgtttggttaggacacacttctgaaatgcaaaccaaggtaattgtggcccttcatgccagcgccattggaggacattctggcttcccagtgatgtatgctcgggtcaaacagttgttctattggccacatatgaa

SEQ ID NO: 162863 - DNA, 600 bp, Zea Mays
caggaccctcctcgccccttcaaacaggacaaggggcagactatctaccttgagcagcaaggggacgagaagagatggttggacagagccactcgtgcagcgattgccacaatagcagtagtagatcacgcagagcagggaggttagttgaggatttctgatcagattgccttccgagtccatcgcctctcatctcggactcactcctccactgctcggtccactccctcagaccaagtctccactccacctaccacttcgccagctcctaccgctctcgagccttccaccacacccgctgctaccaccacctcaaccactctagcttccactgctcccgctcctgcttccgctccacctatttctccacctcgcttccgggagcgtgatgagaccgaggtgcgaccacttgctgctgatccttgactgctcaaccttccaagggccacaactactagggtatgtcagtacagacatgtacccgtggactcgtggttgccagctcagagagacctagtggctgtgcctcttttcagcaccagggcccaggagtccttcttcagggcatagttgtctgctcagattgccctgagagctcac

SEQ ID NO: 162864 - DNA, 881 bp, Zea Mays
aaataaaataataaatagattaataaaagtatattcatgcattcttgttgaagttttgattgtgcatttatttggaattagaaaactgaaaacccagatttaaaattcaatttaaaccatattcaaatttgaaagaaatagaaaactgaaaatgagaataaggaaaagaattggcgaacgggccaaatgggccgaattctcacctgccagcctagttttcttccctttttggcccactaactccaccactgcgtggttgtggcgctactggtgcgcgggcccactgcccagtctcaagtggcgcgctctggtgcctattctagatgtcatgtgggactcagcccctacccaccgtcgcgtttctatggaggacatgtggcccccaggcgtcaggtctatccccaacccccaggtcggtagcaactaaagaccgagttcttttcccctcggtgtgcaacagaatcgtgtggtggtcgatgggcttctaccgcggtcttcgcaggccacgcgctagggtcccgctggatgcgccggcttctgcgtagccaccatcgaaggtccaactacctccgcacataaacagttgcgccaccacactcccagaatttctcccccacagcagtactaggtgcagagaacccccttcctccactcgacgtccagccatggcgcacgtcacacaagtctacttcatgttcgagctcctccatggacgcagggatcttccgcggttcagggagttttatggccgaaggcttctgctgtgtcaccacgggtcaaacagcgagggaaaacgcagagagagagagagaggagggagatggagccggatgtcgctgccgcgtcccacacggagagatccagaagaagatggagcttcg

SEQ ID NO: 162865 - DNA, 319 bp, Zea Mays
tacagcttcacctcagctgcagcctgcttgacccgttgtttctccagcaccgtattataagctttcagcttagcttggagcgctatgacggtctcctccctttggtataagcgtacctccttcctagccaggcttttctccttccggatcacctcgtcctctcggtcagacaccttccggatgtcctccttgaagtcctcacgctcctgctcaaactcggcccgttctgaggcaaaatggcaggacaccgccttagtgcgctcctccagttgggagcaccagtcgccaaggcactggcgctcggtctcgagcacctccc

SEQ ID NO: 162866 - DNA, 519 bp, Zea Mays
ctccaccgaaatttcggaaatttcgttccaaaattgcgaaccctggttgcaatagcattatagcagaaaagccccgacgatgaggatgtgtaatccgcgtcacgtacacgtacggatcgaatcgatgtgttcatgcacggtcgtcaccagttcaatccgccgactacagttgtagatcttgataccttttcgattttggtgcagggttggtaatcttgataccttttagaactggagaaactatattgtccatgcctgaagcttgtgtctacgtaaagagcattattttcggagggcgcaaaaaagttggcaaatgttgtgactctttgacgccaaaccgaacaaagaaaaggacctcagaaataccattcagttcttgtgaaaaaaataaaagaaaacattgtttgcctttcttctcttcctggtaaaacatgcatgggaaggagtgtcattcacgtcatttccttctccttcgtagtctcctcgccattaggctcgaaggaggttcagtcgttttat

SEQ ID NO: 162867 - DNA, 804 bp, Zea Mays
cggcgataccgtcagatgcaccatcggtggtaggtgtgggaggggcgtctagctctgtcccaccgccaagtccggaggctccggaggttatcctcaggcgaccgctccgatctggcgccgaacctgaagcaacgttgactcccctccctcaggtgctgtcccgcgctcaccaggctctccgggaaaccgaggtggctatccagcgggagtgggaggcgctcgagaccgagcaccagcgccttggcggctagtgcacccaactggaggagcgcaccaaggcggtgtcctgccaattcgcctcagagcgggccaaatttgagcaggagcgcgaggacttcaaggaggacatccggaaggtgtctgaccgagaggaagaggtgacccaaaaggagaaaagtttggccaggaaggaggtacgcttagaccaaagggaggaggctatcacagcgctccatgataagctgaaagcttataatacggtgctggagaaacagcgggacaagcaggctgcgactgaggtgaagctgcagaagctgcagcaggaactcaccgacaaggcccgtgacattgcccgcgccgaggaaagcctcaaggcgatggaagcttctctggcgaaatgggaaactgatctcgcctggcaggaggaggacctcgcctttagggaggagatgtgggcaaggcggaacaagctgctggatgagcttgagctcgaagcggaggagagaagggagcgtttggagggaaaagtgcgggcactggaggagcgggtccatcagttctaggcagcgcaagctgcccaggcga

SEQ ID NO: 162868 - DNA, 742 bp, Zea Mays
ggtatttatagggaaacctagggtaggtatcccaaagtacatttgtacccctgactatgaaccaaattcctagaatattccatgtaatggggtatttacaacactgcaacgccctgtggacacgtgcactcgcaattttaccctctggttacagatgggccctcctagagcccccatagtgggccggtgacctggatgagtcttcttccctagagccttcatcgcctcacagccttcgtggcttgggacccctcgctccttgcggggggtgtagcctgtgtcgagggcccatcggagagttgcagtggacgaatttatcaacctcaatgtttgtcttgtgcctaggctctctcctaggcaccagtatttgccagggtcgaccttaattgcttgatcgaaggctccatcgaagttgtgccgtacgaagactttggttggccctggccctacgcttaagtatggttagtgaaaatgagggggaaaacttgcacggtgctgatcgaggtctcgttggcctccaccccaatagtagctcccccgagggaatggttcatcctgatgggccaatcccgaaatatctatttgaaggggacgaaaactgccctcgatcatctggtgattcaccttgtgagggcccgctggatgtgaccgttgtgaaaatctatggtggtactatttgttatggggtttggctataaatcctggattttgcggtccttgtgttggactgctaccgtgtcac

SEQ ID NO: 162869 - DNA, 409 bp, Zea Mays
aggtggctgagtcaagagaacaggtatgatagcaaagcaccagttccaatgttctcacttggaatggcattcagatgcagtagacagtttaaaaaagctcttgtgaagtatggattgaaagcacacaagcacttgcacttccagaaagatgagaagaatagggttagggcaaactgttcttggcctggatgcaaatggttaatctatggttccaagactaccagatcagattggtttaaggttgtcacttttatagatgagcattcttgcccacctaggagagacaataagttagtaacctccaacataattgcgaagcattatttcagtgagattaatgacaatccaacatggaaagttgagttgataaagaaagctgttctaaaagaccttcttgcagatgtgtcac

SEQ ID NO: 162870 - DNA, 669 bp, Zea Mays
gttcgcgtgtctgtgccgctgtctgccgggccccgctcgtcagccctctccgcctcctctaactcccggtccgcgcgcccgccatggatgcacccacgtccgcacaaattgtggccaccacccacgtgcctagcctctactcaagccccctcccgtccgctcggccatttccccactcggagacaccccagctcgctctcgctcgtgcgtcgttcctccttggagctctcggaagaccgtcgtcgttcgccgtgcccgcgcacccattccgccgtcaccgttggagcttcaccgtgcctttcgcctcggtgagttccacctcggtgcccgcaacttgagacgcgccccagctcaccctcttcctatctggttccctctgcccgtgctcaccggagtttccctcacgcagccggaaagccgccaccgtcgacccaagcccttgtcgtatccttgccgccgttcaagggtcctggagtcttctctcgaggtaaggaacctagaaccgcccctattttcccctgttttccctcggtcatgcgcgattgctcaccagagtagtgttgcgccaccgccgagccgcctcgccgtgaaccgccccctccagcgcctttgtgccggtgccatgcccctagccgagttcgtcgtgctcccctgaattccctgaaccct

SEQ ID NO: 162871 - DNA, 819 bp, Zea Mays
cactcagcgaagggtcactagacccaccgcacaaataaatacaattgtgccctccactaccgccggacaacgcgagggcaccacacactacatcggctcaaccttcggaatgatgcccgcctccctataattgaacaacattatttttaattcctcaccctcaaaaagatcccgcagatccccttcaccaatactcgtcccaatcggcgaagacagtagatcttgtttgccaaaccgatccactcgaaggcgggtccgctccacccccatccgacggcgcctaccacttcgcgacatctcaccaacactatgcttcaaaaccacttttcgtcgccgtcgttcgatcctcgcgctggggagatcagacacctcgccaacctccaaccgcggcgaggactccgccgcggccgcatctaatgcaacaaaataatccaaatcttcacccgacgactcttcgctctaggaaaacgtactcccaaactcatcatcaaacgaaaaagactcagattcagaaccagacacactataatcagcaggcactacggtagcggccaccacaaaattcgtatcgtcagcaagggttgtctgcgcaggcccacacgtcggaacctgcgcagcaactgagttttagtatcacaaaaacaaaatcctacatccaacacccctagcactatcccgccacctgcgaagggcgggccgacgccgccgggtcttcggcaactggcgcgaccgccaccgaagtgtcttcaccagtcggcacggcggcctccacaggtccctcgccaacatcagtcggcgccggcgactcctcgatccccg

SEQ ID NO: 162872 - DNA, 526 bp, Zea Mays
gagggtgttcaggtgggctctctttcccacgcctccatggacgtccatgttgggtcgtccccacctcggtccgatggggcgacggcggtacgtgcttccacagttttaaccggacaagtcgccttagaggtcggtgagctagatgcaaggagcctattgtctgctagtggggctgaggtcaccccggatagtgctcttcagatcgttcctgctgaccttccctcgtcgagctatgactcaactcctcctgccctgggtctaccactgttcctttctaatctttaggtgagtcggcctcttgctctacgttgttcatattagcgaattatctttcttctgctcatctatctacgatcacaggcttttgttgatggaatagctgcccagctgagatcctatggtgccactgttcccaaacaagctctgtctttaatgcagtggaactcattgctgctccagaaacagaccgatgacttgaaggcgtcgaacgctggttagtgatcttacagcttccctagttgttttt

SEQ ID NO: 162873 - DNA, 555 bp, Zea Mays
cttcttcatattttagaccacataacatagaatattcatctcatttcaattctgattttgagaaacgatcatatgacaaagatcgttttatttataagaatcggtctagagctcaaaataagaatcgaatggtcaagcaagtttatgtagtgaagaaggataatagaaaagccaaaagttcagatctgaattcatgcattacagagccggaggaagtgttagatactttggctagcagtatccaaacaatagagaaattagctaccgatagtccagatactaaatttgaacataagaagcgtaatgtgcccaaacaaccgagaagcctactcgaattatcaatctggcacaagaggctagaaaaactcagtgcacaagagctgaagaggcatgacatgggcccctaatgggagttctcaagatctaggtaaggatgatgcttttggaagaagtagagtaaaggcaaacaaaaggaagaaagcaagtacaagacgtttgggtgaaaggtttggcccagctcaacaaagctattggtcattgcatcatccatatttt

SEQ ID NO: 162874 - DNA, 557 bp, Zea Mays
ggaagaccagccacctcgccaacctccacccgcggcgaggactccgccgtggccacatctaacgcagcaaaataatccaagtcttcatccgaagactcttcggtccaagaaaacgtactcccagactcaccatcagacgaaaaagaaccagatccagaaccacataaattgtcattggcaggcactacggttgcgaccgccacaaaattagtatcatcagcagcggtttcttgcgtaggcccatacgtaggaacctgcgcagcaaccgagtttcagtatcacaaaaaaacaaaatctcacacccgatagccctaacccctatctcgccacctgcgaagggccggctgacgccacagggtcttcggcagctggttcgcccccaccaccgaagtgtccccagcagtcggtgcagcggccggcacagggtccttgccagcacaggtcagcgcgggggtcaccatggggccctcgccagcatcagatggcggcaccggctcccccccagtcccctccttcgcacccgacgcctcgggcagtgtgctatccaagtccccgac

SEQ ID NO: 162875 - DNA, 640 bp, Zea Mays
gttctctaggcctctgtcctgcaccaatagaaagacacggggtgagcaaatggcacatcactggggtcaggatacttagaataatatcagtgttgcggcatctgcccataaaaagtgttaggaaaaataccacccatcctcggtccagaagggaagcgatcaccacaagaaggaaactatgatccgctagggaagtaagaaccaaagcaataccacggggtccttggccatatggcacactaccaacaccccatcaggccgaccaccacgtggtctcactacctaaggcctagcagcaagaggcaaaacacctctaggccttgcaggacatctctgaacaggaggatcatgaacaccatgagaagggtggttcatgtttcttctgctcgactcagaaacctgtcgctcatctctcctcctcctaaagcaaaaatcagccagatacccacccctctcaatactcacaatggaacataacctctaccttatgtggatttttttgtaggagggggctttccttttgggtggctccgtggctgggcttttggaggggggaaatggagatgtcgggaagggtatcaagtgtgttcctgaggtggttaggttttggaacccatacttgttcctaaggaggggttct

SEQ ID NO: 162876 - DNA, 328 bp, Zea Mays
ggatcagtttagacttatgcaaaactcacaggtgacagacaatgtttcacgatggaacattgaatgccagtgtgctccagatgcacaactcacatgtgacaaccatgctacaataccagacaaggctccagatgcacaactcacaggtgacaaccgtgccacaataccagacaaggcacaggttgtagagcctgcacatgcagagcaggtgcctatgcagtcagaaagagctgcagaaaagacatggcagctgtgtcttaatcagctctcgcacattccttcttttgctccaggtgaacaactaacagacgaaaaggttgtagagcct

SEQ ID NO: 162877 - DNA, 542 bp, Zea Mays
gctagtgttacctggaacataaataacaccaatatttacttttctggaatatgtggtcttattataaactttaggacagggtgtaccgggtacaactcaaatgcaataaaactacaaaagaaaaccttaaattgaagggtaaaactcgtcatatccccattactctcttcaagttataataacatgtgccatctaggcatgttttcaatttgtctgattaatcgtgattaatcgtcaagtcggtttagaaaaatcacgattagtcgccaagtcgcccgaccgcgctagtcagcaagtcgtccgacttgaaaacatttatagagtctagacaactggaatcgaaccttgcgttgacagttccttttagtttttattatctatttatcttgtttgctcataacaactaaaagagtttatcagttatggtgttgtccgaaatttgagaaatataactgatctatatgggaaattaaggaataagataatccaaatcatgcagtgcagcgaatcaacaacatattattaagataaatccattactc

SEQ ID NO: 162878 - DNA, 757 bp, Zea Mays
gcaccaggtgctgggcacttgggcagtgggcacaacacacgaactactcctacaaaattaggatttgaatactcttatcatcactacgaatgaatcaaatgcaagggttatcaacactaagatggatgcaatgcagtgtttaaaatggaaaaaaatattaagcggacacaccaccaccaactcatcttgagcaccttaatggaggactggtcatccctgtggtacacgagctgaagctccttctcatcggctgcatctgcgttgcaagctcccaccgccagcgcgtatagcgcttcatccctgcaccaaccaagtgaaacatgcatcagccattccgactttcagagcaaccgctgggacgttccatcgagcagatcatgggtggcgacgacctctcatcgtactagtacgtgacctacaaaacagagagcagctctcgtcatgtcagaactcagaagagtccggtgatcgacgacggaaagctagcgaaagtcgtgcgacctcggggaacttgtgagagagaaccatggtagggtcaatggcgcaggagacgggggccgtcgcggaggcggagcgcgccatggtgcaggaatgccaggaggcgaagccaaggcagagcaggtggcaatcatcggcaccgcgcgagccattgttaagtatgccaggaggcgaagccaaggcaaagcaggtggctggtgttctggcggcggccggtgttgtggcggcggcgcggtgggcgggaaagggcgagtgtgag

SEQ ID NO: 162879 - DNA, 302 bp, Zea Mays
cgttgagcgaccagagagaggaggagagagaaagcgggtgccaccgtggggtctcccattgcgccgccggtggaatccatcaacgctgggaatacgacctcggggtgaggtctagggtgttcgcatgcctccgtgggggtcgttcgtgcacgcagtcgggatctatcgcctgcgtggtgggtgaattactcgtcgaaactttgctcgcgccgtccttccgcctcttgccgtggcatggctcctccacctcgccattgtcggtaataagcacttccctatgttcgtcacactctcaattgcgc

SEQ ID NO: 162880 - DNA, 464 bp, Zea Mays
tatgccccttcgaaattgtatatgggttcaaacctattgctccgatagatttgttgccccttccattgcaggaaagaaccaatatggaagcttccaagcgtgctgcatacataaaaagaatacatgagaagaccaaggaagcaattgagctcaaagcagtgtgcaaggctgcaagcattaacaagcataggaagaaagtgttatttgaacccggggacttcgtttggattcacttacgcaaggaccgttttcctgagcagcgcaaatccaaattgatgccacgaggggatagtccatttcgtgttcttaacaagatcaatgataatgcatacaagataaatcttccaccaagctatggcgtgagcaacacgttcaatgttgctgacctcttaccatatacaagtgaagacacttcagagtcgaggacgactccttttcaaggggaggaggatgatacgaccacg

SEQ ID NO: 162881 - DNA, 1049 bp, Zea Mays
gaagcagaacatggctcctaggctgagagtgatcttgttcttgaagatgatggccatggtgttagctttgatcaacgacacacccccacctggcgcaccagctattggtgtttagtgtctgaccgcacacccggggtaccctcgtggtgcttttgggtaggacgatgtcgtagattgtaactcgatggttcgtgccaggggcacgaggaagagagagtcatgccattttctgtaggtttgagccgcttgaggagcgtaataccctacttcctagggtggttttgtatgtgtggggtgtttacaagtggtgtctcccgagtggagaggtgctaatgagatgaaattgatggggatccccctaggcattttatacatcaccgtagggcactccctgcgcacatggtgatcacactattccagcctatctcctagctaatagcgaacagacttcgcttatctcgagaaaaacctagcacctccgtccgagctatccccgacgtttgaggacatcggacgtgggaaaagagaacagcttcaacaggatcgcgcctaagccgcgaataatacggacgcgagcccatcgccttcctgggtcggtccatttccaccgttgtctttgcctggcccacgatgtagcgaccttgcagggtgactggcttgtggccccaagcaaggttttcgccttctagcagacccggggatatctgtcccccacatccacccccagatcgatccctgaccgtggatctatcaaccaacgctcaggattagaccttgatacacgccgaaccggtaagctttcacagcgaccggattaaagatcaacgacatagcgctccagagcgatcgtgccatccatcaatcaaccgacgcccaggatttatcccacaaaaacagtatggaacgtttaatcctgatcgtccattcctggatccaccgatcgcatcgatcccagtcgaccaactctcctccacccgcccagccctgacagagcagcaccgccacgacgccattgtcggtgcccacgactctacactcctgcatgtaat

SEQ ID NO: 162882 - DNA, 601 bp, Zea Mays
ttgaagtcaccatggaaatacttgatggcttcggcagtcctattgtagctggtgggctcaacaccttgaactgatctgttgccttctctaacttcggctcttcggccgggtctgtgctagcttcaatcggcataggaggacttgattctggggcagaagggacgacttctacatgttcaataagctttggcacatcggctatctcaatgcgtctcggtctacgtgtcaagaccttcactttcttcgccttcggcacgctagaagatgccaaagctgcaatttttcttttccccattgtttccgaataggaaagcagtaatcaggataaataaacccgataacatcaaaaaccctatttagcctcttttttccttgagcaccaaaggtgactatcatagcttcatcttcagcccttgagtaggccccaagctgctcatcacttgtttcctctatagcatctaaccagtcatcatttgtttcatcaaattgacttctatatcgaaaggtatacttgagatagaccaagccattttggctggatccagcggcagcctccttcggcattttccatccacttgcaagaggccatactctgtaagca

SEQ ID NO: 162883 - DNA, 431 bp, Zea Mays
tagagctctgcagctgccgcccgtgttcgccaatggatgaatctcactgcctccttttataccccgagtgccctgctccctcccttccctagcactcttcttcatttgcgcagaaatggtggcgagccgccttgtccctcctcctctgcgctctaggccgagtcttctccaatgtggagcaccatccatggctgccgaccacctttgctcccttgctctcccaccccacgacgtcctccaatatttccccgcgtcagctggacgccatccgagctcccacatggccgagctcccttattccctatccatcgatgcagccggcgtcgcacgtccagctgctctgctgttacgtggctgaaggttgaagatgactcgttgagtctatgacaaatgggcccagggcggatgtgagtgtactcaaaatttcagat

SEQ ID NO: 162884 - DNA, 793 bp, Zea Mays
ctgcaatattcatgaattatcctaccagaagaaggcagttgggaaagagcaatatcataacaacttcggatgctatagctttgtgtacctgatgtgaggtgtcatgtgcgaacgtttcggaaaaaatggccaggctcatggatgaagcaatggttttatgttaaaaatgatctgagtgagagggaggatgtgaaggacataatccagcgccccgtacgatcacgctttggcatcaggaggcctttgatcgcaggtggaaatgaagctcaagcatgtttgaaggccttcaacactgtgtgtacttacattggcaccagagatttggttcaggagcacatttcttataaggtatggcctcttgttaatgattgggagatgcgaaggagaccgttgtttgttccagtgaaggtggcctggtttacctgaagtatagttagcgctacaaaagtcaatttggcgagccgaatgacgaatggattgaagtcgttgaggtaaccagtgatgagctgctggggacttatatgaaggcagaggacgaagccatgaacactgccttcggtgctcgaggcaaaaggagactaaacagagtttttgatgtgattggatttatttatcctgactactgctttcccactcgaaaacaaggaacaaagaggaaaatcacaactacgacctcttctgccacaccgaagccaaagagggctaaagtttttactcatcggtcatagctgcactctttagagaagactgttgcagtgcctgctatagagaagatggaagttgttgaatatgc

SEQ ID NO: 162885 - DNA, 744 bp, Zea Mays
ggcttgcgtgtgcgtgtgcgtccgccgctgcgctgtccccgtccccaaactgtcctcaactcgtgccccaccggggaacctaataccagtgggcatttgcgacattatccagtgcttatccctcgcctgctctgcggtgggggagcgcagtcaaaccgggccggccacggcgattggtccttcggggcggggaagcggcgcgcgcctcgtgggcgtcgcctactggcgtgggagccgcatgtccgtggccgccacacacgcaggcgaaaccggtggacacagcgcaccctgtccagtccgacagtgacacgcgtccgggtggcatagcgggctcatatgaaattccgacttttttttttgaaaaaaaacccaaatacaataaaatttggaacagggatgaaatcgacatgtcgcttgtccatgtgcctttttgatgtccacgcttcctccctttgtcatcccataatagcgtgcttcatgcgatagcctaatcgagatgccgctgaactgcttgcaggaatagcagtaggagttgagttgggtatacagtaggtagactgggctttttcctccggtgtatgtactccctggctacctggggttcaaaacaatcaatgcagacgaaaaaagaacatacgtcccgtcgtcccgtcttgcttttcgatgcctgctgtttgctggcctttttttttctcttccaccggggctggctctagtctagtggtcccgcgttgtttgttcccg

SEQ ID NO: 162886 - DNA, 467 bp, Zea Mays
gtctggattttattggccaacaacaaagagtgatgcagccgagttagtccagagatgtgaagcttgccaattcttgtcaaaacaacaacatttaccggcacaacagctgcagaccatacatgtaacatggccatttgcatgctagggactggacatgattggacccttcaagaaagctcagggaggctatactcatgtgctggtcgccattgacaagttcaccaaatggatagagtacaagcccattgtttctttaacctcatctaaggcagtggagttcatacaagacataatattcaggttcggaataccaaataacatcataaccgacctgggatccaacttcaccagctccgaattcttcgatttctgcgaacaacggagtatccaaatcaagtacgcgtcagtagcacacctaagagccaatggtcaggtggaaagggccaatggaatgatactggaagcac

SEQ ID NO: 162887 - DNA, 541 bp, Zea Mays
gcagattggtgtcctattaccgtggcagtcattccggcgatcaatagagagttacaatgggtcacggcgatgcggtggaggtgccaaggcacgtggcacaaggtcgtgaagaggcagtcacctgcgaggttatccgaagtgaccgtgacaggctcggtacggtggccggagtagattaatggccggagtttatccacggcgaggattcttactcgatcccaggcgctatccacacgatccaagcacgaatcacggcgacatgagcgcgaatccgtgcacggctcgtcggcggcgagtttctgaacctgttttccctggtgcactgtaccatggcgaggtgggttcagttggcctgacatatcatattcaaggcaaattttctctaaattttgtatggcaacacatccaaggctctccagcaaaattatagccattcataccatcttcatctttgttatagcatccttaaccaaaatcttactggatcatgcttaaattcgagccctaactccatgccatcccacggtcagtctgaatttca

SEQ ID NO: 162888 - DNA, 755 bp, Zea Mays
attatatcgggggtatatttattgatgtgacgagtagtttagaaaatgccagtttgcgtggaggatgtattgttaagacatgagtgtcggagttcatatataagtggtcgcgccacattgattgaagtgtcttgagtgcacgccacaatatggttgcttgcgagatggggttatgcgcatgacgagtttagtaaaaatccatcggtgtcacttgtgttaagttgagggttatttgtgtgtggaaagtaataatgtgtttaatacctagaactcttagtcgatagtagaatttgttttggcttgtatagagaggtggtgacatgccaaagtagtcatcactttctctatatttttaagtcgagtctagacgatacgtattatgcgttcgataaattatgtttcgcacatagtgtatgattgtgctcacgaattcgagtagacgcttcaagtaagtcaagtaggtttgtgatacaagtgtgtaatggagttagttgttttaggataattattgaaatactcagttcgtatgataaacatgtatgcgttcatgatttggaaagtaaatgcatggggtttgcgaattgtagactggtggtttacgattcgtatgatttggtcggtgtgcgaaaatacttgtgaatatgaatgtttataaaaatgttgtagtgtatgttgtgtctcggattgcgataataatagacacgccgacgtgtatgttatttggcggctatgtcgttgctctagttagccgaatt

SEQ ID NO: 162889 - DNA, 600 bp, Zea Mays
cgggatccccttgtcaccaaatcaaccctaaattattgcgttccaaacaggtgaaaacgtgtggctgtaactgtgagcggttgcatcatgtactgctagtagttgcgaactgctgaaccggagcgtgtactagagtcatcactcatcagcacagtttgagttgtgaactggcctacaatcaagtgagtgcagaacgggcagtgacagtgagtgatcgatcaccgctataacagccaacaacacgagacggcggcagcaattgtaaaaagcagcagaggtcgcggacccttgcgcagaacagtaaagatggagcggccagcgcccagcggcctgacttgcaatagaaaggatataggtccgcctcctgcgcgcgcgtgtgcactgtgacacacaagcgggagcggcgggcgacctgctgcaaagcgctctgcacagcacaagcataaccagggtgagccgatgacatgactcgacgaggctttgcgcctctcgcctgtttgtcgctcttccggaggcaggacagagttggaacataggcctgattttggttacactgggcttcaaaactgagaccatacttttgttccagcctgccagcct

SEQ ID NO: 162890 - DNA, 509 bp, Zea Mays
caattgtttcacggataggccttggacaattaaaaaaatgatcaccgcaacaactgcaaacaacaaacaaggcagtcctcaggaatcaggttctttatatgatggtgagaatgttgaggattctggtgaagaggatgttagcatggtactgattactctcttagcttcctcacattatctatcattacttttgggttcgcaaataatttgatatgaatatgcttattgtgttgtacatatatttaggaattccaagctcgtaagggtgtccctacccacatcatcaatgatggtgaacatatgtcaacaaaagtaacaagaggaaataaaagaattatggcacctgtgcaggaacgactagttagagtcactagacaaagagttgctgaagtaaaccaaatgtctacccatagcctaaatatttctacacaacccagttcaagtgccgccacaaaccatgatttgacccacaaccttattgttcctacacatcctagttccaataccgc

SEQ ID NO: 162891 - DNA, 598 bp, Zea Mays
atttaaaaacactatgcaacaatcaaagcttctctaggtttttatttactaagctaacacttatatatatacaagagaaaagcttatcaacgaccagaaaatgacgaccacctgtactatgtggttgtgaggagtctcggcggcacagtgcaagctctgtccaacccagccgacgaccaaaaacatgtcatcgttagcgagctaacctctgtggtcgttaaacatagaatccaactttgccttcacgacgaccacagtgattggcgtgaatacctacctctccccgcgcgtaaacagaaaagcaattgacacgatctacaacaaccccgcatgaatcgaagctcactcgatctccttcaagatttcctctcgttccctgtcaatagatcaatctacggggcaggggcggccacaatgtcttcctcctcccctcggtaattcctaaccagccaccacgtcttcctcctcccctctgtaattcctaggtcaaagggagcaggagcggccatcccccatcccttcccttccaggtcgcgaccatcttctcaccttgggaaccacattcacctccctaaaacaacatccccctcatcccaag

SEQ ID NO: 162892 - DNA, 483 bp, Zea Mays
acagcggcctaaaccactctaaaccctcgtgtttcttgtgttcttcccaaggggtcaagcaaaacctctcgacccctcctcaggggcctagggacaggtgcattccaccacctagccagaggatttcccctccaaaatttggcgcgccaggtaggggacatgctccatagcctagccccttgattgatatgactttccgctcgcccttcgaaaagctcgaccaaggcgaccccaccaacatctagcgcaaagtggagaaacaacgcctcaagaggctcgccattgatctcaagcagcaccttaacaggcactcggctgctatcaaatgacgagcgatacaggtctcaccaatggcatttaaggttgcgtccgtcagcaccccgccaggatccactacacttgaggtcgccaccatcgacctccagccggacacagtggcatttgaggttgctcctgttggctagcagccaagcacaggtaaag

SEQ ID NO: 162893 - DNA, 361 bp, Zea Mays
ttcaaggaccgaagcaatgttttgggcactgatccatgaagaatagtcgtctttagctaaaaggatccctttaaacgcgtcaacttctccatcaatccatgcaacggcaccagcagcatcaccatcaatatagcttttcacgcttgtgttggcaccaacagaagcgaataagtctttcagctatttccaagcgcccctcttcctcagtaattccctaacaatttttccccaacaactttttcgaaacgctactcattagcacatttcttttgagctttgtaattccccaacaattttttccatgcccgccttttcctcagtaaggatctatttcttaaccttttctaattcgaagttcact

SEQ ID NO: 162894 - DNA, 596 bp, Zea Mays
tagagcagttgaggctacataggaattaccagttgtggcaacaaagttctctaggattagaaattatcatttccacccttgcatgctattattctatatccacttctacacatgaagaggtattcagttatacacatgaataacatgcaagagagcatagcagcaacaacaagaaaaaaggggtacatgtgtacataggagtagcaagccaacaacaagcaccaaggggcagagggtagaacaatagcatcacgcaaacataaagacaacaactaagaaacatcaataagataagagcatacaacatgtagtagatctaggcttccggcaacatcaagcatgacaatcaaaggcaaagaaagaagatcgaggactgtgaaggtaagaagtagtgaagtacactcaccgatggaggatgagctcaaaactagagaggcaatgagggagcataaggcttggtgtaatggtgtgcttgtgcctctcccttgatcctattttgtgtgttgtgtataaccctattagactgagaagccagaaacccagcccaatttttctctcctaagcccacttgagaatcctagagtggtcgctccacc

SEQ ID NO: 162895 - DNA, 590 bp, Zea Mays
tgggttcttaggctccaaacgacatagggcaattcccttatccactttcctgcgaatttttcattcttgtcgaagacctttttcctgagtgcctccagtatcatcccgttggctcgctcaacctgcccgttggctcgtggatgtgctacggatgcatacttgatctgaatgttcttttgctcgcagaagtcgaagaactctgaacttgtgaagttggatcctaagtcagttatgatgctgtttggtatcccaaatctgaatattatgtcttgtatgaattccacggccttagtagaggttaaagaagcaatgggcttgatctctatccatttagtgaatttatcgattgctaccaatacatgagtgtatcccccttgagctttcttgaaaggtccaatcatatctagtccccagcatgcgaaaggccaagtcaccggtatggtctgcagttgctgtgctgacatgtgttgttgctttgacaagtattggcaagcttcgcacctctgaactaactcggctgcatcgttcttcgctgttggccaatagaatcctgacctgaagaccttcccgactagtgttctggaggctgc

SEQ ID NO: 162896 - DNA, 405 bp, Zea Mays
cccatccccatcgtcgacgagctccttgacgagctgcatggtgcgtagttcttcacgaagctggaccttcgctctgcttatcaccaagtccggatgcggtcggctgacgtgcacaagatggcgttccgcacccacgacagcttctacgagttcctggtgatgtcgttcggattatgcaatgcaccggcaaccttccaggcgctcatgaacgacgtgctccggccattccttcgtcggttcgttcttgtcttttttgatgacattttgatttatagcaagacctgggcagatcacttgcgccacatccgtgccgtcctcgacgaacttctccgccatgtcctcttcgtcaagcgatccaagtgcatttttgggtccccatcggtggcgtacctaggccacgtcatc

SEQ ID NO: 162897 - DNA, 733 bp, Zea Mays
tatggttgtagttgggtataaggagagaatatagggggaccgatgcgggagatgaaaaagtagaggtggaatctagctaaggtcgcacaaaagtaggatatatggggagaaatttaaagagaaccgctttgtatagcctaaccctctgccatcagccctcacgagtcatgcccctgcccctacatctgcacagctacccataaccttcgccgcctcattggccccacccctatccacgaggtgtcatgccccggtcgcacactcactctgccatccgaagaagcacggttctcatatcgttggtgccacctctaggctccagcaggtgtctgcctcctgggccacaaaaatgtggcttctaagactgtctgcagcggtctcctctttccctcccctacgggctcctctccgacgcggtccccttctctctcacgccagatgaagcggtgcactattgactccccagctcctgcttatcgcagaagtcgtcgcccgcgccacaccgaggaaagttctcggtccacttcgcttcctctcgacgcttctgtcgaagtcaggcgagatcgggcgacgcgacggcggatctgccggcggaatggtgattccgagccggtcgaggtctgcgccgagcaggaccaagtggagcacgtcgagttcctcagcactccatcccgttcacggagtaagacgaagcgcccacaaatccgattctgttgaggctcttcgtcgccgc

SEQ ID NO: 162898 - DNA, 405 bp, Zea Mays
ttgcaccacttacgctcgtgcacatgctcgtgcacatacatactttcctattgtcgttaaaaatataagatcagctctatgtttgtatgtgtgttaaaatgctaattacagcgattcgcgtgcttagccctcaataaatcacgaacttgtctataagtagaggggcaaggggaagccgcactcactgctaggttgcccctcacttacttctactcacacacaagcactttgtttgagcgttcatcgttggttcgttcctccgatcattcatcgtttgtttgtcattcgttcattcggttattcgtcgttttcctcgattgtttgtcgttgtgtgttcgtccgtcgttcgtcgaatgatcgtaacgttcgttcatagaacgataataacgtttgtcgttgttcgtc

SEQ ID NO: 162899 - DNA, 648 bp, Zea Mays
gagcatcggcttgttccgtgctttcgtagtttcgtttgccttttgctgtttctccggggttccggttgtctcgtggctgcatagtagccagtagggctgctggctgcaaaaaggttcgatcttggcagcagttttgaactgtacggaccggtggtgattttggtttagggattttgattttttttggttgtcgcgtgtggctgcaatctgcttctctttctggtctcctgtaggaagtggatttggttttggccaccgttcgtttgaaatgatatcgaatgtgaaaaggggatgtttttttccttctgcaataaaaaaatttgatgctgcttttgcaatctcgttcagaactttctaaacttacattcccattctcttttgtcgcaaacattttttgatctagttattactgcagtaccgtacaaaccactcggcctgtttggtcctttttgtttcctcgcaccaaggacgggcgtgaacgcgtacagggatgttcgtattcgctgttacattgttctatctatatgcacatcgtgccattttgtctcagtttgatcaattttaggatgtgttctttcactggctctgttcgtttcacgcaataaatcaactaccggtttagattcagacgttcagtttcatttttgg

SEQ ID NO: 162900 - DNA, 1289 bp, Zea Mays
gtaatcgggttgtcattcctcttacatttattggtcaagactacactggtttgatatggtaccattggtcataaacaccacaaatacaagttgttcacttaataaatatctgcttcattggattcatcttgactgggcaaaagcagtacagcggcatggcttatgttaggatacgaggttgcaaaccttgcttgcattggcaactaagagtgaactcgaaattatgagggggcgtctgcatcgactacaaatcgtaaaccgaaacaagggtacaaagtttgttgcagcaggtacctaaatgggaggatgaacaatgtaacaaggtgagagcttaaactacaagtgcggatctggtaaagtcgtaagggttggggaaaataaactaggattgttcaactaaaccattggtggtgtaaatcattgttcaatgatttattcatatgacggggtacaacatggtatacctcaacacgggcggatctcgcccggtacacggggaatcgaagaaaaaaacgagtgctgttcgaaatgattcgtaaaataagtatggatttgacgaggttcaacaaggtattaccttaagaaggggagatctcggccgcaccacgccgaatcgaagcgtctctgtgtggatctgatggagccgtccaaggtcggatacggaaggcaacgaatcgaaagcggcgtacctcgtgcgacgcggatttgaccccgctttgtcttcggtcgcgaacggaactgcgtggagacgaagtcgagttcgtcttctgcgcaactgagcggggccagggccgactccacagctcgacgggaggttcgccgccgcgtcgccgcgcaaaatctctcttccgcggacgattcgaggcgaagcgaggtggaccgggaagtttccgttgtcttccgcggtcggctccgtccgcgcgaagaaggcgagggggcggctacagtcatccgctgcatgtggcgtgagagagaagagtgcggcgaggtaggggagagggtggcgctcgccgctgcgggaggtaggggcacactgtagccgctataggatgcacagtaatagggtaggggaggtgtagggtgaagcgttgcggacagtctaaccggcaggcaatccacagtgttaccatactatgcgacaatgtttaatttgttaagaaaaacatacgaaaggttatacgagctaataccaaatatatatttaataagttctacctctctatataataaatgtgtaacctcacaataaaattgttggaccttttatggacttggcccatttattaaat

SEQ ID NO: 162901 - DNA, 389 bp, Zea Mays
agcggcccgagtggatggtccaggagctattagtataggtattagtataggccccaaccgaaggtgttgggaggggagggtccaagcatcggtccaataggtgcttggtcgggagggcccaagcaccagtcgaataggtccttggtcgggagtgtccacgcaccaatccaatagggggttgaacgttagggtctaggcaccagtgaaataggcgcttggtcgcgagggtctaggcaccactccaataggtgcttggaagggagggtccaggcaccaatccaataggtgcttggtcgggagggtccagacaccaatccaatgggtgcttggtcgtgagggtccacgcaccagtcgagtaggtgcttggtccgaagggtccaggcaccagt

SEQ ID NO: 162902 - DNA, 578 bp, Zea Mays
tcgtgttgccgccagtccaagttgtgttcgggatgagtggatagcgctcggggtcccggaaatatcaccgtcgtggataagtccggccggtaaaactaatccgaccaccgtactagcttgtcgcggtggaacccgataggctcgccggtgaaccgccgtcgcacggccttgcaccacgtatccgagtacctccaccgcatcgccatgattcgttttagcttccggtcgatcacctgagtagtcgccacgacggttgacacgagttcacttgcaccagtaacctttcccctctctggccgccacagcgccatcctcaattcaagcgccactgtccctggaagctataaatcgagcccgccgttagctccgcaacctcattacacatcacaccgtccagtatcgcccccaagcttgcaaccgtgagctccaatttcaagtttccccaattctgttctgaaacaccgcagggtcgagctcaccgcggccagcccctttccggtgagttcatccccctctctccctcgtttgagcactcttatagctctgtgatgcttgccaagccaccaattcgaactgag

SEQ ID NO: 162903 - DNA, 375 bp, Zea Mays
agcctgagaactcaacctagccgagctctgcacggaaatactcctttcttcatggtctacggttcggaggcagtgctacctgctgatctcaagtttggggcaccgaggttgatctttgaaaacatagcagaagctgaggctaccagactggaggatatcgatatactagaagaagaacgattgaatacagtgattcagtcagcacggtatcaacaaactctgaggcgctaccatgacaaagtcgtacgacatcgatcctttgcagtgggagacctcgtcctccgccgaattctaacgggggagggatggcacaaactgtcaccactatgggaaggaccattcatagtagcagaagtcactcggcctggatcatat

SEQ ID NO: 162904 - DNA, 373 bp, Zea Mays
ttcttgttaaaaccaaacttagctattctagatgttatgttgatgcaacactttgtttgaggtatttctcctggtgctcctctctgcttggatttagccacgggaagatcgttttcccacctaattgtgtcaaaatccaagaaaattcttaacaaggtccgtgagaaggcatctgacatcatcatagaggaggaacaactttaagatacaaaagatccacccgagcccagtagtcagaaatggagggaacttgctcatcataagtcaccatctccaccatatactcttaggattgaaggtgtcccagacccatcgatgtcacagatgattgagagggtcagtcatgttgtgacatttcctctgtttgttccgc

SEQ ID NO: 162905 - DNA, 887 bp, Zea Mays
gtcctcctcctccccctcctcctcgtcgttgttgtcgtcgtcctcctcctcctcctcccactcccacctgaagaagcggtcttcttcgtccacggcttcaccacccctagccgaatccgccgacgaccacagcctcagaacctgctccgcccccgcctcaccgccggcaccactgccaccgcgctcgcccgcggccgcgaccagcaccaccagcgccaagagcagcgcgcacctcctcgccgccggcgccgcacccatcgcacgacaacgtacgtacggcccgacacggcgaacgcgtatgtatgtatgtacgtatgcctttgctcgcaagctccaggactgcaggctatatagatctagctagctctggcaggggagagcgggtttcggatgggagatgatgagtaccgtacgtgtgaggtggtggagacggatcgagtaggaggaagaaagaagagcagcagcagccagcaggaggaggaagaagaagaagccaggggaggaggaggacttgaagtgcaagtgaatgataaaaaaaacgagcgtgcgacagcgggaggtgtggtttatgctttactcatcctctgaaaaaagaaaaaccaaagggaagagccgcagctgcagcgtacagggcccctcccctattttgctctcctttttcccccttggcatacgtacattccccatcatttttcgtggcgtccatttgtgccgccgggacatggatgtatctgccggtacatgcgtaattatttcttgcaaggcaatgctaacagtgagtagtagtacgtagtaggtagacgaggcaacgggacgctatgacaggccgagcatgctgtgcgcatgctacatacacgcatcctttcaggattatcctcgtggcttct

SEQ ID NO: 162906 - DNA, 457 bp, Zea Mays
aaaatatagagctaaacaaaattgtttacgaaggttgcgcataatgtgactttaggggcttgaacaacccaccacaattcacgcgagtacaagctctagcgtatctagcgtcaacacgtgtgcggccatcagggctacgacaatatagcaagccttcgtaataaacgcaacaggcacaattatggctcggtaattggggtacacgataaatccacgcaacgtgcgcaacaggcacaatcgtggctcgcggcagacagacagtgcctacagggcatgcaaaaaatacgcgactcagcgatggcggtctgactcaacgggagcgatccgattaattgagagcgcgacatagtaatcacatgacgcagccaagttcgaacggcacaaatattgcgtcgtattgccagggcacagtcaatattcagctaatgccatgactcagccgattaccaacgcagcc

SEQ ID NO: 162907 - DNA, 895 bp, Zea Mays
acaagagccgaagacgatgtcatgacattggcctttggacgacgaggcaagaagagattaaacatggtttttgatgtaattggttttgtatacccggactattgctatccctcacgaaagcagggaaagaagagaaaagatgctgcttcagttatcgctagtactccgaaggtaaaacggttaaagttttgacacaccggcctaggcacattgatatggcaaaaatgccaaagcttgtccaaggaccttcttctgccgctgatctagatcaccctgctaccactgaagccagggtgaaatcagccgaagagccaatcttgaaggcagcaccagagaagccagaagccgagatagccgatgtgccgaagtgtcctgccgaagctagggcaaaaacggccgaagagccataattgaggaaatcggcagagcaaccgaagactctgagcccgccacaagagacagagctaccgaaggtataaaaaattcctgcagtaactccaaagaggaggagaatggccagcgtactagacgttgtcatggaatcgacaaaggtactaactcctgcctctacagaagtacctagcatggttgagaaaaatacaaaggaaaccaccgaagctatcgaaactcgggttgaaactgaagcggggccctcagtttccgcagaaatagggcctgcggagcttgttgaaaaggatactgaacaaggaccttcggatactgcaaaagctctattaccgttagaaaaagagagaaccagcaaagaatctgaattccctgcagctgaagcttctactgagggattggaatttatagtacgtcacacagcagggaaaaagctatcagaggaacaaattgccgaagctaggcaaaatgctaaggatctgaagtatcc

SEQ ID NO: 162908 - DNA, 834 bp, Zea Mays
cccccacgcgcccgagccttttctggaccctgcccacactcactcgccctcccccgctcagttgcgccctcagccgagcaccctcaccctctctctcgctctgcgcgcgcgcccagggagctccgccgctgctcgtcgtggtctgccgctcattctgtggtcatcgtcgagccctctctgtgtccgttgcctcggtaagctctgcctcctcatcagcagtatgggacactctccggtttgcccccaacccctctagttcgcccgatccacgctcactgtgttctccccgtgtagtcgaagccccgtcgccgtcgacccatccctcgccgtgccctggacgtcgttcgagagtccccgagcctccactcaaggtaaccgacctaaccccacccctgttttcccctgtcttgcacttagtcacacgcgattgttcgccagagtgttccctggtccgctgaggactctccctctgctgtctggccacctcagccccgttcatgcaaccccgaccccgccataatgcctgtcaggtcatccccaacctctacagctatctagaccaacccctagccctaggagccccggtctgccttgcctccggcgatggcgccgccgtgtccacggggagcgccgcccctggctaaccggcaaaggtgaagtccctggcgcccatcctaaccacccaattcttatcggacgacccgacttcaattaagccagatctaatcccaaccgtcctatttggatatgactgctcggatccaccccctcacccacaccctatagttgggcccggctggtcagtccgccccacaccttggtcgctgatgcccc

SEQ ID NO: 162909 - DNA, 849 bp, Zea Mays
gtaaatgcagtgtgctggtttcgaagctttttcctattttatgctaattgattagctagtgaggcatagaaatcgccctaagatgagtgattgtaagcatgttatactaggtcgagtaggcgtgagcatgttgcgccattttaagtcattgccgacttaagccggttgctccattggtagggtatagtggtcaccctaagttgagtaagcgagagcatgttgcaccgtcttaagccactgccaacttaagtcgattgctctgttagtagggtatagtggtcaccctaagttaagtaagcgtgagcatcttgcaccgtcttaagccactgccaacttaagtcgattgctccgttagtagggtatagtggtcaccctaagttaagtaagcgtgagcatgttgcaccgtcttaagccactgccgacttaagccgattgctccgttagtagggtatagtggtcaccctaagttgagtaagcgtgagcatgttgtaccgtcttaagccactgccgacttaagtcgattgcttcgttagtagggtatagtggacaccctaagtcgagtaagcatgcagattgataataaatagtttgagtgccattgagaatgaagtcttttcattgatgatgtattttccgattacagaatacaatgctgccccgatagcctttgaaatctagctaggggtaaaacttcatgagatgctctatattccatgaattccctatttccgtgccatccatttgagtaagccgatatgatcctggtcgagtgacttctgctaccatgaatggcccttcccatagtggcgacaatttgtgtcgtccttcccccgttagaattcggcgaag

SEQ ID NO: 162910 - DNA, 644 bp, Zea Mays
gatcaatcagcgactcctttcatttgtcgcttttacaacggttaggagtgcgcaaccatatattagcttataggagtatctctgacctctctttgttcattttaagaaacatcaaggatcgagtctgaagtcttagcttggtgggtaaaattcatgcagtggcgtttcttaccgtaccaccatctaggcggatggccagacggcccagtacgtttaatttacggatgaaaatcagggaggaagtgacgcaagaacgaatctaactgataatcgcgaacaaagcagtacgtacgtagaactcccaaagcttgacacggactggagtacatttaatacagaattagagggccggatagaagtttagctaatattttgaaattagcgacaggaaactttctctctctcttttgagccgcgcatgaatgggcgggattattcaaacgcagagtgcaaaccaatttcaagttcgtttaaacgaccgtccaaagtccgactgatggtgagttttcagactgatctgagcacacctgtcgggttgtccatggcgcccaccacatcaggatcatatcacgtccacaagatatcctaccagacacgtggggcctctgaattgatagcaggcgccaacgcatggcgttgttagc

SEQ ID NO: 162911 - DNA, 339 bp, Zea Mays
ggaagaagtgacagtggaagaagtggcttcctttggccgaattcttgtacaattcctcatatcattcagctctgaagtgttcacctttcaaagctttatatgggtatgaacctatgtttggtgctgctcctgaggtggctatagaaggggattagttggtggatgagtggttggcataaaggcaagcttatactgctttacttaagcaaaagttggcttctgctcagaacagaatgaaaatacaggctgacaagaagaggactgacagagaattccaagttggtgagtttgtgttggtaaaacttcagccatatgtgcaaactacagttgttagtcgag

SEQ ID NO: 162912 - DNA, 492 bp, Zea Mays
accttaaaattagcatagaacaggctaccggcgatatgctatcgccggtatctacagaggtccgcctcaatcttcggcaggccaacattctttgagaaagtcctaacgacctttgcctcggttcgattccgaaggcacctcaatttcccttcattgactccgccaaatagcaaagcccctggtttgtacccacaggatacagcatattttttcagttcttccttttcagtttctgataactcttgccctagtatatcttgaaaattgaagttttcctctttcgaagtatcttcaatctgctcttttcctttctcaattgttgtgtccaccgcggccgcatcagcttcttcctcagccatttttagaagcatgttatcaatatcaccaagagtggtttctagatcagaagcttcggtggtttcggctttggcggcttcagcttcggcagcaccagcgtcttcagcaattggtatttttgacgctgatgccagc

SEQ ID NO: 162913 - DNA, 603 bp, Zea Mays
ggaacaagtccttagagatgttgtcaaagagttagggcatgatctagccgttgagcttattcctcaagagaccgagcgacttgagtcggctaagccacatgagggagacggggatctggctagagagctagttcctggagagcctaagtgagttcagggtgagggtgtggggatagatatccccgagtcatcatggcattgttatgcttcatgggttgcctacaaggctcccaatggtccgctcataaggcgcctagtgggcattagccgggtgcaaccgaaggagatgcacgcgtgggcgcaaaggttctagagatcatacccgcgcatgccccacaaagaccaactgatcaccggaagacgtggcatgcttctggcggaattagatagataggagtcatgctctgagattgtacagagtgatccctcctaagtcagatataaggatgggatggaactcctacaaaaatgacgaaccctcataccacactcatcttacaccttcagcaaccacttgtaatcctcaatcactagcaatatacatctcagaactcacgggcgtagggtattacgcatccaagcatcctgaacctgtataattcg

SEQ ID NO: 162914 - DNA, 716 bp, Zea Mays
ccctgattattgctatccctcatgaaagcagggaaagaagaggaaaaccgccgcttcgaccatctctattatgccgaagggtaaaaagatcatggtcttgatgcaccaaccgagatacattgagacggccacattgctgaagctaggtgaagggacatcttccattgctgaagcagaacaacctgctcctgccatttccagggaagacctatctgaattgccgaaggttcctgcaatcgggccaaccgaaacattgaaacttggtgccgaggccaaagaagaggcggtcaaagagccaaagctaggggaaaaggtagagctgccaaaaatcttgagcccaccagcgtagtcaggattgccgaagataataagagctcctgcaataactcccaagaggaggagaatggctagcgtgctagacgctgtcatggagacaacaagggcattaactcctgcccctgcaaagaaaattatcgaagctgctataagtcacgctgaaaccgaagctgggccctcagtgcctgctgagacagagcctgctgcaactgaggatagggctgagcaagaatctccagatgttggcatggctatggagaaggatgtggccgaaaaagctaaatctcctgctcccgaagcaccgtccgaagatcttgactttattattcgacatgcttcgggaaaaatactatctgaagaagaaattgcagaagccaaac

SEQ ID NO: 162915 - DNA, 490 bp, Zea Mays
ggtgcagattatagcgggccagtagaacccttgacggatcaccttggcagcgagggccctaggccccgagtgagagccacaagttccgctgtggacttcgcgcagaatctggatgccttctgtttcggtgacgcatttgagcatgggttgactgacccccttcttgtatagctggccctcaatgattgcgaagtcccggcttcggcgcttgaggcacttgtcctcgttgacatcacttggatcgtaatatccttgcaggaacagggttattggggcccaccaatcttcggtcatgatgaggttgactatgcgatggccctcggtgtcattggttatttgtagaccctctggactgcggacggctagcgtgccgatgacgtggtagaacacgtcggagggcaaggcttcgcctctggcggctgctttggccaatgcgtcggcttcctcattcttggctcggtccacatgctgcaaggtaaagcccttaaat

SEQ ID NO: 162916 - DNA, 861 bp, Zea Mays
ggaccgccgactatgcttctcgtcgagctaccagcgaggaagacgaaggctagacagatacgagggctcttaccactttctgtggtgcaagcgacctcggaccattatgagctgcggatccagggcgagggaaaactccgatgagaaattcccgtccacccacggcatcacgagttccgattcgacttcaattatcatcctcacatgctggtgacgctacttgaccggaatcccgaccccgaacgccatccaccattggattcgcccatggcggcaaggtttctctctccctcgatctgtttccctaggttatggtgcttcctatccgatagagaggaaggggggcagcccgatatataagcgtagggctgaggttcctcccgggcggagtccgcacgaacggcgagatccacggcgagttcggtagccatgcgcgcggcggagatctagcggaggacgaaacagactgagcaaggagaacgaccagacggcgggtccatgagctagcgacacctcatggggagcggctgtagggatgggcccggattgtctgcgagagaagaaggggaaagagggcagcgctgagcgggtgctatgtgaggctgagcagtgggctccacccgtcagccacacgcctgagagagcaggccgcacagggtagaagtggagtagttgggccgaggtgggctagttttggcccaactgtaggaatgcttttccattttttttctattttctctattttttccatagatttgagtttaaatttgctttgaaattcaaacaccagttaaatgcaacaaacaaagaacctcaacatgaatttatgatgtattttatttatttattggttaattattc

SEQ ID NO: 162917 - DNA, 674 bp, Zea Mays
tgtacatgcatacgtacgccggacatgccgtcctatgccaatcactccatccacaactattttccttaattaaattgattatgattttaataatctaaataacagcaatggcccacatgccatggagaaagaatagcaacttcttattgactgattgagtcagaagaaagcaacttccacacgctcccacgattaacgcgctctgcaattcaaactctggcgccgacatcattagcaaaagaaaatcaaatgcaaagagcgccaaaatcgctcagaaactactggcctccctgcgctataaatagcagaccacagcgatcatcccggatatattttttttccataccgccgtcaggctgcctccaaatcaccgcaagacctgctgcagttcatctcccaaaaaaataaccatcaccctgcctctgccgcatcatcatcagcacaaaagaggagttcgcggtgaagactgccgttgcacgtcagagttcctgtgaagctgagaaaagaataccatggcgttctcttgatccccttcctctcttcatctgcacggatccacggtgctcgacaggaagcaagtctttataaacatctccgtaatcaagaccccacgccgaacttgtcatacaagccggataggaaagatcgtcttgttcctaagaacgaaagctgag

SEQ ID NO: 162918 - DNA, 843 bp, Zea Mays
acgagcccgtccacttgaactctcgggcccagcgcacagatattgatgagcttgaggcccgtagccccatataagtcgctcaacgccaccatgaaggtgcgaatgtgagtagggctaaacacaaaactccatatttagagtccgaacccgaataaccttagaagcgattttggtagaaactcctgatactcgaaattatttagccaaaatttggatcaatcaatatggtactcgaatacccaaactatccaaactttaacttagccaaagccacaattcaacccgataaccctgagtccctgtctctatctccctgacctttctctttcagacagtgtccagcaggttacccatatagtaccccaaaaactgtgatgactacctgagaacggggtacccaaaataggcccataactcacgacatgccattttggtcgactaggttccatcgagcaactctgcgaggcaggtgggccaaccaagtcctgccgagcaattgcaactctgcaaggtggactagccgatcaagtcatgccgagcaactctacgaggcagagaagcggaaggcccacgacgcgagccaatacacctatgggcccccacgccacgtgctcctatcacgcgtccgacaggagcacgcacgtacccgattgacgtggaggcaaggtaggcatcattaccccacgccagccatggtgagggatgtctccacacacacacacacatctcggataatgcaaccgtacgcaagtgggatgatggagagtctagcaactagacgaggcgtcgccacgtacaaccctcagtgtcctccgactctgcccatgggtcccaccatgcatt

SEQ ID NO: 162919 - DNA, 699 bp, Zea Mays
gtgcccctaaaacactattcacctgagtctctaactacgcagaaaactccctagggttccactaaatcaaactcgcagtccttcctctacttaaacagtgcccgaggcggaggaaagggtggaggggcttaccggtggcgagattgctccagtgaggtggccgagggtgtaggggaggtcgtgatggtcacgccgatgtgcggatcgtctccggagatggtcggagtaggctggtccttgtgcgcaggcgggggagctcggcggcggctagggcttcgacctatctagggtggtagagttcaattaaactagtcagtgagcttcactaggtgctagggaaggcgtaggtgcgaggaattgagctatggcttaccggttagtcgtggccacgtgctctggtggggaaaacaactccgacgagggtggaacatcttctccggtgaagtagtgtccggtttcttgcttcggggagccctacggggctctggggaagctagccgaggcacgtgatcgagtggagatggccgagagtggtctagccacggtggtcgagtgctctggctactcggcgggcggcgtagagctcgtcggagctaagtgctgggtctagggagtcaggtgaggcacggagggagtacggtcaaggattccctgctcttataggcataggcacggtgcacgggctggcgtggaccagcg

SEQ ID NO: 162920 - DNA, 1013 bp, Zea Mays
tgacttcgtgtttgtgcatggtcgttgtcgtggactgtggtgactcggtcgtggtgtggtcactcttctctagagagactcgcgattgtgttgattctcagttggggatttgtcgtttggtatgcttgagccctctggaacctgatcatccatgttttaggttcatgacttcgtgtttgtgcgtggtcgtggtcgtggtgtggtaactcttatctagagagatttaccattgtgttggttctcagttgcggatttgtggtttagtgtgtttgagccctcttgaacctgatcatccatgtttcaggtccatgacttcgtgtttgtgcgtggtcgtggtgcgggtgcggtaactcttatctagagaggttcgcgattgtgttggttctcagttggggatttgtggtttagtatgcttgagccctctggaacctgatcatccatgttttaggcccatgacttcgtgtttgtgcgtggttgtggtcgtggtgtggtaactcttatctagagagatttgccattgtgttggttctcagttgcggatttgtggtttagtgtgtttcagccctcttgaacctgatcatccatgttttaggtccatgactgtttgtgcgtggtcgtggtgcggtaactcttatctagagagatttgcgattgtgttggttctcagttggggatttgtggtttggtgtgtttgagccctcttgaacctgatcatccatgttttagatccatgacttcgtgtttgtgacttgtgagtggtcgtggtgtgataactcttatctagagagatttgtgattgtcttggttctcagttgaggatgtgtggtttggtgtgtctgagccctcttgaacctgatcatccatgtttaggtccatgacttcgtgtttgtgcgtagtcgtggtcgtggtgtggtaactattatctagagacatttggattgtgttggttctcagttggagatttgtggtttggtgtgcttgagccctcctggacctgatcatccatgttttag

SEQ ID NO: 162921 - DNA, 1012 bp, Zea Mays
ggctggtttccatggccatatccctatgattaagccaagggtgacctcctcgtaaccaagctatcttgaatcccatatgcataactgtatgagaaccaaaagatggccagggtattggcgtgagttgagcactcccaatatgcataacccaccgtgttggtggaggccatggtggtctttgcttcatagcttcctgaccgtaacaaaatgacagatctaaactaaaatatggtgtcatggtgtcactgatccatgtgtacttgttctcaagagggggtggccaaggtcctatgtccacctcagtagcagataataggcatggtattattaaacactggctagttatttccaccagcacctcaggagcctcatgaccttcaatggcatagcacaatagaacaacaccactcgaggccaatgaattgatggggatgtaccttgtgaacgagttgtcagcaacctcgactactgcccttggtgtagcaggcacgagcgtggacgttggtgcatcacttctaggcttcaataagacgatgtcctagctgaagcattctatcgagcacttggcggccgaggtgtggaaaacatcatcctcctcctcggtcatcaccaactgcaggatcaaggaagctggagatggggccgtctcgatgtaggggccgagcggaagcttgtcctcgggtgggagcatgaaggagtcgcgcgcgaggcgcgccactatctctgtgtccaccatctgggagatggcccagcctgagcacgccgtggtcacgcgcatgcggatctcggccctccgcatgtcgtcgataccctctagcgacaccaccagcacctagtcgtcgggcgcgggggcactactggtggcgagcacgccaggggcggacgagttgctcaacgtctcaaatcggtggtcgcacaggacgctgttgaagtgtgtgttgtcggcgtcggtgagctccagcgagtccttggcagcgctcgtcggcgtgtacgcccgcaagcagaatttcct

SEQ ID NO: 162922 - DNA, 400 bp, Zea Mays
cttatgtatttatcttgttctaataggcatacatatcccactatacagtaacaaccatgatctagcctaaaataaatagatcctatctagttatacctatgatctagatcccacctaatataacatgatctaatccaaattgagatacttaaataagttagataatgttggtgataaaaattagaccctaattctataaacatatcttaccctaaattaataccttggactaactcgaccgtaaacaacaacctaacctacatcataggttgcctaatccagatatcccaaaagcaaagtaaaactctgttcaaacctacctacctcgtgtaccccggttatcctaactatatatccttagccatatgtccttaactcagatgacaactccaagaaataa

SEQ ID NO: 162923 - DNA, 470 bp, Zea Mays
atagaaataaaacaaagaaaaggggaagactacctgtattgggccttggaaccggaattcagcccaccgttcgtttgtctccgtgcgcgcacaacccatttccgaactccaccgcgctgactcgaccactgccccatgggtccatctaccagactccctggccgcgcgtataccatcgcttgccaccgccatgtggggtcccagttgtcagctcgtccgtccacctcggaacagagtccgcgacggacgcgcgcaatcccgccatggccgtcgtcggggatctcggggtcctcccttccccgccaaccaattgtcctcgacgcggactcctttccctgcgctataaatgtacccgtcgatccccccttcttcatggtcctctaccgtggggtatgagcgcagcatagtgaggaatcaatccgccgtggtcgaagtcgcgcatacaccctcgtcgggatctcgctctcggg

SEQ ID NO: 162924 - DNA, 672 bp, Zea Mays
ttcatttatgcttcttgatgctacactggttcgtaacattttagctgtgctgagagatcggaatcagtttgtttgtgttttaattgatcatatagacttatatacacatacaaaacatcttcaggagttgctgctgccggtggtgaagttaatatgtatttggcgtacttatctgactactgctacctttgcacaaacgaaaggttttcaaaacaaaaaaactctgctatactcgaggcttcttagaattcaagattttatacttcttccagtagctttttttgtatgatcaagtgaatttgaatctgctccttacagatttttgtgtgttgcaccttcatagtttttagtcatgtttttatgaaactttgtgagctacttcttgcttccgtgctgtttttatttgacaagctctaattatttagtcaacatgtcacaagttggcttgtattattttgataactgaaagaggtatgtcacaagctctaactacgctgcttgagttcacatgttctgtaatttctcagacaactgaactgaattttggggttcgaagacgcgatgttgcatattgattttcgatattgatgtgtgttgcaggatggtggtaaggttcttcctgatttgaacggtaggatgttgcatgatgttgatgcctgatccaagagctca

SEQ ID NO: 162925 - DNA, 409 bp, Zea Mays
ctcgacaaatgatctatgagggttcgcttgagtccggagagtgtgggcatgggggttggcgtgcgcaggatcagccgacaggaacggaattgctcgccaaagccccatcaccaccgccatgccgctgcgttgtggcaatgaacctccgtgctttggtttccggtaaggtgcctcccattcgatttgccatgcctagagctacgtttagcgcctaaccgcacttgattaggagccaaatttggtcgtttgcattgtcctccggcgacggctctgccgtgggggcactgcaccgccgtcgggtgcgcgcgaatgccgctcggctcgactggggcggggacgatacacgtcaaccgttgatcgcgtgatgggcggcctagatcgttttaattgtaccgcttcggcctgtgtg

SEQ ID NO: 162926 - DNA, 459 bp, Zea Mays
ggggaggtggcatagcatgggcaggggtagggggtcatggtggtggggttaatttggcaggtgggcactcgggatggctggtccatggcgaggtggtgggctcccgcgacggcgaggttgccggcgaggcttacaaggcgggataggtgagggagcagggcgcgctgtgctcatggagaggtggtgaagttcgtgaactacattaattggactctaagccaccgaagaggggagggaggaactcaccggagagaagggaggcgacggcgacgagctcgattgggtccaggggaggggagagggagtggccgaggccggtgcggggagatgaggggcttcgggcagcccttttataggcgttcggggaggggagggtgaaggccatcgggcaccggtgaggcgcaccgaggcagtgataatggtggcacagtggtggcgacgggacgtctctgtgcaggc

SEQ ID NO: 162927 - DNA, 521 bp, Zea Mays
gcaaggaaccctatagagtgctctaaaatttagagtatgtgtcagagccgctacatctaaagaaacactattcgtccgctattcgcgttgctacagacatccgacggaaggacaccggccatggccgcatcaccgcaacctccaaacgagcctgcttgcgcggagctcgcgccgcggaggagaagatagtagcaacgccggggaagatgaccagcacatcgccgtagccaccctccagctagcggcggacgccatggggcctcggctgcaacgacttggagaagttgggctgcatggaggagctccgccggagagtatgaccctgctgcggtgagtggagtcgcttgacggcagtggcggcgagaagtccggcagcggcgcgtggagtcgcttgacgacggtggtggcaagaagtccggcagcagcgctgtggatctcggccacagaagagaaaaacaaaagacaaaaattgcatcgtcgaatacatgaacagaaaaaaccaattttcgcaccgtgccctt

SEQ ID NO: 162928 - DNA, 553 bp, Zea Mays
gccacggagaccgtgcggacaacccaatgatcaacacgttcccggggattggggatggtctagttcgattgggcgggtgggtgagcatcaccagcatacaaagatgctaaaacgagaacaaagaggacatgatcagacctgtggagggctggccacggcgagctcggttctgcggtggcagaaacttgatttgggggaagactaaaattcaagctctctgatgaacgattgctagcgattttcggtggctgggtgggtgatgaccttgcagggctggcgggggcttcaatttatagggctcaacggcggtggccgggaatttcagtggggacacgcggtggtcggaggaggaagaagagtattggcgcagtggcttggtgtccagcgtcgtggcaattgctccggcgatcaacggggagccactaaggcttacggcgatgtggtggaaagttagagccacgcggcggacaacggcgacggcttaacggcggtgagaatccttatccgagggcggtgagtaatgggagaggtaccgcggctagccggagtggcg

SEQ ID NO: 162929 - DNA, 778 bp, Zea Mays
agaacaagagacatcccgaacgacaaggatgaccgagccgcgggaacacctacgcctccgggatatggtttccccacaccccaccattcgcataaagggtaactcgtgttttggcagtgatttcatgaaatgataagctacaagcacaaaaaaggggaaaagcgtacacaaacatgaaaagtattctggcctcagcacatcactgttcacgaaagacttaaaatattttttacacgggcccgcagaactagcaactcaagcatcagggtggggagaagcagcatcctcagggtcagcattatctgccacgaccgaggtagcttcgatgtcgctggagggcatggccgctgaataagacccgacatcgagcagaaggccaacatcgcacccggcccctcgacagcaaggtacgcggatcttgcactgccacctagcagccccttacttcaacctctcttgttgctcccgctccgatttcaatctttggtcgcggccaaaaaaagcagaggaagctgaggctgagaatgcgagtgcggggtgaaagccacgggtagccccctcccaaatatacagacaaggtgcactagccaatccactgagattgaaactgaacccccacctttaaaagtcaaatccaaaagcgaattttgtttctcgaatctcgtgcgcacgcgtgcgacaacggatcacccgtgggcatcacgtcccatggcattgactcccgctcgcaggccatatgtctcatactggctaatgaaacccgcagacaccgctttgc

SEQ ID NO: 162930 - DNA, 1007 bp, Zea Mays
tttcaagaaatggagatgtgcctactccgtacgggaattactgaggatgaggaatctacaatggctcgattcttggttggccttaataaacccatcgctgataaagtggacatgacgaactacacaaatctaacagaattggttcattttgctaaaagagcagaacgacaacttgctggatcttataaaagccatgtttctttttcagcacaaaatagttctactccatggcgcaattcacagcagccaggctcgagggcacacacaccttcatctcatgcagcttctacaccatctcgtgcaacccctcgctcagtttcagcttctggaaagcaatctgatgggaaaggcaaagctatgagttctaatcagtacaactcctctactgcagcagcccaaaagaagacaagtaatattgagtgttttaagtgtggtggtcatgggcataagcaagctgaatgtcccaatcggcgtgttattctagcacttgcagatggttcgtatgattcacaaagtgaggaggaggatgtaaaccatgacaccaatatacatgatgaaaatttggaaacttttgagtatgaagcagaggatggtgaatgcgaattggtcctgaattgtttagcactgaaacaagttcattgtattgttgagaagcacatgactcaagctattgttcctagctctctagaagaaattacttgtgctgattttgatgaactacttactgatattggtgatttgtacactcatatttctccaccagaagctagtctccatgaatcttctactggtccctttaataatcggagtatcacattactggctgcaccctatcacatttcaagtagccacaagaccattactctagctgttgcaccggatcaagtagtgcaagaagtcatttgtgctccagagtttggtactaaactaccattatttccattatcatatgatttgtcaagcacatcacagcccaattatcactcgctgcaatctgaatgtttatc

SEQ ID NO: 162931 - DNA, 582 bp, Zea Mays
atggactctgccccgtcgaccgctcatgcaggtactcgtattcctcgattctcctgctcttgttttagctccgatctgagtgttgcaggaagtaagatcgaattggggctactgagatggtgacaataagggggcgtagctactgtcagtccagtcgttgattccccgaaatatatatgttttaatatgtcatgccgctactttatatatttgtgccctaattcatttgaatccctgtttttttgttttaaaatgtggtattacataggaaaataaatatatatgttttaatatgtggcacttctcataatggtactagatttagatgatttactatcttttttataaagaaaacaacaagccacttcgttcctagtggaattaattatttccgagtattggatttagctgaagctactttagtttatcaatacatgtaaatctttcttgtaatagcgtgttatgaggtaagatgttcaaaaaggatgaaaacgaaatgaatttaaatagttgatcaatctcatgtttccaatttttgagcgagtcaagcatctttaatttaatgatatactaacattttgt

SEQ ID NO: 162932 - DNA, 488 bp, Zea Mays
tcccatttccactctagaatttctaatggcttcagtaaacctgcaggccgcttatgctcggccttcacgcgctgacatacttcacaggaggccacatacttagaaacgtcaaccttcatccgcttccaccagaagttttgcttcaaatctcggtacattttggtttcaccaggatggacggtgtaaggcgttttatgagcttctctcaagatatccatctttacctctgatttctgcggcacacagagacggcccctgaaacgaaccaaatcattctcatcaatggtgaactcccgtggtttaccatcaccaaccctctttcgagcttcctgcaatagacgatcctgctgctgagccgcacgcactctctccatgagagaggattgaataagcatccgagtctcctcgctagcggtgccgacataacacaaagcgatccccaaacgatccagatcagcgatcaacggcaaggccacctttggaacccc

SEQ ID NO: 162933 - DNA, 1119 bp, Zea Mays
ggatactcatgaggttgttatctttgtgttgtttctcatccagggactggccctgccagtttctcctttatttcgcggccttctcgacttttattctctgaatctcacccatttaaatcccaattctgtacttcagattgttgtgtatgttcatctttgcgaggccttccttgagattcttcctcactttgggctttggaagtacctttaccactgttggcccgggatggctggaggacagcatcagcttgttggaggtgctagcctggagcttcgccgaggcagaaaagttgagtatcttgacatccccttgaaagacagtattaagggatggcggctcgagtgattttccatggagaactataacaagtaccttcctgctcgatcagggaggcagcctgacatccaaacgcccagctggatggaagtccctatagatttagagcttgctgagtccagagtgctgcttggagagatatgtgcgttgaaagacagaggcttgactgctgaagctgttgttgttgattttgacttcaagaatattcaatctctgaaggatagagtctaccttgcctacatgtatactagggtcaatgatcctacccgaattaccaacagatggatttctgaagaagacgtgttgagctgagttgatttgatgctgagaggcaagatttcgaatggtggtgctcccttatcgtattctgcctagaatcttcctccaaagagcccattttctgagtttgtttccaaccctcctgttcaagatggcaatccgggccatagagtgcgaccctccccagaggatattgaggccttcattgctccataccgaaatctccctgaagaggaaaggcagacccatttctagatgcagacgaccgctgatgaggctgaggtgaacgttgttctcattattctggtgggtgagtcgtctgactccgcccgtactgagtcggtgagtgctgcaactggacatggccttggcgaggatgaaggagttcagagtcctagaagtgttcatcgcaaatgattatgtcgaacgagccatccagtcgtgcctgtcaaggggaagaaaagaaagaaaatacttcggcggtcatcgggcttggaactggg

SEQ ID NO: 162934 - DNA, 677 bp, Zea Mays
atgattacaaccaagagcataaccctgtatgagtagatgacagggaaacactactgaaaacctacagtgaaagaagagagacaatttcacttgattttggacctttcaaaggctgcctagcagcggtgaatctagagaaaacagttttcaccatgaccaagttgtggggattaacattactaggtacacacttactcatttgctgactgtttggctggatttctcaaattggcataaacttcagaatgttccacaacctaatgtttctaatctcctggttcctacttcctaccaatattcatatttgtgcatactttagaattagcaaggctggcatggactacccattatcgttcgtgaaacagggaaaacaaccattcagattacaactgacaagatgaacacaaaaacatatgtgttgggaggtatctctgaaatttatcaaacaacagaaattttaatacaactcaaacttctcagcagatcagactaaattaatgtttgtacatcgaaactaacagtgcaatggactgcaagggtcaacattgcatgtaggccctactcatctgttgaatgtttcgtgttggattttcctaatcagtctagccagatcatctcacggaatcaaatcagcatataatccataacataatagaattgttaaggatgtaatgaac

SEQ ID NO: 162935 - DNA, 516 bp, Zea Mays
aggtccgacgacctgggtcgagaagtccagagtgactggcctgagcggagagatggacggaccaaaaaagtggagctggggtccggactaaatggctggcacaactgcagcctgaagagctggaggaggagcagactacactggagagatcggaacaccagtgtgctggagaatatgagtcatgaacactcggtgctctaccctgtctgctagaagttgttgctgtagagtgtccaggtggtcctgaatagtctggaacatcgatagcatccgctcagacaactactactgaatagctgcctgcctggcctgctctgcggccaaatgaacctgctgctgagtgagtgactagagaatggcagctagagcggggtcaatcgctggagttgcagcactggagctactagcctcgtgatcacgggaacgaggtggcataggaggtggcgatggaatccctagatcctcatcatcatcggaagaagtatgagcaaccgcaccctgatcctcaaactgtct

SEQ ID NO: 162936 - DNA, 567 bp, Zea Mays
gttgtagactttcagagtcaataccttacaggtttcgagttatagatctccaaagtgaggcagatcacacagaaaccacattgcagttttctgaaactgaacccagaaattgcagactgttaaggcaactttaagggtacttaactatttattttatatggtaccaagttaatcattgttaagtaaacttgtacaccaatatgtactcttcaacttttctataaagatcccagtccaaaactgtccagaacagtcaccatatagctccaaatttaaaccaaacactagaattcagatctgttcactcttccttatctgaaaaattaaggacgtctgacagcctatctttaggggtcagtaactccactttttatgtagtactgagtccatctcccttcaacaaagttgcacattcatagatcctctaccattttgatataatggtcctaagctaaaacccaatggactgaataataaaagggcttcaaagttggcttaggcataaaagttcagaacccagaaatatcactaagtctgaaaattcagatttgaggataggacttttgg

SEQ ID NO: 162937 - DNA, 664 bp, Zea Mays
caccgtcacagccaccgtcctttcgccacaagtcatcgaatgtaagtccgtttattgttcagagctcaccatccacagatccgtttaccaccgtcatgttccctgttcgcagttcgatttccccaaatccgtttgccaccgtacgtgactgtctgtgtgtggcgcccctcgccataccccgcagtaaccttccgccagttcgcccatgctgatcccgtagacccacacgcagcagctgcaggagaagacgtggtgtggtgcgttcccctcctagtcaaaatcgccgctgcacggatccacattgtctccacgcctctacactgtcgaggcatgggcgacggacctgttctccggtctgcggcaacagggacagtacctctttcactttatttattattaaatgcctccctctatctctatgctctccctcccctcttcgcattttaggtccctacatctaccgctgtcctcgaggactctttgggtttgttattttttttggagttgccagctgccgtgagagtccctcgctttgctgctgaaccctagaacttgccaaggcatctgttggtgcgcgtgttagctattattttagccagtcatttgctttacaagaaaggaccagatgaatctgtcttacgttcttgctttgtttaaacctagc

SEQ ID NO: 162938 - DNA, 714 bp, Zea Mays
atgggtgtcctccgtcgggacaatgaccccacgacagatccaccaagaacatagttcttttggtggcaaaaccccaatctcaacaaggtggaaaagatcagattcagagatgatagacatatgattaccagcgaacggaagctggctgttgggatcaatgggcgggatgatcagagcaatgacgctctgcctcttcctcttgggagccatttcaatctctcgggcagaacgagtgggctcagaaattcaggaaagcagagaagcggctgaggaaaaagtgaagttagggctcggaaatcaaaaaggcacgtcggcgcgagtataaataggctccttgggtcgggcgttacctctaaagtgctagaccaccactcggaaaagtaaaagtctcagtcatcactcgggcattacctctaaaatgccagcactgtcaagcgcatggacaaactttcaagcgcgcaaatgaaaaccaaaacagcagtgattacttggagcaactacatccttgattcataatggagggagtgacacaaactcgaagccgactcattatgagtcaactttttctacccttgctactacattacattgcattaccttactacttacactacaccacactactaactaatactacattattttactgctactatctatactaatatttaaaccagtggcataatgccactggccttgccgccgctgccgtca

SEQ ID NO: 162939 - DNA, 306 bp, Zea Mays
gtcgtgcgaagtagtgctttcggtatggtgtcgtctgtcccgtctgttcctgtggcggattcgtgcctgacgtccgtgcgatgacgcgcgccgggtcccgcggttcagcctcgaggcttgattattacgacacaactttctcctgacgtcgttggccctacgtcctcctccgtgcgcacggattcgtctattcgatatggcgtcccatcctgtcgcttctgacataccggctactgtggagacctcggggctgaggtcgcctctgaccggggccgctccatctcatcagacatcgcggtatgttca

SEQ ID NO: 162940 - DNA, 1112 bp, Zea Mays
acgaaacatctcaagacctcagacatatcggcaatgcaacaataatgaaatctactctaggattagaataaaaaacaataattaatgtacttagtcgctacatggtacaatagctgtaatcttgtgaaagagcaatccgatgagcttacgaacaaaggactcttgcaacagtctttcctctcaagtagccgctacgaagtcgaataaccatgtgctatgtgcagggccttcaacctcttcgtcagcacctccgcatcgtccgattccggcagtcggccgcccatcgtctcttggacacggcaggcgcgcttccgccctacgtggagtgtgcctaagctcttggccagcgccgcctctgcgtcgcacacctgatccgcatccggtcggcaagtgatgtactcttggatgaggaggcggcgattctggaggcaccgacggtggcgcatgatcgcgtcgatgtcggtcgccgctctcatcttcactaacgccacgtgcacctcggcgatctccttgaccttagggctccagtagccactttccttcgccatactgagcagcgtgacctccaactggatcgccgcgtcgaggcgtgcattgatcgtctccagcaccccgaggatgcccttgttggcgacgtccggccgaacatccgcgcacgcccagtagtccccccgtcccccgccgtcgactcgtgctaggtgaagcgtgccccgcgaggcggtgatgctcgagcgagcgaggcggtactgcaagttgctgctctgctccgccgaggtggcattcgtttgatcttggcccccgccgccgccgtagaaggtgtcggtcaggctaatgcagcagtgtgtggggctggcgttgacgctgagcatcggcgactcagggtcggcggggtccacgggctggctgacctggatctggatgtgcccgtcgctagaaggcggtgcctcaggaccgtagatctcaagcaaggcagagtacgtctggtctatgatgatcataaccatgctgtcgaccatattccgtggatgatgctagtcgccaaacagctcctggacacgcggacacgggggcgccgtcgttattgtcctcgcgctcggtgatacggtaagacg

SEQ ID NO: 162941 - DNA, 339 bp, Zea Mays
ggttaaccagtttgaaggcaaagagcttgagctgatgttgtataactttcgggaggctggtctcattccgaaggaggagccttgtatatgtttgttttgtaacctaagggcgaagtctctgtagcttaatttggctgtcttgaatattgtagtcgaccggcaacttggatgcggaacgctgccctcgcccctcttgctgaacgatgactatgttgtttgttggatccgaccgctcgtacgacttcgcacccttaggtgtactctcgcatttttcgtgttagttcggcagcacccttaggcgacttttgctaaaaaatcgcgtctctaggacaacttcac

SEQ ID NO: 162942 - DNA, 690 bp, Zea Mays
tggttatatgtgtgagtatgcgtagttttgctgaatgtgtgctattgttgcagatggcgcatgtcgaagaggtcgaggaccttggtaaactagacagcacgctgcccatggcctcggggatggaggtggcgccgccatccgatgccggcgaaggcccctcgacggcctccgcaacaaccgcgccgactggagctggcgaagacctcgcgccagcccctgggcagacgcgtggggatgctctgaaggcgatggtggaaacagctgccgaagaccccgcggcggcggccgggccttcgcaggtggcataataggttttgaagattttaagtgtaaactgttgtctctgtgatactgaacctcggttgctacgcaggttccgacgtttgggcctgcgcaagcaaccgctgctgactatactgattttgtggcggcctcaaccgtagtgcttatcgatgataatttgtctatttctatgtctgatgattttgagtccgatggtgaatctgggagttcgtttccttggacgaaggagtcctcggatgaaggcttggattattttgttgcgttggatgtggctgcggcgaagacttcgtcgtgtatggagggtgccggggatcttcctagtgcgggtggagggcgtaggcggcgaagggtggtggggaaacatagtgtgggtgagttttcacggag

SEQ ID NO: 162943 - DNA, 460 bp, Zea Mays
ttgaggggcactcagtcggtcttgtagtggaggcaccaacctgtcgaatacagatgtttggggtgccctctaagcggggtactgtggcatctcaaatggatatggtggcatgctccacatttgattcgggacgtatgaaggtggtatatatgtatattgatacggcacaggtggatgtgggggtgggggtggaggtgtccatgcaggcacgttaggtcttaattatacatcatgacctctcgtcttttccaattggtgtggtggtccaatcggtcttacctgccgtcactcataagtgggtgagcgaggtcgctttggtggccggtcacttgggtcggccttctttttcacatatttagacaataattgataaaaggtcgggccagatctgaccagtcgactagctgcctttactgtgttagttttccacgtacctatttctagtcgtcgtggtttgaag

SEQ ID NO: 162944 - DNA, 532 bp, Zea Mays
tggcaatgaaccactggtgccactgtgagctcaaggaaagtggacggagcaacggtggcccgattctagccgatgactagcatcacagtcgcgctctggtggtggatgaggcccccccaagcgacactgagtgatgctctccatagcgcgcatgcagagagctcgcccacatgccggttgtgggtgctcacataatggcgttgggttagataaaattgcagtgctcacctacgctagcttgtgggctgtactcaacaaccacacatgtctaggctcgtacacgcggctcgcctgaatccttcgcagacgtgcgtgtgcgcatggccctcccacgtccactgttaggagcacaattgcccaagtgcggcaacgacctcccactgcttctgattccgcggaagttggatcctggtgctgccaattctgtcaaggatggggtcaatttgggtggtggtggacaggtggagttggagttgggtggataagttggagaggaggacagctgtgggcctcatttgtcttaagagggaca

SEQ ID NO: 162945 - DNA, 588 bp, Zea Mays
tcagcaacttgctgagacatgagagaactgaagacaatagcaaaatccattgaaccaaatggatacactgtttatggataaaatcgataaaacaatgtcatgatcctcggagtagggggtatgagaataaccagaaatgagagatttagacaaatcaacatccgatacctgagaacaggttatagcagataattagataacggggcagaatcattaaaggatccggagatttggatgataaagccacaacgtgattcataagaaaaaggttaccagatccaggtgaaaagagaggtagtcacatgagatcgattaggatgagtaccagaaaggttattaagattcgggacaggatctatgggaagaaacatggccttgatagggtttgtgcaactaaacaccaaaagatttttttgacacaacaagtgcacaaggagacttgggttggtctagcggtcaagttgtgggggtctataagctgtgcaggtgtaacttcaagggtaaaacacgcaagggttcgaaaaacactaacacaagcatgtgattttttttctataatggtttcactagggaaccactagattgttt

SEQ ID NO: 162946 - DNA, 339 bp, Zea Mays
gatggatagcgcaataaagattgtgcaacacaatcatcaatgcatagagcacaacaatgtcaatacaacgtcaaagtggatacatatgtggcggtgtttgcgatctgacaaggtggcacaacaatagccatgttgcttggataatatgcacataatacttggtgatgtacatcaaaaggcgacgagaagatcacacatagatagttgtacgggctaagtatgcatgaggtggagtgacaacgaaaggagtttgtagaggcatcctgatcattgatggggatgatgaaccgacaatgcagatgtatagacagggtaaccgataagtaacatgggaaggcg

SEQ ID NO: 162947 - DNA, 558 bp, Zea Mays
cttcgagtaggctccaagcaattcatcactggttgcttcaatggcatctagcgagtcatcatttggctcatcaaactagctcctgtatttgaatgtgtactttaggtagattgaaccaccttgggctagacccagcagtagcctccttcagcatctcccactcattttgtgagtggccacactttataagcaatgtactcctggactaagccccttgtgcctatgtaagtacataatgtattaaaagcagcctggcatgcttgtatatcattcccaagggcagtggatggcctcctaatgccgaagcgagaccatataggacgttgaataatccccttaatatcctccctttcaactagatcattcttcacgtagaaccattcttgcatccacgcccccggccatctcttccgaaacgtaggaattaggtagcttgcctcagagcgagacacgaagttgtagcaaccgaagttgttgtgatattgctcctttccggtagtcttcatctcataagacagctcatggatgttgcaaaagcatttcacattatgttctaat

SEQ ID NO: 162948 - DNA, 511 bp, Zea Mays
gagctcaataatttcaaaactagaagaaaagaaagctgatttgaagcgtattgctgatttagaatctgcactatcggcccatgtagaattacataagtccgaagtactaagattagaaaaaaacttgatgaagtgagcgaaaattttgaatgtgataaagcaaagcgtgagatagctgaagtcgaacatgatagagttcgaaggaatttagaagagcttcgggaatccaaggaacaatgcttttctgttgccgctctttgctgtggaaaactgaagaaaatgttttctaacatcggagctttctcgaacgatgaaaagtttgtacgtggtgatgccgaaggggctgtcaagtggattgaaggtgaagtcgaagctttcgacgaagtccttacgggtcgaggagacttttgtgcctgcgtatgggcccgagaggcaatatcattggctgactgcgatcactcaaaggttgtaattcaaccagactttgcattttcagctgatgatgtaaagg

SEQ ID NO: 162949 - DNA, 589 bp, Zea Mays
ccggcgtggacgtcacacttgctgagatcactgtcgcgtatttgtcgagtggatctctcgtgctgctgctgatacgggcgcggtaggtatgaagcaacaaacaacatgtgatcgaaaatggtggtggtgcccaggcttggatcgaacaccgcgacggcagcggcggcggtcggcgggggtgttgggttggggagatcctagcgacggacagaggcggcaccgcagcgccgtttcttggggaaaagtgacacaccctcgagcccctctagaagcgtccagtagcatgtggttaaagggtggaggttgtttctgttgccgatacgtggagtatgattagtagctgttgccttatttatttggtgacatgaagcttcgaggagaagccaagcaggcacagatgtaagcattggtggctattaaggagcgatgatatatttctaaccttcagatcaggatcgtgtgcctgaaatttatggagatgacgtggaaggctaggaagccacgttttgctccggctttcatatataggaatgatcctgataatccctgaccttggcaacgatcgatgttcctctccggtgatcttttc

SEQ ID NO: 162950 - DNA, 430 bp, Zea Mays
atcaacggagagttaaagcaggtcacggcgatgcggtggagatgcctagacacacggcacaaggccggaaggcggcggtcaccggtgaattcatcctaatccaccgcggcgagctcggtacggtggccgaaataatttactggccggagcttatccacggcggcgtgacttcgagcgttatccgatcaacccgagcacgaatcgatacggcagcggcacgaatcgcggtgaagagatcgtcagcggcgagaaaaaactgagctggcggcctgatccatttcagatcactgtaccatggcgaaggatcttcagagcgtttgacagtccattttcaggtccagatttctccaaatttcatatggtaccaagcccaaacacctatagcaaagttgttcctctacaatggctctataactttgctatattgact

SEQ ID NO: 162951 - DNA, 651 bp, Zea Mays
tgtacccatgggatccctattttgttgtgttcaatcctttgaatcatctatccaaacattgctaagcctattttaggacctatccttgaatctggactaggtccaaaaccctagttacctagccgacggtacttggtcggatgttctggagcggtggaaggtgtaggcttacggtatggaacaaggctaagcggctacccagctctggaccaccccagagaacgtggactctttcccttaggctgggatcttagtgatccgttccttatccatcatcaagtgaggccccgaaatatgtgcaatgtttgggtacataacctggatttcatgattacaacagaaatttggatccgcgtaaggggcagagtaaacgtatcatgcccaaacaagaaaagaaatcgatggacaagagtaaaaatttcctttattactagatacatgtgatctatgtgatgaacactagaggacagttttacaagggtagcccctaccgggctggaccacagatggtgccggagacccggtttacataggcggaccttaccagaccagaccacagattaatgcatatcctatcacaaaggaagacttcactctcatgctactttgtaagtaggagatgtagggctgacctaaatcgactgagccccg

SEQ ID NO: 162952 - DNA, 798 bp, Zea Mays
ctaaatttaactctctatatcttacttttatgccacatcatcggatttcatcctccacttttctaaatcctccctctataccactactataataaaatatcaattttcatatatatttatcatccactattattttttcttgaactgataaatacccgtgtacacaaaaatcgagaagaggggatcctttggtgcgccccttgatctggaggtgtagagctccacccgctagcactgtagcaagtttagggtacagcgctgcagggtttagcggagcactgtaacctctacagatgctacagttctaggggagggtgagacgctgcaggtagtctaagaaaactctgcagctgggcaccctaccgacgactacacgtatgcatatagaggacacaaaaaactctattatcgtggtttcgaaaaaacgggtgacaatgagatttgtgttcagcaggggtactagtatgggctcactcataatggtgaatcatttggactcgacgagaaatcaacaagaaatctgagacacggggttatacagattcgagttcgcaccctactccagtgtagtattgatcatagtattgcttggggcgtgttacaactagtgtgctcatgtgtagaaagaaggttgtcctgccctttttatagctcatgtgtggactttacagtaggaactcgtattctactgagagggaactcaacttgttgcttctaggtgacatatccctcctaaagttgtcctatagggtcatgcgctaccatacccctgatatgatgttccatcttatccgtccg

SEQ ID NO: 162953 - DNA, 597 bp, Zea Mays
tcacaaagctaggtccacgatgctgaacggtggagcagtggctccggcgagcctgtaccggccaagatacgcaatgaccggtgctcaggaatggttgacacctaattcggcccctaataatcatttcctctcaaccaatttcaaggttctagcccccaatctctctgcccacggtgacagcatgatcaacggacaattcgaagcgttcccggtgatcttatgggttctagcttaattggtcgggtcgagaagcatcaaaagcacatagggatgccaaaacaagagggaggagggcatgatcggacccatggagagctgaccatggtgagctcactcagtacggtgttctggaccgatttgggggaagtctcaaattggggctctctggtggataatcggaggcacaggtgggtgcgttgggtgcttgactaaataaaggggccgatggcacgctcaatttataggattcgagggcggtggcgttcaatttgaagagattgcgctggcggttggagagggaagaagctactagcgcaagtgatttgtggactttaccgtggcaagacccccagcgatgaacgggtgggctaaggcagc

SEQ ID NO: 162954 - DNA, 518 bp, Zea Mays
ttttcaaacacgttattttattcatcacacaagttcattacaagcatacagttgccacagatcatactatgcgcgagcattttctaaggtgcttccgaactccctttctaaggtgtccccaaattccctgagaagatcgtcaaggctagccagggacatctcctcaacgtctgacaagctttctgtccttgagggaggcagtgttggtggggcttcctcttttcgttcagtctggcatccttggctcttggtccgcttccagatcttcttagtgggggtgagcttctttaacttcttatcgtagtccatcttcagggtttgataggcttcacgagtgttggcctcttcaccttctgctatttcgagactttcttggagggacgccttttcctttttttaattccttgatttgttgctctaggctttccacccgggaatttaggtgggtgcagtgggagaaaaggtcatcatagtggttgtcaagggtgtggagatatctggccatgtagactatggtg

SEQ ID NO: 162955 - DNA, 366 bp, Zea Mays
gcattttttgttagattttttgtatcatgaattgcagtactgtgcctggaactaaaacatgaaattcgtcatgttagactgattgattccttgtttaatactgatctgctagctgtgtgtgtatatgtctagtgatcccttgtctagaactgatctagttttcttgatgagcagctgtgtgtgtatatgtctacttataggctataatttgcaagtaagaacagctgctagcaagctagatgtgcctgaactgtagttcatctcctgctgtgtttatatttgttcctgtgcggggacatagatgtgcttgaactgcagcccgaatctagtcttgtgtgttcttctgttcttaatctcttacatgca

SEQ ID NO: 162956 - DNA, 1073 bp, Zea Mays
tggacagtgactttgatccaagattaagagccatttagactaagatccagtgggaatctacctaggattgctataacaaagttgtagagcttctatacagaaacaactttgttacagaaacttaggtgtgttgtcattgaaatttaggagcaattcgaccctaaatcctggctgtcaggtgactgaagaacaaacgccatggtacagtgcactgggaaagcagatatgggtctgatcgccacggcagaaaatctcaccgccgacgacctatccgcgccgcgatttgcgccggggtcgagatgatcgggcgacgagcatctccctgtgaagacctctttactccggataagaccgccgcggtggaaggcactaaccccggctgccacgcggccgtccctcctcccggccgtgtccggtcatcggcgccgctcccctccattcatccacgccgcacggatgtgactgcgttactgtcgcggcggggacgtggcaagcccgtatgaatggctatcgctggacgccgccgttgatcgccagcaaagaccggcaatggttatcaccatggtcatgaccgtggcttactgcgcctataaattcatcgcctcctcaccctcttcgttcaaatcaactgagctcaactcttcgtctctaaattgcaaagccgtagcaccctcctacaccctcaattaaccaccataggcggagaatcgctcacttcccctaaatttggtttccgccgccgcgatgaacacctccccgtggccagctcgactcaggtcagttcaagcctctccgtcgcttgttctagcgtccctaagctctcctcaagctcctcgacctcgttatttgaactaaaccgccataaatcaccggaaacgcgagaaaatctcctcgcagctcgctgtcaccatgccagtacatgatagtccatcgctagcgaaattgattggggggaagggcgcggatggagtctaatctggttcctgtcgctcgggagcgctgatcttggccccctccggccggtttagctcgctggagctccacaacgcgcgctgttgtcgaggactttcccc

SEQ ID NO: 162957 - DNA, 449 bp, Zea Mays
atgaaatttgctctttaactgaagacggtgtttagttggaaacagaaaacaatagatttatgatgtttttagatgcttgaactctgcatacatccacatatagtatttgtctaaacagtgaaccctcggttgtatatataaatgatgaaaactgttgtttattgacgacgaacatgcatatctatactacttcttaagaacctaaggagggcgtccaccatccggtgaagcctgcccccgttcgcgtggtccccctctgcgtctcctccatgtttggtctccctctgccggaagcacgttctttcacgtctcctctcaccccatacgattggtgttgggattagcggcgcagaaggaatgcaagtttgttgctgctgctcgctaccagtttacatgctatcctatttttacaaaaaatgtcttgattacaatttatgacatgctaagtt

SEQ ID NO: 162958 - DNA, 1283 bp, Zea Mays
tactaattcaaggttctgattgctacattatatttaacgcgacaacatttttaagcgatatttgattggacaataaactaaaatacaaagttataaacatgaccgtctttttatggagtttgtagcaactagagagtttgctcatgcttgcacttgtaaagaactaggcaaatgtggatagacgtgtgaatttgaaactgacagagtgcataatttctggtgaccatacagatgatggtggaggcatggatcctgattctttgaggcggtgcatgagctttggattttcagagaaacaatcagggtcttcgattggacaatgtattgccaacttttgttttataatctgcaagccatttattctcgcctgagacccatcgtctaacagtttggtatttatcactttggatagacggaaatggattcaagactagcacaatgcggctcggggcagatgctattgttttcagtcgctgctgcaccaggagcaggtaccagtaccatatacctcacttaaatttctttccatttgtgaaccacccttcttttttatcaactgaaataatgccaagttattacttgttttcagtgggcctacacaatccattggtctcctctcttacactttcttggtggaaacaggacatacaaatgttgtagttccaatggtacgccttgtgatttttattttatttatttgtttggcataaggcacagcataagcaccacctcctttatttctggcgataatatattttctcttcttaggttgattataaatgcaatctaatgaatggccaaactcagcggttggagcgtcatggttcgaaacagttcttctcaaatttgtcggcgttgttgaaatggtccccttttgcaacagaagaagagctgatgcagaatgtatgctaaacctgccacccgtttgaagtgtagagatgcagtactttgtttactctaacaaagcattacgttattaaatcaattgactaacttagacttaagttataaactggataagttgttttctgtataaatacatgacacccacgtaaacactggccatgttctcgaaaaacaaatacatgacgcccatgtatagaaaaaaacatttaaaagtagtaaaattcaacaatttgatgcagctactgtaacctcgtttagtatttgttagtaacatatattggttatctgaaatgctaatggttgttccaatctatggttgatgaacagttctgtgacattggtccacatggcaccaagattatagtgttcaatctgtg

SEQ ID NO: 162959 - DNA, 958 bp, Zea Mays
gatttgagttgacacaagcgatttatcctggtttggactacgagaggccatacttccagcagaggtgggatgatgcttatattactcacacaaaagtgctcgtggtaggggttacaagcatagcgggagaggggtggatcctaagtcccagctggtgattgaggcaagtcccaataccaggtaggggagaagaatgatcaagtgttcgcctgccttgtgtctccctgttccttgtggagccgtgaactatcctatttataagctcggggagagttgccttgtagatgggagccaactacatgctgtgaaggggtgtcttcataacctatagacaatatggccttgtactttgccgttgacttgggcttgcttgttttctgctgagagcagaggccgaggctgagggcttggtcacgtacccgagccccctggcgtgggatttcccataccgtagtggttgacatagtgcctgtcatgggaaaaagcttcttatgggatgcgtcagctctactatttctgatgatgttgggaagtcctctgccataggtatcgagggaagaactgagctcgggcaaggcggaggtccgtctgaggttgcgaccgagtcttgtcttgagatttgatgacgtgtgccacactcgatggagtggccttccacgggattcacaggggacaggtagccgaggctgggttcgagcgaggcggagcctacgcccaaggtcgagttctgtattgggcgaggcgaaacttgcgcccgaggtcttggtccgcatcatgtcatattacgcgtcccatcaagggttatcaagcggcatgcacatgcgtaatgatgttggtgaatctttgataagaccgcggtcctgttgaacgattcgcctgtagcccaacgtgaggtaggtgtccgcattgaatgcggttgtctcccaacggccctcgggaaagttttgtctttatcgcc

SEQ ID NO: 162960 - DNA, 714 bp, Zea Mays
aatttttttacacactcttgattgtagctcttcttgtatcgtctgacattgcaaactgggcatcttgttgcattctcaaaattgccacgatacaaaatacaatggttcggacatacaagatttttttgcacacccagagctatgggagatataagcttcttcgctttataagtgcttgttggtagtttgttgggttttggtagtaattggaacagaaaattcaaaagatctgtgaagctagtatcagaccatctggtgctagccttcaacttaagaagttctagaactgtacgcagtgtagtaaactctttgtcacaaccctttgattcatcatataaagttacttttgaggcactttccagtccctccattttaggtagccctttctgtgatcccatagaactcaacatttctggttccatatggcgcaacatctcttcgcaatcaaattctttaaaatcttgattggcatccaccgaatccactttaccatccactttatcttcaattccgacagctctctcatcattaccaggcacttcacacggatccaactcaccatgttctgaccatatcgtgtaattgtttttaaaccctctttttatcagatgtgattggataactcctgtatctctccaagctatcttattatcacaattgatgcacgaacataatatctccttactctttcgcaaattcgcgtgcttgttggcc

SEQ ID NO: 162961 - DNA, 737 bp, Zea Mays
gtctagttttattcaaaataagtcagaaacataaatacataacatgtttagtgattagataatttaattagcaaaaaggcaaaaatacctaaaaggagatttgttctcgtgcgtgacaaccttgtgcatctccctagtcagcgcatgagaaacgaatccctatctcgtttccctatgtgcatgttgggtgacctcttttgcaccccgttggcctaacccatgggcaggtacatgtaaccgagcaagcagctaggttgcaccctaccaccttggctcaagggaagttgagctagagagtcttgtttagaatttctacactcttggccgcatttttgaacaagctgactttgttggatgtgtggatagcacacaaaaaatttcgagccgagatggtcgaaagttatgtagtgggaagtgtgtgcatgtggtttgaccactttgaccgatcattgagctatggatagtcatcttgaaatttctgagacagacatgccagaaaatctaatgtgaaagcatgtgtgcgcatactggccgtgtcaactgattgtctgggttgatttgagtcacttcggaaattctgagggtagtgggatagaaattctgaggtggaggctgaaattccgtggtcgaggtgttgaccttctctttgcatgaaatatgggtttatgtttttgtaccttttcataccaggtctgaatcaccttagactgtagcttaatgtgatgtcatatccatga

SEQ ID NO: 162962 - DNA, 574 bp, Zea Mays
cacggtgcggctacggcgaagagaacccccacccggcggcacactcgccagagttaccagaccgagcacggcgggtggactaaatccccaattagtccctgctacacgaatgtttggcaacggcaaacacggaggacgtgaatttaccgaggatcaggcgcgcgggcgagctgaccacgagacgaggcggcttgtcggcgttccgccctctccgacgaacaattaaggggcgcgcggtcgtcgattccactcgcaggcaccatggatggctacgctcttgctcggtgtagacccccaacccctcctacgacttcaggcggcagcgaatggatgggaaggcatggcggcgcccccaatcttgcttcctccgcttttctctctctcacccgatccacgacaaggtcaatagaggcacgataggtggagagggttagggcttccgccactcggtacttaaaaccccacaggtcggtccaggtgcacgcaaccatcagctccgaagtccacagcggagctccgccatgcgcggcatgacggttgaaggcgagcgctgacaactcaggcccatccgcca

SEQ ID NO: 162963 - DNA, 540 bp, Zea Mays
ttggcgaacgggtcgatagtcgagcaactttgtgaggcggacacgtcgagcaaccctacaagacagatagatcgagcaaccctctaccgagcaactctacgagtcggagaagtaagggcccgcgacaaggaccaatacgtctatggaccctagtcccatgactcctcgtcatgcgcctgtacctacccggtatgaaaacgaggcagacactattggcccacgtcagccacgataaggcacctcgtcatcaaacaccgtctagaccaacgacacgacacgttgaagaagtgacggggagtctctgtaaacatgacgaggcatcaccatgtactgcccttaatgtctcccgactctgccttgttggaacaatcaagctccgctacaaggggcctcggcatcagagtctctacaataacccgtgaagcgatccaccatactagacgtacgcttacacgcgtatcagacggtgacatcaggggagccacgttagtaaggctcccgtagactgcaagtcccgctccgcttcagatcaccccacgc

SEQ ID NO: 162964 - DNA, 1081 bp, Zea Mays
ggatcccaaagggttttaaacaatgttaccctcctgacagaatgtcgtttctaggaagcaagggagcgatgactcaagtcagttgggggtaagcgtggagggaccctctacttataatgcccaacaagatcccgaaagctaataggggtcttgcgagcctcaccaccccattggttgcgaacgacaaaagggacaagatgatgtccgatccgagaaaagcccccaagggcccaatagttagtgagggcatctagagaaagccactagccactagggcccgtcggtcaactggaggagacaggtagcctttaccctggaggaacccgcctccgaatgaaccccacgacactaagactagagtcaggcgtggtggagtctaacaggggggcgagcgtaccagagggaaaccactcgagtggatccctcgtctggcccgagatcgacccgtcataaggcctacaagcccctcagactaaagagcactcatgacctacaaaccccttagattgcagcgcatttatggcacacccccgaactacggcgcactcatgacctattgggcctgggcctgagtgcacaaacctctagcaagacacaacacaacgaaccgcaccgagccccaggctacgaaggccaggggtcagcatagcccaaatgatcgcactcgggccccacactgcccgcgtcgcccgccataaagagtacaagacagccaagtgaccacgaacacgcatggctttaccccatggtagaacgcttagtttaccatcgcccggtggctcctacctaaggaagccactgccggtcaaccccccccgttatcctataaaaggaggagggcggaccccggtctaaatgatttggagccctggacacacgacagaccctagacgagatgatgcttagaaggacagacaaacaggaggaggacctagaagccagagccccgtcgccaagccaagacttagctaagactccattttgtaaccatctccaccacaaataagagatttgggagcctctcctccctctctcattcgcttgtatcccatgctacgagttttgattatcaatggtgccg

SEQ ID NO: 162965 - DNA, 397 bp, Zea Mays
tgtgtcttatcggtggtgtgcactggaagaaaatgagtcacttttgttaatcgatccacaatgacccctattgaatcatgatgtcgagaggtgttgggcagacccataatgaaatccatgctgatgtcatcccatttccatgaaggtatcgacaggggttgcaaggcaccaactgactttaggtgacttgcttttatcctctgacatgtatcacattccgacacatacttggctatctctcttttcatccttgtccaccaatacaggggtttcaccgtttcagatcatggtacatcttggtgctccctgggtgcatggagaatttggagaggtgagcctcatccaaaattttcttcttgaggtccccatttttaggaactaccagtcggtcttcgaa

SEQ ID NO: 162966 - DNA, 387 bp, Zea Mays
ccaggagtcagatcatctgaacatcacataggctatagatcatcgcaataaacaaattcacgggactaaaaactgcaacagagtccacctagaggatactcatactcctgaagaacatgagaacaaattcgatgtgcaaaccttgtgacttcttctctaccaagtggaaggggcatcggcttgctctcgctgttgaactggttcacacaccaatgcacggattaattgttttcatggtggcagacgtaatttgaagcccctccccctccacgacgtgttcagatcaagagcgagcgactgggtgtggagcaggccgatatcctcgaaccattccagctacttgaacctaagaggttagtccttctgcaacagaaaacaactgagata

SEQ ID NO: 162967 - DNA, 535 bp, Zea Mays
tttggagctagaacgaattttctatgaattaaataagtttctggaattattttaacactaaaatcattttctaattgaatttctgcatttttctatgattctggactgcgcgcatgaataactagaagcacaggagcccctgcgcaaaaattctcaagactcacactactccgagttggatggcgggttgattaaaccaaaacacagggtctcgtttataaattaggactaccgaaggggtaacaaaggccctgagccatccgatcgcgggtggacaccccagattagatctgtctttaagtgaactaatacgtgatatgggctgccagatctaaatccaagggtcggaacctagatctaatcctacccctcctcggcccatccaacggcttggattgcactaaccgaagcggtatgatccaattaatctggaccgctcattacgcatcaacggttcacggcagtcctcacccatccgaccacccttgagctacctgcacggcggcgcccaagcgcccacggcggcgcacgccgg

SEQ ID NO: 162968 - DNA, 686 bp, Zea Mays
gtctttagatcaaaatgcattggaagtgcagtagttccaataaattggcccagggcgtgatcggatcttcgaaccgaccctacatgtaagggcatattactcgccttatccctactactaattaagcatgcaatatgggcgccaggcgcgtccatgcccccgcctcccctttcactgccatactagacccaccaagtaactcgtgccccgtctcgcctctcccgcatcatgccacgcctctccgatcccgtctgcggctgccgctacacccacatcggcgacatgtagtggatcttcgcccgccattagcgctcgtgatcagcgttcgtcgttcagtcaccattttggaaacaccgggtggaggggaatatggaatatagggagatccacaccgttttggcaatgccacgcagatcccgtcacaccaacattaaaaggatgctagcacctctcgtcctccgctcatcctcttcgcatcctctgcaatgtccacttcctgtgtgcgtgtcttccatttcatctggtgagtcccgagtacatcctgatcctaattcatttttgctatgtgtctgtgtgaacatcttgtggtttcagttgcaggctgtcgatgccaccgcttaatttttcaaaacattatcttagcctatcaggttctagaatgcaacctatttagtagtaacttattg

SEQ ID NO: 162969 - DNA, 469 bp, Zea Mays
cttccgccttcaacctcctatactctgcacacttcgggctgtcataaaaggcagatttcgcgtacctacgcatgtcgcgtatgcaatcgttaatgtacgaatcgacgagctgagattcacaacgcatcttctatcccattagtctcttggactctattgtgcgcatcacctctcctttgttgtcgtaactctaactgcatttcctcgtctcctacaaaaaatagtaagtaccggtataatattacatctgatgcaaaacaataaataaataccaacctcatcgtaatcgaccatatgtccacaaaaatatccaacactaagctcggaaggaactaatccatacttagcttcaataccacatttgcagagtactggatcaaacttcaactcttccgcccactgatttttttcttttcctttacctctgcctctggccaatgggacaaaggaccatacaaccactctctga

SEQ ID NO: 162970 - DNA, 549 bp, Zea Mays
gaactactgaagttgctcttaggatccctctaattccggagcccgagcctcgcctgactatataaccatatgcctccttcccttcttgaccacaactgagaggaacgaccaagtcgagcgtctcaacgccgtaggcagaaagcagaagtgcagggagagagagccaccatcattgattcgagtgtatgtcggtgtcgggcccttggagattggactgggagcttcgctgggtcatcaggaaggagctcatggccttctcaagcgtggaagaaccactaggatcgacaaaattgctcgacgtcgagaaactctgctgcagaattgcactatgttgtcgaaagacctagtcgctgctcctaccatggtaagaatgccacctattgactcgatgtccatccttgtatcatgtagcacgtatatgcgcttggcttagggctctagggcactgagagaaatctcgcaggcgagcctccgtcgtgcaggcactaccgaacacagcttctttgtcgagtgcttaagacactcggcaaagcccagaaaacactcggc

SEQ ID NO: 162971 - DNA, 836 bp, Zea Mays
cagcacgttggccattctcctcctcttgggagttgcagcagaagctttttgcaccttcgacagttttgtctctgtcagagggctcagaatttttggcacttttattatttcttctatttttgactttttagccctatcaaccttagcctcgactgactcggctatgggtaccttcggcattacggtcgcctcttcagtgctctgtgcaatcggaccagtttctgttgcttcggctgctgaggaggaccctgcgtcgaattcaggcactacgaccggttcaatatagcacggtcggtgggtcagaaccttcacctttttgctcttcggcacaggctcagctggaatgaccgaagcaacaatcttcctctttttttcttgtcctcgcagcaggtagcgataatcgaggtatatgaagtcgatcgcatcaaaaaacctgttcagtcttttcttccctcgacctccgaaggttgcggacagagcattatcttcggccttggagtaagctccaagcaactcatcgctggtagcttcaatatacttcaaccaatcgtcgtttggctcatcaaacttctccctaaatctaaaggtatattttagtcggaccagaccaccatcactagaatcagtggtggtctccttcggcatttcccagctttccacaagcggccataccctaaaggctatatgttcttgaattaaatctcttgtgccaatgaaggagcaaacagtgctgaaagccctctggcacgcttcgacagcgtcatcaatttctaccttcggccttttgaggccgaagcgggaccagatggggcgttggatgatttctttaatgtctt

SEQ ID NO: 162972 - DNA, 370 bp, Zea Mays
gaatctccaagacagcgaaacatgaaaagtatatcattacctattgccgatgtggcaactgttcgaagaattggaccgagcacgaacagttcagaaattgccaggaggacatgtctgatctggtgacttacacgacgtaacggaagcatcgctgaaatggacaggcaaaatctacgagcagagacacgcagaagcgaccacatttgaggggcgaaccccaagcgttagactaaagactaacacctcggcccagatccagcgacagacgcgcgcgcacgacatgagccgctagaaactgaatctgaagcaggcagcgagggcggcactggattggctggatgtaccgggcccggcgcatcgccgtcatggc

SEQ ID NO: 162973 - DNA, 682 bp, Zea Mays
accacgggaacttccagccccatcctgagcacaagttctggacgacatctgaagaagaaagcatacttgattattacatgccacgattacacagcctttgttacattattccaatctagttctaattatacatactcaacttatacaactcactttttcttatttagattacataaggaaacaacccactactatactaatatagtcatctgcgcccttggctgctcccgctccactgctagcttagggagaatgatcatccgcgatgttcagggaaggaggggctccaaagacatccaactccccataaggtcctctgccagctgctcctgatgcaccagctcccattgccgcaacctccggtggcacgttcggatgcaactggtcgtacaacacatgcacttcctcgtgcagagtattattatacgcttgcagattttccagggctatgcttagctcttccacccgggatcgagcagtcgcctcgtaatcccaagctatagatcgtgaatttacagcccagtcaatagccctatcccgctccacaatctaccgttgcaaacggtcaacctctggtgacaattcagcgatgttgcggctaacacacgcacactccctgcttccatggcgtagttccatcgttagacattcaactctggcctccagatcccctatgggatca

SEQ ID NO: 162974 - DNA, 485 bp, Zea Mays
cagcgattagaactttcttcgctgtcaaaggacagtgaaacctgctgataagagtggccctgacttgaaattcatctctgcattccaaatttgcattccaagttctcttagtagcagttcagtcattcagtgtcacatactcacatgtctcagggttgtacagacctagaaaatgtaataataaccaaacccttggtcttaacttccaagcagattatggtatgctattgaggactgatgtattgagcaataacttatttctttgaatggaatctttgcctttttctgcagtttgggttaaatgttccttctgttcatgctatatcagcacactgtatctgataacaaaatgtttgagattttttccttctttgaatggactatctttgccatttttcgagtttgtattaaatatttttcctattcatgctctatcagcaattcagcacacgtagtccaatgacagagtgctgaaaagaaaaatc

SEQ ID NO: 162975 - DNA, 490 bp, Zea Mays
tttccgagctcgacgccatcccaacaaactcaagcgtagcgtttccccatcgtcggccgtataaaacgcaaagccctctccctctccttcggtacctatgctctagagaattcacgtgcgtgttgggtggaggaagtatcaagggctacccctatggccgtatcatcgccatagggccgtgtatcgccattggcgggctcctctatggctagatctccggtgagtgttcccgtcatctggttcgtaccaatctccgaaccgtatagtattagccggtagcaagtttcaggctcgggatcgtgggttgggcggcttagcaatggtgccaccgcgccagactgcaggccaccgtccaaccaccgggtgtggggatgacccaccgtgggccattgatcgtgtagcgatcgaccttgattagaagggaggataatgctttggccagggcctttgtggacgtagatctaagatggacgattgggattagagtcgg

SEQ ID NO: 162976 - DNA, 500 bp, Zea Mays
ggaaggcaggatgtgtgtgtgtgagtctgagagagacaggggggttttattgtgggcttttcggggtgtggaaattttggagcttgggatctggaatttaaactctgcttcgggtgatgagttgagtgcttggctgcttgctgtgctcgtgttgctttgctttgtttcagctagcttcacacaggctgtgtggatactccggaataggaattaaatattgtgcggtgtggccactggctcgaagacctgtaccagtaggtcaagttgtgcacgatgctcatttgaaaagagagagagaacaggagggggcaaggaattgtgcacggacgacgctgcaggtgagggtgagctggatggatgtgtttttgaatttcatgtagattctgtcctccttccgtcccgtggatgtactaccactttgcgttggaacatgaaagggaggaaagctctacaggttttgatttagatgtaccactccggttctaggctttggctttctg

SEQ ID NO: 162977 - DNA, 385 bp, Zea Mays
gccgagttagcatgttgatttcaagtccaatcaaatcgaagtcagctgatagtcaagagtttgaatgcctttgaaaacgaaaactttattgatgatggagtctccaattacagagtacaatgttgcttcgagagcttttgaggccttgctaagggtaaaactttctaagatgctctatgttccatgagttccccacttctgtaccatccatttgagtaagccggtatgatcctggccgagtgacctctgatacaatgaatggcccttcccatagtggtgacaacttctgtcgtccttcccccgttagaattcggcgaaggaccaagtctcccactgcaaaggatcggtgtcgtacgactttatcatgatagcgcctcaaggtctg

SEQ ID NO: 162978 - DNA, 800 bp, Zea Mays
ctggggttcgggctccagtggggctactcagaggttggtctagccgcatagaagctgtgtgagggattaattggagggaaactagctgaagccatatgaattccttgtaggccgaacaacaccaccgcagggccgcaactcactgcattcagaggtgtctgtgcctctagggtcggtgagtatctacccttgcgatttgtcattatctgctcgatgtatagcactttttgtctaaaagcttgaatcctgatgtcggatctggcgaacaccgacgatgtcgccaccacggtgatgcccctcgccgccgtggtttgggatcgggtggggacaatggcttttgggccgttgattccacaggaacagttaggattacaatagaacgtaccggttggggtaggatggatctgcatcgctggatggggatcaaatgtgtatgattttatcttggacattttagatcctgatcgtcggtctggagttgagcggctgagatttgtttgtcttaccggattcggggtgcgcgcagatcagtcgttggatcgtgggcgtagagttgggatcagatcttatgctcattaaaccatggccctcgatctcagatccggtgagccatgttgcataccggttcacggggattgggtgtcgatccatgctgcccactgcccacatctgatcgaacgacttagtgagcgataccccttcggcccgaccaccttactaaagaaaacctggacttatttgcaattaactcgcagtccaccacgggttaaggtaagtctgggaatttttgcaagttagct

SEQ ID NO: 162979 - DNA, 681 bp, Zea Mays
gcaacaggcaacatgtgatcaaaaatggggtggtgcccatgcttggatcgaacaccacgacgacaacggcagcggtcggcgagggtgttgagttagggagatcctagcgacggacagaggcggcactgcagcgccatttcttgcggaaaagtgacacacccttgagcccctctagaaagcgtccagtagcatgtggtaaagggtggaggttgttcctgttgccgatacgtggagtgtgattagtagctgttgcctttttatttggtgacgtaaagcttcgaggagaagccaagcagacacagatgtaagtattggtggctatgaaggagcgatgacatatttctaaccttcagatcaggatcatgcgcctgaggtttgtggagatgacatggaaggctaggaagccacgtttgcaccgactttcatatatagtaaatatcgtcaatcaaaacaacgaaccatatttgcgatgatcaaaatatattttggtcaagtgaggtacctgatgggatgacaaggcaccgacgacaatcaatgacagtgcagcagccagcaagccaaggacggcacaggaaaataaatgaagaagacaccaatccaatgttggcagatgctgatagggcactacaactgcgtcagtcaggccttttaccaggttcacaggccacttcaaaaatttgc

SEQ ID NO: 162980 - DNA, 479 bp, Zea Mays
gtcgcttttgttcgaacggactagcgatgtctgcttatttggcccctcgcacatctcgacagctttgcccctgccgccatgccctgcccaccctatctctgtactacactatcaccatttccatttcattgaccccggcggcacgcggcaccggcaccgctcgtggttttccaaagctggcgcccccgccggcccactcccacccccacggccccactccgctctatttatccttggccatcagatcagatcatcacagcaacacagcccacttgtgagctgtctcctagcgaatccttgcgggggaaaggaatgggcgtcagcgctcgagctcaccatccgaagcaccggtgccaccaggagacgtgcgtgcccgacggcgcgtcgctcgcggcgatgtacctctacggcgacgtgctcgagtccgtggtggagcgggtgccggtggccgacctcgccgccgcggcgcgggtctcgcg

SEQ ID NO: 162981 - DNA, 727 bp, Zea Mays
gcgacacggagattcgatttaggggaaatgggaaattggggcgctctgttggacgatcagaggtgagagctggtgcactgggtgtgtaataacctagcggacctggttgatcactcaatttatagaagccaacagtggtggcgtcaaatttggagaaggtgcgctggcggccggagagaggggaaattaccgggaagcgctaacgtggcttttactgaggcaaggctcctatgatggacggactccctattacggctcactgcgacgtggtaatgctcctaggcacgtggcgcaggtacgaagatggtgaactccggcgaggacaccgcagttagtcgtacagcaagtgggtacagtgaatagttcagtggtcgggtccaagcacatctagcgccaagatcttttatccaatgtcgttatccgcgcgttatagggcacgaatcgtagcaccagcgaggatcgcggtgtggggtcatcggcagcgagatacactgcatctactgatctttgtcaggcactttaccatcagaacccccatcagagtgcctgatagagcaatttgctgggccttgatctttgattttcatttggcaactacttaatctatctgtaacaaagttgttgtcctatagtccagctttgattttgttatagcaatcatacacaaatacttactggatcatactcaaaatagctcccaaaatcagccctagatcactgttagtcc

SEQ ID NO: 162982 - DNA, 492 bp, Zea Mays
gtgtataaatacaggagatggctccgcgcatgccgccttgggcgggcatcgcggccacgacgcgcgcacggcgcgctggtaagtgtggcgcactcggtcccctaacaaactaggcaacagcctctagaggataagtgatcagccacttttacacccccgcagttcgtgcgtcgtcgacgatgcacaatctggagcgaaaatcttcaaacaacgtagttggcagcccttttgtcatgatgtctgcgagctgatgacgagccggaacgtgtgcgacacgaatgtccccaacagcaactttctcgcgaacaaaatgaatgtccaactcaacgtgcttggttcttccgtgatgcacaggattctgggacatgtagacggccgagacgttgtcgcagtacacgattgacgccttggacaccgggtgcagcagctcgccaagaagatgacgaagccaacaacattctgccgcgacgttggccacacccctgtactcag

SEQ ID NO: 162983 - DNA, 446 bp, Zea Mays
tgtaagctctcttaaagatgggggcggttccaggaagaagctctatagcaaactcaactttttgctcaggtggcatacctggtaggtcctttgggaacacatctgggtactcgaacacaaccttgataatctcaagtgggtctgcttcactgctatcaacagccatatgataacaacttcctttctttggctcaggcgagactaactcggtcaccacttcctctcagtggggacatcaacttgattgtcctcttatcacaaatgataactgcctgatacttatctagccaattcatccctaggatcacatccattccctgagtacccattactatgagattagcgagaaacgatatcccccttatttccacacttacattcaagcaaatgctatcggctcgaattctaccaccggctgagtcaatttgaatgggggttgacatggt

SEQ ID NO: 162984 - DNA, 483 bp, Zea Mays
ggcgctcctgcgtgagccttcggcggaggggatcggcaaacttggggcgacagcagaccgagggggcagaggcgggagctgagagatgacgcgatagccgccgcggggaggagggagcgaggacgggacaaaggcagtagtggccggagggagaggaacacggacacagcacgctcagagctggattgcagaaaatattttcggatccgaggccccggcacgatgtgtgtctgcaagagagagaggattggacggttacaagatgcgactgaaccagcacagacggacactatttttttgccgacgtgggcagctccatagctggatatttcccgtggcttttaagactttagaagagtcggcaggtatcttgttcatggtcagttgcttgtgtgccatcgtatcgtgggacggcttcacattatctgcaactgtaccaaccattaaataaatcaaggaacaattggatctataccattaaaa

SEQ ID NO: 162985 - DNA, 357 bp, Zea Mays
ttttcttctaccagatggaaggctctttggtcattaggacatcctactgctcagaggtggaaggattccctcatctcttgcggagttgcgcgcttcgcatgggaatccgcaagaagccggagtacgtctagaaagaataccacgagaatggaactgagaagttctctatggcagtctacctgggagaaagccgaagctactcgaatcaccctcctttccaagtcaccctcaccggacaccgcttcccagacacttgccaaaaatgttgcccgaaaagccctccgacagctatgccaaaactacagcagagaagtctttgaaaccccccttcgttacttcccacctagcaacaaaaat

SEQ ID NO: 162986 - DNA, 2487 bp, Zea Mays
gttaaaagaacctcatggttggttattccccagctggcagtagggaacaacaacctattgaacagtatcaggaagaaggatctgatggttagatcatcgtcagaccctttcctcagacgatcttgaagagctataaccccaaaatcttctttcgataaaccaagtttagcccttaaattgttggcagcaacagcttcatcaatgcccaaggccgtccgcccgtccctccaccagcatttggtaaccccaaaataaagtgcactgtatcctttgtaattttgagctccttccctgggccggctcgaattgtcatgtcattatggtcaagcttttccatcagccaagctaaatgagatctactgccgagtgcgtcaactctcatatcaagaatactggagaacccccttcgtgcaatagctaggcgctgtctgtcatttaatatctggatgcttactaatacgtcttggggattgcatctcacattaagcctctgctgaaaaaatgtatacaatgaatagcgtaaacatttacatctgcataatcgcaactcaatgtttaaatcaaacctcaacacaacataatttcacgcataaaaataaaatattgccattgaccataaattctaacctgtcgtggggggtccactactttcctccgctttgtaactatcttcttcaagacttttcgagaactgtcatcagagttacgcttcttcgataatggcataaagtcattgtcctcatcagcagcctgccttgtattgtgtctaacagatgtcctcgagagtaagtcatcccacatctgtagcaaaacccttgggcttttcgataagcagacagagctgccatcttgttgtctgtagaagacgtcgttgaagcttgcttgacttctttagaagatgaggcctggactcccactgatggaggtggggcctgatgctgaaaaccagaatatggcttcttataatcccgcttctttccaagatcccccgcttcttcctgcaattgagcaagcacaacagcagtatcaaaatcggatgggcgttgtagcattaccacagctttgatatcgtctttcagaccctcaacaaatttcaaagtataatacaatgggtctggcatggtatggtatgcattaagttgatcgattaactgagcaaactcctccacataagatgacacggtgcccatctgttggatatgaaatagtcgtctgagcaatgattggtgttgatttttggcaaagctatcctgaatcaggtggcaaaattccccccaagaaatgtgcgaaagcctgaactctatagactgtaaccacctcgcagctggaccggtaaactgcatataagcaacctgaacccacacactaggatccactgtgtacatgtgaaaataggcctcacatcgagactgccacagcttagggttctctccatcaaacatcggaaagttcaacttcggaagattgcccaacgaacccaaacttggcggaccctgaccataaccccccgagaaatcccggtacgtgtgatgcatcgcaggcacatattcctcatggtactgaaatggtacatggtgatggaagggagcctgatcatgcgtaccattgttcgggagttgggtttggaatgactccccaaaaccaaactcccgatgatgtggaacatagccttgctgtcccgggtcgtcaacgcgtggcatggccgcaggtgaccgctgcgccgtcgacttgaactgacccgtggttgctcgattgtctgattcgtcccgctccagattgtgagaaactctggcgagttccgagcgcactgcctctacagacgtctgaatcgtctcaatcaagccctccatccttgggcgccaagactcgaacaccttggtgacattctccaacaccgccagacgggtggaggtatgcgccacgatttcgtcgacgcgctcctgctgggctgcctgcatctccgtaatctgggtatcgatcatctgacccagtttatcgtgcagcttggcgatgttctccgtgttggcatggaccaccttctccaatccaccccatcgatggtcctgggactccaaacgatcgcagagttgctgcaggatcttggactgggcggccaaggtcttggactgcgtctcaatggacttgggctgcgctgcaagcgccgtggccaggttgggatctgacgccccctccatattcgcgcccctggtgaagtggaggaagtctgccagaccgaaatggtctttgatgccacttgtcagcactcttgattgccgacgactagccgaactgctcggctgagttttgtttattaatcatccaaaactgtctagcaactaatactctctagtatttattacagacaccaatatgggccgtatgaatcaacgaatccattctgctcctgaaatcctcgagctgggcttgcgacttctgcggcccaacaactccacctgttgtccggcgcttgaatcacttgcttccttc

SEQ ID NO: 162987 - DNA, 975 bp, Zea Mays
cataactgaaaccgaaggcatacaaatcctccgcgaggtccatagcggaacttgtggctcccactcaggacccagggccctcgctgccaaggtgatttgttagggattttactggcccgcaataatttgtactgccaaccgagtcacaaggtcatgcgaagcatgccaaaagttctcccctcgcttaggcagcccttcgcaattcaccaagctcatcgcccatacatggccacttcaacgctgggggctggacatcgttggaccactgcctatagctcaagggaacctcaagttcaccttcatcgccgtcgagtatttcacaaagtggattgaggccagggcagtatccacaataacatcgaagaccgctcaaaaattcttctggcaaaacattgtttgccgcttcagagtcccgtccgaactcacagttgacaacggcaaacagttcgacaaccaagacttcaggtatttctgcttttccatcggcaccaagcttgtctttgcctcagtgtaccacccacagtccaacggtgttgttgagcgcgccaatggcaaaatttttagtgccatcaagaaaaggcttcttgatgacaaaaagggaaaatgggccgaccaactacctgaagtggtatgggccctaaacatgacagagtgccgggcaaccgggttcacacccttccgcctactatatggatatgaggccatgacgccgcaagaattaaagcatgcccgccccccaaacaaacaaatcagccatccccgacatcgacgaaccaactttcaaagacctcaccgacggagacagcctcttcgccctgcaggccctcgacaaatatcaggttcaaaccaaggcctggcgcgacaacacagtcatcccaagagaattcaatgaaggggacctcgtactcgtaagaaccacccgaacagagtcacggggcaagctagagccaaaatgggaaggtccattcatagtca

SEQ ID NO: 162988 - DNA, 984 bp, Zea Mays
gcattgaagcaaatggatctaccatttaaagtgggggctcctcatgattttgtgaaggcgacccgccggctcagacgcttccaatctatagccttggcaagatcgatgacctggcaccataagacgaagggtgaaacgcgagggcgagggccgcgcagcacaacggcggagcttaggccacgttctgctgtcacttgggcccatttgtaagcccctccttgggtagggtttactgtatatttgatcaagttgtacctaacatcgctgtaatgactccgtaaggggaatattccggagctgtagcaggtaactaggggctaattgtacttaggagggcacaaccacctactcggttacctataaattctcccgcattgtacattgatgggacatgcttaacgagaccctacagttccttgcctactgttttgttcagcacctgagtaccctctttccagagtgattagtcagagaccctcttaacaagatgctattgggcagaggccttgaatattgctacccaactgctcaaccgccttccctctaaggcggtgagtcaccccacctcctatttcgccttgtatggcacaaacccctcctatgctcaccttcgagtctttggttgtacctgctatcccaacacctccaccactactccccacaagctctcccaccactccactcaatgtcttttccttggttactcccttgaccacaaggggtactgatgccttgacatcttcacccacagcatcatcatctctcgtcatgttgtctttgatgaggacgttttccctcttggtgactcctcctccccaccccctgaccttgattccctcctcggtgctgattgtgtcgacatctcccttccactgccctctttcacgcctacacctcgcacggccccatcagccctacctacgccacaagcgaccccgtccatgtgcgtggccccgcctctctcgcctacgccatgcacgcccc

SEQ ID NO: 162989 - DNA, 344 bp, Zea Mays
gatcatcatgtgtgaagcatgcctaggttgcttgtaaaatgttatactccttgaggcatgcattgttgaattaagtcaactattcaattggtatctctttgtgataaaattgataaagtatgccttgaccaagatatgttgtgatcccctctagttctgaggaagctagaatgtgcaaagtgcaagtcattcaaatacttgatgcacaactttagggggagcacacataacttgtgtcttttgagactaattgtttcttgagtgatcttgtatagtctcaaggtggaaaaggggagatgagcaggaaatgaagcaatcaggacttgggtatctccataagtcaa

SEQ ID NO: 162990 - DNA, 474 bp, Zea Mays
ctcgccgtacccacttgggctgcggtcgagcaaagtggtcctcgccggagttggccgcctaccgaccatgagccacgtgccttagggcgttaccacgtcgtagtaaaccactgaagcatgtctggtcatcgtcggtgaccttgccacggtgaaagccacgaatcctttgcgccagtgctctcccctctctctggccgccagcacgccatgcccaaattaggagccaccaccctcgggccctataaattaagcgtgccatcagctccgctaggtaatcacacacccaatgcaccagcccgtgcctcagattatccagcagagcacttcaatttgggatttctcccaaattagtcaagaacaccgccgtgtgagtgctcaccgtggctagctcgctacaggtctgttcacaacctcctcgttctcgtttccacatccctgtgtgctgtagatgcttatcaatccggccaattgaac

SEQ ID NO: 162991 - DNA, 611 bp, Zea Mays
agggtgcagccggactagcacaataagtgcgcaaaatcaaagtcttttccaaaagactctccgtgcaaaagtcgcctaagggtgcagccggaataataagtgcgcaacatcgaagtcttttccaaaaaaactctccgtgcagaagtcgccgacgggtgtggccggaccaacgaaggcgcgcagccttaccatataaattacggttacatacacacagcgagggcatcatatattacattggctcaaccttcgggatgatacccatctccatatagttgaatagcattatcctcaattcctcaccctcaaaaagatttcgtagctccccttcacctacactcgccccaatcggcgaggacaacaattctcgtttaccagtcccgttcacgccaagacgaccactctccatctcaccacgatgacgcctaccacttcgcgacaattcactcactcttcgtttcgccaccgcccttcgccgcctatacccagtactcgcacccgggagcccctcaaaaccctccacgcgcggcgaaggctccgctacagccacatctaacgctgcaaaataatcaaagtcctcatctgaagactcctccatccacgcaatcgaa

SEQ ID NO: 162992 - DNA, 656 bp, Zea Mays
gttgagctgattccttcttccaatcttctaaaaagttggttccctttatcccgaaaggtttttggctgagggcctcttctaccacgttggcctttccggggtgataatgaatctcaaggtcataatctttgatcagttccagccatcttctctgacggaggttgagatctggctgagtgaagatatacttcagactcttgtgatcggtgaagatgtggcatttgttcccaattaggtagtgcctccatatcttcagggcatgcactatggctaccaattccaaattatgggtaggataattctgctcatgcagcttgagtaggcgcgatgcataagcaatgactttctcgttttgcatcagcacacaccctaagccttgcctcgaggcatcacagaagacgacgaaatcctgatgtatatccagtagtgtcaaaacgggtgtggttgtgagcttatcctttatgatctagaaactttcttcgcacttcaaggtccacacaaacttattgtccttcttgaggagttcggtcataggtcttgctatgctggagaatcccttgataaagcggcggtaatatcctgccattcccagaaagcttcgaacttcactgacgttggatggctgcctccattttgatactgcttctaccttggaa

SEQ ID NO: 162993 - DNA, 502 bp, Zea Mays
atgggaatcattccgaaggttgaaccaatgtaaggtgtgatgccctcgctgtacatatgtaactatagtttgtatgatgaggctgtgcgccttcgcgcatccggttatgtccataggggcattgcacacttggtctagcacgtttattatgtcggtccggctgcgcctgtagtcagtctttgcgcggacagtttcttggtgtagacttgtgcacggatagtcttttgaggaagacttcggttttgtgcacttgttgtgctagtccggctgcacccttaggcgacttttgcacggatagtcttttgaggaagacttcgattttgcgcacttgttgtgctagtccagctgcacccttaggcggcttttgcacggatagtcttttttaggaagacttcgattttgcgcacttgttctgctagtccggctgcacccttaggcggcttttgcacagatagtctttcttaggaagacttcaattttgcgcacttgttgtgctagtcca

SEQ ID NO: 162994 - DNA, 665 bp, Zea Mays
tagcttcttcctccgctgccttttctccaatttctgaggatttctccttggcgggctctgaaggcccagtttcggcgtcagtccggctcattgtagcttcggcttcggtcagctttgtctcggtttcagtctgtgctttcaaagccttggcaactttccctggagtagagcttgaagcttttattgtctccagcacatctagtacactagccatcctttttctcttgggggtcgctgctagacctttttgtgtcttcggcacctccactaatgccgaagggcttagaacttctaatgttttcgtcccctcgattctcggttcttcaattttgtcagtcttcagcattgcagccggctcttcagtcctctgcgtaagagcaggtcctttggtttcaatagctgaagaagtctcaccgccaaattcaggcactgtggctggttcaatatagcgcgatcggtgagtaaggaccttcaactttttcctcttcggtgcgggctcgcttgaagcagccgaagcagcagtcttcccagaagttgcaccctttcttttctgcccccacggcgggtagcgatagtcagggtacacaaatccaatagcatcaaaaaccctatttagtcttttcttttttcggctcccgaaggccacagatagtgcattatcttca

SEQ ID NO: 162995 - DNA, 518 bp, Zea Mays
cccagattagatccttaggtttaataaatcggtattctatgtagaccgcacgatttaagatctatgatcgatggtcatgcgcgactcagtctttccctgcaccgtttgatcacgcatcgatgacgagggtttaatctaccgaaggggtatcctccgattagatcacagctgcacattggcgaatctacggtccataatcgtcgtcttccccccgctgcgctagcacagcagcaccgatcagctgcggcgatgccacagcccagcccaaagaaacgcactccccgacctaggtgattaaccactgccctagctatcgcaaaatggaacgggttcatctaggaaaacacctaaaggtttcactcaccgtggtttgttgcggaaacacccgaccacaggaagggagtgaaaccgcggcgagacacaactacgacgcgaaatcaatggcgaccctatggcttatcagtcgacccgaccaatcgtgtacactacgacgaccacaatgagggatatcaggcaag

SEQ ID NO: 162996 - DNA, 749 bp, Zea Mays
ctagggttttgttgtattttggaatgagtggatgacggatgggtgggttccgtgacgctatccaaacgattttgtaggctcggatacaggttcggatcactctagaccatgtcgtgctgctaaccaaacacactataattgtagaagtttcaaatgatctagtataatagatggtttgcactagattaatctcatagtaagaaatagtatgttatttttctcgcataattctaaatgccacgatgatgatcttttatgttctatgcacatgctattgttgctctttacatacaaatgatattagcagattagcctattatcatgcatcgttgatatcgttggtgcaattttgtcttgcgctgctccatcgatcgtaggtctagatctgtcatcgcacattgcccagccatgagcccccctgctgctggccatcgagcccctataggttgcctcctccttgtgggtccttgacggaaggaagcaaacagggcgcggcgtgtgtatagtataggtggtgaatctttttcggggctgttctggcgggctggcccaccgaagcggcatgggggagcaacccggtccacgcgctcttcacgtggcctccacagcgcccggccccgtcgtcgcacagccacaagctccgccgcatctttttctcttctccgcctttccggtgcctttaattattttatttatttatttcgcatattgttttttattattttctcggcgaataagtacaacgaccc

SEQ ID NO: 162997 - DNA, 915 bp, Zea Mays
gtactccctttcgaggtccattagcagcgacaccactagcaccgctagtcctgcatctgtctgctcgctctccttctgctctgtattatgtcctccctctccgagcacaccaacaccgctcggttcacacatcctcccactcccatgtcttttcctctccgcattttgactagcggtggcccgtcgctccaccctcaatccgatcgcacaccggccaccatgtcgtatctagcctcacctcctcctccccatttcccccttatctttccctgccttcacatctaggcaatggtggtcgccgctccgcccccgatctagctcctccgtgtttccccgttctccttcgggtcatgccatcacctcctcgtcaccgtatcagccctacatttcgcccaaatccaatcaatggtggcacatcgctccacccctgatctggctcctccccatttccccacctcgttcgaccgcgccctcaccttctcctcctctccgcacgtggcccacatccgacaacagtggtagtcctcaatgtggctcctttttatttccccattctcttttggctgcaccatcgcctcctctctacatccatcccgcatccgaccggcactagttcatccctgatccatccgcacctccaccaccacgcctttgatcaagtcgtacccctgccaccatggcgcatcgagcctcgcctcgcctcctcctcgtttcacacttctccttcatcgcttgcacattcattcaccatggatcctctcccaccgctcaagccaccctcccctactccacgtccattgcaacaaccttgaccatgatttgagatggcaatcgccttgaccatgccatagacccatgaacaagtgcacaagctacactaccctcacacattaaaaagtagcaacactgctcccg

SEQ ID NO: 162998 - DNA, 951 bp, Zea Mays
gccgactccgccgccgggacaacaaccagttgcctggactccgcccctacaccatggccaagttagaaactcgaatttcgccaaaaaaggtcagaaactcaccagtaggagccagtctgtaacatcccaaaattctaacccaggtgtgaaaccctaatctacccccctttttttatcttctatcccaaaactcccttagattttttcccatcatatgcatacactttgtttgatcacaagcacctcacttagattctattttccaacaccaagattatccactaaatgatttgttcaaaaaaaagaaacaaaaatggaaatgagttattaaaaataaaaagaaaaagctcttcttccccctgctgggccaaatctggcccatgtcacggccgcctccccccttccctgcgcccgcgcatcccccgccttcggcccattagccggcccgctcgcgcgcgtgaagccgcccgcgcgctcccctcattctctctcgctgacgagccagccccacctgccagctcctctcgctcgtgcgctccccctcactagcagaccggccccaccggtcagccgcgtcgtcttcctcgcgtacgatgcaccgtcgtcccctccatcgccgtcccctcgcccatccccttgccgcacaggaagagttcggcaccgccccgtcctcaccgcttgaccaacatccttgcccagtaccgccccgccgtggagtctcatcggcgccgctgtgcggcattaatgccggcgctgtgcacctcaccggcgcccgccgagctccgccgctcccctccctcgagcgcctataaaaaggtcgccccgggcacctccttccccgcaccggcctcggccactaccctcccccttgcccaagcgcaattcacgaagcgccaccgtcttccccctctccggtgagttctcccccctcctctctctccctctccgttg

SEQ ID NO: 162999 - DNA, 488 bp, Zea Mays
gacacggacctgaagaagaagattcggtgatgcaatacctctaaatgatcgactacagcgaaagatggccacttgcctggacctcacttatagcagggccatgagcacaacgctttcggtagaagccaagaatttggggtagggaaagacaaagagatatgggcgtgaaggggtgaaggatcatctcaagggtccgagaagcggtcgaggttggtgattcgtccttttaacccaaatcgctcttttcctcgtccacccgcctatcccttcaagcaaccagtttttatccgtcccgctcctgcacccgctcaaaacaatcaaccgaatgcccttggtacttgtttccccgccttacctagttcatctaattgctgcttcaactgtgggaagtctagacacttcatcaaggactacccctatccaaagcagaataaatctaatttccaacagacttctaggagcacatctcaaggcaagggaaatgtggc

SEQ ID NO: 163000 - DNA, 815 bp, Zea Mays
agcttaagaccatcctcgccagccaacatttcctcaacttctctcacctctccaacaaagccatccaagtgtaaagggcaaaagaggaagaaaaagggcacctcaagaggaaattccatgttctccaagctcagcagcaagactgtcaccagagagctcgatcctttgggcttccacccaggggaccaagcttcaatagaccagctggactcactccgtcacgctacagtcagcagagtcagagctcccttcaggccccctctgttgcaagcaaccaaccgccagcaaatgcctgttggcactgcagagaccccattcacttcaagaataactgcccccagttgaaggcacccggacctacctactccaactcggtgaatggccccaagattccctcggcactgcctccaaggcacctccctccaacagtcagcagagcaggacccagtaccagggcagagcacgagtcaaccacctcgacgctcaagaggcccagcaagctccaggagtagtgctcggtgagttccttgttgaatttactcccgctactgtgctttttgattcaagagcatcccattcatttatagccactagttttgtggaaaaacatggcatcccctctacacccctagaaattcctttggtcacccgaaccccggggtcagaccttctatgccagctcaagtgctcccatgtcagaatccttttaagtggggtagtgttcctggcagacttaatcgtcttgccatcccaagggattgatgtgatcctaggaatggattggctaactaagcacaagggtatcataagttgcg

SEQ ID NO: 163001 - DNA, 650 bp, Zea Mays
cccgcgaggccggtcgtccccgcgccgcgcactctagcgaccgcaacccacgctaacgcctgggcccccgcggtcccctcgctgacaggccagacccgttcaccagccgatttcactgcaccgcacaccgtcaccgccgcgtgggcccgcttcactattcttcttcctcatcttaaccgcccccgcggatagtgcgcgcgccgcgggcccgcgacgtccgcacctgggagctcgctggtgcataaaaactaggccgtcgaccctgtagtcatctgcatgcccctcacgcctcatagccactagccaccgttgggattgaagagaggaaagagtagtgactcagggcgccgcccccgacgttgttctctgccgacaccaccgaccgatcctcgttgggtggccctggggttctaccgcgccgtggggaatctgggaagaccgccctgcgcaaggaattggctaggctcgccaggaatcgctcgacgaaaccatctcaccgcgcaccttcgcaacccgctatggactacccctcctcgtcgatcgcttggcggtaagatcaccttcgcttgttcgccttgggttcctctctatgtagcgcccatttcattttgatatatcgcgatatggcgagagttggccgaaccccggcg

SEQ ID NO: 163002 - DNA, 747 bp, Zea Mays
tgataatgcctgagccctcagatccgatcccaacgatccaggtttaatcaggccaaatggtatagctccatctaatctacaccattcaccctcaatcgaatggcgtacattccgtcttcatcaccctgcccaccgagccgcggcggcatcccccagcggcggcggcgccatgaccaggaccgagcgaggagctcctcccagtggtcaccatcgaattgaaacaaagctaaacgttgctgagactacggcgagcgggcatagggcacacttacccacagttaggacgtcgagataccccgaccacgggcagggaggatctatggcggcacacgaacgacggtgagaaattcctcgacaaccagttggtctttgctcccagcgccggatcgagcacgtccctgggcacctggcgaagcccatagatctatcttcacgctccgaacggccataggcgctagaatcgatggcgacagcacgttcgacatccagttttctcccttattctctggttgcccgatggggacggtcgtgctcggtgagttgagcttcagggaggtctcagggttctcatatataccaaatgccgcgcgcgaaactcggatggcgaatggtggccggttggaaaccacggcgggttcttcagcccgagagcttcggcggaggttgttccgaagctgcgcctgtgcccggattcctatccgtccggtttggtggaggaggagctaacgcttcggtcctacccggcag

SEQ ID NO: 163003 - DNA, 325 bp, Zea Mays
acctgttggacgaacgatgagtcgggcctctatcccatcaactttccagatgttcctgctcttcccattggcacgcgtgtctcgaacaccccgcaccgcaagtcgtacggtatatttttcatttgatcaaaatttcatgttttagagagtccttgtcatcatgtctgtcaacttgtgaagagttatcaactagtaccatacacacattccttaggtgtatcacatgagagcatgtacaactacaacctacataaatgcaccatatcttaaaggtatgaaaaaggtaaatgcaaaaaaacacaaaagacgtatcttggtgaaggaa

SEQ ID NO: 163004 - DNA, 392 bp, Zea Mays
aagtaattgaacctgacagtgatggggtcaagaggtcgcaagatagactggccatgggctgtctgttgcgatcggtgctgaaggaaatgtggcagatgctcggaactagaaaagattgaaggacgcatgggcgatagtgaagagtatgcgagtgggagcagatcgcgtgagggaggcgaatgcgtagcgcctattgaaagaatttgagaatatcactttcaacgatagtgaatcggtggatgatttcaccctgtgcatcaacgcactggcgacggatctgcgcacatctggtgaggagatcgaagatacccgggttgtgaagaagatgctgcgcgtactacctcaacgatatgcccagatcgcgatctcgatcgaaactctactcgatctga

SEQ ID NO: 163005 - DNA, 501 bp, Zea Mays
gtttagtcattacctctaaaatttctgtcacgccaatagaagttgccgaaggggtctctgcagaatgcttcggcggagaagatctttcttcttcgcggctcgatgatataatatttcttttcttagatgctgaaggttctggtgttaacttcgatctttttgttaaccttttcttcttgtccttacgactcttttctttttcactcccccgcctcttcgctaagtctatcatagtcaggatactcaaaggcaagggcatccatcacttgatttagcatttgtttctctcgtgtgccgaaggcaacagtcattagttggtcctctttgtcagtataatttccaagtatttcattacacattgtctcaatgacctccaacaattcggcacaagggccgctgaaggttttctgaaatttaaagcgatatggaagtctaacaatctcaaatttctttccttcgtctttcttcttcggcattcccctcccacctaataaaattttg

SEQ ID NO: 163006 - DNA, 485 bp, Zea Mays
cagacctgacctgtccacccaggggaaccaaattcgcaccagacagaatggatgagcgagcaatatcagcataggaggctttcgcagagcgaccacgggaaactatagtccaagagtttgattcttcctccgaaaagagctgccattctttgatccagttggggccgccagaattccaaagatggagataagctttgaaggaagaacaactaaatgaatggcgcctataaactgcgaagcccacttccttgcaagatagcgaaagtcggaaaacccggtctgacagttggagaggcctgaaaagctttgcagaaccaccaatgaaggattgaagcagaagacccaccgattcttcacacaagcgcgaggaacatctgccgaaggaaacgacaaggaggaactcatggcggtcaaatttgcccgggagagggttaatcggacgattaaacttgcgaaaaatccaatcctcaaaatgaaggccgaca

SEQ ID NO: 163007 - DNA, 468 bp, Zea Mays
cgggaggccaagaaccgctttaaggtgctccggggacaaaaacacgtgcggtggaacgcggacataaaaatggtcgctgggccatgaaaacgtgtgctatagctcacgggaggccaaaacagccttaccagtctcaatggtcaaatcatgggtggcggacgggaggcacgaaatcgctgttcgacgacaaaaacatgtgtcacgggacgccctaaaacctaaaccctacagcttgtgggaggccaagaacaactttaaggtgctctggggaccaaaacgctggtggtggaacacgtacttaaaaatagtcgctcgaccatgaaaacatgtgctatagcttacgggaggccataaatagccttagcagtctctgtggccaaatcatgggtggcggacgggaggcatgaaatcgttgtttgacgatgaaaacatgtgttacgggaggccaaaaatagccttaccggcctc

SEQ ID NO: 163008 - DNA, 304 bp, Zea Mays
ctcatcttccacagtaacaacacaagcagcacccccattgggatcagcgacagatggagcacacccattgggatcagcagcagtttgggcacacccattggggtcagcgtcggtaaggccagttgcaggcacttcttcagcagcaggagctaaggtactggcgtcctcatcaaaactggatactcgccggaggcgtcttttcttcttcttttgctcgtcagcagaaggctcaggctgactggttcggctagggcgcctcaggcgagtactgacaggtttcgggacatccaaagttgtgtcaacc

SEQ ID NO: 163009 - DNA, 693 bp, Zea Mays
tgcaaccgctcggagatctcgcacgtaacgtgcatgcctgttactcctggttgacgtgacaatctaggtgtgatatttgataaccaaataaacaaaaggcaaaaattaaactgtcgtttagaacacgtcacgacgcgatcgcacatcgtcgcaagtcacaagtcaagcgataaattacgcgaaacgcgagcaagcacgcgcgcgcgtgtgacagcctccatagccctttatttgtctcatgtgaaaagtaggaaacactcccacatataaggtggttctctcctatctagatgggcgatgtgggactaaagccccatgccatccctacacaccacgttggcttccttattaaattgagccacacacaaatgggcctaattccaacagtccccaccaaagccaaggtctccaattgactcaatctctacgctttcatataccagctttatagtgcagacccgatacgagttgagctacaccttgcagtacaggattcacctcctcacgacttcgtaatggacaaagccttaaattgctagtcttgtgtaagttggtttcacctataggcatcattgatactaggtcgcctaaagccatgcctctggttggagcattacggtcatgctcccgtgtcttttagtgaatttatttgagattacccacatctcatagactgcgacctcacagtcaaac

SEQ ID NO: 163010 - DNA, 379 bp, Zea Mays
gcaccacccgcgcggttcccccaccccacctgacctcgatttcgaccggtctagcacgaatacctatggatcactaagagaataaggagtatcgtaccagattctgtagcatggaaatctttggccacggcaacgcgaggtctcacggcggcggaaggagttcggcgagcaattcccaacaccccggacaccgccgatgctcgcctccacgctggaaacgggcggttggtcttgcgctctccgattagccctactgatcgagcaccacaccttcgcgtgcgcgaaaccgtgaatgctcaccccctacggcgtagtttcgctttggattcttgctcctctacggtgatgatgctaggcttggttagggatgaacagggcg

SEQ ID NO: 163011 - DNA, 387 bp, Zea Mays
attagatgtaaagattatggtggaagaaaaataaagagcctagatggtttgaaaagaagcgggttagctcgaatttttacttctttaattcttaatccttcaaattttataatgcatgcatgctgaaaaataacggctcctctccgaaataaagggtgctcccaaggcatcctttaaaaatctaagtactggcccacagggcctacttacttaggcacctatttctcccactatccctaaggcctttcgtcctaggtctagcgttctagtcctggcgattcttatcagtttctaagcaagttttagattttgaaaattggtatccatggtttattgttcttctctgtggtggtatttgctttgataccagctatggcggaaccgccc

SEQ ID NO: 163012 - DNA, 1249 bp, Zea Mays
gtgccctggcggttgggtggcatctaatctttgactttctgtggcgtgtacgtgagtaccagttagctgggaatggggacatctatctctgactttctgtaggggacggcaaggccgaatgtagcagacggttgactatgtgatcccagttcaggacgtctttgaaacttgtttctctattgaaagtctaaattcttcagtacccattctgtagccgccatacagaatttgtcaaaatgtttgtttttgcggttcttccataatccatacagtgacattgccgtagtatatctgtcgtttctcgtttcttagccttgcaaacattcttttgtaatcagaaggattcttggcacaatctcagaagttacgatgcatttaatgttgcagacagtttacttcatgcgtgaacatgaacttcagcaaatagccaacatagaccggaatcttttttattggaccttgcttaatcttcctaggtatgacaccgtctactacgtagtatgtgtaccttgaattgacaaaggctagacaaagaatgagcaggtctacagttgtgaccttttactatggccaggattgggacttcaccaatgcctcagtgaccgatgtattgaattcagcctttgctttcaatgttgcagacagttactcccccgcataaacttctctgcatcgagcaattagacaacaaaggcaggaatcttgtttctattgaatattgcataatcttcctaggtatgacattgtctacgtagtatgtctgtgtacctgagttggacaaagtctagacaaagaatgacaggtctacacgcgatcgagtaaaagtgctagtgcaggagataggcattcagcggagtaaaagtggaaggagttggttagttgaagaatgacaggccctttcaagtaaaagtcttcatctaacagcatgttctatggtttgagatacagcggtccttttgctaccccgatcgagtggtatgttgtatctatggatccatggtagtgcagtgcaggagataggcattcactatcgcgcctcatccgtcctcattagccactccttccacttggtgctggtgctgctgccggccggatcactttcttcatcaattgtacatccttggctacttagccacagccacggccatggcgaaaacattggtatcagataaagagagtcgtcgtcgtcgttggttcctcttctctccagttgactagctagtcgctttaaatagtcagtaggactttg

SEQ ID NO: 163013 - DNA, 1403 bp, Zea Mays
catgtgtattagatagaaatgcaggggtctcggtgtgaaagattccaagacacagggcgcccctgtcacggacggcgggttgattaactaaagatgtagggtttcttatgcaaaatatacaccgcaaaggggtatcgagggtgttctggccgttcgatcaatgtctgacggtgaggattagattcccggttggcccaaacggtggaacgtggtaaccgtcagattcagatcccatgcccgtgatttaatgaatcggaaaacccatcccgactgcacgatcaaggatcaatggtctagggttctcctaatctgagtcgttcgatttacgatctacgtacagggatcaagtggcgaggggttatcttcagatcaaatccgagccgttcgacaccaatccgatggcgcccactcgtcttcttccactagcgtacatgcgcggtagcgcccacgcgcttcacggcggcgcgcaccggcaaggactcacatgccaacgcccggtgaccaaaatccatctctgagttttccgaaacgtagtcgaggaaacaaatttacgcgaggtgcactttaccggggctcgaggcgacggaggagcctgtgcgaggtgtgactgcggcgaagctcctgtgttggtgaagaagtcgccccgagtgatggcgaaactcccccaccacacgctaggatcaaaacgacgacgtgcgagagctcttgatgtggctacacccgcctatcctccattattcgatggccacgatcggagcagaggaggcgaggttccagttgccatcagccgcggcggagttcctctccgatgcgcgtgaaggacgaaccgcagcagaaggtgtctcgagttcagcggatgcggcggctggattttatatccaagttgtagactccgcacgggcatttacgcagcgaggatcggttggttgttacggccgaggttcacggagtccgtcctaatccatagcagagaaagcggtcggctgtttgaagaggacgaagctgaccacgcggggcccacgcgccatacacaccggagaaaaagaaaaggccgtgggaatgatgggccagctgggcttagaaagcagagttgggtcggcgcggtgaagagaagggaaaaggaggagatgggccgcgggggaaaagaaatcggcccagtgaggtctttctgtttcttttttttcagttcatttctccaattttcaaacttcaaattcaatttaaatctagctttaaaattcaaactcttattcaaaagcaccaacaaaattccagtatgcaaatgcaaaaatatatatttgcttattattactcttccttaagtagatgttccaaatcatataaatttacttattgtttgttttagaagaaagaaatatgatgagtggtcgttaattcaagaa

SEQ ID NO: 163014 - DNA, 328 bp, Zea Mays
accaacaggccaggtttatggggacagaccccaccaggttggcatacacgtatgcactacctagttacaaaagggaaacaactcgacccctcagacctgctttatagatagaacttacagagatgttccagcaccgggggaggtactcctttagtcgtagctagacagtcaccctcgggttggagtattcccgttaccttgaagggtccttcccagctgggaagtgttgcggagccctgatttggtttggtacttccgtaagattaggtcccgaccccaggtttccatctgcgtttgacgaaggagcccccgtccttggccttggtca

SEQ ID NO: 163015 - DNA, 718 bp, Zea Mays
gccgtgcttcctatccggttggagcgtgtgtttcaccggccgctgggacccgctcgtctggggcgtttcttccccgcggaactcgctcgcgtcaccccgatctccgcatcggccgcgcgccgccgtatgacccggaaatccgttgctagctctcggcgcgcttggattgaacgactggcggatgggcccaggttacctggggaactcccttcccttacgtagtcgcccagtgagtatcgcgagctccgtggggcgggtggattcaactaccaccacgattttctcggcgcctggctcaggaaatccttggcttcgtgattaaagcaggccgcgcccctgactcccttctcttctccattatctcttgcgcgcaaccacagaacgccaccatcgccatagcagtgagagagttccgccgccgcaccggaatcgcgagcctagcgcaattgtactcgcggcaagtgtccagtggggttcgcccggtcctaggttaggtggtcgacgccttgcttgggtcgaatcacgctccagcacctcagaatttgtcaccggactttgctctccgcgaccgtccgcctcgcgccgtggtcggcccccttcgcgacccactcagcaggtaatatccttcccaattgatccaccgcatcgttccgtatgtattgccatcgtcagtacgcgagttagggcattggggaggggggcgagaccctgtatttcc

SEQ ID NO: 163016 - DNA, 554 bp, Zea Mays
ttttatcactctcagggactatgggttgataagtcaaaagagtaggggctcttatgcaaaatcatcaggtcgaaagggtatgggcagatctggttcacccgatccagtttctacaaaccagattagaacggtgtttcattacttaggaggcaatcggtgccatcgatcatgaaattgacgactgaggaacaaccacgccttaccactactctacgccacccattactaatcctacgactgagattaattccgcaaaggcggtatgcgtagcctaatcctgcctgcacaacgtggaatcgatggccatgattatatttgcgtgaatgggtatatgggaacctaatcccactcgctggatcacaatcggtcggtcctggctcgtcttccccctgatgccctcctaccgtgatgaacagggtcggtgcggcagtgccatggctgcaataccccatcccgcattctagtggctgattcctcatgattatcggtgtaacacatagcagatgcttagagggatggcacctaggcggcttaccggtggtctggatgatggc

SEQ ID NO: 163017 - DNA, 821 bp, Zea Mays
atgtcatgacaacccattcaaataaaccaataaagcctggacatatacaggccattttagacgcatcttcttcggccatgaaagtctgattatatccgacattaccatcaagaaagctaataattctattccctgatgcattatttattaatgtgtcggctatgggcatgggatattcatctttaggagttgctctatttaaattgcgaaaatcaatgcatactctatgtttacctgactccttctccaccggcacaatattggagacccactctgcgtatctgcaaggtctaataaaattagcttctaccagctggtggattttgtccttgattcgtgggagaaggtctagacgaaatgttctagttttctgcttgaaaggtctaaaactggacttaatgggcagccgatgctctacgatctcacgacttaatcccgacatctcagtgtaattccaagcaaagcaatccgaatattctttcaatagaccgatcatttcatttctaggatcggtccccagggtcttgttcacaaaaggtggccttggagttttaccatctcctatgttgatctcctccaaaggatcggccgatgtaaacccttgtcctaatttatcgagatctctgaattcctctatcatgtcccccacagaggaaccagatgatctttgtgtgatggcggactctccgatctcgggggccagatcatccatgataatgtccttacactgtggtagatgttcagtcttaaagaccgaactgttttgtgaaagaccggaccatctggcctcacaagccaaactatccgtgactagggactca

SEQ ID NO: 163018 - DNA, 487 bp, Zea Mays
gaaaactgggctccaatttgatctgtcagtcaagtcttttactgaatccaaagcactgttcatcgtcatcagataatatcgcacggtggataaggttctggacctcgccggcgataaggacgccacggcggtcggaatggactggaggccgcggtaaatatcttgggtcacgtggcagtaaccctctgtggtggcggactccggttaaacgacgtcgccgtgccatccccggattctaccgcgcggcaagctcacctgcaccgtctgaaatccgcgatcctcatccgtcgccggccagccgtctataaatagagcgcgggcacggcttcgtcaccacattccgcacatcaacaactgagcttttgactcgagctcaccggagagcccccgtagccccaaatttcctcctcccctgttcttagctccgccgcaaaaatccttccgtgaccagcgcgattcgagatagcttacgacttctacttccccg

SEQ ID NO: 163019 - DNA, 390 bp, Zea Mays
ctgcggaagggaatcaaagataaagatcatggtggaaggaaaaagaaaaagagagcccggatggttttaaagaaaagggggtcagctcaaatttttaattcctcttggtgttttataatgcatgcatgctggaagaaacgttgcctctcaaaaagaaaatagggtgctttttagggcatcctaaaatataagtactggcccacggggcctacttagttagccacctattcttccctctatgcctaaggcctttcgtcctaggtctagcagtctagtcctgacgatctgtagtagtttctaggcaagttttagattttgaaaattggtgttcatggtttattgtccttctctgtggtggaatttgctccgatgccagctatggcagaaccg

SEQ ID NO: 163020 - DNA, 441 bp, Zea Mays
agcagcttctcttctttccctgcctcgaagcggatagcggtagtcagggtaaacaaagccaatggcatcaaaaactctgttcaatctcttctttccccggcctccgaaggctatggataatgcattaccttctgccttggaatatgatccaagcagttcatcacttgtagcttcgatacatttcagccagtcatcgtttggttcatcgaattgatccccatacctgaatgtatacttcagccggaccagttcaccttcgctagacttggtgatggtctcctttggcatttcctagctctctacaagcggccatactctgaaggctatatgctcttggattaaatctcttgtaccaatgaaaaacagacagtaccaaatgccttctgacaagcttccacatcatcatcaatttcaaccttcggccttcaaaggccgaagcag

SEQ ID NO: 163021 - DNA, 666 bp, Zea Mays
gctaccgagcgccaataatcgcctcgaaaccaagcactgcgacccgcaaactcaccgatgcgacggtcgctccagcccaactccgcccaatctagttcctcggccagtctccctagaggctagcaaagctcccaagctgctccgaccaaccgaaatctcgccggagaagcctggacgccttgccggacatgccttgtctgctagcctccgtggaccaggtaatctaaccatccattcttcgattccttgcgcacacaccctcacgaccaccccgtgaacctccctgtgcggtttgattgagctctaccgccatgatttggccacaacaggccgcgccgacgagctccatcgctaggattcgtgatcaggccaactccgggcacaagagacgacgacacgtaccttgacatgaccgccagagacttcccttcctcgctcgacccctcgccggaaatctaccaacaccggtaagccgctccgccactttcttcatcgcggttactgtgtagcgtagccagggaccacgagttgagagaaacagaaacctagggggttttctgtgaaccctacgactcatgtgaatagtacccgaggacctagttgtaaggagaagggaaaatagagacaattgtcctgaacgcaaactggttaatcttttccattaag

SEQ ID NO: 163022 - DNA, 464 bp, Zea Mays
tgcgaaaccaggaatcccagcaacttccctgcagagacaccaaagacgcacttttccaggttcagcctcgtgtgtgttgcctgtagcttgtcaaagaccagggttaagtcttccactagggtcgaccctctgttagtcttgaccacgatgtcatcaacgtatacctctatcctgtccctaatcaggtcaccaaaggtcttactcatcgcccgtacaaatgtcagcaaggcattttttagaccgtaaggcattacaacataacagtaaagcccatccacagttacaaaagcggtatgcttcctatcttgcctagacatctggatctaatggaaactagagtaagcatctaggaaggacaggaggtcgcacccagaggtagaatccacgatttgatctattcatggaagtggatatggctccttgggacaggccttattgaggttggtgtagtcgatgcacatccg

SEQ ID NO: 163023 - DNA, 540 bp, Zea Mays
cattaagaaacaagggtggtcaaggatatattaactgaaatgtcttgaacagtcattggggtatgaaagataagcatacataaaaatatgagagcatgcaagactccaaggacacgagcatactaagaccaagggaatagaaattgttgaaaggtaatgacttaacaacaaaataggaagggatctcaaaagataggaaggtcatgaaaacataaactaaaatgtaaaaataggcaaccgagttttcataggtaagtatttaaaacaagagtattgaagaatctagggatacgagcatgtcaatactaagggaataaagatggtcaaagggtagaaatttaatgacgaaagagggaaggatcccaatagacaaaaaggttatggtcaggggacatctacaaggatgtcgcaagcacaagagtgagatcagatataatgaattgagataagtatagaccatgctagaacaaaatacttttggcaagggggcatataggagcacaacatagaattagtcggggtgattaatatttttgaagc

SEQ ID NO: 163024 - DNA, 604 bp, Zea Mays
gttatagggacgaacgcgttccggccaaacgacggcggggatgaccaaattgaggctggggaagggttcacgggttcaccaggagttatgcacacactttggtttgggcagaataagagccaaagagcaggtcgacggtgagggtggcccgacggcgttcttcagaagcaggcgcgtgttctggtgaaaggcttcggccaaatttcgattggttggcactgagagcaataggaggctaacaacaagcaagaacatgaagcaattgggtaagtactaacccgaggaatgctggccacagagcggggaagacttagacttgtcggtgacagagaaaggggagaattggtgttgtggcggctctggttgaaattggggatggggattgaggctactcggccgtgaaaagctatagcttcaccgtgcagactcaatttgagaggaggggtcagagacagcgtgaatttggggctctgattcaacgctctgtgtgtgatggtcgcaccttcgccgtggaccacatggctatttatagccacggcggaccggcgatcatcacatggtcacggacagcatcgcgagcgcatgccgaccatgtcggtaggag

SEQ ID NO: 163025 - DNA, 763 bp, Zea Mays
cttctcaataaaagtcttgctcagaaaagtatgtgatgcactagaatcaaaaaggatgacggcgggatggttggcaacgaaaaacgtacccatcatcacaggctctcctcccggggtggtcgccacttaggtgttgtagactcacccagttttccttttttttgcccgctggagtgttggccacatttcccttgccttgagacatgttcccataagtctgttgagaatttgatttattctgctttggatatcgacagtccttgatgaagtgtccagacttcccacaattaaagcagccattagaggaacttggtagggcggggaaacgagcaccaggggcactcgattgattattctgagcgggggcaggagtggggcgtataaaaactggttgcttgaaaggatatgtgggtggacgaggagaagagtgatttgggttgaaaggacgaatcaccaaccacaactgcttctcggacccttgagatgatccttcacccccatatctctttgtttttccctgtcccgaattcttggcttccatcgatagcgatgtgcttacggccctgctatgaggtccaggtatgtggccatctttcgctgagtcggtcatttagacctctcatgaagcaattcttcttcttcagatctgtgtccacttggtctatagcatactgggagagattattgaacttggcgagatattgcatcaccaagtctcctccttgccttaaacgtataaactcctccagtttcatctgtaaaa

SEQ ID NO: 163026 - DNA, 389 bp, Zea Mays
gcaattatggttaagagagaaagaggagaagacagtcgcgtctacggtcgagaagcgatcacgttacataattataaattaaaccactcgtttatcagaagggcattaatttggacactacgttaagcataaagtaaagtcatgttccacatttaatcattataaatagataaagatgaatgaaagggagtggtcgcacggcgagacgtacgacataacatttagactgaattaagaagtaaacaactcaccacgcgacagagcgcgcaacgaggttcttgcattaattaaagacaaacgttaagtgttgcgcgacgaaacgcacgacagcttacgtcaactaaactgcatttaaacgaatcatcgcacgacgaagcgcgcaacgccgc

SEQ ID NO: 163027 - DNA, 626 bp, Zea Mays
ccgccggtggcctccacgcctggattcgcgccggccaccacgatttgtgccctctgatgtgcagattacgatcggcagtgaaaatatcttcgccatggatgaatttggggtaccgtgaccgccctgtcgccatacccacttgccggcgacgtggctgcgcggtcgtcgccgtggttgccgccgttcactcggttgtgccacgccttaggctgttttaccacgtcgtcttgagccgtggaagttaaccagtgatagtcgtacgcctttgtccagtgaatgccatggtagatcgccacggtgactcatcccctctcctcagccgccaacttctctcctcaaattcggagccaccattcatggataatataaattgagtgttcagcgtgctccattaggttgttacgtgcccagtgcatcgctcctcgcctccgatcatccaccgtagcgcctcaatttgggatttcccccaattcggttctccgcgccgccgtgagtcactgcgccatggaccgccgtctctaggtacgctctcatcctcaccctcgtttcagaacccatgcacgctaggaatgcttgtcggctcaaccaattgagctagaccgcgcttgatcaccgggaacgcctcg

SEQ ID NO: 163028 - DNA, 854 bp, Zea Mays
aaattcgctacctagacttttgggctcactgtcttcttcggttcggtggtaataatattcagtattatgactttatgagtagcattgtagctcaagcctttaagttataattaaaatcctcgtgacaagcattgatataattttaaaacaacttattgtcgctcacctaatataccttcttcaatagtgtgaattatgctgttgtggctattacaactacagaataatattgcagaacatggacacaatgcaaccaagcatgtagcctcattaatcagtgtagatacgcctaaagtcggccctgacatacagcaacgcacaaccaagaaaaggttagtatagcttatcaaatcagccttaagttaattcattttactccattgacattgtatacttatataccagagcgttcgatctgttagagctcgatcatcgccgaaaaaggctatgaagtaactgtttgtaagtcaacttgaacgtaaagacactcctgatgagcctaggtatgtacttccttactgataaacaattagcagattgcaatcgccaattgttatgttcaacaaacatatatacatctactacggttgaacttctacgttccaaattagaggctctagaatttataaaacggaactaggaaaggaatactctcttctaaaaaacatacatgtgcgtctgtagataacttcatctaacatcacatagtgtcaccttaacacaaagaattaaaggctctgtcaaagtttacgatactatacatccaagctcctcgagttgttgttatttttggcttgactgaactgctagatggttagattcagatcaactctgaattgattttgatgtatatc

SEQ ID NO: 163029 - DNA, 1460 bp, Zea Mays
aagtggagttgttattcatataactggattgatggatgggttggctagatatgtgaatcgcgatgtggggtgaaatataggtttgaggtttaaatgacgtgaagaatatgttggtaggctcatatacgcagcgtgattggtttaataatgcgaaggatatgggtaggcatgtatgtgatgtgtggtagggttagtaatacgaagggtaggtctaatgtttctaacgtctagcaagtagatgtttttggaatgttttgagtggtatgtcgtgctctgattgtgttcatgatttcaaatagacgcttcgtatggtcaagttcataaagcaagttatgtggagtgtggtaaattagtgaaacagagcttagatttagcattttaaatgtctaatcaataatgctattagtgttacttgtgacgaatgatgtttgtttgataaagtcgatgctttgctctagtaataataatgccagctatccatgcacggttattcagagcttgggccaccgtcctcctcttgataagcccctttgggacagccttaactaaattaggagccaattctgagattttcttcccctgtacccatctatgattccataattttatattctctccattaccctctaaggagtctacagcaatatgaaagagggataatgcctttagggggacttggagcggtagtccagcccatggtctagcatgatcagttttctctgcccacagccaaagaatgcacagagcacaacacatagtctccaaattatgaatttccacccctccatatcgcaatgggcgttggacatggactcgctcccaagaaatcagacagctccctccattggcactctcttgagtcttgacctttccaaaggaaacccctgccgtttatcaatggctttgactactcatttaggaagctcgatgacaatagcattagcatgatagatggtactatggtagaagcagttagaaccaccttgaccatagtgaggcaccctgctctgttcatcagggaggccttccaacctggaagttgatcagccaccttgttcaccaaaggaaggtcagccttagaagctttgtggatggtgagagggggggtcaagatacttgcaggggaagtccttcacagagcaagccagattgccagaatatcagaggtctgctgcaaatgttccttttgcttgaccaccagaatatcaaagctttgtagatggtgagatggaaaactttgtagatgatcaccaagagggggaggggaacatgggctgcctggtgggctgggccagcccacttcttactctgttccttttctttttctcttcatcatctgctgctctaagctgctgttttaaattttccttaaattcttaaggtgtcacctcacctcacactttagtcgcttaagtgtaaggtatagtcagtcaccacatcaccataccgccttgataacc

SEQ ID NO: 163030 - DNA, 815 bp, Zea Mays
agaaaatcctccaataaaaatttttcttacatgtgggacaacaccacataacataattatgtttccaataaagatttaaaataatctccatataaatttgttactttattgaaatatatttataactattcactaaagaaaagtacaaactagaaatgatatttttcaaatacctattctctattttagtgtgtatgagctttatatttgaaagcatttgactaaatagggaaattaattaattaataagatattgtcaccttcatattggagttttgactttaaatttattttgaattttaaacctaaaatctgagttgaatttggaaatagaaatagaaatttggaataagaaagcaggaaaagaataaaggaaaaacactaacctgggccgctcatgcacaattcggcccactctcccctcacctcaccagcccgccactcgccctgtcactgacgacgatgccccactggccggctcctcaccgcgtgcgctagtactctaatcgctgacttacgattgggcccgcatcgtcaggcacttcttctccgcggtgaaatcgtccgtgaaccaatccacgcgagatccatgggatcttaacaaatccttccccaagacctcggattattgttgcaaccacctcatccatctacgacaccaccatgcgtgcccctggtactataaatgctggctccccttgctatctgcgatatgaacagagggatctcgagagggcaaccggccgccacccgccatctctgctgcgttggtggctcgatcttggagaaggcgctcagagcatcaccagtcgata

SEQ ID NO: 163031 - DNA, 559 bp, Zea Mays
tggaggtaggaaataggagttacaatgcatacttgagctgatattgtccaagggtgataaaaaggacgcctgcccctactccttgtaacctcaacgacccatcaaaatacatcttccatacctccactaactcggggttttcgtggatctattgtttggtccactctgatatgaaatccactagagttttggtcttgatcgtcgtgcgggggtcagaattctatgtcatgagctccgagttcgcacgcccacttggccatccttcccactgcttcttgttgtggagtatgtctcctatcagaaagcctgtaaccactatgactttgtgatcgtcgaagtagtggcatagctttcgcgtggtgaggagtactgcgtatagcaacttctagacttgagggtatctgatcttggaggcctaagaacttcgctgatgaagtatacggggtgttggactagatttgtgtgcccttcttctctccgctcgattactagcgtggtgctcaccacgtgagtcatgcatgagatgtacagcagcagatcttcagctggttggttggcg

SEQ ID NO: 163032 - DNA, 458 bp, Zea Mays
gtaaagtgctaaaaatgcaacaagatcttgaagaggagaaaaacaaagctatcatcaaagatttagaagacaaagttgaaaattacgaagctattctgaagaagaaggatttcgtcatccaagaccttgaaatcatagctaaagaacacgaagctgccttagaaaagaaagacttcattattcattctatggaaggctcactggctgaggtccaagccgaaaatgacaggttaaagaatgaattactcaaaaagtcagaaaaatctgagcaggaaaagaagaatctcgagacaagtctcaaggccgagatcgaaaagagatcaattttgcaaaaatcattgaaggagcttcaggagagatgcctaaatttcggcagccgatgcgtgcaacggctgaaggatgtgtttcactctatcggagccagctctaaaaaatttacaccttcagctgaaaacctg

SEQ ID NO: 163033 - DNA, 655 bp, Zea Mays
atcggctcaccacgcgcttagctgaagttgtgcgcccagttttgatctggatcgtccatcaacacatcagcggccccggtgtccccccccaacgacggccggccacggaggagcagaggcccgcggcggcgcgccatggccgaccaacgccccaagcggcacccggtgcgagagcttcaaatgaacgggtgctacccaagcagaaaggtaaggcaaagtacatggttgggttttcacctgccttggatttgtgaaggagcttggccacgccgtaatgcggccctgtggccaaatccaaagaaggcgagcaataccgggctcccccgccattgatttcgctgattgaggtcacgagcatcctcctggtgatccggcgatgatctatggactcctgtggaagtccgagcgattgcgcggagcacataacggtggcggcggatctcattgttttagtgcgcacatagcttcaggacggatactacttctatcggcctgattactgatggcgggagcgcatggtcttcatttatctattggcacgagggaatcacggccagtggttggaacggcctgagaaagggggaaaacgaagactgggattcagagctcacccgatggccatgcgagggacgcggtcgagtttgttgtgatccgg

SEQ ID NO: 163034 - DNA, 699 bp, Zea Mays
tccacatacctcccaacaaaacggcgtagcagaacgcaagcacagacacagtcgaaactggtcttactcttctcgccaactcgtcccttcctatacggttttgggatgaagccttccttactgcatgctatctcatcaatcgcatgcccacccgtgtgcttcagaattcttcccctatggaagctttgtttcatgagtcacctaactacaattttttgcgtatatttggttgtgcctgttggccaaacttacgcccctacaacagtcaaaaactagctttccgatccacccagtgtgtgtttctgggctatagctctatgcacaaaggctacaaatgtttagatcgatcttccggccgaatttatatttctcgagatgttgtgttcgatgaagtcgtttttccttttgcctcatcttccacaccctctgattctatctccacttcttccttgtttccttctgaagaaccagctatttccaatgaccatatgcagcattatagacttgatttattgctacctaatggctcgctcgagcctccttttgccactgtttcaggttctacaggtagtcgctgttcagatgacccacctgctgctgtcgatcaacactccagtgcaactgacgatgttccaccaccacacactgagcagcattccatttcaccaacaaattgcttggcttcaccatctgctgcgc

SEQ ID NO: 163035 - DNA, 780 bp, Zea Mays
tcttcccgcgaacaacatgttgctctcgtcggtgatcctcatctatcccagtctttcccttcggcgtccacctcgtcatcttaggcccacgggccggctctgaccgtcttcgtctaattttatctaaccctatctaccacccgtctaactctgtcaaaccctatctcgtgcaactcgccgcgcaactgtctctctcgctcggccaggacaagagccaccgtgaaattgacaaccacctctcgtgccctctcctttctatacataccctctcctttctatacatacacacacccctgccatgaaccccttccctcttccttctcacacaggagcagcccacgcgttttcttctctatgcattgtgccgccatggtctaaggagccgcttcatcttcttcctcgcgtcgccagaggagcagccccgtcgtcttcctcgcatcgtctttctcttccttgcgtgcctactcggctgttcttcatgcgtacgtgacaaatcatctccttctccctcttcttcgcctccttcttcctcgtcactacgcaaacatcatggcggccagggagctcacaccaaactccctactcacctggcaacgcagctggcccagcccctcgccggtgcggcctggcgtggcccacacaactagcccgcctcgcccccatccgagctcgcgcagccaccctgcatgatccctggccaggccgatgtctagccgagccttccctgctacgacacgccctcgcatggtgctgttgcgcgtcgctcagccccgactccgg

SEQ ID NO: 163036 - DNA, 409 bp, Zea Mays
cgacaattcccatgttagatatgcatcaggatcatattttccatcaaacggtggtatggagaatttaattcttcctagagagtcatcattttcacgtacctcacgtcgtggaggtcgaccacccaagccatgacgatcacgttgtaggtgtcgttggtgcctaatagattggtcatcatgctcgatgtctgctgaatactccgtagcatcatctcttgtggtaccaacaatggaaccatggccgtcatcatcaccttgttgcctaccttcacgcccaacttggtccatcctatctaagcgctcaataattgctgcaagagaggtgttagtagcagcaattgttcgttccaaagtggtcaatgtgttgttggtaacaatttgtgttgtttctaattgaccattgcgctca

SEQ ID NO: 163037 - DNA, 516 bp, Zea Mays
cacttacaacatgtcaacattgtgctgcaacagatgcacgctcatcacctcttcaccaagtgttccaagtgcttctttggcgaaccatcggtggcgtcggcggtggaggcatgactgcagcctcggatgtctcgtgctctgcatgtgcttagcgaccgggacacgatcttcaccagcagcttctgggagtcgttcaagctagcaggtgccaagctcctgcacaactccgccttccatccgcatacagatggccagtccaaggtgtagttgcatcatcgtcatgcaggctacctgcattggtgtcctacatccgcatacagatggtcagccaatagctctggcaccatgacaccttcatggcattaatttgcaagtgtctcttgctagcccaggacgtcatgaaggaacatcaggacaagaagcggtgcctagtggagtactcggtcggcgactgtgtttggctccgtctgcatcagcatacaactgtcgacaccacgacaacttcctccaagctgg

SEQ ID NO: 163038 - DNA, 550 bp, Zea Mays
atccaagaaagttgtactgtgtgttttatggcgaaaacaaaggccatacaacaaaaacctaccagataacaatctagaagcagaaagaacttcctactgcagccgctcagccatctcagccgaatgaagtattcagtacatcttcgtactactcaccttacatcccgcaatgtgtccaaccccaggaccccaagttacaacaatcttcagcctcgaatgcttcaatgtaggatatgcaacaacacgacagaagggaggctcctaaagtcagcacaattgacaacatagtcccagaaacaaaacacatatgctaagggcctaaggggctgggttagcaagattgaagctgccattaaaagcactcttacatatcctttatctacttatgtttctttgcaattcatttccttcgcattatgaagatgcatgcttctatcaaacttgcaaatgtaataatgtgcttgcaccttcgagtgcaatgaaaaagtaatggcactccaatggaccatcgtcccaaaaacaaagcatatatgctacgggcctaggtttg

SEQ ID NO: 163039 - DNA, 352 bp, Zea Mays
cgccttcttcgcactcgaagaccagcgcgccagctgtatgacttgtgggaccgggcccccgtgtcataggatggataccccggtgtgcatcgggggagacttatcgcgacgtttcgaggtgggagcgggggagtctgcctttaaagaggggttcatccctcgtgtagcagccatgccttgcttctctcccactcgcggcgtcctctcacctccgagctctctgcgcccctttgccttcaaggtttctgctttgtgtcaccatagtttaccatggccttgtaagttcatctcgagcatgcccagactgagtgggtgctcgacatggtataccgcctgcttggatgggatgcgt

SEQ ID NO: 163040 - DNA, 454 bp, Zea Mays
cggagcaccaaatcggtccctcataggtacaatcacagagcaagaaggcaatagagtagattagggttcgggattgagcacatatcacaagaacaagcaccagattaagaagtctcaaactcgtcggagacgtcgactagaggaagaagaagacgaacatcgaaagcttaccgtaacgacgtaaccaaatccgtgatcgaacaaccagccaagcagccaccaggtgaggggaagccagagcctagaggtggagggagcggtggaggaccctaccggagggcggaggctcgaacctagaggcgaggcggcggcggagtcgaacagtgaggcggcggtggagacgaatcgacaaatcacccccaaaatcgcccctaaatcgcagacggatagaaggagggcgagagacaacaggcgaggcaagcgagtgagactgacgaggcagggcccgatgggg

SEQ ID NO: 163041 - DNA, 872 bp, Zea Mays
agactaggtgggatcgcgggttgaatctatactcttctagggactcttttgcaaagttggcgtgactgttataacgcacgcacaatctttgacgtttgatcaagatccgaaggcctacatcaaaccagctgaatcggtattcttaggatataattccatccatccaaccacgatcggacggtcacaaagcatcgaggcgaaggggtatggccgcatctaatccagaccgaccatctaaatccaatggcccagaggccatcatctccacccgatggcgccccacgacggtgaacaggcccctagcggcggcgcccatggccggcaaccatgcataggtgccccggtgaatggagtaacacgcgaaagagctaaaaacagaacagagaacaacgctaatcaattgtgggagttcttgcctcaacagtggtgactgcagtgctgaccacaacgagctatggaatcatggtgaagttctgaaccggtgagcaattccctaagcccagtgcatccccctcgcccgatgattgcccgcacaccacccgcatggtctgccctttacccaagaatgccagccaaggcccgccggcgaccacagctcaaaattcaccccagtggaacactcctccctttgggtgacggcggcggcgaaccgcatggcgcaaaggtatgggtggctggctgataatgttttataggagagggcgacacaaatttatatccaacaggtgcatcccacaacctggatggcaagaatcacgggcgcgagtccgtgtcgaggagatcgcaagcagggcggcgcagaatcagggatgtagttctgatcacggtgtagaagggatgccggcgcgccggccccacgtggcggaggcagt

SEQ ID NO: 163042 - DNA, 801 bp, Zea Mays
gacccgtgaagaccatccaggtcggcgcagacccctcccagaccacctgcatcgtaggggatctgggagaaaaataggaacccgcgctcgtcgccttcctccaagcaaatgtcgacgtcttcgcttgggagccgtcgcagatgcctgggatccccagggaggtgatcgagcaacagctaaaggtttacctggacgccaggccagtaagccagaagccacgaagacagtccatggaacggcaggacttcatccgagaagaggtccggaagctgttgcacactggctttattgaagaggttcatcaccccgtgtggctggccaacccagtcgtcgtgccgaaggccaacgggaagcttcggatgtgcatcgactacaccagcctgaataaggcatgccccaaggacctgtatccactaccgcgcatagattagattatggactctacttcggggtgcgacctcttatccttcttggacgcttactctggtttccaccaaatccggatggctaaggaggataggaggcataccgcttttgtgacagtagatggactatactgttatgttgtaatgccctacggtctgcggaatgccttgccaacttttgtccgggcgatgagcaagaccttcggggacctgatccgggataaggtggagatttacgtcgatgacatcgtggtcaagactagggaaggatcgggtatagtggaagacctgaccctggttttcggcaagctgcgggcaacccgcaccaagctgaacccggagaaatgcatcttcggtgtctctgcagagaagttgc

SEQ ID NO: 163043 - DNA, 405 bp, Zea Mays
gttttgatgaacatagttgtgtcttcatcacttgaactatcttcatcacttgatgtttcgaccactttctttgtcttatgatctttgttcttcttagaggaatcttgttcatttgagatcaaggcatgggtgtctcttgtattgattggggcttcttcggactcatgttattgaatctttgcaaatagttggtgaggtgtcatttcctcatagtcatcacggtcccttatcattcttgctagacttttatccttttctttgtatgctctcataaatagtctagtgaccttggaatcactccaatcttcacttccaagcactcttattttgttgaccaacaccattagtcggtcaaagagtgattgaagtgactcacccttagtccaatcatatcgtgaaagctca

SEQ ID NO: 163044 - DNA, 965 bp, Zea Mays
attgagagtaaatcctgctccaacttgctctgtcaggcatcaaaaactgaatctctgatggtacagtgccctcaacggatcagaacaagcgcaacagaagaatcccaccgccggtgatctccctcgccgtgattcgtgtcgccggcatcaagattcgcgtgcggggtggattgataacatcgcggggtaaggatcctcgccgacggtgagctggaggtcactccggtgactcaccgtggctccccttctgctttgcggctgaaaccgataagctcgccggtaaccgccgcctcccggccgtgcgccgcgtggcctagccgttctacagcaccgccgtgacaccttaaggctgtcccatcgtcgccggggagcctgccacgccgcgggacacgaattcaccgcgcccgccttcttctccatttccggccgccgcgcgtcctccccgaattcactggccaccgcttcccctcgctataaattgagtgtccccgccactccgtaggataattacgcatcagttgcaccaaaccttgcaccggattatccaccagtgactgggaattgctcatttcccccaatcacggtttccgccaccgtagaactcaaccccgccgcggtcagcccaactcaggtcagctcttcccctctgctcccttgtctaagcattcttatgcgcctgtgatgctcaccgacccacccaattgaattggaccgccaccaatcgtcgagaacgcgacgatccagccgccatgttctcggtcaccgtgaccagagagttttagtgcgcgattggtgaaattaagttaggggaaacatcgattaaggtatgaattaggtgttagtcgtcggagagcgccagtaatagccccaatcggccggcgtaagtgctcgccggagctcagccgtgcttgaacgccgtcggggacctcccagtgcgaggaaacagaagttgggggacccctgtg

SEQ ID NO: 163045 - DNA, 366 bp, Zea Mays
ctggaaactgggaaaccagcgttcaaagctggagtctgaaaggtaacattctatactattacaagcataccaaatctcagcaaccttggtctgttggataccaggacattgctatgtttgaccttcgcccaacacagcatgcggttgatgacagcttgcgtcttccctcccctttcaagagcactatccacctctgcggaaaagatgtaccgccggagaagaacacttcagaagatgtgtgcaacttctcaatcaccattttgttacgagaataccgaagagccccaagtcaattctttcagcagcttactcattttcatactcatattcaaacttcactctataaacagtataatttatagtaca

SEQ ID NO: 163046 - DNA, 816 bp, Zea Mays
tctgatggctgttgttatacgagaactctgcataaggcaaactagactcccaacttttatcgaacgttaacacacaggctcttaataaatcttcgaggaccttgttgaccctttctgtctgaccatctgtctgggggtggtaggcggtgctgaaatctagcttggtgcccatagctttctgaaggctcatccaaaatttggaggtgaactgggttcctctgtctgacactatcgtccttgggatgccatggagtctgactatctctttaagataaatccgtgcaagggtggctcctccaaaggtagttttcactaggatgaagtgggctaccttggttagacggtctattattacccagatagagttgttccctttttgcatccggggtagttcggttacaaaatccatgcctatctcctcccacttccattcgggcactagaaggggttgcaataggcctgcaggcttctggtgctcggctttcgttcgttggcaagtgtcacaccaggccacataatgtgctatctctttcttcatccctctccaccagtatctggttgtgaggtctaggtacatcttggtggttcctaggtggatggagtaggctgagttgtgagcttcatcgagcaggacttctcgtgcctccccttttggtacacacagacggttcttgaaccaaaggactccttgttcatctgttgtgaggtccggaagttgttctttgcgatctttttccataagtcttgttgtctctgagtccaggcattgagctttgcatatgaggtcttctagcattggtttgacttctaggctgc

SEQ ID NO: 163047 - DNA, 899 bp, Zea Mays
cgcgatcggtaccataagagaacatcccttctcggatggatccgcgatgcggtgcaggatgcctttccggtctgggatgcaggagagggatccaaagcggaaaacctccccgacgttgaagatgatcagggtgttgaagatgatggccatggagttgtcgtgaatcaacatcgcaccccctacctggtgcaccaactgtcggtgtttatgattcgactgcgcaccataaggacagaacaacgtcattgatcgtgactcgttggtacatgcggatgcacgtcataacacaaaagagttatacaggtttgggccgctagaaatagtaataccttacatcctattggtgttgagtattgagttttgctagtgtgcataggttttagatgagttgtgggcggtgatggatgaattctcctatcaatctaatgatggtgtggttgctatgagaaggatgatgagataagatgagatcgatttgtaggggtacccctcggccttatataggggaccagagagatatccctttacaagccatgaagtctatctgatcctatctaagtctatctttgacgtggcaggtgctcctgctcagccagagttcggttgccttttctccaagttatctcctgagtatctagctcttcaggtacattcaaacagtacgcggggcatcaacgctcattctacgacagccacgtataactcggctgttttggttgtcacccttcttggtcgaactcgttcagtctaccaaattaaagaagtgagaagtttttaaggatttatggaatttatttgtttcctagtgctctcataataaagactaacacgtacgaagcctttgttggagatctccggttagtatcattaagattttcctacacactagctagtgttgg

SEQ ID NO: 163048 - DNA, 282 bp, Zea Mays
gctgctcctgaggtggctaaagaaggggatcaattggtggatgagtggttggcagaaaggcaagattatactgctttacttaagcaaaagtcggcttctgctcagaacagaatgaaaatacagactgacaagaagaggactgacagagaattccaagttggtgagtttgtgttggtaaaacttcagccatatgtgcaaactatagttgttagtcgaccttgccctaaattggctttgaaatattttggtcctttcaagattattcggaagattggattggtg

SEQ ID NO: 163049 - DNA, 752 bp, Zea Mays
cgggggtcctagtgcccggacgttggggtaaagcaccctagcgtgctcggcatagttctaatttgcgtttgcactgtgtcccggtccaagattgtccacctggttgtggctccggtgaggttctgccgccgtagggaaggtacttgcgccaccgcaaacacccggtgtttggggaacgggtactatggtcgttggatctccatccagcgcttagaattaggtcgggcatagcgcttccacgggtgtgcagttggccgttggatcgtgatcccgtggcccaggattggatcgtgggtgaaagctccgtgtaccatccgattgtggatgggcgtcggggatcaaacgctgcataccaatttggttggaccaattgagaccgtggatcgtaggatggaggggcgagattagatcgggagggacccttcagtcacatgatctgagccgttgaagtttggtctgagggtccaaaatgaataccggttcaaaggggacgcagatgcaatctggaccgtccgtggatgatcggatgaatagaaacaaccgataccccctttcggccagggactttttcttatgagcccctgaactccatataaattaacccgctatcctaagtgactatgcctgggtcttgcagattcttgcgccagagcccctgcgctttctaggatttgaggcccagtcccgagatcagataaaacagggaaactaatttaaaaatagatttttagtacaaatttaattgcagaaac

SEQ ID NO: 163050 - DNA, 529 bp, Zea Mays
ccagacgctacgccaagccaccccccttgagcgctagcctatggtaaggaaccgcccccacgccttatttgcctcgattccttttcctctgcggtgacctggagctcaccgatgccgctgcacgtcggtccgtcgctcccgcacagcgtccggccagttcagctccacttcgtgcctgcgttttggccctaggtgtcccaaacccctcactggagcccacgccggcccggtgcactcgatcacccctccttgcgaccaggattgctcgttggagtaaccctgacccgcccgaagtgccccctccactattcaaccgtttccaaccccgctctcacgacaaggacccttcctcgagttcgctgggtccccctcaccgatcctagccagctccagcgacctcagaccccctagaacccgcaactgcctcgtctccggtgacttcaccgccgcggacgggaacgacgctgcccaaagccgttaacccccctgggcgcttgatcccaaccgctcgcctcttatccaacggtcc

SEQ ID NO: 163051 - DNA, 620 bp, Zea Mays
gatcatgagctgcttggcatggttcgtttcagggagaaatggtgctcgacagcacaggcgcaggaatagaggcgcttcggctggcgaagctctgatggtgacggcaaggacaagctatcttcttccccaaaaagaacagcaatgaccggaccaccgtgcgagagagcagcggcgcaggggacatggccgcgacacagccgctcggccggggaaatagagggtgcgcaggggaggagagagggatagggctcacctgtgcctggtaaccgtcgagacgagatgcctgctcctgcacgatttggatctggggagcgagaaaagggttatgcgacgacggggtggatatatagaaaagaacgagggatgtggttgtcaaattcgttgcggatcgtgttctagccgagcgagagagactgttgcgcgacgaattgcgtgagacagtataagacggagacagagtttggcgggtggtagacagggttagataaaattagacgaagatagtcggagctggcccgcgggcccaagatgacgaggtggtcatcgaaggggtagacggggatagacgaggatcgccgacgtgagcagcatgtcgttcacgagaagaagcggttcgttga

SEQ ID NO: 163052 - DNA, 896 bp, Zea Mays
aaactattgctaataagtaggaatatgaagaattcaaaacaatagatcatcttttaaactaaaaatgatgtttccttgatgtcaagggcattgtattcgcaccagagggtattagagtacaactagtggatgaagatgttattgggctagctaatgaccttttgtgataccaggtttcctataatcccctctatttaaggcatacctagatggtttttatatccactcaagaaaacaacacacatcaatatgccacatcgtttctcaaaataaaataatgaccatggaaaatttatccaaattgagtgagagaactgtccaaacataggttaaggttgtaaggcacattttttccaccatatcgttgctaaaaagttggaatatagagaattcaaacaatagatcaccttttaaaccacaaatgacgtttctatgattttgagggcactatattcgcacgagagggtattagagtgcaactagtggatgaagacgttattgggctagctaatgacttttgtgataccaggtttccaataatcccctctattcaaggcatacctagatggtgtttatgtccactcaaatataacaccatacatcattatgccacactatttctcaaagtaaaataaagaccatgggaaatttagccaaattgcgtgagagaactgtccaaatataggttaaggttgtaaggcaccttttttccaccgtacaattgctaaaaagttggaatataaagaattcaaaacaatagatcaccttttataccacaaaagacgtttcctagatgtcaagggcattgtaattgcacgtgagggtattagagtacaactagtggatgaagacgtcattgggctagcaaatgacattttgtgataccaggtttccta

SEQ ID NO: 163053 - DNA, 608 bp, Zea Mays
gctggaagtgacgtggggttcatgatggaagacaaagctgcgccaagcacgaccctgagctccaccataagactaccctttggcctttgggacccgtcgaacgtcgctacatcaacatcaagcttgctacagggacccgtatgccaaacagacgaggcggtacgtcataccaagagtacaacgacgtacaaccctatagacgacgtcgggaggactacaccatccaagggcaaccggccgagcaccctccagtagaatacaagtccgcattgtaaagtcctaccttagaactataaaagggcaggaccactttctttctagggacacaagcacacttgttgtaacaatctccaagcaatactacgattgacactacactatagtaaggtgcgagtccgaaccagtataaccccttgtctcagatttctcgttgagtcccagtgattcaccattcggagtgagtctgtgctagcaccttctaccgaacacaaatctcattgtcccttggtttccgcgacaactatgttaaaatcactatagggtactaagtgctacttatgatgctggactagggctacatctctaccagccttggtcctagatccacc

SEQ ID NO: 163054 - DNA, 457 bp, Zea Mays
acattgatccttagctctaatcctaatgctcccattgacaaaaatgtgtctaactaacctctctacctcataccaggagatggcattgggacgcgtgctctggacacgtcaaacccgagatcttctctttgtgctcgacagtgagacaaacccgacttctcccctctctatctcttgatctagtcagtgaaacttgcaagcctccacacaccagcgacaaaggaatgtcaggggaagagatctctcaatgggatcatggccataatctcaaagatttggagccaatccgcgcttgaacacgacctctctctgcgctgcctcgtgctcgacgctgtgccaggcgccagagcgcgcactggcgctcgcccgcgcacgcccagagcgcttgtcagaacctcctctcagccacgctcgcccacgcctttaaaacctcccctgggcgcgcctcacctcaccc

SEQ ID NO: 163055 - DNA, 543 bp, Zea Mays
tgctgctgtactgcatacgattcatttacttgtggacagcttttctttggtaggttcctgcatgtatcaatgtgaattcatttgttttcttttattcatgtttgcttctgtgccatccatcaatctgtgtacactcatatttttttggcattcatggctgttgaatcctgcatgagatgagtaatttttggtgtcttgtccaatgggaaaaccatgggattgtatatttgtttgtttttttggtgcatggaagcaaaccttgtgcaaggttataaaaagtatgtcatatttgcatcaagtgaaggtgcattgttctaaatgaaatattattctatctgttagcaatttcattattcctagaatgtatagtgttctgggtctttcctgcttgatcttctacatggacgatttgccctaggcctgctattttcatgcctatattttcactttttaatatttatcattcttgcgctttgtatcatcaaggttcaccacttgtctttttatgtattatcacctagttatttgttcttgtaaatgctt

SEQ ID NO: 163056 - DNA, 316 bp, Zea Mays
ggcgagtgccctggacgctggcaggttgcggcggccggtggcgggagcaggatctcgcggccctggggatgcggccggtggcaggaggccgggagcaaggatgcgccggtggcgggaggccaggagcaggatgcgccgatggaggctggaagcaggatgcgccggcggagggagtggggactggaaacgtggggtagccgggtaggtggcggcggccggcggctagggttggagaatggatcggccgatcgggtttgccgtttgcctcttgtccgggtgccgtactgacacggttgtgtggagtggaggcaaggcg

SEQ ID NO: 163057 - DNA, 494 bp, Zea Mays
cttgatgggatactccgtgtaagtcaaatcaccctgaacactgagctcatccattggtaactgttcctcagggacacggaggcacttcttaagttgagaaacgtgaaagacatcatgtacatctgacaggtgatcgggtagttctagttgatatgcaacttctcccactcgctttaagatcaagaaaggtccaatgaagcgaggggacaactttcctttaactttgaatctcctcataccctggattggtgacaccttcagatacacgtgatcaccctccttgaactccagtagtcttctccgggtatcagcatagctcttctgccttgattgtgcaattctcaaattctcccttatcattcgcacttgttcttctacctcttgaataagttcaggcccaaagaactgtctttctccagtctgatcccaacatagaggagtcctgcattttctgccatatagagcctcaaacggtgacatcttcaaactggcct

SEQ ID NO: 163058 - DNA, 847 bp, Zea Mays
cggagttaaaacgtagaagttatgaattttgtaagcatttagtatttcctttacacaagaaatcattttctaggtctattttattaattccagcgaataactgtactgcagacacaatttaacaggagttcagggtttagtttgtaaatcagaggtcttctctataatgatcttaacactgactcgggtggcgggttgatttgagaaaagccgagggggtctttagaataaatgccaaggcgaaggggtatcctcacatgacagccgcccgatcgccatccggcggcctagattagattcgcgaaagggtatgctctattctaatctggtccctacacccgagatccgatggtcgagattcctataatgcctgatctaatactggccttgcgatcacgatccaagggctatcctaccatctaatctacatcgtccaacagaatatcaacggcgcacagccatcctccacctctcgaccgcccagagcatggcgccgccacccaggcaccacgacggacctcgccgtcgccgggtcttcttccgctgcggcccacaatttaccaccccgactaacgcaacacgatgccaagattaaaacgaatcgagtttgtaagctcctaccagccgtgacgtcgaggtgagggcggtccacggagagacgcaatccacggcagccttccttctccgatgagcaattgatgccgccacagtggtcgatccaccccgtcacggccacggacgctatccaagctatactgtggagttccctgtactgacttcgaggccatctcagtgacagggacgcaggtcgacggcgcggaggcggagcagagttcatgcggcggtg

SEQ ID NO: 163059 - DNA, 617 bp, Zea Mays
gggttatgccgcggaagtctctgcccacgcatcgtggcggcgaagcgtcaccggcgagcgattcaccatgctccagtcaccccagcggcacaattgggcgatgaagatctccggcttggtcccccgcttccgtctgacacctcgctggaccactatgtcgacggatgtgcgcttccacggacgcgcccctcacccttgctttatgacaatggtgcgcccgatcccctagccgcgattatggctggtatggttgggagtttgcgggtaagcggaagaggtagggaggcgtggctcaaatagcaccagttgtggccccggaggcagtttcctccattccatccgtgcgacgatctcggcgtagctgttaggagttcactgcgaattgaccgcgagggaggaagacaaccgcgacactgacccagtggtcccacccgcaatgaccagcagagacagcgcgtcagctggcaaatgggcccaatcggtcagcggcgttggcgaagttggacgcgggatgcacacggtgcggctggcaatgtgccccctcgatgtcggcgaacccagtcattctagtgcgcgcacgacagatgactggtggggcccaggtgtcggcaccacag

SEQ ID NO: 163060 - DNA, 665 bp, Zea Mays
acataccctcccgtgcagctactgcgcctgcccagcatccgatcctgcccgcgcagctaccacaccagtggcggacgcaggacaaaatttcaggtgaggcgataacgtagaagacaaatcaatataccagaccatttgataaaaatagtttcatgataataatatagagattaagtgataatataagtagtgttctaaaataacatgaataccgaaacttcattttggccaccctaaagaagagttggagagaacaaaggggtgaaccggcagggactggacgttagggcaaagcgggcgcatcagcacgtcggtgtggagagtcagcgactccaccgtaaaatgacgacggtgaggcgacaataggcgtgggattgcgagtgcaagcgacgatgcgatggtagatggcgacgatgagacaaaaggcggtggcagcaagcgacagccattgtcgcgttgcgacggcacgacgggacccttgtgagatagcgagggcgggtggtgctatgatgccaaggtagaatcccactaatatcctacccatccgccggtgcggattagaaggcaaagtagttgttctggtacaggatcccaaagtagccggtgagtcgtagtgaagcaccgagaaaaagttagatcaaagtctagtctttattaaatttagt

SEQ ID NO: 163061 - DNA, 428 bp, Zea Mays
gacaaaagcgagaagcttgcagggaagtggatcagagaactgccatatgtagtctagagcctgcgaacccaaccaagtcgagctctgcatggaaacaccccattcttcatggtatatgggtcggaggcagtgctaccagccaatctgatctttggggcgcccagattaacctttgaaagcatagccgaagcagaagcaactaggctagaggacattgacgtactggaggaagaacgactaaatgtggtaatccagttggccagatactagtagaccctgaggcgcgctaccatgacaaagcggtgcggcatcgatccttctcagtgggagacttgtcctccaccgagtactaacgggggagggatgtcacaaactatcgccaccgtgggaaggtgatgtgcacccgttgggtgaatgcccgatctttc

SEQ ID NO: 163062 - DNA, 701 bp, Zea Mays
ttttcttgaatggggaaaccaattttggtatagaaaatttagattactttgatggtcattaatcccttaatggctgtggagaaggtggaccccttgctggtggcgtagacaatgggtcaccaagacgatgaggaggagaaggtggtggagccctgaatgacgatgcttgtggcagagacagtgggtcagaaagaggatgaggagaagcatgtaaattttgaggaggttatggcggttgtacaataggatctgcatgtgatgactgttgtgttaggggatgggcatgagacgatgacggtggtggatcaaccaatttgacatcccgtcgaggccaaaggatgaaattcttgatagcctgtccaagtgtctcattaccttcgggcctagggatgcctaacatgtcgtccttggatccttggacgaccatcgtcagttctaccctgcaataatcttctagaatgtcgcttctatggaacttgcgtcataggatcataaggcatgtggctactttcttcgtacgatgatcgttaataacatatcttataactaggggtcacaccataggccttgtgatgtcatcaactagacagcggaccttatttctcgttgacgcgatagagcttgggacagttgtacaatcggtggaagacggtggttgagctgctggaattagttgcatctgtggaggttgagtggtcgtc

SEQ ID NO: 163063 - DNA, 447 bp, Zea Mays
tggggtgctctacgcaaaattccagggccatactataatgttactacacctgtattggatggcgggttggttttacaaaagccgaggggctcaaacgcaaaatggttatggcgaaggggtactgatcagttctagccgttgaatcttacatgaagggccatgattagatcggggaaggttattatgaatcgatatgcgttcactgccctaggatcaaagatcgatagcccgaaatcgtccacgctacagatccagcaagggcactctgatcgatgatctaaggctgacattaacccacgcggggagtacgctcatagatccattggatcaacatcacacgatccctatataccatgcgaacgggggtacgcagtccactcatcctgaccgcacgtgggtcgattgatgtctatcctggcaccaccatcaagtaccagatgaacggtc

SEQ ID NO: 163064 - DNA, 974 bp, Zea Mays
gaggttctccagctttaacaaaaagcggtggacgggtttcagaaaactccaagtatgtggtgtctcgtggcccttgaggttgacctctgcctccctattgctgaaattgattccccaccaattcacgcaggaaacgtgtgttgtcagcagtagcattgactaaggcagcgatagcctcagccaatgtaggaggtacaagtggcgggtttggagtttcctccccgccgctggaagttcctgccccgtcatgagcatgagttcttgatagcatctgaggaagaaaaacatcctgaattattacatgccgaaaacaccacctttattacattatgctgaactggtaataagtatacatactcattagtacaactcaacttccttatttactttacataaggacactacttaaactacactactctaattatcttcgtccttggccgctcctgctccactgccagcctcgggagaacgttcatctgcgaggttcatggaaggaggggctccaaaaaggtccaactccccatcaggtcctccactagctgctctagatggtccggctcccgttgctgcaacctctggtggcacattcggatgtaaccggtcatataacacgtgcacctcttcatgaagggtgttacaatacgcttgcagattttaaagggatgcgcttagttccgctacccgggctagagcatttgcctcgcagtcccaggcgaaagagcatgaatttacgacccagtcgatagccatgtctcgttccacgatttcctgctgcaagagattaacctccgctaatagctccgcaatgtggcggctatctcgcgcatgctacctattttcatggcatagttctgacatgagtcgctccaccctggcctccatatcccctattggatcgttgcttccactgctgctcccctcatgtctaggagccaactgatatcgtggcacaccacgaggtccggttgcct

SEQ ID NO: 163065 - DNA, 722 bp, Zea Mays
cgacgctgctgctgcactgtcgactggtcggagatggttgacaggacgcaagacactggcagcacccgggcgtgatgaggtggtggaaggagccaagaagagcacaggtgcaaacactgcccatgtccatggagcggaaacaactgtagaggttgccgttgtcgggcgcaggagcagaaccgccggcctcgtgccgttctgtgccgactaccgcactccgagaactcacccgccaaggaataactgagacttaaagcaggcaaacacttcttcccctggttctagcctctgctaaaaagatctatgctatcttccaactaagctgctattagtatcgctcattacgtagtgaagtgtggtttctgcctttctgatgtaaacaaccgggcaggttataggatgtaacagcacggacactgagatttgcatgatgtttttatctgaaaacatgtcgatctcgttgctgcaggagcgaaccaggaagcggatgcacctgacctgcggaagctgtacatggcccggtgagtgcgtcgccatcttgcttgcttcggcgattccatgcatttctgcatggtctgctatgctctagcagtgttatttgcttatactgccaggccgcaatttccttccagtgtaaaaggagcgagggcccggtaacccatgccacgttccaagcaccaaggcatgccggcggcggcggcggcggcacggatacatcggcg

SEQ ID NO: 163066 - DNA, 529 bp, Zea Mays
aagtgcaaacaatgcctcagggtgacgtcagattaaaataaaaatataggcgaagacacctccgagtgcaaaaacacccccatgtgcaactaacacaacgacgacatattaaataaaatgttggcaaacacacctccaggtgcacaccatactaaataaaatactggcgaagacgcctccgcatgcaaaacatatgcccacggatgacccctgatcaaaacaaaacattgttgaacacaaccagaggtacgaagtctcttgagagcatagtaaaacaaatagcagcaaaatacacatgtggcgcgggggcacccaaaaaaagtggtctaccctaaggctggcgcccgtcccccatatgcaaaggaggggagagggcggcgcttcattttatttttgccgatcaaagacaaccgccagcattgccagaatacattattagtacaaaccactcttagtgttgatgaagtcatcattacattttcatgtggccccacaaccaaggacttcaggactcatccttcagtataag

SEQ ID NO: 163067 - DNA, 660 bp, Zea Mays
ccagttcttgaattgaaacggcttgtccattgcttagcaacaaaattgaccacattctttcctgccttcgaaaatgggctcgtatcaatcatatccttgtctgcaccgtttgtggcttctccttcctaggaggtgttctttcaaacatgcatggcacgtacaccctcttgggaggagccatcactcgcctcatacatgccaccactcgcacgagcacatctcctaagttctcctcctctctcgatgcatacaatgcaaaccgcaaactcttcatagttctcatcgtatcgttagactattatggcaatgatcctaggcttccttttgtgtgaggtttgattgtctatttgtttcctcctacgagacgaacctgccaatgccaccctccatacctcctccgttatccttgctttccttttatcttggcccttgtcaatcttccaccgaaaagtaatcgacaacgtccagcggaatcaacactgcgacaaccttgcacattccccgcacgtgatgcaaggtgttgtttaaaacgtgtagcccccttcccaatgtttcttgcaatacttgcacttgaatatgggaaatatgttgtcctcctgtgttcccaaactagaccgatatgatctgacatccctaaaaatagcaatagtttgaactgtt

SEQ ID NO: 163068 - DNA, 533 bp, Zea Mays
cttcgaccgtggttgctgaagacaattctgatgattctgtgtctaagtgttttgagtctgatgattctgggagttcgattgtgtggacagaggagtcttcggatgaggatttggattactttgcggcattggatgtggctgcggcggaggcttcaccgcgtgtaatggatgatgagggtcttctgggtgcgagtgttgggcataggcggcgaagggcggtggcgaaatggagggtgagtgagttgccgcgaagtgataggcatcgtcgtggtgaggtggaaggtggtcgccttcatgtggacgggactggcaagcgggaattgttgtcctcgccggctagggcgagtgtggttgagggggagctgcgaagtctgtttgcgggtgaggaattgagggtaatgttgttcaactatagggagatgggtatcatcccgaaggttgagccaatgtaatgtgtgatgccctcgctgtatgtatgtaaccatactcttgtgtgatgaagctgcgcgctttcgttgatcaggtcgctcccg

SEQ ID NO: 163069 - DNA, 689 bp, Zea Mays
gggtcttcgccggcgatggacatccaccatggccgactggcgagagagagaaaggcaacaagagcgagagaacgggtgtgttgccatcgggagggagttcaacggagccgtgcactggacgtccaagacttccctgtgcgtgcggtgtagagcagacctggcctcctcgccgggcgtgaagactgcgcgaacgccgtcgagtcgtggacctgggcgtgcttcaaagagcgccgcggtttggccttgccatcttgatcgaccggtaaaattctttccaccctgttcgcattaacaccccctccgcgtagcactcttcagatccgggttttgggaaccagagagggaaactatgcatctccggcgaacttcattgtcgtgagcttggcagcgccgccgcgcgtgggctgcttgatggggttgtagctggagaaaggaacagtggctgtcggataggcgatggatggacgagattatggcatcgtataccccttcgcgcgatcggatttgggccgtagatgcggaatcgggccgttctgatttggttagggcgtggcaagtcatcgaccgttgatcccatatccaatggacctagttgcatacagattcgttatatttgagatctaaccctagcccttgatttttaatccaacggctcagaactacagataccctttcggcctggaagactt

SEQ ID NO: 163070 - DNA, 465 bp, Zea Mays
cgtcagagttataggggcgacgacatccagtgacctgtgtgcccgaggctaggcaaggctgcagctaaggggctccacctacctaatcgccaaggccaagacggtggcaaagaatggtgtgaccgaaggtgtccaacattagaaccccaggaaggaggttatggctgtgttgtggtgcaggatggtgagaccgagacttagaccctcgagcaaccagtcaatgggacgcgaccgtggcgaactacagcaatgagggcaagacacgacaacaatacttcatggcaaaaaatgcaaggaagtgcgagcgatggatgagtggcactacaacgatgggaaaacgcgacgcgtagcgagatacgccgagctagcccctgtttctttgcaacagtagcttgaatgagttaaatttgatcaaactcatgtatatctaagtcaatgtaacacgaaatgttaaatgagctaaat

SEQ ID NO: 163071 - DNA, 325 bp, Zea Mays
aagaaatttagtcgataaaaatcctttgcgcttcaattgtaacttgtaagtgataccataccatcactttctaaaatgttcaggttgcataaggggccaataggaaattaaacaaggcatatgctgttctttattatcatgtaaatacactcactgactactggagctacacatttgaagaattatactgttcaagcgattacatttcatgactacaaatcattttagtttttgagatgtcttgcataatcaccataggttataacatcttctgaatcaatatatcttttaactgtatttgcccttgccttttctaaggttttac

SEQ ID NO: 163072 - DNA, 488 bp, Zea Mays
cagtcggcttccctcttccgtgcgtgcgcagctagtgtgtctcgttgacatctagacccggggtgtcaaccctttcttctgggttctgtgcgtttcgatcctgttccatggatccggtcgcgtccacatgggaaattatgcgctaggttgttaggatctcagataactagtgcataaatgcatgggagttgccccctttccatcccccttgttatcccagccattgcaacaccaaggacacatccactaggcaccgcctcggtgaggatcgggccattgtctaaacacgtgctcaccacgtcatcggaggcttacttgcgggtccaagaactccatcacgcctctaggattgagcttgtggtcttcgcaggcgagggggtgccctggtccgcaaccaattgctcatcggagtgtccgccgttgcgaatccgtacccaaccgtgggcagccctcacggctaccccatcttcggtaaggcttgtcttcat

SEQ ID NO: 163073 - DNA, 376 bp, Zea Mays
gttgaatcagccaggcctcgatacagatatgcggggtatgctctgtctttcagtggctgaatgttcttgaaaatgaagtcggcaaccacagtctctgcagtcaaacccctctctttcagcagcccaacctcagcaagcagagcccctgcctcagccacctcctggtccgtgggggattcggtccagctcgaagtgcgaacatctggctgtctccctgaccgtggggggagagaattcccatgattctccacgatgaaccattccaggcgccatcccttgatgctgtccttgagtgggatgtcgagatagtcagtcttcctcccacgacgcatctccaaactcgcgccccccacaagctggtgctgccctccagcca

SEQ ID NO: 163074 - DNA, 743 bp, Zea Mays
atttttggcaacacgtctaatttttaaggtggcatattaaattgatacatgcaaaggtgtgcggaaagccggaaactcaaaaacaagatacgaaggttaaaaacttgctttcttgaaaaaggcatatcacagattctccacacatattgcacaataattcaaacccattctactgccacaaaaaaggtgaattggtgtgtgccagttttgccttcgaaaaccaatccaatccgattctatcaaacttgcatagttgcatagagttaaaatttatgggaaaaaaatccttcagtgtgttccgtcaatatattacaaactgaaaaagaaatcaactaattacctctcacaccacatcagtgttattaaaactacgtttaaacggtgtttatacatcaaaacgctaattagagattgaaactctgaaatgttaaacaatatggtctaaaacgatgttttacaacgtttaaactcaatggcttggcatttaagtgttctaaactgtaaaacacgacgttttatgtgttttaatcattagctactttggtcccagtccattagttacttttgggcccagtccagtctagtctctacgtgcttgccctactcccctgacttgaagtccgatggctagcagcacgcgtgctctcctctatgctctctgctgctgtcaccagaaggtgctgatgctgtcaaccgctgcaccatgtgcgccctctccctccttgtcgagtgcgccctctcct

SEQ ID NO: 163075 - DNA, 611 bp, Zea Mays
cttgaacacaaacgtgttcagcttggcaagatgaagaggaagggcatcacctaggggccaggggagcagcagcatccgtcctcgctatgctccaccccaagatacacagctcgtccaagaggagggcaacagtctcaccagcgtcctgttcaggagacacctcaggctacgcctcagactctgtgtccttgttaggctaccccactggcaccccgatgagacctactggctagaaaaccgctactagcactacctgcttcaagtgttgtgagattgggcactatgccaatgtttgtgctaagaggaaccccaacactccattcgaggcaataattagggcaagcagactctgaatccagccaacaaccgtggatatagtattgcgagggttaatcaaatcagtgttgaggctactactgatggttctgacatcgtcattggtacgttcttcattaattccgtgccagcttctataatttttgattttggagcttcacattcattcatatttgctcgctatggaagaaaattctgggctctgcctatagtgctagaaaagagtaccatagacttaatccttggcatgaactggttaaaacggtggaaggcag

SEQ ID NO: 163076 - DNA, 381 bp, Zea Mays
gacgaaacccctgatgggaaatggctgaggagcctactaaaaccgaggcctctccatgagagtctcccacctcgggtagaactccgcctcgcccgatgttgccaccactccgtctgagtcgcccgagccaatctcaggcagatgatacaggagcgcccaaaaacaagaagggaacacccgcatttaatgcgcgtacctaccccatgccgtggtagcagagcacagtggctgacaagacgacaatcacatctgggcgcaacaacatgattacgtctccattacagtgcacacacgtcgcctaccatcccccgatgggacatctaatacaacaagacagagtagactgccctcgggtgcaattctccacctcgtccgacgccg

SEQ ID NO: 163077 - DNA, 909 bp, Zea Mays
atatcattgactcccaacatgctacgcacgaaccatcgagctatcgtcgacttcgtcgaccgcaaaatcattatgtagtatatctcatagtgtgttgctggtgctaaacaccgagaaaagcatttgcttccaaagactctaaactatgaaatatttgaactgttaccggttaggagctcatatggagtcttcttgagaagtcgatgaaggtagagccgatttatggcacgacaagtagtgttgactgcttccaccccaaatcgatctgaagtcttgtacttatcaagtatggccttgccgcaacaattagtgtttgattcttcctttctatcgcaccattttgttgtggtgaatatagagtcggaaatccatgcttgattccttcttcaagatagtccatcacttgtgtattttttaattcatttccattgtcgctccttattttctagattctcaaattgaactaattttaagcccttttcaagaatttcttgagagttcattgggtttcacttttatcctgcaagaaaaatacccaagtgaagcgtgtataatcatatacaataatgagaccatactttttaccattaatgcttaagtaggccaccagaccaaatatccatgtgtaggagctctaatggccttgacgtcgtcatgatgttcttggtgggatgatttgacccaacttgctttcttgcttggcaagcactgcatggcatgtctttctcaaaacaaacattggttagtcctatgacatggttaccttttagaagcttatgaagattcttcgtactaacatgggcttgtcagtggtgacataaccatcccatgttagcttttgcaactaagtatgtacaaagttgagttttatctttcgtgaaatctactatataaagattttcctttaac

SEQ ID NO: 163078 - DNA, 616 bp, Zea Mays
gtttggaccttacctacagcagggctgtcagtacaacactggcagttgaagctaaaaatgcaggacatggaaaatcaaagggatatgcgggcgagagaacaaatcaaggacctgaaaagagaccaaggttggtaatccgacctttcaatcaaaatcgttcttcgcctcgcccaccttcatatccattcaagcagcccatctgtattcgtcccactactgcccccgctcctaacaatcagccgagtgcccctggtacccgtttccctgcccttctcagttcttttcggtgggtgcttcaactatggaaagtccggacatttcatcaaggactgcccatatccgaagaaaaataaatccaactttcagcagactactgggaactcaaatcaaggaaaggggaacacgaccaacacttcaacgggcaagacttcaacgggcaagaatttcaagaaaactagaaggggaacatggccaacacttcaacacggccaacacttcaacgggcaagaatttcaagaaaactggaagggtctattatacccaggtgactactacactggagggcgaaccagtgataacgggtacgttccttgttgccaataacccaacagatatc

SEQ ID NO: 163079 - DNA, 705 bp, Zea Mays
ctgagacaccaaaaacccccattggaaccctggaaaaccctaaatccaaaacctaggggcctatgtgcaaaaacagtgcacatttggactaaagtgtcaaaagtactatgtttaagcatataaagtcacatggttcacatttaggaagatttacaagccaaaccctaagttttggattcatttgcaaaaaggaccccaattgagatttcactctaagtctgaatttcagatttgtgggctcaacttttgagccttgtaactttcaaactctagggtctttgtcctatgtcaccacatcaaagttgtagaccaatcataggagaacaactttgcttaagaatgtgagctcagttgttaagaagaatttagagataattaagtctaaagttggactgtcaggttactaaggtctgaattttcagacagacagtgcaatcactacgactttgagcataaattcaactatggtccagcaagaatctgcccatggctgctgtgacaaacttgtagctgatctatagctctacaattttgctgcagagcatggagtatgttaccattgaaaattgagagaaaatcatgctccaagtcgctctgtcagttcatctgatgggtgctctccatggtacagtatttcgatggatcagatcgccagcgcgactgtcctcaccgctgatgacttgctgccgcgattcgtgccattgc

SEQ ID NO: 163080 - DNA, 299 bp, Zea Mays
gacggagaagtatgcggaaatctacattgaccagatagttcgtttgcatggaataccaaggactatagtatcggacagaggagcaccatttgtggcacgattttgggagcaattgcaggaatcacttgggacccatgtaatacgaagctcagcataccatcctcaaacagatggccagaccgaaagggtaaatcagattttggaagacatgttgagggcatgtgtgctacactacgggaaggattgggacaagtgtctttctttggcagaattctcctataataacagttaccagtcta

SEQ ID NO: 163081 - DNA, 504 bp, Zea Mays
gctgcgcgcatgcagctgactgggcgaatccaccccatccggaccataaaaacctctcgcacggcactcattttcccctcccaactccagagaacgcccaaccgagagcatcatggtgttgcgtggtagaagcagtgggggagaagaagccgccgccagaggatcccatccgtaccgacatctcgtcctcggcgcaccgccgagaagaatcctctgggcacggggcagccgtccgtaccctcggggtgaatcgggagtctcggggcgcggagatttcctcgccggcgtagtgtaatcgtcgtggttccctcgcggacgagtgggtcgattttggtgctttgggtcttggtaagcacaagccttcctggttcgtctttgccccgctacgtgtagagcacacccggtgtgagtgtagggaaagaggttacaggtttggagttctgcggtcatggcgtccgccgttgttcggctcggcgacgccgctgtatggttcgaaggagggag

SEQ ID NO: 163082 - DNA, 526 bp, Zea Mays
cgggccttgcttttcggaaagaaatgagaatcaggacaaattcaatccataagtgccctaggtactgtgctccataactcaacacgacagtagagcatccaggggaagaccgatgcgccgggtctccagctctccatcacaaatggcctagataaacacagctacacaggtgacagctatgttgaacgtgctgggggacattccaatcttacgcagcatggaatttgtgcgctcttatcatcctctgctcggcctccatccatcatgaaggcacgcaagatcacctcaccgaaatccaggaccagatgctcctcaactggctgcctacgtatagaagggaatgtcgtgcgggattaccagctagctggcctccaactccaatacaaacatttgcctctctctctctctcgcccacagccacccccgcagccagaaatgaggtacggcgagctggcgcacctgagccacccgcagcaccgtctccggctggagcacgcggagacgccgttccggtgcgatgggtgcg

SEQ ID NO: 163083 - DNA, 535 bp, Zea Mays
gtcggacttgccatcgtagtggggggagagtcgagtttctggaatctggggggcgatcaagatcgcgctgcccatctgagcggccgccgatgttcgaactcgaagccggttgctccttcagagcggccatgtcggccttcatggtggacatctccgtggtgatggacttgagcatctccatcatgtccttcatagtgggatcggccatggctgcggctgcggggcggaggcagtagaggactgtggtgatggtggatggctgagtttgggcgcggcgactgtggaggactgatctgaatgagtggaagaggattgacgtgacgacgataccaggttgtcaagggagttggttcctaaggtagctggccctcgactctgcaactcgtagtctcggtttgtcttcgccggcagggttataccccttagtcgtcggcttgacagggaaaagaggaagaagactagatgactaaattcttgctcaattccctcaagtgccggttacagatatatatagccttcgcttgcaacaactccc

SEQ ID NO: 163084 - DNA, 411 bp, Zea Mays
aggcatgcatccgatcgtgcacggttctggctcaggcagattttagcgtaaatcgtgaaccaaaccagcgtaaattagtacgaattttagcgtaaatcgtagatccgtttcataacgatgaatgggcccaaaaattacagcgtaaaaatcgcacgcttccgatcgtgcccgggttctggatcgggcgaatttttgcgtaaaacgtgaaccaaaacagcgtaactgggtatgaattttagcgtaaatcatagatctgtttcgtaacgacgaatgagacccgaaaattacggcgtaaaaatcgcgcgcgtccgatcgtgcgcgggttctggctcggacgaatttttgcgtaaaacgtgaaccaaaacaacgtaaatgtgtacaaattttagcgtaatcgtaaatttgtttcat

SEQ ID NO: 163085 - DNA, 1528 bp, Zea Mays
ggcagaatggcagaacacgttagtgataggacatactaacctcagctatgtagccagcacgatatacacagatagaatctaccaattcttttgcagtctcctgaagaatttcacgcctacaacaataaaatgtttatgtgtcatctgtagtaaaagtgcgtgtacacaacagttcaaaaaaaacagaaaagtgatacataaaaaaaagtgtccttacgtgtaagctagaacaagctcacatagcttcctacttttacagaatgcaatgcagcggaggccatgttgaaccatctcggaaaatagatatgaaacctctactattgagctagcaaagaaaataatgttattagtgcatttcatgaaatagtatttcttgaaaagatacttcttaatataggtgcaaacacttattcactggtaagcagcagtaaacaaaatactttaaacacataatgtgttccttacataccataacatagtagtcaagaatgacagtgttgcagacaagcaatattcttctgaaaaaggaaaaacactcaagtaccatgttcttgaatttctgagaatttcaagtaacatggaacattaaagtagaacattttatgatgcatgaaatgctgtcaaaagattagccagtagtataaacaaggtactacatggcgatagatagacgacccattgacattgcccttaatatagggaggcaccagaccctggctagataggagacatactagccattcttctcagggatgtaccacttcgccggcacctgggactgagtccaggtgggcagcctaatcaacaggaggcgcaatcaaccgagctatcacttagcatgacttctaatagaaattatgcttttaaccaggcaaaatgaaactagggaacttgcaatttggcatcaatgatcaaacaataatacaaagatcacaacccaagtaactaccactctataatgcatataacaacaaaataactcaataacgaaaggggatttactaaatttgaacaaaagtagtgactgaaaaaggtaacagcacatatatagctagaaagagatgaaagcgtagtaaattaggtataatgtgtgagatagattgcattgagtctttcaggaggtatatatagagtgcaaaggcctagggacaagttgcctaccagaaacatatgacaatattggactacaatcctaaactaccgaatagactcaaacatcccacacagtcatagcaggtcagactagaaatcgtcgaagactaacatcccccgacagttctagcaatgtcgcattacaaatgctacaactagagtgaaacctacgagtagctcatgcggataacagccctttttgtcaccaaagtaaccaacgttggactggtggaagttgtggagggaggcatgggtccaaagcatcaacagaggcacaagtacgcataatcagcaacttcttgccggcgacagcagcacgatgataagccaaccaaatggtgaaggtaaactgggatggttggacgtatcagtaagc

SEQ ID NO: 163086 - DNA, 1155 bp, Zea Mays
ctttattattaagttttgggcagttttcttaattaaatcaaaactctagaaaacaatacaggaactatggagtttactatttttgcttgatagtttatatttcacaaagtctagcaaaattggtttggctaaatttggatgagtattcttcaagttatgtatttatcaagttctctgcagtatttaaaagaaaagtaaattcgaaatgggaaaagaaaaacagatttgcgctgaagtccctgggttttcttccccctttttctctcaaaaatcagccctcggtctactattcgcatgagtcactgaccttacgcataaccccctgaacttgtcctatatctaacccacgatccttggctggctggaatagtaaccgtggcaaagatcacggcggcgaggctcaccggcggcagtagggctccggtggggtggtcggtgacgtcggggaggtcacggcggtcacgtcggtgtgcgggtcggcgtcggaggtggctggagctgctctggccacgagcgcaggcggcggagatcgtaggcggcacctgctccggccaaaccatggcggtagggttcaatcaaggtgcacgaggagctcctctgggtgatgtagaggctatgcgcgcaaggaatcgagaaatggttcagtgggttacccggtccacgtgcgcgggcagggttacgaactccagcgagcgtgatcgcactgttccggtggggctggtcctcggctcaagcttgggaaagcttcacggcctctcgaggaagctatccgagggctcgaatcgagcggaggtgcgcgggagtggtttggccatgctgggcgcccacgggcggctctgacaggtcgcggggaggtcgccggagctgcgggctggctcaggaaagctaggcgcggtgcagagggggtgacagggaaggtggccgtgcatgagggcgtgctttatagccactcgcgggcacgacacgggtgtgggcacgggggcggccgagggcgcgcgggggcgcgcgtgcgggcgtgctctgggcgcgttcccgagtgcctacccacgtcgaacacgtggtggtttggttctgccggtgttcaaaggcctgattggtcgccttagcgtgtagatctcagcaaaaatcatgtgtaaggtctcttctctgcaccat

SEQ ID NO: 163087 - DNA, 626 bp, Zea Mays
ggctttttagctccgactccttgtcggtagcgcgcttgagggtgagatcagccttagtgcgcggctttaacttctgcgcgggcaccctgggccttcgtgcgacctcttttcgcaccctccttttcctcggcaagtaggcggctcaggtcttccctcactttttctgccgccgaaagcttctcaagcagattgcggcttttattctccaccgtcgacttgtccctcatcgcctctgtatgttgcgtgcggaggcgctcaatccttccctcaagccgccgcctttcggtggcaaactccaaggtcaacgcccccgaagcaatacgttccgcgaaggtggtcgcctgacaccaaaacatctttcaaaaacagaaccatgaaaacgacacagctacaagcgctaatcacactcacgtatttcagcagctgcacgactgaggtggccacgcccatagcagcggcatcggaggcgatttcaccatcggtgcaaaatctagcccacgggtcctctgagacccccgtgtcacccttcattcccgtcgccgcgaccacagagctggcagacgatgccgccggcacaaccgccagctggccagactctgcccctacatcacattcatatcagaaac

SEQ ID NO: 163088 - DNA, 319 bp, Zea Mays
ctggaccgggcgccaattaccagagaaggcagggtctactgcacaaatgtttccaagactcagcttcctacgctctggacggcgggttaatttgtaaacatcatggggtctctttagcaaataggccacggcgaaggggtatcgatcactttcagccgccagattagaatcatgcggctacgataggtcatatcgatgccatcgacccgcgtgagccatggccatccgattgaggatcaatgtctttgagtttaagacgctgcaagccaacctggtacgctcgatcctgatccaagggtgaagatcaattcgttgaacc

SEQ ID NO: 163089 - DNA, 704 bp, Zea Mays
atggtacagtaacgaaaagatcttctggttcagtgaacctcgccgccggcgaccccgcgctcggattcgtgccaggtgccacgatttgtgctcaacggagtacagataactgctcggggtaagaaatatcgcattaaggatgaacttaggctactgttccgcctcggccgtcgtgtccgcctgactcacggctggttcagataagctcgccggagttggccgcctattgatcggttgccaagtgccttggtgctctaccacgtcgcagtaacgtgccttggagtgtccattcatcgccggtaaccttgccgcggtgaaagccacgcacctcttgcgccagtgctctcccctctctccggccgccagcgcgccatgccaaattctagagccaccgcccttgggtcctataaattgagcgtaacatcaactctgctaggtagtcaagcatccagcgcacccactcgtgtctcagattgtccaacagagagctctaatttgagatttcccccaaatcggtcaagaacaccgtagtgtgagagctcgctgtggccagctctccacaggttcgatcatgccctcctcgctcttggtttagcatccctgtgtgctttggatgcttctcgacccggccagttgagctagaacacgtaggatcaccgggaacgcttcgggttgtctgttgatcgtgccgtcaccgtgggcag

SEQ ID NO: 163090 - DNA, 712 bp, Zea Mays
ggcgccagccaacgacgagctggtcccaacaaagccacggaggctagaggcggtcctagcctcctgggactcgaaggatcgtagaggagcatgaggtgctagcaagatggtgggcggaggcgccattctgcaaccctgtcgaaggcctattggtgaagactcaaaactagatgcgttcaaggatagttttttttactattggctccttcatctattaggataaggtattgctcaagcaacaccaagccacgttgggccctctgcccctatgccattgaccgagctcgccgccgtaactgctatagctgctacgcgcctacattgccaattaattctaagagatatgatagggaggatcgcgaggatgttgggaacctacacctcggttagccaagcgctgcatagacctagctatggaagcacaatcgatcatcggagtgtgtcaagtcatggtgcccgtcgccgacctatgtcatcgctccaaacgccggtaaggtcccctgagtcgcttcgtcgttctcgcctcaccgttttgcccttgtacacccgagggattaagtaacggaacactagacgcccttcactttggcgaagccccacctcggaaaaccacccaacacctctagggagccgtcgtaaggaaggaagaagtacgagtgacgttgatcccatagtggatggctgagattagaacgtttcttaccccttcgcc

SEQ ID NO: 163091 - DNA, 806 bp, Zea Mays
gtggagggtgaggctgccttgcaggtgtaggacatccgtgtggtgtgtgactttgccgacgtgtttccagcagagctttcgggcattcctccggagcgcgatgcagcttttgaaatcaagctaattccgggtacgcagcctattcataaggcctcgtatcggatggctctaaaggagcaggttgaattgaagcgacaattggatgatctactggctaagggtttcattaggcctagcagatcgccatgggcttccccagtattgtttgttgagacgaaggataaaagcaagagactatgtgtggattatcgtgctccgaatcaagtgataatcaagaataaatatccgctaccccgtattgaggttctctttgaacagttgaggggtgcccaggtgttctccaaaatttatttgaactccggttatcattaattgaggattcgtgaggaggatattgagaagacagtcttttgcaccaagtatgggcatttcgagttcatagtcatgtcatttggcttaactaatgcccctgctgcttttatggaagcaatgaatagtatgttacatgagttcttggacgactttgtggtcgtgttcctggatgatattctgatttattcaaagaccgaggaagagcatgagcagcatctccatctcgttctgagtgctcttaggaagaatcagttttatggcaaattgaagaagtgcgcctttcggctatccgaagtggctttcctgggtcatgtgattaattagcagggcattgcggttgatcccaagaatgtcgcggctgtggtagagtggaa

SEQ ID NO: 163092 - DNA, 365 bp, Zea Mays
ctgatattgtggtggatgtggtatttgggtttggatgagattgttgttgtggactttggtttggatgtcgaccagtgtgttgcgccattggtcgtcagccgtcccaagtttgatcttatgcgtgagtttggggtagattagtggttagtagttgtgtgtttgtggtagattggcgaagaaaggaactagatcgtatagaatagtgaagctccgtacgtcgctcgccaagtgttcggagaatcgcctgaaccatagatcgttgctgttttcgcgatttccgaatcgatttagtattagtgagccgattcactaatcctgctagcttcactttggctttgtctatcaaaatatattttatgaagaac

SEQ ID NO: 163093 - DNA, 730 bp, Zea Mays
gttaaagcttgattccttcctggcctttccagatgaggtgacaaacgcctcgtctactggggcgggggtgcaaatttcttgaacctccaggcctcgaccccttggctgatgggttctgcgacctctgccttcctaccctctaagaccatggtatgcgagccatcaaggacattcggtggagaagactcatccccaccgagcgcataagcggcccccaatgttgtgccctcgggagccctcttccctgccttcgatatgggtggtgggcccaatgttctatcatgaggagacgggggtgagtcaccaaccaggaaacaaaggtttgacattacgcgcatgctgagctgtggtccttgccgacctttgcttctcgcccttctatcgtcttgtcgtctgacgtctccctcccccctttggcaatgctcctcgcctctccgcccctttgtcacacgtaaggaaggtcatatttaagaagcgaaaaatggtgtctgccctcggtggggatggcagggtgtcagtgctaccggaattccttcagtcgtcggcccctgtcaaggtcgccatggtcaacactcctggttcgtttctcccgctatctttggcaattcttgtttggtctagatcatgagggctaagggtcattcctcctctgtagcgaacttagaagtctccactgcccctgcctcaagtcactcgctttgtctcaccccgccatggcctccgctcctcg

SEQ ID NO: 163094 - DNA, 371 bp, Zea Mays
aatcagcctggtttggacttcgaccgtttcattctggactgttcgtttctatctgaattaaaaacgaatctggttcggtttagagtttctccttccttcataggctcggtaccaatcctggtcgcgtgccctctggatcgaatcttggcgaggtgagacagcaaagcatcacgagataatactagtttgttgtgaaacaagtgtttctattcctgcttgaaacgaacaaccatcatatgttttatagtttttattccagcatcacgagataatactagtttgttgtgaaataagtgtttctattcctgcttgaaacgaacaaccatcatatgttttatagtttttattccagcctgaattttactggagac

SEQ ID NO: 163095 - DNA, 542 bp, Zea Mays
gtgaaattgccttgagctcagtgcgtctacacctagaaagcaaaaaggcaacccaagccaagccgccagagaaaagcgaacgaacgagcatagcgactgagtctcggttaattcggttaaaacgatcgaaccatttattggttcttcttttctatatacacatttaggttctcattttctagaaatcgaattttataaaaaactgaggaaccaaaccaacctgaagaaccgaacgtccaggcctatccgtcttgccgtgtatgtgggtcacactatagatactctgatgcttaggtcctccatgactggggttgattggtctcacaaggtagagacaggaagtgccaaagacaaagaccatatgtggtgaggtgctatcatgttgacagagacttcccaacacccctttggtgtgccgcactgttggcccagatgaagttcggtgacgacgcggcctgtcgtggctaacatggatcaacaatatctacctcattttcataacagacgagtacaagcgtatgtgagtgatcattctgtgagtg

SEQ ID NO: 163096 - DNA, 441 bp, Zea Mays
ccgcccatggtgctcactgccgatctatgcgcagcatgagctccaacctgcgtaaccgacagctacatcccgtgctccctcgcgccaccgttatgtggacccacctggcagtcatgtactggcgtccacgtttttccttccgtcgccgttcggtgggcccgggacgtcagttccgtcctcaacgggttgccacgcatggcgggcacgacgtcggcgcaaatcacgcacctgcctcgcgattgaccacggggttaaatgccggatgctagccaccacctcacgcacctcccctgaccctattcacctgatcaagagctgttaccgtggagagagagaaagagaacagcgcagcgatgaggggagagaagtgagtcccgccgcgggaggggaaaccttgattcgccgttcaccgtgctctgggtgtagtgctgggaagctcca

SEQ ID NO: 163097 - DNA, 578 bp, Zea Mays
ttgttatgtctgaagagaaatatgcttgtgacctattgcaacatgctaacatgtgtctgtgtaaacttgtctctaatctactggcttctaatgaaaaaaattcagcatatgttggtggtctgttaggagttgggacccaaagatagtacgaagtataagggtattgttggagttctttaatatatgatcattactcgaccaaaagtttggtattcaataaacaatgtatgccagtttttgcatgcacctacaactaaacactggaaaactaagaaaagaattatgagatttgtcaacaatactatcaatcttagaccaaagtcaaaattgatgattgacttctcaaacgcaaactagactagttatattgatgatgaggttttgcatattccttgttcctaatttaatttcttggagtgcaaacaagaaatcaattgtttttagatcaagtatggagcctaaatataaagctatggctaatgctacttcagaaattctctaggtgtagtctatttataaggaacttggcattaaggagtacaataagccatgtttatggtgtcataatttgggagcca

SEQ ID NO: 163098 - DNA, 371 bp, Zea Mays
aaagaataattggtggtttcatagtgctgccttgcttttctgttacctacttaatcttcaagaacgacatggacagttgctgctgtcggcagggaagaaaattgaacgttacggtagaaatctaaaaagaagagtatagagaaaagcttggacaagagatagtggcggtcactcactttggtagaaggttactcttgcatgtagtacgtacaggtacagtactatagaacactgtagcaactgacgtcgtcctgggggctcgttagtgcaggcaatgctggcgggaacaggaggaataataccaggcaggcaccggagactagaacggtcatcagttcccaggcaccggagactagaatggacagttgggg

SEQ ID NO: 163099 - DNA, 680 bp, Zea Mays
agtgtcaaatgttggtgccccagtggcattctcagcctggaacttgcctcctctcaaagccttcacactttttgtgtcgaatcctcctgtcactgatggcagtttgggccttagagtgcggccctctgctgaagaagttagtgacttggttgcctcgctcggggggattcctgatgatgaacgacaggtccattttgaggtgcccctgaaccctagtgatgcagagataagcgctatgcttgatttgctggctgaggactcttctgacgctgctcctgttggggcattggtagtggcgcccctcccagaggctgatacaactttggatactcaaaagcctgccagtactcgcccgaggcgcccttgccgagccaatcaacctgatccttctgctgatgagcagaaaaagaaaaagagacgcctccggcgagtatccagtttggatcgggacgttggtacctcggttcctgctgctgaagaagtgcctgtgactgaatttattgacgctgaccccaatgggtgtacccaatctgttgctgatcccaatgtgagtgctccatctgttgctgatcccaatgggggtgctgcctgcgttgctaatgtggacgacgaggaggaagaagatgaagttcctttgactcggaaaaacagtcggcagttcatcgctagcggtgaaagta

SEQ ID NO: 163100 - DNA, 462 bp, Zea Mays
actcggatatatacttggcaatttctctcttcattctggtccaccagtataaggacctgagatcatgatacatcttattactgcccgggtgcatggagaattttgataggtgagcttcatccaatatcttctttctgagctccgggtccttgggaacaaccaatcgatctccaaaccataggatttccttgctgtcctgcatgaagcatttgtatttttctgctctctgcttgatcatttccttaattacctgaacacccttgtcttcaatctgggccctgactatttgctcttgtaatgtgggctccaccgagatataatttaaagcacctgaagaaaccacttccaggttcagcttgcacaactcatcacacagggtggtgactcttgcatccatgctcatacaattgcactgggcctttctactcaaggcatccgccacaacattggccttgccaggat

SEQ ID NO: 163101 - DNA, 545 bp, Zea Mays
ttgcagaagtagggctcaacgcctttgtagtctccagtacaacatacagcacatttgccatccttctccttttgggagtcgcgacagaagccttttgcaccttcggcagtgttgcctctgatagaggactcaggatttctggcatttttgtcactctttccacctgtggctctttggccttattatcttcagccttggctggctcaactgtagttatcttcggtactacactcggctctgtagtgctttgcataattggaacaatttcttttgctttggcagctgaagaagtaccttcgccaaattcaggtatcacggctggttcaatataacgcggccggtgagttagaaccttcatcttcttgcccttcggctcaactgtgatggccgaagcagcaatctttcccaaatcagcaatctttctctttatccattgccctcgcagcgggtagcaatagttagggtatacgaagccaatagcatcaaatacccagttcaaccttttcttatttcgacccccgaaagctgcagacaaggcattgtcc

SEQ ID NO: 163102 - DNA, 457 bp, Zea Mays
ccccatcagccgggttgtcgcaggagaacgtgaggtacgaccttggacgtgggaccgagcaaatgacctatgggccgaccacctaacttgcgactcactgggagcttgcttggcccacccctcgctctgcgtggggaggtagagtgaaactaggatagaatggaatttgattcttacccgacgctaggtatttgaagtggcgtggtagaaatggaaccatcatggcattgtccacgtgggcggcttgatgggacgtaaaacgacttgctccccttatcgcgcgcagttggcgtggcagcgtggttaattgttttgtttgccattgacgcctttccgaggcatacgagacctacaagatgtacctacgtatagtcttccccacggcgcccgaggaagggggttatccataaggcggatcctcctatgtggtccatggggcgcatcctctaggcgtcgc

SEQ ID NO: 163103 - DNA, 547 bp, Zea Mays
aagaatcaaggaagaaaacacataccttcgatctgtcttgagctaggtgtcatgcagtgagccctagttgggcatgatggttaatcagttcaagaggggaactagcagaccggggttaggctttactgctaaggatgggagtgtcacttgttttggtaaggttggtgagtgcagtggcctgaaacccttagagaaacctttagccacgccaagcttgtcaagctcactccacccaaaaatgccactcctgctgtgagagatgttgtgattgaggtgcatgtgagagccccccttagaacaagtgtggattcaaaaaactaaccctctcaggaacacacttgacaccattcctggcgtctctagtgacccccttcttagagctcctcaaccacccaaaaataaagccccctcccacaagcaaaaaacactcaagcgagaggtgaggttccattgtgagttttgtgagagggatgggcatctagattccttttgctttaggatgaagagagatgagcggcaggtttttaagtcgagtaggaagaacatg

SEQ ID NO: 163104 - DNA, 895 bp, Zea Mays
agatgggtttgttgtgcgtagtactgacaccctccgtaggttctcaccacctgaagtgcgtccgacaccgcggtgggccaatagaatccctgtcggaaggcgttccccacgagactcctcgaggcagcatggtgcccacagattccaccatggatatcttccaagagcattttcccttattcaattgggatgaataactgccttatcccattgtgcccctccttgtagaggtccctccgaccaccacgaaggatttggcctattgatgaagccttcgtgttttcgtttcgtcttgggacatcacaccattggtcaagaatttgtgatacggtgccctctaattggccacgaggttggctaggggtcggtctcctccacgatagcaactgattctgggggtcggcgggcccatgcccacgagttgcccatccttctggtgagcctcgtcatattggacatttggtttaaaaaggtcggtcacaaagacccctagagggacggtcgttcgtcccgacaccatttttgtgagagcatccaccatttcattgtctcgccgaaggatgtggttaatttcgtggataaacccgacagcgaggagcttgctgatctcttccccgttggccttgtgtctttcttcatcaaagtggcgtagtcgttgtttcaccgggttggacccaggttaatttgtaaggaatgctcggcgacttccctcgggatgcccttcatgtcgaagggtttctaggcaaagatgtccttttctgcatagaggaagtcgatgagctcgttttcctatttcggagagaggttggagccgatgtgcactatccactcgtcaacgcactccggatccaatggtatttcctttacatcatttaatggtttgaaagtcgtgccc

SEQ ID NO: 163105 - DNA, 370 bp, Zea Mays
tcatgagtgtgccgtagggcgaggggcgcgcggaccataaatgcgtcgtagtccgagggctcataggtcatgagtgctatgcggctcgagggattcgtaggtcatgagtgggaagcggaccgacgcaccgcgctgtggctcagtgtggttaatgtgaccggttatttacaattggtgagtctggggctgggcgtaggatttactcgagtggttcccctccgacacgtccaaccctcctgtcaggttccaccatgcctgaccccgggctcggtgccgtgaggtttgaccagggacagctcctcctgtcaggttctgcaacgttcaacctcatactcaggccatgcttgtttcggattataatctctcaagt

SEQ ID NO: 163106 - DNA, 470 bp, Zea Mays
ggaattatattgaacttttgttggtggcatgcatcaatggctatttattttttaacacatattgaatgtggatttttgacgtcctggatctaaacatgaaaggtagtattcaacacatgactctgcctttgtgcacctgacccatacttaactgttctaagaatttgtgtagattcattcaaggtgatcaatgttgaaggcatgctcatgtaccagaggttgttcagtgctcccgcccaagccggtctttctgcattgtcacaacaacttttatagcttcatatgattcatcgtaccggttgttgaagtgttaagttacttttgttttgaggggaagtattgcagatcgttacaatgtttctactcttgtgagaagtcgaaataggagtgccattggatgggttcatagctatgacatccattgatgttattctctttttctgctcaaagatgactgcaataggcatttg

SEQ ID NO: 163107 - DNA, 723 bp, Zea Mays
gatactggaggcactcaagaaaaaggtcttcgacaagaatgaaaaattcgcaggaaagtggataagggaattgccctatgtcgtttggagcctaagaacccaacccagtcgagctttgcatggaaacactcctttcttcatggtctatgggtcggaggcagtgctacccgccgatctcaagtttggggcgccaaggttgatcttcgaaaacatagcagaagctgaggccaccaggctggaggacattgatgtacttgaagaagaatggctaaatgcggtaatccaatcagcacggtaccagcagactctaaggcgctatcacgacaaggctgtgcgacgatgatccttctcgataggagatctcgtcctccgccgaattctaacgggggagggacggcacaagttatcgcccttatgggaaggacccttcatggtagcagaagtcactcggcccggatcgtatcgtctcactcagatggatggcacagaagtcgggaactcctggaacatagaacaccttagaaagttttatccctagctgtatttcaaaaactgctgggacgacaatgtactctgtaaagtggaaatgtgtcatcaataaaaaagaggtttcaaagatactcagttcgtttacgattgacttgcattcttacttaactcaaggtgaccactatgccctactaacggagcaatcgacttaagtcggcaatgacttaaggcggt

SEQ ID NO: 163108 - DNA, 1700 bp, Zea Mays
atcatcacacgtgacatcgacttaaccgcagaggaagcgatgactacttcggcatgtcactacctctctacagtccaatcaatattaactacatcgatcgaacctcatattgcgcaactcttataatttactatctcaaatacaaccatagcacgacatgcacttgagactctttgttcaagttaacgcaatcacaactaccatacacatgcgtaccactttttcccccacgtacttttaatctatgctaaaaccatactcgtgcacataccaacttacaaacccatgcacaacgacaaaactgacgaccatctcactacaacatctaacaagagctgtgaatccttaacatgttcacacccgactttttctataattgtcgcggctcctcggcaccagcaatagcataaaaatccccacgatcgctaagtatctcatcaaaagcttcgacctcttcgcctatccactagataaccccatcgggatcaccataaataaatttctgctccaaagaataagctcccacctttctaaagctatcttttagtttctttgcgcatttcatggacacttcgtagcatttttccttagaatcccaaagttcttcaatgtttttctgcactcttactctttccatttcacttatttcttgctttgcgttcgcaacttcgaaattttcattcatttcggcaagctttttctttaagtcttcaacctcggctttgtgagcttcggcttgtgcgttaagcttggcttcactggttttcagcctatccactaaagagagcagtattttgtctttttcaagagcttcatttcttagtgtaataacctctgatcgaagatttccaagagctaactagcagctttcatcttatgctttcttctggacctttaaagccttgcttagaattaagccctatagaaacaaaggatgagcacatattgataaaagaaataagctacaaaaataatatgctttccgacaggttaaagtattctcaccttcatactattataggcaaggctatctgcgagctggtcctccgtcattgcagataagcttagttcaagcttcggatatcctacattttcttccatttcccgacagacatgaatctctttattgtcaggcagacaataaaggaagtcatcttcatcatacccaccatacaccaaggaccctcgagggtattgcagatccctcgcgtaatgttgcgcttcggcagtttgctcctttgataattttttccctgaagcatgatgcactttgaattccaattcctcggtaggtgctacaggagcaggggactcagattctacggtagcaccctcttttcctagcattaatggtccttcagcaacctctgaaagtcttgcttcagcaccctccttagcagcctctaaaggtcttgctttggtagggactgagggcccagcctcaaccgcagcctgcgttgtgccagcctcggcagatttctttataatcttgccttccgcactaggtgcttcagtagagacaggagttaacgtcttcgcggattctataacagcgtctagtacgctagccatcctccttttcggagttgctgtaggaatcttcgacgccttcggtacctccatcctttgcaacgggctcagagccttcgattgctttgtgggtttctttaattctagctcttcagccggcttcgctctag

SEQ ID NO: 163109 - DNA, 722 bp, Zea Mays
gggaaatggattttcaaattgaagggagtaagcacaaggtcagatgagttaagtcaaacgggttcaaccggacgatctaagtcgacagaaaacacacttctacgtagagtcagtcgggagagaatagtcggaacacaggatattgaacggggcaaagaactcagtacctgcagtcaaacctcaaacatagagtaacactaacacaaactcaacatccaacatagataaaaccagcaattttcattatcttcgggaggttcattacagagaaaaaggtcagttcattatgaaccgatcccgacaaaagatccctactactactacacctcccttctactgctacactactctatactaatatttaagccagtggcaccgtgccaccggcgttgccacccttaccgccactacctttaccatcatcatcgtcgccgtcgctgcccttcgccttgccaccattgtcgtcgttgccaccacctctattgttgcccctactgttgttgccgctactaccgcatttgccatcgccgctactgcctttgccaccgccgatgctggcttttccatcgtcgcaaccattcttaccgaccgtgccgccttcatacccatcgtcctcctccttagactcctcctcctccacatcctcagactcctcctcgtcctcctcctcagattcctcctagtcatcaaggccagtgcgctcgagaccacgaaggtaggcc

SEQ ID NO: 163110 - DNA, 361 bp, Zea Mays
gatataccttccttcttcttataaatccacttgcactttaaaggttttttaccttcaggaagctcaaccaatttccatgtagcattcttttaaagactctcaaattcatcattcatagcaactaaccacttggataaattatcacatgagatagcttccaaataagaagaaggttcaagtgctacattagtttcttaagcaacaatgagagcataatgagccatactatcagtgtcacgatatcaatgtggcaaaacaatattccttctaggtctatcttgagcaatagagtgattgttgctaacaggaggtacaaaagctgaaactgactgtgtaataggagtaacagaatcaacattaa

SEQ ID NO: 163111 - DNA, 378 bp, Zea Mays
ggatcctcataaaattgcagtctcgacaattacattattttagtttaaccggacctagcataaagatcaaacaaaaaaaacatcccaacttctatgagcacatactagatcactatgccttcacaacaagtatgatcttcgaattaatgagacctaactcaaatatttattaactagaaccaaacacaagtcgtacaaattgcagtctcgacaattacattattttagtttaaccggacctagcataaagatcaaacaaaaaaacatcccagcttctatgagcacatactagatcactatgccttcacaacaagtatgatcttcgaattaatgagacctaactcaaatatttattaaccagaaccaaacacaagtcgt

SEQ ID NO: 163112 - DNA, 500 bp, Zea Mays
ctaggtggtggctaatacatgcatatatacttaaaagaatgaaaaaaaggagatcagagtggtcaatatcggggagaaagagaaggcccatttaacgtcacaagtctcctagcgtaacagcttatcctctcccctcccaaactcctttgttgatgcttgtcactcgcccacgcccttgacatcgcctgcttccccaccggccattgccgagaaggcccatttaacgtcacaagtctcctagcataacatcttatcctctcccctcccaaacttctttgttgatgcttgtcactcgcccatgcccttgacatcgcctgcttccccaccgtccattgccgcccccatcgatgttacctcctcccccactgccacatgacgtctgtgccgcccccatgcgtccttgcctgggcagatgtgcctgccgccaacgcctagtgcagcctcttctcccactggccaccgccgctgcacgttagcatccctgccttggcagatctggc

SEQ ID NO: 163113 - DNA, 416 bp, Zea Mays
ggaaaatggccacctacctagatcttacacacagcaggtctgtcagcacgacgctggcagtagaagccaagaatacaggccaaggaaaatccaagggatttggaggtgacaggtccaatcagggacctgagaagcgaacaaggttggtaatccgacctttcaatcagaattgttcttcgcctcgtccaccctcctatccatttaaacagcctgttttcatttgccctgccactacccccacttctacaaatcagccgagtacccctcgtgctcgtttccccgccctccctagctcttcaactggctgcttcaactgtgggaagtctggtcattttatcaaagactgcccatatctgaggcagaataagtccaacaatcagcagaactcggggggctcaaatcaaggcaaagggaac

SEQ ID NO: 163114 - DNA, 589 bp, Zea Mays
gtctactgaagattagctttagtatgaagagaccaaactgcagaatgggtggagctactcaagatgcttacatagctttcaatattgtggctgagaggatatgaactcgggatcttattcaagagtttctcgcatacaacatgtttcctacacaaactaggtggaaagtgtcgaaggcatcaaactttagcttcggaattcgagaaacgagcttcgatctaggctccttctctagggtgcttgaatttcatagaatcgaggtgcaatgagactgttgagacttcaacttttgggacccgagggaagcgaaggttgaatagtcatggatgctcgaagttgttcctccaggtactctggattacatctcagtggagccaaccatgcatgatcagattatcatggcgcaacttagtgacaagggagtgcagattatcaaggaaatgctctcacaaaaggtggagaagtataaatgttttcgccaaatagtaagggcatactatggttcgaagatcgacttattgttcccaaggattaggatcttaggaagtaaattttggacgaagctcatttgttcaagttttcaatgcac

SEQ ID NO: 163115 - DNA, 336 bp, Zea Mays
gtaggtagtgaggggtttctaattggttggtaattcagaattgttcaaaatttcatgggtggacatatttacattttataattgttgtgttttggtataccaattgaaactttagttctttgcattttttgctctgtcggttggtcctggaatgtaggtagtgggtggtttctaattgggttggtaattcagaattgtttgaatttcatgggtggacagatttacattttatgttgtgttttggtataccaagggaaatattgtggccctgtttggatctctccatataatcattatctgctaaacttttgttgttaggatccaaacatacccaac

SEQ ID NO: 163116 - DNA, 1066 bp, Zea Mays
tattggaatagtacccgcggcggagaaaagggcggcggtgcttaccggcagcgatctagctccgtgaggtgtccagggaggtcggggaggttacgatggtcacatcgaggtgcgggttggcgtcggagatggccggacttggccggtcctcgtgcgcaggcgagggagttcgtcggcggcgagtgttctggcttgctcacgtcgggatagttcaattggttggcttggggagctttaccaagtgacgcagaggcagtatacgtgaggaattgggaaatggtgcagtgacttacccggtccacgctctccagtgagcggaagaagttcggcgagggtgattcagggtttccggtgaggttgcactaggtctgagggcttggggagcttcatgggtctctagtgaagctaaccaaactgctggcgtggactagggacgactggggtgagctggccacggtagctagagctcgggcggcttggcgggcggaggagctatcggttcacggcaaatgctccggtgcttaagcgtggtgagtgtgcaaagctgaggcaaggacgtgcaggagctattggcctttataggttcgggtgctaggagggcgcgcggcggacttgatcgtgcgtgggggcgagcgcgcgtgggttgggcgaacgatggcgtgccgaccagggtcgaacacgtgtgtgcgtttcttctacccgagttctggcgcgagttgtcactcatccaagcctgctctttccatggtcagtgcacaaaacctcttccccttcctataagctgccaattatgtgtgggggtcaaattatttggcctactggttccaaagatatggagctctcaagtagggtctgtctcacagcccgagcccgaggcaaatctttggttttgtcgtgtctagggtccgaatcccaatgctatctttagatatgtggtagaggagttagtttagcacatattttctaatgggagctcacggttttggattagggatcatgatgaacgcgctcgagtttgggtgaggggctgaaattcagaaatctgaaattcagatttgtatagaaa

SEQ ID NO: 163117 - DNA, 745 bp, Zea Mays
aggaacagtaagtatgaaatgtctttaataagtagttagtacgatctggaggtttgcattgtacttagttacaaactgatatcgtacatagttttcatgtcaaaatagatatgagctgcgccacataaactgatcctacattacataatctgatattggtgtttggtaccacataggaaaactgatcctacatcacataaactgatcctggtgtttagtaccacataggaaaactggtcctacatcacataaactgatcttggtgtttagtaccacataggaagggttgtttatacttgcgagcattatatttagttacaaaagggtaggatcaataacaaaaggttgtgcaatgtatacaatggttgaatctcagttagcttcgtgttgttgcataaatcattcttggtctttttggtctgtggaatctttgattatgaatgatccttgtttgaacctagtaaatgaaaggtaggattttaataatcttgtcaatcattatgtagtgaagtacaaatatgcggtgtgtaaaaatatatgcacgtaaaattaacatgcttgatggatatgacgaacctatgtagaagctctttggaggagattgaagaggaagctttctctttatctttatcagtgggagtttcctgcaagcgttaaatagcaatgggtgagttgtacatacatgtatttaaaaggtcactaaaatcacatgatgttggttgttgatatgtccttttatatatac

SEQ ID NO: 163118 - DNA, 435 bp, Zea Mays
agtgtcagcgacagaggggaagagcgtgctgatcgagcgggcccagcgccagggggtttgggcgctgataggtgggccagggcgtcagggcgcgcgtgcgcgaagcggtacccgcggtccgggccgtgcgatcaggatcggaaagaggggatcagaccggggaggggtgaaaggctgcgggcggcactgctcctctccacggctgtgaggttgccggagttgaggcaggtgtgagctagggggtccggggtcgcagggattgggcagagaggaagagggcgccacggcgaactcaatggcggggaagggaccatgaatccacgagcagagaggggagaacggcggtgagaaggcctcgggcgggacggagtaactccggtgagccattctggccacggggaggggacttaaggcgcgctaaggcctgggctagct

SEQ ID NO: 163119 - DNA, 871 bp, Zea Mays
ttctcgggaaggctagttaattggtactcatacaactctctccatggatggtgatttgcaaggaattatctttgttgtttgcgtgataactatacaccagttatccgccgcctttgctgtgtataatataatatcaggcagctgttgcgcttttggatggttacagatttcacatgccatttccctcccggcctccgtgaggacaagaaccagccgaggccctagcctgccagccagagccacagaagggctccaagaaccgtttgccattaaccaaaacggactgaaggttgggttggccaggaccactgcctagagttggcaaggaggctctggtccaagaacaagtccatggagaacggctcctgggtcctgctcatttgcatttgcacctaggatcggagcagtggctagctcaactttctctcccgtggatcgtgtctcctgctgccgcttcacattggggctaccatgccttgccttgcccagcaacccgagaccgagagggatgtgtgtgtgcagactgcagagtggccttcaattcaattcaagcatcagtaggacgcatgctatactgttcaggaccaaggccaggcagcagctggcaaataaaaagggtacaagagcattaacacatgcccacattccaagtgagcagtttcaggtgatgggctgctgcagcatactatatgtacaatacagtacgtttctcagcaaggagaggcagaatatacactggggccggggtgctggcagataaaaagctcgaaaaaggaagaggaaaacaattttcactactacagaagaagctcaaaaaaaaagataacatggatcttaggctagcaagctcgtcgggttgcacttgcgcgcg

SEQ ID NO: 163120 - DNA, 401 bp, Zea Mays
tgaatgtcagcacactgccaggtagggctcttgacatgttggcaagtgggacaccttcatctacaaaaggaaaaacatacacaccaaaggggatcaattaccattaccaggactcacttacttgttttccacgttcatctctctcttctctactacttctactgttcttcctcgcatgtatttcggttatgaacattgtggagattctgaactctgaatacagctacctcgttccccaatcctcttcttccttcatctctagatccctcctatattgctaacaagtggtatcagaggaatttgatccttggtgttggtttcatcttcgcaacaacaccatggctcttgacaccaagctcatactcgatgcactgcagtaccacttcgacgagatggacacc

SEQ ID NO: 163121 - DNA, 521 bp, Zea Mays
aattctggcattgaattggatggttggcatcaccaattcgtcatgtcaattcttcaaatttacaatgcatgatggttctagtggtaagatcattgcaatgttttatgtaatgtggtggtggtatcactcgactggttgatccagattggttacacgtccttcgtttaagggtttgtttaggttggtggaattctgtgaatttttcttacagggaagtgaatgaagacgaggtgaacgtctgcggtacagtaagatgagtttggacaacgtgtgcggaaaaggacgagagctcgcttgcactccatcgatactgtctacaggctaaaggtaacaagaacgaggtcaaaggaaacgccaagcagcaatagctagcgtcttacaaaatgtcgattcgacacagaataatcaatccatacgttgatgtgatgccaaagtagaataaggctatagatgtaatattactcaatttccatgcggggctatttcgaccgggtggattcggcatttacgctctctccaac

SEQ ID NO: 163122 - DNA, 883 bp, Zea Mays
caggggtgctttataataggatgtggggcccccacgaccgtggcatcgtccgggaaagggtggaccgagcgctggcgcaggtttgttgttggtttggtgaggtgttgtgtgtgttcgtttgttgacattttgagctgtcttcgtaggtgacgaacgaggaaaacgtggaggacctcgccggccttgaaagctcggtgtcccggaggagtgcttcggcggaggcggagccgaagagcaaacgatgcttctaggcggtgctgctgagggtcccacgacggcagacactttagcacaggttgaaaggatgtaataggggatagattgatagtcttcgtttatgtatgatactgaagatcagctgctgcgcaggttccagcgtgcgagcttgcacaagcaaaccttgatgaagttatgagtaatgatgttttggtggatgcgaatgcgatgtctcttagtgataatgtatcgggggaatcagattttgggtcatggtctttggagggtggagaattagggagccctttttcatgggtggatgaatcctcggaggatgacctggactatttttgcggcgttggatttagctgcagcagagtctccattgcggtccgcccaccgcgaggcaccggtgacttcgattggtgcaaacccaggagacttgcaaaggcgaaaagagatgggtgtgtcgaaacaaagcgtcgatgagtcttcgcgaggtgtaagaagacatcgccgaatgggtatggagaggtctcgtcttcggagcggaccgcgactggatcagggtgcctgtcgtgagttactggcgtcgacgtctgggtcatgtatcggggaaggggacgtgaggggcctttttgagggggaagagttgaggttgatgttg

SEQ ID NO: 163123 - DNA, 1300 bp, Zea Mays
tctatcctatctcattccctatttgaaacttcactctgtaaacaatataatttaaagtgcaaatctcatattttacacggtccactacggataacctaaggttgtctttagtggaccgtgtaaaaaagggattcgcacaatcacactgtagatggcatcgtttgtggtagtttcggaacctggggatacagtagaatttatgttcggcgaggagactaatgcgaactcactccgaatagtgaatcacgaatgacttgagtagagggtttatactggtttaggctggtgccctagtccaatgtagtgctagccgtagtattagctaagaaacatgttacaataggtatgagtgtgagagtgaggggccgagaactctagctgaatgcttctatctttgactgtttggctccctccttttttatagctcagggggtccttacgcagggatctatcgtccgagggtacgatctatcctctatggtagtcctgctaacgtggtccttttgacattgtcttgggtcgtgcaaccaatatggcaaagcactccatttgcccggtatgcggatcactgtaacaactccggtgttgcgctccattgtaatgacgtattatgggacccatgtgtcatagttagaaggcgctgggattcgtacgcggcgacgccccgccccattgttatggacttctctatcatccattgtcgtgtcgtggcgtcatcccgagtaatggaagtgcttaatgttgcctggttaatggaagtgcttaacgatagagttaatagggcaaaatggtactatataaaggttagactgttaaatagatgacattggtgtgttgggctccattgtagtgacgtttgatgggacccatgtgccatagttagaaggcgttgggattcgtacgcggcaacgccccgccccattgttaaggacttctctatcatccattgccgtgtcatggcgacatcccgattaatgaaagtgcttaatgttgcctggttaatggaagtgcttaacgatagagttaatagggaaaaatggtactatataaatgttagaccgttaaatagatgacattggtatgttgggcttcattgtagtgacgtttgatgggacccatgtatcatagtttgaaggcgttgggattcgtacgcggcgacatccccatcccattgttaaggacttctctgtcatccgttgtcgtgtcgtggcatcatcctcgttaatggaagtgcttaatgttgcctggttaatggaagtgcttatcgatagagttaataggtgtaaaatggtactatagc

SEQ ID NO: 163124 - DNA, 837 bp, Zea Mays
cgccctcacacctcgccacggatgcgcccacgtcgtgcgtttcccggccacctccgcacgcactcagcctcctttttgagcccgcacctcgttcactcacccccactcatttgcgcactcagccgaactccctcgctctctctctcaccttatacatgcgcccaggaagaccgttgccgttcaccgtgtccgcgtgcccgttccgtcgccaccgttgggcgctcgccgtgccctttgcctaggtaagtcctgccttggtgtccgcatcatgggacacacctcaatttactctccccctctctggttccctctgcctgtgctcaccagaacattcctcgcataactagagagccgccaccatcgacccaagccttcgccgtgtctctgctgccgttccagggtcccagagtctcttctcaaggtaaccaacctgtcccgcccccaatttaccctttccctgtgctcgtctgggcgcgattgctcgccagagagtagttgtgccaccatcgagccatcccgccgcagacagttgttctctggtgtctccgcgtcgttgctgtgcccatgaccgcgttcggtacattcccccgaacctcctagagcctttcttagtgtcccgagggtcccagcgcgcctgcgccctcatctccggcgagcccccgccatagacgcaagaggtgccaccgctggcgacggagggacctagtcggtggatcttaggcgttcgtctgagatcgggcggcccggatttaatcaaacccaatctaatcctaaccgttcgattcgcacccaaccgctcggattcgcaccctcacccgtgcccctgctgctgggccc

SEQ ID NO: 163125 - DNA, 343 bp, Zea Mays
ggcccggtttctgcccacgacgacgccgaaacccgagagaaaactgaggcgttcttggtgattcagtgcggtctagttcaatcaatcgggtctacgagcaacaggagacttaagggatgctagaacaccaagcagagaggcatgaaccaacctgcagatggctggccacggtgagaagctcacagcggcgcggaaaacagatttgggggaatcgtgaattgaggagctccgatgaacgattggaggcgaggagtgatgcactgggcgcgtaacaacctagagaagcacgctgaacgctcaatttatagtgaccaacagcggtggcgcccaatttggggaagac

SEQ ID NO: 163126 - DNA, 1597 bp, Zea Mays
ctacctcatagttctctggacgtctttcaacaagtgaagtacttgtaagaacaagcagacgagagacagaatcaccctgttctccaagcccaccccttggtccaacacccaaacttaagctctcaatattagcagtgccacgcgcagcagaacgtaatcttgttaccgaccactctccatgccgtgtttcagcagctccaactgcctccatagctgggaaagaagtccacatacaagtaaaatcagagaaaaccatagtgggctcacaggtaacaaataaactatcactgagagttttaaatcctttattatatgagacgaatgtagggtcggcagcatcaataaatgtgtaacgaaaacatgagacaagtgcgaattttgttgatcaatgtggagcttgaaggtggcattttacctaattctcacagttcatttgtgttttgcaagctgccaagttacaaaacatatggatggaaaggcaaaactagaggcatgataatgcagtgagaacatcaagtagatatataaaagtattgagcaagcatcttcatccttatcaacatctaaatagattctctaataaaatagagtacatctaaagttcaccatcactagagatctgtctacctctttttgctatgaagtcatccgctttcattgattgtgagttatccacagatagtgataatccaatctttaatttggcagttttcgtctgaaagatgaccaacaaaggaagttacatagaactacaaaaaacatgtatcactggagtggaacgaccaaaaagaacaaggtcaaaattgtgtaccatatgcgatataattgcagtgtttgtagttcctgaagcagccataaaagcttttgacttcctaccataaagagggcatagcacaaaccctccaccttcagaagtcttcctcccatagctatcccccaagagtacaattgccggagaattcatatctctgaagtccaagcaccagcgtatatcaccagaagcctcaaggagctcaacacccacaggagtgaccttaaatttctacagaatgttcagatacaagaaccaaagtattagacatcatgtgatgataatacaacagtatttctttcaatacagcattatgtgagtaataagttatcaaagatggtctccgcaatcagctaggtatctaaataatgaccatagaactggtacactacaatcatctaccacatccagtcacttatatatgacatttcgaacaacaaactaaagttaaaagcaagccagacttgctgtctgaaacatcatatggatctgactggagggagtagtatttcatagcatgtcgttattttgagcacattttgtggcactatttttcatatagttaaaaaatcgcaaacaactgaacaagaatgaatgtgtgaatatgtgaattatcttcaatagttctgcttgaacttgtagcctggtgctatgagatctggtgaattatcttaaggatgcaacaagttgaatcatgaagtagggtagtactagatgagattgggcatggaagcatcaattgatcagaatagagttgtacagcacaattgcttacagaaactaagc

SEQ ID NO: 163127 - DNA, 833 bp, Zea Mays
aacaagtgcatcacaacacctaagggtgcaaagctgtccgagatacgcaagtttctatccaagcaaaagtcgcctaagggtgcagctggatcagcacaacaagcacattctaatagatagcgcgaataacaaaaggcacaacttatttcaaatacgagataaacaataagcacagagcgaccgttcaatacaagatattctgttctgcgcacaagttcccatagtcgtcctttgggcaagggggcgagggcagcgttacttgaattcaccaaagaatggccatgtcaacacaaacccttacataggctccaccttcaggatcaggctagcctcccggaaattgaacaacattagtttaggctcctcgccgtcaaaaagagtccacaaatctctctctttgaaacactacctggtcgttggagcaaggataatccggcaagtaccctcctccaactgcattccttctcatggatgatacctctgcattcccatacagcgacgccttagagggactccaattccttgcgaagggtcgccaattattcccaaacttcgtttcgacactccgatccttctcttgccccgcagcgcattcgggccaaccctagacaaagactctgccacagtgggggcaaccctaggcgaagactccgcaacagacaaatctagcgccataaaataatctaagtcatcctccgaagactcatcttccattctagcaaacgggctcatccactcttcaccttcgacgaccatgattcaacatcagattcatcactactaagcactatcaaactttggcaaattaatgatttatcattttcattgtcaca

SEQ ID NO: 163128 - DNA, 592 bp, Zea Mays
agtactggaggatatgttaagagcttgtgcccttaagcatggtggtagttgggataagagtctaccttatgctgagttctcttataacaatagccatcaggccagtctgaagatgtcaccttttgaagctttatatgggaggaagtgcagaactcctttatattgggatcagactggagagagacaattctttgggcctgaactgattcaagaagcagaggaacaagttcgtataattcgggagaatttgagtgtggctcaaaccaggcaaaagagctacgctgataatagaagaaggccactggaatttgaagaaggagattatgtgtatctcaaggtctcaccacttcgtggaatgaggagattcaaggttaagggcaaattgtcccctcgctatattggaccattcttgatctttaggagaattggagagatggcataccaacttgagttacctgctagtctatcagatgtgcataatgtgttccacgtgtctcaacttaagaagtgtctccgtgttcctgaggagcagttacccatggatgagctcagtgttcaaggtgatttgacttacacggagtacccgatcaag

SEQ ID NO: 163129 - DNA, 1043 bp, Zea Mays
actggaatcagaggtagcatcaacgtcctaggtaccaacctcgacctcatgagaaggatccttttttcctcataccagggaagagcgagagggcgattgaccaccagggggatccctaggatatggcgtagcaactctgccatggacaggacacattggggagtatatttagtaacttaccactccagggtatcagacactagatcgaccaagctactttctcctaaagctgagacactgctaggctgagcagctggtgagacaaatgatgcatcaccaccacatgtgacaactgacaaaacccccggcgagctgtgataaatagaaggtttaaagataggaaattgtgaggtattctgagtagtcgccttggggtgcaatgggggaggggttggtgaactggaaatgcaacatatcaacattggagggttcggcccagaggcgaatgaggaagactctagcaatggtggctgggccactatggttgaggattagtaacttctcaagcacatcttcaacactattgatcttaatgacccctctaacagaagtgtaatctccattccccaaacatcctagatcaatgcagcacgcattgccaacaacactgagaaccacacacattctactctgatgccagtgttcaagagggtagtccacaacagcaatttctgcaaaccactgatagtttgcaatcacacggttgtatgcttcttcgtggcgctcgaaccacacctagttggcaccaaggacaagacgacccatcgatataactcttttgcgctcagcttcagattcaaagacaatcaccgccaagcctctcgctgaagcagcaaagcagatcaaggagctccgcatttcctctcctagagttcacggaccagagcgaatggtgagttgactggctggtccatgtggatgtagtctaaagcttactgaccaaatattccccatcatccatgtggacctcagcaaactccctcctgcactctagggttggtgtgttactatcggcgttggaggtagagtagggtggacgtgga

SEQ ID NO: 163130 - DNA, 963 bp, Zea Mays
gtgaccgtggcttcatgttgcacaagggtctggtcatcccgaagcttaaagacagtgggctcatgaccatcgtattcagtttctccctcttcttctcattggccttgatataaaaccactcactcttccagctggttggccacttggtgcgatagctgaggaccggagccttcgtatccttgtgatacgcgaaattatagcagccaaaattttcgtgcagcccgtcagctctggcgttcgtttgatagtgcaactcatgcactcggcaaaatgcttcggcatttgggttcatcccttggcttcgaagggcccagatgaagatgctgagcctaacaatagcattaggggtcagttgatgaagaaagatttcataattatccaaaacttctccaatcatctcgttcagtggaaaccataatcctgctctgaaaaagcttttgaaaactactacttcatcatcttttggcgttagagtggtttcttccctgacaaaacgaataagcttcttctcagcttctccgaagtagcccagtttcatcatcatgggcacgtcggcttcagacacagtagatttctcaaaatccaggtggttgggttttgatgggatcaaaatgctataatcttcttcttcttcatcagcattttcttcttcctcaatatcagcctgatcagcttcggcaccaaaagtaccttcgtcaatagttccctctgtcacaactaagcccgattgtctcatgacttcggaaatcggagctgtctcggtggcttcagtctcatctccttcacgagtcaccctcgcagtcgagcgtactctggccatctgatggatttttgcggtttttacgaagttgatgttttttatagtttttgatgaagctctctcttttgacaaagctaattcaaaatgatggttcgctcgagaatgcagtgaaaaagttttggctatggttaaatttttcaaca

SEQ ID NO: 163131 - DNA, 573 bp, Zea Mays
gttggcagcttggcttagcacatgcaattgtcagagtctatgatcagagtacaccatgcattccatgtctctatgttgagaaagcatttgcggaatccagatcaataaatcgagttagagtcgattcccgtgtagcaagacctgactctacagtgtcgtctgctgcctatcctagaatccttggagctcgaggagttgatgcggcagaagtaccctgaacttttcgttaaggggtgagtttttgttgtcgctgatcttttcttgtcgttccaagagaagcgtcggaattcgaggtcgaattctttttaaggggggtagagtgtgatacccaattttctgaaaagaagttaaatttcttttttccttttctttcgtgatctgtgtagctggggttttggatttctttgttttaggaagcattcaccagtaaaacagtagaattcttgtgagacatgcactgggttgggagcagacgtgcaagttgggccgtggatctcgatccggcccactagtcccttcccttaaccctagccgcccctcccccctaatcccctttttggttgcagccgcccc

SEQ ID NO: 163132 - DNA, 331 bp, Zea Mays
cttgttcgggcgcaggggggtttgagcgggcagatccatacgggttggctagcggcgtcatggcgttcggtcctcggtcgtgttcgttagaaccatgtggcgcataggacgtcgtagccaacgccgacggggcttactccgttgcggtgacatgtgcgccactcagtgcgctgacggaaggtagtagacgactaggtaccggtcgactgtagcttgggggagaagcatatgccgctgatatctggttcaacggctgagattaggagctggcgtaccgattggggaaactgtcctggaacgttagatcgtgatccagtggcgcagagtggat

SEQ ID NO: 163133 - DNA, 725 bp, Zea Mays
gtatccacaataacatcgaagactgcccagaaattcttctggcaaaacattatttgccgcttcggagtcccgtccgaacttacagttgacaatggcaagcaatttgacagccaagacttcaaggatttctgcttctccattggcaccaagcttgccttcgcctcagtataccacccgcaatccaacggagttgtggaacgcgcaaatggcaaaattttcacagccgtcaagaagatgctcctcgacgacaaaaagggcaagtgggctgacctgttacctgaagtggtctgggcactaaacacgactgagtgcagggcgactgggttcacccctttccgccttctatatggatcggaggccatgaccctgcaagaaataaaacatgggtcaccacggacagtcccgtcagccgtccccgacgtggacgagcccacttcgaaggacctcatcgacggagaccgcgtcttctccctacaggctctaaacaaataccaagttcaaacaaaagcatggcacgaccacacagtcatcccgagggaattcagcgaaggagacctcgtactcgtccggacagctcggacagagtccggggcaagctggagcccaagtgggagggccctttcatcgtcaagacgaaggcgtcccccagcgcgtacaggctcacaacgccatccggcgaggacttggagcattcttggaacattgataatctccgcaattttttt

SEQ ID NO: 163134 - DNA, 475 bp, Zea Mays
ggcacaggcccttggatccgagatctacgcctaatatccctccacaccactgatcaagcaagaggcctcgttcccgcaatcagcgatcccagattcaaactatccattgcttcctctagatctaattctggccacacatatccgatcaacggtcatggaccgatctagctaaagcggtattattcttggaatcttgtctgtctaactgggattggacgaccaaggtcatatccccttaccccagcctaagccgcggtggtgcacatgcatcccatggcggtgcgcgccggtgagcaggcgaactgcccaccccggtgcccgattttgaacgaggatgggtcctacgcatggaggcgacctaagtgaatgtagcagaggtctacttaccacgaattacagagatagttcttcccatggtgtggtgcggtacattggtgggtttgacattctggcgagcaatcttggtgactccaag

SEQ ID NO: 163135 - DNA, 611 bp, Zea Mays
gacagttaggattagatctggttatttcaagcagggccatccgatttgagatgaacgccggggatttaacggctagcccgagcaggggctccctggttgccagcagtggcgccacccgagtccgtggcggagctccgctggagacgagggcgcgctgggggacctggggcgccgggaagggcttcgggagattcgggggagtgtggcgaacatggccatgggcagaacaccgacacgggggtgctgaagggtggaggtccactgtgaggtggcttgacagcggtgcaactctactccagcaaacaatcgcgcacaaccgagggcaggcaaggggaaaataggggcggggttaggttggttacctcgattgaaggctcacggaccctcgaatggcggccgaggcacggtggggtctcgggtcaatggtggcagagctacagaggcacggagaaagggccggtgagcatggacctagagaattagagttgaagggagcgaaccgaggggtgtcttgggttgctagtgacgaggcgaagctcactgaggcaacagacacggagagggctcgatggagatcgtagaacaagcacgggaccacagtggacgacaac

SEQ ID NO: 163136 - DNA, 422 bp, Zea Mays
cttactgtaatacgcggtggtggcctatgaccgccaggatgtgtctacaacgcagtacctatggctataagttgcagcttcctccacaactggtaggccaatctcccccatgcaggcgcgcacaggagagggaaggctctcacgcgtgagaaactgagaatcgcctgcgggccgcgaatggcgagcgagcacggcttgagaatctgacgatggaggaagcttggatagtggaagggtatttttggagatcaatttgtagatgctggtggaagcgttttctttcctatactggccttctcgaaacctgtaggagttgctctaacaggtaagcatcatcagcccctccttgtccctcagtttgtaatacagcaatttcagatatggacatagaaaaactctaggtccaccactgatagtaatcc

SEQ ID NO: 163137 - DNA, 640 bp, Zea Mays
caggcaatgtacgccagctaactggtatgcagaaggggtacgggtcctccggttggtcggaggaagtcccatccaagattcatggcgtttgctcgaggtggagtagaggacagtaagcctgctacctctagccatgagcaccttggttagatgtgccgtaccgccaacgaagtcgacgataggtggacattggcctagctagggaatgtgctcgtatccgatagattgatcgaatgcaatggtgtatttgaaccgaccgaaagaggccaagatcgttggccaagtgtccatcaccttgcatcgttcgatttttttgtgctccctcaaggcgcaatagccacgcctctcgaaggttagtaaacaaccagtctctctaggcaagcggtcctcttctccttggcatttcgtctttccagtgttccggtcccctttcgaatggtgtcgtcttgtgtaggaattctctgagcaacccacaatccttatagcatgtcggaccgggtgccgatggttcgaacatgggacttcgaagagttttttgaaatgatcggtggtttccttgattggaggccttctttttgtctcgcttgccaaagccatcaacacgtcggctcgctattgtcggcttcttctcccttttgcg

SEQ ID NO: 163138 - DNA, 931 bp, Zea Mays
tctgaacatggcaatgatgtctagattcaggtcagctattaatgatctggcattaaaggaaatccaattgcatgcaggaaatatacttggtcaaatcagcatgctaatcctgtgttggtcaagctggacagagttttttgctcttctgattgggaggctattttcccaaatgtgttgcttcaaagttctgcttctcaggcttctgaccactgccccctactcttggggctccatgataattcatttgggaaaaacggttccactttgaagcattttggccaaaaattgatgggtttcttgatactgtacagtctgcctgggactctgtgggtagttcgccttgcccctttgtgaccttggatagaaagctcaaagagacctcaagaaggctgcacagctggagtgataagaaagtgggtcatgttgcctctcagttggcacttgcaaaggagctcctccataaatttgaaactgcccaagatcacataatgctttcaccggctgagaattggctcaaaaataagctcaagatgcaatccttgctgctggcctcctttaaaagaactatggacaggctgagatcaagaataagttggctgaaggaaggagatgctaataccaaatactttcatatgcatgcaaggcatagaaagaggaaaaatttggtgactaaacttaaggatggggataacatcttgaccagtcatcatgagaaagctggagtggttgaccttttttactcaaaacttattggtcatgaggttgaaagggatagatccatcaaccttgaagctctcgagcttccggtgcatgaccttgctgatctagagctacctgtttctgaactggaaatctgggaaaccatcaagaccataccttctgacaaggccacaggtcctgatggtttcactggaaggttctataaagtttg

SEQ ID NO: 163139 - DNA, 590 bp, Zea Mays
ggcccatcatcccagccgcactccctccctccctggcagccgctgccaccttctctcccttgcctcccctgctcctctccctcagccgccacccactctctctcctcctccattgcttctcttccacgcgcagcgccaggaacagcagagccgcccctgccacgtcgccgaccccggtagagcagcgacgcccaggtgccacccgcaccgacccgactgacgcgctcaagctccgcgtgccaagacagccacccaacgcgccacatgctccgagcaccgagcccctgcgccaagcacccgaagccgacgccaagccaggaacccgcgcgacaatccatttctccttcgttaatggagcttcaatgcgcccgttcgtttctctcctctcccccttaatctgtaagtttctcctccccattaacccgtctattttctccaccattaatggtcgtcggtcgccatttctcttcccctcagtgccctctcacttccccatcttcgactatatatacgccggtcccgagccccttctttcttccgtgcttgtgtgactctgtgctctgtcgcccataggccatagccgtagcacc

SEQ ID NO: 163140 - DNA, 663 bp, Zea Mays
gacacctttgaagcatccgaaggtcttgattcagtacccttttcaacaatctccgcaggccctgcctctgcgagagctgagggcccagcttcagtttcaacctacatcatggtagcttcagaagattcctttgaatttttgtctcccatgctaggtgattctacagaggcaggagttagtacctttgtggattccataacagcatccaatacacttaccattctccttctcctcggagttattgaagcaatcttttgaaccttcgccagttctgcctcttgcaatgaactcaaagtttttggccgctccgctgctatcttcgagattgcctcttcgaccgattctaccctggctttggcagtagtggggtgacttggctcaacggtagaagaaggcccttcagcaagcttcggtactttggccgtttcaatatacctgggtcggtgcgtcaaaactttaacctttttcccttcggcgtggtagagatagctgaagcagcaacctttctcttctttccctactttcgcgaggggtaacaatagtctaggtaaacaaagccaatgacatcaaaaaccctatttaacgttttcttgcctcaccctccgaaggccaccatcatggcatcatctttggcccttgagtaggcaccaagtaactcgtcac

SEQ ID NO: 163141 - DNA, 489 bp, Zea Mays
cccggcgctcggccccgcgtgcgcctcgcctcgccacgtcaaccccgcgcccatggctataaagtgaaccccggcctcgaccgtacacccccacgcgctcccaaccctgcccaagcacaagttcactggcgtttgcctagagaacggcgtgccagtggccgcgcgagccccgaccaccatagaccggctgctccaaccctcctccaccccgtctgaccctcagtgaagctccccgaacccgcagacccaacaccacctcgccggagacgacggatcgatgtcgccggacttcaaccggccgtcgtcgcacgtagaccgagctacacagtaagccattcatcgattccttgcgcctacggcatccctgacctccagtgaagctccccgtgccatttaattgaactataccgccatgagcaggccggagcacacgccgcagccaagcccgaccgcctgcgcacgcggccagccctattccggccatcaccg

SEQ ID NO: 163142 - DNA, 584 bp, Zea Mays
gataatttaccaggaggaacgataaaatgaaaagagctgagttacctgaagattggagaagaatgagggtaatcccaagtcaggagaagctgcatcgtagctcgacgaaggaagatcaatcggaacaatttgaataacattgtcaggggttgactcagccccaccagcagatatcagaattcttgcatctggctcgccaacctccaaggcgactcgctcgctcaaagtcaaagaagcatgcatcgccatcaccccatcagatcgtggtggagacaacccgacatggacatccattgaggtgtgggaaggagagctcacttggacaccctcgggggctgggttgtagctcgcgccacccaccagagctggatcattaccagcaacaccctcgggggctggttgcagctcgtgctacccaccagagccagatcactaccggcgacaccctcgggggctgggttttctgcaacagccacctctaaggctgaaggatcctcagtcacctccatgggagtcgggcaatcttcaccaacttcttgacatcgaagactgccatccaaagtagacgatgtgcgagacactgc

SEQ ID NO: 163143 - DNA, 583 bp, Zea Mays
tcacttctggattctagtgaatctagtagtgatgtttgtgtttgatgttagtatggagttataagtctaaatcccagtgtcgcaaccatcgaggagtcggtgttgccatcttaaccctaaatctgtaatcctccattcctctctgattcttagctcccctcttcgtctggtacctcctacgctcaggtgttcctcatcttcattggccgacgggtactcggcaactctagtgcttcgggtgcgtttggtaagtccatgaatgtttgttccggtgatgtttcttcagttctagtgatgttcatcatgtttgattttttgtatggaggtattggtctaaatcccagtgccacgcagccattaaggaactagtgtcaccatggatatcgatccggctgctgaggaggagtaccgacttgaggcacacaatgaggagtaggatgcacaggcctttatcggcatcgacaacgatgatgctcctggtactagaacatggataggctccactacccctactattgatggaagcagttctggtactagttgtaatgatattggagagacataccatcatatatgttttttc

SEQ ID NO: 163144 - DNA, 635 bp, Zea Mays
agtgaaagtttcgatgttgagagtgagaatgaagatgccgaagatcggccatggagaccaagcgacgttgtttttgggaaatcaacaattagacaagggcaaattgaagcgatgaaatacaaatactttcatgatgtgtctatagtgagggctgggggagaagacatcattcccctcccaaaaggtgatgaagtggtagtcttcagaagcttcatgaaagccgggcttcgctatttgctccacaagatgctgatcaaagttttaaaaatgtttgagatataccttcatcaggttacccccaagctcttattagagtgggagtttttatatgggccatgaggagccaaggactggagcaagatgcgagatgcttctgcaatattcatgagctgtcttatcagacgaaggcgactggaaaggaacaatatcataacaattttggttgttacagcattgtgccttagtctgaggcgaattaccatgtgcccacgttttggaaaaagtggtcaggttcttggatgaaggaatggttttacgtgaagaatgacctggataagagggaagatgtgaaaggcgttatccaacgtcctatatggtcacgcttcagcattaggagcccatccatcgcacttgga

SEQ ID NO: 163145 - DNA, 282 bp, Zea Mays
ttggaacttattaatgatgaagaactgggattatatggttagagaacgacaggttgagtaccatcttaaagatcataaattccatgacagtgaggttgataagtgagccctgaggcccaggggcgaagctagcatataaggttgccggggtcagtaggcttggctgacagggtcaaatagcttaatgtgcagtgctaaccaatgatttttcattgtatttttcaaaagtcattggggtcagccgaccccgacaattgaacgtagctacgcccctgctgaggc

SEQ ID NO: 163146 - DNA, 463 bp, Zea Mays
gccggaatgatactgtttggtgagttacaagggcgcattagccctgaggattcaaacaaaaaatttacgaagattatcgatattataggaatgctctaggtcctcgccggatggcgttgttagcctgtacacgctgggggacgccttcgtcttgacgatgaagggaccctcccactttggctccagcttgccccgtgactctatccgagttgtccggacgagtacgaggtcctcgttgttgaattctcttgggacgactatgtggtcgcgccatgcctttgtttgagcttggtatttgttgagggcctgcaaggcgaagacacggtctccgtcgatgaggtccttagaggttggttcgtctatgtcggggacggctgaagcgcttgtccgtggtgacccatgttttatttcctacggggtcatggcctccgatccatatagcaggcggaaaggagtgaatcca

SEQ ID NO: 163147 - DNA, 1884 bp, Zea Mays
tcagccagttgctggagacagccaaagataagacagttcgcacagtagcaggcttcacgatggggctgaaagtctcatcaaaatcaatgccgggtcgttgcgtaaatccacggagaacccagcgagccttgtacctttcaagagagccatcagcattaaatttgtgcttgaaaatccacttgccggtcacaatgtttgcaccatggggtcgaggtaccagatcccatgtgtgattctgcaagagtgctgcatactcatcttccatggcagctcgccaattaggatcagcaagagcgccacgaaaggtcttcggaattggagatagggggcgacgtggaacagtgctggcacccggaagccagccttagcgcgtgtgaccatgcgatgatggttaagcactggggagacagccaccgctctgggtgggggacaacgatgcgatgcgttcgtaggagatggagatgaagcagcgacactgccagtcgagatggcagaaccgtccagaccagccggggtggttgtagtggccaggtcctgcactgggggtgtggacgacgcgtgaagacttggccaaaccggcgtggtgcagtagtgtcgggtgcaccaccagcagcattgggtggagcagcgcctgctgctgggagcagcagcgccgggagctgtaggcgcgccaggaacagcttgggcgctaggagcagcagcgcctgtaggtttgctgggagcagcaacattctccggtatgagtcctgaaagaatcagaggtggtgggcctataggtggcggcaccgggttagtggtaattgtatctaggaagtcaaaatcttgggaggaggcagtgggttgctgttcagcaaagggaaaagtggactcatcgaaaacaacgtggcgggaaaggatgacacggttggataggaggtcaagacaccggtaccctttgtgatgtgacgagtagccaagaaaaacacacttagcggaacggggatcaagtttgtggctagtggtggcagataggttgggatagcaggtgcaaccgaacacgcgaagatgttcataggagggtatggttttgaagagggcaaagtgaggagtggaaaaatgaagggtcttggtgggtagaatgttgagaagaagtgttgccgtgtggagtgcttcaacccagaaggttggtgggatgctggcctgaaagagaagggagcgaatggtgttattggtagtacggatgatgcgctcagctttaccgttctgagatgaggtgtaggggcaggacatgtgtaggaggacaccgtgggtgaggaagaatgttcgagaattggagttatcaaactcgcgcccgttgtcacattgcacggctttaatcgtgacaccaaactgtgttttcacataggcgaaaaactgagtgagagtcgggaaagcatcggactttagtcgtaaagggaaagtccataagtaatgggagcaatcatcaagaacgactaagtaatatttgaaacccgagacacttaaaataggggatgtccacaagtcacagtgaataagatcaaaattgttgaccgcacgagaagtagacgtacggaacgaaaggcgaacatgacgactcaactgacaagcatggcataaaggagagctagcatctttattacacatgggaacgattgatgcgagcttggagagggactcatggccagggtgaccgagacggcgatgccaaagtgacagagtggagctggcgatgaagctgtgtgcggcagggaggcacagggggtatagaggcccggagctattgcacctgacgatcacgttccgagatagtagatccttcacagagcaacaagagggatcaaattcaatggaacagttattatcggtagtaaactggcgaacgga

SEQ ID NO: 163148 - DNA, 359 bp, Zea Mays
ctcagggtgctggtggtggaggagtgcccaggggcgctgttcccgtgggtgctgcttcaggtggtggggctgaggtgcctcttcctgttagtggtctttctctgatgcagtggatgggcatgaagttggacagttttgatggcagtggtactccgatcgaggcgacagattggctaacttacgtggaggataagatgaatgtcttcgagattgtgtatggggatcatgttcgctttggcacacagctgctgaagggagaggctcagatttggtggagaggcgtgcaggcagctcactcctcttcaccaggagtcctgtcctgggatgttttcatcaggaagtttaagaggaggttctac

SEQ ID NO: 163149 - DNA, 393 bp, Zea Mays
ctgggtgcctacaggtccagcaaggtcaaaacccatctctcccgcatgcctatttcatagattcgagcctcccttcctcttgtccactgatttgcgaccctgattggcgcctgctgcccccctttggtcctccctcatctctgttgattgattcacggtttcttccctttctcttcatacagtcacagggcaggcacataagcatttcttcctctccttttggcttccctcctcttgggtgtgcactgcccctgctcttgacttggatgtgcactgcctctactcgacttggatatgctctgcagttcgcatctcctctgcagctctgtttccctcctcttctgtttctttccccgtctttcctctgcttgtgctttgttatatagatgctga

SEQ ID NO: 163150 - DNA, 448 bp, Zea Mays
gaccactagggcaagcgagtagaggcctatgttgattatgtagtcattaagacagaaaaatcagacaacttcatcaaggatttgcaacagatcttcaatagtttgaggcgctacagatggaaactgaacccagagaagtgtgtgttcggagtacaggctggaaagctactcgggtttatcgtcacccatcgaggaatagaggcaaatctagaaaatattgaagccattatgaggatggagccaccgtgatcatagaagaaagtacaaaggctcactggatgcatggcagcgatgagtagattcatatcaaggcttggtgagaaagggatgccattctttaaactgctcaaaaaggtggataaattctagtggacgacagaagctcaagaagccttggaagcactaaagaagtttctgactacaccaccagtactcaagccaccacgcc

SEQ ID NO: 163151 - DNA, 517 bp, Zea Mays
gtccaaaacactgacagttggcatgctaggtaggggcttgcgcgttctcgatgaactttccaagctccggatggccagcaacggcggtggcgtggtttggacccccgaaatgaccaatcggtttggaagtctcgacttcgtcatccgtgacaagggaacaatggaaagggccccaaaagcccggttcccccgacgagcgactcgctcggcattaccaaaggcctcgacagcctccgtctcggtccccccacgaggagatgacaggcagtgatgtgtgctgtaacccactttcgtcgagatcgtgggaatgctagaccctatatgggactcgttccatgacctcctcctatcggggtcaaaatgcggactcagtttcccatcaagtgggactagccacaacctggcacatgaatgcctcatggacgactcgatgggggatccctcctcgctcacggagagccccaggagaaccccactggtgccacgatgtatgccatggcatccgacctgcctcggc

SEQ ID NO: 163152 - DNA, 465 bp, Zea Mays
gtcagagcgtgtcgatcgaaatccaatggagacgacgaacttggcaaagcgatgaaaccgagcgcgtggtgcctgtttcagcccgtagagggacttggacaaggcgcacatggcatccggcatagaggtgtccacgaatcaagcaggttggtggctgaagacgtgttcctgtatatgcccatgtagaaaagcactggatacatcaagttgtcagtcggtttgcagcgatggtgagcattgttcgaaccgtgcctggcttgattactggagcaaaagtctcagcgaagtcgattcctggtcactggatgaatccacggacgatccagcgtgctttgtacttgttgaggctgccatccggtcgaaacttgtggcaaaaaacaaccatttaccgaagacgatattagcatgcgaatggcgtggtaccatcttccaagttcaatttgctaggagggcaatgaagaaaaa

SEQ ID NO: 163153 - DNA, 535 bp, Zea Mays
gggaaagtctattcatagttcttcttctctttcccttgtagccccatcttctccatggtgactccattgtactttgcacattttaatcaccttactccttgtgacacgagtcgaagtatcaagaatcttgatagggtgctcagtataggtcagatcatcttgaacactaagatcctccataggtagctgctcttcaggtaccctgagacacttcttcaattgtgatacatggaaaacatcatgtacatctgcaagatgatccggtagttctagttgataggcaacttatcccactcgcttcaagatcaagaaggatccaataatgcgaggggacaactttcctttgactttaaatcttctcataccccgaattggtgacaccttcagatacacgtgatcaccctccttaaactctagcagccttcttcgggtatccgcataactcttctgcctgactgtgcagttctcaaattctcccttatttgatggacttgttctcctgcctcttgtataatctctagtctaaagaaccgcc

SEQ ID NO: 163154 - DNA, 431 bp, Zea Mays
atgggattggggctatagaaccgtaagaggctgtgctttcatcgcgcgcaatcaatttgggcgaaggtggagagggcagtgcgaatttgacttcgatttggttcactggtgttcgtgatgaccgagcctcgccgtgatccagggggctatttatagccgcggaggtccggcgatcacttcccggccacggatagcttctttagtgcatgcctagcacatagaggagtggtacagtgaggtagaatcacggtgcagaggacaccacggcggaaaacgattgactcggtggccgccggtgaggtctccggctggactcggggtagggtgccacgtatgcgctatctaactccggcgttatttgttccctaccgcgcacggatttggacggcggcggcacgaatcttcgcgcagagaggtcgccggtggtgagc

SEQ ID NO: 163155 - DNA, 273 bp, Zea Mays
gcacggtttgcttcactggttgcacaattacatagcggagcaggcgaggtcggcaacttatagcaggcttgagcagtggccggtgaatttggattgagacgcgcggcggccggagagcaagaaggctactgacacagttggttcgtggagaataccgtggcggactcaccggcgatgatcggatggctaacatgagtcacggtggtgcggttaaaggctggaggcgtggcgcaaccgcggtgaatatcgcggttccggtgacggccgtaaggc

SEQ ID NO: 163156 - DNA, 463 bp, Zea Mays
ttaaaattgtccttaacatttgttaaatgcaggacgacactacagctcacgtatgagctacaaagcattagcttatcattttcaaccatgaatgctaaattaaaaataccatgaacacttgaaggaattttttaccaataccatgtaacagcagcatacaatcacaaaattgaatatgatggtgaactgaagaagcacaatccactgttttcgaaataagttaattgtcaatctattgctttccttactgaatatgtgagcatgtgatgattttgaatatggctgagttcaaaagggcaagcactattgtgggccattcgttgaagaactgcattacaataccatgctcacatgtccaaagatgggaaggtaaatattaaaaaccaagttaacacgtgctcacatgtccacatatatagtacatgcaaccaactctaacgacatgcacttcatctgttagaac

SEQ ID NO: 163157 - DNA, 372 bp, Zea Mays
gaacagtagatgtgccatggtcgtgtacgaacaagcatgtagatgtagggcaaggatggtttacgttggaaattttaatatgtatatgcagtggagagagcgagtcagagttagcatgttacacttcttatagtcacatggaaattgatacacgcatcaggggatcagtgggaggtgtattgggtggccggacgggatccacatgatccacgggttgtttagctcacctgtgtattagaacctagacttgcctcgctactcaggtaaggtcatggattgaagcccaatacacgcctcacgtgtaactaggcccacaacgggatcacgttccccgcgcgacctaaatatgtctttggcgaatatggtgtaggc

SEQ ID NO: 163158 - DNA, 367 bp, Zea Mays
aagactgcagagtcagatttgatatatatgtgtgatttctacagatgtctgagaacaggcgcagaggtgcgaggcgtgctcagcctgaacagcaggcaccccaagaggaagcagccccgcagcaacatttgccaccgccagcaccgatgaccattgagcatatgttcttgatgcagacccaagcagtccaggcaattggacagaaattagcagccatgcagcaggtgcagcagcagccaccaccgcctcagcctccagtgcaagtccagatgccacaagtgcccagagacaagcggacagagttcatgaggggccatcccccagtctttgcccattctgctgatcccatggacgcggaagattggct

SEQ ID NO: 163159 - DNA, 417 bp, Zea Mays
gccatgagaaggaaagaacatcaatcgccacgccactaccgagctcaggcaaggcctgagagcaaatcaccctggcctcacatcgcacccggcagcagcagcaaacgaggccgaggccgaaggaaccaagcggaacgaagaccaaaatcacatcacgtagctacagctcctccgtcagcagccggggagcccagcccagcagcactttgtcccttgcaccgatcgttcctccgtcctcctcgcgtcctcgccttgcgcgagcactgcaccagcaaggtgacctgagcttcctccgcttcccgaacctagctgtttagctgtccttcacccacccaacttgtctcgcaccgcgattaccgagccccgatgcgcgcacggtttacggggcggcattggggtcccgacggccgaccccac

SEQ ID NO: 163160 - DNA, 311 bp, Zea Mays
aaattcgagttttctccttgggcataacatcacagctccaattaaaggagccttagacgaagtgctccggtcgatgccaaggaactacgggcccggaaaaggcccctgagtggcatcccgcaaataaaaccattgtctgttttggcccttgttagaaagggaaagggaatcgggatgtactcgcatgaccttccattgcggaggtggatgctagcgcatcggactggtcacacttttgttgtcctttgctcctctctctttcgcaacagcttgacacaaaagtaccgctataaggtgaggttgggcttgac

SEQ ID NO: 163161 - DNA, 424 bp, Zea Mays
gctgtggagaaggtggatcccttgctggtggagtagacaacgggtctctaagaggatgaggaggagaaggtggtggagtcctaaatgttgatgtttgtggcagagacggtgggttagaaagaggatgaggagcagcatgtgaagattcaggaggtgatgatggatgtacaataggtactaaagtttgaggaggcggagatggttggggatgcgacggagatggcattggtggatcaaccaattcgacatcccttcgtggccaaaggatgaaatttttgatggcttgtccaagtgtctcgatacctttgggcctagggatgtctagcatatcatcctcggatcattggacggtcgtcgtcacttctaccctgcaataatcatctggaatgtcgcttccatgaaactagcgtcctgtgatcacaac

SEQ ID NO: 163162 - DNA, 659 bp, Zea Mays
ggagggttctggaccgcccgattagagattcacggcccagatcggccccggccgaaggggtatcctatttctaatcgtagccgtccatgcgatgatcaacggtcgcggaagcatcgtctcctacccagcccgagccacccaactggcctcagcgcacggcggcggagtcaccggagtccatgaatccgaccaacccgagcgccagactcaaattcgttcggccctcgcgaaattgacgacgcccagagcctgattcacccatcaattgctactgccatccatcgtaggacctggcccacagtgcaccgcgccagcatcacccgctaccccgaattgacacacgagccatggctaattgagtgcaatacgactgacaaaccaaggaattaacggtgtttctcatacctaattgcgcagcagaggttctccggccccggtggatagttggaggtcgagattccgcgacaacgacgaggaacttcagagagccgcaaccccaatttgtgtgtgcaggggtcttggtttgcttcctgtcgtaccgaagactccaatccgcgacaaaccgaacccacacgatgtgagtgcggtgacggtgccgctcgcaagctctcaatctctctcttcctctcctcggatttctttctccatcgattttgcgt

SEQ ID NO: 163163 - DNA, 510 bp, Zea Mays
aaaaaatccgccatctgcgcgaactccgcggggtcgttccaaccgaatccgcgcttctttctagctcggcttccgagatccggctcgctcggggctatataggggctgagcgcgccgccgcgtctgtgtgtgagatggggaagattggcgtgcgccgtcggatccgctatcggtggccgagattagaatgtttgggcccgttcgcgcgattgagcagacaccgtagatccatgaccctgcggctcagattagggtcggcttcattaaattgtgggcgtaggatcttgatccgatggccaggggtgcgtaccggttcgcgagtgtggaaatctaatccgagcccctgagtttcaatcggacggccagaattgacctataccccttcgcgggcacagatttgcgcataagcccctgaagtatttaggtattaacccgcagtcctggctactggagtctgggtcttggaccccttttacgctctagcccctggagtttctgttaataatgcgc

SEQ ID NO: 163164 - DNA, 673 bp, Zea Mays
gtcgttttccggtgcggcccagccgtcccagttctgaactatgaaccctaatggtcatacaaaagatttctggtgacgtgttaaagactctgtagtgctgtaggccagattgtgctggactctagttctgatatgattctgtagcattttattttattagccttgaacgcggtagtcgatacagtataggcctgtttcaaaggttcatcggaaacagttctgttcctgccaaaattggggaatttccagcaaaaacattagatatccatcctgtgagcagcccatccccgtcatgatgtctctgtctgctctcctgtcatctcatctagttatttttggtgcttcagtttattggttttttgcatcctgaagtgatgtgtttctatgttatgttcgtagttttaggttgtgttgctggtgtgcagtgtggatttgagttatacttgttgggtggttagagtaattattttcgtcttacaccataactttggattgtgattggaacatagctttgaactgtggatccttgcaccatatattaggctgtgtttggttcagcttctggaaagtgtttctaatgagaagctgaagctcaaccaaatgtttagaacctgaaactgcttttccagaagcagttcctttcgtgtaacttaattttcaccgcttcttggac

SEQ ID NO: 163165 - DNA, 710 bp, Zea Mays
tatagagcctcaaacggtgacatcttcaatgtggcctcgtacctgttattgtaagagaacttcacatacgataagctcttatcccaacttccaccatgtttaagagcacaagctcttaacatatcctccatcacttggttagtcctcttggtctgcccatcagtctgaggatggtaggccaaactaaaattcaactatgtgtccaagcactcgtgcaacttcttccaaaaccaagaagtaaactgtgacccttggtctgacacgatcttcttaggcaccccatgtaaacatactatccaagtcatatacaactctgcaagcttggctcccgtgtaacaggtatgaagtgagccacctttgtcagtctgtccataatcacccaaatggagtcataccctataggagtgcgaggtagtcgaataatgaaatccatgccaatttcttcccatttccactcgggtatcttaagcgggtgcaatagtctagctggtctttgatgtttggccttgactctttgacacgcatcacacttagccacgtgtgcatccacatctcttttcagcccataccaccagtacttctgcttcaaatcctaatacatcttagtgctaccagggtggatagagtaatcagaatcatgggcttccttcaatatagtctcacgaaggctatcaatcttaggaacacatatgtggtccttgaaccatatt

SEQ ID NO: 163166 - DNA, 484 bp, Zea Mays
cgttgttaggtgaatgcggatgttggctgttgttgcacgtgcgaactgttgtgtggaagctgctgggtcctcctctattgtgcgtggcttgtggcgggcttggactactctcatggcttcggcgcttggaactgctcgtctgtccggtcctgcgtgcatctctctctcctggctggaggtgtggtggcctggcggcttctctgtgtttttctttttatgatgacttctcgtgttggctagggttggcgttaggggctcggtcagttatgctccctcagcttttataggcagcgcaccatagcaggcagagcagagataaagattccaattgcatccatctacaaacaaggctctcggcggaagggataaaagcatgcatcgcaattactgctgctctgctgcaaccttggctctcgtcaattggatgaccaaaagatgccaacgtctaagatcttttctttgtgcagctgcctgtttgtcacca

SEQ ID NO: 163167 - DNA, 772 bp, Zea Mays
gtgtgtttgagaaagttaggaagggaaaaaatgcaagaacgtttgagaaaaagaagcatcgaaccttaaagtcaggtaagacgtgtccttgtgaatttccgcggtggtggtgatgacggttgtaataagcaaatatagttcctaaaacacacacttatatttttgcaggacgcattgtgataagagtaacgccataatagtcttttgttgtccccatcttaattagttggttaatttggaaaaacgaagaaatggagacacgaccaccttcatagttgcctcaactactaactgagctgggctgcaataaatttaaaaagataaaatatgctttttcgcaatgggagggccatatgtgtgttaatttatcggcgccaaactaaacgccatgagcagcatccaagctctagtttcagcttcgttcttttggtccaagacatctgaatatttcaatgcttggctagaggctcctccactctttttctattgtagactgaggattcgctaggattgccattgttacagttggtgactcattcatatgagtagtaagtacatacaatcgaattgtttacatcttctctctaacccgagtatataaaagcagcagggaacgtagtagaaagccaatgtttcttcttcggctacccaagtgatctcctgccatggacattgtgtataggagtaggaagcatcaggaacacctgcattactactctgtcacatgcaagataggtagaggtagcaagtggcgtcaaatcatagacacccc

SEQ ID NO: 163168 - DNA, 809 bp, Zea Mays
ataacttagaccaacacatgaacttggttgtggcaggttccacaacgtagacatcttaggcttctagtttcttctttcttttggtatcatatgaatctggaccactaatgatgaccatgatatcctaattatgctatggtaacttgccccaacctcatcatcacagttgtcgttcttatcggtcttgatgttctttggctttggggtctcacaatgaggctcctttagcaccttctaggcaaaatccctaatgtgcaggctatcttgtgttttgtggttgctttggggacggtagatgcatcgcccctccatgatggatttgtacttgttgttgtagtcctcaatggggggcgcattgccctggcattaccgagtcacatgctcaacattgttcactcggtggtcgggcctgtgcttctagcccttgtcctagtctaactttcccttgtcctttgtcgaaggagtcatgcgatgcatcacctcctcgcttagggagtatttgtcaatcacttggaaatggacaaacatggttgtcggggacttctggatcaactcttgggatagttctgtgttctggagacccttgcggaatatgcaaactacagtttcctctggcatgttggatacatcaggcttgacatcttgccattgcttgatataactctgaagagtcacatcctccttttgggtaacctacttaagatcatactatgttttttggttcactagtcatgctgaaattagcgatgaagaggtgttttaattcatcccaagagtagatggtgttgtccaggaggctaaatatccac

SEQ ID NO: 163169 - DNA, 393 bp, Zea Mays
caataatcatcttaacaatcaaatttctagtgtgatcatgatcatattcaatgggattaacaacaagagaaccatcatcaagagcgaagctgatagtaccttgagcaacctttgattttgcattggccaacttgttctggtaagcggtgcacttatcaagatgtcgattcagctgtgatgttggacccccaggtcgatacacatacagtttgtaacaaaacttgcacttggccttcgtcaccatttccccaaacttctttgattgaacttcgaccaccttaaaatacttccagtaatctgctcgcttcgccctcttgaccttacactttgaaggagataatggaacatcaccctttgcccttttgactcctctctttgcattatgaacttgtg

SEQ ID NO: 163170 - DNA, 305 bp, Zea Mays
tcaaactgtggcactttttaaacttttgttccatgtcatctttatgtgcttttattggttacttccactataggtccttgttttgtctgattatatttgctcatggttatgttacaatgatatatgatacttattggttggagatatttaaattggagtttttccatagaacttccgaatagttgtacacaacacttgaacctgtgcattgatacctgtgtttttaaatcatgtgtctaaacacaaatgcttttgtggattttgatatgttttccatataaatctttcactctaccaacaaccac

SEQ ID NO: 163171 - DNA, 493 bp, Zea Mays
tggcgatgttgaagcatgtcagaaggcctttagtactgtgtgtgccttcattggcacgagggatttaattcaagagcacatagccttcagggtatggccacttgtggagagcagggatatgccgaaggagactaatgccgaattcaatgaaggtggtctagtccgattgaagtataccttcagatttagggagaagtttgatgagctagatgatgactggttgaaatgtattgaagctaccagtgatgagctgcttcgaacatattctaaggccgaagatgatgccttgtccgtagccttcgagggccgggaaaaaaaagattgaatagggtactcgatgcaatcggcttcgtataccctgattataactacccgctgcgaatgcaagggaaaaagagaaaagttgttgcttcggccaccactgatgtgccgaagggcaaaaaagtgaaggttctgacccaccggccgcggtatattgaactggccgtagtgc

SEQ ID NO: 163172 - DNA, 728 bp, Zea Mays
tggtggtatgggctgaaaagagatgtggctgcacacgtggttgtgtgtgatgtatgtcaaagagtcaaagctgaacaccaaagaccagctagactactgcacccgttaaaggtacgaatggaagtgggaagaaattggcatggattttattagtaggttgcctcacaccatgaagggttatgattctatatgggtgatcgtggacagattgaccaaagtggctcacttcattccggtcaatactacttataaaggttctcagctagcagagttatacatggctcgaattgtgtgtttacacggggtaccgaagaagattgttttttatcgtggatctcaattcacctaaaggttttggaagagccttcatgagaacatggtacgaagttgaactttagttcaccctatcatcctcaaactgatgaccaaactgagagaactaaccatgtacttgaggatatgctgagggcttgtgcccttaagcatggaggcagttgggacaagagtctaccatatgttgagttctcttataacaatagttaccagtccagtctgaagatatcaccatttgaagctctatatggcagaaagtgcaggactcctctataacgggattagactggagaaaggcagttctttgggcctgagattattcaagaggcagaagaactagttcgcataatccgagagaacttgagggtagcacagacccgacaaaagagctatgc

SEQ ID NO: 163173 - DNA, 493 bp, Zea Mays
gcgagggtgagcgcgaagtgaggtgaggcgcgtccggggtggtcttaaagccacgggtgagcacgaccgaggggtggctctgacatgcgctcggggtgtgcgtgggtgagcgctagtgcgcgctctagcatctgggcacggtgttgagcacgaggcagtgcagagagaggtcatgttcaagcgcggattggctccaaatctttgagattatggccatgatcccgttgagagatctcttcccctgacattcctttgtcgtttgtgtgtggaggttatgggtttcgctgactggatcaagagatatggaggggtgaagttgggtctgtctcactgctgaactccgagagaagatctcgggtttgacgtgtctagggcacgcatcccgatgccatcttcacacacattgcagaggggttagtttagaacaaaattgtcaatgggggcttaaggatttgagctagggtcaaggtgaacgcgctcaagctctaggtga

SEQ ID NO: 163174 - DNA, 364 bp, Zea Mays
gggtgttggcctctcgaggcatgacaagttggtttccttcaccgtgctcctcatgcctgacatggaagcactctcgagtcgagtcataaccctcatcatcggagttgtagtcatcggaaccgtcggagaggtagttgtcacacatggacaagaaatgtcgcatggtcctgagatcacgtagcccagagaagtctaggctaggaccaaaatcatcctctgcctcagagcctacgtacaccgagtttggagaggttgcaagcaggtctaatgccgaccgcagatgatgacctgggagttcctcatacatactagtgtaggtgattgtcgtatagggttagcctggaggatcgaagctaaatcagaa

SEQ ID NO: 163175 - DNA, 708 bp, Zea Mays
gactcgtgggcccgggcccccgtgccagagactgggctgttggtttcggtggaggtgaagaggcgcactaccgcaggcggtagcatgctcttcacgcagcagactgttctgctgctttcggcggagacgaagaggcgcatttactacgggcggtggcgtgctcctcacgcggcggttcgccttctccgcacatggaggctgacgcccgaagagtatgactcatgggcccgggccctaggccaaaggctaggtcaccctagcgtgcgtcgggcgagatctttagcgatgtctcggggcgttagtgggggaatccttctttaaaaaggggtttcatcccttcagtagcagccatgccttgcttctctcccactcgcagtgccctttcgcctccaaggtctctgctttgcgttgtcgtagtttgccatggccttgtaagctcatcccgagcgtgcccagactgagtgggtgctcgacatggtgtgtcgcctgcttggatgggatgcgtcggcgtttggcggaaggatttgcgtcggcgccatcctcctcggcgaacttgctgccggagagttcgtgctctttgtcttcaacctccccagcgggttagtgctgtcgatcttgcctttcttctgctggaggtgcacggccccgtgggggcggcgctcttccaccggtgcttagcttcaacgatgttcatcagccttgcggtgg

SEQ ID NO: 163176 - DNA, 1258 bp, Zea Mays
ctcttctcagctctcctggcgatcacccccctatgctcaccggtggtgatcgtcggcgacgtgctcccgtgaccctctcctacgtaggctcctctgcctcctcctctcggtgagcacctccctccattgtcttccctctctctctctctatttctctggtcagtgagcctgaattccacctctttgatccaatctcaaattcttgtgaattcctgtgaatccatgtggttggaggtgttactatgtgtcccttgagtatccttgtaggtttctagctccctttgggagggtttcaatcctcaaaaagccttttcaccaaaaccctaatccaccgcacgccacatgctcggtgaaatgcccaaaccagccaaaaatgctctaattgaacccaaacttttcaggcaccttcataatacctccagtaacatattcgcccaatttcacgccaatccgatattccaggcttcaatttcacacaattccctgtttcgagcgatcaattccgagtcgagtgcctaaatttcattttctctgcctaaattcaaaccaagcacatacttcagtcatattcacccatataaacctattcgtgatgtatcagctcaattccacgtcatttcatacctcaattcgaattccaaacctcctatggcactatttctcgttcaaacaccgtttttgtgtcgtttgacctctcgatcgccatatctctcgttttctgtgccatatttctctatgtatgtatttattcacatttcatatacttatgactatgtgactaatatgtgctcacctcttctgtcatttcagtgaccttgcctgcccgtgagccgtctcctgtcctgcctggattttcacatctcgtttgagctttccaggtagatatccactcttctgatattctatcggcagttatcgacttgtgcttagcttctctctcatttgcaggtcacgatgccgcgcacgaagaatgtgtcggcgccagggggaggagatgacgaggaccctcctcgcccctttaggcaggtcaagggaaagatcgtgtatttggagcagtaggaaggccgcaagaagtggcgtctggacagagcaggcagagcaaggatctcagttgcagattccttccgatcagattgcctaccgagtttgtcgtcatgcctctcgtcctcgctcctccgctcctaccactccctccactgtaccactccaccacccacttcgcctgcaacagtcactcctgcgccatccaccacctcag

SEQ ID NO: 163177 - DNA, 524 bp, Zea Mays
ggaaatgatattcaagcatgccagatagcctttaacaccgtatgcacttatattggcacaagggacctagtgcaggagcatattgcttataaagtgtggccccttggaagtggctaggagatgcccaaggaagctgctgtcgggtccagtcaaggtggcttagtttacctgaagtacacctccaagtacagaaattgattcgataagctgaacgtgactggttagattgtattgaggcaaccagcgacgagttgcttggtgcctacacaagggtcgaagacgatgccatgacagtggccttcggaggacggggcaagaaaagattgaataaagtttttgacgttattggcttcgtatacccggataattgctatccttcgcgaaagcaacgaaaaaagagaaaatctactgcttcgatgatcgccagcacgccgaagccgaagaaagttaaagttttaacgcatcgccccaagcgctctgagacggccgaaatgccaaaacctgctaaagggtgtaatacccaa

SEQ ID NO: 163178 - DNA, 482 bp, Zea Mays
ggcaattgctcgccgtcgtgcgaccaccgccgcggagccgctccgtgacatgggcgccatccttgttcggccaatctgctggaggaatgtctctggtggattcgttagggcctcggcactttatagctcgaaacgggaataggaatagggcaccggtgcgcaaccaggcgtgctccggtggtgctccaccgtgtgctctggggcggcgctgccgcgaatggctaggatggggaagacgaaacctgaaccgtcgatgtggcagcgtgcggtcaagattagaaatagcgtacctgttcgagggtttaatccgagccgttgattcgtggatgaccggtcccgattagtctctgtgtaccggttggccttaaccgttggtgcgggatccagtgggtctcagtgctcaacgttttcggatagtgatccacctaatctcggccgcatgacttagatccaacggctcataacacccgataccccttcgc

SEQ ID NO: 163179 - DNA, 1032 bp, Zea Mays
ataagacgaagaggttggccaaggtgtatcaggagatttcagagaagaatagaatgaagcatcaaaaggggctggctctgaaaactcaggttacaggagtaaggggagataatagggcaggaacattgtatcctgagttgagcaaggagaggcagttgagagactacagaagagcaaatgggttgtgttttatctgtggtgataaatttgaaccaggccatcaagcaaaatgtcccaagaggttggtaactcaactgcataatctgacagtggaagatatgggtatgattttgactgatgaagtgttgcagaagttggagcatgaggagaagtgagtggaggagttacatcaattatcctggaatgctatcagtgcacagaatgtgatggatgcatgagggtccaagctctgattcaggatcagatgttggtcatgttgattgattctggtagttctgcaacctttatcagtcagcgaattgtagcaaagttggggttgatcactgaagattgctcaactgtgcgagttaagatggcaaatggagcagctatgatcagtgacaaaagggttaaggaagtagtgtggagatctgggggcacctgtacagcactgctatgagggtgctagatttggaagcatatgatgtgatcctagggtatgatcggctgaaagcctacagtcctatggagtgtgactggattaacaaggtgttaatctttactgatcaaggaaagaaggtgaggttgcagggtgatgcaagagagatgcaggaagtgcaacaagtatctgtgttgcagctggagaaatggatgaagggagaggaagtttgggtgtttgtgcttctggagcaggtttcagaagaaacagttgggaaaattgatacagatctacaggagattctaagggaatttgaagatgtttttgctatgccttcgggattgcctccagtcagaccttatgaccatcacattcctctgttgccagggtctattccagtaaacgcaaggccttatagatactctccagctcac

SEQ ID NO: 163180 - DNA, 673 bp, Zea Mays
atctttaactcaaatattttggacaaactttttatgaaattccaaagttaggattttgggatgttacaaatcctaccccccttaacagaaatctcgtcctcgagattagttagaaaaggaatatagagaaattgatgtgtaaattagcttttagtttccattagttaaaaatttaagaatttccctttttctaatagtccttaatgggtgataggtatctagctacttattaggtatgatataagagatggataagttagggcaagaatagcttggggtaaaaagtttatggtgagaaagaactccttgttgggtggtaatgcatctgaagatcgatttggacttctctccttccttgacgaggttgatcttgttcttttccgatcttggtctcattgagtcggggtcggtgtatatcatcagagctgggggaatatggttaagatagttatggatgagatagactacatgatgtaggtcaaaatttggtttgatgtcaggtggggtttgatagattatgcaatccatcaagactctattggttgggttagatctcatgcatgtggctgagttggtctaagacactagaagtttcaagtgcatggggggttatggccttatcttttgtaccagcattaagtatcttactttagattagatcataatagattag

SEQ ID NO: 163181 - DNA, 908 bp, Zea Mays
aaccaagaatacggtgccgaaagtccccgtcgaacacgacgatacgcccccgcgtatagtctcgtgtgtatccccgctgacttgtggggccagtcaaccccagtcgtaggggcctcagcgtacgaagtctctactgtagcccacgtatcggaaaaaggacaagacgatacgccatatcgagtgtatgcctacacacactgaaaaagtgatgcaagggtcatagtagaagatgaagctgcaccaagcacgacatgaatcacatcgtaagttacccacttcatcaacaccaagcttgctacatgggacccgtatactggacggatgaagcggtacgccatactgggagcacgacagtgtatggcctcacagacgacgtcaggagggctcctgactacgccacccaagggcaacatgccgaactccctctagtagaatgaaagtcccaatgtagagtcatgcccttgaactataaaaaaggcaggggcccatatttcttcgcacgcaagcacacctgttgtgatacgactccaaacaatactacgatcagcactgcactggaatagggcgaaagtctgaaccagtataacccatcgtcttaaatccattattgagtcacagtgattcaccattcgaattgagtccatgttagcatcctcaccgacacacaaatcattgagtcccaattaattattctatcattcagagtaagttcgtgctcgtgttatcccaaagcccagcccatattcccaccacacattaggtataagaacggtacaacaacctttccttcatatgtagtagtacataagtaattggcgcagccctcagccaagccaatcatctcgccaacccacatgcaaactaccgtaataggaagctggagttaggtacgtacagatgcccttccg

SEQ ID NO: 163182 - DNA, 410 bp, Zea Mays
cccatctgttgctgatcccaatgggggtgctgcttgtgttgccaatgtggatgatgaggaggaagaaaatgagattcctttgactcagaaaaacagtcggcagttcatcgccagtggtgaaagtagtggagttccccctcctgctttgtctgccctcattggtctgcaagaactgtccctagccaactttgatcagactcttgaggatatggtcccggaagacttgttatcggagccagtggatgatggtgcaatggaggcttgcgttgacgtgcctgatgctgggttgaggtcatcccgtgcctcgtcgaccttagagcgcgatctcgagggtcgggaaactgacttggattgccctggtcctatggaagtagctgagggcccgtcaaccttagaggtggttactacag

SEQ ID NO: 163183 - DNA, 551 bp, Zea Mays
ggaagctcaatccagaaaaatgtgtccttggagtaccagcagggaagttgctcagattcattgtcagccaccggggaattgaagccaaccggagaaaatcgaggctatcatgagaatggaagcaccacgattacagaagaaagtgcaaaggcttactagatgcatggcagccttgagcaggttcatatcaaggctaggagaaaaaggcctaccattctacaaattgctcaagaaggtggacaagttccagtggaccacagaagcataggaagctctcgatgcgctaaagaagttcttgaccacgccaccggtatcgagccatgccatatcagtcggcagaagatctgctgttatacatctcctacatgactcacgtggtgagcaccgcgttagtagtcgagcgggcagaagaagggcatgcatatccagtacagcatccggtctacttcattagtgaagttctggggccctctaaaaagaagtatcctcaagttcaaaaattattatacgcagtacttctaactgctcgtaagctccgtcactactttgac

SEQ ID NO: 163184 - DNA, 360 bp, Zea Mays
gtggaattgagccgatacttcacgaataggtttatatgggtgaatatgagtgaagtgtgtgcttggtttgaatttaggcgaagaaaatgagattagggcactcggctcggaaacgatcgctcaaaaacggggaatttggtgaaattaaagcctggaatatcggatgggcgtgaaatttggcgactatgttactggaggtattgtgaaggtgcctgaaaaatttgggttcaattggagcatttttggctggtttgggcatttcactgaacacgtggtgtgcggagttttagggtttcggtgaaaagactatgtgaggtgggaaaaccctcccgaaggagctagtaacctgcaagaatgctc

SEQ ID NO: 163185 - DNA, 711 bp, Zea Mays
aaaaaatgaatgtgcatcatgttggtattattagttgatacatttgatgtgccaaacgcatgaaagaaatttgaagtttaaactaaattcgaaaacataaaataaaagaagagaaaaaggaaaactccatacctgctaacggaccacgtttccttagcctaagtcactctaataacgtcatcctctcacatctgggtgattctgcatgctcggcatccaatagaaattcactctcgctcgatttcgcgtctgcatccatgtgtgtcgctgctcagtttcccctccgcgctggatcttcgccatgaatgtcgcggctgcagctgtctagctcttgcatacaccggcgtgttggacccgcaggccaaaaaaatcaccttgcgttcttggggaatctgtggctagtgtgtacggctggtcatcgtttagctgcgcgccatggcaatctgaaacagaagctccatttttctctcaccagacgcacgccgtaacaactccaccgcggtcgtcgtaacaaaggccaaatcctcggccgggatcttcgctcgcgaatctcgctgctcgccccagctcggacttcgccgcctgggtataaatctgcggcctctcctccccaaacaacggcgcgcagagaagaaataaagagagagcctcgtcgtaggagagagagtagagcgcagcgaataggagagagaccgagcgtcacgattgccg

SEQ ID NO: 163186 - DNA, 511 bp, Zea Mays
atataaaagttgaatctcatcaatcggacattcatcgttatgtcgtctttattatttggtattgttactatgccacaactttagttcaatatatcaattagctagaaaatgaactcatggactaaggtaatttataaagaactagaaattgtattccatatcgagtgtttaagcttgtaatatgatgtaatattttttcaccatataatctctactacttaattgtgtattgtaggcgtccaagtagtgatgttctgcctcccgacgctcccctcccgggatctcggtcgcgctttcgtcgccgccatcatcggctccgctccctcccgggatctcggtcgcgctttcattgccgccacgcccatgcccctccattatctgtgttgtgcccttccattctccgcacagtacccctccatcgtcgtcccctcgcccccatccgtcgtctccctcgctccgctcggacaatcgtcgccttccccaatgccatcgagacaatcgccgccttccc

SEQ ID NO: 163187 - DNA, 742 bp, Zea Mays
ctctggttgtgcccttgcatagaccacctgcaccacgctttccaagttcgacgtcgttcattgctatctcgtttacaacacaccgccggcaggcatccaggtcatccctcctattgcgtgtcgttttgccctgcccagtaaagcccgcagtcgtgcgttcgcctccctgagcgagcaggagtgcgtctgtgtccgaaccaccatgtcgtcttagtcgcccccacacacgcgtttgacccagatgtgatcgcgttcgcaaccacccctgcataaagccccatcccactatccatccccgtacaacaaccccactcctccagccgctcacacaacctcattctcatctacctcatcgcgtgcatgctccattaggcgtgcctttccctctcctttccctggccacaccatgccacaagaaccgacaccaagcaacagcgccgccagcgagcaccccatgccccgaaccaccccacaccatatctgcagtacaggtacaacagtccctgtcgccggggacgttagacccacccttgtcgcgcgtgcagtctgatggctaattcgccacgtcgtcggtcctgcttcggtgagctgtcgacgctgtctcctgaccggcgaagccagtgacgcacccgtcgtgcccttgctcctgcgccgttctcatgcacagcatcacaggtgagaatcctctgcccttccctctctctgtctccattttgcgacgtcacacagcgttgcgccgctg

SEQ ID NO: 163188 - DNA, 553 bp, Zea Mays
aagttttttgagtctgatgattctgggagttcggtggtgtggacggaagagtcttcggatgatgatttggattattttgcggcattggatgtggctgcggcagaggcttctccgcgtgtggtgggtgctgaagttcccggtccaagtgttgggtgtaggcgtcgaagggcagtggcgaagcgtagagtgagtgaggtggagggtggtcgtcttcgtgtggacagggttggtaggcgggaattgttgtcctcgctagctggggcgagtgtaggtgagggggagttgtgaagtctgtttgagggtgaggagctgaggataatgctgttaactatagggagatgggaatcatcccgaaggttgaaccaatgtaaggtgtgatgccctcgctgttcgtatgcaactataattttgtatgatcaggctgtgtgcctttgctgatccggtcgtgcccctaggggacttgtgcactaggtctagcgcgtttattatgtcggtccggctgcaccctcaggcgacttttgcacggatagtctttggaggaagacttcggttt

SEQ ID NO: 163189 - DNA, 367 bp, Zea Mays
cgaaggggtattctatcgtctaatcacgaccatccaacctaagtccgacggtcgagaagagcccagatcgaaacgattcacaagttctaatccacaccgaccaataaaatctaacgctcagaatgtcatctcccaccccgcgaccccaggacagcggcgcggcagtatccagggcggcggcgccagataccaagcaacagagcaacaccggtgccccaaacgaccatctcgacctctctcaagcacacgggggcacgatttctaccatggataggctctacgcgatgtggaggaagaggcaaatagctgggacccgatcgtaccagcggtggaggcgactgaaggctcggccacggcatatggcagt

SEQ ID NO: 163190 - DNA, 667 bp, Zea Mays
aaaatctatttttaactctattcctctgatttacaaaatccctggactgcgcaccgaataaccagataagacaaggacccctgcgcaagtattcccgtgacttagtgcccacagcgcaggactgcgggttgactaacataaactttagggtctctttagcaagtttaccatggccgaagagatatgggggttttctgatcgttagatccaaaatcgagggcgcggattagtctggtccgtaaataaatcggtacgggctccccatcattggattttggatccacggtcacggtttgatccagccatcaaataatctaggcagctccccctggatccgacggtcacgatgtcctagcacgaaggggtaaatggtgatctgatcccggtcattcaaatccggatcaacgacccacactacttcttcttcctcaggtggcagaacacgaccgtgcctaccaagccgcggcggagcacaatgtcccaacggcggagccgtggcggggtaattctccagcgagaagtccatagcccagcccccttctaatctccatggcgcaccacatatcaacagcgtagggcgcgtcttcaatcctcgacccaaaccaggcggcatgcagcggcgccagagcgccacccggcggtcagtcgctggcgaaatacccagcct

SEQ ID NO: 163191 - DNA, 657 bp, Zea Mays
agtacgaaggcttcggaatatcgaaggtccgaaaaacaccttccctgagcttgttatcaaaaaacgaataaaattcacagcacttattggtcatcgaccagtcagtacgagcgtcttggcggttcgccttcttctcctgcagggctatataaacagataagttggtgagaagataccacaacattcattgctattgcacgatcgtgctgctgaaaattttcaccgaagccaaatctttccgcgttacgtttcgaacaagcatttcaccgctcaagcgcaacttcgtctgctagagtctgaacatcgaaatggctagagtaagatcaactactagggtgacccgcaagggagatgagactaaaaccactgagacaactcccatcttagaaatgatgaggcgttctgggttggttgtgcaggaaaaaactattgccgaaggtattactaatgctgaagctgaacagaccgtggctaaagctaaaagtgaaaatgaaagtgaggatgatgatagtatcctatgtccgactaagcccagccatattgaattcggtagatccaaaattaaagctgagggtttggttctaatgaagaaactaggatattttggagaaaatgatgatcaactggttcgttttgctggagaggagacgattccag

SEQ ID NO: 163192 - DNA, 536 bp, Zea Mays
tgaaataaccgaagctgaacatgacagagttcagaagaatgttgatgagcttcgggaatcgaaggaacaatgattttatgttgctgcacaatgatgcgagaaattgaagagtatgtttgctagtgtgggcactttttctagcgatgaaaagtttatttgcgacgacatcgaaggggcaataaagtggattgaaggtgaagttgaagcctttgacgaagttcttactggtcggggagatttctgtgcttacatgggtgcacggggagcggtgtcgttgctcgaaaaggttgttgtgagcacgcaaaatatgtgattcaatcaaaatttagggtttcggctattgatatcaaagacccttcggtcgaagctatttcactaggggaaattttattccgacatctggcttgttggtgggaggaaaatggtggatgaagctaccagagatagtgagggagagttccctttgaatgctaaatcttgtccttcaatttttgctttgatgtttgtgtagtatttttaagaaattgtattttggt

SEQ ID NO: 163193 - DNA, 607 bp, Zea Mays
cagtcaagcggaactccatgtgcgccatcccgacgagaatcatctgcatcgccgcctccatggatatagagtgaacaggatgcctagttctgagaagccgttgtcatcgaggggcgatgaaggatcgatctggcaatggggaggaggtctgcgatggtagggtcggcgggtgtgcgacggccgacgaaggatcatcatggcggcgggggagcaggtctaggatgggagggatggaggtgggtgcgtgtctacgcgagactgtgacgactgtatgcgacgactgtccaagactgtatttcgagtccgagcagaacgacacacgtgttgaagacagatgggctgtgagcccgcgaaatgcggggaggcctccaaaccgcgttgggttttaatactttagatatgtgattggatcaggatctaggctatttgcatgtaggaagaagtcagtgtttatagattgggtgcagattgaaatcattggcgctcggtgataatactgttggctagattacgtcgtgttggttactgttggggaatgcaaagatgatttaaaatataagggtggacaacaattatcaagttgatttgatatattttatttccatga

SEQ ID NO: 163194 - DNA, 448 bp, Zea Mays
cttttattatgtaaaaggggtgtccctagtaagagtgttgttcaaacgtaaacaatgtgttcccccccatagatgtcttttgttatgttgctaaatcgtatagatatttgtggtatatataacaaatggaaggctgacgtgtatgatttcttaaataaccaacatccagtataaatttaagaggtttttacacttctcccattagtctgtatactttgctcagatctacccctccctcatttctctacccagttttaccctcccacctacacacagtgctcagcattgaccttacggacctattccgtccattaccgtccttacaagtgggaccgctcgccttacaagtgggaccgctcgttcctggcagtggcagcttacaagtgggaccggtacctttccccttcgtgagctattacccactctccaaactccatcccaaatcgac

SEQ ID NO: 163195 - DNA, 718 bp, Zea Mays
gctcaacgccgtgcccaggcgccagagcacgcactggcgctcgcccgcgcacaccccgagcgcgtgtcagagccacccctcgaccgtgctcgcccgcgcccttaaagaccacccccggacgcgcctcacctcactcctcgcataccccactgaccagaccctgtccttagctccggtgagctctgcgccgcccgcccgagccacccgagcgccagccaccgcgaccagccattttcagagaccccctagcctcacccgagcctctggaaagcttccccgagaagccgtgaagcttgtccaagcaaggattgaggccctgcctcaccgggacagcaagatcaccgtcgccagacttcggccgccaaccaccgcacgtagactgagctatcaggtgagccattcttaaattcctcgcacccatgccttccctgacacctaatgaagctcgttgaccagtttaattgaactctaccgccctggataggctggagcccttgccgccgacgagctcccccgcctgcgcatgtggccggcctactccgaccatccccggcgacaatccgcacctcagcgtgaccgtcacaacctcccctgcgctctcgaccacctcaccgcaacaatctcgccgccggtaagcccctccgccctttcctccgccgcgggaactgtttaattgggggaaggacctcgggttagatttagtaaaacccccgggggt

SEQ ID NO: 163196 - DNA, 653 bp, Zea Mays
gaaaacaaaattgtttacgaaggttgcacataatgtgacttcaggaccttgaacaacccaccacaatccacgcgagtacaagctctagtgtatctggcgtcaacgcgtgtgcggccatcagggctacgacaatatagcaagccttcgtaataagcgcaacaggcacaattatggctcggtaattggggtacacgataaatccacgcaacgtgtgcaacaggcgcaattgtggctcgatgatcacggcagacagacagtgcctacagggcatgcgaaaaatacgtgacttggcgattgcggtccgactcaacgggagcggtccgattaaatgagagtgcgacatagcaatcacatgacacaaccaagttcgtacgacacaaaatactgtgtcgtgttgccagggcgcaaccaatacttagccaatgttataactcagccgattaaaaacgtagtttgattgacgcgatcaagtacctactatacaatttaatcgttcggcgtgagtccgaaagcttaacgcaacacaaatatttagaaagatttgagtatgcgcactatagccttcacacattttaataatttctgctaattatctactatgagaaataaaagcagaaaaataataaaattaatgcatgtgcataagcagatca

SEQ ID NO: 163197 - DNA, 608 bp, Zea Mays
caagtgtcggcgtagagggctagggtagcccgagggcaaggaatcggtgatacaaaggccaaggaagcattcaatcgtagagatattgctgaaggtcaagggaatcaagcctagatggcgaagatggggcacaaagacgacatggcagtggagtactggagtataagaagcggagatggaacccacagtccaagcggtggagtaggaggggaaaggggcagcagtgggatcgtgggcatgggggcagtggaggacggagaggaggggagcagcaggcccggacccaaacatagatcccgaacaaggctagcgacatgaatactgctaggattactaccaatgtcgagtaacgctaacaacgtcgggtagcacggtcaaggcaacgacggacagcgtgctgatgaggtggcgattgaaggcggagaagacgatgactaggccaatgtcgacgttcctctggaagagcacaaggaccgatgggaggcgaagatgtcgcctagcttggacgcgagcctactagcggagacaaatctgacgtggtgcgtgctgtagaggacgaagacgagctcagaggcgtgcgggtgtgtgtgcggctggttggcaccccc

SEQ ID NO: 163198 - DNA, 366 bp, Zea Mays
ggcataggtatccagctacttattaggtaggatataagagatgtatagtttagggcaagaatagctaggggtaagaaagtttgtggtaaggaagaactccgtgttaggtggtaatgcatctgaagattgagtttgacttctctccttccttgatgaggttgatcttttatttcccggccttggtctcatttattcgaggttagtgtatatcatcggagttgggagaatatggttaagatagatatagatgtgatagactacatgatgtaggtcaagttgttgggtatggccgagttaatccaagtcaccaatttaggcttaggggtatgaccttatcttttgtaccagcatttagtaacccactct

SEQ ID NO: 163199 - DNA, 1170 bp, Zea Mays
cctacaaagtgtggccactcggaagtgggtcggagatgccgaaggaggttgcggctgggtctagccaaggtagcttgatttatttgaagtatacattcaaatacaggagccaatctgatgagccaaacgacgactggctagatgccattgaagcgaccaatgatgaattgcttggtgcctactcaagggccaaagatgatgctatgatggtggccttcggaggtcgaggcaagaaaaggttgaaaatggtttttgatgtcattggttttgtatacccagattattgctatcattagcgaaagcaaggaaagaaaagaagagttgttgcttcggcgattcctactacgccgaagccaaaaaaggttaaagttttgacacatcgccccaagcacgctgagacagccaaagagccgagtcctgctgaagggtcttcttctgtttttgagtcaagttacaccgctcctgccgaagctaagacagaatcggccaaagagccaaaaccaaagatagcagcggagcagctgaaagctttgagtccattgcaagaaacagaactaccaaaggtacaaaagattgcttcattaactccaaagagaagaaggatggccagcgtattagacattgttatagaatctgtgaaggtgtcaactcctactgcagagggcgaggccctaaagaaatctagcgaagctacgatagcgcagacaactgctgaagctggaccatcaatccccgccaaagcaaaatctttggaggatgccggagaacctttaatgttggaaaaagaatgttgtgctgaagaatttgaatctcctgcccctggagcatctatcaaagaattggaattcatagtgtgacatgcttcgtggaaaaaattatcgaaggagcaaattgatgaagcgcaacattatgccagggatctgaagtaccctcgagggtccttggtgtatagtggagatgatgaggatgacttcctttattttctgccagacaataaggagatacatgtctatcgggagatggcagacaatgtaggatatccgaagcttgaactaggcttgtctacaatgacgaaggaccagcttgcagatagccttgcttataacagtttgaaggtgagaatattttaacttgttggaaaacagattatttttgtagcttattatttta

SEQ ID NO: 163200 - DNA, 777 bp, Zea Mays
acccctgctgcctacttaaacatttcagtttatatgtccatgaacttcttgtcttctgaggccccttcctatttcgttgttaagtcattatctatcggcaatttctattcccttggtcttagtatgctcatatccttggagtcttgcataccctcatattttcatgtatgcttatcttcgtttcccaatgtctaagacacttcagttaacatgcccttgaccacccttgtttctgaatgatccatgagcgatcattttattttgcacatccttggctatctcgttaattccttgtaacttccctcggtaataatttttattacttgaaccattttgttgggaccttacctatcttacccttgcctgttctctccacttcgtcagtcctaccttaactctgtccatgattatgcttttcatcattatcacctttacccttattagctctatatcttaccttgatgtttatcttacacagaccctttaaaatctcctcatttcatctcaatctgagcattgtactttacctacttttcccttggtcgtatcctcctctttgtcacctacgcgtttttaactctatcctttgttgtgttttttgttatgtcatttgctcttctcacccctcgatcttatcttggtaattacactattttcgttctataaaatctccaatatcctatcctagtttgagagcggtgttttacttatcttactcttggcaatattctcttctttactgcatgaaagcctggacgtaactccattccttgttgt

SEQ ID NO: 163201 - DNA, 618 bp, Zea Mays
cacggaagtagggaactcatggaacatagaacatctcagaaatttctatccttagcaaggcctcaaagattcccaaagaaacattatactctgtaattaggggacttcatcatcaataaagtttttgttttcaaaggcattcagattcttgactctcagctgacctcgacttgactaggcttgaaatcagcacgcttactcgactcagggtgaccactataccctattgacggagcgatcggcttaagccagcgatggcttaagtcggtgcgacatgctcacacttactcgactcagggtgaccactataccctactgtcgctggcttaagtcggtccgacatgctcacacttactcgactcagggtgaccactataccctactgacggagcgattggcttaagccagcgatggcttaagtcggtgcgacatgctcacacttactcgactcagggtgaccactataccctactgacggagcaattggcttaagctagcgatggcttaagttggtgcgacatgctcgtgcttacttgactcagggtgaccactataccctactaacggagcaatcggcttaagccagcgatggcttaagttggtgcgacatgctcgcgc

SEQ ID NO: 163202 - DNA, 984 bp, Zea Mays
cgccaatatcccgtggctaggtcgtaggtttatagatagacagtggatcgttgctcgaactcgctagagagctagctgctgagggaaggaaggaacagcgtacgtacgtacgtacaatgtgaagagaagcagcaggcggcgcggcagcactcaccattttgtttgtttcgtgcggaggtagctaggtaggtgaacgacgaagaagagcgagagcacgcgcagtgcaaaagaagacgacgaggaggagggggaaggcacggcacggcacgggcttctttaaatagaccttaattgtgtgagatggccggccggccggccggagatgggctgggccggcggccggggagcatgttgaaagcagcactggtgtacgcgtgtgacgacgagtgacgtaccggatgcccgagggacagggaccgcggacgtacactgcaacgccgaattgaagcgcccacagtgtcttacatagaggaggcctgcgggcagaggtagcttgctagcgtcgatcgacgagtcagtgaatgcgccaacaacccaacaaagaggaggttggagaattcaagtgccacattgaattgaacagacatggatagatggccgagagctgcagagctctagctagggcgattctctctctctctctctctctctctcgtaacacggtcacaccccaccccacacgtacgtacgtaccgtcgatcttaacgagattcctgcctcgagcgagagatagatggagaactggaggtggagtggctggcgcatggagctgctgggaggcattcaagatggattccgctggtaggcggcagcggggcgcgcgctctgctgcctggggaggccctactggctactactactacagagacacagacacggcaggcatggcatgagtcatgtggcctcattcatgggatgtttgtctctgtcttgtccgtctccgtcgcgtcgcgtcgtgtcgtgtcttctctctctggccctctt

SEQ ID NO: 163203 - DNA, 557 bp, Zea Mays
ggtgcgctttcacttgtcaatgaggcggtactatggatagtgatagatattgcgatacaatcggtggattatgcgaaattaaagcgtaaatgggagggatggggatggggcatggcgaacctgaaggcgatggtactatgcgaaagaatgtagggaaatggaacgaagaaggagagggggaaatgaaccagggcggagaacggtggagggcaaacgatgaagcacgacgattagggcgagtgggggcggtgggggtggtcgtcgatggcgatcgtaggagcgggtgacggcgacggcgaggagcggaattttgagggtttcggtggggccgcgatgagtgggttgattgtggtcgggtgggtcttggacattgaccatattggctcggtcggctagtggggagcgacgcataactgtggggacccatagtgtgcgcacgatcagttggtcagtgtgtgtacgtcgtgttcatatgaagcataaagtgttgtgcaaaggatcgtaaatagtttatacaagcattaatcccgaaccacaccccggatgtggtataaatt

SEQ ID NO: 163204 - DNA, 496 bp, Zea Mays
aagaactgtatgaacccactaatttgcttcatttatatgatgagtgtggatatattcaaatgcttctcggggtcgcggcctttgatgccatacgacgagacgccgaacgtagcaatctgatgatacgttatacacatataatatattgcatatacatacacacatataatataccatttaggcaatgtatattgtgtaaaacaatttcatgtgctaacatgctaaaacgtgttgagggcccttagatccaaaatcaaaggataaacttaatcccacctcctattcttggtttttttctatccgccaaatcattttctcctactttctcctattttgctatccgccaaatcattttctccttccaggccaaatagccctgtcgttccctgctcagcgccaccggatgccaggccagccaccagcacttccacacaaacaatcagcaaaaaaaggaaaaccgctcgacaaatttccatgttttctgaatgacaaattt

SEQ ID NO: 163205 - DNA, 428 bp, Zea Mays
ggcgcctataaaaaggtcgccccgggcacctccttccccgcaccggcctcggccactaccttcctcccctcgcccgagcacaattcgtggagcaccatcgtcttccccctctccggtgagtccccccctcctctctctccctctccgttggtccagcgagcaattaagtgaactgagcagctccctcacaaagccacgaacccgaagcaccacttcccagcctcagtccctcacccaaagctcgctggcggcgatccccgccgtggagctccgcccacctccccgtggatagccccctcccaaccccctctagccaaattaagcctacccctagaatcgccagcctctgcccgtgctaagccacctccccgtggaccaagaaccgggccaccggcggcaaaccgtcgtcgagcccaccggcggccggc

SEQ ID NO: 163206 - DNA, 663 bp, Zea Mays
ggagcgaggagtggttcactgggttcgtaacgagtagacaaaacaggctgaggcatcaatttatagaggacggccgcgaggagggcgaatttggacggggaagcgctcgtggtgagaaagggggaagagtcaccggagttgctaatgtggcgctcactggtttacggtctacggcggtcactgccgagtcttcacggcttgcgacgagtggtgagatgacttaaggcatgtcacaaccaagctagacgacggcacaacggcgacgtcgcgcagccacgttgccggtgcaagtgggtacggcgacagggcaaaatagtgccccaaagtcatccatgcgcaagatcttttcaccgtcgaccgttatccgcacgccagagcgcacgaattgcaatgccagcgaggatcgcggcgcgactcaccagcagcgacaggttcactgcatttggggtcttttgcagatattgtaccatcgcgattaagttcagtatgtctgaccaagcaacttgcaggggtttcctctcaaatttttgtgtggcaactcactcacctgcctatatcaaagttgttgtccaatgtactagctacaactttgttgcaaacaccttgctcaaacatccactaaattccccgcaactcgctcacaaagttcatccaagttcactg

SEQ ID NO: 163207 - DNA, 319 bp, Zea Mays
gcacatccaaggaaagatgctttgaaaaatccttggactgtgtgaagaaaataaaaaccagtttcgccaatgtgggcgcctactctaccgaagaaaacttcatacgaggcgaccccgaaggcattattgaatggataagtggggaggccgagagcttcgaagaaatcttaagtgatcgtggggatgtctgtgcattttctggtgcacgggggatttcagctatcttggagaaggtgggatgtgatcatatcaagaccatggcccaggccgaagctgccttctccgcagacgacacgatggatctttcagttgaagcaac

SEQ ID NO: 163208 - DNA, 297 bp, Zea Mays
gaactccctagaaaaactagtgaagagaaaatatttctggtgttttcagtctgcacttaactgccctgaacttcttcagtttactgcagaagcaaatccattcctctatttctcaaatttctccacacaaacaaagctaccctcccacatcaaatctgtttactggacattagtctttcactgttggtataaaatttccttgcatcatatgattcttagacgaccaaattattgtcattgattggtctgcaaatacatatggactgttagtattttccttccctacttgtttttaat

SEQ ID NO: 163209 - DNA, 661 bp, Zea Mays
ccgcggggagggggaatcgggcttgctaaggctcggactagctacggtgaggtaaggggaatgctatggaccgaagtaagagctctagatgaggctgaatcgatcgatcatcgcacgagcatggcgaaaaggagcggtcgaactccggtgagggcaaatcagctaaggcagggtagaattaagggaaaccgagcacgggagcgagtttctcacctcgggacagcgctcgggagggcttggcgtggcttctggcgggctggacggccgacacggcgggcgagaatcaccgacgagcataggaggtggcagtagagcgcgagagaggtcaagctttggcaaaatgaggcaggggacggagagcgggtgagggcggtgctcaaaaaggagctggggcacatgggtaggcgacgttgccggttttcttggcgtacacgcgaacgtgagtcagcggcggttgcagggaagacggggctaacaaggctggcccatggcggagagagagagtgcaaggtgaatggttcgtggcgctaacgggcggggcccacggaatagagagagcgggacgcgcgcgaggggagttggagccaacaggtcggccctaccgggcagagggagaaagggagggagagcgcgtgaacacaggctggagctgacaggtggg

SEQ ID NO: 163210 - DNA, 534 bp, Zea Mays
ggcatagggctcgagcggaggtgggagctgggtaggagaaggaggagagctcggtggggttttataggctggcgagggagaccgaggggcgtcgaacgttggtggggttcggccatcattagcgtgctgaaatgaagaagtaaagcgctgtgatgagaaacagacgtcgtggctagtgggggagggagacggacggccgtcgcgggtgctcgaggtgaagagcgccaggagctgagtaggctggcggcggcggctacgctggctggtctgtgcgtgcaagttcgaagattagggaaggagaggaggtgctagtgggaattgaaggcgtgacagaggaaacgacgaggcagttcgcggtggtgaagtgcgcgacaagcagctggttttttaaaagggacatcggttgcgctccagaacgtggggaagaggagaagaacgacgcgagctttataggcgagggaggagagaggtttgcagccagattcaatactccattgaagtggattgaagaatagcgttacctactcgaagaaa

SEQ ID NO: 163211 - DNA, 479 bp, Zea Mays
cagtacgcccgggccgcggtggagagccccatggagtcatccgagtcctcggatgacgccgggggagaagccggagcaggcgaaccatcagactcggaggaggcctccttcgagtactccgagtccccaaagtcctccgagggaggactcggagcatgcttacgcttgccgtcagtgtggcgaggccaaccacgacccctcctacctccacccatggttggttggagaaggagagagtgaagaagaagaaagcatatgatcaaaggatgagtgaagagaacaacggggcaagcaggctatttatagaggccgggggtgaccgtccactttctaccacgctcgccgaacagtcgcaagtattcaataagcaattcaagccgcctgaaaaatgagtcaggcaataggcgccactttgtgtaacatggcaccgtttggaccaaggccaactgctcacgcaatatgattacaccccgtggtca

SEQ ID NO: 163212 - DNA, 782 bp, Zea Mays
gcgctagcgcctagcatttgccaaagatggggctttcgctcctgcgagtagcatcaagttcggctccctcgacttcctcgccaactccaccggagagctccatctcaccagtctcaatgcacaagccattgcaagcatggcgctcgggcgctccaccaggagtaggccggagaaataacaccgcaaaaaatatgccacttcccttaagcgacacctagccgactcgccgcctccaccgagcagcatgtgggggaggcaccatcgctgacatctgaggctgccgcgaacagtcaacagacaagcggcgacaagcgtcatcatgaatccagcagcctgaagatatacgcaatggagcactccagcccgccgtgctcctcatggttggaagtctcaatcgcgttcgatcgatgcgaccatccgagcaggatcccacatcccgggacttaccctctcatcgttgggcagcccgaaacatctctttagagtcctcatggatgaggggagcggtctctacatcatgtatgttaagactttcgatgccctaggaatcacacgctccgtgctacgccccagcaccgtgccgattcatggcatcacaccagacctcggtgcccgcccgctcgctcgaatcctcctgccttttacgtttggagacccctctaatttctacaacgagcaactgtagttcgaggtgatggacttcctgggggcctacaacgccattttggggaggctatgctacgtctagttcaggctgttcccaactacatgtacctcaagct

SEQ ID NO: 163213 - DNA, 522 bp, Zea Mays
gcgcccgtgctggtccacgttcgatcgtgcaccgcgcccgcgcctataaagccaccccggatgcacaacactccactccgcacttgccctcactgtctagacccaggtcttagctccggcgagctctgcgccgcctgccctagccacctgagcaccggccaccgcggccagccatttccgtaggcacctagtctcacccgagcccctggatagcttccccgtggagccgtgaagcttctccaagcaagaaccgagacccagcctcaccgaaaacctgaatcaccctcgtcggacttcttccgctcaccgacgaccgtggaccgggtaagtcactgcgccattttccaattcctcgcgtagaccacctctgcgtcacttggtaaagctctccgagccaaccgattgaaccatcccgccgtgagcaggccggatcactcgccgccgatgaactcccccgcctatgcatgaggaccgaccaactccggccatctccgacgctgaaccgtacctcgacgtgaccgc

SEQ ID NO: 163214 - DNA, 461 bp, Zea Mays
gaaaccagagccccaatcccaccctcaatcgttcgccagagctcgtgaatttcgaattctccccaaactggtctccgccaccgcatgatcaagctcgccgtggccagctcgattcaggttagctcgagtccctctgctgcttgttctagcatccttaggtaccccgcaaacccctcgacccctttaattgaaccggaccgccagggatcaccgggaacgcgtaccattgtcctcatcgttcgcggttcacgtggacagagcttgatagcttaccaatcgtgaaattaagttaggggaatcgttcggggagggtttaatccggtgtacgccgctcgggagcaccggtcgttgcataaatccaccggcacaacctcaccagagttcatcctccgcgctgccgtcgtcgtggaccttcccctgcgaagaaatagaaaccggagggcttttctgcaaactgtcag

SEQ ID NO: 163215 - DNA, 649 bp, Zea Mays
gaggagtgatacaagaatataaataatgtaattatacttctaaaaattggtatttctcatttcataataagatttgagaataatttggcacaagtttgaattcaaattcgaaatttaaatttaacttggaaatggagcaaagaaaattggagcatgaaatggaaaaagaaaagaataaaacgaaactaacctaactgggccggctgctactaattcggcccacctacaaattcccccgcgcggcccggacagcttctccaccgtgcgcagtgaggctcgctgctgcgcgggccccccctctgtcagttgcaacgaggcgccacctccctcaacgaaccgcgcgctggcatctctgcttgtgggtcccactcgtcagtcctctcccaccttcaaccttcagcaccaaaatcgtcgcgtggaatccctgggctattcgcgtcaacaaacatcgcgtcccggccggatcgagcgggtctccgtgcgggcttctcagggtccctggcgattctctcttctcctctttggactctctccagggtataaaacaccaccgtgtcgcgccgccattaaagcctagaatcgaaactacgcgccgccgtcgaggaactcaggcctcggggtcgctcggtgctttacagacggccagaag

SEQ ID NO: 163216 - DNA, 701 bp, Zea Mays
tgagatatttcttttttcgaagtactcccaatttgaattggttattttgctactagggtatagtggtcaccctaaatcatgtgagtgtgagcatgtcgcatcgacttaaggcgtttccgacttaagtcgtttgttctgttagtagggtaagtgatcaccctaagtcaagtaagcgtgtgcatgttgcaccgacttaaggcgtttccgacttaagcagatttctccgttagtagggcatagtgatcaccctaagtcaagtaagcgtgagcatgtcgcaccgacttaaggcgtttccgacttaagccgattgctccgttagtagggcatagtgatcaccctaagtcaagtaagcgtgagcatgtcgcaccgacttaaggcgttttcgacttaagtcgattgctccgttagtagggcatagtgatcaccctaattcaagtaagcatgagcatggcacaccgacttaaggcgttttcgacttaagtcgattgctccgttagtagggcatagtgatcaccctaagtcaagttatgccaatttcgagtcaagctcaatcgaagtcagttgtcaatcaagagtttgagcacttttgaaaaatgaaagctttattgatgatgaaatcttctcgttacagagtacaatttttcttcgagggtttttgaggcatcgctaagggtagaactttctgaggtgttcaatgttcc

SEQ ID NO: 163217 - DNA, 591 bp, Zea Mays
gtcgcgcggacccagcggaatagccaccgtgtgacgcatttgcttccacgtggggccgaggctctggggcacttcccatttacttgagacactaatttgtggacccatggctccagtaccgtcttctcatcgttgcgcaatgatctcaactgaaccaccgacattgccgacttgaccgggaccagttgggacccaccgtggccatcttgggtcggactcccttgctccttataaaggttgcccgaatcactgccacgtccttcaaccatctcggccaatctcgccatcaccgagctcacgctgagggtgaagagggccgccgctggcaaactccgtcggtcccgtcgatctggccctagtaactggtcggggaggatccgcggggcatatcaaaggtgtccggtgacaggcgtgggctcgtgctggtctgagtcgatgacaattgctcgatggagccaccctcggttgcgattccgccgcacggcatgggctagaatctccgtgacaggattcacggtgagttctacctctaggagtccgcggtacttagcgcattacaaattacctagtggctcggtgtttgggtgctgg

SEQ ID NO: 163218 - DNA, 564 bp, Zea Mays
atcgacttaaggcgtctgtgacttaagctgattgctccattagtagggcatagtgatcacccttagtcaagtcatgccgatttcaagtcaagcccaatcgaagttagttgttaattgagagtctgaatgcctatggaaaatgaaaggattattgatgatgaaatcttcaggttacagagtacaacttttcttcaagggtttttgaggcattgttaaggttagaactttctaaggtgttctatgttccacgtgttccccacttttgtgccgtccatctgagtaagtcgatatgatcctagccatgtgacctctgatacgatgaacggtccttcccatggtggtgatagcttctgtcgtccctcccccgttagaattcggcgaaggaccaagtctcccactgtaaaggatcggtgccgcatagctttgtcatggtagcgcctcaaggtctgctggtacctggccgactgaattattgtgttcaatcgttcttcctccagcacatcaatgtcttctagcctagtttcttctgcctcatctatgtttttgaaagtcaacctcggcgcc

SEQ ID NO: 163219 - DNA, 271 bp, Zea Mays
agaagacaagatgacaccgtacacccctacacatggtagaatatcagactacgccacaacctactctatgggttacgccttagccctgattagatgagacgggaggataggatatcgagagccagcacaacgaccaataggagatacacgctcaggaagatctagcatcgtcgggcttatctgacgcctctagtcctactttgtaacttgctcctaggcccacctgtcggggccctagctccattgtaacgtgtctccccttggactataa

SEQ ID NO: 163220 - DNA, 501 bp, Zea Mays
ctggtctactgcaatctcttcctgtaccggatgctgcatggaaggtaatctcaatggactttgtggaaggcctcccgcagtcagatcacttcaactgcatcatggtgatagtggacaaattctccaaatacagtcattttattcccatgcgtcatccctttactgccctgatggtgaccaaacaatttatggacaatgtgtttaagctgcatggcttcccacaagctatcatttcaaacagggataaagtttttaccagtgccctttggaaggaactcttccggttgattggtgcagagcttcgcatgtcaacagcctatcacccccaaacggacggccagacagaacgggtcaaccaatgtcttgagacttatcttcgatgttttgttcatgcttgccccaccaaatggaagcagtggattgctctggcagaatattggtacaatacaagttatcactcttcccttcaactcactcctttcgaagttctgtatggtcata

SEQ ID NO: 163221 - DNA, 473 bp, Zea Mays
gacccttgctcctttgcttgggatccgacgccaacgcggttgtgggaattgaccgatcggtgggtctggggcgggtcagacttttacaattggacgaggtggagtggagggaggaatcgaatcgtcgtgtttgggcacgaatgtaatgtaagcaatgacgaggtgcgaaaaatgaccacgccgccacggggagcgagagggagccgtcgcgtcaagccatactccgtgtgattggttatcgtctccacgggcgcccacaacagtttgccgccgctgtccaacgccagtgacacaacgacacccaaaaatcaccgccggtccacttgtgaattctgacaccactcactctccatgcctcacaacgatgggcagcagcacaaagcatcgctcgtggtacccaccaaggaaggacgttaaaaaataaatagaaaccagatgccgttctatgaggtagcccccattgccactcttta

SEQ ID NO: 163222 - DNA, 524 bp, Zea Mays
ggtatctaatggtgggatatcagtggatcctagcaaggtgcaagaagtattgaattggaaaccaccaactgatgttagtcagtttcgtagctttctgagattggctagttactacagaagatttattgaagggttttccaagattgctaagcctatgacagctctgctagagaagaatgccaagtttgtgtggtcagataagtgtcaagcaaacttcgaggagtcaaagaagagattgactacagcacccgtgttgattttgcctgatctaagcaagaactctatctattgtgatgcatctcgactgggtatatccgctaggtcttcgttggcaccttccctgacgacgagcacccacatggtatgccatctcttcccctccctgctgtgcaaaactaaatcttctctctaaagtggctccactcttcccttccgatctgttgtcctttctgcgatgtagtcaacagtagggtaaaaatgattttgattgccaattagtaagatgggaacacattcaatcccgt

SEQ ID NO: 163223 - DNA, 840 bp, Zea Mays
agccggggccatgcatgcatggcgtcgtgtcgagcgtcgaagcccgcctcgcgggacgggaggcaggaggcggcgggcgcggcgttgttgctgccaactttgcccccggcgtgtgatgacgacgtggtagtgtatagtagacgatgagatgggccagaaagcaaagcagcgagcgagcacacgggtgcatcccgcatccgacggacccatacgcatacgccatccatattatccactcacctgtctcctcccctccccctcaagcttttcttcctttctcccctgtgagtcatgatgaccaatcgctggattccctcgctttcgttctgcttactcacccttgtcacgtgcggactgacgcggaagggcgcaggtggagtgcgcgcggggtggatcatggaaactcacctgtcggtgtgcgctgaggtggaaagggtggacgcgctgcgtgcccggggcgccggccgccactcgagatcacgtgcgcgcggtcgccgcccctagccccctacggtgccctttccttttggacgtggcggcagatggtgcgtcgcggactcgcggggctagctcgcgatccgggtatgttgcacatgatccgatcgagtacgataccaactagcccatccgttcttttttaaaaataaacgaaccaactataaatattcaagaaccgaaagaattcagcttctcgggctaggaccacgaccaccgcggctctagatgctccctagcttgtagaagaaccccgggccaccactgccactgccactgcccactgaccaccgtagaagaaccccggcttgcaagttgccaagtctcctagctttaattcgcaac

SEQ ID NO: 163224 - DNA, 502 bp, Zea Mays
gtgaccttccacattgtaacttttttcaatttatgtagtttagttcaccattttcagttgtttctgttcaattactaaaacctttttcttatagaggcatacatacattccggtacccaaaatactccggacccgactatgccaacttcgcagccgactacggagttgacaggcacccagttcgaggaaatacatgaaatgcaacaacaaatgcgtcgtgcatttgagggctgccctgatgatttggacgttactgcgcccatggagacgaactcatactcaaactctaaaaagcaggtattatatacaatctcaccattgttacattatatgttaatttcccactttgcatccaaatcttagacaaaaccataatcatgtcaacaggattaccattttaatgttggcaacaaactgttgagggacataaacatcccacctcaacatataccagactgcaacattatgagctcatatacgtcttcacacttaccgatgtttg

SEQ ID NO: 163225 - DNA, 766 bp, Zea Mays
ccgagagcgttgtcgtgagaaagagccgagggagagccaccaccgtggaatcgtgtttatgacgccgctccgccctcgggtgcgtgaccgggagcttcaccaagtcgcgtggagtgtgtctatggctttgccttggcgtaattttactccgagcgacgagaatttctcactggacttagtccatctccttggagccgcacatcaccgtggtccgacgtctgcacggttcaagtggacggcaagttgcccctgtcaagtttgcatgttagtcaacttcatttaggacatagttttggaggcgctaggtcaccagaggactagttcgatatggcgcctgcgaatctccaccattgggggtagcagtgccgccggttgaagatcagagaggggtgggtggggggagatgcagcgtggccgttggatataatctctgcgaccatgattagattaaagttgtaccagtttggccttttaattctgggccgttgatccagtgatggttggcctgaattagatcaaaggatagctcgtaggcgtggcgcatcctcggccatagatacagaatctgatggcttagagttaatcaagcagtgcgcggttgtacgatctaatctggactggagggttttgatccgacagctgatctgtgcggataccccttctccacagaagaatagtaaaagagtcactagagtttatctatttttagccgtagtccgatctcaatagaaactaattagtatttggtcctagaatcttgcacaag

SEQ ID NO: 163226 - DNA, 564 bp, Zea Mays
gaccgggtaagcctctgcaccatttcccaattcgttgcgcgcatggcctctacatcacccagtggagctcctcgtgcactttaattgaactataccgtcgtggtttggccggaacaggagccgacgacgacccgcgccacatgtgctcgtggccagggtagctccgaccacctccaacgccgacccgcacatcgacgtgaccgtcgtgacctccccgacgtcactaaccactccgccggagctctactgccgccggtaagcctcgccgccgtaatctatgccgcgggtactgtttaagccagccagggagcgcgggttagatttcggctaggtccagggggttttgcgcaatgtcagtgacccatgccaatagtagaccgaggactgttttgtgagagaagagggagagaaaacccaggggcctcagcgcaaacctgtattcttttccattttcgaatttatttttcttttaaatatggtagagaacttaataaatgcataacttgaagaataatcatccaaaaattgtcaaaccaatttttcaagactttgggaaatatgaac

SEQ ID NO: 163227 - DNA, 731 bp, Zea Mays
attttcgttttgcaacttttgagaaccatattgttgaccaaagtttgacttttatgttttcaaattctaaaccaaaatataacaaaaaccaaaccggtttccgtttcttggttagtaccggaaacagtaaattttaccgaaaactggtactaatgagcgagatagtaatccctggattgggcagtgagcgagattgtaatccttggattgggcagaacgctatctatcatgcaatgtcatgcaagactggaacaaacctaaaggcctgtttggatcccacgaaatgaaaccattacatgttattactagattacttttgaattcctctcgaagtctcaattcttgggagccaaaaagggcctcatatgaaaataatactccatatgtcctgctacagcatttgaatgttagcaaacttgccaggacctagatgctatgaacatcccccaaccaaccagaccggcagctcttgcagtattcatcatcaacacaactaagtacacccgccacaaacaatacacatccaggcaacatttcctaatgtcatttctgtgatcatagctgaagctgctgcacttgcattgggaacgactgtcatctcttccctgcatcttcaacatctaaactttctttcagacaatggagggactcaactacgcattttcaaggttgggagggaatttaacactacaacccatcttctagctaggcagactactcatatttttttt

SEQ ID NO: 163228 - DNA, 672 bp, Zea Mays
aggctgcgtacccggaatcagtttgatttcaaaagccgtatcacgctccggtggaatgcctagaagctccgctagaaacacatcggcatattcacacaccacatggatgtcctgcacccgcaaggcagcctcactctccaccaccatggagaaaaagattcctgacttccttgaccgacgatccggaagtaattgggacaacaaagatagagtgaactttggagaacttctcaagaataccacctccctacccgacgacgcctgcaataacactgtcttccaaaaacaggatataactatgcgatactgagttaaccaatccatacccaagataacatcaaacgaccccagggaaatcaccacgagattagctgaaaagacctcatcagcaagaatgacggaacaaccctggcagactgaacaacttctaatggagccattagctgaaataaccacgattggatgacccatcctctgcaccgaaagaccagcacgcaacacaaaattctcctaaacaaacaaataactagagtcagagtcaaaaagagcatgggcaacaaacgaatcaactaagacgtacatgtcaccacgtctccctgctctttgccatccgtagagggtagcgcataagctctagaaacatccgcggaagaggaagcccccggagtgaaa

SEQ ID NO: 163229 - DNA, 399 bp, Zea Mays
cctgagcactactacttttcatccgcgaccataaacatacgcatttagactacaacatcccaaacgggtgcgagaacactagtttctagtttaactccatgattatttccttaatcattttaactacttaattggcatcgaccgacttaaccttcatctcgacggtccgagcaccacaattcacgaaagtatacctagacatctagcatcacatagagagcctactacttcacattgcaattcatacagagccgcaaggtgacaataataacacacggtaatcgacccttctctacgaccttcagttaggtcaccaatagacgacatgatgactacgaaggcatgtcaccatttcatcacacccattcatcgcatatatgcgcactaattcatttcttg

SEQ ID NO: 163230 - DNA, 589 bp, Zea Mays
gggttgggagattttgcatgcctttgaattgttgggctttttggtcggttctgctcaggcgactatgtttaactgtcgtggttttgaactttatgtttattgaccgtattactatgtcctttattgaccgatacttgataacccacccagtgattgggcttggctttactatcgccaacgaacctggaagtttccttgatgaataatcacaatgctgttatttactcttagtggtctatcttaagccataatgtccgtgggatcaattccagtgttaaatggaacgatattcgttgtgcgattcgggagtctagatgtgatgttatctgcttgcaggaaactaagaaggaatgctttgatgcggctaacctcaaaaaattctgccctaattcctttgattcatttgcttttgtcccctcgatgggaaatttgggtggctccattactgtttggaatagctcaaaattggtgggcaatgttatttttcagaacgaatatgctctttcggtcgaatttttctctaattcatcgaatgattcctggattatcacgaacatttacgcgccatgtactccgcaggggaaaattg

SEQ ID NO: 163231 - DNA, 321 bp, Zea Mays
gcagaacatgggtcaggccggtgaagtccgaatccggtaggccaaaccgcaaccaacaacaagtcaacgccatcgccaatccacccccaccggaaacatagttcatcgtcaagagtatcccacacaatagggccatggcaccaacaccagaggaagaggcagaggtcgagctccgcagccacgaaggttcgatctactacctctttcatggcgaagactacgcaaaccccaccagggattgccctgaaaccaaggccaccaaagataggatggccagaaatcggccaaccgacaaccaacgagttgtcgcacatacttcac

SEQ ID NO: 163232 - DNA, 703 bp, Zea Mays
caatgtcaagtctgtttgcaggcaaaaccggaccggtcagcttacccaagcaagttacaaccactggaagttccgctgtctgcctggcacacggtgtcattggattttgtcgaaggccttcctcgttcgggcaccgcggattgcattttagtggtggttgataaattcactaagtttgctcattttattccactgtctcacccgtatactgcgctaaccgtggctcaagtttttgtctctcaagtctatcgcctccatggttttccagtggctgtgatttctgaccgggaccctgtgttcaccagtcagttttggcaacacttcttcaagctagcgggtgccgagctgcgcatgagttcttcctaccacccccaatccgatggtcagacggagcgagttaaccagtgcctcgaaacctacctccgctattttgttaatgcatgcccaaaaaagtggtcatcttggcttccaacggcagaattctggtataacaccagtttccattcagctttggggtgttctcccttcgaagtcctctacggtcgcaagccccgatccctgggaatttctgttgatgatactgtccctgcttcactatcagattggctccaggaacggtctcacatgcaggacctcatccatcagcacctgattcggtcgcaacaacggatgaagcgtcaggctgataagaacaggaccgaac

SEQ ID NO: 163233 - DNA, 293 bp, Zea Mays
cagtaatggctagctccaggcgccaatggctacttcacggggaggcaacatgtttttggttcgatggtgcaaggactcggtctggtgctcccccagaaggaaggtgtctgtcagagcccggagttagtccacaaggacccgatccggtgcccccacaaatagccagatttcagcatcttttgagaaggaaggggcaatggctatgggaccttttggggctataaaagactcccatggcgcacctcttctgcatctaagcatactaagagctactctacactctcacactctgc

SEQ ID NO: 163234 - DNA, 639 bp, Zea Mays
ttccccttctgttgctagaactgagctttgtcgtttaatagctaggctagacctgccactttgttttggtgaatctagtgcttttcaggagtatattacccatgcccataatccaaggtttattaaatcttctaggcaaactactgctagagacttgatccgactgtttaatgatcgtgttgaactacttattgaagtccttaaacatgtttcatctgttgctttgacatctgatatattgtctagtaaagctaaagaggactatataagtgttgttgctcattttgtgaactctgattggtgtttagaaaagagattgcttggtcttagacctatagaggtagctcatacaggtcttaacattgctgagcgtgttgaaatggttgcaaatgactatagcattattgataagatttttgccattgtgcttgataatgcctcatctaacaaaactactattgatgttctgaaacctgtctttgctggttatattggccatttgatacctgcacctagtaggagtgagagtgatttaagtaatatatttttgcatcagcgttgtgcttgccatattattaatctgattgttaaaagttgtttgaaacgtttacaaccatatcttgaagactttaggactgc

SEQ ID NO: 163235 - DNA, 345 bp, Zea Mays
ggagatcttcgcctacgcacgcgacgaggcagagacttcaggccacacggcggcgagctccccggcgagctccctggcgcacctgcagtcgacaatgcagagctctaaacccaaattggacggagctacacgatgcaggggtaagggtgaatgcgcgaagaaggttctcaccatagatggtgcccagcagagctccgtcgacgagggggcacgaccacggcggaaacccaaactccgacaagcaattccccacggaccgccatgcctccacgcgaattgatgccacttgcgcatgcgatgcatcatggcgaacacccggttacattctcccatacccgaacggcg

SEQ ID NO: 163236 - DNA, 308 bp, Zea Mays
atcagcatccttgacataagccacaagtattatgttgtttagttgtgatgtctgatatagacctctacatatgcatctgcaatttgcctttcatgccttttatactgatcaagcactcttgggcaatggggctggggtgaccatggtgtttctgtttaccttaacagtgtttggtgttggcacatgttgcacacacccaggcaaggaacatttcatgaagtcagaggctgggcaaaatggcaatgccaaactaagctcatctgccaatctctacaactgaagttaccccagcagtctactttatgttt

SEQ ID NO: 163237 - DNA, 727 bp, Zea Mays
aacggtcgaagctaccttccccaaccagccgactttgggcacggcggcgcaacccaccgtgcggcggcaagaccgccggagctgagaatccaatcacccagccagccatcttctaattcgttcgctccttgcctaattagtgacattacgagcccgtttcccccaccaattcctgctcacaacaagcccagagtaccgcccacggcgcaccgcggcaacaccatggccggacagtggactcaggggctcagctgcaccatcctacgattcgctagtgcatagcctataggaagggaggacgaatacggtggggacttaccaatggccggccgaggtcagacgacgctcgtccacggagaaggcggaagcgaggaaccggctgtgctccgacgagtaattccgatggagcaggcgacaatttccaagcgaagaagccacgactacttttcctagggtctagaggagttcttgggtacgattccgaggccttggacaatggttagccaagttttccccggcggcggcaacggcgggtttcttttccctctctctgctacggcggtggcgcggtatggtggggggtttgcgggtggacgagagaggcaaggaggtgcagcccaaatacccacaaacgcggccccgaagcagtttcctccccggtccatccgcgcgaggatctcggcggcgccttcttcgcggttcggttgagctcgcccgcgagcctcgc

SEQ ID NO: 163238 - DNA, 639 bp, Zea Mays
acgacccttctgacagcaccctaccccggcttacaggttctgcgcacagcggaggcaatcgcgaactagatgaaaagtttattacctcgatttcccggtggtgatgacccgctctacggcccgaggcggcacggagggcgactggaactccagtgaagaattgacttcaccacccgacgccccgatggccagcaatccgcacgcacgaaaccacgagatcccggagtatacccctgacctacttgccatcgatacaacgcttccttcgtgacaccgaccacagcgtgaatggcggcggctgaaacgtggcctactccctaccctggtgacggctgcggcttgtgctcttgtgcgaggaatagtaggaaaggggaggaagccgcaggacgaccgattctttatgcctagcttcaggtgtcctcggacccggcttcctcgtggtggttgcaacagatcgcccgcaagagggggaagagggttctgaccagaggggaccacctgttggtggcaggtactggcgcaagagcacacatgcagctgacctgcgggcctctggtgtcagcacgcgcgggcgcaacctggccgcgtgaagccaggtaagtgggccgcccgaggcattcggcccagagccaactctcc

SEQ ID NO: 163239 - DNA, 511 bp, Zea Mays
gaagttcagcaatagataggctgggatctatacttattaggctacgaaacactggcccataggttggataatccggagcaaaacccaagccagcgtgcaaaagaacttgagggctcgtttggtggcaagggatttggagattggtggcaagtgatttggagaggattcgtggaggaggaaattccaatgttggcaacctaacatccaaactgaacatgcgactagtacttcagagctacacggcccatatggttgctacttgctagcataccggaagaaccccagacacggagagtagtttgggggatggggtgagcgggcacgtgaagtgtcaggtctctctagtctagtcgtgactcgtgatcgatctccattcatcaacatgcattaaacacaccactagctagacaacaacaacaatggttcgggggaggtgcaagatacatgtatacatatatatatgggcatagcaacacgacgccagtcacgctcacgccaccccgaaacagct

SEQ ID NO: 163240 - DNA, 857 bp, Zea Mays
ttgtacgcgaggctgtcagcaagatcatccttcgataagaccgaaaggccttcttcaagcttaggaaatcccatactcttagctatctcccggcaaacggatatttctttgttatccgggagacagtacaggaaatcatcttcgttactaccattgaacactaaggcccccttcagatatttcagtctttgggcgtagtgtttggcctccaagatttcttctttagataatttcttccccgaagcatgtcgaaaaatgtaatcagtatctttagctaaggcttcggggacaggagattttgctttttctgtcacgacttgctctgtcatcttgccagtatctgaactttgctgacccaccttatcttcaggcacggcgaccttcgtcttagtaggcgctgaaggcctagcttcggctttgacttgatttttggcagcttcggcagttttcttggtagaagaagttaaggccttcgtggtctctatgacagcgtctagtacgctggccatcctcctccttttgggagttgcggcagcagtttttttgtacctttggcaattctactcctgctgatgggctcagaatttctggcattttcattgtttcctccacctttggctctttggccttatcatccttagcttcgatcggcccgactgtaggcatcttcggcactacagttggctcttcaacgccatgcacaatcggacaccttgttttgcttcggcagttgaagaggcttcttcgccaaattcaggcaccacgaccggttcaatataacgcggacggtgggtcagaaccttcaccttttcgccattccgaacaactgtggttgatgagaacatcacttctataca

SEQ ID NO: 163241 - DNA, 460 bp, Zea Mays
tctattcaaattgtgaaaatcaatgcatactctgaacttacctaattctttcttctccaccggcacaatattggagacccactctgcgtatctgcaaggtctaatacaattagcttctaacagctgatgaatttcgtcctttattcgtgagagaaggtctagacgaaatgttctagttttatgcttgaaaggtctgaaactagacttaatgggcagccgatgctctactatctcacggcttaaccctggcatctcagtgtagttccaagcaaagcaatcagaatattccttcaatagaccgatcatttcatccctaggatcggtctccagggtcttgttcacaaaagtcggccttggagttttaccatcccccatatcgatctcctccaacggatcagtcgatgtaaacccctatcctaatttgtcgagatatctgaattcctctattatgtctcccaca

SEQ ID NO: 163242 - DNA, 1630 bp, Zea Mays
aaaaattgtgtctaacttataaaagtatatgtaccagccttttgtcctttgtcttagtcaaatctctttgatgtaagaactgcaatgcatcgtggataggttggtagttgtatcgctatgactgcttaggggcactaccatgtctgtgggaggacaaaaaagaacacgagcaccatacgagtgatggaacgaaggagcaccatacgatccataacccaagtccaacagactccctctctgcctctccatttagcgtgacacacaacctcttcatcaacagtctttagtttgggtcctccaacagtctccacatctcactccatatacacatgtagtgtgtgaggttgatggttggtaactgtagcagggtttttaatgtccacttccatgcccatgtgcggagaggagatagaatccaaaaggaaagtggaaaagctagcctccattttgcacgcgcgggatggggaggctgctagagtgttgaacagtgcaaaatggggattgaaagctgctggagttggtctagtaaggagcatcatatggatatccgtacgagtacaaaggagggtacaaataagtgaaaggttgagaagtatgagtgttggtggaagaagtgtcgtgattttggaaaccagggggcagtgagatttgtgttcgctgaagggattagtgtggacttacttcgaatggtgaatcacaaggactcgagcgtggatctaagacggtgggtttatactggtttaggcttgcgctatagtccggtgtagtgttgaccgtagtattgatatggagcgcgttacagtaggtgtgcttgtgtgtttagaaaaaaggggtccttccctttgatagttcaagggctgaactctataatgggggacttgtattctgctgggaggagctcgaccgaggggccttgggcagcgtggttcttctgttactctctgtagggtcgtgcgtagccatactcctaccatgacgtattgtcccgttcgcttgtcgtacgagttccttttgtcggttttccgctaacattctcgttgtagtgcacggagggtcccacaagtcggtcgtatggagcggtcgtgcgtcgtgcggtctcgtcggtcgtcatgagcctgcgccactcgatgatccgaccacaccggctaatcgatagacctacagacgatcgacaatccgttgggccagaacgtcaataccgaatggcgtcaaaccatgtgagcggaaggtaagggcaagcactggacctagccttaacgtaacatacttttggcaatgactactatgccagcagacgctagatgtaagcgtgcaagtaagtcttctgatctgttagatgatgatctaaccatagatgcaattgtggtttgttaggagtttttttataaaactactcaagctcatgtggtatagtttaagtgttaaaagtgacatacttagacctattcaaataccgggtcaggtcggatcaaggttgggtcgtggatcgtttagcacaacccgcgcccgacccgtgcatattgttgggtcgggtcaggttgggccatgtcttccgattggatgcgtcaggtcgggttggatcggattttgagtcaaaaatcatggtccgtacctagcccgtcgattgttg

SEQ ID NO: 163243 - DNA, 423 bp, Zea Mays
cagcgtcgtcctctcccctatccctgttgatgtttagtgtacccctaaggccgcagcgcttaacgctactctctcctctacccccttgctgcacaagcgcgcacgccacatcaagaggaccactgtggcagcccccttccattgatttccgtgctcgctagtattgttagttgagagaaaaatagataaatgatgatagatatgtatagaaaataatattttatgttgaagtggggtatagggaaagaatttaggggaaaccgttgcgggaggaagaaatgtagaggatgaaatgttaacgatgtgacgcaaaaaagtgatatagggggagaaatttagagtaaaccgttgtagatagactaacgtcaccgtgctcatgctgggcactcccccctccctctttgttcgttgcaaagcttcttg

SEQ ID NO: 163244 - DNA, 468 bp, Zea Mays
attggcgtgcagcggaagcttccctggcaacgtacgagtgatgatgagcacagcgtatgccgcagcacgggcgtactgcatgccattggaatggatgggcacgatgcctgcaggatggcctggttgccacccgtcagcagagtggacagggcacatttaatgctgaggcggcacatcgcttgtcagtggagtagacagggcgcatttaatgctgaggcggcacatcacctgccagtttgacaggcggtgcgcctcatccgcaataaatgcggaggacgcacggctcagaggccttatgtcaggctccgcccattggcttacgtcacgggctgctggccacgtggcagcatcgggtctccgcctaagcggggagcagaggcgtacgcgatatggtccggacacgtgtcggctccggacccccgcctggccttgattaaggtccgggtactccttcccctagaatctcgg

SEQ ID NO: 163245 - DNA, 497 bp, Zea Mays
ggaaagcatgggtttatatatgtatgtccactttattatgtagggtagaagattcctttaaagcatagataggtttgggcaagaaaggatagggtaaggaaatactccatccaagattgtggatcttgattcttttgaagatctggcttgaatcttatccttccttgatttgatgaggtcgatcatcttcaatcttcgtccttgaagttgttatccgaatttgggacatgtagtgaaggcagattcttaggtaaacaaaataggttaataggtggttatgtgttaaataagtttaagcgaagtctgtcttgttgttttgcttctagcttggttggataagttatgtaacctgttatatcggtcaagtttggtgttatcatcaaggataatgggtattggtgttaccataactagggacatagttgagatgggtgtgggtacatggggtatgtagattgaacatagtttttttgcttataagataaataggttgggca

SEQ ID NO: 163246 - DNA, 853 bp, Zea Mays
ggcaaagctacatcctgggtgtgatgcattcacgaagctttcctttcttgtaaccatatttcatttgaaatgcttacatggatggactcaggagtcatttacatcacttcttggtgttctttctgccgcactccctgaagaggcgaacttaccaaaaaactaccatgcagcaaagaaaataattcgaggactaggtcttgattatgttaagattcatgcatgtccaaaggattgcatgcttttctatggtgaccaggcgaaacaagaaacttgccatatttgcaacacttcacgttgggcagaaagaaaaaagaagggtgaagcaacaaaaacaaagggatataagaagaaaccagcaaagatcttgcggtattttcctttgataccgaggctgaagaggttgtatgctaatgagcaaacagcaagcgacatgcgttggcatgatgagggtcgcacaaaggatgggctgttgaggcatccagctgatgggcaagcttggaatgattttaatttgagatatcctaatttttctgctgattcccgcaatgtgaggctcggtctttctagtgatggagtaaacccttacagaaacatgaatattagtcacagtacatggccagtactgcttattccgtacaatctacctccctggatctgcatgaagcaaacatcttttatactgtctatgatcattccaggaccagatagcccaggaaatgatattgatatatttctacaaccacttattgatgaattactacagctgtgggagggtgttgaaacttttgatgcctcttcaaggaagaagttctctctcagagcagttttgatgtggactttaaatgatttccct

SEQ ID NO: 163247 - DNA, 724 bp, Zea Mays
tcccaaattggggagctgtggggaatgatcggagctgagagttggtttactagacgcacgattacctagcggaacgtgctgaggcttcaatttatagaactagtgggcggtggccacgaatttgaaggaagatgcgtggcggccggaatgaaggggtgagtcactagcgcgatttactgtggcactcaccggttgaggagctacggcagttatcggtgagctggtgtggctagagacgacgtggtgaaaggctcagagcatggcacaatcgctgtgaagcacgacaactccggtgatggccataaggccacgtcgccggtgcaaagggtaggggacagcgaggccacaatagctcatacaaatccgcgacgagatcttttcatggtgagcgaaatccacacgcccgcagcacgaatcccggcaaccaacacaaatccggtcgtgcggaccgccggcggcgagattctgagctggcggcctaatccagatactgtaccatcgcggagtgtattcagttgacctgacagaccatctttgagctcgattttctcccaaattcatatggcaacataaccaatgctctgcagcaaagttgtagccccacaaaccatcttcatctttgttatagcatccctagatagattctcactggatcatggtcgaaatggctctcaaacttggttctaggccactgtcagtctgatattcagacttcaacaccctg

SEQ ID NO: 163248 - DNA, 833 bp, Zea Mays
taccgaggaccctgacctttaaaacaatccaaaagagcccgagacactgttgcttcagtcgctgacatttacaccgaagccctccaagttctaattctttacgactcgaggtccacgacgtcgcacggcggagaaccgagctccggcgaactcataccggccaccatacgtaacgactggtgctctaattcggctgagacctaattcaacccttaacaagtgtttcccctcaatcaatttcactagcggagctctaaatcgtccagtccacggaggcagcgcagacgacgggagaacagaagtgttcccggtgatctagggcagtatagctcaattgaatgggtcgagcagcattaggagaacctaaggacactaaaacgaaagatcagatagtatgaatagacctggaacaagctggccacggcgagggctctttcacggtggcggaaaccgatttgggggaaaagagcaattcgtgggctctggtgagtaattgagagcacaagcagttggattggatgctggattacctaacggagccgagggtgtgctcaatttatagtctacttgagcggtggccagtgaatttgatggagatgtgtggcggccagagaggaggaggggtactggcgcaaacgattagtggctttcaccgtggcagactcacgggtgacgagctagtgatatagagcggcttacggcgacatggtgaagcttcaaggcacctggcatccgatcaacaggcggccaattccggtgaacttatctgagccgaccgcaaagcaaaggggcacggcggccagccgccggtgttatcccgtggcgaagatctt

SEQ ID NO: 163249 - DNA, 1098 bp, Zea Mays
aatgcttgtataaacgcacagtgtttacgatcctttacacaacaatttatgctccatatgaacacgacgtacacacaacaatttatacaacgtgcggggtgtggttcagggttaatgcttgtataaaagcacagtgtttatgatcctttacacaacaatttatgctccatatgaacacgacgtacacacaacaatttatacaacgtgcagggtgtggttcggggttaatgcttgtataaacgtacaatgtttacgatcctttacacaacaatttatgctccatatgaacacgacgtacacacaacaatttatacaacgtgcggggtgtggttcggggttaatgcttgtataaacacacagtgtttacgatcctttacacaacaatttatgctccatatgaacacgacgtacacaaaacaatttatacaacgtgcggggtgtggttcggggttaatgcttgtataaaagcacaatgtttacgatcctttacacaacaatttatgctccatatggacacgacgtacacacaacaatttatacaacgtgcggggtgtggttcggggttaatgcttgtataaacgtacagtgtttatgatcctttacacaacaatatatgctccatatgaacacaccgtacacacactaaccaaccgatcgtgcacacactacgggtccccacagtcctgcgtcgcttcccgctagccgactgagccaatgtggtcaacgttcgagacccactcgtacgaacagaaccaacccacgcgtcgtggccccaccaaaaccctaataaaatatgtgccttgccgtcgccgccacccgctcctacgatcgccaacgccgagggccccaccgccccactcgccctaatcgccatccttgatcgtttgccctccaccgttctccgccctggttcgtctcccctctcattgttcgttccatttccctacattctctcgcataatccaacaattgtttacaatatgaatcagtgttttcactatcccggcaccccaactcctgcatagtaccgtcgccttcaggttcgccacaccccatcctcatccgtcccatttacgctttaatttagcataatccact

SEQ ID NO: 163250 - DNA, 292 bp, Zea Mays
gtgatggtcaaaaagttaattgactttggtttagtgttggttaacctcagcgtgaatgtggtgttgtatatatgtctcttggcttgtggtgtggatatgtggaacacagagacagtgggcgatggccaaagtaaatgtcaagtggcttcatgcagatggactgtgaatggcggaggatggatgcggcagaggatggacactaatgcttggactgtgggactagagaaatcggaggattgaccctgatggctgacaccaaggaatgttgataagtgtatgaataaatgctgag

SEQ ID NO: 163251 - DNA, 940 bp, Zea Mays
ctcagatctcagccaccaggacggcaggttgtttctctaaaattataaggggttttctgcaaagtagtacggtgaaggggtatcggccgagtacggccgtccgattagaaacgaacggcaccgattagattcggcacatgccaaacctatgagtaatccaaaccgtctgatcggagatccgtggcccggattaaattttaccatggtcccttcgcgtccctccgatcgggatccaatggcgcagggacatctgaccgaaacgctactggtgttacgatcctaaccgtcgatcgctcatcccacgaccaaaaaccctttcccccaactctgttgagataacggcggcgcacaggattgcccgcggcggtgccatcgccggtgctgcttgattccgccatccacgcccccattcactaattggaccagtgctactgcattactagcccacggcagagctgtgggagaagttctcaccggcaatggacagggcgaagaggctggtccgcggtggtcggatgccgcgcggagacggagagctcccctggacgcggtagttgacgtcgtcggtcaccaatgtgctccaagaagggcgggttaggacgagcagcccgcgccacagcaccacggtctcaacacccctttctccctcggatcaacccggcaattcacagactctctctctctctccctcgcgattctaatggcagatggggagtttggctactggacgcatagcctgcggcgcacgaactcccccgggtcttatagagcttgcccagtccaatctttttccgaaggaatagcgacattagtttggtcagcggggatttcgcacggcaggcacgcgggtagcgtattcactcgccgccacgaccgagaagaaggagaccgaggcgcttagtgcctggtcgatgggccccgcaaatcagcgaggtgagtg

SEQ ID NO: 163252 - DNA, 528 bp, Zea Mays
aaagcatgaggtaaattgggttcctcagtttgatacgatcttcttcggtactccatgcagacaaacaatccttgacatgtataactctgctaactgggctcccgagtaagttgtcttcacaggtataaagtgtgccactttagtcaacctgtccactataacccatatggaatcatagccgtcacgagtacagggtaatcgaactatgaaatccataccaatttcttcccatttccatttcgataccttgagaggttgtaacaatccttctggtctttgatgttcggctttaactcgttgacacacatcacatagtgcaacataagtagcaacatctcttttcagaccgtaccaccaatactttcctttaggtcctggtacatcttagcacttctagggtgaatagaattagctgaatcatgagcttctcttaagataagttggcgtaggtgctcgatttctagtacacatattctctttttaaaccataatgtgccttgttcatcttccatgaaataggaggttctc

SEQ ID NO: 163253 - DNA, 658 bp, Zea Mays
gtggtagctgcgtggctagggttgggtgctgagcaggcgtagtagctggctgtgtgggcgctggaatccacagggcagtagctgggcgggagaaccagtcaaagatcgtggggcgagcctagagtgtcagcgtggagggtatgtgtggtctggtggttacaccaaatttcaaatgtttggatcaaaagtgctcgtagcatataagacaaggtcgtttatatgcctggataaccagtcagagagttgtgtgggcgctggaatccacagggcagtagttgggcgggagaatcagtcagatagcgtggggcgagtctagagtgtcagcgtggagggtatgtgtggtctggtggttacaccaaatttcaaatgtttggagcaaaagtgttcatagcatatatcgacaatgtcgtttatatgcctggagaactacttagagagcatggggcgaaactagagtgtcagtgtggagagtatgtgtggtctggtgtctcaaatgttttgagcaaaagtgctcgtagcatatatcgacaaggtcgtttatatgcctttttagtttcctaagtggaaacgttatctcagcctctggaaaagcgaatacaatgactcgttaatataaagtgacggaccaagctatttttcgccgctggttcgaagcctg

SEQ ID NO: 163254 - DNA, 934 bp, Zea Mays
agcgtgttcaactagccgctcatcaactttccggaatggccttagcctggtgggataccttcaatgttgccatcagagatgctacctgggcagagtttgaaacggctttccgagagcaccatgtgccccaagggatcgttcagctcaaggaagatgaattccaggaactaactcaagacggaagatctgtcagtgagtacatgcacaaattcatagagttggcccgctacgcgtcggatgacgtcagcaccgaagtcaagaagatggcccactttttgaaggggcttagaccagaactcaagaccatcctagccagccaagacttcctcagcttctcgcacctctccaacaaagccatgcaagtggaaagggcaaaggaagaagaaaaaggtcatctcaagaggaaattccaagtcctccgagctcagcagcaagaccggcaccagaaaactcgatcctttggatttccacccaagggaccaagcttcattaggccagctggacccactccatcgcggtttagccagcagagtcagagctcctttcatgccccctcagttgcaagcaaccaaccatcggtgaatgcgtgttggcactgcggggaccccagtcacttcaagaacaactgcccacagttgaagacatcagggtctgcttactccaattcggtgaatggccccaagaatacctcagcacccacccccaaggcgccctcctccatcagccagcagaacaagacccagtatcaaggaagggcacgagtaaatcacgtcgatgctcaggaggctcagcaaactccgggagtagtgctcggtgagttccttgttgaatttactcccgctactgtgcttttcgattcaggagcatcccattcttttatagccactagttttgtggaaaagcatggcatcccctctacccctctagagattcc

SEQ ID NO: 163255 - DNA, 497 bp, Zea Mays
gaggaattcagggaacgtgcactatccagaaaggcagaagtctgggctaaattggcctgactctgagaatagttctcttcaaagtcagagcaccgtcgagccaaatctgataaagcagttgaaggagtacatgcgattaaagaaaagctaagcaattaaagcagctagagaaacagtgagttcactaaccaatattcgatgccttcaagtcgtctatctgtttttggagcagcagagggttccactgcatcggagataaagcttgatcgggaacagtagcgccgcaagatctcagttgggcggatacaccaccaataaaatcctgtggtcatggacagataagcaaaaaagataattcaccggtacgaacaataaagagcaaaaagttgactcacctgaagattggaaaggaacaagggaagacccaaagcaggaagagtcgatgcatggctcgacgaggggagatcagcgggaataatctcaagaccatgactcgg

SEQ ID NO: 163256 - DNA, 467 bp, Zea Mays
cagaatacaaccacttcattatccttcagctctggtgtggtcttctcacctccaaggcgaaccaaatcaacatcgtatatgcaacacctgttcgtatatgcaacacatgttcttcaacacttcgatatggccagttccaattgttgatttcccaaagacaatgtgacattgtcctaacttatttttatcatcttttgtatcaaaatcctcactatcatcactggacccatctatcacaccagccatgctgcccccagcgattttagtcaataatgtaccctcacttggtgccaccttcattctcagcaatgtccgaagcttccactatcacgagatccaaaggtaccttctctcctgccatcacttccaaaccatgagggcacttgaaaacctcgaagagctattactaaaagacggagttcgaagatatattcagatgtggagaaaactaatggcaaagtgcgaaa

SEQ ID NO: 163257 - DNA, 397 bp, Zea Mays
ccaacctctaccacctcccccaccgcgaggagggcccggtgaaccttaacgacctcaacaacaggaagggggagaaggtggagcattcccgcgcgtcgacggagaggtcaacgtcatattcggaggacatgggtcgcaagagaacaaaaggcaacagaagctcagcgaccgacagatactgatggcaaccaccagtgcccctaccccttatcggtggtcagaacacccaatcacctttacccgggcggatcagtgactcaacttcgatcatccaagcaagtacccgctccttgtcgatctagtgatccgagagagcagggtaaagaaagtattagtggacgggggaagcagcatcaacgtcaccttcccccggacactcttgggcttgggagttgca

SEQ ID NO: 163258 - DNA, 1184 bp, Zea Mays
ggaactcggttctgtagttttccggagttccaaaggtgacaggcatgtagatgtgtccaagcgggtattctccttcggtcgacacaatgccaaagaaaggagtgtctgactcgtggagctctttgagtgcaactcccaagcctaagagtgtctggggggaaggtgacgttgatgctgcttcccacgtccaccaataccttctttaccctactctctcagatcaccggatcaatgaggagcgggtacttgcccggatgatcgaagttgagccattgatccacccgagtaaaggtgatcgggtgttctgaccaccgatagggggtgggagcactggtggtcgccaccaatatctgtcgatcgttgagcttctgttgccttttgttctcttgcgacccgtgtcctccgaagatgacgtgacctctctgtcgacgcgagggaatgctccacctcctcccccttcctgctgctatggttgtcgaggttctccgggtcctcctcgcggtgggggaggtggtagaggttggaagggtcagccattcccgacggaatgcttgaagtctctgcagttctgcaaggtgtggcgcatatccctgtggtacgagcactaggcgtcgaggatgtcgtccaatgttcgttcaactccgcggggtgcccctcgggcgcaagagacgggtggtccagcggcgtggacctcttcatgaggcctcttctcccagtgcttgtctgtctgctggtttgcgtcacgtcgtggtgctgatggagcaggcttcgttcccccgatgaggtcttgagttcgttgatcggcggtgatgtagaggtccacctccctgaacagctgctcggaagtggtcggagccttttgtagtatggctcggacgaaggccgagtcattggatccctggtagaagtcctcgatcactgttgcttcagtgacctcgggaatacaatttctcatggtctgaaatctcttgaggtacgaccgaagagtctcatcccctcggtgcctgatggatttgaggtcccacggctgcgctggcttgtcggagagggattggaagttggcgataaaacaccgactgaagtcgctccaatcgtcgatgcagtgccggggtaggtgccttagccattgcagtgcatcttgcccgaggacgatgggcaagtatgcagtcatcacatcttcagtt

SEQ ID NO: 163259 - DNA, 919 bp, Zea Mays
agaggtttcccgaagctagggcgaaaacatcaattccccgggagccgcgcacgtctccagcaattccccagcaaaatgaccagatgccctgagccccgacttctcagtcaccgtacctaattttctctttctgacggccgcacccggagccttatcccttgaggggccttcatcggccgagggcctcgcttgcttccctcggcgatcagcggtgtcggcggagtctccctccgggtaagaaccgtacagcaaaagattcagctcaaacacacggttcaacctaacattggaaccgctgatatcccagctcctcaactgctctgtcttcggcgcgtatttgccgacaatcttgatggattcggcctcgacctcacgcacaaatgcagccgcatctcggtcgcgcagatccacagtgaaggcaggacttcacactagccgacccccagtgtcgggatccggtggggggtaatctcacccagtgcccaaccatgtgctaggggccacaccatgcaggcaataaactcctcgaccaagtcacgtccgctactcaggcgggccgcataccgaagggccccctcgtctttattttcttctgccacctcaaagtgtggaaaagccacatagcaatgtgagcacaggatggtagggggcaaactcggcaacccttcgacatccccgggagccacataaaaccaaaagttccaccaattgccccatttatttctagcacagggaacaatctcaacaacttcatccgaggtcttcccaaaccctcggcgtgaaagtgcatgatccaaattgagctatcttatcacctatttttcttttctactagtgtagatagtaattcttcgtgaagacctccacagatggttgaccgtcgtatgaggaaacaacccacacatacttcgcgagcacc

SEQ ID NO: 163260 - DNA, 444 bp, Zea Mays
gaaggggtatcaggtacttcctgccgttggatctaggtttagcgcgtgggattagatctccacccctatgaaacaggataccatggtagccgcgagatcctgcatcaatggtttggaccctatacaatcgctggaatcgtacacacaggttcatagatgaacggtcagggttcccagttaatcctagcccttcaaaaccgatcctgcggcgacagcgtcatctccttcccccaggcgggcatgcccggcggcgcgggacttccccccacggcacgccatggctacccacactagaacccgagtattgcacacaaaagaacgatccttagggtgctacccaaagtggagacaaggacgagaatggaggagaacaccgtacctcaagtaatggcgtgacccttcgtggctacggcgacgtgcggtccagcagtaatggcgattcgc

SEQ ID NO: 163261 - DNA, 456 bp, Zea Mays
caattgtgcgggatggtaaacaagcagaacctaagtttggtaatggcaaaatcccaattttctctctgtttgaactttgaactgtgtgctttctcatgtaaagaaaactgtgaattctgttgtcaaggagcctatttgtgcataggaataaactagagcaacacaatgaatcaatattgtgaacagatgtctcagttttgtgcaaaatgaatgagatgatcaattttgaaatgaaaatgacgcaagtgtaaactatgtgcaacatttttaacaatgaaaaattaccgttagtccagaaacagtataataaacattggtaataacagtatgtgcaatgagcagtggatgcaacaaaactgtttacaaaccatccagttcatagcatccatacaggctcatacatgcatcatcgaggcaaataagcattactagagtgccaaacaagattatgttcct

SEQ ID NO: 163262 - DNA, 627 bp, Zea Mays
cttgggggctaggtcatcgcccccttgtcgactcgctgctttacccactcgaggctgagtcatcgcccgcctcaccgactcgttcttcaccagctcgggggctgggtcatcgcctgcctcgctgcttcactggctcggggactaggccatcgcccacgtcgtcgactcgctgcttcaccagctcggaaactataccgatgggatggcaattagaaggaggtggcacaaaaacccaaacctgatccctctcaaaattttcaagctcctcatgcatagcattgacccaattaggataaaaaaagcgtgtccaacatcccggggttcaaaagaagcaacaaaagctgagtgagcaaagtgagacatctgctggtacgtagagcgagtgattcgctcatcaatctcaccaatcatttgttgaggagggtgatcacgttggacatggtgtggagcggtccttgaatacgttgcctccccatcaacagcagcctcaactcctccagtcttagcaagcactggctcgagcggaccccaagtggtggaagaagtggggtcgggtctatcagctaaagtagtggaagcaggctcgactagggtagctagtggagtcggctcaggatcaccccaatc

SEQ ID NO: 163263 - DNA, 347 bp, Zea Mays
atatcttgattaaaggattcatctaaagtgaaggagttttcctctggctcaccaaataaacctttgtaaaactcagtgataaaccttttaagattgtcgtgaccttctactttagaattgccattctcaagcgagaagattctcttttttctgtgtttcccattggcaatcatatggaagtattttgtgttgttatctcctaggagaacatcctttgtttttgcccgttgaaaatatttgatctcttcctctctgagaagtttggtcagctggtcacgcgagtgagtcaagcagacaagctcagactcattcagatctcttgtttcagcttcagtatccaacatgca

SEQ ID NO: 163264 - DNA, 622 bp, Zea Mays
taagcaatcatgattatgtatgttgaataaatttattgcattcccaccttcgatgaattagcgagcttagtattatcgaaggtaatgtctctttccaactcaaattgccttgtctgccaatatattaacttgaaaatgaatataataaaacatcactttgtagggcgtatatattccatgtattgaaattttgatgtagctgaccttatggatagtggctagtctatcagttcgttataatttaccttgcctagtatcagccaccttaatcttctttaattcaatacatattattaatgtttgcattataccatgaaatctagaaagatgagttatgaggtagcagaggaccttatggatagtagaagtatttctgaatgttggttgcaaatcctcgtactcctttgcctcttgctctctctttatgaaatacagattagtagtttagcaaaaaaattataaggggtattgagtagcgctactttttgctggggctgaagctgtggctgctgttgtacattgtaaaataactatgttgtgttgtagaaacagccatagcgcagccacaacaatctgaagcgaacaaggcaatgtaatgcaatcatacctgagagtaagtttt

SEQ ID NO: 163265 - DNA, 703 bp, Zea Mays
atcatgctatgatggatgtgatgatcgatacatattattgttaggaggtataaacattattgttaggacaagcgaggactgtgaacactgtggaggtggtgcgacggacctgcgaaatagacccgagaagtgcggtggtgtgcgacgtaaaaatgctagccaatcattttctttttctttcttcaagaaaacattgtatggagtgtaagttcacatgctatggatggacagctagctgtagttcacagcatataagcatcttcactcatgctacaaaatggctagcccatacaaatcttaacagaacatacaatacacaaatgctttaattgaatttcattaaaaatgtctccaaacaaatcaaagttgtaagctgaaagcctatgttgttagagtacatacagaaatgaagcaaagtaatacctatcaaagctcttcactcctgccatgttgctttctctggccatcttgtaggttgcttgatcctacaatgggaaagaacagatgtacacatcatccggtaatccttagaaattcacaccatatccaatgaatatattaatttaacaccacaagccaggtttagaggaacacctaaattattgcaaaactaaaggaatataccacaacaagcaactgagccttgcggaaccaagaaagttcatcatcacagatgtcctgcacttttgactggaaaatttgc

SEQ ID NO: 163266 - DNA, 431 bp, Zea Mays
gtcgtgctttaccgcctctaggacatcgtgggtcatccttcatcccttgtggatgaagggttggaagacatgctagaaggttaggaccaggtggctagtagtttcgcgcttagggtgtcagctcatgacatcgtgtgtggcacgtgttgattgcaatgtatcgtgcctcagtgctgcttccctaaagtaataaagtaaacttcgttccttggcttttcatgtcataaggcccttgagtctcgcccccttttctatgtgagatttttcgtgtaccttccctctttaaaagtaagagaggggagtgtgagcgaccttgctcgcggacctccttattagtcgatgtctcctttcgcccatggattggggcagacttcctaggggaattgttcgatgaaatggtatgaccaacccgcccttatcttggggtctcc

SEQ ID NO: 163267 - DNA, 516 bp, Zea Mays
ttggaattagcacctgagttaaattcaaaaatttgaattcaaatgaattaaggataaaagaaaacagaaaatagaaatgaaaaagaaaagagaaaccacatagctgggccgatttccttccccaccggcccaactcgcgcttccactgcgcctcgcgcttgcccacgcgcgtcacgccactgtcatgtggggccaccccgccagcctctcaatccccacgagccaacaatttcttccctgattggtggggccatctcgtcgggtccatcttcctcacggcggaccgtaacaatcgccgccatcgtagccaagttgtcgcaccggattccgtctgtagctcgggtggtttgaatcggcaacaaaacgcgccctggattccagagccggccaaaccgcaccatctctaggaacgtcatacggctcgcctctataaaacccaccgtccgcctggagttcttcgtgggcgctacgagaagcaggcatgagctccacccgcggtcggagaagggaagaggg

SEQ ID NO: 163268 - DNA, 496 bp, Zea Mays
ccgctccccttcccttcccacatggcgaaggccgacgcccgtacccgaggccgggccgcctctcacgtccccactcccacatgggcgcagcgcactgaggccctgacccacgtcctgacccacccgtcccacgcgccgtcgctccagtcgcagctcttcctcgcctcccgcgtcccgtgcccgccgcggggcctcggctccaccacgtcgtacccgccgttcctctgccccggcgcctcgctcctccgctgggctctcgcctccgtgttcctcccgcgcgcggcgagcctctgcctcccgccctcgtcctggcggtcccggtgccccttccagctcccgccgccggtcgtgccctccgcggccatcgagccggcgcccgagcggtgggccgactccgagctcagggcctacgcgcgccggcggcgggagcggaggggcccgctgacggtgcggccgccggtggccgtggtgggagtggtgctcaccaccgtgccca

SEQ ID NO: 163269 - DNA, 377 bp, Zea Mays
gggtgaaaacagaaataactgtgggggcaaacttgtcctaataacgggattggtctatcttgctatcaagccttaatatgataagtgctttaggttatctgtttataggatcaatgatgaaataagtgctgccctcatgtgccaactatgaaacccttcatgcatcccatggcacatcaatatctccggtgagctggatgatccagtaagtaatgagtgaccctttgtcggcaaggttgcagtgttacagtgtatggtagtacaaatgagacacagactccacactaagcttgattatcgttgtcctcgcaataaatgagtgtatgtaatgcctgcttaagcaccattggactggtgaagaacagaatgatggatgc

SEQ ID NO: 163270 - DNA, 463 bp, Zea Mays
agaatggaacacaccagctatgggactttaccttgcctgacccccagccaagcaagagaccgaggaatgaaaccacgactgactcgctcgacctaaaggttaggaaccgcacccaaccctttaaaggtctatatccttagatcgtgcaagtagtcatctcaaggacggtacgaaagcgcagactgagaaaatgcatgcaatctgaatcacaggacgagagataggaaatggacgtgcataccctgacaacagggtaaatttgaatgactactctagaagagatattggcacacgctttcagatgttcatttaagatcaagcatacaaagacacaatatttatcccatggtttagctcgccacaaaggcttgcccacctccacattgttgaggaaagccactaagtcaaagggtctcactcccttcctcgttctcaagccaatagttctcactcttgaaacgag

SEQ ID NO: 163271 - DNA, 345 bp, Zea Mays
tttttctctcctactgtttggaagctatatttgcacccggaaggaaataagataggcaaactttcaaacgaatatctaaaacttcagatccacaacggatcagcatatatatacctttcaatggacattgaaacagttgcgaacagagcaaagtcaaatcacaccggagagatcttggaacagaaatgacagatagagagtgcagattaaaccgggacgacatgcacgcacctctagattagcaatggagcgctgttgaaacttgcaaactcatggtcaagcaagctcaaacggtgggagagtagtgaacggtttgatgccagtaaatacaatatattggggcaa

SEQ ID NO: 163272 - DNA, 640 bp, Zea Mays
cgataacatacaagggtgtaagagaaggggcgaaggtgcagaagaaccaagggtatcagtacaataaagaatggagctaaggtaagactagcacgtggcaaagatgaggttacaaccaaaggcgggataagtaaaacaccactctcggactgagatggatgattggaggttttatataacagacatagtgtaatcaccaaggtaagatcgagagatgagaaaggtaaagaccacagtaaacaaaagcacaaccaaggatggagtttagaaaaaaaactcacaagcggcaaagaagaggatacgaaggaaaaaataggtaaagtacaactcttagattgagatagaagagaggagattttaaagggtaggtataagataagcatcaaggtaagatatagatgtgacaagggtaaagatgataataacgaaatgcataatcaaggatagagttaaggcaagactcatgaagtgactaagtggagaaaacaatcaatggtaagataggtaaggtcccaatagaagggttgaagtaaaaattcattaccgggggaagttataaggaaacaacgagatcaccaaggatgtgtgaaataaaatgatcactcatggatcttcaagaaacaagggtggtcaagggcat

SEQ ID NO: 163273 - DNA, 963 bp, Zea Mays
atgaagaagggggtgggcattgaacttgttgtcctggaggtctcttggctgctctttttaaagctttctttcctcctttgaatcatatgagtgtgaagcctaacatcactacacctttaaagtgggagtttcatcgtgcgttgggccaggccatggcactattaaatgggtcgtgccttgggcccgctaggcacaacccatttggccatctatagtcaatagtctagtactcctccctcatcatcgtacctgatctcgtgagtgtggaaaaagatgagagaaaacacttcatcttgtttgaccccacaccacacagtcacatacctcgccatccgcactcacctaatctatgtgtttggatcgtgtttgaataactatcccatttaagcaatgtctacctatatgatatatagaaaccgtagcgatgcactggcaactaactatgaattagtcatgcaggagctcattcagcaaatggcgaatgtgcagtacaccgagaacatgacagaggaacaggttgatgctatggcaggaagtgagactttgcggcagcaagcttcactgttcggagcaacaagaaactataaggttgaagggacattcatctatctcagcagcatatttggatcaaacaattgtcttaccaaaaaatgtaattcttacgcaggtgttgagtaagtccacaaacaggctaagggattcgttgcttccaaaagatgagcccaaacttgcagttcctatgttactgcttattgcccagcatcgatccaagtaagatttttattaacttggtggggccattatcaggcatcttgcctttgttccatgtgtttgttccaaaccatgcaaatggcgatgcagaaatataaatggcgtgattgctaatgatttaccatcaaaggaagtacgtactggagtaggataggtgtcaagccttggctgacattatttattaaattattt

SEQ ID NO: 163274 - DNA, 383 bp, Zea Mays
atgcacgaccaaatctttcccaacgccctcctctttgttcgatcacactttcttttcttgctggaatgtttgctccacctatttattaatgggaggttgctcatttctgtggagctgtggtttctagatacgatggccatggcgttcttcttccagctgctcccagatcaccccggggttctaatagccgcagcccaagtaaacgatggatttctggttacgcagcctcgcacatcaattcgattggtgcagctctatgttgtagccatttttttctcttcaataattgtttgctgaaacctggtgacgagtacagtctctgctgctgcgtggctgtgatgacaaaaaggttatttggttgattatgattcttaatgccattt

SEQ ID NO: 163275 - DNA, 660 bp, Zea Mays
acaagggttacaaatgtcttgaccgcacgtcaggacgaatttatatatctcgtgatgttgtgttcaacgaatccctgtttccttttgcttctactgaaccacccttgtctgcatctacttctgcccctacttcagatgagccactagcatataatgatcatatgcggcgatatagacttgaactgttagcatctgacagttctccaaagtgttcttctgtgcaggttttaggttgttcccaggagccgttcacaacaacaacgacatcgacttcatctgatgtttctctgataacattgcccctgccagctccgtgccttcctctgcatactcagacaactgatattactgacgtacactcgccatcagcttctgagacccaaccgctaatagaggaagtgtctgcagctatgccctctagaacagatgaagtgtctggagctatgccctccacatctacggtgcttactcgactacgcaacaacattgtcaaacccaagattccaacggatggcaccattctttatcatcactctcgtaagggtttctttgctgcacccacctcttacaagactgccttgactgatgaaaagtggtatgctgccatgaagtctgaattcagtgctcttcagcaaaacaacacatggacattggtcccta

SEQ ID NO: 163276 - DNA, 336 bp, Zea Mays
ttaagctggaataattcgggcggttccgccacacatacgtttctctctcttccaaacgacaacacatatcttgatccaacatgcatcggatcggccacactgctagaacatgctgcccgatgtatatgcggctggcctgcaccacccaccgaacgtacgtacgtatatacacggccgacctatatatatagtatcggatccgaggctgttggtctgctagttgagcttgagcaaggagtcatcgagtggagagagtgacacacacgacacgtacacactacattggccagcgtacgtagtagctagcaagctgcaactagatcatggcagcagttg

SEQ ID NO: 163277 - DNA, 866 bp, Zea Mays
ggtaaaggtggcaccacagttggggtgcgacggcggtggctggcgaggccagcaggatgtcctactcgatgtcgtcgatgcggtagaatctgggtgagagaggcgtgacggggaaaaagatgggaagttggaggatgattatatgatgttattttatggcaacaacgagaaagaggagaaaacacttgcgttatgtatacaagagataagacttatcttatctgattggtagttgttaggtgagacatgtggggaaacaagtctacacgcttccacgaggcatatacgatgcaaggcgacccaaatgctgtggttgctccaggaggtgagcccatgtgatcctccagccttatacagcccggtagttgcccggtagttgagggcttgaggcccatgtcaagcaattgtttttggacatcttagcttgaagacaaaggtttcttcaaaattcatttacgatcgttttttttctataaaagccctctagactcatgcctttttgtgagtgggctccaagaaaaaaaaaacagaccgtgcaagtcaatgctttatgtgccctctagactcatgccttttttgtgctttggttgggtatagccgcctctgcctaccgtgctgtgtgctttattttgcaggctcgcaagcacgttgttcctccagtggacgaataaagctgtggcagggcacaacgcaaatggattcgttcgctggaccaccgactatgtaaagaatcggatgactttgaatcgtctaagtgggcccacccacgcgcttgggcgccgcatccacggcgaggaccgaagtgcccccttggacccgctcgctggtaaatgtttggtccacaagtgcgacgtacacgagttacg

SEQ ID NO: 163278 - DNA, 489 bp, Zea Mays
ttttaggcatctgtttttagatcaagcaccgatgcttgtgtggccttccttgagaacaaggataaagtatcttatgctagggtatcattcaatggaatgcattatgatctacctccctggtccataagtattctcccacactgcaaaacaacagtctacaacaccgctagcgtgagattgggcacctgattctttttgttcattctacaacttccttttgttcttattttaattgggttgctttcttaaattgtatggtttccctaatattgagttcatacaacatttccttggtgctattgtactgtataattcttggcgaaaaactgtttatgttgatatgtttatacaggttggaagttagatttcacaaatgaaaatggaatgtgctggaggattcacatggcaatcatacaatgaggatataaacttcttgggtgacgaatcatttgcaacagttgggttaatggaacagataaatgtgacaag

SEQ ID NO: 163279 - DNA, 452 bp, Zea Mays
ccccgggacctgatgggtttaataccaactttatcaaaaaatgctggccgattatttcacaagacttctatgacttatgtgatcaattctaccacggggatgtttgccttcgaagcattaatggttcttatattgtcctgattccgaagaaggataatgccagagtagtgggcgatttcagaccaatctctcttctgaataatagtatgaaaatcattactaagctgctggctaaccggttacagacagtgatgacttcccttgtccacaaaaatcaatatggcttcatcaaaggaagaaccattcaagactgtctggcctgggcattcgaatatattcatctttgtcatatttcaaaaaaagagattattgtgctcaaattggactttgaaaaggcttttgattctctagagcatgagttcattcttcaggtattgctgcacaatggcttc

SEQ ID NO: 163280 - DNA, 896 bp, Zea Mays
ggttgcgagatctgcgcgtccgctccgagttttatggggtgggatcacctatgccgacttgggatataaagcttcccctcctgtgtcctttgattccttgaatcaagccatacccgaacgacgtaagcctagccaccgccgtcgcgagagaaatagaggagagagagtgtgtgtcgccgccgtggtcattttgatgctcttgcgattggtcgcggcgtggagtcgtgtggcgttcgcgggctccgccagggcttgtgaatgtcggatatggcattcacgggcgcggtcgaccgatcggtgcagtggaattggtcgctggatatggcactccaccgtgttgccgcacgccgctgcggtcgggcgtccctgtgtggcgattgacagtaagggcttctccatgtaattcacattggtgtgcacatagtgtaatcgtgctccgtcgaaggattcacaggcgtcgctgtggagctcgagtgctggcgagggaaggggggaagtgcactggccatccgttccgtgattaatggatgggattgaatcggctaggagagctattcggcgatggaatccagggcgttggtttgttgatctgtggctaggattactgtgggtgcacccactcggcggggttcgattctggcagtcgatcgcatgatctgcgcgtaggattagattctaggttcataaaatcctggccgtcggctccgggtcgtgtggctggagctgcgtaccgattcacaatcgcaccgatcgaatcctcgtcgtcgactgttgatccaacggtcgagattcacacgtgccccttcgcagaaccccttttacataagagccctcgggtttcagtaaaattaacccgctgtcctaatataaagtaattacggttgggccctggtttc

SEQ ID NO: 163281 - DNA, 450 bp, Zea Mays
gtggtacattgaaccgaattttctccattattttgatgcagtaaatggacaaataatggttgcagagcttaacttcaatctttctcagtcatgtggccttattatgttgtcaatactaaaagattatggatgtgtttggtatgaggtcaaagtatggcatgcttgaggtgttaatcttaatacaaaaaaacattcagtggtgttacactgcccaaattatctctcatatatgctggtataaaggtaatactatcgatgcacaaaaaatacttaaatggttagcagtgcttttattgtgtatccaaaatgtaatccatttatggacagtaatgctcaagcagtcctgcttcttgtttttacttataatttgcatagcttccctgttattagcatacttctgaaatctatcaacctggttataattttggtattctacatgtcatgtagttg

SEQ ID NO: 163282 - DNA, 477 bp, Zea Mays
aaaagactccgtgcacaagtcgcctatgggcgtggccggatcaatgaaggcgcgcaaccttatcatacaaattatggttacatacacacagcgagggcatcacatattacattggctcaaccttcgggatgatacccatctccttgtagttgaacaacattatcctcaattcctcaccctcaaaaagatttcgcagctccccctcacctacactcaccctagccggcgaggacaacaattcccgtttaccagtcccgtccacacgaagacgaccactctccatctcaccacaaagacacctaccacttcgtgacaattcactcactctccgtttcgctaccgcccttcaccgcctacagccagtactcgcactcgaaagatcctcagcacccaccacacgcggagaagtctccgccgcagccacatccaacgctacaaaataatccaagtccccatctgaagactcctctgtccacg

SEQ ID NO: 163283 - DNA, 828 bp, Zea Mays
acatctcgctttgtagaaccttttggagccatgggtttgactgagcttggccttcaaatccttttctatgttgttctacccatcccttatatagcacaaggaaagatggagttatatatatgctagactgtggattatgtttgacaaaaattcaactacttctatctcatcgtagacgtgaaaccgtacgcagtgcacatcttggtcgtaccatagtgatgaggattcttgctacaacgatcgatatatcctaccatactgctagatacatgactccacattattaattatggcatagttggtaagcagtgtagttgtctatactttatcatgtctgcaaatgcgcctatatgtttagcttggctatagtaacagcggcatgcaccacacagtagccatgggtgcacctaggcatggcgacaatatgctttcttgatagaaatgccatccatcatatttggtctaatggacgaaagccttatctcaaccgccatgttccatgtggtcatccttcctaattagaggctcgtgtggcatagggcgcaccgtctggtgttgtgccgccccgagagcatctttgctatggaccgttgcgccatggggtgtctcaaggaatgtttgaggattctgattatggacctgtaggtttcccttataggatctagatggctagagggagagtgaataaccaaaaaaattaatctacaaaacttataataataactagatctagggtttgaatatacaaaaacatttacttatcctagttctaatttactctaaattatctcttaaccaaactagtagcttgtaaaaagaattgtaaac

SEQ ID NO: 163284 - DNA, 472 bp, Zea Mays
gggtcaaccagtatagcagcttcatggatttcatggataccaggccgttgatattcaaggaagcaacaaaacccttggaggcagatgaatggatcaacatgatggagcatatgtttcgtctattgagaccctcaaaagatttcaagacagagtatgcagcgcaccaattgcaaggacctgcagagatgtggtggtctcatttccacaccgcttaccctgaaaatgctccaattgcgtggcaccaattcaccgcaactttcagagggaattatattccaccaggcttaatggaaatgaaggtgtcagaattcatgaggttaactcaggacacacaatcagtgatagaatatctacatgctttcaacaatctgtcgcattatgcgcctgactatgtgaacactgaggccaagaagatcgatagtttcaagagaggcttgagttcgaagatgatgaaaagtatgggaatttcctc

SEQ ID NO: 163285 - DNA, 811 bp, Zea Mays
tagtaagccagtgagcgccacgttagcgatctccggtgactcttccctcttatcaccgcgagtgcttccccgtccaaattcaccctcttcgcggtcatcttctataaattgatgcctcggcctgttctgtctacttgttacgaacccagtgaactactcctctcgcccgatcgtccaacatagcgtcctaattccggattccccccaaatccattctccgtgccgccgtgagcacccctccgtcgacccactgtcctgttcctccacccgccttcctagttgccgttcttgagtcctggtatgttgctaaagcttaccgcgcccccaatttgtatgttagtgcactgtgtcgtcgggaacacatcgggaaagtcgcaagctctgcggttgtgtgtggactgagctctagaactgcgttcaggttaaattagggatttccagtggatcactaggggtcgaattaggcgtagaccaaattagagcacggatggttgggtattacggccgatgcgagttcgctggagagcgcacgccgtcgtccaccgtctgggacttggtcttgcgaaggaaagaaaggagaggtgcttaagtgcgattgtaagtgagacagggaatagtgcgtagggattctttaccggttattcaaatccctgagggtctctgcgcaagattgccagtgcaggcgcgtttgcctggatgtgggccagttcgggcttaattcaacccagtagtgttcatcctttaccattttctttttgctgccaggcttggaaatttataggaaattctagaaaaatggtaaaattatggg

SEQ ID NO: 163286 - DNA, 506 bp, Zea Mays
cttggtttggtgccttgcgccaccgcgcactgtgcccgagctgtcccttcaccccgcctgcacgagccatcctgtctccaccactgtgcgccatcatcgctgccgtggcaagctcaccggtgctcgccacctcgcctcccttccccgcaccgggtgcctataaaaggaccgcctgagctccgtccttcctcacaccggcctcgggccactccctctcccctcccctgagtcgaatcaagctccacaccgctgcgcccttcctccgctttggtgagttccgctctcctctctcggttaagttctagtccaattaatgtagctcttgagcttcaccgttccctcacgaacacgacacacccattcccttcacctattgcgcccggcaacctcgccggggatcccaccgccacgggcgcccgccacctcgccgtggaccggccgtcccaagcaccctctggccaaattggccccacctccgtaatcccctacctccgcccgtgccttgc

SEQ ID NO: 163287 - DNA, 439 bp, Zea Mays
tctggagctaggggctaaccattcgggctcacgtctgcgattttatatgtcttgtcaggaaacttgtttagccccctatcacctctgttccgttcgctctgcttccttttccttgacctcccggtggttgtctcggtcggttccggtgcgccttgggtcggttccggtgcgtcttgggtcggttccggtgcgtcttggtatcgtgccgcagctttttcgagcatcacacgaaattgagacaagacctcctattcatgtaataaaatgcacaagaaatcatgcatgtgtaatagacattgtgaaatcagctaattaattaggttctgttacaccaaacgccatcctatttccactagcggttgtgttaagataaccgccagtggaaataggttttcactggcggttcccaagccgggcccacctgatttttttactggcg

SEQ ID NO: 163288 - DNA, 571 bp, Zea Mays
taccaagtaggcctccatcaacttctggacatgctcatccttggcttgcttcagggcttcaaccgcaatgacttcacgactttccaatgcagttgcacgggcttgagctgtggtgagatccacatggaacttacggttgcgcttctctgcatcttctgctcgggcaatcatccgacggtggtgccgagccaagaaatcatattgtgcatccagggtgagcaggtatgcagtgaggtacacgagtaaggggtcgtcctcaagcagatgttgccctaccaatgcacgcatcctggccatccaaatgggacagtctctctgaaagggcggaaagaatctgagcggtgtgtcggccacttcttcttcataaatctgacacagggccctcaatgccttgcgagtgatgacttggcaagtgtctctgaatctgtgcccagcagcagtgacactccattccacatggtgcagactggatccaatgtatacagtcacgacacacttctctgtgccatgctcgacgaattcacgaccttcatactctggctggcttctgattccaaggcgaactgtgcat

SEQ ID NO: 163289 - DNA, 1615 bp, Zea Mays
atttactactagaaatacaatcatgactacaaggtatcattgaaatctgcaaaaagaaaacacaatcgttttttacgataaagaaaacaagatctaaaaaatagaagaagaaaaaaaacaaagaagatatgagtaataccacaacagttggctgacgctgtagtttacgagccacgattctccaaccacacccctctgctttgcattcagctcgataccttgtcttattagtcaccacattgtgtacctcaaactctttcttgattgcgtgttgtctcaaagccatcctaaaatcatgcattgtaggaaaagattcaccaacctcaattttgggattttccttgtcaaccactatgctagcttcacaatctgcatcatcatcaactaaaatttgcgcctcacagatctcagcctcagtaacctgttccacctgaggagcttcctgagcgccatccctaaatcccaaggcagcataaaattgctcatcaccaacaaaaatatcagcatcatgcatcatagtaggatcgacatcccccacatattgacttgcatttttggtgcatggcaatttccccaacaatttctcctccactgatatgctccttacataacctggtttcagttcaaattgtacaaccaatgttagcactttacttgtccaatacatctgaaatgcgttgtcaagatcagtgtttgtgataatctgttgtagatacttattttctcgatcccaaaaccagcatatcggctcttgacaactcccccaaattgttctgcttgcaagatcatccattaaatgtttgactaagtagccacccacaacattcacggacaaaacatggtttttatcctccatctcaaccttactgccatcttcaagaatagccgtataggctggaatcgtagcgcgcaggctgaacacatgctctttcctacgtaccaatcaaggaaaattaacaaaaattagacctatcactctacggatgaactacaaaatcagactcacgttgggattaggatatggaactcactctacgaatgcgctgtaatttccatcaagctgtgacctgtcggccatctcattgccgtccattttgccgcctctcatgccgtctgtgcccttccacccgctgcagatgggatcatcccccatcttgttgaagctgttcatgtccatcgtcgctcacttctgatcttgtgtttgggggattttgtggttgaagtgctaatcagccgccgccatcagccatgtatctagggttatgttggcgcttggtggcagaagaacggaacaagaaaggcaagggagcacaggagagacgaggggccaactcagtcttttggctttgggggcaagggaaagaaaaaaaatcggaagggataggaaaggacgatgcgtgcagttttctgactgctgctagtgcctgaagtgttattccgtgaatacttagattaccagtgttgtttgctgaattagctcatagaccggtgctattttatggatttccccctctccaagcaaggagagaccggatataaataaataaaaaggcctgcacgattgcattgcaccgacacattgcgcagacattctcaagaggtacaagcgtctccc

SEQ ID NO: 163290 - DNA, 518 bp, Zea Mays
ctctatcagagggcagactggagatagtggaccgtgcctcatcatctgtgataggatggtccagatcacccaaatcgacatcatttctgtgacacccctctagattgaggggaaaatgtctttgatgtgccattcccaaaagttttgaataatactcatgcaaaacctcctgtttttgctcatgagaggtgatcacttgctccccattaaccagcttgtgaataagatttattttctttctatagcgggcctgcatgtggaagaaggacgtattggcatctccctccttcaaatatttgatccgggacctaaggcgcgcaaccgtcctctccaaggaagcaagagccaggcaatgttgtttgagatttcttttcaaccacaactcctctgatgataatggcctgttgtcttgagccatctctagcctgtgcaggatctccctagccatggccaactaagatctgacattgccaaccttcttatgtccccacgactgcagggcttttgctagccttttc

SEQ ID NO: 163291 - DNA, 290 bp, Zea Mays
cgctcgcccaaaccaggacgaaaacattccccctccttgtccttccggtgctccccaaccaccaataaccctggggtgcagcccatgcaagttcagatcaagtgactatccatagaatctcgagtggttgtacttgataagagcataggtaatgaaggataacaaattgatccttatacgagtcggggcaatccttcatgatcacacctaacccggctgagccaactcctttaggggggcctcccaaactagagagtcccgatcatcccactcaaggtgataagggtgat

SEQ ID NO: 163292 - DNA, 622 bp, Zea Mays
ttgtctattgaagtagtttaacccatctgttgtagcgtaatatgtggatttcaggcaatagtagtctcctggctccgtctttgaagaaataaacctgcatgaccacacacttctggcagtagtgcaacacatgccagatctgcagttgccaacttgactcagaggtggcaggcaatcctgctcgaccttgccctaagcacccttgagtagaaggtgggggagcagacatcgaaaaggcatggtgcggggttgcagtgagggttggtgcacgatagagatgggtgtcgcaggcaatagagaagggcaagtagagagggctcagtcaacgcatgaatgcagagtgaataaatgggagtaggtattctgtttcgtgagttcattccaaatatggtgaatcaatacatgggtggagattgagcagccaatttagtgctctttttggttgcttgatgtgcctgtagtttgtgtggatttgaaacaattccttcactgactgttgaactgatgcaaaaatatgagagccctattgctctttgattttgtggatcttccatggtaaataattttgcaaaggttaaactaaatttatagcttgcaaacttaagtacagctctgatttatg

SEQ ID NO: 163293 - DNA, 807 bp, Zea Mays
gcactgtagactgtccggtgcgcccatactcggtttttaaaaaattctttcccctctcgcgcccgaggcctggcttcatttcttctgttctctgccccggtctctgtgctctggcggttccctccccatcgccggcgtcctcccctctccggcgaccaccaatcctacggcgaccacgtgctcctctccttccctctctggtgagcatcctctgctctctctttccctctttttctctctatctctccctgctgtgagcacccctcttctccctttttgtgcaaaattccaattcctgtcaaatccagtgaatccaaatggtggaatgtgttccaatgtgtgccttgagcattcctgtaggttcttagctccttcgggagggttttcacacctcatatggccatttctccgaaaccctaattcctcgccctccacatgttccgtaaaatgccccaaccagccaaaaatgctccaattgaacccaaattttttaggcaccttcacaacacttccagtaacacttttgccaaatttcacgccaatcagagattccaggctttaatttcaccaaattcctcgtttcgagcgatcgtttccgagccgagtgcccaaatctctttttcttcgcctaaattcaaaccaagcacacacttcactcatattcacctatataaacctattcgtgaagtatcggctcaattccatgtcgtttcgtgcctcaattcgaattccaaacctcctatggcactgtttatcgttcaaacgtcgttttcacgtcgtttgacctctcgatcgtctcatgtcttg

SEQ ID NO: 163294 - DNA, 404 bp, Zea Mays
gccgcaccgtgagtcttcaccgccgggcgcccggattgagccagggatcttcaccgcgccacgctaggggtaccggcggctctgcaaacgacttcgggtgtcctcgacgccgtggatttcgcggcaacatcagataccacctccgccgtactcgcgcgcttccgcggtcgggcatcaccgcacctcggccagtcacaagtgagtccccatcgtgttcgtcttccctccctccatgttattccctagcgacttgtggtatggtatagtcgaatccccgggagcactggccgaccatggcgccgccgcggtacaccgtgtaccgggtcctacactcggggtcaaccaaaatttgatggggaattgagttcagggcgtcgtcaatctcgcgggagccgagcgaattt

SEQ ID NO: 163295 - DNA, 949 bp, Zea Mays
cctctctccctctcgctgcctggtggggtcgacttgttggtgccgaacccatccgcgcgcgcttgcctctctcgctgatccgtgggccccgctcgtcagcgcagaaccccgtttgctcgcccgccctctcgctgactcgtgggtcccgtctatcggacccttcccctctgaaccaccgcgctctcaccgtggacacgcccactacctcacgattcccggccacacccccacgcgcccaagccttttctggaccccgtcctcactcactcgccctccctcgctctggtgtgtcctcaaccgagcacactcgccctctctctcgctctgcgcacgtgcccaggaagttccgctgctactcgtcgtaggctcacacccgttgtgcggtcgctgtcgagccctcgccctggccgttgcctcggtaagctccgccttatcacctgcaacccggtacacccctcagttcgtccccttcccctctggtttgcccggtccgtgctcaccggttcattgccgtagctccaccgccgtcgacccatgtcctcatcgtgccccggactccgtttgtgacctcctgagtcttccctcaatgtgaccgtcctaacctcgcccctattttcccctgttttgcacatagtcacatgcgattgctcgccagaatgttccctggtccgccaaggactctccctccgccgtctggtcgtcttagccctgttcatgcaacccttaccccgccaaaacgcttggtaggtcatctccaacctctccagcaatccagacagacccctaacgccctaagaaccccgatctgcctcgcctccggtgacggcgccgccgtgtccgcgaggagcgccgcctctggctcaccagcgaaggcaaaatcccagacatccatcttaactgctcattcctaatcggatggcccgacttcaattaaacctgatctaatcat

SEQ ID NO: 163296 - DNA, 495 bp, Zea Mays
gggggagatgagatggaatggaaatttgaccgggggggacgtggtgggcgtgacgcgctgctgctgggctgctggctacgttattgttgggctgttgggtttgggttgcgttgcgtgtggtggtgtgttgaccaattgacttggccggcctgcgggctttgtgtgtttgtttactcggtcccgccgagccgggacgacacgacggccgagaagacgcgttggtggggttggtgcctgtggaacgcaggagggagagaggaatgaccccggacccggccggagccaaggcggaacggaaactgcgcgggcgggcgccgttgcttggggttcttccggtcgctccattggaacgcgtgttgacattgacacggcgtggtcccatgtacatgaacccaggcgtcggttttagatggagaaaggggtcaaaaggggcatgtaattttcaggacgaaagcccctgcacccctctccggatgtggaagtcgcggctcccgg

SEQ ID NO: 163297 - DNA, 687 bp, Zea Mays
gccacaaggaagtcaggggaggacattgtctggttgcctggggaagggtgtgcagacccctccatttgggagggttgagtatttctagtttaaaggaactatgctgggcccttcgtatgagatggttatggcttcataaaactgatccagaaaaaccttgggcaaacctccctatccaagttccaaaaaaggcagaagctttcttctccactgttttggtctctaaggttggaaatggagcacacactttgttttggacagataaatggatcttgggacagaatgtgtgtagtctggcgcctaggttatttgccatcattcctaaaaggattgcaaatagaagaactgtgcttgaggctctttccaacagaaaatggatatctgatataaagggtgctctgtctgtgggagttctagtggattatttgaatctttgggagcttctatcagaaatagtgttgcagcctgaagtggaggataagcatatttttagtattgcggcagatggtaaatactcggctaagtcggcatatgaaggcctctttgctggatcaacgtcctttggtcactatcacctggtttggaaaacctgggcacctccaaagtgtcggttttttctttggctggtggctaacaagagatgctggactgctgacaggcttgcaaagagaggcttggatcatccag

SEQ ID NO: 163298 - DNA, 1097 bp, Zea Mays
tatcgatcatcaggtgcattcaattacgctttcggttgctgcattgagaaatgaatcagtcgaactgtgaaccaactacttgaaatttcacgtgatgtggggtatagtggcaatgcataagcccacatggagcactgggtcttcgaggtgacacactgacattgcaactgaacacacttgtctatgtggctatggctacggtatacatagagtcgtacattaggtagcttattcaatcaaataatgtccggttttgtcatgaaagtgataataatcttctatataaacttggtcaaacgtaagacatttcacttaaaataaaaccagaacgtctctctttttcggtggagatagtattaatataatttcgaaaattctgatctgcgagttggtactttgataattcaaatccatgttgccaaaagctaactgatataatactttcttcaacagtaactatcatactatctgcatcttctatgatctattaaagtacctcacaagagatccaattaatgattcacacctgcaagataacacctgtagtggaaatccagttttctggtgtgagtctaaatatttcagaaacaatgaaagcatagaagaaaatgctgcagtaggacaatacctaattatcatgtgcatgcccctagaccctccatttttctcttagcgaggaagcagaaaaccaaactcaaatacaagaaatattagtcaatacaaagtggccaaatttctcgagacagaaaaagacaggtgggatgtagaaagggacttaaaagttgaaaccattggccccatgtactgcggcaaaatatttctcttcttctggcagtacagtagcttgcatcatatgtgacatcctctttatagtacaggaagtcaagaatagcccgagtgctcagcacatatgctacatgctcccaactacattaccccttctttgaagtggcgagcaaagcgagaagtttgagtggggcccaaaacctgagtggggcctaaatagaaacctacttactaatggacctttatagctacaatgaataagataaaaactccactgaaaccagaaaattgagtgggaccccgtgccccag

SEQ ID NO: 163299 - DNA, 658 bp, Zea Mays
tactcacgacagataatcactcgttcggaagatcgacatcgtggcgttgcactttatcgggcgaacaggatatttcgatcccgtgggggaagagacgcatttttggcgagtaacaatctcctggccctagttgctcgaacgtcgtcaggaggttcttcctctcccttttccgcacacaggatttgcagctagagagacgtttggggtgggccgcgctgacacctgcgccagtgcgccgttggcgacggcgaaatcagggctagggcgtcggcggtgggatcggagctacggttgctgggggattgtggctgggcggttaggtgagaggggcgtgaggaggagggatggattgggggagctgttgctcgcgcggggcgtgagcatgatccggcggcgtgaggagaggatgaggacggggatggcgggtcatgtcgtgcggcgtttgcggcggtggggtcgaggtaggcagggcgacggtggctgcggactgcggttgctcgctcgcacggatgggagggctgacgagtgacgaccagagtgatgtacgcgcggggctgggcagcatccgacggacgacgaaacagaggtacggacggacggttgagatcgttggatggcagaacagcgggaggcatgctacccttgcgttcttaataag

SEQ ID NO: 163300 - DNA, 1219 bp, Zea Mays
cttctttagcatctggtccaccaaggaatcaaccttaatctacctaggaggcaataaatgaacacaacatccacaaaacttggacaagaatgcttagggatctacttgttaaaacatgtagaacacatatctagtaaaacacacatgagatggaaatgtgttgcatgttgtcctcttcttgatcacatgagcatctccgacaaggtgcatcaaaatagtgtaccaaaaatcaaaatactacatttaaagtgtttagaacactaaaaacaaattaaacttcaacagttaagccccatattatatattttaaaaaataattacattgttaggaaagaaaaggttgaagatgatgtagaaaacaagaataggacactaatcttgggtgtagtgtgtttggatcacttacagatgtgccctatatttattgataaaaaattgtaaataggacattggtgttgttttttatgagttaaaccctatattttaaagtagtaaattgttttaaggcactaggtatgttctaagtgtggaatccctctccacctaactaggttgtcctttttcagcatctattgtggatagccaaccacaaaaaataaaattgacaatttttagaggcccaagggcaaagaaaactgaatcaacgaaggagtaacgagctgattttgtgaagcactaactagaagatgacaatttcggtcagtttctcgttccgagtgagtcaccgacaattcgtctcgaaagtctctttacgactagtttggaaacttaaatcccttctgggattttcgggaattaaggagaaaattaagctaatttccacccctcaaatcctcaggaatctcagagggatttaagtttccaaactagccattagatagaaggtctcgtgtatatatatgtcaaggtatttggacaaagcaccactaaaagagcaccttatatataaatacgcaggagagttgcatattagtatattaagaagaagagtaaaggtttgggaactgatcaaaatacaaggacactactcatggaggacgaaaacacaaaaacataaagagactcatctatggcccaaaaaacgacagcaacgacctagccgttagagagtaggcgcaggccacaagctagagccccttgtatatccatgagccaacttaagggtgtgttcgaaagcaaagtattttaaaactatgattttagaatactggttttaaaa

SEQ ID NO: 163301 - DNA, 317 bp, Zea Mays
caaagattgaataagttggtgtatgtgagctacaaccggaaaatggaaaatcggttcgcaaaaataagagagctcggttccaaaggcaagaaaagcaacccactggtgcttgaagagtttcaatgggaaaatgaatgggttgatgaggaatctgatagtggtaatctttgggctgccgttgatgaagcattgggtgcaacatagggtctccggggccgaaatgtacctatggctgctggtggtctagttagggggacctcttcttctcagcctcatccaaggacctatgttcgaactaggaagcgtccaaggaatac

SEQ ID NO: 163302 - DNA, 399 bp, Zea Mays
gattgtcaatattccaagaatggtctaggtcttcgctggatggcgttgttagcctgtatgcgctgggggatgccttcgacttgacgatgaacggaccctcacactttggctccagcttgccccgtgactctgtccaggtggttcggacgagtacgaggtctccttcgttgaactctcttgggacgactgcttgttcgcgccaggccttcgtttgagcttggtatttgttgaggccctgcagggcgaagacatggtctccatcgatgaggtctttggacgttggtttgtctacatcggggacggctgatgcgcttgttcgagatgacccgtgctttatttcctgcggggtcatggcctccgaaccatatagtagacgaaaaggagtgaatccagtcgccc

SEQ ID NO: 163303 - DNA, 484 bp, Zea Mays
gtcagatttttggatgataagttgaagacgatgaaatggcggcttcaagggttttggagaagggccgaagacatggatgttgaagatgttctgtaggctagttattggtagttgattctggttgttgcttcaggttcaggcctctctggcgtcttgtcttctgtttctttgttcgcttgtttctgtcccgcggtctgctttgtaagatggtttatttcacagtagattagtggttatatatgtgatgactctttaattttagcttctataaaacctggttcactcccgtcgtcaaagaagatctcagagagacgcaacaatcagaagggaaacattcttctttgggttaagttcgcgacatggttggtagccaatcaccatcgtctcccgcaacacacagcccaaccccatggatccttcctcccacacccgttgcagtaccgtggcacagttggtttatagcgcatcaaatggctggtgcgga

SEQ ID NO: 163304 - DNA, 789 bp, Zea Mays
cacccacggaaagccaatgtggtagctgatgccttaagtcagaaattgcaatgcaactattctatgttggattcttgcatcgacaccctatgtgatgagttgagcaaaatgaagatcgaagtgattccttctggtgctttgtctcacatttccgttgagccaacattgcaagaccagataattatggcccaactcagtgataagggagtacaaatcattaaagagaacctccatcagaagacagagaaatgtaagtgtttccgccaagatgggaagggtatattatggttttaaagcagattggtggttcctaaaaataaggatctcaagaagaaaatcttggatgaagctcatctctccaaattctccaagcatccaggaagcaccaaaatgtaccatgatcagaagcccttgtattggtggaccataatgaattgggagagagctcaatatgtatcataatgtgacacatgttacaggataaaggcaagccacttgaaatcagctggtgccttgcaacccctatcaataccttcatggaaatgggatgacatcagcatggattttattgtgggcctacccaatacctctcgacatcatgattcgatttgggtcgttgtggatcgactgacaaaagtggcacattttctcccagtatgaagaagtaagcagagttgtatattgaccgaattgtgtgtttgcacgggttaccccggaccattgtctctgaccgaggagcccaattcgttgccagattttgggaacaactgcaagagtctttgggaacca

SEQ ID NO: 163305 - DNA, 2803 bp, Zea Mays
ctgatgtttttgccgctgttgagctctgatgagttgctgctgaaccagttgaagcatcagctttctttcatgcagccaatcagtcagtgaaggaacatcacattgcccagggaggtcaatgcccagctgccgcggaatatggccatagagcacttcaaaaggtgttctttgaagagaggaatggtaactggtgttatactagtattccgctaaggataaccactttttccatttcgttgggcaagcttggatgaagcaacagaggtacgtttccaaacattggttcacacgttttgtttgaccatccgattgagggtgataagctgtagtcatcctaagatccacaccagcaagcttgaatagttctttccaaaaggcacttgtgaacagccggtctctgtcagttataatggcctgaggaaatccatgaagtttaaaaacatggtccatgaattgagtagctaccttcagggcagtgaacggatgacgaagtggaacaaaatggttgtacttcgaaaatttgtcgacgacaaccataatgcaattatacttatcagatgtgggtaggccttcgataaaatccatggagataacttgccatgcggctgcaggaacttggattggttgtaataagcctaggtattttactctttctggtttagcctgttgatagattgaacagtggctgcaccaagtagcgatcatctttttcatgcctcgccaaacaaactgctttttgatcttatggtacgtgaccaagaaaccagaatgcccaccaattggagcagcatggagtgcagtgaaaattttgagagggaattcagatgttgctggaaccaagattctgctgtgatatcgaataatgccttgtgtaatctggtaagggccagaaggagattttagggacaaggcctggagaattggtgcggtatcaggataagaactatatttatctgctaaatcctgaagccacgactgttgtatcactgataaggccaacatctgctcacttgagagtctagacaaggcatctgctactcgattcgaggtaccttgcttgtagcaaattttgtactgcaaaccaagcagtttagtcaaagctttttgctgccatggtgttgttagtctttggtcatcaagatgggtaagactttctgatcagtgtgtatcacaaactgtccacaaatcaagtaagatcgccagtgatcaacagccatgagaattgctagacattccttttcatatgttgataaggtttgatgtctaggacccaatgtcttgctaacaaaagcgatagggtggccagcttggtggagaacagccccaatgcctgaatcgcaagcgtcagtttcaatctcaaatgttttagcgaaatccggcagggcaagcacaggagccgagactaaagcggttttcagagcttgaaaagcctgatcatggtcctcggtccaaacaaacaattggcctttttttaggagagaggtgagagggcgactcataatgccaaagttttttacaaatttatgatagtatccggcaagtcccaaaaaacttcgaatgtccttgactgaacgagatgtaggccaagatttaactgctgatattttctccgggtcagtggccacaccttcttgactgattatgtgaccgaggtaatgcaggctggtttgagcaaattaacattttgatagatttactttgaactggtgcttgtccaagatattaaagacaacgcgaatatgttccaaatgatcccgccaattggtgctataaaccaatatatcatcgataaaaaccactacacatttccgaagcaaaggagcaagtatggaattcatcgtaagctggaaagtcgcagggccaccagtcactccatatggcataacccgatactcatagtgaccattatgtgtctgaaaggcagttttgggaatatccaaaggttccatttgaatttggtggtatccagagctcaaatctaagcttgtaaaccacattgcaccctgtaactcatccaataattcatcaataatgggcagagggtatttgttcttcactgtcaaagcattcagacgacggtaatccacacaaagtcgccaatctccagttttcttgcgagctaaaataacaggagaggcgaagggactactgctaggctgaatcataccattctgaaggagttctttaacttgacgttcaatctcatctttttgtgctgggttatatctataaggacgcagacgaaaagatgtagcccctggcactaaaggtatggaatgacagtgggagcgagcgagaggcagccctgttggtttatcaaagagtgaagcaaactcagtgatcaagttttgaatgtccacctgaatagtttgtgtattgtcatcatccgagatatgttgcaattccaaaagacaccaaacttcatccagggataagaggtgattcaactgtgatgctgaaatggtgtcacatgaggaaaaatccgatttgtgaccatatagaaccactcttgaattgtttactgtaaatgctaaccagttatcaacccagtgaaattccattgggctattggaagccaaccaatccacaccaaggatggcgtcatagcattgtaatggtagcactttcaagttgatcataaaagtgtgaccttgaacactgactttgcactgagaaagctcctgggtacagtaaatcagctgaccacttgccacacgaatagggactggttgagctaacggaaccaaggaagagacaccccgaaccatctgttcactaataaaagaagctgaaccgcctgagt

SEQ ID NO: 163306 - DNA, 614 bp, Zea Mays
gtggcatactcggcttggaacctgcctcctcccaaagatttcaccctttttgtgtcaaatccgcctgtgactgacagcaatttgggccttagagtgcgaccctctgctgaggaagtcaattctttggttgcttcgctcggggcgattcctgatgatgaacggcaggtttattttgaagtgcctctgaatcccagtgatgctgacataaatgatatgcttgatctattagctgaggattcgtccgatgctgctcctgttggtaccttggcagtggtgccccttccagaggttgatacgattttggatgtctcaaaaactgtcagcactcgtccgaggcgccctagccgagctagtcgtcccgagccttctgctgatgagcaaaagaaaaagaaaagacgcctccggcgagtatctagttttgatgaggacgccggcattttagctcctgctgctgaagaagtgcctgttatcggtcttactgatactgatcccaatgggtgtgcccaaactgtcgttgatcccaatgtgtgtgcccaaactgtcgttgatctcaatgggagtgctgcttgtgttgccgctgtagaggatgaagaggaagaagatgaaattccttt

SEQ ID NO: 163307 - DNA, 891 bp, Zea Mays
cgtgtcaccgccgtatccctagggtcgtgggtgcttgctgcgctcgccttggtccccggtagcggcagcagcaaccgaaatagcgaatcgtggcttttcgtgaccgtggttcttgtttctctttttcgtcctgcctccgccctgggtgacgacatctgagtcgcctatcttggtaaccttgacctgtggtaccgagtgccaagcacgaccctcagcggctctggcgcacttgtcagccagagcaaggagtgtggtgacgtcgttcacatcgtgtgtggccaacttctccagcatcttctcatcacgtaccccctggcggaaagcagtgatgatggaagcatccgagattcgggggattgtcccacgtaccttggtgaagcaggaaatgaacgctcggagggtctccccaggctcctgcctcactgcatggaggtgtgcctccactccgtgccgctggtaagcgctggcgaagttcgccacgaaccacgcacagagctcctcctaggagcagatggatcctggggcttggttcatgagccaagtccgagctggtccagacagggccacatggaagtgggttgccaatatggcggtgtctccacccgctgccgtaatggcggtgacataaacctgcaggatttctgacgggtttgtcgtaccatcgtatttttccaacagatgtggccaaaacttgggcggccacgtcaccgcgcggaggtggtccgctagggcagcgcagcccactccagccaacgggatgctggtctggaatcgagcatcccctcgggcctgcggcgcgaccgccacagaatcttgcccgagattgtcgcagcactcatgcgtcttctccaaagagatacaggcttctctgcccgcgcgtctgcggttgag

SEQ ID NO: 163308 - DNA, 714 bp, Zea Mays
ccacgcgacagctcccgaccccgtcgcaagcgcccaaccaaacaaattctactgccctactggtgaatgttttccccaaattccaaattcccaaaacacatcaaccgaatgagaaaaaaaacaaaaagaataacgtccaacttctcttttttgcaaaccgggtatcacactctaccccccttaaaaagaattcgaccgcgaattctgacgcttctatcggaacgacaaaaggaaagattaaagaatcaacaacacttacccacaacaaaaagttccggatacttctgccgcatcagctcctcaagttcccacgtagcctcgcgctcagactgattagtccataagaccttgacatacttaattgatctcttcctcaatacaagctccgagaattccaatatacgcaccggacgacactccaaagtcagatcctgctgcaccgcaattagttccatctcaatctgatggtccggatcccgcaagaactttctcaacatagagacatgaaaaaccggttgtacccctgccatggaatccggcagtagcaagcgataagctaggctgccaactcgggccaagatagagaatggtccaatgtatctcgggctgagcttcctagagacaccgaaccacacaactcctttagtaggtgataccctgagaaggacttggtcacccacagcaaattccagatcccgcctcctcacatcagca

SEQ ID NO: 163309 - DNA, 283 bp, Zea Mays
gattaagcattccaagcttttcattgtagttatattggcctatgccctaccgaggcaaattgtgttatgcgttgctgaggtttactaacatgattttatcaagaaattctatatgtgaccacattttgcagatttgttctctgttaacttgcaagaacactgagatgagagttgttatttttgtatcacctgatgttcactaggcattggtacatgtgactttaatttggtgggcatatatgcaaagaaattaaatgaaataaacaaatgagagaagttctga

SEQ ID NO: 163310 - DNA, 757 bp, Zea Mays
aaacaaacctaggagtgggttttttcggctttcggctgagttttggccgttaacgttttatttcttagttcgatttgatgaaaatcgtttcaatgaaaatcgccaaaatcaatggtaaaccgtcgcgacgagaggaattcacatctttctaaatcctaaaccatgcagaccccatcattctcagcacacaaagccatgaggtatctaaattctcgtggcagctaaattacctagaaatcgagattcttagaaaagatcttaagaaaaagttgtcctaaacacctaaaatcttctaaaaatataagtaaaagctgctcggctgacttttgttgggctgttgctgtaggttgcagcggtcgctggtctctgatccggttgactgttatttggctgctgcagtctacgactctacgtgaagagagcatgagcatgaatctggggcgatgtccaatggtagtaggtttgatatataccatctcatcttgagatgttccagatctagctagtagtacaggggggcgaggagaggaccatggcatgccctttggatcatgcaagcgtcaagtgtgtggttgcaccttccggtaatccggtagacaccggtggttgcgaaataatcctagctgtggtgccatgccagttcaaacccaacagcgccaacgcccctcgccatccatcttcgatctacgcacctaacaagggatccagcagcttccacgttctggtctagctgttcaacaaccagatccgcctcgtg

SEQ ID NO: 163311 - DNA, 887 bp, Zea Mays
tgagacttcatgtctttttgataggaaaaattgtagtatctcgggttattgtgaaaatcgtctaaaggcctaaccttcgtctgatagtgcagttcatgagctctatagaaggctttagcgctggtgctaacaccctggttgtgcactacccatataaagacgatgagtttgactatcgcatttggagttagctgttgcatgaaaatcttgtattttattaatacttagacaatcatcttgaacatcggtagtcgaagtctagttttaaaaaagctcctgaaaactattatctcatcattcttcggttgtggggtggtctcgttgttagcaaagcgaacccccatccttctcactaatataaccaagcctcttcgtaacatcaaaatcactaggtttaacagtagaatccccgatatcaatgtagctcgtcttcatcagccgaaagtcgttgtcctcttcttcagcttccgaggcactttcctacacaacgttttcttctttccgcagctcttgtctcagctctctctcatagcctaagaaattggcatcatggctcccatctccactgtgtttgaaacatctttgtctctttgggctactttggatcagatcggagtcatcaacttagcgattgagcggatcctcgccatgggattaaaagttgaagtttgcaaaaagagcagaagtagcagaaaaagcttcgaaggaggagaatcaggtggcagcaggtcggtacgagcagtaaatgtcgtggtgactacctgggatcgatcagcttatatagactagcagacgtgggagccgaggaattgcaccgctctcgctcgctgcccagcggaccgtctaaaaaatattcttgtttagttttcaataacatgctcaagtga

SEQ ID NO: 163312 - DNA, 360 bp, Zea Mays
tgtatatatattttcctctcgtcgagcctgttctggatctcgtgttcttttcgcgagatcaccgaaccgcttctcctcgcgaaaagcaagtcgcttgcatctgccatcctcgactacctcgtcgacccttcgtctattcccccggtctacccttcgtctaagtctatcccttccatcaatctcacctcgcttcatctcgtcgcgcaacgctcgtgcgtgcaacctcctcctcgcttcgccacaccccacctctatttatatacgactccttccctctacacagatacgaacttcttccctgaatccggatctcgcgagcagcagttaccaggtacacagctctctcatcctcccttcgtc

SEQ ID NO: 163313 - DNA, 537 bp, Zea Mays
tctaacgctaaaaaataataaagcagtattcaatcaattaatcatgatcgcagagggctcgaaccctaacctggttgggatgctcctgtttgagcttgtgggggacgccaggaacgatgacagctatggtggctcgcgggtaatgatgacaacctcgatgaccatgcaggcatgtgcatgaggtgacggcggtaggaatggcgtccggccgtccgcgaggatggggatggcggtttcctctcgtaattgtttcgaccaacaatccgtaacaaaggcctaagggtttttggttctgattgtcgtcctgcatcgtaacctattattcggttactataagccagactccacacgtgcaagaggtgtttcgtctggttgattacttgtatatagatgtagaacaagacttgcacaattcttagaacaccttaggctatactctgcagaaacatttattgtggtctcttgtagacaaacaactgttggctgaatttgaagaagatttgttctcactgcctctgacattccagcttagaaaag

SEQ ID NO: 163314 - DNA, 623 bp, Zea Mays
gtcgtgcccatgctggcgtcacctagcccctgcactagtctccggaacccgccaacttggccctagggtcatgatcgttttttggtctcgctgggggagagaaggtgtgcactgggtgccagccatggcgctaccgtgagagccaggagccaccgctggcgtttggtcggaatgggaggggaggcgttggagagttgtccgcctggccattggatgctttaccaacagatggatagtatttggatccggctatttgatctgtagcgttgaccaactgatgggggggccctcattagaagtagcgcacccgttcgactagggtcaatacttgcggttagatcttgatcggacgaatccatgtggtcataggtgtttaaattttaatccagaggatgcgaatcaggcgaccagggttactcgctggtttgtcgtgtgtcggatctaatctggaccatcggtgttagatcaaatggctcgcgtggctagataccccatcggccaacccattttgcgtatgagcccttggactttacataaatcaacccgctgttcggtcaagtatagattaattgtggttgtgccctagaattttataaaacacaccgtgtgctctcggatttgtg

SEQ ID NO: 163315 - DNA, 612 bp, Zea Mays
ggatcaggcaagtgtggggacagaacattgtcattattagaaggaaaggacaataaagatgtggtctgtaaaggagaatacgaagaggaagtagaagaattgtaaaagaaaggacgattttcaataaataccacatcacgtgaaatacgcatgcggcgagctgaagaatcatagcatttatagcccttatgctcagaactatatcctaaaaagacacactcaacggattgagcagttaatttggtgcgctcgcggggtgctaggagaacataacaggtgcagccaaaaacacgaagatggtcgtagctaggaggagtaccaaaaagtacctcacccgggcatttgttggctaatttagttgatggttgtctgttgattacataaatagcagtagacacagcttcaccctagaagtgagatggaacaaaagaagcaataagaagggtgcgagctgtttctataatatggcgatgcttccattcagccacaccattctgagcatgagctccaggacatgagagttgggcaagattaccctcggatgtcaagaaccgacgaaacctatcagacaagtattcaccaccagagtcagagcgaaattttttaattgag

SEQ ID NO: 163316 - DNA, 762 bp, Zea Mays
gcgaccgtgcgcgcggcttgattgccgtggccgcgaggggagtctttcacgaagagacggaggagacggtgacggcgcggcgacggatcgtgccgaatcgcacggtgtggcccgtcgtcgtacgtcggcctaccttgaggtaaaattcgggtggcgcaggcgagagtgagccgcccgggtggaagcttctaaaatctggaaacgttggcgacaggtctagcagcagtgtagcactcgcaacagccccgcatacttatttggggctagtttggaagacataaattcagagggtattggagggctaaaatctctctcttctatcccgtagctcccaaactagctcttggggtttatatcttttccctacatttatatatacgcatccacatgtccgttaaaagtgtttgttttttccgtgtttgtgttttgttttttttttcgtgtttgtgttcacgcttctaagccgcacactactaatgcgcatgtataggtgtctaggtttcgccctacctacacacgtgtccggacttaaccccgtggcccagatacctaccgcatgacccaagtcacccgacctcgagccgcctgaagtcgaaaaccttaaaccctagacatagtcgtgtgcccatgctaaatccccatctcgtctggagtctaaacgtcgcgccacatctagctcctggtctccataccgtcgcatgactccatagctccaccagcccaccccatcgcgccgggagccaccaagacgtgccgcccgac

SEQ ID NO: 163317 - DNA, 727 bp, Zea Mays
ctgcgccctgagtctcgaactggtgaaaagtggtatcctcggcctgagtattaatcactggagcaggtgccggcacaggatcctctagagctggacggtaggccccaaagaggaggcgagaggcctcaagagtaccctggaactgtggtggccgaatcagctgagcgaagatgtgacagagatagtgagcatacggcagctgtcgacgagcacgtagaccatccagtacggtgtcctcgatctcacaaatgaggaaatccacaacgttaatctcggagtgagagaccaaggcaccaaggagccaaagctgaatatgagtggcagcctccctgtaacccatccgtggcagaagcgtccatctcatgagctgatatagaaacttggccgctgtggtgaaatctgtcgaagaacatcgcgacccatctgtgaagggcggtcggaacaaagccatgatgtgagttgtaccaggaccaactccgttgtgagggcgacgaggaggatcagaggtgccatagcacaagctatgaagacgagtcgatgactcgttgaatccaaacaactggcgaatctggctggcatgaatggtaacatcctctcgctcaaagcggaacctcatccactagtgatcagggtctatccatactgaagcatagaaaactcggacccattcctcaacatatctgccgctggtagtcaacagagtgagaagtccaggcagataggagag

SEQ ID NO: 163318 - DNA, 381 bp, Zea Mays
cagcactctactaaatcaatcttatatgttacaaaaacaggatttgagcctagctcagttggtgggagatatgggcgtgcacccccattagctaaagtcctctttttgcaatgtacctagttcctcctaggttggtttagtttattgtaagggccttcttattttatataaaacagcaaacaacactatagaaaagcaccatggcagcacaaatatgccaaatagatccactgtcagccttcaggcacaaactcaaccaatgaaaaaattctatccttactgccatttcatgatcaagagaatgtatttcttctttattttgtcacaaaatcaaacagaccaattgcactgctaccacaatacctaatcatccaatctcac

SEQ ID NO: 163319 - DNA, 571 bp, Zea Mays
gttggagagtctaataatagtgtcgcgtatgctacggatatagataggggtggacctctagcaaaacccataccaagagagtggtctttaggccaggctgtatcgccaaattatcacaccataggttgtgctcgtcgatcggtgtccttcggccgtctatagttgcagaaacggtgggtggtgggtggatgcttgtcgtagcggagaattggaagttgatgtccctccctcactcacacggttggaagtgacggggagaaaagaaaaaggaaatgctaaacaagtattacttcagttctcaaatatttgtcgctggtttgttcatttttaaactaaaacatgatacttaaaaaagaacgagcaaaagctgagagtttaagtaggacacacataccggtgattattgggggagcgagagccatcgctttcacacaggtatgaggtaggcttgccgcagcgtgcactgtgtataatggagttgatcaagcaggcagataggtacgtgcactctgcactgtgtataacggagtatactgatgcattcgcgattctcatacagtatatgcgcatg

SEQ ID NO: 163320 - DNA, 647 bp, Zea Mays
attttaaatgcgctctggactgggcgtcaatttctggtaaacgcaggggcctcagtgcaagaaacccgaggcacagagcacagtgcccatggaccgcgggttggttaacaaatcttctagggtctctttaacaaaaatcccaggccaaaggggtatgtttcgaccagagccgcacgatcctacatctacggctaggattagatcttcgttattatacaccagtgcacggttttttagccctcggatcggagatatgtggccacgatttaaagtactataaacggctatgatgcccctacacgggatccgacggcacagatccatttggcgaaagggtatgcgatcgaatacatctaaccgtgcgctgcgcatccaacggccgcgaacagctgccccgatcccccctacccggcgacggcacagtcgcaccgccacggcggcgccatcgccggcgaccggccaatcgacaagctagtggccccaaacaccggtatgagtgatgcagaatgaagctagggacctaacgaagctagtaggaccatcataccggagtattgtgcggcgtagagagtcaatccacaacgcagggagattatcgcggtgtttcagatcttcggtgagcgattaacctcgccccgccgcctccc

SEQ ID NO: 163321 - DNA, 578 bp, Zea Mays
gcaaggcgaccatcacctcatcgttagatcgagctaacaaagacaaagcttgtgccatttttgaatttttcatattagctttaatattaaactttttgcataaagcctggagaatcgcacgtggtacctcagtaaaagaatctgaaatagccgagatcccatccaaggcaactgcatcagactggcaagagaaaatgtccttcggagccaacaccacctgacgcgctggatgtttaccaccaggagaaacatgcagggagccaacaaaaggtacacctgcacccgcgtcgacaaaaggaacaacactagagggccccaattcctggtatgattagaaaagcatgactcctgtgctttgacacatgctggaacagacaaaagatcagaggaatcatttctttttgtatgaggaagagaagtaaaaatatcaacggttggcatatctaaagtagtaaaagaaataccagttgctgccttaggagaggtcactttatttagtaactcagagggagcgacaccccctgtcgtcaattgttcatggcacccaacaatgccaggaaatcgatggagaaaagcat

SEQ ID NO: 163322 - DNA, 440 bp, Zea Mays
gggggggaacagcgaggccattaaagccaaagagccgaaggaccggcagcaggtggcactgacggtctcgccagcggaagcaaccacatcagccccgccgggggcgctgatcacctcagcaccggtgggcagcggctgcaccagtgcgcacgaagagatcttcgctcccgtcctcgctgcgggagtaaaggcaagaccatcaagaacgccgctgccgctcccgcggcgtacgacgccttgtacagcctcctagtgcagccggaggagcaagagaagccgtggatgtggccgacccgcgcacagcgccaccatcgcccgtacggtggaggggcagccacgctccaccccagcgacagcatgcagcgccggaggtggtgccagtgccacccaggccgagatgccaggcacgcggcagctgacagcgccacagacggcgaacg

SEQ ID NO: 163323 - DNA, 722 bp, Zea Mays
ttttttttttaaaccaagttttcttatcttattttctgcgtgctttctgcagcacctcagcagttctcagatggatcccgctgctggtccttcatctagaccaataatgactgaaaatgtatcaacacaggaaaatattttagttcgagagaacttggtggatgatcaggttgttatattgtctccatttccccgggtgttaatacttttgcccactcattttttatttactgacttctttgtcttgctctgtacgctcttttcagcgaccaagaaacaaccctgacattgaccctcctgccgggtcctcatctagccctatattaattgacaacataccggctcaagaaaacttaataaacaatcaggctgttttattgcctcaagatactcagaggcgggaaacgcccaatattgttattccaaatatcaatgcaaagcctccaaccaagctaaagctcaagcgaaaactttttggcgacacggatgagaactgtagcccaaccattgcacctgcctcgattggtagtatcaatactataaatcagccctctgctagtgccgagcttcttgaggatgatgattatacagatatcacaaattttggtatagtgaagaggaaaggcaatttgcagcctcttccttttgttgacagcactgtgggatcaagtggggatttttcaaagtccccatataacatgactcgcgctgctagtcctcat

SEQ ID NO: 163324 - DNA, 715 bp, Zea Mays
gggtcgttgaagaggccttagtgggttggacgacaaggctttacaggtcgtcaactgagtgtgaacagaagcagacgggacttcggaggacatggcacatctatagcaaatgtgggtagatgcgcatagaattccaatatctataggattatctctttggtgggctatataaggccaaggtggtacccctaaaaaaattagacaccccacgaaactccatgagacctagctagatttactcatcgcctccatactctttctttagcaaatgcatgtaattctcgtaccagagcaatacaaccaccaaaaactcacaggacctaggatattacacctcttagtggcctgaacctgtataatttgatgtattttgttgtgctctgcacgaaccattgagctgcgatcgacattgccatcctcccaaaaaaacattgtgtggtacaccccatagtgcaccgtcggtaccaaacatcgaccgttgacgcgccaggtagggggtgtgacgtcaattcctgacagctccatggtcgtcgtcttcaacatcgtctttaactttaccaccgggaagatcttccactttggatccctctcctgcgtcgccgatcgaaggggcgctctgcatcgcatcgtggacatacagaaagacgctctggggcctcgcaacatcagcttcaaggagaagaggtcatcgccaagatccgggatagttgtgaag

SEQ ID NO: 163325 - DNA, 800 bp, Zea Mays
caccaaatcgatcttgaaagggggctctgcaccttaacacctttaagtggcatctcacaacgttggacttcaccaaccacccaactgtgactcaacgtccatatcccacatgcaacaaaatcctcaactaggtccctaccactattatggattgctacttgatggaatgcaacttcgtcctggtcaccctcttccccttgtattaggagaacaaagtgtaccagtgaggtagcatctcactagccctctactgacgtcttcactttcatcaaccttcacataaaaccaactttttgtccaattgttgtcccattggttcctaacacacaacaccatctcaatgaaagtctttgaggtcttcctggtctttagggtgaaaacaaaactctataactggactacccacccaatgatggtcttcttttgccaatgcatacaatgattttctataaatacctcaatggattgttcgcctttgcacgtaattgtagcccaaacatattaattgagggccatgatggcatttagggtaagctagagtagttgcacgttataccttgacaagacttctacaacaatatttggcacgacatttgaagtccgaccataaagaagacttcaaagagcatgactttgccttacggctctagtgtgttctcagactcatggccatgcctagcccccatagcaaactaacgcaactgctccatctccttcacatgacccatccctagtccacaaccaccaaaaagcacattactcccctccatgttgtttcacctctccgaggagcccctaac

SEQ ID NO: 163326 - DNA, 836 bp, Zea Mays
gcacgcctctccaccaaatttgatcctcccccttcaacagatgtgtgccaaaacaaacccgatctccacacacaatctcgaaaaaatccatcttatcctccaaaaaagtccactgccatcaaaggtgtccagcttcatgcccatccattgcatcagagagaccactgacaggaaggggcacctcagccccaccacctagagcagcacccgcagggacagcgcccccaggcactcctccacctctggcaccctgagcagctccagtaggggcaacaggaatagcttgcctcagaatggccaactcctgctgcatggcctgcatcgcggctaacattgccgccggactcatagaatccccactaggatcttgcgggctgccatgagccctacgaggcggcataactgtagccacaggggtaagtaaataagtaaataaaattggcatagcaactcatcaaataatgtcaagctagcactgacaatttcataatatatcaatagtaaagcaagaaacccatcctatatgtgcagtgtgtcaatttattattatttcattgctagtacctacagcctattcctctgataccaactacaacaccccgttgttcccacacaatgggtgttaccaaaaacccttcccacaaaatttaaagcataaaaagaaatggagacagaaagtaaaaaattcggcagcacctaacttgaaagtagcataacgagaggaacacagagtttatacatgaagcaaaagaaaggtaatccacagtgtataattaggatgcaaaggtagaaataaacattcaagacaaaattaattcagccaaccaacgattacg

SEQ ID NO: 163327 - DNA, 456 bp, Zea Mays
tccaatttccgaggatttctccttggcgggctctgaaggtccagcttcggcgtcagcctggctcattgtagcttcggcttcggtcagctttgtctcggtttcaatctgcgctttcgaagccttggcaattttccctggagtagagcttgaagcttttatcgtctccagcacatctagtacactagccatcctttttcttttgggggtcgctgctagacctttttgtgtcttcggcacctccactcatgccgaagggcttagaacttctaatgtttttgtcccttcgattctcggttcttcaattttgtcagtcttcggcattgcagccggctcttcaatcctctacgtaggagcagatcctttggcttcaatagctaaagaagtctcaccgccaaattcaggcactatagccggttcaatgtagcgcggtcggtgagtaaggaccttcaacttttt

SEQ ID NO: 163328 - DNA, 482 bp, Zea Mays
tggggccgatagatcagtgaaacggttgagcaagggggtatgcttgtgctgctgacgggctggactcaagtcaggaacagtttcaggtgatttggtgcgcgcgacatggcacacaactgagctgaaccgggcgtgaggagttgtcgcgcgaggatgaaaagagaggtggttcgcgatgataaggtgtgtgtatatatagaaagaagagggcgcgaaagtcagttgcacgatttcgccacggctcgtgatgggaggcaagacgaggagaggctgttgaggctttgtccaagtcagacgcgtgcacgcgaaatagacaacttttagagaagataaagctgacacttggggcctcagatgaccgcgagaagaacgagtgagggggaaggcggttgcgtgcacatcgcgtgagacgttgcacgacaaggtgagaaaaggtgaagtttacgagtatagacaaaggtagacacatggggagacagggg

SEQ ID NO: 163329 - DNA, 700 bp, Zea Mays
ttccctggtcggcccatctttaccatcccatcccgcgtggcccaaggttctccactggctgacaggcgagggcccgtgtcatccactcttcctcccgcagttcactcctctccctcgcgcgcttgctctccgtcgcaccactatcgtgtgggccgctcggccggctccaattgaacgcgcgcgtcgggtactggcgggtggggccgcagggtcagtccctcacctggtgtctgtgcgcggtagtgcagtcaccctcgtgtgggccatccctgtcagttctatctcctaccacaacaagaccaccgaatcccccggaacaaactcagcgaatcccgcacgaatcctcccaatcccgcccctcttcggactcatggccgtggggatataaaatttgggctctcgcgcccctcgtgaccatatctgcgtgaaaagaacttgcgctgcctgggaggtctccggtattgtgcatgaagtcagcggcaccgtgggggcaggatcaccgcggaagcaatattgtgtgttccttgctctcatgctgctgggggatcgttcgggggcatctccgattcatagggagtgtacccatggcactgttgcatgctatatcatcgccatcgatgactggttacccatcggaattcgtcgggccgccattcaccgcggtagaccctctctccatctcctccccggtaaggatccc

SEQ ID NO: 163330 - DNA, 1032 bp, Zea Mays
cgacggcaagcgcaagccagacacgtggcgttggcagaaacgtatgaaccaggggaaggggaatgcctcacatatgcagatcttgaacttcttcaccttgcaaacattgtctagaaggcttgccgtataaatcttttgggccagcaatacagtagcttattgggggcgaagacgaacatcctacccttcgttcgatgccttcgtcgccttgtcactccaacaaagactatatccacagagcacgccagagcaagacgaaggcgtcgaatgggtgaagaacgacgcggtctcccttcgaactctccgttgcaagtcaaagtctactagtctcacattctcaccgcgtacgggtggcccatgcgagtttcagcccactgtaacgggccccgcgcggataaatgcattacggcccgcgtttgtaatagcctttactgtaatgattgtctgtaacctccctcgtgcgaatattctggagacaaaccggacacttgagggcataaacgtttttgacaagggacgagtggtcactcgagtgcctataaatacccccgtacagtgccatcacagggccaaatataatagagctattattatcccacgacaagctttgcaaacactatttccacttttccattgaatcaacttaaccagaagagcaacttccaacacaactcttgcagaagcaacaaccatacaaggacagagcaagaaacgcaaacaggtgaaacgacaccaaacatttcagtcgttttcaggagttctaaatatactgctatccactgcttagctaatgtctgacgccgtagtgaggacagcagcgctggtacagtggtaccccatctgtcaactacacgggccattttttttatgtagtctgactaaccagtttttacgacgctggtaaaacataaacggagttttattttagtttctcaaacacacagttgcctatctttgataggagtcatttctcaggtttttgcagcttcctttcttttgtgattgttccccatttctcaggtttgtgaccac

SEQ ID NO: 163331 - DNA, 1654 bp, Zea Mays
ctgatttggttcctgagtgatcatatggaccaaaaacccacacatgctagttgaatagatgtattaaaaatgttcagagaacacaacgtatcttgcgggtgggaggggattttcataaaaaggtactgctgttagatttaacatgaacgccctagatttaaaatgtgcacatgaccaccgtatccctttgagcacaagatacgttgccaaaagattagaattaagaagaaccagagaaaggctcacaaaacagagtaaaatggacgtcctcgggtgcaataccgtattctccggtatgaatatagacccctagtataagaaatgagtccagcagttttcagcatgaacagttttggggaaaatcccaaaaccctatcgaactgtgtccaaaaatcatgaaatttgaaccacatactcagcaccataggcaagattctcaccaaaaagcagctcaaaattccaatgtcttcataccggatcatccggaatttatattggaccatcagttatttacgaactacacgttggaaaatttgacctaaagatcaaaactgcatcaaatcatatccgattgatctcaaactttgcacaaggttccttgggttgttggccagatatcctcaacaccaacacctggaacaactcacaactccacatatctaagaatccatcaaacagaattagtttttctcaattttgctccaaaagatgaatctgcgtgctcatgagggatctgcccaaactatttggcagggataatcttcagtgtcctaacaagtatccatgcaatcaaaccaccccaaacttgttgcaacgcaagatcaatcaaaacagagaagagaaggggaaggaaaaaaacaaatccgaaatcaaagcaaacacatgagctatgaatttcagaggaaagattgctttgattcaaccctcacggaggttttctatgctaaccctgcaagagggagttccactaaggattaggacaatggtcctattctacgttgatccctttggattcgacgttcgggccccaatcgggattcgggacgacgttctcgtttcacgttttgggataaagttctcggtagggggagcgtaggcatgtttcacgttcttagtatcttagggtccaactcaagatctatatatctgatggccacgtgctcttcacgactttgcttcgcatcgacgcaagcttcaggatgatgcctcgtgctacctacaattcctgtcggaactccaccggtgtttttaggcccaaccccgagaaaccgtctgtccggtggttttgaggcccataccagcaaacccctcatgtgtagcgtatcctatatgccccctccacgatctcgacttgtgtcaccactagtcctcgaccgcccgatcaccaagtcctcctgcacctccgcttgacttgattgatcaccgtctcagcttggtcaacacggtctactccaccatgtacacttgtgcttgtcggtgactccaagtgtcagcctcctgcgattgatcctttggtttttctagtcccttggttcaagtcctagtgaccgtccttcatcgttgccagtccatcggcatgaactgcttgaccttcatcttcgtcattaatcaccgcctacgcacaagttaagaaacatgttgcccatacactcac

SEQ ID NO: 163332 - DNA, 349 bp, Zea Mays
ttgggctgcatcaggagaccaagaggcccaggaagaagagtgtgaaggtgtttgggcccaattgggtgaattagagtggtgtgttttccttatataaatatatcacagatgtgtgcggatgagtaggaaatgtaataactgaactccatacttgtcctccaagttgaactctatctcctacctattccttgtgttgttcgtccaattcttcttgccgtgttccaagttcctacttcccagccagcagctaacaagtggtatcaaagggcagtcgttcttgcttgttgggatttcactctggatcctccgtcgtgccaccactacaatacccgcttccgccggcagcaag

SEQ ID NO: 163333 - DNA, 308 bp, Zea Mays
acataccagcgccgtggtcgacgcggtaccccggctcgttctcccgccgaggtcccgacctatcaccccgtcgtcgtccaccgtgatcctcgacacatccacccgacgatggtcacccgccgcgcggccggtgtccttcggccacctgatcgcctgattctctctgccacctcttctttagctcttccgccggtacccacgactgtccgtggtgcgcttgccgacccacaatggcggcgccccatggaagcggagtacgaggctctctaggccaaccacacctgggacctggtgcctgctccccctgg

SEQ ID NO: 163334 - DNA, 597 bp, Zea Mays
cccaacccgacatcgaacacatcagcacaaacatccaccgcgtcaccatccgctggctctgataatagatcctctggaaccatatcttcaagagtctgatcaaagttcgccagatacaattcttgtagaccaataagggcagacagagcaggagaagggactccactactttccccactggctacatattgccgactgttcttccgagtcaaagggacttcatcttcttcctccccgtcgttttcatcaccaacacagacagcacccccattgggatcagcggcagatggagcacacccattgggatcagcgacagatggatcacacccattggggtcagcgtcagtaaattcaggcacaggcacttcctcagcagcaagaaccgaaggaccaacgtcccgatccaaactagatactcgccgaagacgtctctttttctttttctgctcatcagcaggagaatcaagttgattggctcggcaagggcgtttcgggcgaacactgacaggtctctgaatatccgaggatgtaccagctttcgggagaggcgccaccaccaatgtcccagcaggagcagcatcagaagagtcctcggcc

SEQ ID NO: 163335 - DNA, 406 bp, Zea Mays
ggaccatatggatatccatataggttgtggaggaggatacaaataagcaaatggttatggaggaggagcattagtggaaggggcttcggtggtaggaggaggagcacaggtcgtagcaggttcaatagtaataggaggaacatcaacacttagtcaatatgaatatggaggacataaatgaggaaacaaaggttgcaaagtcaaggaacagggacaagtatgaacataatcttgccaatgatggacgaaagaaagaccaccgaagaagacccgcccacactaccatgggtcttaggaagttgctcatggagcaagtcaatgaacgtatctatcgatacttaaatacgggttacccactcttgctgggtcaaggcgagacccctgtggttgcccaaagccacgaaat

SEQ ID NO: 163336 - DNA, 666 bp, Zea Mays
tccgaaactgtcagattatgacaatctgtaaagagtcagatccactgttatgtcaatcagcaaagaaccgtcatgtgaacggatcctaagactggggcgacaattgcgcatcatcatcctctgaagaatggatacaggcatgcagcaaagatgagaaaaaaaaaagaacacaaatgtaacacactgcaacggatgggaggaagtggtgaaggcgaactcatgaacagtggagtcagaaacgataacatgtcaatcagcaaaggtccggaagtccggatcctaagactggggcgacaaaaaccatatcatcatcctccgacacgaccatcgacactgatgaattcaaaagaaatcaaaatcaaaagatgggaaaacaacactgtttcgaccaaaaaacgcaccgagcagcgagaaatcatgggagtcaagaatgctagacgaccgtagaagaattcggctacacgcgttgtgtatttatattcagctaccgccggtgaggtgtcttcagactgcgagcggcggcgcgcagcggctgtatattttatattgaacgaaggcacgcagcaggtcaattagggtttctagtgggcctcggggtgattgtgggccttttctcgaatgcgtgagagacaagcgtctaggtcctattctgggcctagaactaaa

SEQ ID NO: 163337 - DNA, 342 bp, Zea Mays
caacctttcaaatcatgtagctagagcttgccgagcagagttttaggaaccaacccttaagtttggtcgaggtctgaacctttagggcaggtgttctagggtggtggagggtgtaggcttatggtctggaaccaggctaagcggctacctagctctagaccacccccgagaacgtggtcctttcccctagctggaggtccccagaagttcgatccttgttccgcaccaaaggggggcccaaactaagagaaaagctagttacctggtcacaacaaaagaaagaaaccacgtgggtgttagagcaaacaatatatgtaaattaaagtaggaaaaggattgaac

SEQ ID NO: 163338 - DNA, 647 bp, Zea Mays
gcccttcatcgtggcatggcctgtcgtcatctccattaaaggtaataagcccctccctaggttcgcctcatcctccgctttgattatcaccggcccaacccctttgtgggtgcttcgggataagggatttcatgccaccggtgactgggccgccgctgcatctggcgcgccgccgtcgtgggtgtgtggttggggaagatgtcccctggtcgccgaatctctagtgaacggcctggatttgagactcgtgcctattcaacccgactcgatctcgactgttgatcagttatccttgggcttaggttttattttggtgtggcgcgttcctggccgtcgatctaccaccggacggtggagatcaagttgcaacatacctcttcattgttgaatatgaaccgttgggatgtcatcggatggctgtgggtggataccggttcataagcgtgcgatgtgatctggtccatccaagtgtgatcggacggtggagatatgagcataccccttcggccctggtcatttttttaaaaagcccctgcacttgtgttaaaacaacccgccatccattatagtgataagatcatcgcccttgggtcctagaattttcttgtgaccccctaggcttctagaaaatagtgtcctcagtccag

SEQ ID NO: 163339 - DNA, 1009 bp, Zea Mays
gaatacaagcccatcgcctctttgaccttagcaaaggcagtggagttcattcaggaaataatgttcaggtttggaatacctaacagcatcattaccgacctaggatctaatttcaccagttcggagttctttgacttctacaagcagaggagcatccagatcaagtatgcatcagtggcacacccaagagctaatgggtagatggaaagagccaataggatgagactcgatgcactcaggaaaaggtgtttgacaaaagcgagaagctcgcagggaaatggattagggaactgacatatgtagtctggagcctgcgaacctagccgagccgagctttacacaaaaacaccccattcttcatggtgtatggatcggaggcagtgttaccagtagatctgatctttggagcacccagattaacatttgaaagcatagccgaagcagaagcaaccaggctcaaggacggctaaatgtgatcattcagtcagccagataccagcagaccctgaggcgttatcacgacaaagcggtacgacatcgatccttcacaatgggagatttggtcctccaccgagtgctaacgggggagggacgacacaaattgtcaccaccatgggaaggaccattcatcgtcgcagaggtaacacggccgtgatcctaccggctcactgaaatggacgacaccgaagtggaaaattcatggaatattgagaacctcaggaaattttacccgtaagaaatgcctcaaaactcttgaggatgagttgtactttataagcagaaggtttcattatcaataaagcttccatgttccaaggcatacaagttcttgatcaaactactgacctaggttagactcaactcgaaatcggcacggcactcgtacacaacttagtgtgatcattataccctactaacggagcatttggcttaagtcagaaatgccttaagccggtgcgacatgctcacgcttacacaacttagggtgatcattataccctactaacgg

SEQ ID NO: 163340 - DNA, 484 bp, Zea Mays
cagcatctaacaatgccgcagagtacaaggccttggttcaagggctaagcatcgccatttcactaggcatcaaaaggttaattgtatatggcgactcgcttgttgtcatcagccaggtaaataaggactggaactgctcaactgattcaatgaacagatactgcactgtggtgcagaagctggaagacaaattcgagggtttaaaatttgatcacatgggaagggttcgcaatgcagcagcagatgcattgtcaaaattggggtccacacgggcataggttccacctaggattttcgtccaagagatatagcaaccgagcgtcaccgtagagcatgctgaagagtgcaatgccttagaccaagcagaaacagatctcaatgactagagggagccgattatcaggtacataaaaaatgaggaagaacagtatgatggggccgtgacagaacgtatcacaagacagtcggcccactataccatgat

SEQ ID NO: 163341 - DNA, 799 bp, Zea Mays
aataaataatcccaaaaccacataatcctatggtaagttacagctaaaaaataatgcaaggaaagttttcatccagattacactaattaatgtcttagtatcgttaaaatctcacggctatcaactgccaattttctctaggaaagatagtaatcattggtgctattcccaaacgccaactgctccataaaaattgagaagagcccatgccaattgctaaagcaaaagagatggatgcatttgacaagaaagtggttggacatggatgttaccttcaggacagggagcaggtatcagcgatgctagtgtctcatctactgaggagcgccttcgctctgaacccgtcgcgtaggcttggatccaccacctcctcctactgctgcaaattgatgtaatatttggaaacagaaggtcaggatataatatttggttaaacaaattgatgttatgatattagtatcagaacattcagtattcaagaagagtttagagatgattctagatcatggcatagcacacggagaaagtggaacaaagattatatgagaactgaagcagaattttgaagagtattacatgctcagtcccccatgctcatgcctcaaccaatgctagaagtcaagctagaaaaaaagatcttttattatagcatagttccaaagaagcaatccatcatagttacacagtgatgtcatcaagccacactgctcttggcaacattatagcatgatacatcctaaatggtatagttgtggatttccatcatagctactcagtaaccataacacagatagcatgt

SEQ ID NO: 163342 - DNA, 699 bp, Zea Mays
gacaggacgatcaagaagtcaaacgacgtaaaaacggcatttgacaggcaaatagtgacataggatgattggaattcgacttgaggcatgaaacgatatgggattgagccgatacttcacaaataggtttatataggtcaatatgagtgaagtgtgtgcttggtttaaatttaggcgaagaattagggttttgggcactcggctcggaaacgatcgcgcaaaacgggaattttggtgaaatttaagcctgggatctcggattggcgtgaaatttggcaagtaggttactggaagtgtggtgaaggtgcctgaaaaatttgggttcaattggagcaagtttggctggtttgggcatttcaccgagcatgtggcgtgcggggagctagggttttaggaatatggccatttgaggtgggaatgccctcccgaaggagctaaaagtttgcagggatacacaagggaggaacatgaactcattccatcaattggattcacaggaattcacagatttggaagatttgcacaagggtggtgttcactgcctaactgacacagaaaagagagagagagggaggacagagggctgctcaccgcaggggaacagaaggggtgcgcaggtcgccggagatggaggccgccggagagaggagatcgacggcgggcgctgggaagtcgccagagacagaggagacagagcgc

SEQ ID NO: 163343 - DNA, 376 bp, Zea Mays
gacggttggtgagaaggagaacgagtggacgacacaccaaggggggcacgggggtgacgcacgaagtcaggagtggagacgtagatcgtgggcgtgggcacgaacggtggagattgaccgaaggcagaacacgcagatggcagaaccaggagaggtagactacttttaggttcttaataagtagtaaagatgggccttttcgtgcctctatatgggccatttcgtgcctgccttaaacgggtcgtgctcgtgcccgcccataggccgtgacctcggcccaaacctggcccgaaataacgggtcgtgccggcccggcactaaaatatttcggatcgtgtcgtgcttgggccgtgtgtttttttgtgcttcgtgccgg

SEQ ID NO: 163344 - DNA, 348 bp, Zea Mays
atttttcgaaattgtgtcttagattttttggaattttccagcatgtgattttttcgcatcgactgtacgtctctagataagtattacttatttttgtatttttggacgccttgagattattttgggatagatggtgttggaaggcagttggattaacgatttggtctctcgaacgaatccatccttttctatgcacatgttatgtattagtaatatataatgatagagagcggacagtctgtcttttctacacactaggttttagggttttcctgtgaggttgtgaaaaactctttatgtgaggaaaaaatatttcataagtaagcatgtcatgtgagttagatcgag

SEQ ID NO: 163345 - DNA, 595 bp, Zea Mays
taggtatgcaatgcttctcaataaaagtcttgatcatgaaagtatgtgatgcaccagaataaaaaaggatgaagacaggatgtttggcaatggaaaacgtacccatcatcacaggctctccttccggggtggcagccacttgagtgtagtagactcgcccagttttccttgtatttttgcccacctaagtgctggccacatttcccttgccttgagatgtgctcccagaagtctattggaaattggatttattttgttttggatagggcagtccttgataaagtgtccagacttcccacagttgaagcagctgctagatgaactgggtaaggcagggaaacgagtaccagggtcactcggctgattgttttgagcaggggcaggagtgggacggataaaaactggctgcttgaagggacaggcgggtggacgaggaaaagagcgattagggttaaaaggacgaatcaccaacctcgaccacttctcgaatccttgagaagatccttcacctccatatctctttgtttttccctatcccgaattcttggcttccaccgaaagcgctgtgctcacgaccctgctataagtgaggtcc

SEQ ID NO: 163346 - DNA, 774 bp, Zea Mays
gttcaccggcgatggccaactgctggtcttgtgccgcgtgctcgggtacccccgtcgcgtcaccgtgactctctatagatgtcttatcgtcgccggtgaagttgccacgacggtcgacacaaattcgcgacgtcggtattcttccttatctctggccgcctgcgttgttcgaccaaattgtgcgccaccgtcgaagctccctataaattgaaggccgggactgctgcgctaggtcatcgtgaagccgacgcacccgttcttcccctcaattacccaccgtagccggaaaattccccttttcccccaaactggtctccgccaccgcgaagaacagctccactgtggccagcccattctggtaaggcaccgtccaattcgcgcattgttctcatgtctctgtatgctggtgatgctttccaacccgtccaattgaattaggtcgccacccattgccgggaacacgagcaaaagtccttagccttcactgttctcgtgggcagggcggagtaggtcaccaaccatgcaattaacttagggaaaatgctcggagtaggtctgatttggtgtccaccgctcgggaacgccagtcattgccccgttaggccggcctgctagctcgccggagctccaccgcgctcaccgtcgtcgtggacctccccctgcgaagaactagaatatggagggtttatgtgcaaactgttagtgacacaatgaaatagtaaaagaacccgttcccagttagccaaaaccccgagggcgtttctgcaaaatccc

SEQ ID NO: 163347 - DNA, 392 bp, Zea Mays
tgataggttgaagaatgggtgtgggccattgatgttaggaggagcggccaggattagaagttggggccagatcctatctccaccgttggatctgctaccgatgcgtatgattagatggtagggtaaccattcgatgtgtttagcctgagacgctgatcaacggatcgacggtccaatacactcggtgttgttcggccctatatcctaaatctaacgaccaccgatggagtcctatttgcttttaattctcgtcgtgcatcgcggatccgatggcttcagtcatcatataccccttcagccggcaccatttgcaaaagagcccctccgtttttaatgaataaatctgcaatccagtttgactgttctctgagtcttaggatctttgcgcagaa

SEQ ID NO: 163348 - DNA, 1219 bp, Zea Mays
tgggtggtgtaccttttgcacaaacacatatggaggagcttgagctctgctcgatccgagtttttacagcacaccagcttccgtgttgcggttccttttcacatggtggaactctaagccttgaaacttatcttctacttatgtgacaacaacacaatacttgcccattgactcagttaaataatcctagtctttgtttatctagcttgtcaccaccagtgaatcaccatacaccatcaaccgcttaattccgagtgaaacgacggtgtgtagtccatgtactagtgcttcatactccgcagcattgtttgataccggaaaaataagttgcaacacaagcttgaggtgttccctttggagcgatgaagaggaccccgactccagctccttgcagcttcaatcatccatcgaaatacatcttccagacttccattggctcaggattttctggaacttggttctccatccactccgagacaaaatataccaaagcttgtgtcttgatggcggtacgaggccgaaactcgatgtcatgtgctcccaactcgcacgcgcacttggctatccttcctaccgcttcccgattgcgaagtatatccccaactgggaaaccaataaccactataactttgtgatcgtcgaagcagtggcataacttacatgcagtgaggaagactgtatacaacagcttttgaacttgcgggtacctgatcttggatggccccagggctttgcaaagtagagtgggtattggatggcttgcacgtgcccttcttccttccgctcgactaccaacggtgtacttaccacgtgaatcatgcatgagatgtataagagcaactcttcagtaggctgatcaacgatagctcgattaggtggtttgagcacatgaggggttgttaggaacttcttgagggcttctagtgcttcggcggtccactgaaatctacccaccttcttgagcagcttgtagaatggtatgcccttctcaccgagtcgtgagatgaaacggctcaaggctgccatgcaaccaaccaacttttgtaccttcttttgtgatcttggtggttccatccaaagaatagtgtcgatcttctcaggattcgcttcaattccccggtggctgatgatgaagccgagtagtttgttgtaggccatcgatgaagttcgctgagtctttcttcttgatcaccgcaccatcaacgtaggcctccacgcg

SEQ ID NO: 163349 - DNA, 417 bp, Zea Mays
ggactccaaggtcgccactctgtgcgacgagttatgcaagctgaacttggaagttgtttactcgggtaccttgaattatatctcagtggagcccactttacatgagcagataattatggcccagattggtgacaagggtgttcaagtcattagggatatgctaaaacaaaaggtggataagtacaaatgctttcgtcaggacagcaagggagttctatggtttggagaccgattggttgttcctaggaattccgaactcaggaagaaaatattggatgaagctcatctttccaaatttccatgcaccccggcagtaacaagatgtatcatgatctcagatccttgtattggtggaccaggatgaagagggaaattgctaagtatatatctgaatgtgacacttgccaaagagtcaag

SEQ ID NO: 163350 - DNA, 623 bp, Zea Mays
tatggctcaaaaaacatagtcaaataggccatgggtagaatttgagattaaaacacatcagtatgttgttgcgctcttctcagtttcgattcaatccattgttgtgaatggggcaaacactctttttttgccgtgagttttttgctcttcggctcctgcgaaaagaattccgaacgggtttggggtccttgctggaaagtaatcccttgtcatttctgaacgggttcaggcctttaccgaaaagctatcccttattgatcgtctagttccttaggtcggggcatttttcgaaggacgacctggtcggttttggctccctttcgaatttctaggaatcctgcatcagtcaaacagacaacaaagaaaatagaggtattagtgcggccttgctcaggcataaacattacacttactagaaggacaaagattcgtttatcaagaggggaggttagtagttttttaggtgctgctctgcctattactccccccctcccttcctggcacctgagctctcggttgagatcgggggcaagtaggtttggggagcgttggagtcttgttatgggtagaaccgttgtagttgctcgatgttccatacgttggtgattgtccttcccttctcg

SEQ ID NO: 163351 - DNA, 796 bp, Zea Mays
tggactgggcctcattttctgcaaagtatagggggctcggggtaagtatttccagacacagagaacagttgcgtatggatggcgggtttatttcgctaaagtacgagggctcttaagcaaaacgccaaggccgaaggggtatggacagatctaagccgtccgatcatacacctacgctccagattaaaacgcattaccaccgaaacggtacgcagcgcgcgccaccggatggaagatctacggctacaatcatctgaatcccgctcattgcatccgaccgttcgatcgaacaccagcgctctggatttaaataacgttgatcgatcatctaccgcacgatcccgatctaacggctcctacccgaagtggcgaacgggtacgagcgatctaatctaatccgtcccttaaggatccgacggcgcacgttctctgccccaacagggcatccacgcaaggcggagcaaactcccccacggcggtgcgccatggccggcgatgctgaaccccccgctctcgcccccatttcctaattaaactcagctacgcaatgcagaaggcttaaggaaggtgagggtaggtttattaccgcaaattgttgactcgttggcgttggccacggtgcgtgcggatccgcggcggatgtgaagtccggcgagcaattcacgccgagcagaagcctatcttcacggtccgagcgcgcgtatggttttcccgtggtccggcgaacacaaccggccacctacggcctgcccggcggcgatacagagctgggtcaacggcggcggatctcttcctc

SEQ ID NO: 163352 - DNA, 311 bp, Zea Mays
tgcgaaaaaaaccgaagtctaccgcgaagactatccgcacaaaagtcgcctaagggtgcagccggactagcacaacaagtgcaaagaaactgaagtctaccgcgtagactatccgtgcagaagacgcctaagggtgcagccgaactagcacaacaaaagcaaaaacgacaacaccaagccgtccgcgccaagaccgactatacgcgcaccagcacagcataacaaaacacaccagaccaagtacacaacgccttcgcaggcatagacaaacgagggcatacaacctcatcatacaagcctttacacatata

SEQ ID NO: 163353 - DNA, 495 bp, Zea Mays
gatcaaccccgacgccaggccggtgagtcagaagcctcgcagacagtccgtcgagcggcaggacttcatctgaaaggaggtccagaagctgctagacgctggcttcattgaagaggttcatcacccagtgtggctgggcaacccagtcatcgtccccaaagcgaatgggaagcttcgaatgtgcatcgactacaccagcctgaacaaggcatgtcccaaggacccgtatccacttccacgtatagatcaaatcgtggaatctaccttcgggtgcgacctattgtcgttcctagatgcttactctggtttccatcaaatccagatgtctagggaagataggaagcataccgcttttgtaacagtggacgagctttactgcaatgttgttatgccttacggtctgaaaacgccttaccgacattcgtgcatgcaatgagtaagacttttggggacctaattagggacaaagtggaagtctacatcgatgacatcgtg

SEQ ID NO: 163354 - DNA, 346 bp, Zea Mays
ggccgccgcgtccccatccatatatcggagagtgaggaatatgggttatggtccagatctacaggaagggtggaacaagagcttgctcccctagaggggaatttgatcgatctggtttctccttttgctgttgtttgttatctctgctttctaatttgacagatggtggatgaagaattacacagactatttctctgctatctatgctctctgcgttttcttttctgtgtttcaccttgaaccggtttagtgtgatgatgacttactgcctttagcagtcataaaccattatttctatggttttgatacttgttttgtacgagcacatctctgttcaagtggatgg

SEQ ID NO: 163355 - DNA, 675 bp, Zea Mays
gaaatgttgaggcatgaatcatggagggaacataagttcccacatgtcataattggaggcactcttactaaccataggttgtggcccctcaccacacaccacctattagtggcttccacccttccaacacaatgtctcatccttttctaagatctgattatagaggatgctaaaatgacaacatttacctatataaatcttagtgtcttccatgcctttccttttagttcttgattacatgatctaccccataaattcattatgaaataatctttaacaaatcgcatccttccattttccaactctagtatgttttagattgggagtgttgcttcagcatagtttcattggctctttaagtttagtgtggtgaaccggttaaatagcctttagctaaaattagacatggtgttatgttttgaatgaaactacttgtaaagaatctggttgtatagttggactaacccttataggaaaattaccaaattttggcatgtaagtcatgagatcattattggagacaaaccaaggcttgaggtaatattcaaataatttttcacttcttttcttagccttgttcgtttttttgaagtattggttatcattcaaaaataaaaaataaaaaacaacttgtctagctccttgttaccatgcctaacctttcttgtgttctcc

SEQ ID NO: 163356 - DNA, 416 bp, Zea Mays
gtttggggcttcccctttgtaattcccctctcgcccccttgtaatgggcctggcccaactatcccaagtctattaatatatcatcacccaaccctatcctagggtgagtttgttgcaagagtagaggatggctttcaggagtcactacacattacaagagatgttgtggcagactgccaggttaaaccaagaaccggaagattccacccagaacagctggaacaatcgggaaaatggccagagttctggccggtacaggatactgctttggccgtgtcagtctcttcactgttacgtagcattccagccattctggctggtaccggaacagtatgtacatgcatggtccaaacaggctcttgtacaccgactgtaacttcttattgcagccttaaccatgcaatgctttgactgac

SEQ ID NO: 163357 - DNA, 997 bp, Zea Mays
gcgacgagcaagctcgagctgatccatggggatctttgcgggcctctgaccccatcgacaccgagcggtaacaggttgttctttcttttggtggatgacctgagtaggtacatgtgggtgtctcttctgcgttccaaggagggagcgatggcggcgttcaagtcctttcaggcaagtgatgaggtggaagctggaagaaaggtgggaactttccgtacggaccgaggcggagagttcacagcacaagctttcatcgagcattgctgcagtgaagggatcaagcgacacttgacagcaccgtacacaccggagcagaatggagtggtggaacggagaaaccaaaccatcatgggaatggtgcggagcatgcttaaagccatgaatctccctaactggttctggggggaggctgtggcaacggttgtatacatactgaacagatcacccactcaaggaaatgaagggagcactccatatgaggtatggcatggaacaaaacctaccgtcagtcatcttcgtacattcggctgtgttgcacatgttaagcaaggcaacaagcgtctaacaaaacttgaagatagaagtacacaaatggtgttcattgggtatgaaagtggcagcaaggcctggcgtttctacaatccaagcacaaaacgcgtacatgtgtcgcgtgacgtcgtgtttgaagaggatcgcgcctgggactggaatgaggaggagaagactgggataaatgtcccagttggtgctgagttcgtccctgtcgagagctccattcgcctgatggacaagccgggtccttcgtcctcgtcaccaagcacgtcgagtagtggtcgttctgggcctcccactcatcccggtggccaatgggatgttcaggatgaacagcaggtgcccacacctgggataatggctaccgagtatgccacacctcccactgaaaccccagatcttgatgctgaccatgaagatgacacgccacggaggtatcgtatgc

SEQ ID NO: 163358 - DNA, 508 bp, Zea Mays
cgccgtggcggggcgtgcttggtgttctccgccctttttgtcaaccgggaacgcctgtgctgttctcgaccgcggggacgacgttgcgttgtgggggcgctgctgttgttggagtaggactggcactgttgtcacggagaggaaagcgatgcgtctcgaggagtatgtggctaggaggagagacatgtttgttgttggacttcaagtgtttcttacttgcgcgtgcacgtttctgtgaaccaggtaggagtatgatggcggacggagcagctggatcggtcactggtcagaccctaaaagaaggtggtctaggtgctttcaggaaataaagaagaggggcctttagtagtattgtaccgtgcgagaatgacaccgtgcctaaacgctcctgaaccctctctctgattcgttcgacagatagatagatagatcatgtgaaagtgacaccagacccgagcctcatcctgaacacggtacttgtggtctggtcccggtcccgtcaacctgt

SEQ ID NO: 163359 - DNA, 1102 bp, Zea Mays
atgtgagtgtatttgtgcctatcgacaaaggcagcatatcccgtgcgcacagctctctagtgctcccatgtgcatgagtcatccacaccacacaaccaacatccaacggcgactgcacttttcacaaagaagccctcccacgctcccacgcagtcccctgtttcactttacgaggaatgatggtagttcatatatttttttcaccccacaatgccataacaatatgacgacatggaattcccatctttttcgaaaagtttgcatgagcaacatccaaaaatagttttcgtgcaccattggaccactctatccttcatagaaccatcactaaccataacatacttaacagacgcttgatgtgtagttcctataatagagcaatgatctctagcagctaccacttcttgaaatattctgaacaccttgtgcgtgtataatatgcttgcttgtttctccacaatccatggtgtatgtagaacatgtgtgccatgtatactaatattatcagcttttaactcttcttgtcgttggcattctaaggtcgtatcagatctaagccaaaactcaacaaaacataacttacgatggataaagcgattaaagaatgaatttgagttttcagatctcgacgtagttcttaggactcctgcaagagatatatccataaagaaagttggaatccatgactcacgaatttgatatctattagccaaccactcgttgctctgaagaccataagcatctatgattccattccaccggttctcaaattattctctagtttctgaaccccatacaaaattgttcaatgcagcccaaaaatctttctcatgattaagtggaggaccaaccttttcaggaactttctccatactgtgccacatacagaatctatgagttgtatttggaagaatagttctaattattgatttcatgctagcatcttcatctgttatgataagcctaggggctttccctcccattgcactcaagaaagttcgaaacaaccactcatatgactcaatcttctcatttgctaggaaagcagctccgaaaaaacactttgcatgtgatggttcacaccagtaaaaggtgcaaatat

SEQ ID NO: 163360 - DNA, 675 bp, Zea Mays
tttgcaatttgaccacggctaaagggtactggccgcctagagtcatccgatccggaaccgagggcccagatcaacctattacttaaccgaaccggtacgcggttgtggtcgtcggattaaaatccgatggccccgagaggcacacgcctacacccgatcgcgaacacacgctagagatccaagggttccgatcttatttggcacacaggatacccattccgatccaaaccacccataggcgatcggacggccagagggccgtcttcctcccacgacactgatacacggcagcgtagcccactgtgcggcggcgacacctcaccggagatgcacagcaacaagcccgacgaccaaaccatccccgcgagaacgcgcaaaatgaaattcgtatattcgcgaatctgatagagggtgccttaccgccaatggggatgcgaaggtgcatagccacgacgcacggcggatctgaagtgatcgagctgcgccgacaagatattccttccccaccgcctgtcgatttagccatgtgaggccaaggtcgcatgcagaggactcccgcgagcacccggattccagcatggagtcccaggtagcggtgacacgaggatcagcgccggcagcttgtttctctccctcactctctctggttgccacccgccatagatacgccatgga

SEQ ID NO: 163361 - DNA, 1244 bp, Zea Mays
ggcacgggcatggcccggttaagcgtagtcacggcatcggcccgatccaaaacgaggccgtcacacgcgacaacccgcggtcgctcctttctcctaattttagaaccctgctttgctcctttctcctctctcgcggtcttgggcgactcggcttggcaatttttgtgccgccgcctgccgttagcgcttgctggcggctggcgccggtggagaagaactccagccgatggccgacgctgatcttcctcttcctctcccggtccgtcctatcctcttcctttctcgctccgcttgttcactgtaatggtgcaccctaaccctaaatggctaaaccttgatctgcgccaagctcgctcctctacctctacggctctatcgtctgccttgtggttggtggatctagtgctccggtgttgcaggtaaccctaaatctcgttccctcggtcctttcttcctttctcgctccgtcgccgtgagtcgtttgtgtgtgtcgtcttccttctcggtttctaggtctcgacgtatcatcttcctttctcgttctctcgctccaccgtcgtgagtcgtcttctttcttgttctctcgctctgccgccgtgagcacataaccctaaccctaagctcgatttgttcaggtgtgcgccgtgtgtgtgcgccacgcaccatgaggagccggagaacccgactaaggcagtggccatgtccacggactcgactgacgatgagctcaatctcgatgccgtggtcgaggagaggcggcttgaagcacataatgaggtagaggatgcccggtgcctcctccttggtcccgctaccatcgatctggatggcgccggggcccaaacgacccgaacatacacgggctccacaagcccaacggccgacgcgagcacctctgtccctatgccaggtaaacgttctaggaggagagctccgacctctaaggtatggctgcaatttgaggaggcaactgtgatgcaaaatggtaaggaggtaagagtatatgccatttgtcttcactgcaagaatagcatgtctgctaaatcttcatctggaactggccatttgatcaaacacttggatctttgccctgctaagaacgagaaggatagatctgggaaatctcagtctttgcttaaatataattcagatggatctgttaatcattgggagtattccccttctgttgctagaactgagctttgtcgcttaatagctaggctagacctgccacattgttttgg

SEQ ID NO: 163362 - DNA, 623 bp, Zea Mays
ccaggggcctgcacgctaaaactcaggacgacaggttgattctcggaaacccgagggtctcttacgcaaaaccgccacgcgaaggggtatcgagtaatctggaccgcacgattacgagcgagcggccgagattagatctcacagtcaagcgcgcgagcgcagacgcatagcgagcgctaacgggtgggctcggagtgtcagtaacccaaggtagggctgacatgccgggcccagtgacaggggcgcgggtgaggggagcgaggctgagcagttggattcacatcggacggtggctatcggatctgttttaattaaacctagaccacgagatctcagatggatgtcagaaatccgtcggccagcacggtcggggtggtgggtccttggcgtggcagcgccgctcgacctcgcggcgggacctcaccggagacgaagggaacagccacggcatggccctaggggcttgggggaagggctcaggcgcaatcagggcaatctagcgaacacgactgtgggcacaatgccaacgtggaagcacccgagggcacagaacgctacgggatggtcccatggcgacacaaatctactccggcgagcaatcacacgttgaccagggcaataaa

SEQ ID NO: 163363 - DNA, 887 bp, Zea Mays
gaaaaataacaagcctaggaaaattgatttcataattttaccatttttctaccatttttaacagatttccaaagtcttttggaaaaagaaaaaagaaaaagatcaaatagagctgggccggttctggcccagacggcccaggtccagggcaaaacgcgcccgcgtgcgcccgcgccctggcagctttgcagaaaggacctcgcgtttcagaacaacccgaagtagatccgtagcactattcactaagtcgctgacgctttacaccgagcccctctggtttctaattctttgcacggctaagtccccgacggcgcggagcacggccgagctccggcgagctgtctgtgccggccgattggggcaaggactgacgtccttcttcggtcgaaaccgaattcacaccccggccaacgattcccctaagttaattgcacaattggtggattaatttggtctggccacggagagcgcacggatggaccaaagattcatgcgttcccgacggtcaggggacttctagcccaattggacggtttagtaagcatcacagacacggggagaagcttaaacgaagcagagggagggttggactgaccggaaaaagggctaacgacggtgaagcttgtttcacggtggcggaaagagatttgggggaaaacgcgaattcgagctcactggtggatgattgtggccgattagcggtggctagttagctggcgacctcacggagctagtcacgggctcaatttataggagggtaaggcggtggccgtgaattttgaggaggacgcgcggcggccggagagggagaagaaggcactggccgcatgagtgcgtgtccacagtcatggcgagctcgccggcaatgatttgacggcagtaagaag

SEQ ID NO: 163364 - DNA, 720 bp, Zea Mays
gttagttaggaagtgtctattccttagagtctatagactacaaaatgtatatttattattttcaataaacagaagacagacgatcctaagcggcgtgcgtttctcatcccttcgatacatcgccacctctttataagggtcgatgtggtctctagcagattgcatcggggatatgcagtgctccaccttattttggtagatcttttattgagaattattgttggccagatctgctagtaatcatgcatagtatcaatctattgtttcgtttaagcttcatgctacagattgattctacacagttggatgtgtgtatcgctcgtccagttgctacattcaatggcatgtagttgtaacatgtgtatatagcaactcgagagttcgatacacatctagcaccctgccttacatgccttaatcgcgtcatttgttctatataaaccttcttggaggtcctgatatgtgtccgcgcgtacaagcatcggcttgtggttatagatgtttctaccgttgtttgtataatacatattgtagattggacccatgattgtttaccgtttatttggtaaagtgtagcaggtagttaagttcaataaagcaaacgagtagcaacgttttcaactttgcacccgctttgtcgacggcggcagaccagcacgagccgactattattcctgtttgaaaacacacaagacaacataattagtttgctaactactt

SEQ ID NO: 163365 - DNA, 612 bp, Zea Mays
gtctctcagagtgcctgaacatcattgccatggtacagtgctatcggggggaattcagagcacttcaccgccgtcgatcacccctccgccgcgatttgtgtcgccggccttaagattcgcgtgtggggtggattgataacgtcgcggggtaaggatcttcgtcgacggtgagctggaggtcactccggtgactcaccgtggctttctcctctactttgcggcggagcagataagctcgccggtgaaccgccgtgtctcggccttgtgccgcgtgtcctaaccgcgccaccgcatcgccgtgactccctctaaactccccgtcgaccaccggagttactgccacgatggtgaacacgtgttcactgcaccagcgttcttcctcacttccgaccgccgcacatcaacgcccaaattcacggtcaccgccgaagagccctataaattgaagcccccgctaactccgcaaggtcatcctccactcagccaccgctaatcgctagcagtccttcgccagagctcgcgaattttgaattcgccccaaatctctctctaccgccgagaactacaccctgccgtggccagccttccccaggtctgctcattcccttcttg

SEQ ID NO: 163366 - DNA, 684 bp, Zea Mays
ctcaacttgaggcatagttggcataagaaaaatgctacaatatatacttttagaaggacgaaacaaaacatgtaatgggaagaactcatgcatgccaagtgttccgttgtgctactcagcaacatcaccgttgccacactatgaaacaatatcaagtaccaaacacgatcgtgcacatcaaagatggaatgcatgataagctttaactaacttcagtttgattccactcgaaacaaatgaattttgatacgttacgtctggattatctcagtcccacgctcgtactaacccgtggtgaggagaacaaatgcgtgtttggagagcgcatgcttgtgcttattcctagagctatggacatcgcaccatctgtagagcatactgaaatagaatctttgccagttcctgcatcaggaaagcacatcatgatatatatatatatacccaatcagtaacctttagtgcataaatagagaggacgcctagactgtcaacacatttacctgcttgccggatggaacagtgcactgcactctagaaccttctttttagcatctcgaagtctgctttcccatcctatttagaaccataaagcaatgttacaacctacacaaattcgaatccaattcttcgcaatcaagaaatcaaactccaaacttgaaagtgacgtacctcgatcaaggcacc

SEQ ID NO: 163367 - DNA, 367 bp, Zea Mays
tgggcggtgaatttggggaggacgcgcggcggccggagggggagaagaacgctggcgcagtgaacacgtgttcaccgccgtggtattaactccggtggtcgacggggagtttagagggagtcacggcgatgcggtggcgcggttaggacacgcggtggacaacggagatggcacgacgacggtgaccaactttacccgcgggcggtgagccaggggagatgaactacggctagccggagtggcttccaggtcaccggcggcgaagatatttgaccccgcgacactatccaaccatccagagcacaaagtgggccggcggtcgcacgaatcacggcggcaatcggtcgccggcggtaaagtggctgcg

SEQ ID NO: 163368 - DNA, 387 bp, Zea Mays
ttaaccatgtcttcatttatatgtcctcatttcaggggttgccctaaagcctaccatccttcttgtgttaaccgggatgatgacttcaagtcaaagggtcggtggaactgtggtatgtgcaataaatttgtctgactgatcctcattttccttacataaatgcttgcatttggatcatgtggacatgcattatttcttgaagctacatttaaagtgatcctgtaatattggccgtctcacagttcccttctcaatttgtttaatttgtatgaaatatggaatttataatgatcttacagcattggtcatcacgtgttttccctgttcttactatcatatagcttacttgaaaatgttttatctattcctaaacattgagattagtga

SEQ ID NO: 163369 - DNA, 605 bp, Zea Mays
gaagaatggaacttccgagagcttatgcagaccaaagttgctgacctgcttcacattcagaaaatatattagaaacaaagggcatctatcaaatggatcactgatggggatatttgttcaagattttttcatgcacatgcaacggtaaagcataggcgaaacacaatcgcctcgctcactgatgataatgtgacaagtttctcggagcatgaccaaaaggcaaatcttctgtggaatgctttcaaaactcgtctgggtacttctgatttcttggagaatgtttttgatctatcaaatcttataaatatgcaggatggtttacaatggttggattcgccgttcactaagcaagaaatcgatagcattattgcagcactcccctcggataaatccccgggtcctgatggcttcaacactaattttatcaaaaaatgctggcatatcaattctcaggatttctatgatttatgtgagcagttttatcaagaagatgtttgtcttcgaagtataaatgggtcctttatcgttctggttctgataaaggaaaatccacaaactgtgggagatttcaggccagttttgctcctaaataatagtatgaaaat

SEQ ID NO: 163370 - DNA, 520 bp, Zea Mays
tgcgccgccatagcgtatagtacgtgttgctgtgatccggcctccaacgccatggttcggttcctgacaatttacatcaaaatctaaagaatttcactgcattttacataaggcgcgcgagcacgatcttttgtcccccattctctttctcttccacgccgccatacatgaccgcgcgcggcgtcaacttccatctcccacgatccagagttccaggtcacaggcacctcccgacaggggcgcgcgcgcgtggcgtcagttccggaagctgctcctgcaattctgcgacgcaatgtggacgtccttgctaagcccggcggcggtgatcccgcagtccacggccagcctcctctgcccgaacccgaacgcgccgacgtgcacctgcacggtgacctccacggccagctggagcgcgaggtggtccttggacccgctgaaccccttctccaccgccctgggcgtgcgtccgttgtgcttctgcccctgcagcagcacgctgaagtcggtggcgtcctcgccg

SEQ ID NO: 163371 - DNA, 401 bp, Zea Mays
cttgattattgaggctgctgaaacaaaggaaccatcacgccaagcaactaaaatacctcctctggacccatgggcaggactaaaaacaaaattactgaatccggacccaagaatagaaagaatgttgaagtctgagatggagaccattttggtttcttgaagacatacaacagcaggtctgaggcttacaaccaacgacttttcagagtctctcttagcacgactgttgaggcccctaacattccaaaccaaaaaacatccaggctccatggagaaactaaagccatctaccaacacggggacagaaccagctcaggcctgcaccccagggggcacctcccagccaaacagggccgccagagcagcaacatgatcactggacagggcagcatcaaacaacc

SEQ ID NO: 163372 - DNA, 515 bp, Zea Mays
ggccggatcgagattcacggcccaactcgatcacacgtcagttcctgaccccagcgcatgagactaaacctcattctactattttactggtgaatgcttcccaaaaattccaaaccccaaaaatgcaccacccgaaagagaaacaacaaaagaaaacaaagcaaaaatgacctccaacttatcttctttgcaaactgggtatcacatgcaaccttatggtgggatttaagatattacatatacattcacacactagcatgtaagataatagatgtacaaaggtaatacaatagttcatggaatgacacacctttgttttatgccacatgttctccatcatgatcatcaattttcaacttagtgttttgacaggattgacattatttttgcacaaagcaagatgattttcattcatgcccatcagtcttcattacgacatggattgagtaaatttagcatgccaaagagaaacttatcctcttcaaaaaatcaagagaaacccattctcttcaaag

SEQ ID NO: 163373 - DNA, 594 bp, Zea Mays
gtgggtgttacaaatcgtataatataatcaagaacttcggaaggcgcttcgggagtaggagtggcagctttttcaggcagaatttgttctacaacttctttttccgctgccttttctccggtttccaaggatttctccttggcgggctctgaaggccctgcttcggcatcgacctgcctctttgtagcatcggcttcggtcagctttgtctcggtttcaatctgcgcttttgaagccttggcagttttccctggagtagagcttgaagcttttattgtctccagcacatctagtacactggccatcctttttctcttgggggtcgctgtaagacctttttgtgccttcggcactgtcacttctgccgaagggcttctaatattttcgtcccttcgactcttgtctcttcaatattatcggccttcggctcagctaatttggctgaggattccttcggcattgcagccggctcttcaatcttttgcgtgggaggagcaggttctttcgcttcagtagctgaagaagtctcaccgccaaattcgggcactatggccggttcaatgtagcacggtcggtgggtaaggacctttagct

SEQ ID NO: 163374 - DNA, 792 bp, Zea Mays
gtgaagataaggtggttggattaaaaacaatagaagtgaacaaagtctcaaaccaaagacctaactcaagtttaaactgttcatgctgaagatcatgatagacaaaataaaattgtaagagtattaagaaccataccaacacagagtaatgccccaacaagtgaaaggctccaatggtgaaatttccatctagggcgccaactaggagcatcaaggaggtcaagcagaaagcatgacaggttcacgccagcatagcacagaaggaaaaacattgtgatagtgggggtaatcaaatccaagtttccaataacaacacagcaaatacagatgaaagctgtgaataaagtggccgcatgtggctcagatccctcagaaactttgaagtaattaagaacaggaagaatgtcatcattcgcaattgctgcaagcaaccttggagccccagtcaaactctgcagtgctgcacctaaggtggacagaataataccaatgtaaatcactgcaggagcaggccaagccaccgtagcagtaagaagcctgcaagtggttaaggatatttatgagataaccacacaagtgagaagacactgtaacagctggcgtaagccttacgtggctacataataaaataagcaactggaaactacagtaatgctgttagaatgttgttctaagacaataaccgataaggtaaaaataaaccaaagacttcattaaggttatacaaagcagccagagtattcttagccattaagactatctaccacaataatatgaacatcaatcttataa

SEQ ID NO: 163375 - DNA, 1733 bp, Zea Mays
cgaagttggaccttagcatacttttcgaagagttggtacaactcttggagggacgtttggggtgtcacaggtgcaatgattgtatacgtggcctatgcgcggcgctgatggcataatggatagcgatttcgtcttcgatcgacgacaactgagatttgagtgatagaaatttgttatagtagtcacgaagattccttctctggttgctggcataaggatagctccatgagggcatcggtctatggtctgtatccctgaaagttgagtaggaatttctctcgaagggctgcccatgagtcgattgataacgatggcagcctgatgtaccatgtcagagtaggccttcgaggcgattatgaattactctgtcattgcattgtcgtctccttcggacgaggactactgccacctattagcccatgatgaattgcaaagggttagctttactgttgtatttgggccaatttcctgctctataattgcggggccagggtgtcgcctgtagcctggctgacagagggtacctttcgtcggtgaagttgaaggcctggaaggtgtcttggtgtggagtctgtctggtttcttcgaagttgtcctgtccttatctatggtgtgaaaggtgagatggtagttgctgagtctgaagctctggaatttctcgttcgagggccctcgggcgctcctttttctgctggataaggtattggaccttggcctggacttcgttgtgttgttttttggctatgaaagtgtccctttgcttctggaggttgctgttgcgcatgcgaaggcttgtgagtagttgttcctctgtattgatgttgaggtctacgtcgtcttgtaggtcttcgtcgtaatctgaggtgggtatccctagcgagtggagatggtgacatgttgttggtgcgaagcctgggggaattggtgacatgttcctcgtcaagtatggccatattttggccttgtagggatggctatgtgggttgagtggcgcgtcatttggggtcttggagctggaggtgtgggcgcttggcacaggggatgacaaccgtttttgtttggggggttggtggttttcaccttctggttcggcggtggcttggggaatgttgttagtggatggctataggatgtcgtcgacaaagaccaccttacctttttggtgctagcgacgagggccgccatcgttgcctatccttgggtgaggagttggcccggatgttatttttcttgggaggcattgtgggattggccttcgtgacacaaacggttggcgccaaatattgggtcctgacaagtgggccccaacactcgggagcggatgaatgaaacaatgaacgacaaaacattaggtaggtgaactgtagcttcttgttgtgtgtgtcccgtccagctacaggacgggagtatttttagggcaaccgagggttggtggcccaaaatacattcatatccccggttacctactacatccttggaatattccgcgtaacggggtaattacagcgaggtgatgtccggtgggcaggcacacctaaatgtctacccactgattgcactaaccggtggggactacttctcctggtccatccatatcgtggggcctttgcgtcttgggacccctcgtaccaagcgtaggatgatccatgtcggggttttccgaaccgtcgtgggtaacgaagtcctcgaccttgctctccgcgtttgggccttcgcctagccgccatgctgga

SEQ ID NO: 163376 - DNA, 676 bp, Zea Mays
gaataccaaaaaacctttttggctcccgaaaggagagctagaaggagaaaataggtggactgactgaggacgaggcactagggcggagcagccgcatcagcgcgtcgttctggcgagtcatcgaatttgtcgtgagatagcgttggtgagacgacgacaagtaggaggagcgagtgcaggaggcaaggtagcgatagatgatggtgacgacaagcgacacccattgtcgtgttgcaatggcgcggtgggactctaatgagttagcgagggacgggtgatgccatggtcccaccaacagcttgcccatgtgctggtgcatactaggaggcaaaatatcaatgttgtgtgtaggatcccgacgagtcgacgagctgatgagtgatgagaaggcaaagtgcgcagtagcggacgggttaggtcaccgacttactggtcaatcgatgaccgaagaagcgagtgagccacgagtgagcttgcgctagggaagagaatcaaatggctcaggtgaaaagtggactgagtagtgaaggatcgaaagaaaaatagatcaaaacctagttttcattagatttgtccacgctaactatacaaaaatttgcttattttggtgtgtacctaaacctaggtataaggggttaagaaaaattgaggtggggccatggcccaccttgcccac

SEQ ID NO: 163377 - DNA, 641 bp, Zea Mays
tccaaggtggaagccgtttcaaaatggaaacaaccattcaacgtcagtgaagtacgaagctttctgggaatggcagggtattaccgccacattattaaaggattctccagcatagcgaaacctatgaccgaacttctcaaaaaggacaataagtttgtatggactcccaaatgtgaggaaagtttccagatcatcaaggaaaagcttacaaccgcgcccgttttgacactatcggacatacaccaggatttcatcattttctgtgacgcttcaagacaaggcttagggtgtgtcttgatgcaaaatgagaaagttattgcctacgcatcccgcttactcaagccacacgagcagaactaccctacccacgacttggagttggcagccatagtgcacgccctgaaaatatggaggcactacctgattgggaacaaatgccacgtcttcaccgatcacaagagtctgaggtacattttcactcagccggacctcaacctccgtcaaagaaggtggcttgaattgatcaaggattatgacctcgaaatccattaccaccccgggaaggccaacgtggtagcagacgccctcagccgaaaacctttcggggttaaggggaccaactttttagaagattggaagaa

SEQ ID NO: 163378 - DNA, 364 bp, Zea Mays
ggattgtgatcggtatgaactgggtgagtcattggtggccgcacaacgtggcttttaccatggcggcacctccggcgatcaccggatatgcgtagcacggttagctgcgacgtggtaaagcgtttggacacgcggcggacgacagtgatggctcaacggcggtgagaatctaaccgagtgatcgatgagcaagggggtacggtgaaccttatctgtgcctgcgcccgaactaatccagtgccaaaatttcaatccatcttgatcttacccgcaaacacgaatcacaacgacggtgtgaatcacgacggagattgtcagcggcgaaaaaaactgagctggtggcctgatccatttcagatcacta

SEQ ID NO: 163379 - DNA, 508 bp, Zea Mays
gtacttccagggtgaatagagtaagctgaatcatgagcttctctcaaaataagttggcgcaagtgttcgatttctggtacgcaaattctcttcttaaaccatactgtgccttgttcatcttccatgaaatctggggctttacccaaaccaatcaaagttttaatttccttaatcttctcatcggactcttgtcctttatgaatctcttcttccaaggtagattcaacttccataactgttgcttctacattattgagcaaaccaagattgagttgttccatttcccagcacaattcctgtgacatcaaatgagtagtgatgttgttcacttgacccttacggctcaaagcatcagctactacatttgctttttcggggtgatattgtatttccaaatcatagtccttaatcaactcaagccatcttctctgtcttaggttgagttctttctgagtgaatatgtatttcaagcttttgtgatccgtgaagatcttgcacttgtttccaa

SEQ ID NO: 163380 - DNA, 273 bp, Zea Mays
acgaggccggcccgtcacctcatgaaataggaggccatggagaactctagctcctagaatatatgtcaacagggcttaaaagcgtaatgattccataccacaccttcggggaggcaactaaaatgaacaggcaaccagacatcgccgacggaattgcctcaccgaacagttccacaattcactggcaacttctcataaagcggtacgcactagcaaagattcttccaccacatcaaaaatcaaccaaaccaaaagggcaaaacggcagatgag

SEQ ID NO: 163381 - DNA, 464 bp, Zea Mays
cgatgatgagctgtcgctcgaggaaagtggtgattctatgtggggccacacgtacaactggcaaaagaaagagcaggagaatcataaagaataaggaaggcacacttggagctcttttggaggaagtagccctcatatctcgacgatgagttgttgctcgagggagtgatgctatgtggggccacacctacagttggcaaaagaataaagaatgggagaatcatgatggataaggaagacaccattagtaattaggttgctattgatctctattaggataattgtttggaatttaaacccattctacttttggttgtaagctcttgtatctaaaggagcgatgtcaattggaaaaggcaagcaaataattattcctaatttccttcccatctttgtgagctcttgctcctttatttaagaggaagcaatgcaaggatatggccttcccatcgagaacattcacc

SEQ ID NO: 163382 - DNA, 725 bp, Zea Mays
tgtcccagtgcagtaccttcagacataatcaacttttcacttgttgaaagaggagtggctacacccttgcagtcagacataccaacccttttaagcagatcagaagcgtatttctcttgagtcaaaattattccgtcttgctcctgaactacttctattcccaagaagtagttaagttttcctaagtctttgagtgcaaattcttggccaagttgatgtaacaaggcttgtgtagcatcagctgtcgaacttgcaacaattatatcatctacatatattagcacaaaaatgactactcctcccttgttaaagaagaacaaggatgtgtctgcttttgatgcactaaacccaagactctgaagctttgcactcaaccgagaataccatgcacggggagcttgtttcaagccatacaaggccttgtctagtttgcatacatagttatattttgctttatcctcatacccgggtggttgtctcatatagacttcttcttctagaaaaccatgcaaaaaggcattttgaacatctagttgacgaagactccatccccttgacacagctatagacaagattatcctgattgttgcagatttcacaatcgaactaaaggtatcttcatagtctataccatatctttgtttaaacccttttgcaacaagtctagctttatatctatctaagcttccatctgccttgcgtttgattttataaacccacttgca

SEQ ID NO: 163383 - DNA, 661 bp, Zea Mays
cgtctctcgcttgcgccaccgccgctcagcagcatctcatctctcgcttgcgccgccgctgctcttcttcgtgtcgcccgcttcggatttgtttccaggcccttcgagtcgtggctccaatccagtaccttctctagccaaaaaaatttccaaacctatgggctaaaattctagtgggcttaaacgaacataaaaaaaattagaaaccgagatttctactggggtcggatttcaacctggattgccccccaatccagaccgaacccggcctggttgggcacaaccgaacggagccttagtggttttgataattgagacaacgagtggattaagctctaccctgtgaaagaatcgatgacgacgcaccaatcacctcggagaggtacatcttgacggctcttgtcctcctccttaggcactaccgagtaggacgctctggaacaagaacatgagaagaacgaatcttgtcctccttggcgttgcctagtccgacaccctgcctagtccgacaccctagaacaggaacacaatcgaagggaggtggtgcccaatgaggacatgttcatttcgagagcgattgaaggatattaaatcccttactagtcaaaattgaatagaaagaaatttaattcccctctataccctcatatcaatatgcaac

SEQ ID NO: 163384 - DNA, 312 bp, Zea Mays
ccccgtctacccccttcgacgtccacctcgtcatcttaggcccgcggaccagctctgaccgtcttcgtctaattttatccaaccctgtctaccactcgtctgactcagtctccgtcttacactgtcttgcgcaattcgtcgcacaaccgtttcttttgcttggtcagaatgcgattccgcgatgaatttggcaagcacctcccacgctttcttctttctatatatatagacattcccccatcgtcacataacccattgtctcccttcccagatccagatccaaatcgcacaggaacaggcatcccatccagg

SEQ ID NO: 163385 - DNA, 1493 bp, Zea Mays
atatcattgatgttataaaacaattcttcttcgatgaaccgatttctctgcaaagcttgggaagatacactttttggaggtaggttgtgatcctttatgtttccaccacatttgttgaatagaattgtaagttggtctattaggtgatcccttatttgatgttcatccatttgatatgtagggtgattcattgttttgcgcatgttgtattgaatgtcatccgctagtaatttccaaactttctcaaagaatgtgtgttcgtctccaacttcgcaaaatagcaacatagtcacaaaaagttgtcgaagctgattcgaagttgcccatttagctgcttcatcaaatgcattataccactcttgatcatcgtttagaagaccatgagctttgcatgcttctttgaaggtgcggtgtagcacaccgttatgttttcgtagatcttcgtagctctgtgcacctttgacactcaatagcaacattctaagataatatctttctcctgatgatggatgtacatagtagatacgaccaattttgccttcctttgttcctcttggtctctagcttcttgttcgttcttcccatcgccattttgatgggaattctatgtaagttaactctcttgcgtcctccctttctttattggtagtaaaccattcagtaagcattgttttgtgtagtaatggttcagatagtacttgagacatatctgatgttgcattgtatgtgattgaattctcatttggtaggtgaactggcattctttcaacagcaggatagtgtctatggatttcataacctagaacacgctagcatgaatctttgtcgcataaatatcgactgtctaaatattccttgacctcattccttgcttctgtctcttcgtcatatggggtttgttcaccatttcttattttttgtaggtaagctttactacagtctggaccttttgtcacatatttgaagaggtatttaacaaaaactgttttgttgcaccactcaatgtttatatgtgcctgataaattttcatgagtgctggattgtagggtacaacccacctattgtcgagtttgttgcctgacttgataacatatctgttattgtttctacgcctgtagacaacaaacccttggctatcaaatgatgtagtttcatgaaattcttttggatagttttttgaacatctgccatttttcatgcagggacaacctggattgagtggaccacatggaccgtgtatcatatgttcggcaaccaaacaatatgcaagtggatcagtatttggatctggaatttcagcagatataaaagagtcaatgagttctggggtcggctgtgttgtatcagttgagacccaaaatataatatgggaatgaggaaggccacgtttttgaaattctgtagtgtaaagcactgcagtaggtagaacaaattgtacaaagtagtgagtaagtagttttaagcataatcgcagactaattgaatgtattta

SEQ ID NO: 163386 - DNA, 518 bp, Zea Mays
gggtggacgtaggtgcctagcgcgtgcagcacgtcttgcagcaggttggggaagtgccccgtctcgaacattgatgtgtaatgtttgacaacaacccaaaccccatgaagtagtcctactgggcgtagtcggcttcctggttgacgtgttcgtcttctccatcatcgtcgtcgtcatcctcgtcatcgtcattcccagagtcgttggggtcatcgcctttgggtgcaggtgcttggacggctagtgcaggcggtgccgatgtcgatgacctagctgcgaaggccagggactctgccaacggggtgggcgtcggcagctattcctccgagctatcctccaggatgactccattctccactcgaatgtgagggagatccaccggaacttcctcgaataccactgggtagacagggatttgccgaggcggaggggcgtagctgttgttgacacgggtagtttggagagtatgaaccatctacaagagaaatgtcaactcagttgaaattttaaagaggtaa

SEQ ID NO: 163387 - DNA, 739 bp, Zea Mays
cgaaggggtacggttaactctcggccgtccgatcaaatatcgaaggccaggattagatcttggctttattgaaccggtacgcaatccaagccctcggatccaaaagcaacgtcctagatttaaaacccctaagaccagatctcacccgatcaatccaaatcggacggtcgagattctgaacgctttatcgttatcccatgacttgatctcggccgatcccggctagatcaacggtcgcagtccatcgtgcccactcgccatcccaagctccgcggcggcggcagctgcgcctcccaacacggcatggcacgccgacgaggagaagcatcagccaccctggtgccccaatccatacgagagtaagcgcagaatgggcagaagatcatggcggatccgaacgaatcatccttacctgaactggcgcggcacaaccctccgcacacgatgcaccatggcccacggcggaaatctgttttccggtgagaaattcaccgagcaccagggacttcctagtccagccaataccgcagatcgcttccccgaaggtcgacaaatgggccgaactcgctctcgcttccggaacaccgccacaaccaccgatcctcgacgacgaagcacccccaacgccttcggttccgcacgacgagcattcctggagatgttgcttcgagttgatagagttggcgcattatatagggcaaaggccaccaagatcggtgggatggttgcaacagtctcc

SEQ ID NO: 163388 - DNA, 898 bp, Zea Mays
tcttgtatctgtcccgaatcttaactatacgtatctggtctcgtatccgagagaaatacattagggtaggatacgtgatgaccctgtatacggctgtatccatcttgttttcatccctaattgccaccaggatgggaaagcacatcacggtaggaagtagtcttagatagaatagaagcaaaagcgacaaaaccaagacgagccggacgacaaagtgtaaggcgaccgcgaaggttatatcgcggaggaggcgcaacaagcacagaaggagacaagctagatgatgttgaagggacggtggaggatgtgaacgttgagtgtagtggaaaagaataggaggacgtgatagaggggatggtggagatggaggtggaggcaatggtggaggtggagaaggcgatagttgtggaggtgagggatgtggaggtgatggtgatgaaatagaaataggggagacaaggtggtaggaagaggtggaaccaagcagagaaaatcaacagactcagaggaagggaaagaagaggacaaatcagtaggaaagaagggacgtgactcatcaaaggtcacatcctgatatactcaaatgcaacaacgatagggtcccaacaacgatatcccttatgcctagactcatatccaaggaaaacacacagattggatcatgagcttcatcctctcatgaggctaaagaaggacaaaggcaacacaaccaaaagcacgaagatgagtatactgcggtggccacccaaaaagacgctcaagaggagtgacaccatgaagagcaactgaagattgaatgttcacaaggtacacagcttcaacccagaactgaggaggaatagatgatgccagaagtaatgcacgaatagtcttaagaagatggcggtgcttacgctca

SEQ ID NO: 163389 - DNA, 371 bp, Zea Mays
gtgagaagtcggctctgtcagagctgtacacaccgagacaaaagccatgccaagtcgtgtcaaatggcttagggttgggttcaaacttttccagggtgttctaggggtctttgggcgccattttgtcaattgggccataagattttgaggttgggatcaaagtgaacatgtttgatttttgaaagagggtcggttttgaacttgagaaaaacctgaattttcttttatgcctttctctttggtgacctttttggggttcttctgaatcctttttggggtcacactctttctatgttttgtagggtattaagtgtactacaacttttataattagtccaagtcatgacaatgtgatttacatagactttttg

SEQ ID NO: 163390 - DNA, 945 bp, Zea Mays
gtttgttggccgccgccgtgagtgcacgcctttcccccatcgacgtcgaagcagaaagcgtcacctgcttccgtggttgccggtgtgtatttcgtctgggcggaggttagcttggggtgagcgcagttcgttgtcggcgttcatggtcgccgccgatccaaccttctctgctctggtgtggtgctcaaccgggggcgcgtgggtagcctacgttggcggcgaagccattcctcgttcgtgtgcagctgggttgcctctgccgcggcccatccgccccgggaagggagcgattgcttcgtcgtgattggttcgcagccgccgccggcttcccctcatcgcatttctggtgagatttctttgtttttttgtcccatcgtattaggggagtgctccgcattcgtttaagtagatcgggggggtcattagtgttgctaatgcgccgggcggaattactggtcatggcgccgccgtggaagaactcaactccggcgactggcgaggtcggggagcgcgacgggagattgtgtgccgtcggatccagagcgaaggttaggatcagttcgtagcataccctttcgtgttacgtaatctgggccatcgatctgatgttgtgcggcccagatcaaccttatagttattgaatcacaggaacggatcgtgtccgtagatccgtggatgtgcgcttgggatcttgtgtagacgtggcttgatctcggacgatgatcccggacccaagggcctgggttgcatacaggtataggcgttggcagatctaatcgtggacgtaggtcttaatccaacggctgatcgcgaccgatacccctttggcctgccatatttacgcatgaaaccctctggtcctaagaaaataacccgccgtcctagtaccctgcgctctgtgtctacagatttttaccccgtgacccctgtacttttcggtaattg

SEQ ID NO: 163391 - DNA, 788 bp, Zea Mays
gcaatgttgtccgagtcatctctatgacgatgaccttgatgatgctttctatcttcgtgatcagcacgccgccgacgatcacgacgccgcccatacaacccatcatctccaaaaagattttcattatcatcaaatcctccagattctgcctgtgattttcctcatgatgacgatgtggtcctcgaccacccgctgcgggaagacgttcatttaacatcctttccatggcccccacgagtgagtcgaccatttgatgcaattcagcccgagagacaggggctctctgtctccatggtttccactgtgaacacttgaattggatcctaccatgttagagggaaacaagagaaagtagaatatgaaagtatttatggaacactcgatctcacctcttacttacccgagctctttcctgatctctaggactgtgatggtgccggtgtgacaacttcgacagaggtggtagagcggtcgaaaggatcacaagtcgaatgtcccggttcaggtttttagtggagctataggaggctgatcaaggtgggctatggtactgttaaccaagtgtgttgacgtgctaagagatatgaaattattgctgggaagattctcaccaaatcaatgtaaactgaaattttcagcaacacactgcaacacaatccctttcacaattttttcactttttttacttctttctcttcttctttttttatcacactgatggggtgctgatatcaaatgcaatgacacaatttgaatatgatggtggtacctagcaacttgaggaattt

SEQ ID NO: 163392 - DNA, 453 bp, Zea Mays
ctagtgctggcgtaggggtaggtgtcggagccaagataggggcaagtgttggtgctggcgtgggagcaggcaccggagtcggagctagtgctggcgtaggtgtaggtgccggtgctggtgtaggggcagacgtcggagctagggtaggggtcggggcaggtgtcggagttgaagacggtgtaggtgtcgtagcaggcgttggtgctagtgttggagccggagcacacattggtgctggcgtaggtgcagatgtactgggagccggtgtgggtccttgagccctaccatgagccacaagcacggctgtcacccaaaggagtaggagcgcaggtgaagctatggacttattgggcgccattgctagctagctgcgttggatgatcatgtatgccccaggtatttatagacgtcacctcaccttgggaacgggcgcgcgatcaacatgcatgtcac

SEQ ID NO: 163393 - DNA, 511 bp, Zea Mays
cttttatcacgttatttgtgaaggtttcaccgatctatgatgtaattcgatctcgagaaagagaggccaaatttggagcctgttaaaacttttattctcgatgcaaatgcaaactcgaaaatcaatctcgatttttaattctcgtctaaagctcatttaaccaagcgctcgacagttgctagtcgagccgtgtccgaatctaatttctcgatgttcaatccatatatccaatttttttatctgaatctgtactctcaagcgagatctctaatgtgtcggcttctaattaattcttatctgacccaaactagtattatccatattctatctaattacttccctactagattggttcctaatttaataactaaaatataacgtcacgtttagaaagaccttgatttttataatcctagccacgagcgtagaattgtacaggagcaaaaattgtatcttcggcatgaacaaaagcagcaataattctataatggaacaactcacattattaaat

SEQ ID NO: 163394 - DNA, 972 bp, Zea Mays
ctcgccaaccatacactctccttgagctactagtttcaataaacagttatgtaactgaagaccttgcggtaactcatcatcccacagaatagggctagaaattgcatcaaacactctatgggcttcactcatggatgtcatgggtaccttgaacaatgcctggtcatgctgctgcaatagcacatgtggatcagaaccatgctgcaattccatagcaagctctagaaacaatggcgcattactggaaggaataagcacgacattggcatcaagctctgcagtatgctttgtcttctcgtaatgcacatactctgcaccacatgctagctgttgtcataagccatcatgcgccacttgagttgaaatctcatcccacactacacctgtaggatatatttcctccagtgtagctgcatcatcccgaaaagacaattcatcaaacagctaagtggaagcaactggcgccatccttaaatccttgaacatcaccatattaggacaggccacatcatcatcccaacggggcatatcattgcatactttctcgacaactacttccgccatcgcagtagcagccatatgtctgtctgtcgcccatgacggagtcacgatggctgcaatccacagccaccaaacgccgcctagctccacctgaagaagttcgccgccgcctagagagctggcgcgacaaactggattgaagaaaaccagaggcaccttgtgtcgaacagctgagatgcaacaagtctaccgccgccacacgccaccggaattccaatcactgtcgccaacaccaccaagtcgaacgcccgccggagatcgacgaacgttgatgacacgatgccgacgccgagagtcgttggaggagagagagaaaaatcatgcccaaaaccctagtcgtcgaagcaggaacaccgttaaggaagaacgcgacccgctccgtgcgacaccaaggatcaaaaggctttgata

SEQ ID NO: 163395 - DNA, 895 bp, Zea Mays
ctgcccacgagaacaacgaaggctaaggacttttgctcgtgttcccggcaatgggtggcggcctaattcaattggacgggttggagagcatcaccagaatacagagacatgagaacaatgcgcgaattggatggtgccttaccagaacgggctggccacggtgaggttggtttcacggtggcggaaacttgatttggggagactccaaaattcgtgagctctggcgaacgattgctagcgattttcggtggctgggggcgatgaccttgcggggctggcgggggcttcaatttatagggctcaacggcggtggccgggaatttcagtggggacacgcggcggtcggaggaagaagaagagtactggcgcagtggattcgtggctagcgccatggcaattactccggcgagccacagagagtcgcaaaggttcacggtgacacggtggaaacactcgggtacgtggcacaaggccagtagtcggccatcaccggtgaacctatctcctaaagccgtaaagcaaaaggggttccacggtgagtcaccggagtggcgtccagcgcacggggtgatgatcttttctacccaaatcgttatctccaagcccggtgcacgaatcaggacggcggcggcgtgaatcttcgcgcagagaggtcgccgacggtgaggatatgacgctggcgatctgatccacatcgggctaccgtacttgtaccatcagaaatccttttcagaacatctgacagggtgatttgaagcccgattttctccacagtttctctagtaactcactcaactctctgtagcaaaggtgcagagctacaaaccagctacaaatcgactatagggattaaactcagttgagcactggaccaaggttgaatccaagtccaaag

SEQ ID NO: 163396 - DNA, 760 bp, Zea Mays
agcggaaacaaatggtggccactgccttataagctggccgctgattagcaagccgaaagacctaggtgggctgggagtcattaatatcgaaagattcggtcgtgacctccgccttcgctggctatggcgagcttggggggatgaggaacatccgtggctacgccaggacactccctgtgatcgcacagacagatcgttcttttgcacctccacccaggtctcgttgcgcgatggtagaaaagcgaagttgtggcacgacagctggcttgatgggatggccccgaggaaccttgcgccacacctaacatgtcgccaggaaaaataaatcagctgctagtgaactactcagagacagatggataagctcggtgaggaacaaaattacaactacagagattgtggagttcgtctcgctctggactagaatccaggatgtgcacctactgccaggagttcccgacacaattacttggaagtggaccccagatggcgtttttgttagattctatggtgcctacagagggcaccttttgggatccttcagacaccttaaggttgacctcatttggagagcccgcacggaactcaaatacaagatcttcgcatggattctacttcaaaataaaatcctcatagcaggcaatctcgctgctcgaggttggcctcaccaacaggcgtgcaccctttggtctggcccgctggaaacaggactccacctatgtttgcactgcccgtttgcccaagaggtttggaatcaggt

SEQ ID NO: 163397 - DNA, 521 bp, Zea Mays
cccccctacgacatacctccatatggcgtgccaccgacgaccccggctccaccccagctcccgcctccgggtacccccactgcgactccctagtccccgcttgctggaggctaggaccccgcctccctcggcgctgcctacagcaccatggcgttggccccaccctcacctgactaggtcatcgattctggtgcctgctaccacaccacccccaatacaggcatgctaactcgctcctacccccctcattcctctcatcccacctcgatcgtcgttggaaacggttgccggtcacctcagtaggtgcctcggttctccctaggccgttctatcaacgacgcactggtggccccacatatcacccataatctcctgtctgtgcgtcggttcgccatcgacaattcatgtttcattgagtttgacccctctggtttttctgtgaaggatctggccaccaggaccccttgtaggatctaggacaccggctagagggggataaatagacggttttgactaaaatc

SEQ ID NO: 163398 - DNA, 449 bp, Zea Mays
gtagtggtggcgtaagatatttgattgaggtgtgcgggtatatgccttaatatggttatactcgcgacgaggaaagatgtatgtattgtgtaacacgatgtttaggttgctattgtataatcgtgtgaaggatgcgcatgatggtcatgtgactaaagggtggtgtagtggcgaagcgagaaggaagttgagtttttcgaacggctagtggatagtgtctgtcggtgttgtcataatttttgttgtaggcaatgtgatgcttgctttgtcaaatattgcattccattcccattggataaataaatgtcttgttgatcgattagaggtcttatatgagcgttatcgcagcccaataattattggaagcgagtagcgttcataactcggtccttgttaaaattgaagaacgatccgataacatatgcacataagtgctttaggtccttcag

SEQ ID NO: 163399 - DNA, 1117 bp, Zea Mays
ggctccattagtagttgttcagtctgccagggttgttctgtcattcttgctgatgaggtcttttcagctaatctcgtggtgatttccctagggtcatttgatgttatcttgggtatggattggttaactctgtatcgcgcagttatatcctatttttggaagacagtgttattgcaggcgccgtcgggtagggaggtggtattcttgggaaggtctccaaagttcactctatccttgtagtcccaattacttccagattgccagtcaaggaagtcgggaatctttttctccatggtggtggagagtgaagctaccttgcgggtgtaggacatctgtgtggtgtgtgattatgccgacgtgtttccagcggagcttccaggcattccaccggagcgcgatgcggcttttgaaatcaaactgatttcgggtgcgcagcctattcataaggccccgtatcggatggctccaaaggagcaggttgaattgaagcggcgaggggtgcccaggtgttctctaaaattgatttgaactctggttatcatcagttgaggattcacgaggaggatattgagaagacaacttttagcaccaggtatgggcattttgagtttatcgtcatgtcttttggcttaactattgcccctactagttttatggaagcaatgaataggatgttgcatgagttcttggatgactttgtggttgtgtttctggatgatattctgatttactcgaaaatggaggaagagcatgaacgacatctctgccttgttctgggtgctctaagaagaatcaattctatggcaaattgaagaagtgtgccttttggttgtctgaagttgctttcctgggtcatgtgattaatcagcatggcattgcagttgaccccaagaatgtcactgctgtggtggagtggaagagaccctctagtgtctcagaaatccgaagtttcttggggcttgccggatattatcggcatttcttgccaaatttttccagcattactaagccattgactagactcttgaagaagggtgttcttttcgtctggtccgatgattgtgaggtcagttgtcaggaattgaagaacaagttggtgaatgcccctatcttagcc

SEQ ID NO: 163400 - DNA, 941 bp, Zea Mays
tatggagcgagattagccgtccgatcaacaccggacgcctcggattagatcctggctgcagtgaatcattatgcagtcgcaaccgttggatcaaggatcgacggccacagtcttagcgcgcgggactctattggctgggtcggcccagatctcatccacagatcagccacagaacggctcagatctcatccacatgaaacggtatgcgttgttctaatccaactgtccatacttaatctaacggacccgagttcttcatctacttccagtcggatcacggcggcaccgccccacggcgtggtgcccaacgaggtcgcccggccacagcgatgcccctcttctactacggacacacactactcgattcgaacaacaagatgaatgaggtgaggggatattcacctcggattatggcggtagcggtcctggccacgcggaggtgaaatagcgcggcggagctcgatctacggcgagcaattcccgtcgattcggtgatgatctccccgatccgagtgtgcgcaaggtttccccacggtttggcgaatgccccgtccgagccacccaacaccagaacgacgacacggcccctggcgacggtgatctcctccccgagctggtggcggcgatggttgcgatggggttagccgacgtgggcatgagtgcgcgagagaagaggggacttggtcgcttgagctatagttttatagaactaggtgtcgaggggcaacgtccgggcgaagtgatggggagcaactcgatttccccagcggcaatccgccataggcggcgaggtgggtgagtgcggggctgtcagcacgggcccacccgttagtggaaagagaggtcgatgcgcgcgagtcaaacgtgtctggcgaaggggacccacatgtcggcgcggatgggcagttgagctgtgcgcgctggacagaatgaccggtgga

SEQ ID NO: 163401 - DNA, 566 bp, Zea Mays
acttgtcggaaacggaagtttgaaagacgaggatctccagcaccgacataggtgcaacaaatgacatcagcactctgcagtatctctctttcagtggcacgctttagtgccttgtacttcttctcatcactactggacaattcacctgtaatagtagaatatgcttgtcggaatactcactcaataatctttgcacatcacatccctcgacaatgcttgattgtggcataatggtatcacaatagttaaacatggattaccttgttcatctttcagttgctataacttgtgaaattcactcttttcagaggtatcaaggtgcctaacctgcaagagttaacataagcatcagtgacattcatagcaagattaatttccacaaaagcaacaataggatgtacctgataatgaagtgtgagatgctgaacaggagacgaaatagcttctctagattttgcacacagcctaacaacctgtagcctaacgtcctgtcaaagtaaacccatagtccacattaactcatgatctgaatattccatgttcttgagaactaaaccctgcaaaac

SEQ ID NO: 163402 - DNA, 320 bp, Zea Mays
aattatttttatactagaaaagcattttctgtattaatttattcaatttcctatgtctctggactgcgcgcattattattataaagtgcaggggcctcggcgcaagaaacccgagacacaggctgacagcaggatggacagcgggttgattccttaaaactacagggtctcttttgtgaatttacaacggtgaaggggtatcatccaccatgggccacacgatcaaacatcagcggctaggattagagcaacgcggttatgaatcggtatgaagccggatccatccgattccaatcctgcggtctagatttagcgccatc

SEQ ID NO: 163403 - DNA, 555 bp, Zea Mays
tgaattgcacagtggaattacaactttgattggtggaattgctcgtgttactcattgtgaatatggtgcaaaaattgaatggatttggatgattattttatgtcaaatcgatgattagacggatggggcggctagggttctagaaatcgcccatggacggtcgcagaccgtccgccaggatggcacggacagtccggccccctagcgcggacagtccggtccctgacagaaacttacacttcctttctctatgttgtgacatcatcaactatcaaccagtggatattacccatatatattgcagtggtctgggtggtcttaagaagcttgcaggtcgttttaagtcaaagtgtcatcgtgcagatgatgcagattataatccagctatagacttagaggcccaatcatcagctaggggcaacatttctatggacaaagaggatgctccacacgctcatccagattatccaattgatgtcacaagatggacctatcccaagagaagattctctatggttgagtactgctctaggaggacagttaatcagtatgatc

SEQ ID NO: 163404 - DNA, 499 bp, Zea Mays
ttcgataggggatattcttcacaacaaggaagccattggccgaatagccaagtgggcctgtgaactgggatctcatgacatcgaatttcgatccttttcagtgggagatctcgtcctccgccgaattctaacgggggagggacaacacaagttgtcaccctcatgggaaggaccattcatagtagcagaagtcactcggccgggatcatatcgtctcactcaaatggacggcatagaaattaggaactcctggaatatagaacacctcaggaagttttacccctagctgtatttcaaaagctatcgggacgataatgtactctgtaaaatgggaaatatgtcatcaataaaaaagggcttcaagaatactcagtttgttcatgattgaccggcattcttatttaactcggggtgaccactatgccctgctaacgaagcaatcagcttaagtcggcaacgacttaagacagtgcaacatgctcgcgcttacttaactcag

SEQ ID NO: 163405 - DNA, 728 bp, Zea Mays
ctgatgaatggctttgggtggtggagcaaaagtttgggttgatccagtgtaccgaagtgcaaaaacctcagttcgcagctcagttacttcgtggacctgccagcacttggtgggcaaactttgtggttgtacaaccagcaggacatcaaattacttaggctgaatttaaggaagcttttagagcacattatattccagatggagtcctgcaaatgaaactggaggaatttttaaggcttaagcaaggtcctgacacggtgatgcaatatcttgggaagtttaatcacttgtcccggtatgttgttgatcatttgaacactgatggtaaaaagcgagattgtttcatgcggggtttgagtttcaagctgcagaagaaaatggctacctgttatgacttgacatttaatagagcagtcagtgtggcaattgcagtagaagataaggggcgggtacatcaaaatgctaaaaggatgtggaaaggctctggagctggatcttcccaggacccatcaaagcgtcaaaaggtagtaatcagaacaactggttctcccaacattccctaccactcagccgcttatcctgctaagactcctatctacatccgtcccacaaacatgcaacgccaatcactacctacaaataaccaagctccctgtttgcctgctcccactggcaccaaatatccttgctacaactgtggaaaagcagggcatttcattaaagactgc

SEQ ID NO: 163406 - DNA, 756 bp, Zea Mays
tgcttcgaggcctcagcctgggacgactgagccgcctccatggccacaaccagacccgcggcaagggtcccggccttggcagtagcttcggctagttgcccggccaaggtctcggcttgggaagagacctccacggcctgatcctagagttggtcccactcgtcggtgaccctgtcgagctcctccttcagctgctgcaccctcacggtcaagggagccacttctgcccatgtcgaggcagcgtccgccctcagctccgcgcagagcgtccgaaggtccgccgcctcggtgctctgctgagcgaggcgctcgttggcctaggcaagcaaacccttctagtgccgcagcgactcccagaggccgctctcacggtgaagaaacatggacttagccgtgctcttcgctacgagctcctgaaaaaggggaaaatgtcaccaacacaccctcaatcacttgacagcgcaggacaaggaccaggagcccttaccttggaaattgcggccatgttctgggtgagggtgtgcgtcgccgtcaggagcaacttctccaccgcctggccaaggtcattgaagacctgccacagccccatctcctcgtcgtcgtcgagggtgaacgcaggctccgaggcggcgggagctcaccacataagccgcgggcctccccactcgttggggttacggtgcgtggggacgatggtgctcctcccctcgccgagctggggctcggcgcgctccacggttggggcctcgggttgct

SEQ ID NO: 163407 - DNA, 451 bp, Zea Mays
gattgctgttctgagcttttggtgatactatttgtgtaacggctcgtgtctctattacggtttggactaggaccagcacaacaccattgtagaatgtttattcaacttgttgtggctaacgtggtactagctattccttggaactattgaaattgcagctacctataaatccacaaaaatttctacaacaccaccaggttgtgctagctgccaccgttgttgttgttcttgctgtttgccggcacctcctgtattgcatggtgagaatttgtaagaacttgcttaacaagtttgagaatgagagattacaacaatgattcctagtagtttataggatcaaatatatttttattgttttcttgtctttactaaacatggcaggtgatatggagatttttgagccaactgaacattatattcaaggcatcattcgacacttgccttcatatac

SEQ ID NO: 163408 - DNA, 371 bp, Zea Mays
gcacaagtcccctacgggcacggccggatcagcgaaggcacacagcctcatcatacaaattatagttacatacgtacagcgagggcaccacacatcacattggttcaactttcgggatgatacccatctccctatagttaaacagcattatcctcagctcctcaccctcaaaaagacttcacaactccccctcacctacgctcaccccagccggcgaggataacaattcccgcttgccagccctgtccacacgaagacgaccaccctccacctcactcaccctacgcttcgccaccgtccttcgccgcctacgcccagcactcggaccgagaacttcagcatccatcacatgcggagaagtctccaccgca

SEQ ID NO: 163409 - DNA, 383 bp, Zea Mays
tgcccataccaaaaggacatgcgccacacccttcggaactgcagagacttcaagcattccatggggaacgaccgacccttccaacctctgccgcctcccccaccacgaggaggacctggagaacctcgacaaccccaatagcaggagggggtggaggtggagccttcccacgcgttaatggagaagtcaacgtcatcttcggtggacacgggtcgcaagaaagcaagaggcaacaaaagctcaacgaccgtcagatactggtggcagccactggtcctcccgccccatatcgatggtccgaacacccgatcaccttcacccgggcagatcagtggctcaacttcgaccacccgggcaaatactcgctcctcgtcgatctggtg

SEQ ID NO: 163410 - DNA, 466 bp, Zea Mays
tctgaaactgtgaggcatctgacagtccaacttcgggcgcctttttctgtggtttttgtgtagcgccaagtcctattcccttaaacaaggttgtaccctgatagaccctctacaactttgatattatggtccagaaccaaagccccatggtccggacgggaagaagctccaaaattgatccaagcataaaatttcagaaccagaattcgcactaagtctgaaatttcagatttgaggataggacctttgggctaagtttttccaccagttttatacagcattagtggcatgacccttaattaaatctgcacaccaaagtatgggcttccactttggtacagcactcatagcccagaactacatggatcagcccttaaggagtatcccaaatctgcttcagactgaaaaatcagcaggactgaatttttatctaagtctgattttccaaactgaacactgcatcttt

SEQ ID NO: 163411 - DNA, 528 bp, Zea Mays
agctatattcttacatacaaggatcaacaacatctcatttttcaaggcacatgaaaatttgtgatgggtatttgaagcatgtggcacagaagttggatcaatctcttctaaactttgctccatcaacggcaggtgaatctggatctggcctccctcctatcacttctcctaaagattataatcatgagaaagttaaaaaattaattgctaagatgataatagttcatgagtatccatttaggatggtcgagcatacttggtttaacattgtcatgagatatttgaatccttcatatgagttcattggtaggaagaccataagagttgaatgtttaaaggtgtatgagtctaaaaaagattctctggcaaaggtccttaaatgtgtggagtacatttccctaaccactgatttatggacatcaaatcaaactttatcatatatgtgtttggttgcacactacatagatagtgattggaaaatgcagtgtcgggtgctaaatttttttgagttagaccccctcacaaagg

SEQ ID NO: 163412 - DNA, 334 bp, Zea Mays
tgaaaaaatagagaaaacagaaaaaggggaaagcattcctactgttgggccaaaactagcccacctcggcccaactactccacttctaccatgtgtggcctgctctctcgcgcccactcacgcgagtggccgacgggtggaccccactgctcagcctcacctaccacccgctcagcgctgccctctttccccttcttctcttgcagacaatccgggcccacccctccagccgctccccacgccgcgcgattcctgggagcttgacgcccgcgccgctcgtccgtgtgtcacgtgggacccaccggtcaaaccgcgcaaccgaacccgtttcctt

SEQ ID NO: 163413 - DNA, 603 bp, Zea Mays
ccgtggtcgtggcattggcgccgctagaatcacggtgagtaaccctgcaacaacgtcgcacttacctccgcctcgagtagcttgttcgggagagatgcttcgagctcaggatcggggttcagctaggaccggtgatgccgccaccgctgggtgtcgtcgggattcacctttgaggatgaggaagacacggctggcacctttgatccacctttgtgcggttaggattggatgaggggtattacctcgggggtgccgcatgtgagccgttagatccttagtgtgcgaccaggattagagtgagcgtacccctttttagttgttggagatctcagccgctcatctaaaaaaacaagggctcccgttgggtctgggtgtgggagagtttgaaccgtggatctatgatcagacgggtgggattgagtcatcgcgtttatgtgctcggattgagtgtggaccgtctgatctggatccaaggtttcacatagcataccggttcaggcatggacgaatctatcctgcactatcgatctcgcgtccaacgatgcagatcaaccgatcccccttcgccttggcatttatgctaaagagaccctacgattttta

SEQ ID NO: 163414 - DNA, 363 bp, Zea Mays
ggccttgagatattccgagatgaccaggggcttcggcagacggttcaacccaagacatatcaggaccatacacaatccaaatcaaaacaaagacaaaaacaatcacactcagggacaaccaagtcatcctcaaaccacagaaacctagcaaaataccttcatatcactgtccctaagaggtgcaagaagaggaaggagttttggaggaagattcaactctcaacccaggaaaatgttttgccttttctctggagaggacaaggggcatacaacaagaacctgtcaagtgacaatccagaaacagaaggaaatcactcaagctgaagcacgtcaaaaatcaatcaaaggaggtcctacccatcg

SEQ ID NO: 163415 - DNA, 835 bp, Zea Mays
gataaaactcgataacactcaccgagcaacctgaaaatttgataccacttgatagaactggagtgcccaatcttttggtgaggtggataatttcgatttggtggaggaggtgactctctcgatccgactatgaacgaacaagtcgtagcgccttagcaatcgcaaaaccaactccaaatggttattgaccttgctagtggcaaaatcaacctgaacatgaagttctattcctgcgagcaatcgaagaaacaagcaagaagaagatgtaggtaaaactgaatatcaatcactcacgagttggagttcactaggctgtccataggtggccattgagcacaactacaatacaggaagtctgcacgatggctaaaactatcaaagaaaacccaactctaggagggggcacagcccctggttaaatagaaaagaggaggtgggcgcctagcctccccacaaggcagaaaattaggcacccaatcagtcaatcaatctcctgcccacaaggcagggaatatgcacccaatcagccatggctcctccttgatccccattccttatttaggtggcacaacaccttcttgattatttctttccaaactaaaagatagataggtggtgcagcacctagactttattctgggcagattcatcatgagaatagatggtgcatgcactttaggaaacttctggcccttcatccttcagaatcatcacgaagtttaattcacgtgcacgagctcgagtgagtggtcctggtggcgcctgtgctggttcagttggagtagccattcctttgttggggttgatgtcctcatcatcctccccttcttgaatc

SEQ ID NO: 163416 - DNA, 775 bp, Zea Mays
tacaactttgctgcagagcttggtatgagttatcatcagaaatcaagagaaaacttggcttcaaatttggctgtcaggttcatttaactgaactcctgatggtacagtgcccaccggatcagaccgccagcgcggctgtcttcaccatcgacgaccgatcttcgccgtgattcgtgccaccgccgtgtgattcacgtcgccgatgacccgataagaccgccaggtaaaagccaccccccctggggataactccggtgactcaccgtgactgcctttctgctttgcggctgtagccgataagctcaccgtcgaccgccgcctctcggtcgtgtgccgcgtggctcaactcttccaccgtgtcactgtgacccgctactgctgtcaaatcggcgccggtgagcttgccacggcgttagccacgaattctacacgccgccttcttcctcatctccggccgccagcacggctcggctaaattgatcgccaccgcccgctagctctataaattgacctcgcccgtagctgcgccatgtagttgtgaagctatagcaaccgctcccaccctcgatcgtccatcagcacgtccgaattgcgcattctccccaattcggttctaaaacaccgtgaactcaaccccgccgtggtcagcccaactccggttagctccttccctctgctcccttgtttaagcattcttatgcgtttgtgatgcttgccgagccactgaattaaactaagagccctctggtcgccgggaacacgaccatatagccgc

SEQ ID NO: 163417 - DNA, 468 bp, Zea Mays
cgcgagctcaaccaccaccgcggaatcctcgggaggccttgaccgtagataaaagctggttcgtcgtgtccttcatcctccactcgcgaacacatccaaactgtggcgaccaaaataatgaccagagtgtcgcggtgaggaagaagggaaggagagtgctgcgagcgtcggcttgggattggccgggggtttggcctcgtcggctgtctaccagagctgtaccagagcacgcgtggcgcgtacgttgcctcggtagggcgaattaaccgactggcgggctggaattcgtggtcggagcaaatcacacgtcccggcgtcgagaaccggttcctgcgcgaccctgttgaccggtaagcattccatctcgttcaagacttctaccgcgctcccttgtccttggctgtgtttgaattcgaattcaggtagaccgaatggccgggcaccgccgccgcttcaccattgtccgcg

SEQ ID NO: 163418 - DNA, 471 bp, Zea Mays
ttttgccctttggctcagctgcaatggccgaagcggcaacctttctctttttctcttgccctcgtagcgggtaatggtaatcagggtatacgaagccaatagcatcaaataccctgttcaatcttttcttgccccgaccctgaaagctgtggacaaagcattatcttcggccttggagtatgccccaagtagctcatcactggtagcttcgatacacttcagtcagtcgtcatctggctcatcaaacttctccctaaatctgaaggtatacttcagtcggaccagaccaccctcactagattcggcggtggtctccttcggcatatcctagctctccacaagtggccataccctgaaggctatatgctcttgaatcaaatcccttgtgccaatgaaggcacacacagtgctaaaagccctctgacatgcttcaacagtgccatcaatttccaccttcggccttcggaggcc

SEQ ID NO: 163419 - DNA, 721 bp, Zea Mays
ctgaacaaaacacaccataaaaaacttaagatagcctcgagcattgcataagaagattttctcacacggttcgaaaaaacactcgaacccttgccccactcagtggtaccgtagcacatgtaagaatgatcatgactggggccggaccttagacttgtactgtggcatacaaacgggggcacttttttaacctcaaactgaaaattcactcaacgggaagtcaaaatcaggacttgaggaatgctactcaagccatccaaccactcagctagatgccctactctgactaatcactgctaccagattaaaaggatatgaattagcttcaaaaagtttctgcaactgcaaggccactgctacagagcttccttcagaaagaaaaccacaaattatgttttctttacatgcgcagaagccagaatattagaacatgaaacagatacgcacagttcagaacaataactgcaataccagccaggcacgaagcggcttgccaattcctctacaactggccttagaggcagctctataaagtatgagaaaactattaagtgctgtccaaaaagttcatttggtgtacttggcaatatgtaatgagcaaatggtattatgagtcatctagtttcctaattgaataaatattaccctgaactttcgggactacaggtgatattgaaccttgaactcatttgaatagacaatttctagggcattacttttt

SEQ ID NO: 163420 - DNA, 756 bp, Zea Mays
cccgtcagccccctctgcttccctaacctctcgcccacgtcccacgccgtggacgcgcccacgaccgcgcattctctggccactttctcacgccctcgcccctttagaagcccgcacaccgctcgcccactgccccctctcgccctacgcacgtgacaagtcaagctccgccgctgctcaccagggaccgtccccattctgcgaccatcgttgcgcctgcgtcacgtccgttccctcggtaagctgcgccgcatcacccgcagctcgagacaccctttgatttgcccttttctcctctggtgtgcccggtccacgctcaccagagcacttcttgtgcagctggagagccgccgccgtcgacccgtgccctcgccgtgtcgtagcttccgttcgtgcgtttcggggactgccctcaaggtaaccgttctagccccgcccttattttcccctgtctcgcatttacctgccccgattgctcgctggagtattccctagcccgtagagaactcccctccgctgtctacccgcctcacccccttcacacaaaatcgaccccatcatagagtttgcacgaccctccccaatctctccagttacccggaccgacccctcgcgccctaggagacccagtctgcctcgcctctggcgatggcgccgccgtgcccgtggggagcgccgcccctggcttcccggtagagacaaaaccccctggcacgcatctagtctgcccaaatccaatcggacggttcgatttca

SEQ ID NO: 163421 - DNA, 912 bp, Zea Mays
tctagttgtgttccatctttgttcttttgttctacttctctatgaggttcaagagaatgacgtgacagcgacatcgtgggcctctgactggcacgtgtgctcctctttgggtgcacaccatcatcaagagatcccactatggtgtcatgggaagacaaagccaggtctccactctgaagctcgccatcgactatgactctaaagttgtgtcctctaccctgctcatccttcttcctcccttccccttctgtaatatagattttgggggattttctaagttagggttagggttgggataggagtttgggttcttgcattccaatccctctaacttctctttttctctagcctctgctttctgtgttcgtttatgagggctagggttagaggatctccccgagccaccctaagtctagatttagggttagggtttggggatctttatcttcgaggtatccaattcgatcttaatattctactactcttagctcttcctgagttggggtcggggttaggattggggatctttcctgaccacttcagcctcactgagtccttgaaatttcttctatttctcttttcgaacaatctgtggacttagggtctggggaaaaggacaatagcgacttcgataccattctgaatatgtaaatccttaggatctaattgcctttatgtaaatccttaggatataatttcctttcccttctctaatcgtccaatctcttagccatagatatattcgatttcgatcttgtatcatagagagaggaaggagaggaatagttgttcatgccttcgaggtcgagttatatagccatggcggtcgtcgtggtgtcaggagttagtgtgtctgtttcttgccctccttgtgatctaaaagggaaatgtgctatatgtcatttctagttt

SEQ ID NO: 163422 - DNA, 417 bp, Zea Mays
ggacgaagagagcgcatgcgaagaccatcgagaattccaaagactgagcatctagaatgcgaagaccatgtgatgtaacctactactaattgtaataagggacccgtgtatagtcggcccatgttacaggatcccacatgtaggctgctatacgggcagagttgttggtgtgtcagcccatgtttgtaattaattacgttgtaatgacctgccaaaaccccccaagggagaatattctgggggataacgtaggtaacagagggcataatcatctttgacaggacaggccaaccctaggttacctataaatacccccgtacaacaccattgtgggggacgggaaacaacactgttgccctaatactttgtgtaacttggcatcaaaccttttcctatctttccactatttgagcttga

SEQ ID NO: 163423 - DNA, 595 bp, Zea Mays
attgggaagggcacagaaacgagtatcaggggcacttggctgattgttaggagcgggggcagtagtgggacgaataaagacgggttgcttcaatggatatgaagctgggcgaggcgaggaatgattttgattagaaggtcggatcaccaacccggttctcttttcaagcccttgatttgacctttcacctccaaacccctttgattttccatgtcccacatttttggcttccactgccagtgttgtactgacagccttactgtaggtgaggtccaagcatgttgccattttccgctgaagcctgtcattgagccccctcataaaacaattctttttcttcaagtcagtatccacctggttaatggcatactgagagagatggttgaatttgttgagatactgcatcaccgtatctcctccttgctttaaccggataaactcttttagcttcatctggagtactccctctggaacataatgttctcggaatgccaacttgaattcttcccaggtaatcggatgtccaataggctgaattgcagaaaaatttgcccaccaggtactggcaggccctcttagctactgagctgcgaac

SEQ ID NO: 163424 - DNA, 449 bp, Zea Mays
cgtggaacgcgccaacggcaaaattttcacagccgtcaagaaaatgctcctcgacgacaaaaaaggcaagtggcccgacctgttacccgaagtggtctgggcgctgaacacgactgagtgcagggcgactaggttcaccccttttcgccttctatatggatcggaggctatgactccgcaagaaataaaacatgggtcaccgcgaacagtcgcgtcggccgtccccgacgtagacgagcctacttcgaaggacctcatcgacggagaccgcgtcttcgccctacaggctctaaacaaataccaagctcagacaaaagcatggcgcgaccacacagtcatcccgagggaattgaacgaaggagacctcgtactcgtccggacagctcggacagagtcccggggcaagttggagccaaaatgggagggccctttcatcgtcaagacgaagg

SEQ ID NO: 163425 - DNA, 572 bp, Zea Mays
gaccgatgccccatgaatgggcacagccacctcagcgccctcctaaggtgtctcctgggctgaaggggggcgggacgaggccctcgcggacatcccaatgccgcgcttcaccgccttggtggcagtaaagatcgacacgttggctcggcatttggagctaaggacaaaactgatagccagagaaaaaaagcttacacataagacattctcatatttcaacaacttacccggagacaagcacgacggaaggcctcggcctccggctctctggcccctgctgccccaccacagacataggtggggcagtggtcacctcttctgcaacccccgacgcagggaatgggggcggaacgatggtcggggccactatgggccccgcaacgactgcatgaggggggtgatgggcccctcctctatgttctccatagtggacagccgcttgggggtctcgccctccgcacccgcaggcaccacgccagcttcctcggggatggggctgcttccccctctacaacacgcgcctcttccatcgaggcagggacgggggcaggctcgactgacgcccacgcctc

SEQ ID NO: 163426 - DNA, 598 bp, Zea Mays
ttgtgcatatatatgggtttgtgtcatgttagttcagtctttgcgtgtgtgtttttgtcatctctcgttgcgagtgtcagttaccgtcgatgtttttgaccttaacttccgacggcattgggaagctataggtagttaagtaacttccgtttgtttttttagacatctaactatcatcggaggttagcatttattcgtttagcatcaaaatttagttaacttctaacgatttttgttaactttcaacatttttactgttgtttggctttttcttgtggtgcttcattgccaatttttagggacttgtaattattttctgattttacatggaactttattatcgtttttagaacttctaattattttccaattttaaagctattaatcgatagtgaaaggttataattaccagttcataagaaacaggcagtgataaattgacaatccagatttgtcccatagtagtacatgtgtgtagccttcaaggctgatttggtgacaagaaaatttgagcagattgaggaaaaaataaactaatttctctttcaacccccttcaattcagttgtcaccaaacaaactttgaaggctagtttggg

SEQ ID NO: 163427 - DNA, 898 bp, Zea Mays
atcccaggccgatagtgatacaaatacttccataattcgaaatgaggaagaattctgaggtaggcctcacacatgtgtacaaagatggaaatttgcaagatagaattgggattcaggtgagtcagattcagattgtagaaattaaggatgccgtgaaagaagggagaaatgggaaaagcaagaccgcggatgagaaaaggaacgtagacgacggactcatgggtatcttctgtcggaacagtgaccccagcagagctcttttggaggaagaactccgacatcaacaagggggaggagatctgattccgagacaatagacatgtggttacctgcaaacgacaactggctgttagggtcgatgggaggaatgactaccgcagcagaactctggttcttccgcttgggtgccattgcaatctcgtcggcgggtcgaacaagggcgaaatcagaggaaaacagaatggttcaaggcggaaacgtgaagttagggctcagaactcaagagcgcacgacgacatgagtataaatggggttttcccgggttgggcaccgtttctaaaaagtgccaagtcatcactcgagaaaacgagatttcagacatggctcggtcattacctctaaaacgctgacaacatcaaacaccactcggccgttacctctaaaacaccgacagtatctgccatagctcggttgttatctctaaaacgtcgatagagtcaaataccactcggccgttacctctaaaacgtcgacattacttgccataactcagctgttatccccaaaacgcaaacagcatcaagcactactcggccgttacctctaaaatgccgacagtgcttgccataactcagctgttatccccaaaacgcaaacagcgtcaagcaccactcgactg

SEQ ID NO: 163428 - DNA, 676 bp, Zea Mays
ctttcctagggcacgtgattaatcagcagggtattgcggttgatcccaggaatgttgcggctgtggtggagtggaagagaccttctagtgtctctgaaatctggagtttcttggggcttgctgggtattatcgacgcttcgtaccaaatttttccagcattgctaagcctttgactaggctcttggagaagggtgttcccttcgtctggtccggcgattgtgaggtcagttatcagtcattgaagagcaagttggtggacgcccctatcctagctttgcctgagagcggtaagtgtttcacagtttatacggatgcttcacgtattggtcttggctgtgtgctgatgcaggaaggcagagtgattgcttatggctcaaggcagttgaggaagcatgaggggaattacccaactcatgatctggaattggccgcggttgtttttgctcttaagtcatggaggtattacctttatggcgagacttgtgacattttcaccgatcacaaaagtctcaagtatatttttactcagaaggagctgaatttgaggcagcgtcggtggctggaattgattaaagattatgatttgtccattcattatcacccagggaaggctaatgtggtggctgatgcccttagcaggtccggggttccaaaggtggccttgtcgttgatcgc

SEQ ID NO: 163429 - DNA, 575 bp, Zea Mays
tcttcttgcttaggcagtggggagagtggttggtggtgttggttcgcatgctatggtggagggggtggcagggctaatctctcctagtgttgaaggcgtcattgctgtgggaaagctagattgtggttttgttggtgctgggggtaatttgggtgttcgttttagcagtggtggtggtatggatgcggttggtacgtatgagcgatggctcattggttgtctgctggagcggctctggccattcggtccttggttgctttagtcttcgggcaatatctagttgggtgctctaagtctttgccattaaagacatagcaaaatcttcttggctactgagggcctcggcctctggtctcgtttccgttgcggccttgttgcggagggtagttttgacatcgggggtggacctctcctggttactgctggtttgcaatgtttgggacttgtagttgaccacgctcttgatgggttgggtcttgctgtggaggcctggtccatgtcatgctggtctctagagtttcttttggcttccgctgtgactcgacttttctatggtggagttctcctgactgggc

SEQ ID NO: 163430 - DNA, 1425 bp, Zea Mays
ctcaaaacaaaaagccaaagttgaaaatcttttaataaacttaaagatttctaatctaggatgagtgaaatattcttctctctctcataaattaggcatcgatattattcaaataataaaataaataatatcatcacatcatgcagggattattttgtttgtcaaactcaggattgaatttgtttgaatattggaattgaaacttgaaataaaatgaaatagggaaagaaataagaaaacataaaaaaaaagaaaaccactcatcttgggccgatttcacctgtcttggcccacttacgcccgcataccgcgtcactgtcctacggggctcgctccatcgttcgatcgctcgcacattagatggccgctcctggtgagcacacacgatgacatctgggtcccactagccatggccttcatcccgcgtcggactccttgcggcgcgcaacagatgccggtgaacacggggcggcttggttggttgatcctcaccctgggaatataaaacccagctccttgagactctctaggccgccctccatcgttgaccagtgcgtagtttccgtggaatccgagcaggcagcgaggatcgagaggaagaggaagagagattgccgtcatagtgaccgccgccggggattgccatccacgcggtcggtctgcggtcggagagggccgcgaacgtcgcaggcatcggctccggcatcacggaccctaattcgacgagggcagcctcggatcatggggattccttaccggtgcgggtcttgccgcagtgccacaacctcgactggaatcgagcctcggtgcgcacgattcacggtgagatggccgtgagagtgtgagcaggaatggagccaccatgtgggctggggggttgaccttgaagccgctgccatcgttgttcgcctcgccttgctgtggtgcgttcggtggggatgccgccgtcgctgggccctggggggcatcgagggagattgtcggactccatgaggtatgggcgtgtggtttgcaggcgattggaagcaccaggggtattggatttcgtcgccggggcctcttcacccccgcggaaccacagtgcgccatcggggctcggcgacgggagctggaagatgagcggtggccgttcatcagaaaatgagcgctcgggattagatcctgggcgtaatggctcatcgtccaatctgggccgttgatcccctgatggacggattctggtgcatatcaaatatccaccacagatcgtgggatcgatggctctgttagttggtcggtttagatctaatctgagctgtcgaatggcgatccaacggtgccaatctgctgataccccttcgtcgtgcgttatttgcataagagaccctatggaattttgaaaccaacccgccatccaaatcagtggtaagatcattacagaaaagt

SEQ ID NO: 163431 - DNA, 437 bp, Zea Mays
agctgttggttatggatcagggtaggcgtcagtggtggcggtggtggcaactgagcccaggaggcttgggagtgactcgccgaagcaacggaagtcgtgggctgttgattgcccacagactccgagatatatggagaatagcatgaagcagtatgcaagacttgcttcgataggttcttccgtgcttcaacttcagcgatttctttctgcttttggatcgtgacttggcacgtccttgtcgtgtgtcccttatcttccccatagaataggcagaacagtctcctgggctgattaccatatcttcctctgaagcttcttccccctctgcctcttggagctagtggcctgaaggagctttgatgtgcccctgatgattgggaactatgatgatgaccttgagtatgatttcccctgtcatcgcttgagctcgggttatg

SEQ ID NO: 163432 - DNA, 604 bp, Zea Mays
ggcgcacgggtgtggtcgaccccgccggcatggtggtgccaatcgccggcgggcttgggggaggtgggtgcgtgctgtcgaggtcgtcgcggcgggcatccgaggtacagcgtgaacccccagcggtagagtccagactggtcccatgttgacgtcgaggcacggaccgtgcgcgcctcccagggcgtcggcgaggcatccgttctcggctgcgaccgtgagcagccgtggccattccactgttaggggaggcgtcatggcggggacgaggtgacgggctcatgctctgtcccctgcctctgaattggcgatgtcgctgctctcggccgcctccatttgttgcagagccatctatgtacacaagctggcgtggcgcgacgtggtcggggaagacgtcaaggctgacatgctggctcccattctgctgcagcaagctgtcatccacagagcgaggaaggtgctggcggccgccggtggtcgatcttctgtcgtcatggcgatccctgcgtggctctgagcggtctcgctccctatgaggagcgcgtgaaaggctcctgaagagacgggagctccatgagtcctctttacggctgcggcggccgcg

SEQ ID NO: 163433 - DNA, 1161 bp, Zea Mays
ggtcagtgagaagaacggtcttatctttgcaacttatgatgcccttatgtttggttaaccaatccattcctaagatcacatcaatcccttgggatggcaagacaactaagtctgccaagaacactaccccacttaaaagaatcccgacttgggagcatttgagctggcatagaaggtctgaccctggggttcgggtgaccaagggaatttctaggtgtgcagtgggaatgccatgcttttccacaaaactagtggctataaaagaatgagatgctcctgaatcaaaaagtacagtagcgggagtaaattcaactaggaactcaccgagcactactcctggggcttgctgagcctcttgagcgtcgacgtggtttactcatgcccttccatgatactggctcttgctttgctgactattggaggaggatgccttggaggcacttgctggggcattcttggggccattcactgaattggagtaagtaggcacagatgccttcaagtgggggcaattattcttgtagtgactggggtctccgtagtgccaacaggcattagctggaggttggttgcttgcaactgagggggtttgaaaggagctttgaccttgttgactgaaacatgatggagtgggtccagctggcttgttgaagcttggtcccttgggtggaaacccaaaggatcgaattctctggtgcctgtcctgctgctgagctcggaggacctggaactttctcttgaggtgacccttttcttcttcccttgccctttccacttgtatggccttgtttcagaggtgcgagaagctgaggaaatcttggctagcaaggatagtcttgagttctggtcttagccctttcaagaaacgggccatcttcttggcttctgtgctgacatcgtcaggtgcataacgagccaattctgtgaatttgtgcacatactcactgacagatcttccaccttgagttaattcccgaaattcatcttccttgagctgaacgatcccttggggcacatgatgttctcggaaggcggtttcaaattctgcccaggtagcatctctgatagcaacgctgaaggtatcccaccaggatagggccatcccggaaagttgatgagcagccagatgaacacgctggttctcagggcatccgatggctt

SEQ ID NO: 163434 - DNA, 697 bp, Zea Mays
gcataacaatgttagcacaatcatggtttgtgcatttgtaagagtctccgtgagtgacagctgtgcaggcgcattttcggcacgagttataccaccacttgctgtcaattttccttatagtgactgtaaccaagaattcctttccctgcatggaaaataagaaaaagaggcaatctcaaataaatgtgttatgctgaaacctaaatggttgtaactccagtctgcctctaatagaaaactgcgggttcaatggcatttttggggagataaatgtttgtagcggtaagaatccaagtgggcaaataatttgcatagctgcttgaattgtaagttagagttgccttacttaaattgaaaattcttgggttataagcaattgaagagttggtgcattgctgcctttttccatctaagtgtcgtaggacggacatgattattgctcgtgtgaccaacttcttttgtacggcacataatttgcactggaccattgttttttagttggtgactggagatgtcagtcgttaattgatcgtatgatgtcaatccctcatgctttagatttattagatatctgctcagaaggaaaggaggagtaggcaacggccgcaagagcggatgaagattgagaagatcaggcctttgccgcctgcagattcatcaattgttgataccagtgatagtgaaccagaagtcactc

SEQ ID NO: 163435 - DNA, 1107 bp, Zea Mays
aagcaatctaatactcaacaccacacatgatgtatggtgttacacgttcacgtggcccgaacctatataaatcttgtgtttcgacatgcatcgcacatagcattgagcagtgatcgacgttgacgtcctcctaaaaagcactacgtgagctaccccatagtgcgcagtcgagactaaacaccaacaacggttaccgcccctggacccttcgcctttgagttgtgcgatagtgggccactcgaccgaggcgatgtcaatggcggcggacgtcgttgaggtccagcttccatatgcaccaggtccctaccctcctgctgcacagagggtggtggtctctttgctacttgctctagaggagggctccgaggatcttcccgccttatccttgaagggactggagtcgaggagatggaggcagaggagagaaggtttgttgagggggctccatccgggcaactaagagcctagagatcatcgagggctctaacacctctgccatggaagtagcggtgattgtgcgtgtgtcgatcacgcaagagttgctccctttcgatgtggtaagtctcatctcctttttgccccttagtgtttctaggattcctcacctgagtatcactcctagttgtagcgtctcctaacccagtcgtcgacccggagtgacgcactgcttgcagcgcagtaggaggtggagcacttgctcactgaagctgccagttcggaggagcgggagctgttcgtgctcactcttaggctgagaagccttgggcggaggtgacgcgcctacgcacatagcgaaatgaggcgcggggtgacgtggatcgccttcggggggagaggtcatgcttttagggagctctgtcggagttgacccgacataccgatgacaccgagttggcactaaactcagctaacgctcacctagaggggttggatgcagatctctcgcgagaacgtgaggcatccagaggtacacccttttgggaacggggttgttcttgattggtctatgtctaaggttacttacatttcttcttttgcagagctctaaaagatgtcctctgtggctcgggacacccaaaatgtggtagacgatgagaagcacaagct

SEQ ID NO: 163436 - DNA, 359 bp, Zea Mays
gcggacactgaggtttgctgggctcggtcccggagacacgatgcgttagaattcaattagcaggcatggcaagcattaagaactcaccaggagtcaggaacagtagtgggatggcttgaacaaagaatagagaggtcgccacatcgagatgccagacggcggagtattccggatagcaccagagggagtcagaacaaggcataattgaaagaatactagccctatcttacctggctacggagatgtctcccacgaccgagctgaagacggcgaggggaagaagatactctggagtttctcaaagaaattggtcggttcgcgctagctctaaggtgcgtaaggggacctggaagcagtgc

SEQ ID NO: 163437 - DNA, 673 bp, Zea Mays
cttgaattaccaacagacggatttctgaggaagacgtgttgagctgagttgatttgatgctgagaggcaagatttcgaatgccagtgctcccttatcctattctgcctggaatcttcccccaaagagccccttttccaagtttgtttccaatcctcctgttcaagacgatagtccgggccatagagtgggaccctctccagaagatattgatgccttcattgctttgtaccgaaatctccctgaaggagaaaaacaaacccatctctagatgcaggcgactgctgatgaggctgaggtgaatgctgttctcagtatgctggcgggtgagttgtccgactctacccgtactgagtcggtgagtgctgcaactagacatggccttagcgaagatgaaggagctcacaatcctggaagcgtccgtcgcaaatgattgtgtcgaatgagccatgcagccgcgcctgccgaggggaagaaaagaaagaaaagacttcagtggtcatctggcttggaactgggtgctgagtctactgtcttagtcttcggcggtggcttggcgagcgccaacctcgaggatgatattgaaaattgtgatggtgccagagttggtggttgtgtgcttgatgaggatgaagaggaggaagaggaaattatccctttgattcgcaagaatag

SEQ ID NO: 163438 - DNA, 825 bp, Zea Mays
acgacatagagttttggaaatgggtaaggtgtagcgaaaagaaatgggaaaagagaggtaacgcccgaatttggcgagtgaaagagaaagaagaaaaaatcaactccaaaattcggggcattacatgtccaaatgaggagagattttggggagttcttctcatatacacattttgtggaggatgtctgcctttctgtgagattttgagctgtgcttcagggggagatgtttttgtcgggggagctgttgagcttttcagagcttttgctagttgtgttgagcctttgcctctttcttgaggaactagctttggtttcagcatttttctgttccttatgctctgatttggctttgattgttgactagtggtgttgagccccttttatgcctcttcttgatgactagccttttttgcttggtcgtgttgagtcgttgcccatttctttagggaccaagctttgctcactctggatgacatgttcttgtcttttatctggcttttggtcatttaagtgagtttcctttcttccttgttgttctaatttgtgtgtctgaatagtggtgttgacaatgcactcatcaaggggcagattgcgaacacaaggttgacttgtcccttgtggtctgggttgatgatgagtgattgtcaacatgtgtagtgctttggtgtgagttagtggactaaccagagtacgagcttgcgttgtgcaaccatgtatctcggcttgtggtgtgtagtatagggatggtgatcgacaatgaaggtaaaaatcatacaagttcgtgtcgataggataggagcagtgaaagtcaccttgagggggg

SEQ ID NO: 163439 - DNA, 445 bp, Zea Mays
aaaaactcatatctgtttagtagaagtccgaaagatatatgactaccttcatacaaggcctcacagctcctaaacagaggaaacccattcttgcgatgcttctttaatttggggaatttctgttgaatacaacatatatttagtacgaaggcatgttttggaatgatactactttatcaaaagagagagaataacttacacgtgcacacttctcccacaagtctggttcagctaatatcatccccatagtctcattccatcctataccactctcattctttgcgttgcttatggccttgtagcttgctttcaaatctttctccttgtcttgaagttgttgctttgtgaaatgtgctgaggggaatttctcattgaacttacaagtgatgcttcaccaaccatctgagttccaaccattctgtcccttaaatctggcatcaacctt

SEQ ID NO: 163440 - DNA, 564 bp, Zea Mays
ggccaaatgtcgaaaagcaaattctacacaaaggggcgccacaaccacacactcgcaaaaccatggcatttcacagcaatacaatgcaagctcatccttgccctagcacacagcttgttgcaatttctcttcgcctcatacttatcatatcaatagggttacacttttttagaaaccacatcacttaatatacaaggtatatatgcgtgtaacatctgataggtttaataataaatctctttctctatccctaaatccgtttcggtggcttggacgctagagcgtgaggctttgaccgacacggtgaggcctagattcgcgtcgatgacgtagagtgccacaatcctctctttttcctcctctctacacacctcacgcgacacatccgacgacaacgggctaagctcaaaggtgagcgtatctcctcttctcgacctctttcgtgatagacccgatgcgctactagcaacgacgaatttggggcgatggtttgatggttgtcctcacaaaacacgtgaagaaaccacgctttccacccaacgcgtatctcgttgatttcttcat

SEQ ID NO: 163441 - DNA, 638 bp, Zea Mays
ttaatacacaaagtatatatatagttataactaaggatactatatttacatacaagggatatttattagaggcttgtaaataactagtctacaacactaaaaaaataaacagcatactttgagataataatatacataaatgtaaagtgggggaaaatacaaaattgattgggcaccaaaattaacacatgaataaacagaaatatatacatagtacctcagattttctaggagtcttctgtttaggagagctttttttgtaatgatattagactttggactgcttttcacactcggaacttgtggggaagggacttttatcttctttgcactgtttttttctgaaggggaaggtgaggctgatcagaattggcgctttaaagatggagcatccatgaaatcgtcatcggacagtgtggatggagcagaaggaggatttcttttaacacgacaagctagggcctttctacgaaaacgatgaactggagctggttgtggctcagtctgcttctggttatgtggattatcatcttgatgagctgaactgctagatcgagttcgtctggaaatgtcaactgaaaaaacctcctgacttgactcaatggttagtctttttggattagttggagggcgatcaa

SEQ ID NO: 163442 - DNA, 375 bp, Zea Mays
cggccctccagaggctcatcgacgacaagctggccgccctccaagctgcggagcaggaggctgcggcagctcgtgcgctcgtccgagccatcgctctgctcctggaggaagagcaggttgttgtcgcagccctagacgccaaggttgtggctgcggcacagcagatcccctcgtcgtccgcggctgcgcctcctcccccacccgtcggagatgagtttgtcgtcatcgccaacctgcatgcccaagcatgcggcgttcagaacatccgcaacatgatcggcattgttctggacccctcttcaatgaactacgcccgctggcgcgatcaggtgatgctcaccctcgagcgctacgaactcgctgcccatgtcctcc

SEQ ID NO: 163443 - DNA, 401 bp, Zea Mays
ctcacagacgagtggacggaacggtacaatttgcagaacgaaaaagcagcggcgatgatcaaacgatcatgacaggataaaaaggtaaagatgtcggtttttttttcgctttacaagggcgcagagcagcagcgtgttccattatattgcagccgggttcttaaccagtatatgtgactgccaagaaaatatggcagctagcgccgctctgtattctatatgccatgtcgttggtgctgtgtttggatgaatgctaaattcttcctaaaatgttctctgcgacattagaattacgtcatgaaattgtttggctaggttcgtagaactagaatccagagaattttggttaggttattagttagggagccccaacaatatatgttgtgcacagcttcctacta

SEQ ID NO: 163444 - DNA, 286 bp, Zea Mays
gagccgatggagcaagcttctactggcgcgttactgcaggacggcacgcaggtgccacgcgaggtttgtcttgctggtctctggaaccctaggaacggcggtgcggcactactatgattcacggtggggcacagggttccatgggggcacaacctcgatcttgggttgcgattcgaggaggggctgtggccttggcttttatagcctagcgaagatcatctcggatccggtagacacggtatgcggttgttctgttagcaaagtcaggagcccatagcgtattctg

SEQ ID NO: 163445 - DNA, 428 bp, Zea Mays
cttcggcacaacagtggtggccgaagcggcagtttttctcttctttccttgccttcgcagtgggtagtgataatcaaggtatatgaagccaattgcatcaaataccctgttcaatcttttcttgcctcgacccccgaaggctgcggacaaggcatcatcttcggccttggaatatgtcccaagcagctcgtcactggtagcttcaatgcatttcaaccagtcatcatttggcttgtcaaacttctctctaaatctgaaggtatatttcaatcgaactaggccaccttcattggattcagcagtagtctccttcagcatatctcagctccccacaagtggccacactctgtaggctatgtgctcttgaattatatctcttgtgccaatgaaggcgcaaacattgctaaaggccttctagcatgcttcga

SEQ ID NO: 163446 - DNA, 1561 bp, Zea Mays
aagccataataataatataataatagtaatcgatggggtctcacctcctcttgccgttcctcctgctactgtcctcaccatatgtgcaagctcaacagagaatcaccttgggctcctccttaacaacccaagggcctaacagcttttggctctccccttctggtgactttgcctttggcttccggtccatcgagggcaacacctcctcctacttgctcgctgtctggttcaacaagatcagcgacaagacagtggcatggtatgccaagaccgctgatccagatccagcgctggtacaagtttcatccggttcatgcctcgagctcacgtccagtggagcgctctcgctccaggaccctactggcaaagaggtatggaatccagaagttgtgagtgcaacctatgcttccatgctcgatactggaaacttcgtactggctgctgcagatggctcttccaagtgggggaccttcgataacccagcagacactattctgctcactcaggtgctcacccctgaaaccaagctccacagccggaccattgccacagactactccaatggacggttccaccttaacctgcaaaataatggtgttttcttctatgctactgctgtgcaatccgatcctcaacatgaatataattggtccatgcctgggaacgccacaaatttggtattcaatgcgactggcatgatatacatcaccttggataatggaacacaagtaaaaatcacatctgggaagacaagctccatagcggactactaccatcgtgccacacttgatccagatggcgttttccggcaatatatgtatccaaagaagttcagcaaccacctgtacactcaggcatggtcagttgtcgacttcaaagctccaaatatctatatcccaagaaggtcaatagcagagacacaggtcagcagtggaacatgcggtttcaacagttacagcaaggtggatgtcataaacaaccagactacctgcgtgtgcgtcccacagtacacatttaaaggtggaagtaaaggctgcacgcctgacttccagcaaccaagttgtgacttggatgaagcaggtgccacgaagcagtttcagttagtaacaatgagcaatgtggattggcctcaatgtgactatgaacagcatgacaacatacctaacaaccagtgccagcagctctgcctgacggattgtttatgtgctgtcgctgtgtttcgtgatagtgacaatacatgttggaagaagaagttgcctttaacaaataatgttgtaggggatagtgtgcagaggacagtttacatcaaggtaccaaaaaacaacagtcaacaacctgagcttcttgattccaacagatggaagaaagataagaagcactggatccttggaagttcattgtttctaggaagctctatcttgctgaacattgtcctgatctctgttatactcttcggtacttactgtactataaccataaatgaaagcccgtctgtgcagtcatcaaacaatctaggattgcccctgaaagccttcaattacactgagcttgagaaggcaac

SEQ ID NO: 163447 - DNA, 1626 bp, Zea Mays
ccaggcgctcgtgggtgggccgccgagcgcacttgggcctcccccgcccactcccaccggctgggccccattcacctggcccacggcaaacgcgtccacctggcctgctcccgttccggctgcaccctgggccgtccagcaggcctcgccgacccagcagcatgcggctcctggtccttttggcccatgggaccaacatgctttagcaggtgctttcaacaccatgacactcaccccgccaaccggtgaatggtacatggactccggcgccaccgctcatatggcttccacctccggtatcctaacttattgccatcccccttcctcttccactccttcttcaattattgtcggcgatgggacctccttgcccgttgtctccacgggatccacacatatgggtccgatccaccttaataatgtgcttgtctcaccatctattatcaaaaatcttgtctctgttcgtcaattcacaattgataataattgctctgttgaatttgaccccgctggtttttccgtgaaggatctcaggacacggagcgtgatcgccaggtgcaatagctcaggcgacctctatccactctccatcccgttgtcctccaccactaccccccaagtcttcctcaccagcgcctcttcacagctttggcatcaccgtcttggtcacatcagccacgacgcccttcgtcatttaactagttcatcctctatttcatgtaataaaggctctactgcccccgatatctgtcacgcatgtcaacttggtcgtcatgttcgccttcctttttccatttcccagtctcgtgctccacgtcactttgatctcgttcactgtgatctatggacttctccaatacccagtatttctggttacaaatactacctcgccatccttgacgactgctcccacttcctgtggacattccctctccgcctcaaatccgacacatttcccactattgctaattttttctcttttgttgccactcaatttggcaccaccataaaaagcttgcaatgtgataatggtcgtgagtttgacaactcccacacacgagctttcttcctctcccacggtgtccaccttcgtatgtcgtgtccctatacctcccagcagaatggtagagcagaacgtgtcctccgcactgttaacaacatcgtccgttccctactctttcaagctcaccttcctgctccttattgggttgaggctcttcacaccgccacatatcttctcaatctccaccccaccagcaccctaaattcctccactccccatcttgccctctttggtcgccccccatcttacgaccatctccgtgtctttggctgtaagtgctatcccaacatctctgccactgccgcccataaactcgctccacgctccaccatgtgtgtctttcttggttactcgtctgaacacaaaggctaccgttgtcttgatatctccaccaatcgtatcatcatctcccgccatgttgtgttcgacgaatcctcctttccgtttgccgagacccctcccagctcggctcttcccactaaccttgattttttggatttattttctgaacaggtcccggttccacccattggcgcattgccctcgtccactgctgggcagcg

SEQ ID NO: 163448 - DNA, 562 bp, Zea Mays
ggcaagtagaggaggcaccgtcgccagtgttcgaggtcgtcgccaaccatccatagaaggacaacaacaagcaccccatgagtctagcaaccgagaggtgtacgcgcgcggagtcctctagctcgccatgcccctcatggctggaggccctaatcgcatacgatcgacgcgatcaccccagtagggtggttttggtcaaattagtgtagctcttgagctccaccacttcaccacgagcacgacacacctttttcccctcgcctattacacctgttggcctcgccggcgatctcaccgccgcggagctcgccacccgccgtggaccggccatcccgagcgtccaccggccaaattgactccacctccgtgaccccctacctccacccgtgctttgccaccattccgtcaacacagaactagaccaccggcgaggaaccgccgccgggttcaccggcgatcggttctcaccgccgcggaccgccctcctcctcccccctgacgccgttaccccctcctctctctggcgtgtgggcccgcgcccacggcatcagccgcgccgtcc

SEQ ID NO: 163449 - DNA, 439 bp, Zea Mays
gaaggtttttaccttgtgatttctttcacttggtgtgtgagagctctgggtttgattgctcatcttctcttttcctacataacagtgtttttgtcacatgtaaatgttttttaatcccacacgtaggatgagcaagggataaaaatgggtcgacgtcccatctcttggcatgcgtgtgcaggcccctggtacggatccgagctctccggcattgccttgatgtcgtcgtctctggaggaagcgtgctggtagggctctgagctctccggcatcgtctcgacgtcgttgtcgtctctagaggaggcgactactgcgccagcatcgtcacctccttccctctgccgtctcaggtacattgtaaggtcctcaagaacctggtctgttaagagtcctctatgtttataaacaacctatagctggtctagaattttattggctc

SEQ ID NO: 163450 - DNA, 878 bp, Zea Mays
cggctaccctattgtcttcttcctctttcctgagcgcggtcagagagatggaggcgtgctgggcagaaacatcgtaagcatttgcctcgccctggtcccagcccactgtgatcattgcggtgtcgaagcgcccattggcgtgaatccgaccaaccctaacaaactagctcgggcaaggggacgaagtcgatccacggaacggttaacacacacggcggggaatattgctccggtgagcaattgctggtgccctaagctacaatccgaccctaacctcagtgcaccagataaccacgataatgagaattcaggggagaggagtcataccagttgaatagccgagaagatgctcggccacgttcgtgcggatccaccgcacctgccacactctgacgaggagggccgcaccgcgccggtccattactcacgctcggctcacactggtgacctccctccggtccccacaagggtgttaaacgattgcggcccgagatgaacggcgttgaactaccttcccctctcaatttgtcttggcggaggcgatggatatcactggcggcgctactagggttctagcggcgggagagggcttggaagttgggttctgcgaagaacggttacggcacggattttatgctgcgcacatcgggtctaggtgcgattcgatggccggagatcgcggcatggttgaacggcccgcgaccggtaatggtctaaggaagacggacctgacgaaatggacccacctggcattgtcacagcgagtccatggatttggagggtgactctgcacgaccaggcccatgcgctactggacggtgagtgacatggtgcggctggcctgtgggccctgaatgtccgggccgcacgcgtgagcg

SEQ ID NO: 163451 - DNA, 655 bp, Zea Mays
tgctgaccctagctgcatgttacacaggggcctggccattccgaaaattaaagtcagcgggcacatgaccatcgccatcagtttccccctcttcttctcatcggccttgatataaaacaattcacctttccagccggttggccatttggtgcggtagctgagaactggagcctttgtatccttgcgatatgcaaaattgtagcagccaaaattttcatgcagaccgtctgccctggccttcgtctggtagtgcaactcatgcactcggcagaatgcttcggcatctgggctcatcccttgtcttcggagggcccagatgaagacattaagcctaacaatggtgttaggggttagctgatgaagatatatttcaaaaaatttcaagacttcccctatcatctcattcagaggaagtcggagtcctgctctgaaaaaactcttaaaacccactacttcatcatccttcggtgctggggtggtctcttttccggcaaatcgggcaagtttcctttcagcttccccaaagtagcccagcttcatcatcatgggcatgtcagcttcagacacagtagatttttcaaaatctagatggctgggttttgatgggatcaaaatactataatcttcttcatcctcttcaatatcttcttcttca

SEQ ID NO: 163452 - DNA, 604 bp, Zea Mays
atgaggggggcagttcatgttgttcctgatcgacttagaaactcgccgctcatctctcttcttcctaaagcaaaaatcggccagatgcccatccctctcacaatacctacaattgaacctcacctctctcttaggtggaatttgtttgtgggagggggctttctttttggatggttgagaggctctaggaaggggatcactagagatgttgggaagcgtatcaagtgtgttcctaaaatgatttggttttggaacccacacttcttctgaggaggggctttcacaggctccacaatcactccatctctcacaagagtgataggcttatgtggtggtgattttgataagattggtagtgggtgaaggtttctctgaatgtggcaaaccattgcactcaccaaccttcccaaagcaagcgacactctcatccttgacacaaagccttacctcggtccaccagtttccctcttgaactaactaatcatcatgcccaactagggttcattatacgacacccagctcaagaccgatcgaaggtatgtgttttcttccttgatccaagtcatgtcgtgtctacatgactctcaggctaccaaccctcaca

SEQ ID NO: 163453 - DNA, 652 bp, Zea Mays
gtccgatcggacgttgacgacctagattagacctatacgcggatgaaacggtacgcgccatgatccataggatccagaatccacggtccaggtttaatacagctacgatcggctcatattcacccgatcaaatatcaacgacctagaatcactcacgcgaagggttattgctggcatcaatccgagccgttcactacgatccgacggttagatttactcggccgagatccaatcgtggccacacgatcccagatcaaaggcccccagtttgtcttcctcctcccacagagcgcacggcggcggaacacaccgcaacggtggcgagggacaccgtcgacacagttctggtactccagttcccattaacgtaaccaactccctaaatcgcagcggaataatacgaaatacaatagggagggattcttaccggaggtctacgtagcgctaatggcgtgcggcgaagagcggatccgcggcgattgcgtcgcgccggtgagaaattcgccgatgtcagtgcacaatcctaccagccccggacgcgagcacctccccactaatccagcggagctcctggagctagcaatgcggaaatggtggcggcggtacggtgaatttggccggtgaccgatctctctcttctctcttctctcgc

SEQ ID NO: 163454 - DNA, 412 bp, Zea Mays
gatatatatcccatgggtcctcatgagcactaaaacatgtcatgggccacctgatgggctttcttctgagtcaccttgtgggatggaccaacaagatatagccaagagcttgagataagctaatggagaacgacgtctgagttaagcaccatcaaagcctggatgtgtcggatgatgcatttgcaaacacctgaagggcttggcattcgtcgataactcaggcggttaggcaatgaaggctccgtatatgcagtgacatgatctgaggcaaagaaggagataagccagtagatagtaatcgcgacttgtaatgggataactctcgagtatataaggccgagagggacccctaccatttcatctctcatcacccacaacttcagctcaccctcacccacaatccgcagcttgt

SEQ ID NO: 163455 - DNA, 282 bp, Zea Mays
gcgaagtcccggcttcggtggtggaggcgcttggcctcgttgctgtcgactgggtgatagtacccctgtaggtacagggttattggcgcccgctagtcttcggtcatgataagattgatcttgctggggtcctcgctgtcgttggttatttggagcccttcagggctgcggacggctggcgtgccgatgacgtgatagaacacgtcggagggtagggcttcacccctggcggctgccttggccaatgcgtcagcttcttcattcttggcccggtccacatgc

SEQ ID NO: 163456 - DNA, 306 bp, Zea Mays
agactattgaaaccttatttaagataattagaaatgggtagactttaataaaagttggattacttaagtttatggacttaaacacctaagcttaggaacttaaaaccaggtaatgatttaattccaccacgggcttaaacttgattagtggataatgaatcactttgtatagtcctctaccccagacctagggaacaccagagtgcctatcccttttcaactatgaacttgtgatctctctctgctgcatttgtttggtatgtttcttttgtttgttatcttcccaagtgcatagtgtgaatgatt

SEQ ID NO: 163457 - DNA, 501 bp, Zea Mays
ctggagagtgagggggaagtgcctcgtcctagggatgacgaggtggccgtgctcgtgtccttttatgagtgcgggttcagcctccccctgcaccccttcgtgcgtgggcttcttcattactatcagctggaggtgaagaaccttcatcccaacaccattcttcacatagtgtgctttatcacgctatgtgtggcgttcatggggatcgatctgcattgggggttgtggcaacctctttagcgtgctagtgtccccaggccacaatgaccaaccgtatgtcgggtcggccaacattcaactccggaccgatctaaaaaaagagtacttcagggtacccctttcctcctctgtctagtatgaaggtgagtggtttcatgccatgaacgtggacgggagtgccccgcagttcactagttgggaattgacgttggcggaggaccaatgtgacagaacctcccaaggtattaggctcacctatagatgtccttgtcctaaggacct

SEQ ID NO: 163458 - DNA, 480 bp, Zea Mays
atgaggaggtggcggttgtggactacggggaggaaggcgacgtggaagtggacgaccgcgccgagcgcttcatcgagcggttctaccaggagatgaggctgcagaggcagcgctctctggtccagcgcctgctctagagacattcgtccgttgctgctgcttcaattccttggtcgatcgggcagaaccagtcgtggttgtcgctgctatcttagctgcacttcggttaaatctctccgtatcttgcatttgcgtcgttccatgtttttttgcttctcatgtggcaattctcttgtctgtggaaggagacattcgtctcccctgctgttgtactgttacttctagtccttacctatataatccatccttgtgttgcaatgttcatttttttttggggggtagtgttttgagtttgtacaattattacaaagcatgcgtgctacacacctgtttctattagcacaaaatgccaacttctga

SEQ ID NO: 163459 - DNA, 621 bp, Zea Mays
cgttaggcttcgtgaaaaaactagaggctacaaacatcatagcaacatgtgcaagtgctaccacaactgctctgaggttgcccccttccacatctgctaaagttatcaagaaattaggtgtagaattctgcaaagttgctcctgaagccctgacagaaagctctctagaggcttctcggactaaaaattgcatcattcagaggccaaagaagtagaagaaagatcagaacaccaaaaatgataagacaaaaaagaagggtgatgaagacatgggcccaggtgaccaggatgaggtctagagcttcatgctccctctctctttgcagtttgttgtgcctgcagcttttgtccatcctattttagtttcctttaatgggaacctcaaacaattttgatggtatggccgggatggccttttttgcgatgggctttttgtagtgttaatccttctcatctattttggtgggatgaacttggtccacatctttgggcccatcccttttttattgctctgatgaatggcaaacctttattttgggatgttgtcaacattatgctttattctgcttggcatgttatcaatgttaaggaatattttaaatgctctctcccactttgttg

SEQ ID NO: 163460 - DNA, 521 bp, Zea Mays
ctccgttcaccaacccggcagacgccatgaaactaaatctcaacagcgaccgagaaaaccgtgtgatccccgttcgatccgcccacccgccttggactcaatcccaataaaatgtgggcccctcgtcaactctgcaagccattgagagtcgccatcgatgagcaaagaagggcgtgcgtcaccaccgtcatagggatcgaacgtgactacacctctgtccatgaatgagggccccagagcatcactcgtccatggcacaacttctcggggcggtcggactcacgggggaccaacggggtggccaaaattcctccccgtcgctcatgcaccaccgctgaccagacctcgccatggcttgtgtcgcctgcacactgattgatggtaagacgcaatgcatcgagttcgccttcttctccacttagtgtagcacccatctgtttagacgggggaatcctggtgcaccgcgtcaacattctccagtgtgggcgccgtcgtcccaagcgcgtgccccaccgtgctcg

SEQ ID NO: 163461 - DNA, 821 bp, Zea Mays
agcgtgccaagcgacacataccgctctgatggcccaatcatcaatgttcgccggaagtgaggccttcgccccagcgagccgcatcacgtttggaaccctcgacttcctaaccaccaccaccggcgaactccgcctctctgcccccagcgttcccatcaccaccggaccaagcccgttccgctccaccagaagcaaggcaaagaagcggtgcctcaagaggcgcaccgccaccctcaagcagcgcctcaactagcacaccacaaacaccaagcagcggaaggaagaagtgccaccatccaccctggtggcctttgtcagccgatagccgtcatgcatcctcgacttgctcgaggacaactctagtcacggttcaacaagagctaactccaatgccgacgaggcgccagagagggcttgcttcgtggcaacaccaccacaaaacaagaatgatggaggggacaaggaggccctcaaccaagaggaggagtaccaacgccagcgccaagcacgcatcctcactcgtgaggccgccctctgctgccagcaagaagagctcgatgccctcatgcaaaagatcgaccgggcctatgaggacattgagcggaggtgtctcgaggctgagaggtcctggccgaggaaggtacacgacttgctcactgagagcagcgatggcacacaatacttcttaagtcccgggcagaacatggccgcagtagccatgatgctccgatctatcccagagccatatgagccagaggcaaaagtaatgtaccgaaacctccacaatttagtagagagggccatcgtgcagcaagccgaga

SEQ ID NO: 163462 - DNA, 380 bp, Zea Mays
caggcagacaggtgaggcggcgccgatagctccccacgacggggccatggccggcgatggccatcccacgcaatagtgcttagaacttttgaacgacaggtgctaaccaacgcttggatcctagcgggtacgttggtatgaatcttaccggggttggaagcgcagagggcactgcccatgatgacgagcggctccacgggcccgaagggttccagtgagcaattccgggttcatcggtcgacgatcatccccgccgtgacgaagaccacctccccggaccgcccgtgaaggccccgggccaatccttgtgtcctaagcggtcccaaacgcgtagatccatggcggcggcactgggtttcctggtgctggcttcggacgcg

SEQ ID NO: 163463 - DNA, 702 bp, Zea Mays
gtccggtggttcaccggacagctactgtgcgctgtccggtgtgcaccggacatgcactgtagactgtccggtgcgcccatatcgcgttttaaaaaaggcctccagcccgagaccgagccagaggctccattcctctcccccgccagtgcttctctctgtctctctggcgtctccctctcctccgccggcgacctcgtgcccctctctttccctctccggtgagcagcacttcgcccctctccttccctctatctctttctctcctgctctcggtctgtgaggcagtgaagcactaattctccaccctttgtccatttttcaaattcctgtcaaatccagtgaatccaaagggtggaatgtgttcaattgtccccattgagtatccctgcaggttactagctccctttgggagggtttcacaacctaatttgcctcaatctcccaaaacctaattcaccgcacgccaagtgttcggtgaaatgcccaaaccagccaaaaatgctccaattgaacccaaatttttcaggcaccttcacaacacttccagtaacatacttgccaaatttcacgccaatccgagattccaggcttaaaattcaccaaattccccgtttcgagcgatcgtttccgagccgagtgcccaaatctctttttcttcgcctaaattcaaaccaagcacacacttcactcatattcacctat

SEQ ID NO: 163464 - DNA, 513 bp, Zea Mays
gacagcctccgtgaaactattctgaaggaagcccatgactttaattactctattcatcctggtagcaccaagatgtatcaggatctgaaacagaagtactggtgatatgggctaaaaagagatgtagctgcacacatggctgtgtgtgatgtatgtcaaagagtcaaagctgaacatcaaagaccaactggactactacacccgttaaaagcgcccgaatggaagtgggaagaaattggtatggatttcattgtcgggttgcccctcaccccaaaagggtatgattccatatgggtgatcgtggacagattaaccaaaagtggctcacttcattctggtcaagactacttacaagggttctcagttggcagagttatatatggcttgaattgtgtgcctacatggagtaccaaagaagattgtttctgatcgaggatctcaatttacctcaagattttggaagagtctccattagaatatggatacaaagttgaatttcagttcagcttatca

SEQ ID NO: 163465 - DNA, 1108 bp, Zea Mays
cactcatgcatgatgaagcgctcaaacgtcagaatcattgtccctaactttgaagtctgagaaagcaacaaagtcatgggccatcataacactacccgccggctgagccacacccggtacaccctctccaagatcatcataaaaccaagacttgaaccaactaccacacctgttctttggactcgacacgagttcatacactttgccacatgtctttctggtcttcagtgtgaaagtgcagctcccaaactggatcaccctaccaccaatagtcttcttctgccaatgaaggaagtaatgcttcccaaagacttgaattgaaggctctccaccatatgtagtcatctcccacatatatttagacaatgccacaatggcattcgacgctagttgatgcaattgaacgctgaaacgtttcagcacttcaccacgaacaggtggcatggaaatcaaagaccatccttaaaaataccttgaacactacgatctcccctcatgggtttagagtctgctcagtactaggcacacgccgatcctcgctccaaaataacctaacagttcaaattcgcacacgtggttcaaggaaaccgcagaccgaccgaattccaaggtttcgaagccagtgtgtgctgaacgctagaaccacccaccggtggtgacatcttaacagggtgctcagcacttgatgacaaggaagaagagggtggcagcacgagcttatgtcagcggcaagcaatttgcttaattcacggcaaatcaatcgtcgtcggtaagatggagtaaaatgcgcggcacgaggaagaagcgaccgatcagaggaatgaggtggtgcgcggaaaaaagaatagccctgcactgccctaccgttatatagagcgatcgagcggcgcttcaaaaaacatgaaggcactcaccatcaaaagacgagccaccctacgtcagctggcaatgtcagtaaccaacgatcacaaacacaaaaagcaacccgttcaacttgttatcgagggcagcattcgcctgtcatctctacaagacttcgggtttgactcaacaagttgaaccaacccctcggagggctcatgttggaacaaagacagaacacccccct

SEQ ID NO: 163466 - DNA, 554 bp, Zea Mays
gtagaggtgttgtccaggaattttgtgagtgggtggacagcagtagttctagggatttctgggaattttcgtgggttaattagtgggaatcagtgggataatcatgtagagctttgtcatacctttccaatgattactgatacaatcgattcggagttataatttaggagatatcattgtttgaatccggatatgttgctgtccaaaaaaacagatttttcaggtgggtgaacagcagtagtattagcagtttttgggaatttttcgtgggtaattactaataaccagtatgataatcatgtagggctttgtcttatctttccaatgagtactttcgcgcttgatttggaattatattttaaaagatatcgctgtttgaattcgggtatgtcgctgtccaaaagagaaaaaacagattacagggtttattttgaggactgttttgggctaattagatgttggaattttattataaattgtatacaaaacttgtggggaatttgatgtatatgcctctagagtttttggttgtgaccactgctgtcataatttta

SEQ ID NO: 163467 - DNA, 430 bp, Zea Mays
cttccttgcaaactgggcatgggaacttaccatgaacacacgaggcgcagaatagcccatacaccggtaagtcatgcatggagtactggtaccaaacatgcattctgaagtttgtcttcgtggctcggtcatacgtccatacccttcctcccaagcacgtaccaattcatcgatcaaaggctccatgtacatgtccattttattccctaggtgtccgagaattatcaacgacacgaatatattctgcctttgaaagcacacaccggggggagattgattgagataacaaacacgggccaacatgtgtacggggcagagctcattccatagggattgaacccatctgtggccagcacaacacgtacattacgagcctcttcggctttctcacggtgaatggcatcaaagtgtttccatgcttcaccatcgg

SEQ ID NO: 163468 - DNA, 839 bp, Zea Mays
cagcagaacctagaactctgtcgtcgggtgcgctggcctctaaagcgactccttgaccgaaggcttgggctatcgccatgcaaccagagtgtggaggagaagaccctacgtgaacatccatggaagtgtgggagggagaacccactcggacaccctcgggggctgggtcacagctcgcgttacccattcgagccggatcatctccggcaacaccctcgggggctaggtaagcgccagcaccatccttgatggccgagttctctgcagcagccacctctaaggctgaaggtccctcagtcacttccatgggagcagtgcaatccagaccagcctcctaaccctcaagaccgcgctccaaggtcgatgaggcgcgggacgctgcccgggatgaccccaacccggcatcgggcacatcagcacaaacacccatcgtgccaccatctgccggctctgacaacagatcttctggaaccatgtcttcaagagtttgatcaaagtttgccagagataattcttgcagaccaatgagggcagacaagacaggagaaggaacaccactactttccccactagctatgtaacgccggctgttcttccgaatcagagggatttcatcttcttcttcatcatcttcatcaacaacacggagagtacacccattggggtcagcttcagcagggtcacacccattggggtcagctttagcaaattcaggcactggcacttcctcagcaacaggaacagaaggaccggcaccctgatccaagctagacactcgacgaagacgtctcttcttctttttctgcccctcagcaggaaaagtgggttgatcagctcgg

SEQ ID NO: 163469 - DNA, 521 bp, Zea Mays
tggacggcgggttcattataaaataccctagggtctcttatgaaaactaagcagccgaagggggtatcctctaatttcagccgtccgatcaaacgcggatggcccagattagatcctctcctgctaaaatcccgctcttgctctccaccgatggatccgacaacaagggttaggatctaaacaccgaaggggggtaagcctcggtctaatctctaccgcacactcaaatccgacggcgcacataagctcttcctcgcccagacacaagggacacccgcggtgcctgctccattcacggcggcggaccgctggagttcgaatccggccatcccgtgcacgtattgccaattaaaccataccacctataattgatgctacccggaactcaatttcccaacaaattttggttgacctcgagtgtaggacccggtacacggtgtaccgcggcgacgccatggtcggctagtgcacccaggaattcggctatgccatactccaattcgctaggccataatgtgggg

SEQ ID NO: 163470 - DNA, 905 bp, Zea Mays
cggtcgcgaagtacagccagtgaggcagtgaccatctcgcgccaacgctccctgtcgaccatgggtccatggccaccccggtgcgttgcggtgcctgcgtcgcgtgcgtgcgtggtgcacatgttggcgccaaccgctacgtacccacgttgctcttgctgccgcggggcacggaacggaacggagtacctacggacagtagctgtctgttctgaatcgagtcctgaattcatgatggtacagcgggcgcccgtggagcttttcgtccacttccttctgttccaaatggaggaagagccgaagagggactgagggattggggaaagagggagagagggatagagagagagagagagtccggctcaaaagcctccaggctcctcatctagtcatcctcttcgtgcccacctggccacctcacagaacgaacaagcatcttgcttttcccttccaacggtagtcctccgagcagcgtccaaccagaaccggccgtgtcaactgagcacctcccgtgccgcctcccccggctcattccgccgcccattatattgccccaagaactgatgcgacccgacccaagattccggctcacgacggtgccaggtgcccttgctctagcgccgactcatccggtggcgagacaggggcctgaatgaagtgaagctcgtggtgggctgggttacgtatgccaatgggcgcgcttcaggtgatgctcctccgcttggtgctgctcgccgcgtccgccgcgacgacggctgtcacggtcacggccgcgccgccgcccagtgaggtggcagtgggcgcactcttcacctacgactccaccattggccgcgccgcgcgcctcgccattgagctcgccgtcgacgacgtcaacgccgaccgcaccgtcctcgccgggaccc

SEQ ID NO: 163471 - DNA, 407 bp, Zea Mays
gaacgttgtaagagaggggtaagacgcttcataatttgtattccaccaccaccctgagagatagttgtagggttcacattgtttgttgcctttttgtctctgttttgtgctaacaatgataggaccaatgaatcaaatggacaaggacaaggggcctaaacttaacggcgatgagtgtgtctctcaaatggaattgaaggagatgatgcgcgcgatgactgaagcttttaaaaaataccaggcctctgcctcgacatcctatgagcagcttgatcgatgagttgctgaacttgttacacgcatggacgtactggaggctcgtcccccaccaccaactccagccccagctcactctcctatggacgacgacgacgatgacgacgatgtttatgcaccgctgcgacaac

SEQ ID NO: 163472 - DNA, 450 bp, Zea Mays
tgccaggagaattttgcgttgtttttgttgttatagtggagactggtctcgcttcgatccacttggtgaagtattccacaacaacaaatttcgggcacacttcgcctgaccacactacgcgatttgttgcgcatacaatgtccggtcaataaaaaccttggcggcgagggctctaaagcccgagtgacagtcgcatattcctttgtgcacctcgtagagtaggtttacgccctcgactactatgatacatttaagcaaaggatgggaaagtcctttcttgtacagttgttctcctattatggtgatcccatgacttcggtatttgagtcttttgggttcagcttggtatgtgggttgatagtgtcctcgtaagtacaaaattattggggccctctagtcttcggtcattatgaggcttatgattctctgcccattgggctcccttacgac

SEQ ID NO: 163473 - DNA, 369 bp, Zea Mays
aaaatgtgaatttaccttacgtgctgcatatttgtggtcaattcatgatttgcctgcatatggtatttggtctggctggtgtgttcacggtcgactgtgttgtcccatatgcatgggggacacacaagcatatcgattggagcatggtaaaaaggtctcatactttgattgtcatcgacggtttcttccatccaatcatctatttcgaaatgatacgaagtcatttagaagaggcataaaagttaaagacggtccaccaaaacgtttaatgggtgaagatatcatgatacaacatcgtgcccttcaaagggctgcagaaggtcatgagtttgaaggctatggtcaagagcacaactagactcatatttc

SEQ ID NO: 163474 - DNA, 642 bp, Zea Mays
ggcaatggtgcggaccgtggggaaggagatccttggtggtgggcataaaccccagggcttcgggccgaggaggtggttgtgagtcactgcgacctggcgaacgtgttcgcggcaccagcactggtagtggagcccctgtcgccaaggaattgctcgacagagttccacgaccgccatggaccgcacatcgctgtgggcgggtgttcctgccgcactactaccggtaatttactcctcatgttgttcgtcgttaaccacattacctatagaacggtttacatgagggtcagggggtgattggccgccgaatttgcggtctccggcgagcggctgccaccatggtgggtggctcaccaccgctgttgaccactagattggggaagacactcgaatgtcgttcacttacaaagcaagggccaggattatatggtagatgtccaggcggtaggagggattccgggtcgttgatcatgctgcgtagggcccagatttgatcgagcgagggcttgatgtgggtcgttcgatctgggtggacggatatgattcggggggaaaacaaccccttcgtttcttatatcctcgccgttggttttgatcctagggcctcagttccacaccgggttggtcagagtgagattcttt

SEQ ID NO: 163475 - DNA, 628 bp, Zea Mays
atccatttagccgggaccgaaatggaccaactcctgagattttgatttcacgatcacgcgctccacacgaagttgcttcgtctcgacgcacccttcgcgatgatgccacgtgtcgcctccaattactgtcggaacagcaccgtcgagttttgaagcccaaactcaacaaaaactagaagttcggtggttttgagactcaaccaccgaaatcgcagtgagtagccgcatgcgcgttccccacgtcctggacatgtgttccaccagtcttcgaccacgccggcgacacgatccgctcttccacgtccttgcattcgtgcgtgtctcaggtgtcatccaccatggctagtcgccccgcttctccggtccctcagtcaagtcccagtgctagtgctagtcctacgtcgctcccggaccatcggcacgaacccacatgaccttcacctcgtcgtcgaccaccgtcacacacaagcctgcagtcatggtggcacagcacaagctctcatagtctagttagtccaagactcacaccaaaacactacccgttgacaatcactcatcatcaacccgaatcacaagggataagtcaacattttgttcgcagacaggctctggctccgctaaaaatggc

SEQ ID NO: 163476 - DNA, 398 bp, Zea Mays
agactcggtcgatgcagtccacggcggagggtgagcccgcggcggcgtaggaacaccggtgaggaatcgcgtgcaccccggcccccaatcgcgccagccgagcgaaccacgagcaccagcgagcctcaacgaaggccccagaggcctagtcgaggccagagcgacggccagagcgctagtccgctttggcgtggaccgcgcctcgctcacacggcgtcaatggcgttagtgatggatggctcggtttgctggtagttgagaggggagcggaggggtttggcttcgatgttaaagggcgcccgcgaggtggttccacggaatcagagtcctccggcgagaatcgcgcgcacggcgagctcgcgtttgttgcggagggcggatgaccaggcgcgcgggtg

SEQ ID NO: 163477 - DNA, 434 bp, Zea Mays
gcctacacccaagcatcgaaggagggaaagcagtagctagacaagcgctgggacaagaagccaagagatgaagtgcataccactgggtgcccgacgaatcggccccacgacatgccacgaggcagtgtaaagacgttggacgagatactcgacgcctagtgcctgtacctcaaggagatgcgccataccctatgtaattgcagggacttcaagaactcagttggccatggtcgaccattccaaccactgcggcccctaccatgaagagaaccagacctacaagaacatccgctataatagagtgggggtggtgggggtgccttctcacgcattgatagggaggtcaatgtcatcttcgggggccatgggtcccaggagagcaaaaggcaacataagctcaccgatcggcaggtcttagtggtaacccatagtgc

SEQ ID NO: 163478 - DNA, 947 bp, Zea Mays
ccgagccaaatctgataaagcagcagaagaagagcgcatgactaagaataagttgagcaatgaaagcaaataaggaaactatgggctcactaaccaatatttgatgccttcaagtcatctatttgtttttggagcagcagagggttccactacatcagagatgaagcttgatcgagaacagtagcaccgcaagatctcagttgggtggatacaccaccaataaaatcctgtggtcacggatggataagcaaaaaagctaattcaccagtaagaacaataaaaagcaaaaagttgactcacttgaagattggaaaggaacagggaagacccaaagcaggaagagttggtacattgctcgatgaggggagatcagtagaaataatatcaagagcatgacttgggggaacttcggccccatcagcaggcggcaggctcctgacatttggttcgctggcttctaaagcaaccagaccaacgagagccatagaaacgtgcgtcactgcagcctccttggaccggactgggggcgatccaacgtggacgtccatagaagcagagagggagcccgctccaacaccctcaggggctgggttgctaccagcgccaccctcggtggctgggcttccgcagcagccacctctagggctgaagatccctcagccacatccataggagctagatgactcggatcagcacttttgcaaggaagaccgccttctaaggtcgacgatgcacaagataccacccgggttacctcttgcccagcagaattatgtagcagaagaccaccgtctgggacctctgaacaaatggttggaatgtcagccttaggaggatctgatagaatatcttcggggacggcctcttccagtgcttgatcaaagtctgatattgacagaccttgaaggctgacgagtgatgacaaggcctgggagggtatgtcgttg

SEQ ID NO: 163479 - DNA, 1016 bp, Zea Mays
agctttacccggcccacctcagtttccccttcgcgcggcccaccagtgcgcccgcactcgcgcctggcgtccgctgacgagtgggacccgcaagccagtcactgccccttttcctgggagccgcggactcacgtttctctgttgtggacccccttcatcaggagtatcttctccaccgtaacagacacgacgatttctctgcggtccgcttcaatggggtcctctgcagccttcggatctcgccaactctctcgtattcttcgcatggtcagcactttcgtctctcgcgcttgggcgactggcgcgtgaaccacctcggtcaaagacttcctcaaaccgtccgcgagcttcgcgccgcacgccgcgccatgtgcgccaccagctgattccgagtcctagcctccgactaaattgccgttcccaccgaagcggggtttaagaaccgaagtatcgtggcctttcctctgcatcccatccaagcgccgccccatagctcacttttcccttgcccgaccgtgccagcgtcgttaagggcggatattgccgccgccatagaatctcgggtcgtgactagccaaagctttaggcgggagttcaatgggattcgcctggtcgcggtgaaggttgccagcgtttctggggcgaatcggggcccagcaccttggatttctcaccgtcgacttgcagtccgccgcgtgccgcactgctctggagccagggcgcgactcgacataaacctaagtataaacgcttatcccatgctcgcgttgtccttctgctctcgttgcgcgcttcggcagggtggttgggggattgttatcgggttgggtttgctcaccggcgtggtctccaccgtgaacggaggtgagcgccgccgtgcccaatgtcagattaggggaaggaatgtgcaccgttagatctcaatggacatcccagattagatgtctgcgtaccctttcgcgctgttgtatgcaggccgtggatctgtgatcgtgcggttaggctgctggggctag

SEQ ID NO: 163480 - DNA, 349 bp, Zea Mays
gctgtgacaagaggaccgtaacattgaagtccccgtccgggagaggaggtagtggctgagctaagaatgcctaaaacaactaaaggagattgtcaccagatttcggttgatagcaaggaggccaacccgctcgaggctattagggttgtgtcggactttccagatgtgtttcccgaggaattaacgggcatgccacccgagagaaaagtcgaatttgccatagagcttatccttggtaccgcccccatttctaaaagagcctatcgagtgtctagaccagaattggtggaactcaagaagcagatagatgagctgttagagaagggttacatcagaccaagtacctcgc

SEQ ID NO: 163481 - DNA, 652 bp, Zea Mays
tgaacaaactgagtatcttcgaagcccttttttattgatgacatatttctattttacagagtacatcatcgtcccgatagcttttgaaatacagctagggataaaatttcctgaggtgttctatattccaggagttcctgacttctgtgccgtccatctgagtgagacgatatgatcctggccgagtgacttctgctactacgaagggtccttcccataagggtgataacttgtgccgtccttcccccgttagaattcggcggaggacgagatctcctactaagaaggattgctgtcgcacggccttgtcgtgatagcgccttagagtctgctggtaccgtgctgattggattactgcattcagccgttcttcctcgagtatatcgatgtcctccatcctggtggctttgacttctgctatgctttcgaagatcaaccttggcgctccgaacttgaggtcggctggtaatactgtctctgacccatagaccatgaagaaaggagtgtttccatgcagagctcggctaggctgggttcttaggctccagacgacatagggcaattcccttatccattttcctgcgaacttttcattcttatcaaagacctttttcctgagtgcctacagtatcatcccattggctcgctcgac

SEQ ID NO: 163482 - DNA, 370 bp, Zea Mays
cgggactaccctacgtagcaaggctacggtggtggcgcgccaagaggaagaggcccccaacaacctagagggttctattgtgtgttccacggtgaagactcagctgatccaataggagattgtccagaaaccaaagaaaccaaagagcgcatggctatagcagcccacacaaacaatcaaagagccatcactcacacttatcaccccaatagtacctccatcctcaattcaaaaacaaacacccatacaacccttagccacatcagaacgacaaccaaagagctccccaacacccacaactccaataccaagaaagattaccactaccacctccatcgccccaagtaaaccagcaacctcgtcaaccaca

SEQ ID NO: 163483 - DNA, 622 bp, Zea Mays
gttccatccgatttgttgttgcttgttgtgtgctcataccatcctgactgactattagcaagagcagttcgtcggcctccctcgatccccccttgtcctgtcccgccgcctcgccatgcgctagcttccagactgtctcccgccgagttgcacttgcgcgttgcgccacaccttgcatgagagagactgggagcatgacctgacccctgcctgtccctgtgcgtccacctgttccggatcttgccctagccgtatccgtatgcctgctacagctccgggctccggccggccgcacgggtgtgctgtgctctgccttctcgccgcttcagaatagatagtggcctcgccagccctgtcgcttctcgccatgcgcacgtgctttgcgtgcgggtggaagtgggctcgtttggcttgctacttcttctagtgctgcgactattttttgttttgttttgtttatttattactgattgctctggctgatgttgggttgggagagagggatttctcgccgctgccgtcacgtacggagagttggttggtttggacgattattagtcatcacgacaagaccgcccttgactaccttttccctcagtgcctggcactgcacaactgctgc

SEQ ID NO: 163484 - DNA, 878 bp, Zea Mays
gaaaaagaaaaaggaaaacgatgaacatcactgggctgaaactagcccgttccggcccacgaccaggcaaaacgcgcccgcgttggccatcttgcgcagagaccctcggtgatttgaaaaaccagaaaagatcctgcaacactttttctttgtctcgctgacatttgcgcatacacccatgcacttctattacttctccaattcaacccctagcgacggcgagctcacccgccagccatctctcgctggaactcgccccaaatggtgatgcctgacgaaaccgagcactcgattgaaatccccgaacccaggcgagcctagaccatgttctaatcgagctaatcctaccctagattctcctacctacgacgacggcgaaaactaagggcgggccgagccgttcccggcgatgaggtgcggtagcgttcgaattctaagtatggggagcatcgtcacaccgaaaggaagctagaatagatcgcaattgggctagaactaccttgggcaacgctggccatggaagagcgcttctcggcccgcccttagttttcatgatctatggtgggtaatcagaggcgagagtgggtgctctaggttcgtaataagctaacggggctagctgtgcactcaatttatagcacccaccagcggtggctttgaatttggaaaagggaagctagcgaccggagaggggggtgagtcaccggcgcgaactaccgtggcattcaccgggcaatgtctcaggcgatggacaggccacctacggcggtctactgcgacgtggtaaagcttctgaatacgtggcgtccaggcgacaagcagcaaactccggcgagggtcatctcgaccggccgcagggcaatgggtatggcggccaa

SEQ ID NO: 163485 - DNA, 1645 bp, Zea Mays
cggcggggcagtactggcgagtacgctggtcaaggggaggaggacggagcggtgccaaacttccctgtgcggcgaggagacggtgatgaagagacggcggtgaaggacggcggtgaagggacggcgggcgtcgtatgcggggaggatgacgaagcggctgaccggtgggaccggtctgccagtggaagcgggcgcgtaagagagagcggctggcaggtggggctggcttgtcagtgagagagcggcggagtgcagagcgggctggcgcgcgcggaggcgggccgggagtgggccgaaaggaggagtgcgggcgcggaagggggggaggagccgcgggtttgggccgagagccggcccagcagggggaggaggaggcttttctctttttctttttactctctaattcctatttctctttttacatctttttcttttgaacaaataatttaatagataatctaggtgctgaaaaataaaatctaagtgaggtgctcatattcaaacaatgtgtatgcatatgttggaaagaatctaagggagttttgggatagataataagaaggggggttagattagggtttcaaacctgggttagaaattgggatgctacaaacctaccccacttaaaggaatctcgccctcgagattcagacggggcttgagaaaaggtaagggtattccttcctcagagagtcctcactttcccaggtggcttcctcttccccatctctgctccactgaaccttacagagcttcacttctgaattgcgggtccttctgactgctgagtcgagaatcttcactggcttttcccggtactggagatctttttgaatctgaattgcttctgcctcgatatgggtttctggtacttttagacatttgcggagttgagacacatggaacacattgtgaatatctgacatggattctggtagttcaagacggtatgccacaggtcctattcgggaaatgacagggtaaggaccgacgaaacggggtgctagctttcctttcatttggaaccttttgacaccacacatcggggaaaccttgagataaacaaaatctcctacctcaaatctgagctcccttcgcctattgtctgcgtaactcttctgtcgactctgagcttcaagtaaccttctgcggatcaaggcaactttttcttcggcttccttaaacaaaagtcgggtccttctaatgttctttcccctacattggaccacattaggggagtctggcattttcttccatacagtgcttcgaaaggtgacattttgatgctggcctgatagctgttgttgtatgagaactcggcgtatggtaaactagactcccaatctctgttgaaggctaaaacgcaggctttgagtaaatcttcaaggaccttgttgactctttccgtttgaccatctgactgggggtgataagcagtgctgaaatccagcttggtgcccaatgcttgctgaaggcccttccaaaattttgaagtgaactgcgttcctctatctgatactatcttccgtggaatgccatgcagcctgactatctccttaaggtataatcgggcgagggctgctcctccaaaagtggtctttactggaatgaaatgggccaccttggtgagacggtcgatgattac

SEQ ID NO: 163486 - DNA, 387 bp, Zea Mays
gcgtggccggagttagtcgccggaggtcaccgtgactcagttaacttttgccgcggtgtcacccatgcctcgatctccctcactgtgcctcttccctacgtggtatacatgcgccaacgcagttatccgtggccatagatagctagccggaccgccgtggctataagttgcaccgtgatccacggcggggtatgcacacctccactcagtgagttgatcgcaatccaaaattcgcgctgcctcagctccctcttcccaaattgattgtgcacggtgaaactacagtctcttacggctgtatagccccaatcccaccccccaatttcacccagagccgccgcgacaccattttcccccttcctctgtcaccggcaagccaaagtctcc

SEQ ID NO: 163487 - DNA, 909 bp, Zea Mays
ccgggctcaactacctccgaccgggtcggtcgccctcacctatccgcccataaaatcatcacgaagctcgggcgcaaaaccctaacaccctattccctgctgcggcgcgaaatttttctcgctgtcgatgtgccgccatacccgccccacgccgctactcagctacgtttgcgcttgacgttcggtggacaccggggggtccgtttcgacacaccggagttgagtagggcgttctcgcgacggaagcgccgccggtggtcatggaatttctcgccggaacgcgagattcgtcccgcctccgctccatcccgtgaactgcgttcgtcggcactccaatccccggtattgagtcacctataatgttcaccaccattagaattacgtgtattccggttcggatcgaagttttcggctcgggatcgggtattggtgattgcctaccatgggcgccgccgtgagtttctggggatggcctcagtgttggcgttggggagggagaaggcgtctctgccgtttgatctgagcggacggtggagattagaagtggcgtaccctttcgccgcgactcgatctggtccgtaggattgatcggacggctcggagtataggaatctttcattaaatctgcaccgacgatcaggcattggacgatcgagattgtttaccggttcgtataaaacgtaggtctaatcttggcgactgatttctgatcaggcaactcagattaaaagataccgcttcggtcgcacgttttataaaatagacccctgggaactaaagaatcaacctgccatccaggggccctgttctctgtgtctggattattttgcgccagagcccctgcgcttcatagaaaatgaggcccagtccagagctgatttaaaattgaataaatgaattgaaaataga

SEQ ID NO: 163488 - DNA, 394 bp, Zea Mays
gaccgccaggaggtcttctctagaggggttgataaagatagcagcatcatcggcatagagagaagtcctcagttttgctgtagttagtggaatggggtaaaggatcccatttctggctgcaaggtccaggatatgctgcagcggatcaatggcaaggatgaacaacataagggaaagggggtctccctgcctaacccccctcctgtgctggatgtttgctccttgtcggccattgaggagggctcgagacgaggtggacccaaaaaggatggaaatccactcacgccatcgagggccaaaacccatggtctggaggacttccaggagttagccccaattaactgtgtcgaaagccttctagatgtcaagcttcaggaagagcgccggttttttg

SEQ ID NO: 163489 - DNA, 485 bp, Zea Mays
cgacacgggtgcgaccaaccacatgacagggttgtccgtcgtcttctccgacattgacgaacgcgtcaccagcaccgtcaggtttggcgatggatctctagtcaacattgaagggcgcgacacagtgttgttctcttgcaagtctggtgagaatcgccaactcgtcggtgtgtaccttattccacgcctcggcatcaacctcgtcagcgtcggacatctagacaatgatggctacatcatccatgtcaacaaaggattgatgtggatccaagacgagcgacgacgccttctctctcgtgtgcgacgctcccccaaccgcctgtactacatccgactcgacaacgcacgaccggtgtgcctcaccgcccggggcatggacacagcgtggctgtggcacggacgtttcggacacataagcttcgaggcgctccggaagctctccaacggcgacatggtgcggggacttccacacatcaacacatcga

SEQ ID NO: 163490 - DNA, 380 bp, Zea Mays
ccggagaggagggaggtcactagcgcaagtgattcgtggctcttactgtggcaaggcctcaggcgatggatgggctatctatggtgattaattgtgatgtggtaagatggctgacggcgtggcataaccgtgaggaatggcggcacgacagcgatggtcgcacggccacatcgccgggcaagtgggcacagcaaccaggcgaaacagtggcctaagttcatcctcaacgcgatatttcttaccccgagtagttatctgcacttcaccggacacgaatcgctgcgtcggcgtgaatccgagcgtgggatcaccggcggcgagggggctgaacctgagatcttattcagtttactgtactatcagattttcatcagagcgcc

SEQ ID NO: 163491 - DNA, 2003 bp, Zea Mays
tcaccgagttggagtaggtaggtccgggtgccttcaactgggggcagttattcttgaagtgactggggtctccgcagtgccaacaggcatttgctggcggttggttgcttgcaacagagggggcctgaagggagctctgactctgctgactatagcatgacgaagtgagtccggctggtctattgaagcttggtcccctaggtggaagcccaaaggatcgagctctccggtgacagtcttgctgctgagctcggagaacctggaatttcctcttgaggtgccctttttcttcctcttttgccctttccacttggatggctttgttggagaggtgagagaagttgaggaaatgttggctagcgaggatggtcttaagctcgggtcttagccctttcagaaaacaggccatcttcctagactcatgctgacatcgccaggcgcgtaacgggccaactctgtgaacttgtgcacatactcactgacagttcttccaccttgagttagttcctggaactcatcttccttgagttgaactatcccctgaggtacgtggtgctcacaaaaggcagtttcaaattctgcccaggtagcatccctaatggcctcgctgaaggtatcccaccatgctagggccatcctagaaagttgatgagcagccagttgaacacgcagatttttggggcatccaatggcttccagtttcctcttgatcgtgcgcagccagtcgtctgcatcgaggggattgctagaccccacgaacgtgggaggcttgagtcttagaaattctcccatcctgtcctgtggtctcccaccacctgggcgctggttttccagacttctagtgaggacttcaatgagtcgggtctgattggctagaacttgggccaaatctagtggtagttccggaggtgcggggaggtgggtctcacccccttctccgccagcttctccttcagctcttaggggaaaacctgctccaatcccggaggcgataggcgtggttttatccgaagccatctgccaggggaaaagagttactaccatgcacatgccactttttttcactaagttactttattcattacaccggttcattacactagttcattacagcacacaactaccataagttcattacacgcgagtgctatctagggtacttccgaactccttctctaaagtgtccccaaattccttgagaaggtcatcaaggctggccagggacatttcctcggtgtcggacgagttccctatcctggtaggaggcagggctggaggggcttcttccttctgctcagtctgatatccttggcttttggctttcttgcggatttttcttgcgggggcgagcttcttcagcttcttgtcgtaatccatcttcagagtgcggtaggcctcacgggtgttggtttcctcgccttctgctatctcgaggctctcttgaagggacgccttttccctcgtaagttccctgactttttgctctaggctttccacccgggagtttaagtgagtgcagtgggaggcaaggtcatcatattggttatcgagggtgtggaggtattcagccatgtagacgatggtggggtcatcttcgataggatctcctcctgacaaggcctgaagtcttttcctctaggtgggggtatctttgttgctgggtgggaagtagcggaggggggtttcaaagattactttgctgtagccctggcatagttgtcggagggttttcgggcaacattctggcaagtatctaggaagcggtgtccggtgaaagtgacttggaaagaaggatggttcgggtagtttcggctttctcctaggtagactgccatacaacacttctccattccattctcgaggtactccttccagacatattctagctttttgcagattcccatgcaaagcgcacagcttcgcaatagatgtgggaacccctccacctctgagcagtaggatgtcctaatgaccagagagtcttccatctggaataggaaaag

SEQ ID NO: 163492 - DNA, 366 bp, Zea Mays
cttgccttctcctcagtgtaccacccacaatccaacggagttgtggaacacgcaaatggcaaaattttcacagccgtcaagaagatgctcctcgacgacaaaaagggcaagtgggccgacctgttacctgaagcggtctgggcactgaacacgactgagtgcagggcgactgggttcacccctttccgccttctatacggattggaggccatgaccctgcaagaaataaaacatgggtcaccacggacagtcccgtcagccgtccccgatgtggacgaacctacttcgaaggacctcatcgacggagaccgcatcttcgccctacaggctctaaacaaataccaagctcaaacaaaagcatggcgc

SEQ ID NO: 163493 - DNA, 465 bp, Zea Mays
atcatggtataggctatggtgtcccttgggccaattggactaccatagaggagcttgggatccatctctcgctttgactggggaacaattgtagcaacaatagcaatggtaggagggcaaggtatgtgagacatcaaacaccacctcaactagccctagttataccaccattcactttggtaacttcatcaactatgcccgcttagacaaaggtactcaagcataggcacttgcatccacatatacacatgatatggatgggtcatagatcgaggagcatctaagggatacctaatttgtttaagacatacaatccatatacccactttgaaactaaatagttgatggtacgtcccaaacaatctaatgagtatggtcaatagagtgtacaccatccctttgcctatcatctattttgtctgttacatccttcctagtcaatctcctctctgttagctctgttgt

SEQ ID NO: 163494 - DNA, 549 bp, Zea Mays
ttcgtggcgaggtcaatcgtgcagcgcacggttgataaccagaggagaagtggtgctacgattgcggggttctagtcgtgttgattggaagccagatcgtctgtgtgacatctccgccaaatcgatagttatcttcacctgacggaagatcgggcacccccgtttcctatcaaatggtatcaaagactcaggtattaccgtcagacttaccctagtttagtttaggtttttcatcctataactccagataattgccatacaaaaaaatatattccgctgtcctataaccctgtttagccttgcaatttcgtttctgattgctttgttgaatttgtgtccgtgtcgagtcttgttgctggtttaggtcgtgtcgtaatcgtagttcaatcgctccatcgctgttatttgtttccgccgctatcccatccaccttacccagattacaagttgagacaccacattactcgatttgccctcgctagccgccttgtgtgaattctcgccacgctagccctagattaggttgcaagccgcattgcattgcagccc

SEQ ID NO: 163495 - DNA, 500 bp, Zea Mays
atctgttgtacacggtgcacaaatcgcaacaagagatcgaccaccggtgacagctcaccggcgacgagcaagccgcgctggcaacctgatccactttggtctactgtaccatggcgagacctcatcagagcacctgacagatcatgtttaggtcacattttctctaaaatttgcatgtgaacttcatcaaacctctgtaccaaagttgtagagctatagttaatcttcaactttgccacaatgcttaccatcaaatagtcactgaatcccattcaaaatcgagctcaaagttcactccatcacactgctactgaaaattcagtccagggattgcctgacagcctgactttgagctgaattatctccaaatttctcacaacaacatggcttgcactcttaagcaaacttgttatccattaataggtctataagtttgatgtggtgccccagggcaaaaaccctatattttaaaagttgcaaggctccaaagttgagctcat

SEQ ID NO: 163496 - DNA, 322 bp, Zea Mays
gacgaaacaagtaagaagcaacggtaatggaaaggtgggttcgtcaggggagagctcactcatcgcagcgagacgacaaacttgctcggagagccatgggaatcaaagcgagagagtgcgggaggaagcaggagggcaggagagcgcgtcggctgggagatggcgagtcctgagagctagccaaaaatgaccagcgacggggagacgatggcgagccagatgcgatggcgaagttgatgaagagactgttggaagctttttgcacggagtttttcttatttttagagagcacgggctgtttagctagtctgttggagctgct

SEQ ID NO: 163497 - DNA, 716 bp, Zea Mays
gccaccataacacctcaagccatcaatcaaagactcatctcatccatagcctcgcagcagccaccgctcgccggtgggcctgccaccgcgggcagaatgccacaaccccgtttcgtcatgaacaagaacgtgcgggggagaaacggccctggccgtcaactggtgataagcgctcacgattgaatctcaaataccccatcgtgatcgaaaatcatagtcattgatctcggatctgttggccaagatcagatcgtgggatcctttaatctcgagcgttgattttagatccgacgaatgtgatgggatcagacacgtaccgattcggccgaggtcgtgggccatccaatccaatctagcgggggaaattcgatctgctatcataaaatatatgtcgtcgagctccgatccaacgaccgagacttcgatctaatccgcaccatagactatcgatccaacggtccacaaaagcccataccccttcggccgtatacttttgcaaaagagaccatgtgctctatattaatcaacctgtgtccacatgtgcggtaagatgattacctagcagtccctgagaattgcaaataagtccctagagctatatttaattataaaaatgaccgaaaactaaattaatccctatatttttcgttttaacttcgatttagtccgtttaagttgtgttagtctcgtattaaatttatctacgcaataacaac

SEQ ID NO: 163498 - DNA, 733 bp, Zea Mays
tttaaaacggttaccatcataattttaggtggccaatttaaatctaaatttagggctagagtatattatgcttcaagtgattttattaacaaatgcgaacacaaaaatcttcctttcttcaaaaatgtgtacaaattttcaaaggtcgcaacctattattttttaagaggcccacctccaaaaatcaattaatagaggtgaacgttttaggaggcccacctccaaaaatagactccaacccgtctaagacaatatcaacccacactatatagaagagaaataaagggagccctagcccattctctaagccaatatcctcccccacactatctttcttcctccaactatctcccacagacagtctctctccatcaccactatttttctctctcactactccctctgcatcatcacccctccctcttctcacaaccagtggccatgaaggatcttatgtgatgagttcatttgcacccgagcacagacgacgatgtttggtggaatgaggaggctccatgtcggtgagtctatgaggaggcaacatgttgggcctaggaggcatcaggtagcatcatgatgatgtgatgatgtagtaggatgagtcgagaatgttcgaggaggagacatgttaggaaaagtatgtgacaatggatctcgagaataaacatgaccaccaaggtgattataagaaaaatggaccaattcccatttcgtaacatagctttgttgtttg

SEQ ID NO: 163499 - DNA, 1460 bp, Zea Mays
ctcaattacatagtctgacaatggaggatatggggttaacattgtcagatgaggtgctgcagcagttagacaaggaggatagggagatggaggaagcaagtaatctgtccttaaatgccatcagtggaactgatagagaggggtgtatgagggttcgagcactgattcaaaatcaggtgatggggatgctggtagactcgggcagttccaccagttttgtcagtcagagaattgtggacaaactgactttgcagacagagcctgcttcacctgtcagggttaaggtggctaatggggagttcatgttgagctcgaggagggtggcagcattagagtggtgggctgatggacatacctatatcagtgacatgagagtattggatttagaagcttatgacgccatcttgggatatgattggttgaagggtcatagtcccatgcaatgtgattgggataacaaggttttggtgttcaaggatagaggtgtggaggtgcaattgaagggagatagcatggagaacaaggaggtgctgcaagtgtctgctgctcagctgcagaggtggatgaaagggaatgaggtatgggttctggtgctgttagagtcaatgcaggaagaagaggttgaaaagcatcaagaaccattgcagctcatactcaaggagtttgaggatgtttttgctgtgccaaccgggctacctcctgctagagtgtatgatcaccatatacctctgttaccaggttccatacctgtgaattctagaccctacaggtactcaccattccacaaaacagagatagaaagacaggtgacagaattactgaatgcgggtctgatagtacctagtgccagtccttttgcatccccggtattactagtccagaagaaagatggtagctggaggttttgcattgactacagaaggttgaactctatgactatcaagaatcgatttcccatgcccttggtagatgagattctggatgagttggctggcacccagttttttaccagtttggatatgactgccgggtaccatcagattagaatggcagaggaggatgagtttaaaactgcgtttaagactcatcatggacattaccaatttcgagtcatgccttttggtctcaccaatgcccccgcaacgtttcagtgtgccatgaatactgttttggatccttttctcagaaaatttgttatggttttcctggatgacatattgatttacagtccaactttggaggaacattacaaacatctcagattggttctgtccaaactcagggaacataagtttttcttgaagcttaagaagtgtgcttttgtgaaaagagagctgcagtatctagggcatgtgatatccagagaaggagtggcaacagaccctgcaaaaacagcagctatgctggcttggcctataccacagaatataactgagttgagagggtttctgggacttaca

SEQ ID NO: 163500 - DNA, 861 bp, Zea Mays
tgctttcaagcgtccctccgattgccattgccagtgcaattgtttcaaagttgatgacatggctctccacccgaatgcaagcaaactacagtgatgctggaaacgtcgtggagcaaactcttggtgccattaggacggtttgtcctactagatagcaaacacttatttttgttttgtctattcatttactatcatcaccagtaacttcctgatatatatcctgcttacctggtttatctgtccatgtttatctgaaggttgtttcattcaatggcgagaatcatgctataaaaaatataacatgttcataagaaaggcgtactggtcttctctgcaagaaggtgctgtaaatccccttggactcggttttgtgatggcaaccttaatttcaagttatggcttggctgtttggtatggatctaagctgatagtcgagcgaggttacaatggtggcatggtcatttctgttatcatgtctgtcatgatcggagtaatgtaagttttctgttatcatttaaaattttcttaaacgaacaatgacaataagcgagcaatatatgtttctgtgtggacgagcctcaactccgtcacatgacagtgactgtatctatcttctacctattcaaatgtaaagtgtactatttgcgcttccaaggaaaacatctgcttaacttctaataccaaatacccaataaggattaaatcatgcatctttcagacaaaacattctgtatctattctttcagaccattggttatatctacttatttcggttataaatacttcttttctgtaggtccttaggccaggcaacacgatcagtgacagctttcgcagaaggccaaggagcagcacatagaa

SEQ ID NO: 163501 - DNA, 429 bp, Zea Mays
gtaagttccttggtgcatgttctatcccttccgcttggtttatcatcgatctagtgcgaaagttagcaaccgggggagctccgccacctaaatctgaccaaggcgccaccgcagatactctgcttcgttggtctgtggctggggatggaagacgaagtattagccgttgatcatccaacatatggccgagattagatcttggttaccggtatgacctaggggagccatgatccgttggatctgttgagaacggataggattagaccatggtatgatgttgcgcgtgatgtcgatcttgttgtttacggctaggattagttgatatcataccccttcgccgcattaaaccggagccgcagattcccagacgagcggtcccgatttgtacgcaaatacctcttcgcgtgatccgatctgggcccttgtttt

SEQ ID NO: 163502 - DNA, 354 bp, Zea Mays
ttgctagtagctgctcaggtgtcggcggtgactagctgtgctgaagaggccgaggcccctgcctaaggtcgtctacctcgcttgcctcatcgtctccctccctgttgtaaaggtccaccacaacagtgagcgcctccacacatgtgctgctaggatatcgacgtgttgcaccacaacgactgcctcctcgctttctgtgactagaaagatgaaggcatgttggtgctatagttcacactgactattgtaacaacatttacaatatagctgacactgcttatgatcaaacttgaagattttatgatcatgagtatgacatcccagagatatccatgtacctcacattggctcgga

SEQ ID NO: 163503 - DNA, 603 bp, Zea Mays
ggtcaccctaagtcaagtaagcgtgagcatgtcgcaccgacttaagtcgtcgccgacttaagccgattgctccgttagcagggtatagtggtcaccctaagtcaagtaagcgtgagcatgttgcaccgacttaagccgattgctccgttagcagggtatagtggtcactccaagtcaagtaagcatgagcatgttgcaccaacttaagccgattgctccgttagcggggtaaagtggtcaccccaagtcaagtaagcgtgccgatttcaagtcaagcccaatcgaagtcagctgtaagtcaagaatatgaatgtctttggaaaacgaaagctttttgatgatgaagtcttcagattatagagtacaatattccttcaagagtttttgaggccttgctaagcgtagaactttctgaggtgttctatgttccacgagttccccacttatgtgtcgtccatctgagtaagccgatatgatcctggtcgtgtaacctctaatacaatgaacggtccttcccatggtggtgatagcttgtgtcgtccctccccgaccaagtctctcactgcaaaagattgatgtcgcacaactttgtcgtggtagcgc

SEQ ID NO: 163504 - DNA, 429 bp, Zea Mays
aaattatattttaaaacagatggagtattataaaagagaagttttcattttatgaccaaataatatatttttaaactagtttgactcgcccaaattcttctatagttgcatcttttatgaacgtagggagcatcttgaaagagggatacgtcatgatccacttttttcatttgccaagaaagcaaattccacggagctatcacccaaaataattcaatgtgatgttgcttgctgcatctcgaattaatttctgtctatatgaacaccctattcgcttggctttaatttgtatcggcttatattctacagtatttttgcctctataaattacaattgcaacagtgcaaacaactgattttaatttgaagcgaacaacctatagacataaaatttatatatattcgagccctcctgagcgataatacctca

SEQ ID NO: 163505 - DNA, 594 bp, Zea Mays
gttgtttcctataaacaataggggttctttaaggaaagcgcacgacgaagggggtattcttggatctcggccgtccgatcgggaatgaggcgcccagattagattggccacccaatgaagcgatacacgctgaccaccgctggatcccagatctatggttcagcttcgtccacgcacaacttgtactccagccgatcgatcggaatacgactgtcacgatttccaaacccaaatcgatacgcggctcctaatcgcagtcgcccactagcatatcgatggcccaccgccttcgtcctccttcatgcccaggtcgcgacggcgcccagaccgcggcggaggcaacatcggtgaactgcaaactggtgccccagcgctccatacaccgattgactaatcctacacatcgcgctaaacgagacggacgagactgaggtttccgtacctagaattgaagacccgacgaggccggacacgatgcgaggcggatccgcgacggcgacgtgagcacggtgagcaattcacccgcacccagtgcacggacgcccccaccgaggaatcaaacgcacaccccgtcgtccaatgcggctccgtggc

SEQ ID NO: 163506 - DNA, 465 bp, Zea Mays
ctttattatgtaggatagaagatgtctttagggcatatataggtttggttaagaaagtgtagggtaagaaaagacttcatccaagattgtggatcttgactcatcttggtgacctcacttgatccttgaagacttgagttggtgctcatcctcctttgatgatgttgatcatcttttctggtcttgtctcattgattcggggtcggtgtatattatcagagttgggggaatatggttaagatagttatggatgaagtaggctacatgatgcaagtcaaaatttggtttgatgtcaaatggtggttgatagattatgcaatccattaagactctattgattgggtaagttatgtaacttgttatataggtcgagttgttgtgtatggccaagttgatataagtctccaaattaggcttaagtgatttaggagtatggccttatcctttctaccagcattaagtaac

SEQ ID NO: 163507 - DNA, 753 bp, Zea Mays
gtatagggttcacaatttagggttcagggttcagggttcgggctttagggtttggggctctgtgtttagagtttaggcttttggggttcgaggtttaggatttcaatttgagttttaggatttgaagtttggtgtttaggatatggagtttaggatttggagtttaggatttgaggttttgtgttttgggggttgggttttagttttagggttcggggttccggattcatggtttagggtttgggtctcggggtttaggattttggggttcgaggtttagtgtgctatagctcactggatgctaaaaacatccttacctgtttcagtggccaaaacatgggtggtggacgggaggaatgaaattgttgttcgacgatgaaaacatgtgtcgcgggaggccaaaaatagccttaccggcctccggggccaaatgcgtgtacaatggttcggacactagtgtactatggtttggacactaaattggttgttcggccatgaaaacatgtgttgtagctcacgcgaggccaaaacagccttactttactttttagggtttggagtttggggtttagagttttgtgttttggtggtcgggtctttgttttagggttcgaggtatagggttcacaaattagggtttggggttcaatgttcaggctttagggtttggggctcggggtttagagattaggcttttgggattcgagatttcgggttttgatttgagggttagggtttggggtttaatgttta

SEQ ID NO: 163508 - DNA, 956 bp, Zea Mays
agttagaatagaacaaactgccgacaatatgttgctgtctgtaacagctaatgtcaattcctagcttcgtgaatccaatgctcttggataaggtgcctacaatttttgccccggcatggtcgcgaatgcatcccaaatttcttcgtcgaccccgccgaagagtatggactctggctggtaaccataggatatagcaaattcttttaactctgtcttatcctctttggaaagttcttggccacccaggtgccgaaggtcaaaatatttctcttccgaagaggcatctacaattctctttcctttatcaggcgttgcggccatgttttcttcagcaaccacatctgatatgagtttgtcaatttctaacattctggttgtgagttctttagcttcggctctagcaacatcttcagtatcggcaggaattgtcgcttttgccaccgaagctgagggcggcgtttgctcaattgcttgcattacattcacaacccgtcgtttcttctgcccccgaccttctcctccgcagccaaggcggtttcctttgattgtaaaaggctagtcagatctaacctcagtggacttagcagtgcaaatggtatagattcagtcattaccttcagaatctccgacacttcagtagcagagggtgaaggagaacttgtaatcttctctggcacatcttgtaccttggcttcggcataagatatcttgtcacgttttcgcttctcgggagccgcatcctttggctccggaagagtcttttgttttttcaaagctttataatcctctttgacagaccgggcggcttgcctactcagaatggtcacaatccttttccttttttcggccccttcatcaagcctgtcgtaatctggataatcaaaatttagggcatccattacccgattcaaccttcgtttcgaccgggtgccgaaggcagcagtcattaattgatc

SEQ ID NO: 163509 - DNA, 657 bp, Zea Mays
gccgagcctcgttaccgagctcgctaagtgatcgaaccgagcctggctctgctcgctattccaccgagcctcaccgaaccaagcctggctcggctcgtttccagccctacccaagagcgcagcagcgcgtataaataaacggcgcgctcctagtcctccacctcccgctcactccgagtctcactctcactccgtcctccctcttccttacagaaacacaactcatgcagctcgtacggcaccaccaccaccaccaccaactgccgcactgacacatgcatgcgcagaaagcagctagctagcggccggtggccttgagagccgctcgctagcttttaaaattagccaccaattcaatctctagctagcttgggggagctccgttcctagctacacgtacgggcggcgcggcaaccaccagccgtgtagccgacctagtacgttggagcgaagcatatatcggcggccgcatcacatggagagcgcgatggagaaggtgtgggagtcggggcggcggatgagccggagcatcgggcggggcatgggcatggaggcgtggggcgtcgacgacgccttcgtgccgcagcacggctcccggtcccggggcggcggcggcggcggcggcgacgacgacgaggaggcgctgcgctgggcggc

SEQ ID NO: 163510 - DNA, 327 bp, Zea Mays
cgaagtcggaggatacttcctcttgtcatttttgcctcccttgcctctcttcttgcccttgccatccatgcttctcgtcattagggatttctggtggagaaaaggactatggagaaaaggagagccaagacgagtgaagaaatgcacagcagacggttggcttagttaaagaagtagaaggatgccctttcgtcttatatccgtacaacgaacaatcacaagccatcaagagtcgtttaaaattccaagaaacgacacgcttctggcaaaacatggcataacacggcatcggaggtcagtaaatgaactgctcacacgcatcattac

SEQ ID NO: 163511 - DNA, 703 bp, Zea Mays
gcacggagcagatagaagtgcactttccaatgtagttagacagagaaggcatggctgtgatgttataatgctgaaggaccccaagaagagattatggcctgtcgtccaccaccactgcccgttatttgtgggcttcactgagggatggaaacatttggtgacaacaaacgaccttcggactggggacgtctgcgagcttgttaaggggccagacgatggtgagccggtgtactctgtccggatgtgtggtcacaaaatttaaagccgccccggcttcatctgtgcacttctcttctcttatgtgggatactaagagatcttaatatccgacataagagaagagaagcacacacatgaagccgaggcggctttaaattttgtgaccatacatccggacatagtacaccggctcaccatcgtctggccccttaacaagctcgtagacgtccccagcccgaaggtcgtttgctgtcaccaaatgtttccagccctcggtgaagcccacaaataaccggcagtggtggtggatgacaggccataatttcttcttggggtccttcagcattataacatcacagccatgccttctctgtccaacagcattggaaagtgcacttctatctgctccgtgcttcccgacccgattcaggcattcagccgatgccattctccgtataagtcccaaacagagaatagggatgag

SEQ ID NO: 163512 - DNA, 787 bp, Zea Mays
tttttggcccacttggcaaatctgtctgctcgtcccgacacggtgggatggcgccgacatacgggtcccacctgtcagatggtctctgcgtgctcgagcgcgtgaccgagtctaccggcgtttcgggcgctgactcgggggcccacccgtcagctacaggtcaccagtgtgacatgggtgtgcttggtcacggattgcctggcacgccggacccacctgccattcaccgctcgcgcactgctctgtttctcttcctccccccaccccctgtgtaaccgtccgcatcgagctggtcgggccggctcaatgacctccctaccttctcggacgccatctactgcgcataagtagccttcacggacccctgtcgcgaaaagccctaggagaggagggaagtgcactgtgagcccttcggtgaatctttccccctggtcgccgccggccgatatcaaagcgtgggtggtcacatcggggtgtggcgggagtgttcgcaagggcagaagggagaatggacccgtggcgatctcgggattgctcatcggagtcgcgttttcctccgagcttgcgtcccgccgtggccacaaccacctgagcaacgatctaaggtaagagttgccacactcagtttgtcgtcatctcttatacgctcggcactagacggtagttaggattggggcaggaatcgccgggtcgccgccaccggtgaggcgcgcggctactgtagtgttcgccaccgtgcccggtctcagcggaggattggtgacgtgtccaaagccgtggatcagct

SEQ ID NO: 163513 - DNA, 1017 bp, Zea Mays
ggaccttctcaaccacctacgctccttgccgcgaatcgctagggagtccggcccaaccccgtggggtctataagctaggcagctggtttcccccttctctgccctcttcgtaggttcggctaccagagacaggaccgtgcgcaggaagggggggaatcgtcgttacaagaccccggacatcgccggtgccgctcgagcttcgtcgcgcgatttggttgtgtcattgcgccattgtgctcctgtggtggctccccatcgtcacgaacctcccgagatgctcatggtggcgactgtgaccttgaggactcgtcggaagttggagtttgggcggagcgcaccgtcacgggggtctaggtcaccgcactgcgatcctccggtgagaatcccctcacagcccttacctttacctctacgtgatctagcatcgagtgcggtagatcgttgtgcgcctgtggctagcgatttgtggccggagcctaggcgccgccgcggtgctgcataacaccgtgagccctgcccaaatcccagcacctccaacactaaacccacccttcacatgttcgccctgacctccacaccatgtagcacgttttggatcatagtctcgtgcttggcagggaaaaactgggtgctcggatctgcgcggctgtggatggggcatggcgccgtcgcccagctcgggcgcagggaggaagaaacgtgggtgaccgtcggatcctcgtttggacggtccagatttgatggagcgcagcaattgggtcggggtagcgtgtgccgttcgatttagatccggtggttgacagagtgcgcccttttaaaatgaccgtgatctaatccaggccctcgtttctgggttgggcggatgagattgcgccataccctttcgtggcgccattctttctaaagagaccctggaaaatgtattgagtcaacccgcagtcctgcgtgggttgagtctgagtcacaggaatttttgtagagtaaaccctgctgttctcagattttgaggcccagtcc

SEQ ID NO: 163514 - DNA, 670 bp, Zea Mays
ccgccctcaccgcttgacccctacgacgacatcgctgccgcccaggccctcttctccgagttcaatgccgtccctgcggacgcgcttgcgctcttcgctcgccacgaggacgatcgtgctaccatctccaacaactccttcagcagatcagcgacaacctcctcagcctcgtccatgacttccccgacctccgctccacctcaggatggtgttcccgtcctctccatcttcaccgccgctgtggatcctaagcacaacgtcacgccggacacggatgtgagctctagcaagccactgatgtcttcttcttcagcatcagccaccgtcgccaccagcaagctggcgtcacccttgatttggacaggcatcacccttgatttggactggagtcacccttcatcaatgactcccacgccatcacagaaggttgtcctcacccttgatttggacaggcgacacagtatgcagaagggcgcttgcaacctattggatgaatccatcaccggcggaggcgagatcgagctggatgccaccaccatcctcgacgtgctgcccggcgcgcacacagtgggcaaggcgcgatgcgcctcctacgccgaccgcctctatgcctccgcctcctgcaccacacctgaccaggcgctcaacggccactacactgataagctgc

SEQ ID NO: 163515 - DNA, 347 bp, Zea Mays
gccactacgtacgactcaagggaacctcaagttcaccttcatcgccatcgaatacttcaccaagttgatcgaggccagggcagtatccacaataacgtcgaagactgcccagaagttcttctggcaaaacattgtttgtcggttcggagtcccatccgagctcacagtcgacaacggcaaacagtttgacagccaggacttcagggacttctgcttctccatcggcaccaagcttgcctttgccttggtataccacccgcaatccaacggcgtcgtcgagcgcgccaacggcaagatcttcactgctatcaagaaaaggcttctcgacgataagaagggtaaatggg

SEQ ID NO: 163516 - DNA, 580 bp, Zea Mays
tatggatatacctctaatttatagctttcctattttttataaacttaaggcaccatgcatcagtggccttttggccatgtaccacagactacaaataccttgtttgacaaaaagaaaaggagacaaggcagtatagtgcactaaggaagcaccaaagcaagagtaaaattagcagcaacccaatctatttgtgcactagataatgcctgtatcggtacagagtagaaaccatacacacaaaaatatgatatagcagcgattgtttccaacaatatctgcaagagtgtggagatgcagaatgcacaactgataatgcttacctcatcgagaagaaatcggcacatatgaactgacttagcagatgttgcagcaacatcaacacaaagcagaatctgaaagatcaaatgaactcttcagatcaaatatcacgaatgggtatcattaataatactcaatggagacaaaagcgtaagctcctaactgtagttaaagaaccaagctgcgtgcgtaatgacaaaatatccaattcatgtgctgcatttgtattatctgtgacacgattaacagcatcctcaacctg

SEQ ID NO: 163517 - DNA, 344 bp, Zea Mays
gaggaatttaaccttttagattaacatgttaatgtcaatggtgacagtagtttgcagagtcgatctctcttgctatccaagttgtgtaatttgccgtgttatccactttcatgttagtgcaaatgagttgatgaggaaatggcttgtacgcttatgtgacacattatataactatgatggttacaacaaagtggcgtacctggaagcagcagttttggatggtcaaattactgattttctggatgataacactgagtgatctctctcactggcctgggtgttggggtgtaaatcatgtcagttttcgtcaaaccacttactaatcgtttttaacaatgttttca

SEQ ID NO: 163518 - DNA, 941 bp, Zea Mays
gaaaagcccgttttctgaaaggactaagaccagaactcaagaccatccttgccagcccagatttccttagtttctcgcacctctccaataaagccatacaagtggaaagggcaaaggaagaagaaaaaggtcacctcaagaggaaattccaagttctccgagctcagcagcaagaccggcaccagagagctcgatcctttgggtttccacccaagggaccaagcttcaatagaccagctggacccactctatcacgtttcatccagcagagtcagagctcctttcagccccctcggtcgcaagcaaccaaccaccagcaaatgcatgttggcactgcggagaccccagtcacttcaagaataactgcccctagttgaaagcaccaggacctacctactccaactcggtgaatggccccaagaatacctcggcacctgcctccaaggcactctcctccaacagtcagcagagcaagacccagtatcagggcagagcacgagttaaccacgtcgatgctcaggaggctcagcaagcttcggaagtagtgctcggtgagttccttgtcgaatttactcccgctactgtactttttgattcaggagcatcccattcatttatagccactagttttgtggaaaagcatggcatcccctctacgcacctagaaatcccattggtcacccgaaacccaaggtcagaccttctatgccagctcaaatgctcccaagtcagaattcttttaagtggggtagtgtttttggcagacttaaccgtcttgccatcccaagggattgatgtgatcctaggaatggattggctaactaagcacaagggcatcataagttgtgcaagcaagaccgtccttctcactgaccgccaaggaaaatcagtttcttgtcaggctcaaccacccgccaacgatccaatgatgtttaatctag

SEQ ID NO: 163519 - DNA, 639 bp, Zea Mays
acttgctatataaaatattcttagttttagagacatgggcgaggccccatatcccaccatgtagggttgaacgaacctacgcctggcaatcaaactcatggagaatacgacactcttatgttatgtccctatgctttgttccctttttatctctactcctttaaagcatgagtttccatcgtcgtgcgtcacatgtgaagcacgtatatctattttttatcacccatgtcttgcctatcacccagataaaacaagccttatctcttgcatacgcaagcaaccatgtgagatgcaaccaccatgagcgcttatattaacccccaacttcccttatatttctccgtctccacctccatcgtcaccaagattctttcacaccgccgttgaggacatcaaacatgctatcttactaccatctgactttgccaactgccgccaccacaccccactcgccgcgtcacctttacctttcccgttgccaaatgccttaaactattgtcgcaactctccaccgccatgcgcctctgtaggtagcatggaaagagtagctgagggggaggaggaggtgccaccgccggcgatgtttgactctcaaccgccatgcacatctgcagtcagccggacaagaacagccgaggg

SEQ ID NO: 163520 - DNA, 917 bp, Zea Mays
cttccataaaggcagcaggggcattagttaagccaaaagacatgacaatgaactcataatgcccaatacttcgcagcaaagggcaaagggcgacacattagctaaagcagcagcaaagggcgaacccttgccttccgatgtattttatcacatagtcggcacactagccgtaagaaaccccaagggtctgcaaataacgcaagacaccgacggacattggatagtcaatctaataatggctgaagactagcgggcttcaatcaccctatatcttcaggtccactaccacccatctgaccgcagcgaagccaaatggttaatacatagaagtagagacttcaccatagttaacagccatctctacaagaaaggaatatgtcaacccatgttgaaatgagtaactgaagccgaaggcatagagcttctccgcgaagtccataggggtatatgcggatcacattcaggactgagggccctcactgttaaagtcatacgtcaggtttctattggccgacaattgtatgtacagccaaccgtgtaacccggtcgtgcgaagcatgccagaaattctcacctcgaacaggtgccccttcgcaactcacaaagctttttgcaaatacctagccacttcaatgttggggggctagacatcggtggactactgcccacagctcaaggcaacctaaaattcaccttcatcgttgttgaatacttcaccaagtggatcgaggcaagagccgtatccatagtaacctccaagacggcgcaaaaattcttcaggcagaacatcgtatgtcggttcggagtcccatatgagataacagtcgataacgacaaacagtttgacaaccaagacttccaggaattttgcaactctatcgacacgaaggcagtgttcgcctctgtctaccatccgc

SEQ ID NO: 163521 - DNA, 875 bp, Zea Mays
cttcagtttgtatgttgccggacagccgccgccgcctgctccctccttctctctcctcccttccattcctctctcctctcccccagcagccgcaggaccaactcgcagccgccgctccgcgtcccgtgccatggccacgccgcggccagccgaccccgccaggacgccgcgacagcgccctgcgcgacgccctgcacccgacgcccggccgagccacacccgagccgacgccgcgaccgagcagccctcccccacgctaggagccgagcgacccgcgcctgcagccgctgaccacgccatgggccaggaagccgagccgccagacgccccgacaccccgcaggaacagacgtcgcgtcgttcgttcttcgtcgcgagtaaagaaactttactgctgccgtttcctccccctctattactcctagctagtcgtttctctattctccataaatagctagcgcccgtttcctccccctcggcctataaaatccagccgtgtcctctgcagaagttgtcctgcttctcctcttccactcccatgagcccctgcgttatgtgcgtagccatgtcgccattgtcgcgtcaccgccctcgccgatcccgtgtcaggctgtctgctcgctcgcttctctgttagtggagcctgaccctgccgagcccgcgcagcatctcctcgcctcccactgtctcactgccttcttgccggcctcaagtcagccgttggagcccctgtccgaagcttctcttctctgttgccgagctgtaccgtcggccgcatctcgtcgacgacgtcctctgcctctgcgaccgaccactaaccctgtcgtgcctcgccggagcttgtaccccaccgtcagaacgctcaccgacgaccat

SEQ ID NO: 163522 - DNA, 792 bp, Zea Mays
caccgggataagttttcaaaccaaaggaacactaaactatatactcactacttagaaggttacacgctttaaaacccatacgcttgctatctaatggttagagaaataaagattagaagcagcataatgtcagcaacgaacgccctgactgtaacccatgtacataaatgcagcataactgcactcaccggcaaatactcgtcatgatcttaaaggcagtctatattaaatgggtccaatctatcgttgcttcggtgcaattgctgacaaggtatcattgtggtggtggccttcttgtacattgtttcttctctattaatagatacatgccattttgaaaagaaggatgtgtgcacttactagccaggccatatgcccttggtgcataggataccaagtttgtgtatcatgggattgagaggcaccaggaatctttgctacacaacgcagtaggattgaggtgcagccatcaaaccaacgccgcacaactttgggacttgtttagtaggactcatatcgtggattgagttcttggactatatacgtatatacggttgtaggtttcaagaatctagaacctgactttgcctactccttctgcatggcggttccatttggttgaacttgacttcgcctactcctaatttgtttaatgatgttattgagcatctcaaattgaaagagatagagatgttgggtcgacaatttacatggacaaataatttagacgcaccaacatttgagaagttagatagagttcttatgagcctagaatgggaattaaaattccct

SEQ ID NO: 163523 - DNA, 790 bp, Zea Mays
agccctcggcggtttgaaaatctagcaaagatcccgcacactatttgcttgggtcactgacaaatgcaaataagccctcacactttgatttcttcacatcccgcagtccttgacggcgaacgacgccaggccgaaatccggcgaacttaaactggccaaactacgcaacggctagccctcctctttgttggacaccaaattcaaccctacgcgactatttccccccactttattgctggattcgagctctacatcaccctgcccacggtgacagcacgacgaatggactgaccgagatgttcccgatgatccaatggattctagctcaattggatgcgtcagagagtatcaagagcacccaagcatactgaaacgaggaaccagaggacatgaacggacctaaaacacgttggccacggcgaggtcacaaggtgcggtgtttcggaccaatttgggggaaatccgaaattggggagctctggtgagcaattggaggcacgacttggtggattgggtgcttgactaccttacgaacccgacgacacactcaatttataggctccgggggcggtggccagtgaatttggagttggcgcggtggcggcggagagaagagttgcactggcgcaaggattggcggctttcaacgtggcgggctcactggggatcaccggacatgcataatgcgagtgactgcgacgtggtgaatgccgaggcacgtggcgcaagaccgcgaggtggctaactccggcgaacctatccaaagcggccgtgacacgctcgggtacgg

SEQ ID NO: 163524 - DNA, 518 bp, Zea Mays
gcttcgtattctgctatgttgtctgtacacttgaattgcaacttggcggcatatgatgtcttcactttggtccatgaaacaataatggttgcagcaccagatccgaaggatccccatgatccgtcacagaatactgcccaaatagctttatttgaggggatagctttgtcatgcgggctaggggtccagtcagcaataaagtctgccaatgcttgggattgaatggatgatatatgaacaaaatcaattgcaaactcactaagctatgctgcccactttccaattcggcctgaagcctctctatttcttatgatatctttcaatggttgggacgatggtacaatgatgttgtaggattgaaagtagtgtctaagctttcttaaagccattaggactacatacaggatttttccatttctatgaaatttcttttggatggacctaatacttcagacacaaagtagacaagcatttgctcttcacaccttcgtctaccacctctcgtaccagagcagcac

SEQ ID NO: 163525 - DNA, 387 bp, Zea Mays
tacgatttgtgcccggtagcgtgaggataacgatgtttgataaaagatcttagcgctggatgagcttggacccgaccactaaactattcactgtacccacttgttgtacgactaaccgcggtgtcctcactggagttcgccgtcttcgtacctgcgccacgtgcctaggagcattaccacgtcgcagtgaaccgtaatagggagtttgtccatcgtcgggagccttgcctcagtaaaagccacgttagcgcttctcggtgatttcccctctctccggtcgatagcgcgccttctccaaattagacgccaccgccattgctctctataaattgatgcccccgtgagctccgctaggttattacgcacccagtgcactagctctcgtcc

SEQ ID NO: 163526 - DNA, 654 bp, Zea Mays
cgcgctgctgaagccataccgatttctgactgcctggttagcttggtttgtacgtatttgtgatcctcgtcagagaattatggtatggtgagagggaaatgctgcgacagaaataggatgcctctgggtccgggagaatgatacaatgcaacagaaatagtgatgcgggtttagttgtttactgctgtgtttcatggtcgtggagatcacgtacgacggcgctgacaagccccatttctgtcgtcatcattaaataaaatgaccgtgctagctgtgcctggaaggtgcctctgagttttgttgtattattgatccggctggaattcaggctcatggttttttatttggccgcacaccttgatgttaattgactcagtatatgtggtgcatagatcctgcaatagtgggcttgcactaacccactcatcacacgaacagcggaacaggccatggatgccgaccatcgttgtgcagcattactactcttcagagccgttttctcaacactttatttattgtgcattcgttcatcatcctaataatcgaaaaaaaggtgttctacttgtgcattgaaaagtcttgaacacagcaactgggaatataatatgaagttgatgagcaatagtttgcagtttggtcaaaactcaagacttt

SEQ ID NO: 163527 - DNA, 478 bp, Zea Mays
gttcttagtgagcatcgtagctgtcttactcctaggatgttagaggccttaatgtgctcacaggattggcttagaaaccaatacaaaggtatataaagcatttaatttggttggttgtattattaacttgcactaaaattttatgttcgtgaaatacagatgatgcaaatggtcttccttcgagcttttggacggttcttcaggacatatcagaagggatgcaggtaatgttctaaagacaatgtcatttttggtttgatgaatacatgttgaaatttactttcttcatttgcaggatctggtaatgtgatattggtgcaaggaagttagttcagactttgtgacttgtgagcttgttgcatgtatttggtatacgaccatgtgtcatcttatttatgtactcttgttggaactgtaatcttgaagtatggactatgaacagaacttgtgtttgaatttggtgtatcattcatgtgtg

SEQ ID NO: 163528 - DNA, 981 bp, Zea Mays
agagcctataggactggtcgtagaccgcagccctgaccttaaaagttccttagcaagaaaacacctcttacccccaagaaacattttctctcctttccccgatattaacagacccttcttttcttctaccagatggaaagctcttgggtcattaggacatcatactgctcagaggaggaaggctttcctcaccttctacggagttgcggactgcgcatggggatcagcaagaagcccaaatatgtctggaaggaataccgcgaaaatggaatagagaaatactctatggcagtctacctaggagaaagccgaagctacccaaaccacccccccttccaagtcaccttcatcgggcaccgcttcccagacacttgccaaagtgttgccggaaaggccctcaaacagctatgccaaaactacagcagagagatctttgaaaccccccttcgttatttcccacccaacaacaaaaatacccccacctggaggaaaagacttcaggctctgtcagggagagaccccaccgaggatgaccccaccattgtctacatggccggatacctccacaccctcgatacccactacgatgatctctcctcccactgcacccacctaaactcccgggtggaaagcctagagcagcaagtcaaagagcttaagaaggagaaggcatctctccaagagtgtctccacatagcggaaggcgaggaggccaacacccgtgaagcctatcgaaccttgaagatggactatgataagaagcttaagaagctcgcccccacaatgaaaatccggaagaaaaccacgagcaaaggatgccagacggaaaggaggaagaaagctcccccagcaccagcttccgccaggatagagaatttgtccgatatcgaggatatgtccctcgctagccttgatgaccttctcaaggaatttggggacactctagaaaaggaattcggtagtacctcagggaacgctcgc

SEQ ID NO: 163529 - DNA, 671 bp, Zea Mays
agcttgtggtggcgatctttcattttcaggtacgtgtatgtagggataaatgacccaagattacgataacgaagcggtggaaactgaaaggagagaaggcatgagtcttcaatgaaagggtcatcaaagagggcacttggaagcaagaaatgatgaaactgtatgtgggagaagatgacaacctatatttggaaggtgacctgagtggtatgttgagcaactaaagggagtgaaagaaaagctaaagatacttaatcgtggaatgagaaagtccaaagtgctattaaagagaagaaagactgctatagacgtctataccttgttagcagtatgcacaacttagagaagtataaggtagcaaagaagactacatagtaaactattaatgtggcaaagggtagaatgatgagtacgaaggaatgagagaaggtcattataggatggcttgagtccgtgagaggaagacaatagacttctaccaagttaactgcatgaagtatgaaattaatcacttcttggtgaaggcggacgagattagacttgagagggatgaaagcggatcaaatgatgggccatgatggtatcctaaatgagttatgaagatatctttaggacatagctatagtatggctaaccaagttgttcaaccatatcttctagtcaaacgagat

SEQ ID NO: 163530 - DNA, 840 bp, Zea Mays
cgatggctcctctctaggatagtgagggaattgctagcatcacgatacaacctatccatattgtcacgagaatcaagaagcgtttgcctctcctcctacaagtaagaagagcactaagcatcgaagcaaaggggcaaaacagaagcagtcaggaaaatctacctcatgaggcatcttctctgaatcgagctgggcatttaaggaagagttcagggtccgagcgctgtccaagaatgcagaaacctagttcagatcagcttgactctaggcatacctttcctcagcatcggagcaccgttgagtcagagctggtgaagcaacaggaaaaaatacaagatgcaaaacaagagaagcaataaatagcaaaaggaagctacagacccactaactaaatttggaggactttagatcatctatttgcctctgaagcaggagaggattccactgcatcaaaggcaaaacttgatcgggcacaggagcgccacaagatttcaattggaccgacacagagttgcgaacattctgcaagctcaaaagttagcaagagaacccgtctgtcaacataattaacgcaaggcaaagatcagctcacctgaaggttagaaagaaataaaggaaatcccagagctggaggcatcggtgcactgtctgttgatggagcattgacagggacaatgttgagagcatcactcaaggagaccttagctccgacagcaggtgggagattcccagcattcgagtcactgacctctaaggtgaccggaccgacaagaacagtaggcaaactcgtcaccacaggttccttagattgaatcggtggtgatccgacgtgaacatcca

SEQ ID NO: 163531 - DNA, 684 bp, Zea Mays
ctccctgacctcggatgcctcgccctaggaaacaggttaagtcgggtgctgttccttggtggcatggtgacaccagatgttgcggtggcggtatcagcaacgatgcgcctcgcgttgcggggtctcctcctcctgtactatcagttcatcatttgaggcatggccgatctccaccactgcgttgatgtagatgacatcgatgtaatggagcagggatctcgacactgtaggggcagcgactgctacttggggacgagcactcgcggatttagtcagttgtgtcctgccgaacctaggagcggcggggaccttggtcccgtctctcctccgagtgatttgggtacatgcctgggtcgatgaggtggataacggggttcaccgcgtcgggatcatcgtgatggctggtcacggcggtggtgctgaggaggtcgtgcatgatatcggtgcgggggcggcttgacacaacgcatggttgagtcggggcctcaaaattcagggatgtgtcggcgcaagtcaagtcgcgattcaccagggtttagttacttatgtcaatggggttgtcccgaatctcgatgagggcctcttttccgtgaaactgacaatgcaagaccttgaagcgtctttctctacgttcgcaacgcgggcaagggatccaaagtggaagatctccccggtggtgaagtt

SEQ ID NO: 163532 - DNA, 574 bp, Zea Mays
gaagttcatcagcatgcacccaaggtgtttgatcaaatgccgcagaagttgggcggttccagcacacctccatatgtcaatcgcgcggcacctgacggcttcggccaccgttctgcttaccagaaccggggtgatgggttcggggtggtcaccaccttgtccccacctctagtcacaggtattaatcagctcactcatgaatctgttttaccttttatggtgcacaatatggatccgttgttggcctcatactctactcatttagctgcatctctaccacaaatcagctttccccaatttgatggtcaccaccccaagatgtggaaagctaagtgcgagtcttattttgaggtgtttaacactcctagtacgctttgggtcaaacttgcttctatgcactttgtgggatcaacagctttttggtggcaatcagcagatccaggggctcgtcctccttcttggcgggaactctgttcagcagtctgtgctcgttttgagcgcgatcatcacaatcatctcatccatcagtttttccatattaaacaaactgatagcgtgtcagagtatgtagatg

SEQ ID NO: 163533 - DNA, 1155 bp, Zea Mays
ccgggtgtgacagaagtgttatcaaagctatactgactctaggtcgttagactagttagaaatggaaaaagcctagtgtgttcaaaacatgctaattttgtttttacaaaattattttattaaccttacctctttaaacatcaactaagttgacattttctcttatagatggtttgtactattcaaaccactcggatcaacaccaactacatccctctgccacggcaagttcctgtctacccagtggtagtcgaggaaatccctatggatctccctcgcattcgtgtggagaacggagtcatactggaggacagctcggaggagtttctgcctacacccaccccattagcagaatcactagccttcacagctagattgtcagctttgacatcgccaacaccaacagtccaaacccctgctcctagaggcgacgacccagacgactctggtgaggatgatgacgacgacgacaaagaagaagaagatgaggaaaacatcaacgatgaagccaacgatgaacagcaggaccattacatggggttatgtcctgtcactcaacattatacatcaatctttgagacaaggcacttccctaatctgctgcaggatgttttgcatgcgctgggaacctacgttcgacccctgtatgagacaaggcaagtgtacgagcatcctcaggcttgctactacatcaccctcattcatgtcagggtgatggatgcaggtgatagagggttcaggactctgtcagctcatgagtctctaatgctgctatccacctacgctgcttcgaccagcgatgctgctaggcgaactttgtggtccctcagccacacctaccggcatcaactacataacacgaagtacaggcatcttcctctgcgtattcgtggagaaagccagaccagcattgttccaggtggagctgatgaagatcgcctcaacaccctagttggtgtggtggtaggtcttaacaccaatctggatagtgctaccctggacctctctagggtacacttggagctggaggatgcacacacaagtatcgcaaccctggaagctcagcttgatggaaggaatccccctgaagttcaagtccctgccatggcgttatcccctccccgcaagaggatccgctatggagaaccaggatcc

SEQ ID NO: 163534 - DNA, 765 bp, Zea Mays
ggctagcgatccaggtcaggatttcgatgactaaccgcttggcaagaagagaaatggcaccataacccggtgtgtgcactctaccacacctttcaagaaattgcgctacacctcttcttcgatttgtcgttttatcaggcgcattatttggatagaggtggcatgatgggcagtagttgaagatttatctcctaatgcttggggccaacatgatttagttctccaatggtggacgatgagagccagagcctcaatggaaaatagaatcggcctgagaagcctgattatgctagtgatttgggagttttggtgtgagaggaatgcgccattttttttaccgtaaagagtcatcagttattcctggattgctgaaggtgccctgcattcatcgagcctccttgcaaatagctagtttgtctaaaaaaagggtatagaccctgaaggcctgcacaaataatataacagctaaacatctttgttcattgcgatgacgatgaactaaataatttatttggatactgatttttttctacgacacataagaactagaaatttataatatcaacataatttgtttgcactgtgcatggtcaagccataccggctgctaaggaacggggaatattttttctgtgcgtgcagacaccgaggagctagctaggagacactctacagtggggccacatggagcggtgtacatgttcttcagttggctacgcgcctacacaccttactgctcttgttccacgtcctaattcttcttgc

SEQ ID NO: 163535 - DNA, 897 bp, Zea Mays
ccgatggtgcctatcgggactaacacattctcaaaagcaaaaattgcagcacctaagagcaaaagaaagtagggaaagaaggcaaagaaaatatttaatgacacacatctacaatacccgccgataagagatggaaacctaagaccaccaaaacaactcaagtagccacaaaaatagaagaaaaaacagcagttgtataaatctctgcaggtacgatgaaccgtccggctccagcaaccagaccatctaagcctaacgtggaccgtccaaccctgagtccagactatctgtgcctcactaggaagccttcgatgacatgccatcacctattgatgaggacaacatcgaggaggacgatctattgggagaggatctggtcgactacggggcctagctcgagcacgcaggtatggatgttaatgtaattacatttttagctgattatgatatcattggcaatgatgaacctctagttgctcaattcgattttggtcctaaagagatcgtcttcaccaaaccaaaagaatcgatcaaccatttaaagtcgctctttgggcgcgaccacattgatgaaataccgattggatccatgcaaatcaatgtataccttctactttgcaccaaaggttgttacaatgggtaggaggcgatggcttcgtatcacccatataaacactccaagccgcattatggcactaggcgcaagctgatgaaagaagatttcatatttatttaatgcatctataaccatcagatgcatcaagaaccgaagaccgacacaaaagaagcttttgaacacaactattttgtttttgtgcggtcacggggttgtgtcttcaccactaggacgaaccatgtatgtactcttaaaataccctagcttcatcaacaacttca

SEQ ID NO: 163536 - DNA, 456 bp, Zea Mays
agaattttgagataaatgagcctgaagttggactgtcagactgcttgaaatctgaaattcagattaacagtggaatggcatgaagttagggctcggatttaaacatgatccagcgccagtttgagcatgattcccataacaaatttgtagctagtatgtagcactacaactttgatgcagagacttggggatgtttccatagaaaattgggaggaatctggccctaaatcttggctgtcagacacactgaataagcatcgccatggtacagtgcctggacagatcagatcaattgctcacctcgccgccgatgacttcgcgccgggatcatcgccgccgttaagattcgcactcactggtaaccggatagcacttggggtcgcgtagatatcctcgtcgtggataaactccggccattaaacaacttcggccatcgtaccaggttcaccgcagcgg

SEQ ID NO: 163537 - DNA, 537 bp, Zea Mays
tagcactgacgacgcggagatagatgttgtgcttagtttgctggctggggaatcatctgactcgacccatgccgagctaatggctatcacagctagacaagaacttggtgaagcggtggagactcgaaagcctgaaggtgctcgcccgaagtgtacacgccgagtgagccgaccaactgcacctgttgagaaaaagaggaagaagaggcggcttcagcgactgtcatgcttggaccagggtgcaggtccttctgctccggttcgtgatgaggtacaggcagaggtccttcctgaggttgatgccaagggttgtgatcgtgcacatgctgttgtctgcatatttgatgaagatgaagaagaagaggatgaagtcctgctgatccgcaagaacatccggcactatagaggtagcgaggggggtagtgatattccttctccagctttgtcggctcttgtcagtcttcagactttgatcaagcactggaagaagttgtccccgaagatatgttgtcagagccaactgccgatgatatcccg

SEQ ID NO: 163538 - DNA, 1119 bp, Zea Mays
attgccgacttaagccgattgctccgttagtagggtatagtggtcaccccgagttaagtaagtatgccaattgacagcgaacaatttgagtgcctttgaagtctttttattgatgatatatttctcaatttacagaatacatcatcgtcccaatagcttctgggatgtagctaggggtaaaacttcatgaggtgttctatgttccatgagttcccaattttcgtgtcgtccatctgagtgagacgatatgatcccagccgagtgacttcagctactatgaatggtccttcccatagaggtgacaatttgtgccgtccctcccccgttagaattcggcggaggacgagatctcccactgcgaaggatcgatgccgtatggccttatcatgatagcgcctcagagtttgctgataccgtgctgattgaatcactatgttcagtcgctcttcttcgagtacatcaacatcctccagcctagtagcttcagcttctgctatgttttcaaagattaaccttggtgccccgaacttgagatcagcaggtagcactgcttccgaaccatagaccatgaagaaaggtgtgtttccatgcagagctcgactaggttgagttctcaggctccaaacaagatacgacagctctctgatccattttcctgcgaacttttcattcttgtcgaagactttctttctgagcgcctccaatatcatcccgttagctctttcgacctgcccgttggctcttgggtgcgccaccgaggcatatttatctgaatgctcttttgctcgcagaaatcgaagaactctgaacttgtgaagttggatcccaggtcggttatgatgctattcggtattccaaacctaaatattatgtcttgtatgaattctatggccttagctgaagttagagaagcaatgggtttgaactctatccatttagtgaatttgtcgatagcgaccagtacatgagtgtatcctccttgagctttcttgaaaggtccaatcatatccaatccccagcacgcgaacggctaagttacaggtatggtttgcagttgttgtgctggtagatgctgctgctttgataagtactgccaggcttcgcacctctggactaact

SEQ ID NO: 163539 - DNA, 884 bp, Zea Mays
gagaacctaaggatgctgaaataagagagcagggagcacgaacagacctggaatgtgctgaccacggtgagggctctaccacggtggcgcggagaaccaaattgggggaagagagaaattgggaggctctggtggataatccgaggcaaggactggtgcaatggatgtgtaattacctagcggagccgcgggtacgctcaatttataggctccgggggcggtggcgcatgaatttgggttggcgcggtggcggtcggagaagaaatgggtcactggcgcacgagattagtggctttcaccgtggcggctctccgacgatcaccgggcatgcatgactcgattcactgcgacgtggttcagcgctttagcacgtggcgcacagcggtaagcggccaacggtagcgaggtctatcccggctgctcgacgagcaagtgggtacggtgaaactcagccgcgaccgagcccgagtcgatccaggcgccgagatctttaatctcctcagttatccacttgtgctgcacgaatcgtagcggccggcgtgaatcgtggcgcagaggtcgccggcgacgagcttctctgtgttggcgttctaatccaaacactgtaccatcggggttcttatcaggtgcttgacagagctatttgtagagcccggatctcaattttccatgtggcaacttattaatccacctataacaaagttgttgcctgatgatccagctacattcttgctatagcaattatagccaaacaatgactggatcatggtcgaatcccagctcaaagattgctcaatctcactgtcagtctgaattcagacttagggcagtctgacagcccaactttgggctcattttactccaaatttttcatgtgaccaagg

SEQ ID NO: 163540 - DNA, 490 bp, Zea Mays
atttctctcccagatctcctgcgatgcgggtggtccgggatggttctgtgctgacctggatggtcttcgtagtcacctttgagtgcccgccgtctgcttcggttggttgcaccttcggtgctttggcgccgggggctgaggagcttcttcctccgccgtttggccgagcggtctcggccgccagggtgtgtagtttttcaacagccgccagagcggcggtgcggtcaccctgcacggtgaggactcctgcgggggatggcatcttaaggaccaagtacccataatgggcgatggccatgaaccggtacagggctggcctcccaatgatggcgttaaatgggaggttgacctctgcgacgtcgaactggacgttctccatgcggaagttttcctccgtcccaaatgtaaccgggagcgtaatactcttgaggggatatacgggctgcgggcctaccccagaaaatgggcgggaggcccccagccgggaccc

SEQ ID NO: 163541 - DNA, 631 bp, Zea Mays
tgccgcttggccgaaggaggttacgaaaatagctggggatttactgagagatcctgtctaggtcaacattggaagcatcgacgaacttgttgcgaacaaatccatcacttaagtattctagtgaaattatgattgtttttttttcatactttgtgcttcacttttctttaggatgcggagtccttgaagtgccattgctgactcgtgtcagaatttctattgttaaatattttggaaaaagcattctttggcacctaatttctatgtgtcagcctttatctctaatattttatgtggtcatttctaggatgatctatttctatgactcctgtatgtatgcggtatgtagaggtggttctgcctatggacaagcagcggagcctagagcagatttttagagatcaagaaaggggctcaaaaatcatcatattttgctcaactaagaaaatgtgcgaccagcttgctcgtggcattggtcgcaattttaatgctttaagcatccatggtgattaatcacaggacgaaagagataatgttcccaatcagttttgaactggcggggctccaatattagtagccacagatgttgctgctcgtggacttgatatcaaagatatcagcagaggcttat

SEQ ID NO: 163542 - DNA, 474 bp, Zea Mays
tgaggatggaaggagccgccgaggttggaaggcgggggctcgatccttgctttgtcgtaggcgagattcgtggccgcgggcgtggtcggcgaggacgacagaggcaaggatggaaaggtgcggcatgcgcggaggcgaaaatggtggaggtgcggcgcggaaatcttgggaggcggaggcgcaagcggagcggaggatgtcagggtgggaggcagaaccgtgggtgtggacgcctacactcttttcttaaggagtagtagagataataagagaacgatttttcaccattatcttatgtcttgtgtttgcattttaagggaaggaaatggcgaacatgtcgcctaaattattgaaggattgaaccatacatgcacccaggacttattatttccattatgcacgaatgaagccaaccataaaaaagcagcccatcggcctaaacgaaactcttaatattaggctcaattttcatat

SEQ ID NO: 163543 - DNA, 447 bp, Zea Mays
caacccctatgcaaggttctagtatatagctcgagaggaactgaagatcgaaaatgggggtgatcaaggagggagtagtctagaggattactgcgaaaagggagggagaggttagttttaatagaggatgggaggagagatgacgggtctatggctgtgttgttactgtggctgctggctatgtgtcgtcgacttggggaagaggaggaagaaacagtcggcgtgtgagttctgagggagggagctcgccgcaacagtggagaaattgtttatcccaaagaaagccgaaagcggtggcgaggtgaagacatgaaatagcaatgctaagctaatcccatggcacatgtcgtcagctttgacgagtggtggtggtgccaatgccactgctttcacctccttgatccttgcattcctattatttcccgttgacacaagggaaacctctct

SEQ ID NO: 163544 - DNA, 493 bp, Zea Mays
cttgcaatggtattttgttataaatatggcggtcatcataaagtatccatcacactattgagatgtctttctacttttgagccattacattgcattttcttttagcttcggttgttgttttagcttgtgctgagatggccgaatgtaagaagagtgaggatcttgcactagctgggttttacaaagccatggaaaggagtaatgttgcgaaaatagctgataagattctggctaggctgtcggatgactctgaggatagcgaggattttgactttgatagcagcgctgatgagccaaagatcggtcatggagtccaagtcatgttaacttcggaaggtcgactgtgaaaaaggggcatattgaggtcatgaaaggtaaataattccatgatgtatccatagtgagacctgagcgagaaaacaatgttcctcttccagaaaaagatgaagtggttatcttttgaagctttttgaaggttggcctgcgtttcccc

SEQ ID NO: 163545 - DNA, 449 bp, Zea Mays
aacgaaatcgcataacgcgacgcatgtgccggcatcgaagcggatggctgatcaagcgtgttcatgtgttcgatagtagctgttcaaagacataatgaatgtgtggttgtctatgcgaaagggaaagagacatattgccctaaataaaggctatattgaacccaaagagcgcataatattagtgcagactccacgaaattgccaaacgttgggcactggggtttcgacggcaacacgccatgtgctcacatgtaccatcatccattagcgacaacacacacaacaacagggacgccaaactaacagggtcgtctggaagggaagatgccacaggcatatctttgcgaggaagtaggcagttggcgggaagaggaggaggtcccgtgaaacgttgggaaggcagctgatgtgctggacatcggctctttgaagacgaaatggatctaaac

SEQ ID NO: 163546 - DNA, 372 bp, Zea Mays
tgactgctgaatcaagaatcttcactggtttttcacggtactgaaggtctttctgaatttgtattgtctcttcttcgaggtgactttctggtgcttgcaggcatttgcggagctgggatacgtgaaacacattatggatgtcggacatggattccggtaattccagacggtatgctgcgggtcctacccgaccaatgatgggatagggacctacgaaacgcggggctagcttcccttttacttggaacctcctgacaccacgcattggagaaaccttgaggtagacaaagtctccttcctcaaatcggagttccctccgcctgttatctgcataactcttctgccgactctgagcttcaagtaaccttctgc

SEQ ID NO: 163547 - DNA, 537 bp, Zea Mays
acccacttcgctcaaactatcgtgcggcccaagtcacctgcacaccgagctctcgccttgggtcactgcgccgttgggcccgcgtgtaagccgttgtgcgccactgtagatcttcccgacatccgtgcataacagctttagcgcttggtgtggctcgccgtggggaaatgggggaggaggtggcctcaccatctaacgctgcaatctgtggatcacctcgtcgcgttgtctcatgggctcgagcggtaagaacctctttccgcctctgtaacggaggcgtgtgactcagtccgtggccgccgccgccgatctcggaagctgttgaaacaaacccccccttccggtcggactctgggagagataaatactgcctaatctctctctctctccccattaactcatacccgactgcgcctggggctcggagctgggcgccggaatcggtggacgttgtggaatgaccgcaccggcgtgctgtgattccgagactcttcgggggccagggcggggtcctgggtgttcgcggcgacataaggc

SEQ ID NO: 163548 - DNA, 352 bp, Zea Mays
ctttgtcataaaccgagtaattcagatgtggaccatttagcttttcagaaaagtagactacatgtttaccttcttgtagcagtacaccttctatgccaataccacttgcatcacattcgatctctaatctcttaccaaaatcaggaagttgtagcagcggtgcttgacaaagctttgtttttagcgtatgaaatgcttgatcttcatcatgtccccacttgaatggaacatccttctttgtgagattgttaaggggtgcagcgagagtgctgaaatctttaacaaaacgcctatagaaacttgcaagaccatgaaagcttcgaacttggctcacatttaccggtgtaggcca

SEQ ID NO: 163549 - DNA, 410 bp, Zea Mays
aacaatccaaagattagtgaacctggcagagaatttaggatgcttttagttaacttaagagcattaccccagatataaatattaacaagactcatctacccccatctaccacatgcccaacagcaaaataagaagaaaaaatatcaatacacttgaagtgcctacatttctctataaaaaaaggatcctactcctatgtcctaacaccaccagtagcaatgaattgccacccataaaaatcatgacatcgaactgacatttccatcgcatgcataaaacatttcttttttcttgtacacaaggctcaccagattgaagaaagctagaagaaaatggggcatttgaaatagggatacagacccgaagtgaagcattcaagaaccacattttacagatactgaagaaatttt

SEQ ID NO: 163550 - DNA, 904 bp, Zea Mays
ctgaacatgtcaattgccttccacgtggactagtcgttggttgagcctctatgtatccggtgtgccactgttgttaccatcagacatgtctggtgcttataactagctcgagtgtgttttacacttactttgagtggcgtatctggtgtggcatccggtgcgccaccaaacatgtcctacattatagccacccgcgcatgccctacaagggaatattatgaatatgtgatagccctataataagagggtacctgctcctaagtcctaactagctatctctctagcccgagtttttctcattccatcttaggttttttcttcttctaggtttgctgtcgaagtgttgagtgagatccatagatctagatcaaaaatttaaaattctgtcatttatgaaactgagggttgacctaaatcattcttttgtctgaaattagtggctcatgttcttgcttttgatttgatttattgttcttgtttttttctctctcccaatcttccttgtatgctcttttgttggatcttttacatctcagctcttggagtatttttttgggttggaccaaaatatgcatggatatctgagaattactcctaccaaagtggtttggacagagcacaaaaatctaaccttttgagcattttttgagaaaatatccaattggaagactatttcttgaactaccagagttttttctaatcatttagagcttaaactttgtggacaccttaaaaatatcctagagaaggtgtgtgtgaaatgatagctcaatcggagttgactcaatttttcctttttctcctttggttcgaacgactgcctgaagcaatcttctcttgcactatcgagaaaaatgcagcagtgccgcaactcagcagtaccgcgtgatacgcagcactgccg

SEQ ID NO: 163551 - DNA, 526 bp, Zea Mays
gacttcatgtgggaagcaaaacaactgtaccaggctcgtggggcttgcttcaggccataaagggacttgttaaggcgacaaacataagtgggatgagcagagtcaaaaaaaccagcaggttggctacaatagactgtctcagaaagagtaccgtgaagaaacacattattgacatcaagttggtggataagccagtctctcgactgagctagtgagaggactgtgcgaatcgtagttggtttgaccaccggactaaaagtctcatcataatcgaccctaggacgctgagtgaaccctcgacatacccagcgaacttgtgacggaaataccatttccctgtgatgacatgggcacctggaggacgaggaacaagttcccaagtattattggagatcagagcctggaactcttcttccattgcacgacgccagagggggtgagctaaaccttggcgaactaaagtcggcttgggggagatagttgcagcagtgaaagcagccagcacacgaaaaccagccttggcccg

SEQ ID NO: 163552 - DNA, 760 bp, Zea Mays
ctaaatcgtgttcgagtcccagggaatttctgactcatagtttatcgcgaaaagagacaatgaaccatcgaacgggaccgacaactatgagtcagaacctaggagtatgaggaccgtcaccagcggaccccgcgtttggatcctgtgaaaggagccgaggcctcactcagatcacccgtttggagctcactgagtgccatgatctcgaccatcgagggaagcatggtacggctcaccctttctttttcggcgaacgaaatgcgcaggaatgagtattaaaaagatgagacgcatccccagatggatctctatagtgaatgggggactcgggggctcgcttcacaaaaataggggcacattactcgtacttctgcttccggcgaacaaaatgcgtaggaagggacgatgtgcttcctaagacagacccattatcgcaaggagaaaacctggagttggctccgtgctacgaataatgatataacaagccatagacggaaacatgttcgagcatcaacgtgaccggaccccgctacccttgatgaagtactcctgatctcccctgaatacgcgcaactagtagagactaagaacgattggcctagcatcaggattggtcaaaattttgcaataccaactttcggggctcgtgagtcacttccagagctacctgatgtgcgaccaagacgcaaacgaagtcccaaacggcatgcacagaaacctacttcttcacactaaacactatcaaggcatcaagaacaag

SEQ ID NO: 163553 - DNA, 295 bp, Zea Mays
attggtttctgaaccaaaaagtatactttagataaaccaggccaccttgactggaaccagcggcgacttccttcggcatttcccattcgctcacaagaggccatactttgtaagcaatatggtcttgaactaagtctcttgtgccaatacaggtgcatactatgttaaaaacagcttggcatgcttgcacgtcatttccaagtgcgttggacgaccttctaatgccgaagcgtgacgatataggacgctgaataatgcccttaacatcttccctctggctcaactcattcttcat

SEQ ID NO: 163554 - DNA, 524 bp, Zea Mays
tccattcataggataatcaatatcctttacgtgtccaccaacactaggttggttaccaacgaatagatcgtctgcatttactatctcagaaggtctagccttcagctgcttgcaagcatcttaatcccaatttgtgaccatacttctccccctcttatttacaacaacgttgcaatagggagttaagtggttttccatgtaaccactctttctggcacttccacataggattaatttgagtgacacctcatagtaaatgcacatggcagtcaatttgcaacttcttgcaaatcattcgaacctaaaggttcagttttagtacgtgatctgagcctgaatgcttactgcattcattataatttcctagcattctttttggtactagaaatctccccctaatgcctggaaaagctcatgattcaagcaagcgtataggccgtaaatagattctcgtgaagagattctaaaacttaatgatcgacgaagaatgaattctcacatagatccccagctttcagtgtgcc

SEQ ID NO: 163555 - DNA, 1493 bp, Zea Mays
acgactaggagtggttaatgaagtatgactagtataactgatattcataccagatccacttgtggtggtattcgtactagatccacttgtggtagaggcaaaaagtttttaatcttagataattttttcctaaaacatatgtcaatgtttagctgttacgttatttttattgaagcaaaattagtagatgagttactcctctaatctaccacggttctgattagaactactagagccacaccccctgctgttaccatgcccaaaactgcaatgcctgccacatccacctaggtgtccatggatcacctcgtccttgagtagcaccacatcctcagctcatggcgttgactggtctattgttagatacgaggcccatatgggtctcaaaattgaaaagctaatcgaatagctcgttgactatgatcagttcttgctcttgtttttgagccaaaggcgtcttgggtctttatataggcttcgattgtggttttgactgaagaaatttgaattagcatgtcatttgatagcaatgagaagagatatctcacgacatattgatctctggcttcctagtcatcatactctggattgtccacctcaatctcttttttgatgtcacacttctaggggatttttgcaggcgtcgctttggtgtcatcggttaggaagccaaatagctttgcaccatgaatagtatccctaacatgtgcatgtcatagtgcatggttagagtatgttaccttcttggagacaggtagaccaaggagagaattcacggaggtagatgacgatgaacttgtcatggctatgattaccatgtaaaaacacaaaggtgcttgaaagaattgtcgatagcctaaacccgggtctacgtgcattgcgtgttgatatgttggataagtaataacccttcacggcggcgtacatatataggagccgattctaggagttctagataaatacaatataggtttaaattagattctagtctaccttagaatcggaacatttaccgatgataacttcctgtcatatacaatatctcttacctatatatgtttctgcttccattccaatccatcaattcacaacaatacttgcaaccgactgtgatatatgtccttttccttgtcatttcatgcgcatctacttttgccttaatttgtctagctaactatctgctgcataattagctagattagctccacatatagatatattctgttaaactcatctggtcaaaagggttatgcatgcaaagaactgttgtacgattcgaggtacagcgtcccgaaagctaacaataataagacataaagaattcgagtaaattgtcccgtcagttcttggtccctttgggaactaatcgatgtcgtcatcccgctgttctatgcatgtagtatgtgcgcatgcacagtccggtgcctacaaatcagtggacaagcaatgccgtgcttgattagtgaaaaagcaattaagtgctcacagtgtgc

SEQ ID NO: 163556 - DNA, 305 bp, Zea Mays
gcgccgccgtgttctacttgaaccagagaagaagactcggtgttggccgttgattacgtgatgggcgtccaggattagagctgggaaggaaggttctgtagccgttggatggtcatcgtgcatcgacgattcgagcgcgtatatcggttggtgcagtcgatcccgaccaatggatcgagatcggatgggctgcaccagagcgagcgtaaccagatacggatcgtagatcttgaatccgacggtagtaaacgcgtaccggttcgtgggggtttagcatggctcgatctaatcgcggccgtccgcgc

SEQ ID NO: 163557 - DNA, 747 bp, Zea Mays
aaaagagccacacttgactcatgtgatgaagtctgaatttcagtgtgattgcttcaactttgagcccttgtatctttcaaattaataagaatctgccctaggtcaccacaccaaatttgtagatctatcaaaggagaataaatttgcttaagagtgtaagcatagttattgaaaagaaattggagaaaatctcaaccaaagatgggctgtcaggctggttgaattctgaatttcagactgacagtgcaactacagtgactttggacatgaattaatgcatgattgagcaagaatttgcttagtattgctataacaatgttgtagttggatcttaggactataactttgctaaagagtgtcgatcatgttattacacaaaaatgggagtaaatagctctgcaaatcgggttgtcagttcatctgaatgaggaattccatggtacagtagccgatcggatcagaacaccagctcagctcaccgccgacgaccttcgccgcgattcgtgctgccgccatccggattcgcgcttgtggctagtggataacctctcgggtaaaagaatctctgccgccggtgagctggaggtcactccggtgactcactgtggcctccctttccgctttgcggctggaacgataggctcgccggtgaaccaccgcctcccggccttgcgccgcgtggctctgcctttccaccgcgtcgccgtgactccctcccgctgtcttctcaacgccggtgaggttgcc

SEQ ID NO: 163558 - DNA, 576 bp, Zea Mays
gggcgcgtagcgggccaattctgtgaatttgtgcacgtactcactgacagatcttccttcttgagttagttcccggaattcatcttccttgagctgaacgatcccttggggcacatggtgctcttggaaagcggtttcaaactctgtttaggtagcatctctgacggcagcattgaaggtatcccaccaagctagggccatcccggaaagttgatgagtagccaattgaacacgctgattctctgggcatccgatggcttctaacttccttttaatcgtgtgtagccagtcatctgcatcgaggggattgctggatccagcgaatgtgggaggcttgagcctcagaaaatctcccatcctgtcttgtggtcttccaccattcgggcgttgattctccagacttctagtgaggacctcaatgagtcgggtttggttggctagaacttgggctaaatctaatgggagctccagaggtgcggggaggtgggtttcactcccttctccaccggcttctccttcagctcctaggggaaaccctgctccaatcccggaggcggtaggtgtggttttatccga

SEQ ID NO: 163559 - DNA, 811 bp, Zea Mays
ctaagaatgaagttcacaacaaatttgaatttaaacactagacttttgaatttaaaaaggaaatccaaatcataaattgtaaaagaaaaagggaaataaaaggaaacagctgtgtaggccgaaaccaactggaccaggccaactgtcaagttccaccacgtagcccattccctgtctgcgtgctgacgggtggaccctacatgtcggccgcacacccgcacccacgacgcgactgaaccgtctcactgcgatggggcccatttaccggagacagttcccacgcgaacgtctctggtcattatcgcgtggttccgctgcaccatcctcgtacgcgcccattgccacgtgggacctacgtatcatctcccacctccacgaaggtcagaaccacgctgccataccggcctcccccgcatgcatagggaatccgttcccaactccaaccccttgagtccatgcccgaccgccatattaaaccctgcgccaaccttcagtttcatccgccccatcctcaccctagtagttacgccccgtgagctcgccttttgggattcggagcgccgccgcagccgccatctgtcgtcgctgtccccgtttagcacccgtggtgcgctctcggacagtccggcgggggtgtggattgtgagccaagaaggaatcgggcgcgtggaccgcggtgtgaagggaactactcgccgacccttgccttccgccgtgaagccgccccaccctatgaacaaactcgtcatcaagccaatcgtgagtacaaatctccttcctagatccgtcgtcgtcttagcttcaattagca

SEQ ID NO: 163560 - DNA, 741 bp, Zea Mays
ggtttagccacgcataagagacttgggagctcctccctctctctcgtccacttgtaacccctactacgagctttgagcaataagatgttggtcgtgtgagtcaccgaagacgggatgtatggatgttctgcccgaaccagtataaatcttgcgcccactgagcacaccatctggaccatggaacgtgcactaacaaatttacttgtcggagctagttagaaacactgacagctacgcgcgctaggtagggcccttgagcgttcccgacaagttcttcaggctccggatgatcaactgcgacgtagtttgggcgcccggaatgaccattcgtttcggaagcctcggcttcgtccacgacaacgagggaacaatgattagagccccgaaagccccatcccctcgatgaaagacttgaccaatgtcgctatgggccctggaggcctctagctcaactcccattagggacacaacagacggggtacacgacagagactgtttgtgctgaatttgtgggaatggtggaccccatcagggattcattccgtgacctcctcctgacagggtcagaacacgaacatagctctccgtccggaggagcaggtcgcgacccggcttaggagtgcttcatagccggcaccccgaaaaactgctccccgctcacaggaagccctaaggtaaccccctgctagcgtcacgatgcgtgtggtggtggctagtctaccgcggctcgacgtaccctgc

SEQ ID NO: 163561 - DNA, 305 bp, Zea Mays
acgcggagctcgcgaccgatatcccgtcggctggtggctcacgatcttccgcgccgctgcaaggggctcacgatcgcacgaggattttggttgcggggcggggcgagacggatggggacgacgtcgggatgtgatggagatgagctctttgacggcacagatggcgggtatatcactgcaatccatggcgtgagagttaaggaggtggtagttgacggggagaacggcgtggggatcgcggtcggagcgggatttgtttgttcgcggcttgaagatgaggattcggggcgccatgggaatgcgcg

SEQ ID NO: 163562 - DNA, 1333 bp, Zea Mays
aaataaggaatctaggaaaattagtttgacatttttaggatttttctaccattttctagaatttatttggctctggaagaaaaagaaaagggaaatctgtgaatagtactggacccaatctaatccaggacggcccaaccacagcagaagtgcgctcgcgcgtgtgcccgcgtggaaatcttgtagaaggaccctcgggcttttaactaactgggaaggggctcggttactatttctttgcgtcactgacagattgcagaaaggtccttaaacttctattccttcgcagaccaaggtccacgacgaggaacagctctcgccgcaccccggcgaaccaattccggccggccaacgccatggctggagctcccgggcgacaggaacaaaattgaacctccaccgaacacttcccctaagttaattccaggaacggcgcacagaaacgtcctgaccgtggtgaccgcgggtaaggcggacaaccacaagcgttcatggtgatctaaggcaacccaattcaattgagcgggtcgacgagcatgatgagggcctagggatgctagaacaagcgacagagagccttggactgacctgagttaggcctggccgcagtacgattgttttcacggtggccaagactgtaattggggaaacgagcgattctcggtcccaggtgaataattcggggcaaagtttggtgcaactgatgcgtgattaccctacggagccgcggggacactcaatttatagtgagggtaagcggtggcgtctaattttgcgcagagagaccggcggccgagacgaagggtgagtcatcggcgcggtctatcgtggcgcgccccggggtgattcctccggcgaggagctaaccttcacaggatgtccatggcgacgtggtaagacgctcggatacgtggcaatcgaccggcagtcagccaacgccggtgaccttatctacacaggccgcaattcatgggggcacgacggctggccaccggagttatccaaaggtggagattttttcttttgccttggagtattatccggttactggggagcgcaaatcataacggcgacgagggttcacggcgaggattcaccggtggtgaggttcactgaacctgacccgaccagggcactgtaccatggcgcatcttcatcagtcgcctgaaccagccaccatccaccccagttatctctggattcttgttaagaaaagagctacctcttttaataaaatttgttcactaaacatcagtctacaaacttactatcggattcttgggtcaaaaccgaacgaatccaaagttatggcgtgctcaaattggtcccataa

SEQ ID NO: 163563 - DNA, 676 bp, Zea Mays
tgatgatcaaactcgtagtaggggttacaagtggttgagagagggaggagaggctcccaagtctctttatcagggtggaagtggaacttagaagctgcagggtggagacctagcaaagtcttggctcggtggggctccggcctcctagtcctcgttggtgctcctccacctcatgttcgtccttgtgggttcatgtccgtctaaagacgttcggttgctccaaaagccctcacctttcgttccccttgccctaaggctagcttctcccttttataggctaggagaggggtcgaccaacgatggcttccaagggaaggagccataaggcaaggttaaatcagtgttttaccccaggtggagccatacatactcgtggggccctgggctgcggctgtctcgtatttaccgtggcggatgacgtgggggcatcaatggtccctccatagcctagggcttggtgtagcccgtcgtgtagtgccctgtgggaggtctgcgcactcatgcctagtccgataggccataagtacgccgtaggccgaggggtgtgtgggccaataatgcgccacggtctgaggggctcataggtcatgagtgctatgcggcccgaggtgctcgtaggttatgagtgggaagtagaccagtgccttactatggcttggtgctaggcgtggttaaa

SEQ ID NO: 163564 - DNA, 463 bp, Zea Mays
ggaacaacaatttgagaaggcggagacggttgggcctgcgacgacggctgtcgtggtggatcaaccaattcgacatcccttcgaggccaaaggataaaattcttgatcacttgtctaagtgtctcgataccttcgggcccagggatgtctagcatgtcgtcctcggatccttggacgactgtcgtcacttctaccctgcaatattcttatggaatgtcgtttccatggaacttgcgtcctcggatcgcaaggcctgtggccactttctttgtacgctgattattaataccatatcttataactagtgtgcatgccacaggccttgtgatgtcatcaactggatagctgaccttatttcccgttgacgcgatagagcttgggatggtcgtaccctcggtggaagccgacgtttgagctgctggaattatttgcatctgtggagtggtcatctgttgaacagaca

SEQ ID NO: 163565 - DNA, 453 bp, Zea Mays
cgtggcgttcggtcgacgggctgccaactccggtgacttatccggaccggccgcaaagcagaaaggagcacgacggctagccggattagtgcccatagcccaacaacggtgacgatctttttaccctatggcgttatccgggctttagtgggcacgaatcacctcatcgacgcgaatctacgcgcgaggtcgccggcggcgagggggatctgcttctgttgatattttggtactataccattggaagctttttcagttagcctgacagccgaggtttagggcaggttttctccaaattttccatggcaacatcatcatccttctgcaccaaagttgtagacctatagatcatcttcatctttgttatagcagtcctagtcgaattcccactggatttagctcaaatccgatctcagattcagttgttcaataccagtctgatagagcaacttt

SEQ ID NO: 163566 - DNA, 435 bp, Zea Mays
ctgtgtttcaagtgtggggagcgctggagtcattcacaccgttgttccaccgctgttccattacatgtggtggaggagatgtgggagctggctagaaaagaggaagatattgctgaaggaactgaagaaaacaatggaggtggtattgagcagagtctagatagcatccatgcgatatttacggctgcagtcgatggcagtgaaggtattcaaactattcgattgtgggctttagtgcattgccaacaagttttaatactggtggattcgggcagcactgccagttttcttggaagtcatctcatgggaattatgccggaagtgcaattgctcaacaaaccactgaaaataagggtggcagatgggagagttctattaagcaaatactttgttccggattgcaagtggctctatggaggtctgactttctctatg

SEQ ID NO: 163567 - DNA, 331 bp, Zea Mays
acacattgtggatatctgacatggattctggtaattcaagacggtatgctgcaggtcccactcttccaatgatggggtaggggccgacgaatcacggtgctagctttcctttcacttggaaccttttgacaccacgcatcgaggagaccttgaggtagacgaagtatccttcctcaaatctgagttctctccgcctgttgtccgcataacttttctgccgactctgagcttcaagtaatcttttgcagatcagggcaactttctcttcggtctctttaacaaaggcaggtccttctagtgtcttttcccctacgttggaccacatgagagg

SEQ ID NO: 163568 - DNA, 277 bp, Zea Mays
atttggctatgcttgcgaaggcgttatgtacttggtcaggtgtatttgttatgctggactggtgcgcatatagtcggtcttggcgcggacagtttggtgtggtcgtttttgcttttgttatgctttgtccggctgtgccctcgggcaacttctgcgcggatggtcttcgcagtagacttcggtttttcgcacttgctgtgctagtccggctgcacccttaggcgacttctgcgcggctagtcttcgcggtagactttggtttttggcacttgttgtg

SEQ ID NO: 163569 - DNA, 910 bp, Zea Mays
ctgtgcctgatgctcaatctagccccaatttgatcccattaagtcagccaggagatgacctgcagatagattcacttgggtgtatccctttggcacagacgaattgtagtaagtttcattggcatcacatcttctttttggaccacgagcactttgttcattccattgtcgtgggactgatgatcttgtaaatcggtaaatgttgcaggagagaccgctgctcttgtggttgatcctcagaccgtggcatgtggttgcttcggtgatagatttattgcctcgaacagtcctgagtttaggaatgaagaggagccatatgcctttgatatggctgctgatttagatgatgatcgtccggttggtgaactcacagagtgatattgagatgttgaaacgtgtttttccagacgaccgggatccaagagtgcatgagttcagcgatcttagtctttctcatcaggcaaatgcagaaggaagggatgatgtgctgctagatgctcctgaggtcggtcctagcatgatgattgaaaagggtagggtcttcaaggacctgcctgccttgtagaggtggttgcagcattatgcagtcttacgtaagaggccgtatagagtacttcattcgtacgagaaacgtcgttacacggttgtatgcgacaaggataactgtgcatggagggtctatgctatgatacaaaagatcaccgcaaagtggaagataacaaaagtagtggggctacacacctgtgttgaacatgagttaacgatgaaacgtcgccaattgacatctaccctcattgggaagcagcttatgggaatactgcagtcggaatcaaatatgaaggttaggacaatcatgaggattatggagaatgtgtatgatgggtataagataacatatggtaaagcttgg

SEQ ID NO: 163570 - DNA, 863 bp, Zea Mays
aaaatttgaaaaacataaacttaggaaagaaaagaaaacagaaaataaaaaggagaaaagaataaaaccttaattgggccggcagactcccattttggcccactagggctttccactgcgcgcagccatccctcgttctcgcgctcccggcgctgacatgcgggaccgagacgtcaggcactccctgcttcttacctcttccgctcttcgccgcatacccccccctggcgtgtggggcccctttgccagcttgcgtagctcattcgcgccgcaccctcactgcgtctgggccccctgcgccaggacctcaccgctactgtcgcaacaaccttggccgcaatgtccgccaccgcgcgcaatttgtggatcagctggctgatggccaaccaacctcacccggccataagactctggtgcccgaaccctgtgcgcctctcgcacccgtgccaaacccttgccgtcgcgtgtagagcttagggaaagataaagctagggtggcggaagcggggaggcacggaattcacgttgccgtcgacgtcgggtgccggagttcggatcagaagcctgcgccgggttgctgcgaaggtggtagtggcactggccggccggattgaaaagctgagcgaccttaattgctcgtcggagtttggcttgggtgccgcgccgccctgcaccgtgaacggaaaccttgccgccgtgaaacaaggtaaataaaccctctagtgcgttcgccatgtccttctttaggtgtgtgcgttgtttaatttcaatttcgtggcgtgggtgcgcttgtgggtgatcgccggggtgctccgtcacggggaaacttgccaccgcgcggtagatcggctctgaggttgacg

SEQ ID NO: 163571 - DNA, 627 bp, Zea Mays
ctccgatgagggatggggaatacttagagccaaagcacaggcacggggcagagctaaattgaccagactctgtgcgggtgcggtgtaccgacgaggtagaattgagacaaacagagcatggagaaacattcacctcgggacgacactcggggaggctcgaggcgacgtttggagctccgggtggacgacatagctatgaatcatctaggccccttagtgatgttttggtaattaatgacaactggttgtggactaatggttcttggagaaataagaatgcagggttggaccacataaaacagaaaatcttggagatttataaacattggttgtggatcaagtgaaggcaaaggtataacataggtttttgtatttgctagtctccaggagtttagagaagatatttgaccagattagtaggctagatggtcatactataggggtcaatgacgtttgtctgtgtaaatcttagtgcctcatagagcatttagtggatgcatttgcatgaggactaacaacacttccaatttcgagagttaaaaatcttttcaaaagcgtgtttgaaaagttgctaagtcttgggataggcggaccgtccgggccttgtgggcggaccgtccgcgattc

SEQ ID NO: 163572 - DNA, 1039 bp, Zea Mays
aacagtgccaacatactccacataactcatgtatgatcaccacgtcgaggtgaaacacaacacaatactggatacttcttcactgcatgttggacaacacatcaatagtgaagcagctgagtcacccttagataagtctccaattcttcagctttatcttcagtaaaatggagctatcccaggtgaacccccccaaaaagtcttctttaacgtaccacgcccagaactccctagaagagctagtggatggggatacttttgctattttcagattacacaaaaactgctctgaacttctttagtccgctgcagagtcaaattcatccctctttttcttcaatttctctataaggacagagctacctctccacatcaaagttgctcacaaaacattggtcttccactttgctataaacttctagtgccaacactgcacaaatatcaagctataatactccaaagtgaggcacatcgcactgggaccaaagtttcagttaattgaaataaaacccagactcatagactgatagggcaactttgagggcattttactccttattttgcatagtaccaagccaatctctgttaagcaaacttgcacaccaatatctgctcttcaactttgctacataaacatggctccttaattccctagaatagtcgcgaggaggtttcaaagttgaaccaacaaacacctctctgacttggttaactgaacgatattcagttgacaacagaatgatagcccaactttgagcaacgtttcctccagtttttgtacaggaccaagcccacctagcttaagaacatttaatcaccatcaaatggtctttaatttgtctatatagctcacagccttaaaccccctaatttggccacaaaagggcttcaaactaagcaccaaacactgaatttcaggttttcaaagtactgttccaagtctgaaattcaaaattctgctagcctcactttggatgtgttttgtactagattccattgggttctagggtaaagtgagttaatcaagtttgcacacctg

SEQ ID NO: 163573 - DNA, 366 bp, Zea Mays
gaggtttcctggagctcgggcaaagacatcttttccccgggagctgcgcacgtctctagcagctccccaacaaaatgaccagaagctctcatccccaaatcctcagctactatacctaattctctctttttggcgaccgcacctggagccttatcccatgaggggccttcatcggccaggggcctcgttttcttccctcggcgatcagcggtgttggcagagtttgcctccgggtaagcgccatacaacaattggtttagctcaaaaaagcggttcaacctagcgttggaaccgcgaatatcccaactcctcaaagtctctgtctctagtgcgtacttcccaacaatcttggcggcctcggcctcg

SEQ ID NO: 163574 - DNA, 890 bp, Zea Mays
caagattgtcgctaaacaaattgaaaaacactgcttagccaaggagttagtccttatgcaatacttattagttgtgcgaagcctggataagcagttcaaagggttcacaatacaacatatagagtgaaacaagaatgaagacgttgacatgctaagaaaagcagcagcgaaaggcgaccccataccctcagatgtgttcttccacacaattggcacaccagccataagaaatcccgaaggcctacaaatcacagaagatcccaaaggccaaagaattgtaaacctaataatgatagaagactagagagcacacataaccctttaccttcatggccactatcaccccactgactaggatgaagccaagaggttgaagcaccgaagccgtgacttcgcagtaatagaaggccagccatacaaaaaaggaataagtcaacatatgctcaagtgcatcacagcggtcgaaggcatcgaactcctccgagaggtccacaaatgcatatgcggttcacactcgggacccagagccctcgcctacaaggtcatgcgccagggattctacttaccaaccatcgcgtgcacagcgaaccgtgtagtccgctcttacgaagcatgctataaattttcacctcaagcggggcaccttcacagttcacaaagctgatcacccacacctggcccttacaacgatgggccttgacatagtcggaccactacccacagcacaaggcaacctcaaatttgcctttgttgcagtggaatattcaccaaggggattgaagaaagggccgtatcaacgatcacggcgaaaacaacacaaaagttattctagcagaacattgtctgtcgctttggtttacccacagagttgacagtggacaacggaaaac

SEQ ID NO: 163575 - DNA, 671 bp, Zea Mays
gttggatgctctctatgtagctgcagactgtctggcctcagggtccggaccattcgcgatagcaaacttatggtgtggcactcgctggcagtagtcagactgtttgaccttagacgcgggactgtccatgagatgaccggactattcgtgagaagggctgagctctacgaccatctctgttccacctcggaccgtccggccttggtggctagaccgtccgcgacctgagacatgttctctttgaatgtatgcaccatttaacctttacttaggatttagccgtttctccattggctctagcattacaggaatgaagcctttcttgtctataaaaataaacccctacgagacatgtggcggtctaataggtccaaagtataggagcgttagctatatcaatgcaagctaatgcatcagcatgtatcttttctacatcgtcgcctacccattgtaacaacatttggtgcaaagtagaatgtatacattgatttgcatggatccaatctctgcctaatatcaaactataattcgcttctacctcggcgacgaagaaagtaacaacgagggtctttgtctcgatgattaattcaacggacttgacacccttggccttgatcagactatcgctccccacgccactaagtgtcatattaatcctaattagatcgtca

SEQ ID NO: 163576 - DNA, 339 bp, Zea Mays
cgagcaccctcaggcttccgagtctctactattttgtcaatctcttgtccagccgtgatagccatcggctcagcatggattgagtcggaagattccccagccaacatactaagcacaacatctatctctacatcgtctgggctagctggcatctcaaaatgaatttgcttctcatcattgggaagactccgaagaggggcaatcagagcctcaatgtcctcgagagagggtcgcactctaagacccagaccaccatcactagtaggagggttggacacaaattcagaaaatgacctatgaggtggcatattccaggcagaataagcaacaggagcacca

SEQ ID NO: 163577 - DNA, 569 bp, Zea Mays
aatccctcatcctctgaagacgcaatcctcaagctacgttatttcaagtgtactctgttgaatcaattcttgtggaagagggcaagcatcatatcagaactggtgacagtcctccagaaacagaggacactaccgatatggtaggatcgcgaattcggcaagtgcaacagctccagcaaattgcagacacaatctgcaccgagttaaatggagtaaaaaattctggccgcatcaaatcgagagcacaattagttctcccggtggaggagcctaaacaaatccgagctccaatctacaacaaacaacttgtcactacttaaaaaattaataaaaagaagtcatctcagctcagcagcagtagaaactgaagtgaatcgaaccatgaattcgactccaaggcgcttcacccgttcgctccactggcgaatctgcacttctgcagctactgcacgatgctgtgatgggatcgagccagtgccaattgtcctcctaacaaatttacctcccacggtcgcacccaacagccgagcaaagaggcacgccatggaggcataccgccgaacacctgg

SEQ ID NO: 163578 - DNA, 995 bp, Zea Mays
aacgcggtggcaagcgagatggcagccgcagcccgcagcccacaagcgcagggtgccatgtctgaaccatgcgtccacgcctgtcaccatgatcagccgatcactgctagtgctagcagactagcatcacaccgcgacccaccggcgtgttttagctttcaaggctactctccgtcatagtagcaccatcctcttccggagggaagtcgagcccgccacctgcttgtgcaaatgcgcaagacgacggccgtaacggcagcgccactcgtcatgcaccagattactctgggaaccacagtggataacgggggaccgaggacaagattgacattaggggaaccgaattccagcactcagacgcacttctgctttactcgtagtttgaagctaggcaattcgtcaagagccaggtacatgcagctccttgctgacgaggggcgcgcaggagcagcaattttcgcatgtgcagatatgttccaatgagaccatctcatggaaccacaggttgacttctccgtagtctttcgtcctggatgcatgtatcttttcattcttttcgtacctatgaatgaccttctatgaccacgttgtattcttttgtgaccttaccagaagaaagaaaagaccggcgatcttctctctctcaagtggatggcacagaactagcacacggttacatgctgagctatgccccatggatcacttccgtcgtaaaggtcagaactatcaactgccagttcgtcttgtagatgtgtcactaattaggcatttagatagtagatgatgcttcagacagatagcgtcgcacttgggcaattgagctatccgtaggcatagctgggactcatagccatagggttgtctcgaatggtgtaaaggtatgaatctgattgactattactgattaggctttgctctcacacagttttagtactagaagctgtactccgctttgcctaattacagagaacacgtgtcagaaaccattggagtac

SEQ ID NO: 163579 - DNA, 730 bp, Zea Mays
tcgtaggaccctgtcacccatctctacacatcgccaacttgcctaaacgacgaggggcccaagtacgacctcgagctatccaagaaagagcacacgaagcatgggttctgggggcttctggctcagaaagccaaggtcatgctcgacgagaatggcaccccacgcattcaggtaacaactctgaaaccaaaaggagaaggaagagccatcatcaggcgcgttgacgtgatccttttgtcagttctaatatccatggaaatttccagacctctgaatctcgctggtcctacgatcgggtccgaagctcggagagccagagccccacggcacggagaggaacgctggaaggcaggctagacatcggagggaagatcaaggacgttcttgaggtgggttcaccgatactttccactgcttcaggctctctgcgcgcgcaccacatctgctaataaattttctcgcctgatgaatgagatgagatctcgtttccttgcagaaggagggcctggcggtggccgacaacacaatgtcaggcaacagccacggcggtgtcgtcgctgctgcccggaagctgcacatcaggaggaaggcgtgcagcatggacttccgggccgcaaacctgaccccggccagccccagcatgtcgccgatgctggccgacatggaatcgcctcagctcaaggcctctcgcgacgtaaggtgccctcccgttttgcgtgttaggaggagg

SEQ ID NO: 163580 - DNA, 431 bp, Zea Mays
gcggtggccaagaatttatagaagattgggaacgagtccgtgcagcgatgttcgtggatctgcgaacgaaaccccagaatttcggcgagccacaagcggagctgttacggctgggtaggcgacgagaggttgttgtagcccgtcgagcttgaggagaaagagaagatgacaaccgaggcccacacgtaagtgaaccggtggggtaatgggattgctggcaaggaatggccatggtacagcgactgcgtatggggacggagggtagaatctggcgagtggggcccgaatgtctgtgctcgtgtgggatggaaaactaccagatggggccctgccaacagtggcactcgcgcgcgagcgtgaggcgaaggtgcggtgcgtgcgcggcgggatgcagagtcgcgcacccgcttatggatcgaggaaggagatga

SEQ ID NO: 163581 - DNA, 1437 bp, Zea Mays
cttagttttaattcttctctccctcatatgccatcccattactcttgcgttcatctccaccggcccgcactccgtcagtggttaaccagctgcacgcggcggcggccgcgcactccacattggttagcaacgtcgcactcaacaatgggaaactattatgctattcaaattgaatccataaaataagtattggataacacagctgctgtgtttcaaataacgtaacacagatgtcaaggaaaaggcacaaccccacagatggcatgtcaaggatccttggaagaactgagtaactgttacacaaatgtctgtacacgatctgacctatctaccgagtaccaaggctagtagttttataatggtaaaaaagactagtagttttgctccttcaggggcgatcttctaactgggtcatgccttggtttcttcctaatcacaggtgcagaacttctatcgttagttttctctgaggtaagcctatcattgcatggttcctcctcattaattttctgcgagatccttctcaaatttgacatcatactttcacctccataaattacctccccaatggtatcggttagtccagtcagctcattgaccaactgattcctctcttgaagtacaacaacagacatatcagctgtcttagacttcagctctcgtacgtgttcttctaatgtttcatttctttcctccaacaatttcagcttgtttgcaacttccagatgctgctttgccttttctgacatttcagaagcagtgcgagctttgagttgttccataagattcttcaaatttcttgactgatgcttctcttgcaataaactcacctgcagggagtcaagttctctttcgcactctgcaatgagcatatccttgaaaacagtatcatgcccttggatgacgttaagtgaattcagagtttctgcaaaaccataaagttgattcacctctagctcaacttctgccacttttgttgctgcagcctcaagaaggtgctcgatgtcaacctgaacagattcaacagtttgttgaatatcagaaattgcaatttctttctctgctattagtgtataccgatctgctttctcttgattaaacatttccatgagctcctgctccctgcatgcaaatttctgctcaaagaatctaatccgttcttccagctccagaagttttttgtcggagacctcaacaatttcatagtacctgttcttcacttcatgaatagacttctcatactccatcttgataagacttcccaaatcaagtttctggaccatgttttcctcttctagcacaacgatgcgttgctgaagcttatcaaccatcattcctttatcattaatgataccacataactcctgcttttcttttgtatgacactcatcagcctccattttagcaatgagaacaacatccaaatctctcttcagt

SEQ ID NO: 163582 - DNA, 820 bp, Zea Mays
cgtctcgctgacagcttacacaaaggtccctggacttccttttcttctccaaataagtccccgaccacggcgcgtttgccgttcatcaccgacgtcgcacgaactggccctggccagcggcgaacgctcagtcgagcgacagggggagaataacctacccaaggcgacctaggaacgagctttattgtggcttgaacacttagaggacgtcctgcccatgtgcacggcggaaaccgtgatgttgatcccgtgttcctaatcacctacacccgaattggtcaaacggatgctatggtgagctttacgtgcctacatagctgctagaacaacacttgagaggggcagagctttactagagtggtctggccacggacgagccgttctcggcggcgcgacggaccgaattgggggaaaacggcgtcgcggcggctctgggtgaaattgggagctaggatcggggctatagggccgtaagaggctgtgttttcattacgcgcaatcaatttgggcgaagatggagagggtagtgcgaatttgacttcgactgagcttcactggtggagatgaaagcacctcgccgtggctccttgctcaatttataggcacgacggtccggtgattgatccgcggccatgaggtgcgctattaacgcatggcaaccacgtaagggagaggcacagtgaggtgaatcaaagcatgtgcgacagcgtggcggacaatgctgagtcacggcgaccgccggtgaggtaactccggccacatgcggctgggttcgcgaagtcgtgccacgtacgagttaccctttccccggcgttatcca

SEQ ID NO: 163583 - DNA, 431 bp, Zea Mays
tgaatctggcccattgtagctctatgatggaccaatagtcaggggccatcctgcacctgctccgcctcaaacttgtccctctttcgaataggtggttgtggctgtggtgaagtggcctcgcctctattgtgtctaagtttgtccctctaagggctagtttgggtgccagaaaactcactagtagagatcttatcatcgatgacgttcgtattgcgtcactgcatgtgtatatatcgtcacagataaaggtttgtgacaaatttgtgacgagttcgatttggtcataggggtcgcgtcacatttgttgtgttgtgacggactacccagtttcgtcatcgatgtgtatacattctgtgacgaaagccgcgttgtcatggaagtgaattcattctatgacgatcagttgtggtcatagaggaaggcacttttcc

SEQ ID NO: 163584 - DNA, 285 bp, Zea Mays
cttctggttggaagtgttcctatgtgctccattgaatcccctgcaggttcttagctccttcgggagggtttcaccacctcaaatagccttttcaccgaaaccctaaacctccgcacaccacatgctgggtgaaatgcccaaaccagcaaaaaatgctccaattgaacccaaattttacaggcaccttcacaacacctccagtaacatattcgccaaatttcacgcccatccgatataccaggcttcattttcaccaaattccccgtttcgagcgatcgtttccaa

SEQ ID NO: 163585 - DNA, 987 bp, Zea Mays
gggaggggtgacgtccaagaggaaggggaggggaagggggcggctgcaaaaatcccaaggggaaagagggggcggctagggttaggggagactaatgggccggatcaaggttcaaggcccaactcgctcatgtgacagcttccgaccccgtcgcaaacaactaaccaaagaaattctactgtcttacaggtgaatattttccacaaattccaaattcccaaagcgcatcacccgaatgaggaaaaagaacaaaaagaataacctccacttctcctctttgcaaaccgggtatcacactctacctcccttaaaaagaattcgacctcgaattctgacgcttctatcagaacgacaaaagggaaaaaaattaatgaatcaacaacacttacccacaacaaaaagttccggatatttctgccgcatcagctcctcaagttcccacgtagcctcgcactcaaactgattagtccataagaccttgacatacttaattgatctcttcctcaaaacacgctccgaggattccaagatacgcaccggacgacactccaaggtcagatcctgctgcaccgcaattggttccatctcaatctgatggttcggatcccgcaagaacttcctcagcatagagacatgaaaaactgggtgtacccctgccatggaatccggcaattgcaagtgataagccaagctgcccacctgggccaagatagtgaacggtccaatatatctcgggctaagcttttcggagacaccgaaccgaacaactcctttagtgggtgataccctgagaaggacttggtcacccactgcaaatcccaaatcccgcctcctcacatcagcataactcttctgacagctctgagcggccaaaatattctgacgaatttcctgaaccttttcagaagtctgctgtacccaatcaggaccaaccagggatctctctcccaaggtctcccagcacagaggggagacacaccgcctgcc

SEQ ID NO: 163586 - DNA, 783 bp, Zea Mays
gaaattgcaaatttgaaaacaagaaatatgaatgaacaaaagaaaacaaaaagaaaaaaggttctctgttcctggcctgacttctccccctccctcggcccatctcggccagtcgacccactgtagcccatccccgcgccacgtctctgacttgtggggcccgcctctcgggtcttctcccacctcctgtggtgctcaacagaatgtcgtgggcaccgccggaatccgcgcgatgatctcgccgtgagccgcgcgatgcctgctggtgcttgctcgtctcgcccatccatgggacccgcatgtcatcactttccctcttctttaccgcaacagaaccgcacatatctctgtctacctcggtaccggcagcgcagaatccgcgcggatcgaacgaactcagccaggaagggcgcggttcgcccgccagcccttgcggaacccacgacactataaatctatcgcgcccctgcttccgccctctgcccgaccgtgcaccgtggtgaactgagctttcgctgcgccccgccaaggacaaagaaatgagagaggtgctgtcgtggtggatttgaagcctacggcgttgtcgtgtggtcagaatcgggccggtgaagctcgccatgccacagggaatactattgtagctttgcctatccggaattgcgctctgcgctgctggaatcatgcgccggtaatcatccctccgcctaggtccgtcgaccggcctcgtcaccgcaccagcgccggtatgaacccctctattgagttctccatcatctcctctct

SEQ ID NO: 163587 - DNA, 706 bp, Zea Mays
aggaaatgaagaaccaccttgtgaggccataaagaagcttgcaataggtgaagtgagacctcaagaaaaggatgatgaggaaggaattttgtggatgaccaatgaggtttttgatgtgggtgcaaaggtggtgggtgacaaaccctccacccaagcaaacccatcaacctcaagtcatccaagtcttgaagaaaatcatcaaccccaaaggatgccaagttgccaactgtggtagaagatgaacacgaaagtgttaatgaagtgtctcttgatcaagtggatgatgaggaggagcaaattcaaagacaaccatcagtgccccatcctcgagtccatcatactattcaaagagatcatccggtggacaacatcctgggtagcatcaggagagggataacaactcgatctcgtttagtaaatttttttgaattttactcgtttgtttcctctcttgagccacttaaggttgaagaagcgttgggtgatccggattggataattgccatgcaagaggaattgaacaacttcacccggaatgaagtctggtccttggttcaaagacccaagcaaaatgtgattggaacaaaatgggtctttaggaacaaacaagatgaacatgtagttgttacaagaaataaagcacggttggttgctcaaggctacactcaagtggaaggacttgattttgatgaaacatatgcgccgg

SEQ ID NO: 163588 - DNA, 456 bp, Zea Mays
ctggggactggagaaacgacgccgaccggaggtcaactcggaggccggagggcctctaccacgcgctgctgcgctgatgtccatggcagaggcgagtgctggctgaggagggagatgagggagtgagcgctcgtacaggaaaggaaaaagatctggcgacgagatgagcacaccgtgcaggaaaatcagcaccgcacacaggataaactcaacacccatgggcggcggcttggagatgaagacacagagaggatagagctggagaaaaatatcctatggatatgaggacgacgacgatgctgtggctcaccaaaaaaaatcctatggcgtgagaagataggagcgcgcgaggagatgagattagctaaaaaaatatctgaaggggcaacagtagggctagatggctggatattttgttttcttttttttaagcgatatagatatccataactcagt

SEQ ID NO: 163589 - DNA, 925 bp, Zea Mays
gcggctggggcaacttattcgtggttgtggcgggctccaatttcgcggtcgacatcggtgctgcgctcctcatccacgccgatttcgcggtcgacatcgaggagagccaggtcgtgtgtctccagggcatggatagatgcccagagatttggctctactgctggccgggtcgacgaggagaggaggaccgcgagcgcgtggggtaggtggtcgcgacggcaagaagtagatccgcatcggactctatttcttcacgcggacacgatgcagctcagcttcaatgacacgtccatgaaggccatctgcgggcacccgccgcagagccgtccgccaacacaactggcaccacctacacgctgtctcctcgccgtcggcttgggcagccccacgcacactcggcaggagatggtgacggaggggaaacaacacctagaggagacatcggcgccacctgcacaacggtggaatgtgaggggagaaacatgagatcctggtgccctgctggctcatgctcatcaagatcttcaaccacaagtcccaaactcttaccatgattttttagtgcggccaataattgttattccgacgtgtctttgtttcgctctaatctctgttgagatattctgtgctatgctcacggtggattgtttggtgattgcgtagggtagggagagatacggtgtcgcaaggctggaaccatctctgcatctgattgatgagccaaccccgtgttgggtctgttcaagcctttcaatgtgctgttgttgcgggttgggtggtgacggatgccttcaatattatcctgaagggctcgactacattgaggtaagcatagcatgttgttttatcccacattgtgtatgatatgatacatagcagattccatgatcccatcaatatccatcgattctgatctatgttgtgg

SEQ ID NO: 163590 - DNA, 914 bp, Zea Mays
cgaagctgaatttccctctcaaacaggtccttatatatcgttcttcttcagaagctgtgtcaggaagataagaagaatgtagcgtcccctgaggctctgctggcaatgatgcttgcgtgtctgcagagcaaagaggcagagagcctgaacaattcgtttggcccttttcttgtgcttggcagcctgatcagatgccaatgcgatcccatatctccccatatctgatagggaaaataaaatctctccgcgtctgctgcactaccggctggtggttgtgctcgccagcgcggttgaatcccatctcacctcccctcatctgccgtcgtccggtgactgacaggacgaggctccttttccgcaccagcagcgccctctccacttgatgatggcctggcctgctagctcgagaagaagaaatgggcaagcagtggcaatgagatggatgttcttggtttagcagttcttggtcgttgcctgaatcctgcacattttactactacagttgtgagccagaatcgcacagatctgcctgaattcttcttctgaatatccacagcaatgcgaaattggacctgcggaaaaggaatgggcaactgattggtacagtactcactagacaataataatcctgaccaatatgtaaccatatccgcacagaagatgccagggttagattttttttgttgttgttgcaggccatgaacagtccaagggcgtttgctgtaatctgctcgcgtccaaattaatccaggaggatgagagtgtgagactgacacatgcacagggatcacgccaggtatataaacacgcaagtggcccacccaccggcgacggcttcgatccgagaacaatccgtcgtccgagttggcatctttggccagaccagtatcattgcccaatcacggatctctcgg

SEQ ID NO: 163591 - DNA, 813 bp, Zea Mays
cacatacagggacaaaatcgtgtgacctgccatgcactgccaccaggcttcagcaacatactcgctacaggagctagcgtagacaagagttgtgttatgagtacgaccacacacaggaaaaggggccaattcgatggcccaggcggatgagggatccccctctctctattgtctcgtctctttttctttagcaagggtggggccccattgtaagccttctctcttaagatacaaaagggagaagttcacccttcaggtggcacacaagcacaccggttgtaacatgctccagagcaatactataatcagcacttcactgaactagggcacaagcctgaactagtataattcaccacctcaaatccatcactcgagtcccagcgactaaccattcggagtgagtccgcacaagcatccccgccgaacacaaatcttactgcccctggttttcgaaactacgacaatgtctgcaaactgtttgtgggtgtctacatggcaaaggtcgatgtcacttatttcaatgtggtctcttaggaaatggaagtatacatcaatgtgtttagttttggggtggagtgcatgattcttcgccacactaatcgcactagtgtatcccaaaggagtggaactctctcaaagctcaaaccaaagtccctcaaaggtgtctatcatccataggaactaggaccaacatcgagcagcaacaacatattcagattccattatagattgggctaaaatagagtgtttgcgagaggaccaagacacagtacatacatgtggcttcggtcaaaaacaacggtttgatctctt

SEQ ID NO: 163592 - DNA, 611 bp, Zea Mays
tggcccattggacggcaggacgaggtggtcgttggcctcagtgctggcaatcacccaatcgttgtgctagttttcccacctcgaccgctaaaggtggggatgtagactacggccggatctggcctcgtctggaagtagtaggcaccaatgtggtccctagtcttcccggacttgaccagcacaaagaagtagcggaagagggaagtgcaaggggccacacctacgaacatctcgcagaggtggacgaagatggctgcctggaggatggagtggggcatgaggtgttgaagctgatgctcgaactcctccagcagcagcaggaagaagggtgaaatcggcagcgcccagcccgcaagaaatgtaggaggtgaacagcacgaactccccggcggcgagatcgccaaggggggcagcggcggcatggattcttccggcgagccctagcgcgctccacccaagcaggccacgcaccagattaagcgcttcctcagactgaaagcggtcgagatgaccaagcgaagccatggtgtgtgcggcggcgcgggcgtagagcagaagagcacgaaggcaaaggggcacagccgattgggagagaatgcgaaaaggtaact

SEQ ID NO: 163593 - DNA, 595 bp, Zea Mays
gcagacttcaaaaggatggctccccacctcgtcgctggcctagcaaggtgagggtcgacgacggtgatgtggccgcgggagaacgggacctcaggtatcagtcccccgagcaggtcctcaaggacatcctcactggagactctgactccggtgatgataacgaccgccacaagaagttgtatgtgatgtacggtggaagctggaaactcacctcgcgcaggaacgtgaagtccctgcgccgcgaggtcgtgtcggcaaccccaggggtcccgagggcagccccacaatagcggtggcgaagcacaacaatctcctttggggcatctgactgccccgagaacatggcaggcgtcggcatactgctgctcatcaccgcccctgtcattgccaacatcaagctgcatcatgttctgatcgacggtggggctgggctcaacgtcatcagccacgctgtgttcaggcagctgcagatcccagggtcccgactgggaccctcttgtccattctccggagtgggtgctcaaccggtgtatccccttgggagcatcacgctcccggttacattcggggcagaggaaaacttccgcacagagaa

SEQ ID NO: 163594 - DNA, 1833 bp, Zea Mays
gccgaaagaatcaattgctggaccccaaacatcagaaaagatgagatccaggggagcactagacctactaaccgaaataggatatggaagctgtcgtgccttggcacgcatgcatgcatcacaaacggatgacttattatttagagtggaacataaaagaccattatctctaatgacacgaaggacgatctcatgagccggatgacctagccgagcatgccagcgatgaggtgaagacttgatggcagatagaaggagcttctgagtggggttcagctgggtcggtaagggatagagaccacccttacaggggccgcgaaccagcaccttcctcgtggcctggtccttgatcaaaaagacatgaggatgaaattcaataaatgtattattgtctagagtaaacttatgaatggacacaagatttttttgtgtaaggggaacatgaagaatattgtgaaggtgtagagggcgggtggacgaaggtatgacagatgagccaatacagtcaatattcatacctgcgccgtttgccgccttgatttgttccatgccattatatcgttcatgcacggtcattttatcaagctcgccggtgatatgatcagtagcaccggagtctaaataccattgtgaatcactggcttgaaatgtcgtcgcagatgcagcaagacgttgatcagggacgaaatcctcgtcaaaccggtaccagcagatgttggctgtgtgtccgattttgaaacatatttgacagtgaggacgagattggcccccagatgaatcagcggaagagcgacggttggatccaccagaagagcccccgcgtgacatgacagatgattgatcacgtgacggggggcgaccgcgtccacgccatttgttggcgccacggttcgacgaagatccgcgaccacgggaggccgcgttcacggatgagtgataggaggcccccgactgcctctccgtgcgcagttcataactcagcatttgcgagagtaattcagaaggtgtaacaggttctatgcgagtaagaatagatgaaacgagaggattgtagcgttcctcatcaagaccagtgaggagataggatacaaactcttcgtcgttaaggggctgtccggcagcactcatctcatctgcatagcctttcatcttggtgtagaagtccgtcatgttggcagtgcctttctttgtggttgccagcgcaatgcgcgtattgacggagcgagcacgggtacgggacgcatatgttgcggccagtgtgctccatacctcggccgaagagggcagcgtggcgacgttggtgagtacatctcgtgtcagggacgacaagagataccccaaaactgcttgatcacgcgcaatccaccgagcatactcggggtttggttcggtcgtcgaggcatcgccgatcttgctggcgatacgggccgggggctttggatcagcacccgtgagaacgtcttcgagttgcgccgcgcggatgggcggcaggatttgagcacgccagagcacgtaattcgtgcggttcagtttttcagaaactggaattgagaaggaggaggggatggtggaggagaattcatgcgccatggatgaaaaaagaggctggctatggtaccatgtaaacctaataggatgaagcgttcaaccaccattggtggccgcaggttgcatgtttatatagcgccgtataccggacgaagggtgtatacacggatagagtttcaggtggttaagattacacagccgaggcttatctatagcctaatctctatctatggctaaccaactaaccacccgaggcaccagaggatagggattacaattctgtct

SEQ ID NO: 163595 - DNA, 1012 bp, Zea Mays
cggccggcgtcgctcctcttcgcggctgtgagatcgccggagttggggtgggtgcgggctacggcggttccggtgtcgccggagctggctagaaacgaagaggaagagtcggcgaactcgctggtggggttgtggccacgagaccggggtcagagaggggagaacggcggagaaaaggctccgggcgggtcgagacaattcctgtgaggaattccaaccgctaggagaggcaatcgatcgtgatagggctcggtctagttccagtggaggtggggagcactatgggccaacgtcggggcactggacggggttgggttggccggacaccgtgtgggcgcggcgagcaagggcggccgcccaccggcaaggccaaattggctacatgtaggcgtgaatagggaaaatcgagcacgggaacgggtgcctcacctcggggcgaagctcggggtggcctggcgtggcttccggcgagctggatgaccgggacggcgggcgcgagtctccggcgaggtcgagcggcgtgggcagagcacgagagagagccaggctgtgcgaaatgggacgggggagcgagtgcgggtgcgggcggtgctcaaaaggagttgggggcgtgggcgggtgacgtggccaaggaatccggcgaacgtgcgcgagtgcgcgcacgctggtccacggcgggcgcggggaaggcggagctgatagggcggtcccacggtgcagcgagagagagagcgggagcgcgggggtaacgactcggtgtctgacgaagcgggcccacgaggcagagagggaagatgggcgcgagggcagaggcaaatggcaccgacagcctggccccacttggcagagagagggagagagtgggcgcgcagggaaggaaaccgccgctgataggtagagcccacctgtcaggcggcgcgggcgcgtgggcacgtggcctggctgggccgagctgggccgactgggctgctttggccttttctttttccctggattttctaattgttttttc

SEQ ID NO: 163596 - DNA, 847 bp, Zea Mays
ttctatgtatcgagtgttggcttttgggatttcttcttcgagttcccctcttcgttggctcgaccctccttcatttatatgccaaggagaggactagctacagatgaattctctcagaaggtattgctgtgaaatggttttcccttggtaaacgccttcccatgtgtcattatctgctctgaataactctccatcgactgttggtgaagtataaggaccataggtgtccgaacgtcatcgttactcagtctgtccacctacgcccgtgatgacccctgacctttgtagtctgtcctcctgccttccctcccttgtcttgcatgttgtgtagggcgtcgaagggctcaggctagagattcgtaggccatgagtggggttcaggcctaaggcatataggttatgaacggggcataagccttgtacacataggctatgagtggaaggcgaaccgactctcttccacatcatggctcaatgctatatgtagttaatgcgacgtgcgcagtatcgatgacgagagcggtcagatgtggaatccactcgagtggcttcctgacacctcaattgacccttgacctaggttccagaaagggatatgtgccatatgacatttctacctgttttagtgattaagtgtccaacacaccacattagactaactagtttaacatgagtatgagcacagggtcacttggaggcaaattgacgaaactacgtccaaatgggcaaatctggaggctaaaagtgcaactttggtaaaaaatgtaaacatggggtttaagtgtttaaataagttacacataccatattctatgtttctagcacctttgtttagctactatctcgt

SEQ ID NO: 163597 - DNA, 575 bp, Zea Mays
atactttgaaagcgatgtgttcttgaactaaatctctagtaccgatgtaggtacatacggtaatgaaagccattaggcacgcttgcacttcattctcaattgtgattgatggccttctaatgtcgaaacacaaccatatgagacgttgaatgatgcccctcacatcccccctctgattcagatcattctttacgtacaaccattgcttcatccaagagcccgaccacttcttttgaaatgtaggcacatgataatttgcctcagagcagggtacgaagctgtaacagccgaagttgttatggtattgctcatttccggttgccttcgtctagtaagataactcgtgaatattgtagaagcacctagcatccagctctagcccctgactcctcatagctcatataaaacccccccaatttgataagggattcgagggtaagttgatgaaggtatatttcgaatgtcttcagaacttcaaccaacatcttatgtagtggaaagcaaagcctagatttcatgaagctcttgaaggccaccaccttatcagcttcgggaagggcaacagtgcttccccc

SEQ ID NO: 163598 - DNA, 323 bp, Zea Mays
ggttgaaattggatttggcaaatagaactggatctcagtaagtcaataggctcaccaagatgtgctgcaccagcacagatgcacacagggacatagtggggctgtcgagcatggaaaaagaagcaaaggcaagatggacgtcgtacctccggttctgcgacaagcgtggcagcgactgggcacgggggaggctagggcatcgggacatgttcgtgtttttcctctagtcttgactgggatgtgcttgacatgttcttcttttttcctctgaagtaccatgtttgtttttcgaaaagtaagccttatcaaggcaagtggaagct

SEQ ID NO: 163599 - DNA, 549 bp, Zea Mays
tggagagcatcaaggacacatgagaatgttagaacaagcaacagagcaacatgaactgacctaatttgggctggccacggtgagacttgtttcagggtggcggagagcgaggttgggggaaattccgaattcaagttctctggtgggaggtttgggatgcaagcgggtgcaatagctgcttggatgcatggcagagctgggggtacggtcaatttatagcgcccgcgggtggtggtgctcaatttggccgagccacgcggcggtcggaggtgaagaagaaagcactggccgcgtgaattcgtggcatctaccgtggcagttactccgacgagccacgaagaggcacaagggttcacagctatgcagtggaggggctgagccacgcggcgcaaggccgggaggcggctgtcgtcggcgagcatattcacacccgccgtggtgagtgcggtacggcgaccggaattgtttactgcccggagttatccacggcgacgatattttcgcgaccccgcagcgctatccaacacccaggcactaatctcgacgccg

SEQ ID NO: 163600 - DNA, 442 bp, Zea Mays
ggtactatacttctgaatggcaaaatgtgaggtgaccagtaggtagcaaagaagtgttcaactttgcacactcttccctccgtaatgttatagagcgatcgtttggggtcgtcaaaatggagtggagaatcctgctaaatctacctccattttcgcttaggaaacaatcgaagattattattgctgcatggcactgcataacttcattcgagacagtgttatacacgatcaagactttgaccaatttgtacctactaaccttgttaatgatatacacttatgtgagagtagcagtagcacatctgatgagttagacatgagtgcatttcgagatgcaatagctactgccttagtgtcgtaggttatttattcagaattgtagcgatagttaagttgtaaagaagtctcattttgttaatgtaattcactagttggctcggtg

SEQ ID NO: 163601 - DNA, 602 bp, Zea Mays
gcgacagaagccttttgcaccttaggcagttttgcctctgttggagggctcagaatttctggcattttcattatttcttcaatctttggctcttcagccttatcaaccttagcttcgactggctcgactgtaggcgtcttcggcattacagttggttcttcaacgctctgtgtaattgaagcagcctgtcttgcttcagcatttgaagaggctccttcgacaaattcaggcaccacggccggttcaatataacgcggccggtgtgtcagaaccttcacctttttgctcttcggcacaactgtggtggccgaagcgacagccttcctcttttttccttgccctcgcagcgggaagcgataatcggggtatatgaagccaatcacatcaaagaccatgttcagtcttttcttcccccagcctccgaaggctgtggacaaagcattatcttcggccttggagtaggctccaagtagctcatcactggtagcttcaatacacttcagccagtcgttgtttggctcatcaaacttctccctaaatctgaaggtatacttcagtcggactagaccaccatcacaagaatcggtggtggtctccttcgg

SEQ ID NO: 163602 - DNA, 466 bp, Zea Mays
ctagtgtaactaacttgacagagcagccagtcatccacttgcaagtactacttgaagccacacatcaacgccagcgggcagatcatgagatggccacagctgcgcacccgtcaggacaatctgctgcagttctcccacatccgtgctgttcaaattgagttcttctgatgactgacgaacaaacaacaaaataaaaaacaccagtttctaaatgctgcaattatgtgggggcatacgtacgtgttcacctcgtcgtccactagaagcgctgggatcgtatcgacaacttgatcacgagttcacaactatttcagtgcatacatacatagatatccttgctgctgcaatctggagcaggatgggacctaaacagaggtgcctggggttcatcgtggccctgtaccaggagaccaaggagcaccaagaataaaagtggtcgctgtcctggcctaacactgcatccccc

SEQ ID NO: 163603 - DNA, 1054 bp, Zea Mays
tgcgatttgcaaccgagaagaagtaagcaaccactccgttagtgatccgttatgtttgcatgcgttggaaaaggaaaccgatgcctgagccccgccccatgcatatgcaatttaatctgcatgcaagcaagaaataaaaatagccaaggtccctatcgcatgtgcatgcagccatagtcaattgaaaactgccccatgttaggatcatgtgcgcccgtggtttctgtggccctttgcgtggtcgtgctccaaccaataaaaatacgccacgtcgcttaaaatccatgaagtactaaatctactactactctataaggacgcaacgagggcgtccaccaagcttcaccacgcctccgcttgactctcctcgcccacgctcaggccccgactctcctccctcctcgcgaccgcgcaatcccgactcaatgctttccatggagagcagagcgtcggccttccgaaatcttcgcccaggaccacgccttccgctcccccacgcctgatccacacgaggcccacagtccctgcgccttccaaattgccgcgctgctagccgcatctcgcccgtgcatgcccaacccacgcctcccaaatcgccgccaactccccaagctccacgagatctgactgctcctcctagccagtagtctctccgccgcccaccactcgatcccacccactccatagctaatcttaccgggatcgtagatctagaaggtagcatcggatggctccatagggaatggaagcatggatgcaagcgttgatgggggtggtgaggatgaaggtgactatgatgaggaggacaccggccggtttctgtatgcatccgctgacttatccacgctccagtgatgtggcatgttgcctcgtgggctgtgggcgcagcggcagggcgacggacatgcgctcgtgaacggaggaggcggggatctggacgatgcgaggttgcgtttggcgacctgggcaagtggatgcgcgaaggctagtggcgtcttcggccgtgtcgacctgcgcaagcggacgcgcgaaggcttctaggcgacatgatgga

SEQ ID NO: 163604 - DNA, 1021 bp, Zea Mays
caagattgtagccgaatcttaggttaacaactttgttacaggtagattaacaagttatcatgtaaaaatttgagatttgggcgctgcaaaccgctctgtcagaacaactgaagcagcccctgatggtacactaacgaaaagatcttctagttcagtgaacctcaccgccggcgaccccgcactcagattcgcgctaggtgccacgattcatgctcaacagagtacagataactgctcggggtaagaaatatcgcattgaggatgaacttaggtcactgttccggtccggccgccgtgtccgcctgactcacggccggttaagataagctcgccggagttggccacctattgatcggttgccacgtgcctaggtactctaccacgtcgcagtagcatgccttggcatgtccgttcatcgccggtaaccttgccgcggtgaaagccacgcacctcttgcaccagtgctctcccctctcttcggatgccagcgcgccatgcaaaattcaagagccaccgccctcgggtcctataaattgagcatgccatcagctccgctaggtagtcaagcatccagcgcacctactcgtgtctcggattgtccactagagagctctaatttgagattccccccaaatcggtcaagaagccgtagtgtgagagctcgccatggccagctctccacaggtccgatcatgccctcctcgctcttgttttagcatccctgtgtgcttgtgatgcttctcgacccggccaattgagctagaacacgttggatcaccgagaacgcctggatttgtccgttgatcgagctatcaccgttggcagagagattaggggctagaaccttgaaattggttgaggggtaatggtcattaggggtcgaattaggtgtcaacctgcacaggagcaccgatagttgagttatccggctggtataggctcgccggagtccttgctccgccgtccatggtcggggcctcgacttgtgaagaaatagaaaaggggagggtctgtttgcgat

SEQ ID NO: 163605 - DNA, 392 bp, Zea Mays
gtcaggtcggtctgtggggtgcgtgcgttcgcgcgattgtggggcacgtttatgcatgcgtaaacatgtgttatgttttgcgtaaacagaaggtgcacacgtggtggagtcgagttgggatggacgaaggtgggccagcgtcttgttcgctggtcgggtagttggttcctactcgtgtttatgctagcatattgaatggttcagacttgcataacaggagagcggcaacaaacttttcattggttcgttcaggtgggtccgcacaccaccgtgattagcgtgtccacgaagctggaagttaccgtatatatcggaacagaagatatagagctaatcgtgcgtgggagctcaggcggatttcagcataaaacgtgaaccaaaacagcgtaaat

SEQ ID NO: 163606 - DNA, 357 bp, Zea Mays
gcataactgcgaataaattcctagagcagaaacaaagatttatttaattatcttataagccctcatgtatctgtggcatttgcctttagggaagttgttggagagcataatgatacaaaccaaatctccttgaagttccttaaagaaggcagtgtgcagtcctctccaaatgaatttttatcaagtgatgttggtcctcttctcaaaatgatgtgtcatttatattagtttactccaggcttgctgcacactaaattttcatgtgtgttacaacttcattcctcacaatgctttattgtgttcaatgcaataaggatatcggtaactcttgttgcttttctactagaacatgtcttt

SEQ ID NO: 163607 - DNA, 478 bp, Zea Mays
accctgagttaagtaagcgcgagcatgttgcaccgtcttaagtcgttgccgacttaagccgattgctccattagcagggcatagtggtcaccctgagttaagtaagcgagagcatgttgcaccgtcttaagtcgttgccgacttaagccgattgctctgttggcagggcatagtggtcaccccgagttaagtaagcgtgagcacgttgcaccgtcttaagtcgttgccgacttaagccgattgctctgttagcagggcatagtggtcaccccgagttaagtaagcgcgatcatgttgcaccgtcttaagtcgttgccgacttaaaccgattgctccgttagcagggcgtagtggtcaccctgagttaaataagaatgccggtcaatcatgagcaaactgagtatttttgaagccttttttattgatgacatatttcccattttacagagttcattatcgtcccgatagcttttgaaat

SEQ ID NO: 163608 - DNA, 722 bp, Zea Mays
gggcaatctagtttaattcaatgggtcagggagcatcagtggcaagtaagaatgctaaaacaagagagcagagggtatgatcggacctgaaacgagctagccacggcgaagactctttcacggtggcggcaaacagatttgggggaactgagcaattcgtgggctcaggtgagtaattggaggtacgagcgggtggattggatgctggaatacctaatggagccgagggggtgctcaatttataggactcttgatcggtggctcgtgaatttgaaggagacgcgcggcggccggagagggggaagagtactggcgcaagcgattggtggcatttaccgtggcgggctcaccttagatgaccagacgtgctagagcgagtcactacaacgaagtacagcgtctaggcacgtgtcatccgagctgcaaacgactaactccggtgaacttatccacagcggctgtgacttaggcgggtacgacggttggagtagaatagtggccggagttcatccacggctcgatatttccttacccctttgcattatctaactgcgccgagcacgaatcaccgcagtgggcacgaatccaggcgcatggtcgccggtggtgagttctctacgctggcgttctaatccggtcactgtaacattgaaacctgattcagagcgcctaacagaccgacatgcaatgcctagatctcgaatttttgtgcaacaacttgc

SEQ ID NO: 163609 - DNA, 624 bp, Zea Mays
tatcgatggatgataaaaccatagaatacacaataactttatactatgcacattttcaattttaggaggagctttagggggctctatatactcgggagcatagttgtcaaacgagaggatgagataggctttatcgttctggtctagctgcccaatagaggcatctcaaatttcatcgacctcggctacatctacgttcatgttccttgaatccatgctgatcctgcccataaataaattaactaaacaagacgtcatattccttggatgagtaggggctttatttttcggttgggtcgttggtttcttctccgccacctgtcgtcttctcttccactgacatctcctattcgaccctagctcctcctcgatcgatctcacctgcctagtgactcgtctccaataacctcgatcaatcttgcccaaccaacaacgccctctctgacctcaaccaaccctatgcattaggtgatgtcttcccattcatcgtctcctacacacccgccatcacctcctcagactaggatcacagttcctcttcgaccaaatttgcccatcctgcaatattttcgcctgaccccatctcctccccctccgatgtcatcgcctctcgatccaagtttg

SEQ ID NO: 163610 - DNA, 689 bp, Zea Mays
gtacaggccaaacacagatgtcgtggcagaattatcactctgcaagcagcaggaaaaagagacccttcgagagtactacaagaaattcctcctcttgaagtcgcaactgccttcggttgatgaccacatagctattcactacgcaatcagtggccttcgcgcaggtgttttatacagccaccaaaaaaattgcaggagttatatcagctgttcaaaaagtacgcccggtcagaagagctccaccaacggaaaatcgagtcacagcgaaagcccaaggacactctgtagtccagcaggacatgggtcaggccctggcaatcagactcaggccggcaaaaccgcacccagtcccaagtgcacaacatcaccaattagtagcagactggggacactgctcgttgtcacgaataccctccgcagcaaggccacgacagtaacgcaaccagaggcaggggtagaggtcgaggcccgtagaagcgaaggttctattgtcttttccatggcgaagactcggcacacccaaccagggattgccctaaaaccaaagccacaaaggatcgaatgtccagaaaccaatggctaacaactaaagagttatcacccacacctaccatccccatcagtacaaccagcaccaattccataatgaacatttccatactcaccagcaaaaccacaatatataccag

SEQ ID NO: 163611 - DNA, 731 bp, Zea Mays
gaaaaggttagtgtagcatttcgacgtagcccaagactgatccgtgaatgtgatacaaccatttcaggcttgtgggcttggcaatatgaactacgaatactcctgattctgagtgagtggcgacatgtgaacatcgaaacgacaaagaggacagaacctatgcgttgcgagctagcataaagtcatgggagtagatccatatctcttgttaggacagaacaaagataaaaatgcaaccccctttcggtgtttccagggcactaagatggcataaagtggcttctttaatttcaaacggacaaatctagcgtccaactaccactctaccagcatcaaaggacagattcagcacttagtggtgcctgatagagcataaagagagaagtgaatctgagactgcgacgagcgagtactttgaacctcgaacattgcactgtcatctgtaactgatgagcaaagctgacatggttgatggttcctcgctaagctatgttcgtagcacacaggaacctcgtgcagttaccaaacgtagccccgcgaagatgccgattcgtgccgacgaaagttattctctttatgtcacaaagcaattaggcacactccatccatcagatagctgagccaggaccggaggcggcacaacggaggctggactggattcttgaagaggcttccattccatgggggtaaagcgatcccatttccactcctgcctgttgtctgcctccaag

SEQ ID NO: 163612 - DNA, 713 bp, Zea Mays
gagtaagctggaatttacttctgggttgctgcttacttgtttcttcaggtaatggaatcgataaaaaaggtgctgctgaactttaaatcttaaatagaagtgagattagcaccatctggaatcatcaattgttttcctttcagaggtctggggtggggaccatggttctggacctgctacccctttcttcatacaatgaccaaagtaccaaactaatagtccactgccattccctattgcagcaacttgaacaacatgctctcttaatttagaaatgacaattatcaaaaacagcaagctattgcacacccaatctttcctggagcaacatgtataccttcattttttaaaagctttacatgtctcgagatagataaactaggttgctagtacaagcaggaaccagtggctcagatatatacagacccaaccattttatattgtgaaagctggttatattaaattgctggcatctaccttcccaaagcttctttgtctgatcagctaactgtgtgggtaaagcaacatctataataaattccaacgagcttgcactctaggagctcgccttggcagcaatgtgccttgtagttgacaaacccgatttggcacgtatgaaactttcattgagaaggtggcttgacaatgtcacattgtatattagatttttcttttgccagtatccattatctcacacttttttagttgagtgg

SEQ ID NO: 163613 - DNA, 631 bp, Zea Mays
attgctaggagctggtccatagccatatcttgctttccactatagcatctcctactcgttggctttttccttgtttagggaatatgtcgaccgctggggacagaattctcccccgagaagtgatctttaacgtagcttgtaaatgaagccctccgaaatgcatgtttgaggacgatcatagatggaaggggcctcatggggcatctcggggtggtaaactaggtactctgccttggtgtcctatcgagggcactgatttgcgttggctccatcggtccagtgtacaacagcttctctcctgggtcggactcgaaagttggcactgggacaatgtagttcccggtcagaatctgtctagccacatttgaaatgacttttccaagaagttaatcaaaacctcagactgtcatgctaaggcatggtatatgatgtagttcatctcttggcgcaaggcgacagtgtgttttactgacagtgttgatagaccaatcgcttctagtagttactctggctagccagcgagccaaacattcccgaagcatttctaagtgaagcaggtgaggagattgtcagacacacctttgagagtattgtcataatagtcttgcatcttggggttgaagttgttgag

SEQ ID NO: 163614 - DNA, 531 bp, Zea Mays
cacaagcctcgccataaagataatgcctccacaactttagagcaaaaactaccgcggccattcaagatcatgagttgggtaattcccctcaataatgcctccacaactttagagaaaaaactaccgcgaccattcaagatcatgagttgggtaattcccctcatgcttcctcaattgccttgagccataagcaatcactcttccttcctgcatcaacacacagccaagaccaatacacgaagcatcagtataaactgtgaaacgcttaccgctctcaagaaaagctaggataggggcgtccaccaacttgctcttcaatgtctgataactgacctcgcaatcgctggaccagatgaagagaacacccttctccaagagtctagtcaagggcttagcaatgctggaaaaatttggtacgaaacaccgataatatccagcgagcccccaagaaacttcgaatttcagagacactagagggcctcttccactccaccacagccggaacattcttgggatcaaccgcaatgccct

SEQ ID NO: 163615 - DNA, 405 bp, Zea Mays
atgaactcaagactcccgaacctaattgtcatcccaagcctgagcgggtggtggaaacctgccacctagagcgccggtgagaacggggagtgtttcacgcgaccagcccctacctggcatgccaactatcagtgtttggaccatgggtccttaaccaaccaataaatgtgtcgtgtggccgactctagatggtgtgcgaggagacacaagcaattatcctggttcgggctactcaaggccctacttccagtagagaggatgatgcttattatactcgcaccgtggtgcttgtagtaggggtttacaagcacaacgggaaaggggaagtccccaagtccctagagatgattgaggcaagtgccaatatctaagacagaatgggagagcgagcgttcgtctacgagt

SEQ ID NO: 163616 - DNA, 689 bp, Zea Mays
cgagaatggttccagatacagttcgtgtagcagtaggaatcctaggtgtgtgtagttcaatcacatgtacaactacatgctgttcagatcacatcactatttcttgaatgacaacatattctatgcacacatgccaatctgtctctctcttgcaggaaatgctgcttccatgctcctctacacaacccctatgtatgtatatatatcttaaattatattaattactactctcttggtctcaaattaaaattcgtattaagtaattaataaacccatataatatttgatgcacatgttttctatatgtgacaagattcgtcatcattcatttgaatataaacctaaaaatcaagagataaaatgaatattgttttgaaacggatggagtatatttatgtatatattcgattctgaactatattaatcacctattcacctgcacgcacatgctcagactgacgttcagatgggtgataaggaagggcaacgtggaggaattctcctgcgtgccatacatcctagcgctgctcaactgcctgctgtacacctggtacggcctcccggtggtgagctccgggtgggagaacctgcccgtggccaccatcaacggcctgggcatcctgctcgaggtcgccttcatcgccatatacctacggttcgcaccggcggagaagaaggcaagtccaagt

SEQ ID NO: 163617 - DNA, 483 bp, Zea Mays
tcttagtaaatcttcgaggatcttgttgactctttccgtttgaccatctaactgggggtgataagcggtgctgaaatctaacttggtgcccatcgcttgttgaaggcctttccaaaattttgaggtgaactgcgtccctctgtctgacactatctttcgcggaataccatggagcctgactatctccttaagatatatccgggcaagggcggctcctccaaaagtggtttttactagaatgaagtgggccaccttggtgagacgatcgattattacccagatagaatcattcctttttgtgttcggggcagtccggttacaaaatccatgcctatttcctcccacttccattcaggcactgggaggggttgcagtaggcctgcaggctttcagtgttcggcctttgttcgctggcaggtgtcacaccgggccacatactgtgctatctccttcttcatccctctccaccagtatctggttttg

SEQ ID NO: 163618 - DNA, 566 bp, Zea Mays
tcacggtggagcaggtagccaaggataaattcgagcaaggcgcaaacggtacccgtggtcgtgctcagcgtcgggcgaggcagagttttgtgcccgagggcaggtctgttcttctgtcgtattagatgtctcgtcaggggatgccaggcggcgtgcgtgcaaagcggcgtatgtgtaatcatgctgttgggcttagacaagaccgcggtcttgttgccgctgtacacctgtagcgctgtgcggggtaggtatgtgcattgaatgcggttgtcccctgttggccttcagacacgccttgtctttgttgcctgaggcgggttcaggcagaacggagtttgcggtcctagagcgaggtagcctcgggcgaggcggagacggaggtcctgaggcgcgagaggttcgggcgaggcggagatctgcccgagtatatgatttcttcgggatttaaggttcctccgggagggggctcagtcggggcggtgtttttgtggggaagatccccgaagtggtcctcgggagaggcggagacctggttccttgctctcaggatacatgccctggcagag

SEQ ID NO: 163619 - DNA, 813 bp, Zea Mays
gttcagtctggcatccttggcttctggtcttctttcagattttcttcgcgggggtgagcttctttagcttcttgtcgtaatccatcttcagggttcgataggtttcacgagtgttggtttcctcgccttctgctatttcgagactctcttggagtgacgccttttcccttttaagttccttgacttgttgctctaggctttccacccgggagtttaggtaagtgcagtgggaggaaaggtcatcatattggttatcgagagtgtggaggtatccggccatgtagacgatggtggggtcgtcctcggtaggatctcttcctgatagagcctgaagtcttttcctccaggcaggggtatttttgttgttgggtggaaagtagcgaaggggggtttcaatgacctttctgctgtagttctggcatagctgttggagagcttttcgggcaacattttggcaagtgtctgggaagcagtgtccggtgaaagtgacttggaaaggagggtggtttgggtagcttcgactttctcccaagtagactgccatagagcacttctccattccattctcgagatattccttctagacatattttggcttcttacggatccccatgcgaagcgcacaacttcacaacagatgtgggaacccttccacctttgagcagtaggatgtcctaatgaccagagagtcttccatctggaataggaaaagaggggtttgttaatatcgggggaaaggagagaagatttttcttggggtaagaggtattttcttttaaggcaaacttttaaggtcagggctgcgacctatgg

SEQ ID NO: 163620 - DNA, 945 bp, Zea Mays
ccactttcccgcgaacttttcattcttgtcgaagactttcttcctgagtgcttccaatatcattccattagccctttctacctgactgttggctcttgggtgtgctactgacgcatatttgatctggatgcttctttgttcgcagaaatcaaagaattcagagctagtgaaattggatcccaaatcagttataatgctattcgatattccaaacctgaatattatatcttgtatgaattctactaccttagctgaagtcagagaagcaatgggtttgtactttatccacttagtgaatttgtcaatggcaaccagcacgtgagtgtatcctccctgagctttcttgaagggtccaatcatgtccagtccccagcacgcaaatggccatgttacgggtatggtctgcagttgctatgctggtaaatgctgctgctttgataagtattggcaagcttcacacctctggactaactcggttgcatcactctttgctgtcggccagtagaaatcggacctaaagaccttcccaactagagtcttggatgctgcgtgtatcccgcactgtccggtatggatctcatctaacagctgcttcccagtaaccgaaggaatgcacttcatgaggactcctgctgcgcctcttctgtatagtgtatccccaatgagggtgtagtcggctgactgtcttgcgatacgttctgctgcagctttatcatccggctcctcttcgttttttatatacttaataataggctccctccagtcattagagtctgactctggctagctcaaaacattgcactcttctgcccgatctaaggaaatactcgggcgtggtacttcttggatgaaaactccaggtgggacctgggtccgactggatcctagttttgacaacgcgtctaccgccacgttgcgatctctttccacatgatgaaattctag

SEQ ID NO: 163621 - DNA, 1174 bp, Zea Mays
tttgttttatgcatgtgatcgatgattgggatagtcgatgcgaatgaggagtatgattaatcctgttagaatcactggtgcggttgatgtcttatgcgtaatatggggacatgtatgtgcgcgtgtgtcgttgtgtattatagtgatggtggcgtaagataattgattgaggtgtgcgggtatatgccgtaatatggttatactcgcaacgaagaaagatgtatgtcttgtgtaacacaacgtttagattgatgtcgtataaccgtgtgaagggcgctcccaatggtcatgtgactaaagggggttgtagtggcaaagcgagaagtaagtttaatatttttaaacgattagttgatagcacctatcgacatcgtcatgatttttgttgtatggtggatcgatgccttgtcgtcgttgtcttggggaattttcggaaatgtgctggtgctttgctgatggggttgaatgtacttgtgatgtattagaataactgcgtgtcgtacgagtatccgaaaatggtgaaagttggtgtacgttggaaattagaaaatagtcacgacgttagccaatagccaaggttatgccgaaatttaaaatatgggcaatttgagttgaaattatgcttatctaggcgtgtggattaataataataattggaagaacagtcgttcaaattggccagtccaattaagaatgattttgcgtgtgaggtaaggtggtgacatgccaaagtagtcattgtttccctatgtttataagtcgagtcaatacccattaggcgtttattaaatttctcgtcgcacatagtgtatggttgtattcgtgacaaggaggtgtaggttttactcaattagatgtttggttgatgtggctaggaaatttgtttcggcttgggtaatgaagtggtgacgtgaccaagtagttccccccgttatcagtcgggtcaagatgtgttatgccttcgccgtgatacccatcgcatatgctaatttgatgtatacaaaaaatgaaatagacgcattatatgatttagtggtgctgtgtgatctaagtacattatatatgtgtgataaatgttgggcttgaggattgtctttcgggcaaggaagttgtaatagacttatatgtgtagaatgattaagctagtaatacaaaatgacatggataaaaatta

SEQ ID NO: 163622 - DNA, 611 bp, Zea Mays
gcgttgcggagcccttctaggtttggtacttgccgtaggactaggtcccgaccctaggttcttatctgcgtttgatgacagagtcctcgtccttgtgctgtagccatttttgcatggacttgtcagaagtctagacccgtggggagtccagaagggttttcgggggaagccaggcttcggctccgtagaccggggagtacggggtccctccaggggtcaatctagttgtcaccagagtaggagtctccggcgaagacatccttcaggcccccctcgggtgactgatacccgaggtcccgttcagctgcgaccacctcgccgtcgtcgaccctttccttgctaggtcggcgacgaggtggggagctgtccttggaagactgctcacgccgcttgctgacgcgtttcatgaggtcaatgatctcgtgacacttcgcagcgttgtggcgaccgttggggtgcacagagcatgagccgctgttacccctcttcggctgtgggcgtttgttgcggtcgccccggcccccgatcgcggctgcaacgactagagcggtggaccacagcttctggtggtcgcggtccttcttctttttctttttactatcccgggggac

SEQ ID NO: 163623 - DNA, 334 bp, Zea Mays
ctattaacaatcttgccgtgttcacagccagacttcaaaaaagcaacagttgtgccccgagaagctgccagggcacaaaagtcgctatgtccagctataacttcgtcaagatcattaatttcaccttcaatgtgttcgaaggcaccaggcaggtcttcggccgaaggagtaaattcttcactactggccccgacaaaatggaacacttgctttagctgatgaatgcatcgagtgcagaactccaaacatttattttgaagatttttcaaagattctttcaattccaagtttctttgagtttcggcttcgagccttgcatcaagcttcagtttct

SEQ ID NO: 163624 - DNA, 626 bp, Zea Mays
gggcaagataggtgtcgacatatttgtctcccacatttaattatgatctccgtcatttcccaaaacgaaagattcattgttccgtattcccagcacaatgatattgcgcgcattgctaggaatttcatcatcaagatgaacctcttcgtgaggcagatcaccatcagggtgaattaatcggaggagagttatcacagaccacgtgaatctgcaatcggaacatattctttgactaaggccgatggatcatatccgcaggcgtccccgcagaatagatcaaatgccaataagtcaaatgtggatatgatattaatcccgggtatatccacatctacatcaggtagaagcgttcaaacctatttggttactcctcaacgatttctggcaaactccatatacacaggagtacacaccgaacgacaggttcagtttggcttatgtgcgtttaatagaatattgaggcattacactatatgggcattcctccccctaatgccgagatgttctaaaagcatatagataaaatcctcaaccacaatcatccagttgtgggcaatgtatgctattgtggtgatttatttgggaaatcttacgcacattacagataggggttttatgcaatgaac

SEQ ID NO: 163625 - DNA, 694 bp, Zea Mays
cctcaaacccctttctaatctcggagggatttgagtttgcaaactatccctaaacaatctggtgattaccttcttgtaggagatgcaacggctctggactttagagcaaataatcagatccaacaaactaaaatgaaaaaaaggcccagagaaaaacgaaaattaagggggaaaagaaaattatgcgccgaaagcatgtacagatcctcacatcggaaccaatcaacatccttaaatgtcatatgcttttgaaacgtgataagagccaatctgagataagaaaccagatgcacattcataatagctaaacatttaatttcagaccccacctaaaaccacagaattacagaccaaatcgtcagcttagactcactcacctccgaaactcagctcaaaaaataacaccagaaaatgcagtgagacattgctttcggctctgtaaatcaatacccggtgttgaacagaacgactgtcaaggattgatgctaaacagcctttgcagattaccataacttaagtagaactgaaatttcacacatgtgcattccttcaacaaaatgtggggctcaagttttaaggcaggtcctgccatgacggaccagggtactaatatgttaattgcctagttagatatgttcatcggttcattttgtttggaacagttgcagtaacatacaagcaaggccatctccac

SEQ ID NO: 163626 - DNA, 708 bp, Zea Mays
caagaaaagtcttctctactcctccccgatttaacagacccttcttttcctattccagatggaagactctctggccattaggacatcctactgctcggaggtggaagggttcccacatcttttgcaaagttgtgcgcttcgcatgggaatccgcaagaagtcggaatacatctggaaggagtatttcgagggtggaatggagaaatgctctatggcagtctacctgggagaaagccgaaactatctaaaccatccttccttccaagtcacttttaccggataccgctttccagatacttgccaggatgttgaccgatcagccctccgacaactatgccagaactacaacaaggtgatctttgaaaccccccttcgctactttccacccagcaacaagaatacccccacctggaggaaaagacttcaggccctgtcaggaggagatcctattgagaatgatcccaccatcgtctacatggctggataccttcacacccttcataaccaatatgatgacctcaccctccactgcacctacctaacctcccgggtggaaagtctggagcaaaaagtcaaggaactttcaggggaaaaggcgtcccttcaagagagcctcgcaatagcagaaggcgaggaagccaatacccgtgaggcctaccgcaccctaaagatggactatgacaagaaactgaagaagctcgcccctgc

SEQ ID NO: 163627 - DNA, 341 bp, Zea Mays
tcttgtttgcttgcgctaaatggtagatccaaaaaagatgttgctcatcaatattattgcattgaaacaaacaaaataacaagagggaaaataggtttatactttgtttgatttgcggtaccacatagataacgattccatgtgtttactcgtagcaccgcacgggcataaacctatgtatacataattatcgtgatattataggtccccgttgcaacgcacgcacagtaagcaccagtagcacacagtttatttactcttcaccttcacaccgtcaggtggttcaggttcagcaacagagcagcgcggcagtgcccaccgcccaggcttcctgcctccac

SEQ ID NO: 163628 - DNA, 834 bp, Zea Mays
taatctataaacagtttgaaggtggaccatgtaacaaagttgtagagctacactaggggtacaaattctcttaggcaacctgtccctaaaaccatatgcaactggcagaaaaggtgatctaaaatgggtctcggaggtttttaaattttcaggtttgtgaacagtagcctgtctgaatttcagtgtattgtgactggatttggagcttccttgtgcaatccataaggttttgaactatggttctataggggagttgtcgaccatgtgatggggaacaaatttctttaagagagtgggcttgatctcacataaagggaagagtaaaatctgccaaaaagtggattgtcagagttacactagctgaatttgtcagaactgaaatctgaatttcagcaaaaagtgccaagtttggcgctccttggtgatcaatccatgtgtctttagactatgatttctacaacaaacatggagatcaatgttgggggagtaatgtttagtaagggtcatgcccttgaatctgcttagaacagggagaaaatggcgtcccaaaacatgctgtcagactttaatttcagacttggttcagttatctaaaactgaatttcagtgagttttgctcaatttaagagctttcttgtggctaatctatggagttatggactatggtttctatagtaaaatgaaagaccatacaatagtgaacaagttttcttaaataagtttgacttggtgctgtaccaactttggagtaaactgtgctcaaactctctctgtcatatgtgaattcagcttttggttcagttagctaaatctgaattttagtgtttctcaccc

SEQ ID NO: 163629 - DNA, 593 bp, Zea Mays
gttttgcaaaactttaggctggattcattcttcaaggaataagcaactgagtatgatctctgcagcagaattgtagtttgtatatagggctacaagtttgctacaaaccgattagcaagttgtcatgcaaaaattcaagaaaaatgcttctaaagatcctctatcagaccaactgatgaagcctcacgatggtacagtaaccggattaggacgccagcgcagaaaagttcaccgccggcgaccgtgcgcccggattcacgctgccgttgtgattcgtgctcactggtgaccagataacgcttctgggtaaaagatcttcgcttggggataacaccggcggttggccgccgtatccctttgctttgcggccggctcagataagttcaccgggattggccgccgtcgatcggatgccacatgccctaaagcttcaccacgtcgtcgtaaaccgctctatagccctggctcgtcgccggtgagtctgccacggtgaaagccactaatcgtgtgcgccagtgcccctcctcctctccggccgctgcgcgtctccgtccaattcactggccaccgctcaagcacgctataaattgtgc

SEQ ID NO: 163630 - DNA, 384 bp, Zea Mays
tgaacatggtgtagggtttactcaccggagacgggaaccgaatgaggccacccacggcgcactgcggatcggagtcgaagtaagaactccgacgatcaattatcgtaattgtggtgccccgatgctccaacgatgaccacccgagcatccgcgatgaccagccgactgcccagagcgacgaagggaggcaacgcgacagcggcgacccacactcccacggctccctcttttatcacggtggtgagtccgccctaggcgcctatagggtcacagggccactgctcgacgggatttatacatagtacgagcccacatatcgtagaggagggagggtagccgtcgcggtcggtggttatggagctgggcacgatacaatggccatgg

SEQ ID NO: 163631 - DNA, 785 bp, Zea Mays
cttgttttaactgttgcagttggtttaaaagatcacgtgcatagtaagatggaacaaatctagccctcatgatccgtttcaaagcatcccaagtttgtggcatgttatgaggatttttcttgccatgttctatccaccaaacagaagcaaaatcagtgaattcactagttgcagccctaacacatgcattttttggaaaatcatgacaagtaaacttttgttcaacagccatctcccaagtaagataagcatctggatcatacttaccatcaaaagagggtatcttaaattttatcttactgaaagcaatgtcattgttatgtacctcatgtggacgctgtccacccataccttgacggttacgacgtagacatcgttggcctcgatcctcaacttcggtgtcagcagcataattagcacctgaattttctacgtcgtcctcatcgccttcgccacgtcctctatgttgatcatttgtcttcgcgtggagctcatcaaagcgccttagaagagcagtgagactcttgtccacgcgagcaatcgtcgctccaaacctgcaagcttggtgtttttggaaatctgtgctgcctccatttgcccaatcttctcatttatgacctgcaaatcattatcaattccaaaggtgtactccctcacttgcctttgaaaatgttgtacgatgcctttggtgcgaggtgtaagtagacctccaccatcctcatcctcactccctgtacctgccatggttagcttgcagcaaacacagtcacaagaagttgcctatc

SEQ ID NO: 163632 - DNA, 977 bp, Zea Mays
agtttcttccttcttctccgcgtcgcacggctgaaaacggaacagccgcacatctcgccgtgcgtccgcgccggcctccctcccacgtcgtgtctcgcacgtgctggtcgagtctccaactgcgcgcgtcgtgccacttcctggtgggatcgggatgtcagttagcctcttccccagcagcacggtggaggtagccccgtagacggcggaaatccgttgcaaccatcgatccgtgcatggcgtggctgggcgacccgactagcataacagcctccgcacctgcgggatcgggtgcgcagtagatataaaccctcctccttgggtcttgtcgcctctcctgcccaaatcactgtccgccaccgttgacagctgttctgccgagagcgagagaggaaggtctgccgtcgacgcctagcgccttcggtgtcactcatgtcccgggaaggggtaaggggagcatcgccacacactatagaagcccgccgttgaccaaatcctatgggaaatcactgaaccggaggcaatttctcaccggcgctcattttctgtcgcggatctaccctcatcgtggctggagcgttcacctgtgcaaacatcggtaataaaaccctctggccatttgcgttatcatatggtttctttaggcatgctcgatttaactagggaagccctgatgcgaccactggtgtgcgcgccggtgaggagtttgggcggcgctgccgtcgtgagtaggtgttagatggggaagacggaccagggccgttcgatggcatcggatggcaggcgttgggccgtggcgtggataggtgctaaaccctaggatctggatctaacgacggtcgtggtgtaacggttcgagcgtgcgagattttaatcctagccgtacctgtttgatcggagggtggtgatcatccgataccccttcatccgctgttttgtagatgagtccatgtacatttatgaaattgaacccgcca

SEQ ID NO: 163633 - DNA, 308 bp, Zea Mays
tccggttttcatcaaatccggatgtctagggaagataggaagcacactgcttttgtaacggtagatgggttgtactgttatgttgtgatgccttatggtctgaaaaacgccctgccaacatttgttcgggcgatgagtaaaacctttggggacctgatccgggacaaggtggaagtttacgtcgatgacatcgtggtcaagactagaagggggtcgactgtagtagaagatctaaccctagtttttgacaagctgcgggcaacccgcaccaaactgaacccggagaaatgcatcttcggcgtttccgc

SEQ ID NO: 163634 - DNA, 302 bp, Zea Mays
tgaagttaccacaacattcattgccattacacagttgtgctgctgaaaaatttaaccatagccgaagctttcccatcgcattctcaagcaaagcaacgttttgaactagcttcatcataagagagagcttcgtcacaaccataaaaatcatcaacattcgtaagaagtgcaagaaattcaacacctgatggctagagtacgctcaaccgctagggtgacccacgacggagaagaggccgaaactacagagactgctccgatctctgaagtgatgaaacaatcgggaatggttgtgacagagg

SEQ ID NO: 163635 - DNA, 660 bp, Zea Mays
ctagggacatattctcaacgtctgacaagttttctatcctggagggaggcagtgttggtggggcttcctcttttcgttcagtctggcatccttggctcttggtcctcttctggatcttcttagtgggggcgagtttctttaacttcttatcgtaatccatcttcagggtacggtaggcttcacgagtgttggcctcttcaccttctgctatattgagactttcttggagggacgccttctcctttttaagttccttgatttcttgctctaagctttccacctgggagtttaggtggttgcagcgggaggaaaggtcatcatagtggttatcgagtgtgtggagatatccggccatgtagactatggtggggtcatcttcagtaggatctcttcttgacagggcctgaagtcttctcctccaggtaggggtattttgttgctgggtggaaagtaacaaaggggtgtctcaaagacttccctgctgtagttttggcatagctggtggagggcttttgggcaacattcaggcaagtatctgggaagcggtgtccagtgaaggtgacttggaaaggagggtgatttgggtagtttcggctttctcccaggtagactgccatagagcatttctcaattccattctcgcggtattctttcaagaca

SEQ ID NO: 163636 - DNA, 808 bp, Zea Mays
cccgcccatcaaagtagcttcaaccgaaggatccttcgtgttgtctatggagaagacgatttccgtctgggatgcagctttaacatgttcacagctagttttctctaaaattgctgcaacccctcgggcaccggcgaaggcgcaaaaatccccacggtcgctaagaatttcttcaaaagcttcagcttcttcgccgatccattcaatgattccttcgggatcgcctctaataaatttttgctctgatgagtatgcacccacctttgcaaaactatctttcaatttcttagcacaatccaaggatttctcataatatctctccttcgattcacgaagctcatccacattcttttgtaatcttgaactattccattctcttatttcttgtttcgctttcaccacttcaaaatcctcattcttttcggcaagctttttctttaagttttcaatttcggctttatgagcttcggactgtgtagcaagtttggcttcgctaacctttactttgtctaccaaggaaagcaaaattttatccttttctagagcttcattcttcagtctgataacctctgaccgaaggtacctaagggctatttggtagctttcatcctcggcattcttttgcgcccttaaagcattgctcaagattaagccctacaaaaaagagggggatcagcacaatggtaaaagatacgaaaataatttgtttataagtcaaaacatctttaccttcagactattataagcgaggctgtctgcaaggtcatccttcgacattgcagagaggccaacctcaagcttcggaaac

SEQ ID NO: 163637 - DNA, 1057 bp, Zea Mays
ctcctgcggcactacgtcctactcctgctcccgcctccatccgtgcagcaacatcgtcgttgtcgccatcgactactccccctgcggatggtactgtttcttgtatttttctcaaaattagtttcatgaccatcagctgcacatgaccgaaacagtacggtttgtctagtttctccaggtttgtctagtgatgatgttgacgcagtgttgggttcaaatcccgcattcattttggatcctagagctaaactcactaattttaataatgcattgcatgttctttctgattcacttcatcttgattactctagttattccattgaagttaaaactcaattgtcaattctatatgccaaatatgagtctaaatttggttctgtacgtttgcaaagaccccaacctgcaactattggtcctggtaatgtattgtcttcatggaataggtttgtgaggactaatccatcatcagcaccatctgtttctactggaactgtttttaacacacctatttctagcacaatttctgagttatcatcttatctagatagtgatcctcttactgagtttgatgattcatttagtgtacttagttggtggcgtgatcataaaagaacctatccaattttatcaattctagctaaagatgtcttaactgtccctgtatccactatttcttctgagtcagcttttagtttatgtggcaggttgatcgaggaacgacggcgaagtctaacaccagaacatgtggagatgctgtccctggccaaggattgggagcaagcagctgttcggcagcaacactgcgttgagaacaaagatcttgaagagctaatggaaaacatgtatcttgatgcacaagaaggatcgacttgtgttggtggtggagatggacatgatcactaaaagagctaggttgtactcttttttcctttagggttttgtccccatgtagttaaaatggggttttacctaaaggtttttaacgaggcaaccaatctaaatagctctttataaagcatggtgatctattttttgatgtctcatgtatggctgattg

SEQ ID NO: 163638 - DNA, 543 bp, Zea Mays
ctgaggatccttcagcctcagaggtggcggttgtagaaaacccagcccccaagggtggtgctagcggttacccagcccccgagggtgtcgccagtaatgatctggctctggtgggtagcgcaagctgcaacccagcccccgagggtgttgctggtagtgatctggctccgatgggtagtgcgagctgcaacccagcccctgagggtgtccgagcgagctctccttcccacacctccatggacgtccacgtcgggtcgtctccaccatgatttgatggagtgatagcgatgcatgcttctttagcttcgagtgagggagtcgccttggaggttggcgagctggatgccagaattctaatatctgctagtggagctgaatcaaccccagacgatgctcttcagattgttctagttgatcttccttcgtcgagctacaacacagcttctcatgacttgggattgccctcattcttttctaatcttcaggtaacttagctcttttcgttctgtcgttcctcctggtaaatcattttctttgtactca

SEQ ID NO: 163639 - DNA, 436 bp, Zea Mays
cccatgagggtctggacccactgctgatatcctggaatatatcgtcttatctggccacgtggcagccctagagctatccacgtggtggggtcgggtgctattcaccatgcgactagagatggccgcgcgggcaccgtgtcttcatactgtagtaaggggtacccctgatttagggtaccgacagtggcccccgggcccgcctcaggggaggaaatgagcctgcaggtggggccaaagcttgattggcgataggcacgctgcttctgtgcgcttgctgacgtaattactgctagtccaccttcggtcacgccaactgtcatgcctgtccccgcggctgactgacccgcggcctctgcacttgatggttttgctgggccacgcgcggggtgcctcgataccgctgcattggttttgaaaattcaccttctctgtcttc

SEQ ID NO: 163640 - DNA, 1192 bp, Zea Mays
aaaatatgacgcaagtcttcgcaagtcacggagatgcgcatactaattaaaatttaaaatatgacagatgcgtcagtcttcgaaagtttcatcgtcattatgcttatctgcagaaggcttgggtgaatgtttatggggtcccttttgaaatccgctcttttcttcctttatgggcaataggcactattttgggtgctactcagaaagttgatatgcgctacactaggaaaatgggggtggttcgtattttggtggcagtgactaatgtaaatcatattccggagtctgctgaaatagtagttggtgaagggttatatgagatttttttcaaagttgacaaggttctcatagcggggaagtggacggatacagataacaggggtaatcgagacggagatgataaggagcaaggagaggatgaagattactctgagaaacatggaaatgattcttttcagctagagaagctagcggaagatactgtcatggaagataactctttgcatggtgatcctaagaagcctcaagatggggcctgtgacatggggttggtgactcagcttgagaatcagattgttaatgggacagtgataagcacgggtttgaggtcagaagggctgcctctgggcatgccgacaggcttgttggcacttaattccccttttgctgatcagtatgtctccactctcacatctggcgctcttgatcagacaccaggctgtggtagcggtgatgggaagtccaaatcccggctcgtgcaggatccccattgctctttccttgcaggcgtgtcacaggagagtgaggccgtgtggaacttgtcaggtcctgcagcaagccgtttgttcctgaatgagtctgcatctcgggctggcatggttgccggtatggatggtgaggcggtctgtgctcagccaaaggttggagtcggattggataatgagcattttaaagctgctggtaacttactaattcaccagaatattttacatgtttctccttctttgtttaatattcccgttcaggtatctgatcagtctgttactctgccctttgtatcagatactctggcgagtggctgttttctgggacaggttaattcatttgcaggggtccctcgctcagttctccaggtattatgtaaagaatttaatattaaagccaacactaaaaatgatgatatgagacaagc

SEQ ID NO: 163641 - DNA, 320 bp, Zea Mays
gctgaacatcaaaggacaactggattattgcacccgttgaagatacccgaatggaagtgggaagaaattggcatggatttcattactggattgcctcgcaccccgaaaggatatgattttatatgggtgattatggatagattgaccaaagtggctcatttcattccggtcaagactacctataaaggctctcagttggcagagttatatatggctcggattgtgtgtttacacggagtaccaaagaagatcgtgtctgatcgaggttcacagtttacctcaagattctagaggagctttcatgagaatatgaatacaaa

SEQ ID NO: 163642 - DNA, 362 bp, Zea Mays
atgggaggggaccgtttcttaggttctcgccgatttggatcggctccatggtttctgatgcgctcattgctcaaagttccaggcccgatgccactctctctatatatgaatatgatgcctcacatattgcctttttgttgggaatcctgatctcctttcatttaaaatacgtgaccgcattgctctgctgtgactgcctgatgcattgtctccatttcagttcccaattccattttgtaccttctgtcctaggctatcaactcgacattttggtatggcggttacgggcttacagccagggtggttttacttggtgctatcaaatgaagacccacatgtttacccacgggggatggaatatt

SEQ ID NO: 163643 - DNA, 741 bp, Zea Mays
gtctcggtcgacgtggactcgtagcgctagacttggatctctgtctcatagacttgctcgatggagaccttggtcgatcgccccgtctcgcgaacttgctcggtgtggacttggtcggtcgctctgtctcacggacttgcttggtggagacttggtcagtcaccctgcctcttgcatggcggggactcagtcggtcgccccgcctcgcggtcttgcatggcggagacttggtcggctaccccacctcatagactttgtttgacggggacttggttggcgactcgaccaggatgttacaggccttattttaggtaccttgttctcgggtaaccgatagcaacccccgatcctccatgtggttgtggctccttcggggtcatatggaggcttttcgttgttggctggtacctcgagtgtgtgcaggtttgcataggttagggatagaccattcgtgcgagtgttatcacgcactgagcgtgagtctacgttagctcggatgttattgatggtcaaaatctcgagtgcgttaagcgtatctgctagatgtaggctccaagcaaatcttttgatactttgtttcttttactataggtaggcatctcgtttctatctgtcttctgctggcgtgctgtgtccgccttgttttctgtttgatctcacctgtcgctagttgttctaaactttcttatttatggaatgcgtgtttcacatgtgtttttaagttttaaaaaaaacctgtct

SEQ ID NO: 163644 - DNA, 836 bp, Zea Mays
agggctaattctgtgattaaataaaagtccaggggtctaattaaaacaaaccagggacctatgcgctaaaacaaaggacgacgggttgatttcctaaaaccagggggtttcttaagcaaaacagccacacgaaggggtatcgggtgaatctaaccgttggatcggaaaccgacggtcgagattagacctgcggccgagggcgcgcgcgcgggcgggcgagcgctgacaggtgggacagggagtgttagcgacagagggggagagtgtgctgactgggcgggcccagcgctagaggggaaacagatggctagaggggtccgaggggggtccgagccgttcgatcaagatcggacggggaggggtccgagggggtccgagccgttcgatcaagatcggacggaggaaatcagaccaggaatgatgagcggctgcgaatggcactaacaggcgggccagggcgtgtcaggcgcgtgtgcgcgaagcagtatcccgtggtccaagccatttgatctgaatcggacggagggcatcagaccgagaaaacagacggctgcgggcggcaccgctcctctccgcggtggtgaggtcaccggagctgaggctggcgcgagtagggtggctccatggttgctggagttgggcagagaggaagagggtgccacggcgaactcaatggcggggaagaggccacgaatccacgggcagagaggggagaacggcggtgagaaggtctcgggcgggccggagaaactccggtgagcgattccggccacagggaggggacttaaggcgcgctaaggcctgggctggcttcagtagaggcagatgcaccttag

SEQ ID NO: 163645 - DNA, 598 bp, Zea Mays
tatcataattacggatacctagattatgcccctaaaaacacgcttaaccctaagacctccatcacgcccattccccttggtccaaggatcataaaccatgcttcacccgacgcacctctcaggggtcactatagctccgcctcgcccgatcctgccctcagacagggtatgttctggagagaatccttgttctgaccgaggtcccctctcccctaaattgttgtctccgccttgcccaagcctgtctcgggtagggaagacaaccccgaggcatgactcagccgaagtccacatgggataggagcatttaatgggcatacctaccccacacagagttgcaggtaaacaggagcaacaagactgcagtcctatcaagcttcacgaactacgatgacgcatgcagccactgttcccacacgccgcttgccaactctcgatgggacatacaatacggcaagagtgcaggatagccctcgggcacaaactctaccttacccgaagtcgacctcggcctcaggacaaactccgcctcgctcgagcctgacctcgactacatgctccccgtgaatccctcgagaggccactccttcaactatgg

SEQ ID NO: 163646 - DNA, 979 bp, Zea Mays
atggcaatttgtactttttggtcttggtatgctcgtaccattggaatcttgcatactcttatttttatatatgcttacctttatgtcccaatatatgtttaagacatttcagttaacgtgcccttgaccacccttgtttcttaatgatccatgagcggtcattctactttgcatatccttggtgatcccattgtctccttgtaactccacttggtaatgaatctttacttcaacccttctgttggaaccttacctatctaacccttgattgttttctccactttgtcgtttcgcaagtcttgccttaactatatcctttgttatgcttttaattattatcatatgcacccttgacacctctatatcctacattgatgtttgtctcatacctgccctttaaaatcgcccctctttcgtctcataccttctttctcttggacgtatcctcttctttggctcgcgagtttgtaacctcatcctttgttgtgcttttgtttcttattgcctttacccttctcatttctcaatcttaccttggcgatcacgctatgatcgttatctaaaacctccaatctcccaccttagttcaagcgtggtctcttacttatctcacccgtggttatatcctatactttaccacttgcaagacttatcttaactctattcttggttgtacctagattccgggtttttatgcacatttacctcttcctttatatccttgcctattatcacctttgacccttgacctctctccatatttaccatgatgtttacctatttttcttagcctcacttattccatttcaatccgagagcgttgttctccttatcccgctcttgttcgtttcctttccctttgtcactttgcaatcttgtctcaccttaacttcatccttggttgagcttttgtttgatatcatccttacctttgtaatatgtagatcttgccttgatacttatcttaggtctgcttgtt

SEQ ID NO: 163647 - DNA, 414 bp, Zea Mays
atcagcaacagattgggtacacccattggggtcagcgtcagtaaattcagtcacatgcacttcttcagcaacaggaaccgaggtaccaacgtcccgatccaaactggatactcgccggaggcgtctctttttctttttctgctcatcaacagaaggatcaggttgactggctcggcaagggcgcctcgggcgagtactggcaggcttctgagtatccaaagttgtatcagcctctaggaggggcaccactaccaatgccccagaaggagcagcatcagaagagtccttagccagcaaatcaagcatagcgcttatctctgcatcactagggttcaggggcacctcaaaatggacctgtcgttcatcatcaggaatctccccgagcgaggcaaccaaggcactaacttcttcagc

SEQ ID NO: 163648 - DNA, 793 bp, Zea Mays
aacagcgggggtaaattcaactaggaactcaccgagtactactctcggggcttgctaagcctcttgagcgtcgacgtggttcactcgtgccctgccatgatactgggtcttgcttagctggttgttggagggtgccttagaggtgggtgctggggcactcttggggccattcaccgagttggagtaggtaggcacggatgtcttcaactgaggacaattattcttgtagtgactggggtctccgcagtgccaacaagcattggatggaggttggttgcttgcaacggagggggcctggaaagaactttgagcttgctgactaaaacgtgacggagcagaccctgctggtttgttgaagcttggtcctttgggaggaaacccaaaagatcgaactctctggtgcatgtcctgctgctgagctcggaggacttgaaacttcctcttgaggtgacccttttcttcttctctagccctttccacttgtatggccttgtttgagaggtgcgagaagctgagaaaaccttggctggcgaggatagtcttgagttctggtcttagtcccttcaagaaacaggccatcttcctggcttctgtgctgacatcatcaagcgcacagcgagccaattacgtgaacttgtggacgtactcactaacagatctccctccttgggttaattcccgaaattcttcttccttgagctggacgatccctaggggcacatgatgctctcggaaggcggcttcaaattctgcccagatagcatctctgatggtggcgctgaaagtatcccac

SEQ ID NO: 163649 - DNA, 717 bp, Zea Mays
tgataaccctgcgaaagctaaatcggccagatccttttcccctaaagttaagctataacatttgtttcttgtttctctaaaccttctaatgtattcagaaatagtttcattatatttctgcctagccatggtaagatgtgatagcctgagtttagtatcaccacaataaaaataatcatgaaatttctgctctaaacatgcccacgtagtagctgaatttggtgctaaagatgtaaaccaattgaaagcggtactagataatgataaaggaaacaatttcaccttgtgggcatctgttataccaatttcacttacctgcgctaggtattgtcctgcatgctcgtaggtagtttttgaatcatccccagaaaatttcacgaagtccggtattctaaacctcgaggatatggcacagtgtcaaaaaattcaggatagggcttcctatatgacctagtatgccctttgggctcaaaaccaaattccttgagagtccttgccacttgttctataacaccctcagatctctcaccctcagctgctgtatgtgtgactctcgatgctgataacagcgctctctgctccccaatcctgtaatcatttggaacaaatccttgtgggatcttgttccctataggtggaatagatggcccgtatgccatactctgataatatggctgctgtaggttaaagttcattactgaatccccactcctctca

SEQ ID NO: 163650 - DNA, 1002 bp, Zea Mays
gaaaatagaaaatagaaatggaaatagaaaagaaaaagaagaaaacccgctaatgggccacaccctcacattccggcccacttctccttaccccgccagcccacttctgcctccggttccacgcgcgcgcctaggagtgttccgtctccccgacatgtgggtccaccctgtcatatctatctctcgcctgcgcgcaacagaccccgcgcggactccggcgaaatcctcgcgctcgtgcagctaaaccgaactccgttgagcaaaacgcgcctggactctgttgcctgctgcccgcgcttgcttgcagtgttctccctgactcgggggacctctacgacatggccatcttctctagtgggtgcgcgcgcggcagatccatgccgcgtttagtccgaggatttgttaggattccatcgatttgaccatatccatcccgccgcatcacaattcacacctataaaatagctaccctagcctcggcttgggggtatcaatcaatcgcgccaggaagcttcaacgcgaggcgctcgtcaccgagtgcaggagagagagatagagagcggctagtgcggatcttcatcgggcgcggtgtaaagatggatggactcggttcgttgctcgctggggggaaacttcaccgtggagcacgaacgcttggggggtctggctcagggtggggatcaccgggcggaccgggcccttggtcggcggacaccgcagcaggcggggagcgaccgctgctctacctcgcgtaaggaagaagatggaggaccgttggatgcgcgatgaaagattgaggtatgaggattgttgtcggacgtggattggaaatccaaaggatagaacggtttaatgcggggaaagattttggaccgtagatctgggatcagacgcgtagcgttagatcgcgggtgctgaaaatctgggccctcggttttagatcagacggctggaaattaaagatacctcttcggcgtggtcggtttacaaaagaaaccctag

SEQ ID NO: 163651 - DNA, 468 bp, Zea Mays
gccaatttcggcttcgccggttctcggccgtggcgaactgccgtgctcgcgcggtggtcggccgattgagcccggtctagttccccggcgttagtccctaaggtgcctctgcctctgcctctactgaagctagcccaggccttagcgcgccttaagcctcctccccgtggccaaaatgcctcaccagagttactccggcccacccgagaccttctcttcaccattctcccctctctgccctcggattcgtggcctcttccccgccattgagttcgtcgtggcattctctccctctctgcccaactccaacgaccccggagccaccctagctcatgcgtgcctcaactccgacgacctcaccaccgcggagaggagcaacgccgcccgcagctgttcacccctccccggtctgatcccctccgtccgatcctgatcgcacggcccagatcgtgggataccgcttcgcgc

SEQ ID NO: 163652 - DNA, 513 bp, Zea Mays
agttcattgtaccttttctcaattctagcccataacccctccttcctctgccctgtgctaatgactgggtcactactaatctctagccatgttttgcaaagcaacaggtcttcatcaggtttgaagttctgttcctttgtccttctaaatgtgataggtgtgtctgaaggtttggtagggctgttaacttcctggacactgtgttctgcttcggattcaaaattgatagggtcagtctggttgggaacatgggtagaaacctgtggacatggaatgggtggtaccaactggggttgaccgaatgatgtttgtggtggaggacccccaggattcagcataccaaaaaatgggttccatggactacgaaaggtatatgtagatgggtcattagctccctgggaccaggtaggattgctcatatgggatgtaggactagtaaatgtagaaggatgggttgggtctaaactttggccctgccacatctgaggatcccacatgggtggggggaaagac

SEQ ID NO: 163653 - DNA, 312 bp, Zea Mays
ataggtgtcgacacatttgtctcccacatttaataatgatcttcgtcatttcccaaaaacaaaagattcactgttccgtattcctagcacaatgatattgcacgcattgctaggaattttattatcaagatgaacctcttcgtgaggcaaatcaccaacagggtgagttcatcggaggaaagttattacagatcacgtgaatctgtaatcagaacatatgctttgactaagacaaatggatcatattcacaggcgtccccgagaatagatcaaatgccaataagtcaaatgtggatacaatattaatcccgg

SEQ ID NO: 163654 - DNA, 1143 bp, Zea Mays
cggcaacaccctcaggagctgggtaatcgctgacaccatccttggggaccgggttctctgcagcagccacctctaaggctggaggattctcagtcacctccatgggaatggagcaacctagaccagcttcttgactctaaagactgcactccaaggtcgacgaggcacgagacgctgctcgggataactctaactccacatccggaatgtcagtgcaaacgtccatcaaaccatcatctgttggctcggacagcaaatcttcaggaaccatatcctcgaaagcctggtcaaaatttgctatggacaactcttgcagaccaacgagagcagacaaagctggagaaggaatatcactactcccccactgactaggtaatgctgactgtttttccgaattaaggggatttcctcctcttcttcctcatcctcgtcaacaattggaacaacacacccattggggtcagcgtcggccgaattgcacccattgggttcagcatcatcaaggtcacacccattggggtcagcatcagcagggtcacacccattgggattagctccagtaaaaagttccactggcacttcttcagcagcaggagcagaagggtcggcatcctgattcaaacatgacactcgccgaagcctcctctttttcttcttcttcccctcggcaggagcagttaggtgactggccgagcgaaggcgctttgggcgagcaccatcagatttttgagcaatcaaggtcttttcaggctcggggacaattgcaatagctatggtttcagcagggacggaatcagatgaatcctcagccaacatgtccagcataacacttatttctgcatcactcgggtttataggcatctcaaagtgaacttgcctttcatcattagggagatcaccaagtgaagcaaccagagcctcgacttcttcgggagagggtcgcactctaagaccctggccactgtagctagcaggaggattggacacaaaactgaaaaaagtcttggaaggtggcagattctaggcagaatatgcaataggagcaccaatattcgacactttgcctctaagaatcatctccagttggctcaccaaatccacagcaggaatcctcttgttggtaacccaggtagaatcagtgac

SEQ ID NO: 163655 - DNA, 346 bp, Zea Mays
atgatgaagaagaagagatcccgctgatccgcaataacagccgtcactatagaggcagcgacggggcagcgatattacctcacaagctctgtcggcacccgtaagtcttcaggggctttctatgtcagattttgatcaggcactggaagaggttattcctaaagacatattattggagcctctagaggctgacattccaaccatctgttcagaggttacagatggtgaactttcgctgcttgattttgccaggcaagaggtaacccgggtggtgtcccgcgcatcgttgaccttggagagcagtcttccatgcaaagacactaatccgagtcatccaactcccatg

SEQ ID NO: 163656 - DNA, 917 bp, Zea Mays
tcgggttgaaaatctaggatgttacaaacctaccccacttaaaggaatctcgccctcgagattcagatggggctcgagaaaaggtaagggtattccctcctcagagagtcctcactttcccaggtagcttcctcttctccttctctgctccactaaactttacagagtcttacttctgagttgcgggtttttcggactgctgagtcatgaatctttattggcttttcccggtactggagatctttttgaatctgaattgtctctgcctcgatgtggttctctggtacttgcaggcacttatggagctgggacacatgaaacacattgtggatatctgacatggattctggtaattcaaggcggtatgctgtgggtctcactctgccaatgacgggataggggccaacgaatcgcggtgctagctttcctttcatttggaaccttttgaccccacgcattggggagaccttgaggtatatgaagtctccttcctcaaatatgagttctctccgtctgttgtctgcataacttttctgtcgactctgagcttcaagtaacctcttgcggatcagggcaactttctcttcggcctctttaacaaaggcgggtccttccagtgtcctttcccctacattagaccacattagggggtctggcactttcgtccatacaatgcttcgaatggtgacatcttgatactggcctgatggctgttgttatatgagaattcagcatacggcaaattggactcccagtttctgtcgaacgtcaacacacatgctcttaataaatcctcgaggaccttgttgacgctttccgtctgaccatctgactgggggtgataggcggtgctggaatctaacttggtgcccatagcttgctgaaggctcttcaaaatttttgaagtgaactgcgtc

SEQ ID NO: 163657 - DNA, 381 bp, Zea Mays
agaggcttcctggctacgacagctccttcaagaactgggacaacccttgcagcaggctacccttgtttactgtgacaatgtgagtgtcgtctatctctcgactaatccagtgcaacatcaacgcaccaaacatatcgagattgaccttcacttcgttcgtgagtgtgtggccaccggcgctgttcgtgtactacatgtcccaacatcctcccagttcgccgatattttcaccaagggtcttccctctacagtctttgttgagtttcggtccagtatgaatgtccggccagccgacgttcctactgcgggggtgggggggtgttagacaactactcttagtaggctattagtagttatagaaagttagaaacccatcctagg

SEQ ID NO: 163658 - DNA, 720 bp, Zea Mays
tcttaattttcctaagtttgagcataaataagtttttgtgaataaatttcccttaaacttgtatacaggggtgtttattaattttaatcagtgtaactactaggttagtgtctccactatttttttaaccctggtctaacaacatttctatttttccctttaatattaagttttgggcagttttcttatttaaatcaaaactctagaaaatattacaggaactatggggtttatcatttttgcctgatagtttatatttcacaaagtttagcaaatttggtttgactaattttggatgattattcttcaagttatgcatttattaagttctctgcaatatttaaaagaaaagtaaattcgaaatggaaaagaaatacagatttgcgttgaagtccctgggttttcttcccccttttctctcacaaaacagccctcggtctactattcacatgagtcactgaccttacacaaaaccccctggacttaacctaaatctaaaccgcgatccctggctggctgaaatagtaaccggggcaaagatcacggcggagaggcttaccggcgacaatagagctccggtggggtggtcggtgacgtcggggcggtcacggcggtcacgtcggtgtgcgggtcggcgtcagaggtggctggagctgctctggccacgagcgcaggcggcggaggtcgtcggcggctcctgctccggccaaaccacggcgg

SEQ ID NO: 163659 - DNA, 490 bp, Zea Mays
tcttgaaagattattttgtacctagactggaattgtttggttgacaattcataccaattggttatatcaagcatcatcaggactcagagttttggtgtgatgcatctcagtcagtgctaatgatctttgccggaccacttcttgagaccttgggctattcattgctgtgaacttgaaattctggtgctaccataatttgttattgcagattttatccagttccttgctgcaatagtgttccttgcttattacctggtacttgatgccatcagaatatggggactccgattttttagcatataagtaaaattttattttccttgtgtaactagttatattcttgttcaagctacccttccgttccaaatagtttttactatgtagacataatgtatatctaggtgcatgcctttggccacaggaatggttgaataattgaatgcttcaattagattttgttgaagttttgtgttgttcttaacttccacag

SEQ ID NO: 163660 - DNA, 1075 bp, Zea Mays
tcccatgtttggaatttcagagcaaacatccatcgtcgccagcagtcggctccgacagcatatcttcaggaacgacatcctcaagggcctgatcaaaatttgttatggacaattcctaaaggctgacaagagcagacagagctggagaaggaatatcactatcccccctactacctctgtagcgccggctattcttacgaattagcggaacttcttcttcctcttcttcgtcctcatcaaaaatacggataatagccggtgcacggtcacacccattgggtcagcttctacacggtcacacccattggggtcagcttctggacggtgacacccattggggtcagcttttgcacggttacacccattgaggtcaatttcaacaaggtcacacccattggggtcagcttcaacatgtacaccaccattgggatcaacctcagtaaggacctctgctggtacttcttcacaaacagaagcagaagggctagcatcctggtccaagcatgatagtcgtcgaagccacctcttcttctcctcgataggcgtagttggacggctaacctggcgaggacgttttgggtgagtaccctcaggctttcgggtgtccactgttttgttaacctcttgtccaaccgtaacagccatcggtttagcatgggccgagtcagaagattctccagccaacaaagtgagtacaatatctatttttgcatcatccggacttgccagcatcgaaaagtgaacttgcctctcatcattgggaagatcacgaagaggagcaaccagagcttcaatgtattcaggagaaggtcgcactctaagacccagaccactatcactagcaggagggttggacacaaaattgaaaatgacctaggaggtggaagattccaagcagaataagcaacaggagcaccaacatttgataccttgcccctgaggatcatatctagttggctcaccagatcctcagtaggaattttcctgttggtgacccgagttgagtcagtaataccactgtacaagtaagctggatatgccctgtctttcaaaggctgaatattcttgaaaagaa

SEQ ID NO: 163661 - DNA, 754 bp, Zea Mays
ccagatcctattctcgggcatagggaactttcacatttggtgtgctaggtagggggtttgatgaattttctttgagtttgtcatgtttcacattacaacacaactatggcaatgtcaggacattccctggtttgagcagttgtttgacacccgctgtagcaactcgcaccatgaaccatgtccttaggaatctcatgcagttcttgccactatggcctccactaggtggattaggatccatgggcccacatagtagggtccccataggttaatccccgtttgggatacacaatgcactagggacatcacaacgtctacccccatggaccatgagaaagcatgaccattcaacacatgtcactcccccaatgtcgcatcataaccaaggtgaggtgacctctaatcatgaaggctcctccctgcactagtcaatttagcaaactcgtcggtgccttgactctagtgctaacaacaatgtcagccctctcaacaccacataagctctccttcacaatacatagggctcgaaggccattgaggctactactaaatagtggtaacaagatattgctaggttcatagcaacagccaaggtcaagcttgacccttctctccccatgcaacctgacctagagaaggctacatcagtctaggatgtatctttaacatgctctcggaccacaatcatggtttctctagctttagtcaccaaggctgcacctttgaccccaccttgacaccaacattaggaacc

SEQ ID NO: 163662 - DNA, 1064 bp, Zea Mays
cccatcctcggtagcagtgtgtgcctcataagctcatagagaaacttggcggctagagtgaaatctgctggagaacgccgtaacccatctaagaacggaggtcgaaacaaggcgacgacgtgagcagtggcaggggctactccaccgtgagggcgaagaggaggatctgaagtgccatagcacaagatgtggagcctcgtcaatgactcaggaaatccaaagagctgtttgatttgagtagcatgcaatgtcacctcctctcgctcaaatctaaacctcatccactgatgatctgggtcaatccatactgtggcataaaagactctgacccactcctcaacatatctaccaccgaaggtcagaagagagtgtaaaccttgcagatatgtgatctgaccctctgactctgcactacctactgaaagtaaggcagggagatccaaacactggtgcgctctcacggcaatatgagcagacaattgtgccctgaaggactactgggtcctggtgctaaatagtggcgcagctgatgggtccctctgagctggcaaccaagagtccatgggtacatgtctgaatcgacatacccgggcagctgtggctcgctgaagatcgagcatgcgaggatcagcagcaagtggttgcaccacggtcttgtcacgctcctagaagcgaggtggaggaataggtggagtggaagcgtgagcgggagcagtggaagcaggagtggtggaggtggtggtagcagtgggagtggtggacggctcgagagcgacaggagctggtgaagtgggaggtagagtggagactaggtcagaaggagtggaacgagcagtggaggagtgactccaagacgcgagacgacggacttggaaggcaatctgattagaagatatccgcagctgacctccccgctctgcctgatctgctgctgctgctgcaatcgctgcacgagtggctctgtcgagacgtctcttctttttgcccccttggtgctcaaggtagacagtcttcaccctgacctgtctgaaggagcgaggagggtcctggtcatctcctccccc

SEQ ID NO: 163663 - DNA, 612 bp, Zea Mays
tagaaaaccaactagaaaagaaaattaaacgggttaggtctgatagaggaggggagtatctttctaatgaattcggtgaatactgtgcggaacatggaatcatccatgagacaacagctccctactcgcctcaatcaaatggggtggctaaacggaaaaaccgaactttgacagacttggttaatgccatgttggatagttctggtttacccaagtcatggtggagcgaagctattttggccgcatgctttgttctaaaccgagtttcatcagctaagggtgataaaacaccctatgaaggatggaaaggtagaaagcctgctcttggatttctacgtgcatggggctgtttagtcaaagttaatgtgcctgcgtgcaagaaacgtaaattgggaccaaaaaccgttgattgtgtctttctaggatatgcgtataatagtgtagcctatagatttctggtgattaaatctgattttctagatgtgcatgttaacaccgtgactgaatctcatgatgcctcctttttcgaagatatattccctatgaaggatagagttacagcacgtagcgaggcatctactagttatactcctgaacctaatccagtttctt

SEQ ID NO: 163664 - DNA, 668 bp, Zea Mays
ggcactataaggagccagatggtcgatcaggaggcattttgttgggtgttgatttgaatgtgtttgatattggagggattgacgagggagagttttatgttaagtttactctgtgtaataagagtgatgctttaaatgggtgttggcagtggtttatggatctgcacaagtggataagaaggagcttttttggctaagttggtgcagtttactagtcatgcgactctacccctcatcataggtggtgattttaatattcttaggaatcaaaacgagaaaaataaacctttgactgaccaacgttggcctttcctttttaatgtcgtaattgatggtcttaacttaaaagagatagagttgtcgggtcgccagtttacttgggcaaataaccttccgaatcccacatgcgagaagttagatcgggtccttgttacaacggaatgggatcagaaatttccattatcttcggttgttgtcctcaaccgtgatatatctgaccatacactgctgttactgaactcaggggaagccacaccttgtccctgctaacaaccttttaaatttgaattaggttggttgcttagggatggttttcatgatatggttcatgacatctagacaaatgaagtcagtgggcaaacacctatgtagaagtggcaaaacaaaat

SEQ ID NO: 163665 - DNA, 1465 bp, Zea Mays
ttcgtctacctcaaggtctccccgatgcgtggtgtcaaaaggttccaagtgaaaggaaagctagcaccacgattcgtcgacccctatcctatctttgccagagtgggacccgcagcataccgtcttgaattaccagaatccatgtctgatatccacaatgtgtttcatgtgtcctagccccgcaaatgcctacaagtaccagaaagtcacatcgaagaagagacaatccagattcagaaagatcttcagtaccgagaaaagccaataaagattcttgactcagcagtccggaagacccgcaactcagaagtgagactctgtaaaattcagtggagcagagaaggagaagacgaagctacctgggaaagtgaggactctttgaggagggaatacccttaccttttctcgagccacgtctgaatctcgagggcgagattcctttaagtggggtaggtttgtaacatcccaaaatttcaacccgaggtttggaaccctaatctcctaacccccccccctttatctatccctaaattccaccccataggtcatctcatcatatgcatacatttgattgttagaagcacctcacatagattattattttttctagcacccaagattatttagctatttatttgttcaaaaaaaggagataaaagaaatagaaatagaaagtagaaataagaaatagaaaaagaaaaaaaagagaaaaggaaaccccaccggctggcccgcttccggcctaggcccctctctccctcgcgcgcgcgcccgcactcctctccctcccgcagcccaagcggcccatcgccgcgtgcccgcacccgcctctaacatcccgcccccacccgtcagcccgcactcccctccctcgcgatctctccctccctggcaagcggggcccgcccgttagcgccttcctcgcacccatgaccggggctagcgacgcgatcgccgccggtcgccaccgccccgtcgtctcgccattactcgctcgcctgcccggttggcgccttgcgcctctgtccccttgtgccagccaagccatcccgtcaccccctgcccatgccgtctcgtcgtcgccattgtgcgccaccatccccgccgtggcaagctcgtcggtgcacgccacctctcgccccttccctgccccgggcacctataaaaggaccaccccgagctccccaatccctcacaccagcctcgaccaccctcttcctccttccccgagctcgattgagccagcgccgccgcgtccttcccctgctcgggtgagcctcgcctttctccctctgctaagttccagcctaattcatatagttcttgagcttcgccattccctcacaaacacaatgcacccatccccgcctcctattgcgctcggcagcctcgccgacgacctcaccgccgcgagcgcccgccaccgtgccgtggaccggccaccccaggcaccctccggccaaat

SEQ ID NO: 163666 - DNA, 327 bp, Zea Mays
gggtagaaagtctgccggtggggctaaatgtgctaaaaatagtgtggaacctgctaatccatacagcacatacagtgggggtcagggcataagagagtgccaaacctgccatgttagggggcactatagcacaacatgccctcagaacccaaacataagcagagcagccgagaacaaggacaaaaagagaagtgccaaaactgtaggttggactccaagaaaaagaggtcgcccaacaataaaaaaggactagatgggaatcaagacgaggcgcagagtgagggggatgagacacagcaatctgggtacactatggccgtggaggag

SEQ ID NO: 163667 - DNA, 991 bp, Zea Mays
agcggcaggtccctgcgaacgaagcgtccggtgccggcgttgacgaagaggcgcgcgtcgctctggtggacctcgtcgagcatagcccactggcgcggccggaagcgcgtgtcccgcggcctgctcttggggtcggcagtggaggagcgctagccacggcacacggcgcggaggtccatgtagtagtcgaggtcgtcagtggccaggaggcgctcggcgatgcggttgacgaggtccgccgggagagacgaccagtccgccattaccgctcggttgttggagcacaactgcacagggtgagcttgcggggcgaattggattggatattgcaggggcttcatagagtgggagaacggctttatgtagaggatgaaagcagtgatcgttccaatataattatataaacgattcctctttcgtacattaaaaacccatcgtttgcataccaatcgaggagctggaactccaaacgtccacccgatacggcgtgtggcggttagtactccaattcttgggaagatgcggcaccataaagatcacgccgggcgatcgttgaacttccaagctccaacgacccacgtctagctgttcggctagtgcttcgttgcagccatcctagtgtttccctgagtggctcacagccacagctgcagctgcatgtgccccttttagaagtaatacttctctagtagaaccatcgtggaggaagtttgaaaatgcatctatcctttttgtgggttttggttgattgattgacaacaatattaaagaagtaatcagtttactaagtgttatgttggagagtgaaactctaaccgtaaccaaggttgagagatatatttataatacagttgttaggccgaaacccattatacaaagacaccccattgcaatacaaagacacggcaactcaaacaccaccacagtcaaaattcgagccacgacagatgttgactagaccaaaacttcttaaacatccactacacgacgg

SEQ ID NO: 163668 - DNA, 301 bp, Zea Mays
ctcatcatgccattatagggagactgggactcacaaaatttatggagatacctcactacacctacttagtactcaaaatgtcgagacctaagggagtgatttctatcaatggaaagttaataagtcctacaactacaccaaggagggatgcagcctagctaagtcccaagtcatacatgcggagtgtgacaacctacaagtggccctagcattacacccctcaagtagaggaacaatagagagctctcatcaccaccaaaaaagattgccaacctacaggcagagtcctccctaacctggc

SEQ ID NO: 163669 - DNA, 423 bp, Zea Mays
cattctgctcgatcgaagtttctttggacgcctaaaggccgggctgttgttgcccccactgcacactgcatagctgactttcacctcacagcactaactaacatgagatgataccaaactgcaggaccctttttttttgttgctttaagctcttgcatatggaccaataatgcttggaagcgttttactactgtacacgggaggcagagtggcagacggacgaggcaaagtgcatgcagtgcagtgacagtgagtccctacagcttccatcttttaccggacctcctgcggctgcactcgccatcaaccaccgcgtgctggacgggctgctgctgctgctgtgtgtgtgtctccgtcgtccgtccccatgagctttccagaaagtccgtcgccgcggcaaatttgtttacactggctgcgtgg

SEQ ID NO: 163670 - DNA, 660 bp, Zea Mays
ctagaattcagctacagctaactgaacaagaaactgaacacatatgcctgacaaagaatgtttgggcacagtttactccattttttgtgcagcaccaaacaaaattttcttaagaagatttgatcaccattatatggtcttcaactttgctgcagagatataccccagaactccatgtaccagtcacaaagaagctccaaagttgcaccaaaaacactaaaattcagatttagtaagctgcactaagtctgaaatccaattctgtcagctccactttagaccaccttttctccaagttccaagtagctttatgggtatgacctttaaccaaactttcacaccaacatatggtcttcaaacttgctacaggaaattcagtccaaaaccatatagattaatcacaacagagctccaaactaagcactaaaatactgatttcagacttgggctaaatccgaaaactcagaattcaaacagctctactttgagccacttttactccaagctgcatatggttttaggggcatcccacctaatacagtatgttctcctatgttcatgctacaggtttttcatagtaaccataatgtataactctatggatagagcagtagagagctccaaagttagttaattgacattattttcagcaaatcccaa

SEQ ID NO: 163671 - DNA, 698 bp, Zea Mays
tactactgttcattgggctgcagtcaaaagaatcttgagatatctaaagcacacaacaaggcttggcttaaagattggtaaaacaacgtcacttctagttagtggtttcagtgatgcagattgggctggaagtcttgatgataggcgctccacaggagggtttgcaatttttctaggatcaaatcttgtttcctggaaagcaagaaaacaagcaacagtgtcaaggtctagcacagaagcagagtacaaggcgttggcaaatgcaactgcagagatcatgtggattcagattttactgttagaaattgggattcaagcaccaagaaaggcaaagctatggtgcgacaatataggggctaaatatctttcggcaaatccggtatttcacgcacgtacaaaacatattgaagttgattatcattttgttcgagaaagagttgcaaggcaattacttgaaatagaacatgtgtcaacaagagatcaggtggctgatgggtttacaaaaccactggcggcgcgacagttggaattgttcaaaggcaatctcaacttggagaagatttagattgagggggagtgttaacatatatgtgttgtattccaaatatggttgagatattgtcggctaagatctataggcagttaatagaaatagatcaattgtaaccatgtaaaacttatcctttcctagaatagat

SEQ ID NO: 163672 - DNA, 293 bp, Zea Mays
agggaacagaagtcgccatgcccagctattaatttgtcaagcgcctcaacttcgctttcaatatgctcgaaggtgcttggcaagtcttcaaccgaaggttcaaatttttcagagctggctcccactgagttaaagacctgtcttagccattgcacgtagcggttgctgaagttcaagcatatattctgaagctcttttaaggatttttgcagatttgaacttttctcaacttcggcttcaagcttcacatcaaaactcttcctttcttgttctaagctttctgatttgcggag

SEQ ID NO: 163673 - DNA, 669 bp, Zea Mays
ccccgtcgctgcctctatagtgacggctattcttgtggatcagtgggatctcttcttcttcctcttcaacctcgtcaaacacgccaccagcagcctgcaaatcatcgcaaccttcaacgtcaacctcggtaatggcgtccgccgggacatcatcagggatcagtgtagaaggaccaacgtcttgatccaggcacgacagtcgtcgaagacgcctctttttcttcttctccttgataggagcagtctggtggttcactcggcatgaacgctttgggcgggcactttcaggtttctggatctccacctctttgccaaattcttgtccagtcgtgatggccattggctcagtgcgggtagagtcagacgattccccggccagcaggctaagcacggcgtccatctcatcatcatcggtgctagctggcatttcaaagtgagtttgcctctcagccttgggaagactccaaagtggagcaatcaaggcctcaatgtcctcgagagagggtcgcactctatgacccgggctaccatcacgagcaggagggttggagacaaattcagagaatgacctatttggtggcaggttccatgcagaataagctacaggagcaccagcattcgagactctacccctcagaatctttctgtttgtaacccgggtagaaccac

SEQ ID NO: 163674 - DNA, 566 bp, Zea Mays
ggacttcgaggccgtcggattcagggtggatgacaccattgaggccgcagcattgaaggccatgacaaccttcttcgaataccatccactggagatgatgatgcacctgctcggactcttccctgacgagaatagggatgatccgatgtggtgcgaccgagtgcgccatgccaaggatgtgtgggctatgcatcccgaccaggttaggaggatcaccatctagtgcaagagtgcgttgtaccacctgcaagcctacaaagcgatgtcatgacacatttgactgggctagcttagactgccaagactacccttgatgatagggaggtcatcgtggttgatctgtcctgtaagttggtggagaaggatctctaaattgagcagatgggcaatcgcacccgagagttggagcagcaggtggaagtccgggacaacaccattgaggtcctcgaaaatcaactccatgacgtgcaagtggaactggatgaggcaaatgctcatttggatatgcaccatcaggagatgaaccaagagatggatgcagatggaaacaacaaggaggagaagga

SEQ ID NO: 163675 - DNA, 582 bp, Zea Mays
gcacttttaagccgaaaccgaattaccgaaccgaatttttgaaaaccgacccgaagtttcggtttttcggggttcggtttcggtttcaattcctgagaacttcggtgctcggtgtcggcctcggttttcagtgtacaccgaaccgaaacaccatatatgaaactgaatagcccctgatcctctattcctctcattctttgaatctttgtgttgtgcttgcagccggcagccgcccaactggcccaagcccaatgcccccaacggcccaactcagcaagacggcaaccctaaatcagtaaatccctaatcttgaggaaggtaaattagtttgcagtttttatttcataattgtttctactatgttcttattgatttcagattttactaatttgtttactccttattattactgcagagttttgtggcctcactgtttctaaggagacaacagccacccctaccaattcttgagcatgcaaatttgatgaatgatgaatggtgaatggagaatatgaggctatcaaagtttaagatcaaatatgtgatctgtgatgtgtgtgatctcaaactatcattaattgg

SEQ ID NO: 163676 - DNA, 457 bp, Zea Mays
gttcagctcaaggaagatgaattccgggaactaactcaaggtggaagatctgtcagtgagtacgtgcacaaattcatagaattggctcgctacatgcctaacgatgtcagcacagaaaccaagaagatggcccattttctgaaagggcttagaccagaactcaagaccatcctcgccagccaagatttcctcagcttctcacacctctccaacaaagccatacaagtggaaagggcaaaggaagaggaaaaggtcacctcaagaggaaattccaagaattccaagttctccgagctcagcagcaagatcggcaccagagagctcgatccttcgggcttccacccaagggaccaagcttcaatagaccagctggacccacttcgtcacgtttcagccagcagagtcagagctcctttcagggccccctcggtcgcaagcaaccaaccgccagcaaatg

SEQ ID NO: 163677 - DNA, 406 bp, Zea Mays
cagaagtcgaagaattcagagctggtgaagttggatcccaggtcagttatgatgctatttggtatcccaaacctgaatattatgtcttgtatgaattccactgccttggctgaggttaaagaggcaataggcttatattctatccattttgtgaatttgtcaatagcaaacaacacgtgagtataacctccctgagctttcttgaagggtccgatcatgtccagcccccagtatgcaaatgccatgttatagggatggtctgtagctgctgtgcgggtaaatgatgttgctttgataagaattggcaagcttcacatctctggactaactcggcggcatcgctcttcgctgttggccaatagaaaccagatctgagaaccttcccaaccagagttctggatgcagc

SEQ ID NO: 163678 - DNA, 428 bp, Zea Mays
gacgatgatcgtccaaggatctgaggacaacatgctagacatccctgggcccgaaggaatcgagacacttggacaagccatcaaaaatttcatcctttggcctcgaagggatgtcgaatttgttgatccaccaacgccgtcgtcatctcatccccaaccatctccgcctcctcaaactttagtacctttacatccatcatcacctccacaatcttccgatgctgctcctcatcctctttgtaatccaccgtctccgccacaaacatcaacatttaggacaccaccaccttctccacagccataaagggattcacgacaatcaaagaaatctaaattccctctaccaaaattggtgtccacattcgagaaaaagaagagtaaagctactactgctggcacagctcgatttttgaaagggattggacggg

SEQ ID NO: 163679 - DNA, 428 bp, Zea Mays
gtactgagaacataaaagctcatgtcacctagcatgttgtgtcagcatttgaggcttgttacctgcaacacgaggtgcatttgctgtggcctttgggggggttgaggcagcaacgggccgacctaaaagtttatcaggtttgccaagagatctctggatcgaagcacggacattatcaaatagttcagtctcaaggctttccatcgcccaggtttcactttccagagttgaggttgttgactcccctgatctcctcgtttcctcaatgattcctggtagcctggaacctttggccttacgaaaggtgctgtttacaatggctaattcctcagtgtcgagaacccctgcatagaccaggaaagattaagagttgcgatcaatctgcataattaaggtttaccagagtgtataacgagaggcaataattc

SEQ ID NO: 163680 - DNA, 1546 bp, Zea Mays
cgaaggaagcgcctcaaggatctcaatcgtggaacaagaatcggaatcttagctggagattgaagccaaatcttggcaaatctgacatcaaggaggacattgtgacttcttctggcgatgggggacaatcaggtattctcaaaactcctcctgctcctttgaaaaaagagattgagaatgtttgtcgtcctttttgtcaaaaatgcgggatggagagtcatcatgctagagattgtttcaagtctctgtggtgcgatatttgtcgcaaagaaactcatgtgactgctcgttgtgtccttcccaaacaaaacaagtcttgcatgcctattgttggtatggcagctgacgggttaggattttactcttcccattttgtgaaacccctatctagaaaaccaaaaaggagcttcatcagtttggtgaaggttgttgaggggctgatttctgctgaagaccttgagaaggattttggttttcattttccgtggggcaaaacttgaaaagcaaccaagtgccatgtcgggttcttgatgcaattcccttctcaagagaaacttgatgagatgattaatttccctgaacttaaaatgaaaatgtccagggcaaaaatttatgtctcttattggagctcacaggctaaacctaaatccaagcttcattatgtgtagattgtggctgaaaatgtcgctgaggaacttcaaaactatcaagctatttgtgagctgggatcaacaattgggactgttgaagaggtggatatcttatctttagattctaaagatattgtgagattcaaggtacacgtcaaaagtgttgctatgattcctccaattatagaggtaggtgttaaaccttttctctatgacatatttttcaagattgatgatatcactgatgagggatggaatgatgagtctataaatcttggcaaaagagcatcggtggacaggcaaggtcttgatgacctttcttatgaaaaaactggcaaaaaagctagaaatgtaggggacaagtctgttaaagaagagttgagacttgaaaacattggggatatgatgtctcaaggcaaatcttctggtcgggggcctgacttgggtgataacaatgaaaacctgaacccggtatctgaagataaaggttatgacaataatcctataaatgaagatgaagagtttcatgagagtgaagatgacctcctgagttctcaagatttggaagaatttgccaaagatgatgaggggtgtttaccttcaagccaagaaaaaatcaacaagtctcctttgggtgctcaagctaaaggctctggaaaagctaaagctgaaaaacaagtaatgaatatggaagtggagcatggtgaaggcattaggaggaggagcagacttgaatccaatgacgacatgaagattgctgacaaagctgcagcgagagctatggctaaagatgccttcataaacaaaggtatgaactctaatcctttttctgttcttaatactgaaaattatgtacttatgtcgattgcttcagatttaggaatagctttaggaat

SEQ ID NO: 163681 - DNA, 961 bp, Zea Mays
aggagaaggcagcactcggggaaatccttgtctcgcctgaggtcccctcttcatggaatggcggcttccgcctcgcccgagcctgtctcggattggaggatagccccgagcgtagcctcaatcaaaggtcacgggaagcgtggatacatgcacatttaatgtgacgattcgaatacctaccccacatgacgtcgtagtcaaacagggagcgatgggaccacggtcccatccactttcaccaactacgatgatgcacgcccagaaataacggccactattcccacatgccgactactttgctcaaacaaacttcggatgggacgtgcgcacttctaagcatggtctcacccttgggagggaactccgccttgctcaaagtcagcctcagcctcgggagaaagttctgtctcgcccgagcttggctttggccaactgccccggcaacaactcctcacgattcgtaggaggctactccgacgactgaactaacccctccttgtacgactacatgccctgaggcaggctcgacctaggccttgggaggaacctccatctcgctcgagcctagcctcggcgtagataacatcgaccaaaggacgccaccaactcctccatgaaggctgctgacaacgggatggctacatgaccgacgtcaagtttgctttacgccatacggggacaattgccatgcgctttttaccatacttatcactgtttcaacaactacgactcggacaacacctccattagatatgctcaggtacgcatccgagccctagatcctagacacacaccactaattcactcgttggtaagacccttgggtcaaacaccgacacaacctctccctctcttgtaccagtaatttttccagtcatccgttgaccaaggttcaataaatgcactcaaataaaaggaatgtgatcccccacttgcagattggatcctaaaggctatacta

SEQ ID NO: 163682 - DNA, 337 bp, Zea Mays
gacaactcgaataccgttgtttggatgtacgagaatccagaattggaaatggtgcccaataccagctcaccattcgatgcacatgtgccctactgccaccaattcggagcctcttccctcctaattgtagggaatcaggctgacgctcgttgctcctctgtacaaattcaattccatgttttgtgcatccaaacagaaattgagtttggatggctcttgtgattccaaaagccaattttatggccgtccaaacaacggttttcatttgtaatccatttcaatatcaagcctgatttggtattctctccaattcatttccttccctttcaataccgac

SEQ ID NO: 163683 - DNA, 546 bp, Zea Mays
ctgctaacgagattgttcctcctcttgtagcggcctatagcgcaatctgcccatgaagccctctgaaatgtatgttggaggctagtcgtagacgaatggggctttagggtgtagtgcacatttttcacctctcgttcgtgtcgcagagcaggaagtctcaacactggcagaacaaacagcagcggcttcggtgcttcgggtgtgggagaacgacgacgaagttttagttgacgtaaggagcggagacgggtgactggagcagggacggagtcgcggtgcaggacatcagatagagctccagactcggttggcgttgctgcataggggaaatgcttcgtcgaaggggcgggcatgcttcagcgagggggtaccaggagcgacgactccacatgtcgggtatgataattaggggtgcccagactacacctctaaaacgagcttaaaaccctaagggctctatcaaaatacgtcccctaaggtcaaggaatcacaaacatcacctcacccgaggccccctcaggggtcttcctaaaactttgcctcgcc

SEQ ID NO: 163684 - DNA, 435 bp, Zea Mays
aggatacgaccatgggaaaagtaggtaaagtacgatgctcaaattgagatgggaaaaggagaagattttaaatgccggtataagataaacctcgagtaagatatagaggtgtctaaggtgaaggtgataataacaaaagtgatgacaaatgttagagttaaggcaagactcgcggaatggctaagtggagaaaacaaacaaggtaagataggtgatgtttcaatagaatagttgaagtaagaattcattaccgagggaagttataaggaagcaacgagattaccacgggtgtgcaaaataaaatgatcgctcatggattattaggaaacaagggtggtcaaggatatgttaacagaaatgtcttgaacagttattggggtatgaaaataagcatacataagaatataaaagtatgcaagattccaaggatacgag

SEQ ID NO: 163685 - DNA, 687 bp, Zea Mays
cttgtttgtcaagggtagactagccctgtaggctgatgattagttataaagagatgcgtgtttggcaagtttctcgtcttcttgcgaaagaaacatgatttgaagacttgagcttgagctcagcagagcagactggcctaaaccacataatcagttcagttatggctcaggctatcttgagagtcggcgcatccgtcggctgtgttctgtaccccaggcaaacgttctcaaaaagtagttctggtaatttttcgctctccctgccaaactgcacgtagcacccgaatggttcgtccttccttccacggccgggtacacctccgcactgtcaagaacacgtacgcattgacccgaaggcaacgagcgccgagtacatgcagccggtcagcatgctggtcccttgtacctgagcctttttattttaaacgtgtataaggatttgacgaccgtggattttgaccacggttcctccgtgtgcctaaccactagtaagatgaagtttcaacggaccgtgtgtcccaggacaagagggcaacagactcgctctgaacgaaggcaatgcgaggtcagccacactgctggattggagcaagaaagaccaagaggacgctgcactgattagttgtacgcggtgagcggggtcaaattccgttcagcacacactgacactatggtactacgtacgca

SEQ ID NO: 163686 - DNA, 1291 bp, Zea Mays
ctgggccccattaactgaaaaacgcagggggctcggtgtaaagttctgcagacacagagaacagtgggagtaggacggcgggttgatttctctgttttacggggactctttagcaaagtacacaagcgaaagggtattctctattatcagccgcaggatcttgatcttgcggttaggattagatttcccccctcagcgaaccggtacatgatctgtaccgcacgatctaacaccgacgcctacgatttaatgagacctaagttgaatcagagccgtaggatcaccgatctacggccgcaaaggatttgacgaaggggtactccaatccctaaccccggccgtccgatcagaactctacggctcggattaccctaaccctggatctaatcgtaaccgttaattcagagatcaatggttcctacgcgtcgctccctatcgcctgctccgtcggcgaacagacacggcggcgccctggactacggtggcgccatggccggatctactaatccccccatccccgcacctaaactccgatctaaaggtagaaattggcagcggtgctgacagggaattccaatggaaggtgctcaccgccgatcgacgtcgtggaagccctgtccacggagtgttgcgggcttgcagcgacggtgacgatttggggccctccccggtcgcccactccgcagacgcacccgaagcggcgaagaggctcgatcgaagtccctgaccgcgcaccaaccccgaaggagatcaccagtggcgtttccacacggcgccactcccgcacctctctctctctctctcctgattcttttaagcttgctcggcggcggaagtcgctggatgtttggtctagggtttacgccaggcggaggagggagcacacgccgaggttttatactcccccgcaggtcgatacgggcgcaagcggtgcggtcgagcaggcgccatcgtcgccggggaaatcggtggagtggttagagacgcatctgaccgagctggcccaccggtcggaggcaaaagacccaagcgcgcgccgcggaaggtttactggcatgctggccccgcctggcagtggcgcgatgtagaagatgggctggcgcctgtgcgagtctagtgggccgaatgtgatcctgcggcccacaccaggttttatccttttcccttttattttctgttttcttttataagtattttgaatccaatttgaatttgaatatgaatttcacctttgagtaaatgtaccatttcaaatcttgctgcagaaataatatattttgttatatatttt

SEQ ID NO: 163687 - DNA, 856 bp, Zea Mays
tgattgtataagtaagtgcggtatgctagttttggaattttttcctaatttatgctaattgaacagctggtaaggcatagagatcgccctaagatgagtaaacgcaagcgtgttacactatgttgagtaagcgtgagcatgttgcaccatcttaagtcactactgacttaagtcgattgctctgttagtagggtatagtggtcaccctaagtcgagtaagtgtgagcatgtttcaccgtcttaagtcattactgacttaagccgattgctccgttagtagggtatagtggtcaccctaagtcgagtaagcgtgagcatgttgcaccgtcttaagtcactgccgacttaagccgattgctccgttagcagggtatagtggtcgccctaagtcgagtaagcgtgagcatgttgcaccgtattaagtcactgccgacttaagtcgattgctccgttagtagggtatagtggtcaccctaagtcgagtaagcgtgagcatgtcgcaccgtcttaagtcactgctgacttaagtagattactctgttagtagggtatagtggtcaccctaagtcgagtaagcgtgctgattgataataaacagttcgagtgcccttgagaatgaaatcttttattgatgaggtattttccaattatagaatacaatgctccccgatagcttttgaaatcttgctaagggtaaaacttcctgagatgctctatattccatgaattccctatttccgtgccatccatttgagtaagcctatatgatcctggccgagtgacctctgctactacaaatggcccttcccatagtggtgacaatttgtgccatccttccctcgttagaattcggcga

SEQ ID NO: 163688 - DNA, 760 bp, Zea Mays
tcacccgaatgaggaaaaagaacaaaaagaataacctccacttctcctctttgcaaaccgggtatcacactctaccccccttaaaaagaattcgacctcgaattctgacgcttctatcggaacgacaaaaggaaaacaaattaatgaatcaacaacacttacccacaacaaaaagttctggatatttctgccgcatcagctcctcaagttcccacgtagcctcgcgctcagactgattagtccataagaccttgacatacttaattgatatcttcctcaaaacacgctccaaggattccaagatacgcaccggacgacactccaaggtcagatcctgctgcactgcaattggttccatctcaatctgatggtccggatcccgcaagaacttcctcagcatagagacatgaaaaactaggtgtacccctgccatggaatccggcaattgcaagcgataagccaagctacccacccgggccaagatagtgaacggtccaatatatctcaggctaagctttccggaggcaccaaaccgaacaactcctttagtgggtgataccctgagaaggacttggtcacccactgcaaattccaaatcccgcctcctcacatcagcataactcttctgacggctctgagcggccaaaatattctgacgaatttcccgaaccttttcagaagtctgctgaacccaatcaggaccaaccagggatctctctcccaaggtctcccagcacagaggggagatacaccgcctgcc

SEQ ID NO: 163689 - DNA, 610 bp, Zea Mays
ctccatggcacactctcaaagacagtctattgatctcgtgcatcccttaggttttgtagattttgctcagcaagacttatgtgtcgccttaacaaatccttgtatggcttgaagcaagctccccgcgtctggtacaattgctttgcttcacatctaaagaccctaggattcattgaggccaagtcgggtacctccttgttcactaaccgccagggctcgtccacctcttatttgttgttgtacgtggatgacgtcatattgaccgcctcaacgccatatttgttacaccagatcaccaccgctcttcgggctttgttcccgatgaaggatcttggtcccctccaccacttcgggacagttgtgtcccgctccgccatcgggatgctgctctctcagcgtcagtacactatggagattttggagcgcgcagggatgacctcatgcaaaccatatcagactctagccgacactcagaccaagttttcctccactaatgcaccagttgatgatgcctaccgtagattggttggcgtcctcgagtatcacacgttcactcaaccagacatcacttatgttgttcagcatgtttgcctccacgtgcatgacctac

SEQ ID NO: 163690 - DNA, 1059 bp, Zea Mays
cgcccggtcacgggtatgaatctgtcccatgatctcccagattttgatgcacctatgggttctcgagatcattcgactttaattccgaaaatggagtttcctaaatttgatggaaataatccgcgactgtggcgtgatcagtgtgaaatgtttttcgaggtttattcggtggcggagaatctgaagacccggttcgcggcgctcaactttattggtcctgcagcgacttggcgccagacgttggagcgtcgtgggcgtatcctgaattgggaagtgttgtgcagggaagtgtttcaacgttttgacaaggatcaatattcagtgcacttaagacagttggactctcttcggcaacggggttcagtgacggattacgtgcacacatttgaacagttggcacatgggattttgctttacaatagcaactacgatgatacatattttgtcacacgattcttgggagggctcaaagaggaaattcgtgcgtcgattgcgttgcatcgtccgagagatgtagcaacagcaagtgcgttagcactgctacaagaagaggaacttaatctggtgaagactcgggcaatgactaaggagtacaatagaggtcattatcgcacaggcaaggaaaatgacaaaccaaaggatggcagtatggaggtgaacaaaattaaagttgaccgaacggagagaagtgacaagttagaagcattgcgaaattacagaaggaaaaatggattgtgtttcaagtgtggagagaaatggggtcaacagcataagtgccctacccagatctcgttacatgtattagaagaaatcttggatgccattgaattggactatgaacaattcaatagggaagagaatgaaacggtggtggaagaacaagtgttagcagtccaagaaacgatatctgggagtaagaaaagaagtacactgcgattactgggcatcattggcacgcaacaagtcttgatcttggtagactcggggagtattggcacttttgtcagtaagggattagtggatcgtttgatgttaccaacacagagttgtgcccagaca

SEQ ID NO: 163691 - DNA, 665 bp, Zea Mays
cggcgggtttatttcatttaaccagagggtcctatttgcaaagcgcaagccgaaggggtatctcgcgctaacagtcgtccgatcaacatccgacgatgaggattagatcctggattcactctgggccctcagatcctggatctacgtttacgatttaatgatgtccgatgcacgtgtcgatcgtccgatccgatccaacggtcttaatcaaatcgcccaggagtaatcgcccgattctaatccagtcgtccgttaagatcagacggccgaaaggcctgcccccccttctccggtcacggcacccggcggcgccctgcttcccccaccgcagagctcgctggagcacggcgaaactacacagacacgccctagatcccaatccacagtgcgcaatatgtaataaaggacctggcgaacacagggagggagtcctcaccagacatcgatgaccaagcggcgctggccacggcagagtgcggttcggcggcgccgtgtgatctctggcgagaaattctgcatcgccccgcacacgattccacccgaaacggcaacagatacgctccatgagcttcgtagatcatctatggccacaatgtgggctccgagccgtagtcgtcgaccaggtcgacgcgggcggctcccggtggtgtcggtgttcccggcgg

SEQ ID NO: 163692 - DNA, 298 bp, Zea Mays
gtcgcgccgctgcagaccgtccccatagaattgagcccactgaactgggtttgtcgccgccgccatcggtagttaggtcttagtgtccccgcggtcgattgaacacaggttggagtccaccgttgcctggggatcgtgatggtgtcgtcgtcgttgactagatcacaccaccatggcggattggacgtctgaccgccggggttgagcacgacggtgtcgcgactgagtttgtgcaaaagagatgaagtcgaggggtctaagcgaaactgtcagtgacaccaattaacagtggctcggg

SEQ ID NO: 163693 - DNA, 524 bp, Zea Mays
ccttctgctattttgagactttcttggagggacgccttctcctcttttaatttcttgatttgttgctctaggctctccacccgggagtttaggcgggtgtagtgggagaaaaggtcgtcatagtggttgtcaagagtgtggaggtatccggccatgtatattatggtggggtcatcctcattaggatctcttccagacagggcctgaagtcttttcctccaggtaggggtatttttgttgctgggtggaaagtaacgaaggggtgtctcgaagacttccctgctgtagttttggcatagctggcggagggctttttgggcaacattttggcaagtgtctgggaagcggtgtccagtgaaggtgacttggaaaggagggtgatttgggtagtttcggctttctcccagatagactgccatagagcatttctcaaatccattctcgcggtattctttccagacgtactccgacttcttacggatccccatgcgaagcgcgcaacttcgtaaaagatgagggaatcc

SEQ ID NO: 163694 - DNA, 450 bp, Zea Mays
agcgtgggcgaggatctggcaatgtcatgatgggtggtgaggcctctgggtctcaaggaacccgtggacgaatggctcgaaacccttctagtcgttcacatcccgagacaaatcctcaggcctgggagtctacaagtgatgatgaaggaggcaaagatgttgttgttgacctccctcctgctcatgcccccatcatccaaggattggtgcctcacaaagcgcaggctcgacgttcccccaacgaagaaattattgatttcagtgccagcggaggatccgctcttcttcaagacatgcgttttcagaatcctaccctccatgtacaagacgtcaggattgaaggtaatcgcttttggattctacttcatgtagatttctacaattcggttatccttcccaagaagcaccagcccattctccatcaacgctttatcaactggagtgggtgtg

SEQ ID NO: 163695 - DNA, 325 bp, Zea Mays
ggggtgtaatcataccgcccgagcagttgaccttggtccaaatggtgtcgtgttacgcgaagcgacgtctgttgcctgacttattttcaggcggcttgaattgcttattgaatacttgtgactgttcggcgagcgtggtaggaagtggacggtcactcctggcctctataaatagcctgcttgcaccgttgttctcttcactcatccttcgatcatctgctactttcttcaccctttatcctcttctccatccgaccatgggcaaaggcaagagaggtcgaggctcgccccgccataccggcgacaagcggaagcgcgatccaag

SEQ ID NO: 163696 - DNA, 610 bp, Zea Mays
cagggatccccgttggggatttatccctgcgaggaacgggggatgaggaagaaatacccccacaaacgttcatgaggatccccataggaaaaacgtggggacggggatggagagccattccccgattgggaattcctcattaccatccctatgtagaactctaagaccgtgtccagcatccaacagttcactcacatggtcaccaaaacactattttgcactggagactgcactgttcatagattggagtttgaatatgggtatgggtaagctattggagagagactaattttctcatcacgtgttaatggcgacaacaccttcatggacgacctcatgcatgtacgagtacgacatcgcaaggctccacacattgtgtgtccttattagcgtgtacaaaccggatgccccaaaccttaaacagatataaccaaacccctaaattgaatgaggggaaaagtcactacttctgtgttcgaatattattatctctttgacggtgtggtttatggtcagtacaatgagattagatttatgaagatcgatccataattatgtctggactgccacagatcggccccatatggccagttcaacgaatcactccgac

SEQ ID NO: 163697 - DNA, 527 bp, Zea Mays
aaactagggcccacttgaagcgcattggattgctggtatttttggaggaacaccatagggaataattcaattctgatggagggttagaaattatcatgttttagatgggatctttccacacttctacctatagaatcgataatgtgagtttgtgtcattcttataaattgaaactagttagttacccgtacattgttacggtttgcatatatcatataggcatatataggcatattttccttaaatgagatatttattcaaacacaattatgtttttatatttacaatatctcttcttggatcctggtacattacaatcaatggttgcagtggtggaagaccagcgatttcatttgagggcgctagggtttgaatccttcttgcccctcattttttggctggttattctgctcctccttttcttgttttggaggattcccaactattacaggcagctcgaaatgggtatggtatgggtatttcagcagtctagtcttaacaactggcgttttgtttgggaactcgac

SEQ ID NO: 163698 - DNA, 505 bp, Zea Mays
cacggcgaggtggcggtgtgcgccgacgcttgggagagctcttgacgggggtggaggggacgacgaagcacctaggtaacggcgtttgagggcggggagtggactgtctagaaccttcacggcaaatggagacaccggatagggccataggggtagctgggggttatacggaaacggtcgcttgatggctccttcgtgcatcatctagaatggtccttcgcttggaggagaaagagcgtgtgttagagaccgctgggatgcgtgagatgtgattatgaccgttggatttggatcatgcggctaaaacagaaagtgctgacgtggaggcacctgaaagcagaattgctccctgctttaccgttggatttggatcatgcggttaaaacagaaagtgctgacgcggaggcacctgaaagcataattgctccctgctttaccgttggatttggatcatgcggctaaaacacagagtgctgacgtggaggcacctgaaagcagaattgct

SEQ ID NO: 163699 - DNA, 845 bp, Zea Mays
caagatctccggtcgacaccgctttgggtatcgacagtgataatttctctgacagactctcgcttattttctctgttggcctaatttccgaaggtctagccttggagcaatcaggagtagcacttgcggtgacatcttcttccaattctccaactttgtatttggaaaccatagcaggagcaggagtagccatcttcgaaggtctcagaatagcgtctaaaacgctggccatcctcctccctttcctaggggtcaccgctaaaacggttgcccaaatgaaaaccccaattctaattagagcttcgggggtaagctaatgaaggtatatctcgaaccttttaagcacttcgaccagcaccttatgcaaaggaaaccgaagcctagccttcataaaagccctttaaaactaccacttagtcaggtttaggaagaggaacaatgttctctcctccgtccctcactataattgtatcccgaaaatatttgcctttgatcgcctcaatctgtcctctcttaatagtggattttccaaacacaatatgacttggcctccatggctgatcttcggcttcattgttgtcactctcaatatcaaaatcctcattgtcactagaatctccagacagggcagctaaaatttcatcagtaatcgtttcaacattggtactttccatagcttcataaaaaccagctagtgtagggtcctcacttctcttgtcttcagccatctcagcgttgattgaaacaaaaagccaaagctccaaagcaatcacggttacagaatcagaaagctaaaacgacaaacccaacacaagtttgatagcacaaaaaatattttcatcgca

SEQ ID NO: 163700 - DNA, 667 bp, Zea Mays
cttgcctataaaattctgcagatagcataaacataacacgcggatgtaaaaaactgacaaagcacttaccttttctctgttctttatggattcctcaatactcgaactcttttccaccccttctccaaatctcagatagaaatttttgtgaccattctaaagcttcgacagttgaccttcgaacatcatcaccagagactttgaaatcaaggtctctgcaggccttcatgtgtttgcacccgacttttagcaaaagtgaaatagtgattcgggcacctatccaagcacattagtcctctcgagccgagaggacaccattgaatgcacgagtcttgctaagcacccaccacattaaaccttctaagtcaatatctaagaaatttctttcgttcgacagagcttcggcagcagagaaggtcttcaacatcacttggtggcatctgttgcctagagtatgacagttggccaataagattcaataattttcattcaagccccttacatggtttatttcagccttcatgtcattcatttttacttgaccactgctaaggttggaagccactttggtagacgattgcctcagcttctacatttcaaattcatactcttttctcatctactccatctcagcttcgagtgatatgatgcgttttttctgttcaac

SEQ ID NO: 163701 - DNA, 810 bp, Zea Mays
agacaggcggcctctcgagtacctataaatacccccgtatagtgccctcacatgggagatggagaaagctattggcattcagtgttaaactttgcaagcacactttccgctctcttgttggatcaatttgccctggtaggctaaacaccaacagttctcaattggttgttccccttcatatatattgggagaggtctggacccgttcctatatgacatccaatagtttttcacgaatttgttagaataaccatgcatggaataaggactctcacctgagttaatataatcttgggtcatccaggctatacccgcggaccgtccggggtgcgtccgtgccacatgcttggaccgttcggtcgtctaggtgccaaatatggtgctaaacacatgccccctgccttttggtgggtactactatccttttttaggaaacaatagattccccaacttgccttattcccaaaatatgaacactagcctaatgcaagtcaccgacccttgtgatcagacaatatagctatttaataggactctaaggcacattggccatttatgattgcatcctcttcagtcatggctatgtaatcaatatgtcaaaaggtaaaaacttgtggtgccccctagcccgactaagcaaatagactcaacaagtaatacaaattcatcatcgtactatctcacacttgactaggacaacatatcaacaatgagtagactggaaagtaccacgacgtccttggagtcagatgagcaggcgacaccagttgctccacttttcagatcggttggatcaacctttgcgtttgca

SEQ ID NO: 163702 - DNA, 409 bp, Zea Mays
gtctgtttggttcagctgtggattcctgaaaatctgatttttgaaatcagctgtgggaaagctgctgtgtgatggcgactgtgagaaagctggaagctgtttggctaaaacagctgtgagctgtggattgtatctgaaatgtttgttaagcccctaagactgtttatatactaattaaccgcattgacgtgtagatgactgttatgaaaatgaaatatttatgtttgtcaatgtttgacatatataataatttgagaatgttttggatccaccaccatgacatatataactacaaaagatatattgatccaccatcaatataacgatactatcttcaactaaccaatgcattagctatattatcacgaatggtgttcatgtcaacctcattctcctcctcaagaacttc

SEQ ID NO: 163703 - DNA, 525 bp, Zea Mays
tgaggcatgaagagacgggtggaggagacgcaacgacaccccccacacctacgcacgaagcgtagcaggctataccgcaacctacaacaagggctacatatgaactccgattaaacgaaactggggataggatatcaggagccagcacgacgactaagaagggatacatgctcaggaagatctagcgtcgctaggcttattcgacgcctcacattgtactttgtaattactcctgggcccatttgtcggggctccagctcccttgtaacgtgcctcccattggactataaaaggggtgacacttgcgtcacataagggaggtcgatttcacactctgaccgacgactctcaagttctcaagcaatataacccacagtagatgtagggtattatgtgtcaacggctcgaaccactctaaaccctcgtgttcttgtgaccatctgtaagtccagacaaataactaagcccactcctcatctgtagactagggcgggtgagaattggccatctgacagttacatttat

SEQ ID NO: 163704 - DNA, 585 bp, Zea Mays
gagggatcgtgatccacgaaggctcggcctcgtcgtccatcttctcaacaggaacagttccatctccgatggacagaacccatttgctaaattcagcaagagcatcacgcttttccgacggtaggcatgggttggcaagacgcatgttcgtatgtaggctcaagaagctgacatggcgccaaagcctagagttggtaatgcaagcattaacaatcgcagatcgtgaacccttacgaacaactggcagaatctgacgaaaatcgccgcccaagacaacgactttgccaccaaacgggataatcgcgttcgcaggttcgtcctctgagaggatatcgcgcatggttctgtctaaggcctcaaagcaatgtcgatgcgtcattggcgcttcgtcccatacaatcaatgaggatacctgtatgagttcagcaagcattgtccctcgcctaatagtacacatggttgtttcattcatgtcgaaaggtatcttgaaacgtgaatgtgcggttcgtcctttaggcattagcaaagaagcaacacctgaggaagcaacggcaagtactatctttcctttcgatctgatgttcg

SEQ ID NO: 163705 - DNA, 358 bp, Zea Mays
gccacccggcggtactgcgatggcgtttcccacggctaaccataattgacgctccaaaccatagggagaaatcgatagagaactacgcagggaggtgtgttttaccgtggctttgcacaagaacgagcagcctcgcaccatcgtcgtccagttcggtcttcaacacacgacgagggagcccagtcctcccgacgacgagtccgcgatggaaaactcccagacgtccagcgcataactctggccgagcaccgccccaccagcccggcgcaagcaacacgacaacggcggactgcgaatctctctctctctctctcaccggtgaggctctcaggtgcagcagcaacacccgaggtcggat

SEQ ID NO: 163706 - DNA, 551 bp, Zea Mays
agggagttggtggtgtggctttgcagttgtgggcaaaatgtccttttccacactcaaagcacttgattggcttatgagtctgtcttgccttgtattgacttgttgctttcttttgcacaaaagaattgtatccaataccactcttattatttttcataacagtgttcatgagtaactcattttgaagatattggcctttgttgaacttttgtacacttgtggcaagatgttctttctcaatcttaagtttcttgacttcatctctaagcctttcatcgtccactcccaactcgttattaatatcgttgctttctatgccaacttttcctctagtggttgcatctatcaagtacttcttcaatttctggttttctagtgtcatgacttcaaccttttcaatcaaatcatcatgaagactaggctgatcaacttggctcaaatcatcacatgaggttgctacatcaatcttaacaacagggttaatagcctcatgtgtattacaagataaaagctcatttgcaataagaagattatcatagtcaattttaatt

SEQ ID NO: 163707 - DNA, 676 bp, Zea Mays
catagctgtgtcttcatcacttgaactttcttcatcacttgatgtttcgaccactttctttgacttgtggtctctattcttcttggaggaatcttgttcatttgaaatcaaggcatgagagtctcttgtcttgattggggcttcttcggactcatgttgttgaattttagcaaatagttgatgaggagtcatttcctcatagtcatcacggtcccttatcattcttgctagactcttatccttttctttatatgctctcataaatagcctagtgaccttggagtcactccaatcttcacttccaagcactcttattttattgaccaacaccattaaccggtcaaagagtgattgaagtgactcacccttagtccaatcgtatcgtgcaagctcactctccaaaacttcaattctatgtctcttagctttggggtctccttcgtgtgacattttgagaatgttccaaatgtcacaagcgtcctctcttccttggactttccggtattcttccagacaaaggcttctttttattatgctcaccacttgagcattgtgatgcacttcttgcatcatttccggtgtcatctcttctccttgggtgggcttattcatacctatattaacaatctcccaaagactaggatgtacactgattaaatgtgacttcatcttatcg

SEQ ID NO: 163708 - DNA, 421 bp, Zea Mays
caatattgtccggctgcgcacagaaatttaacatttacgattcaatagcgactaaacctaacgtaatatgtgagaacttacgtggctttgaagaatatgaggtgtgtcctgttcatgcggcccaatatgtctcatggggatgtgcttctctgcgccgaccacgtctgccatttttgtgtgctcatcgatatgtccaggtgccctcaattccgccggaggagtaacagagacaccctctgtgtatggggcgatcgcagacgctacgggatgcatgtccattgaaatagacgtacctgctggcttatgcacagatgatacaggtggcatgtcatcgccagttccggtggtggacatcttctcgccgccaatcgctggccggacctctcacttccgccgccgctaaccgccgccaatatctcag

SEQ ID NO: 163709 - DNA, 532 bp, Zea Mays
gggggataacgtttcatgctaatcttatagtaatgggtactcagggaatagatgtcatcctagggatgaattggctagataagtatcaggcagttatcagttgtgataagatgataatcaagttgatgtctccactaggagaggaagtggtgaccgagttagtcccgcctgagctgaagaaaggaagttgttatcagatggttgtcgatagcagtgaggtagatccacttgggatcatcaaggttgtgtccgagttcccagacgtgttcccaaaggacctaccaggtatgccactagagcggaaagttgagtttgctatagagcttcttcctggcaccacccccatctttaagagagcttacagagtatctggacctgaattggttgagctcaagaagcagattgatgagctgtcagagaaaggttacatccagccaagcacctcaccttgggccgcccctgtcctatttgtggagaagaaagatggcaccagaaggatgtgtatcgattatcgagctctgaatgaggtcac

SEQ ID NO: 163710 - DNA, 642 bp, Zea Mays
gggagcttgggttaatggatgtttggcaaaaacccctgttacaaagttcaagctggattgataagctacaactttgatgcagagtactgggttagtctccacacaaaatttagagaaaattcaccccaaacaagctctgtcagaccatctgatgaagcctatgatggtacagtggcaaaaaaaatctacagattctatgaatctcgccgctggtgacccttcgcggtgattggttctgatcgccacgattcgtgcttcaggtctctggattgggctcgccggtgaaaagatcacgccgcggataggtccgggacactgtggccgcgctgtccctcggtcatttgcgccacgacgtggccttatggccatcaccggaatctgtgttgttcatcgcgattgtgccacgcctcaggcccttaaccacatcgcaatagctcgggtcatctgtatctggtgatcgccagagagccgccatggtagatgccaccaatcacttgcactagtgatctcctctttctccagctgccaccgtgcgagaccaaattcactagccaccgcttagcacccttataaattgacggcacggtctgctgcactaagttatcaccaagccaaagcacccatccctgccctcgattagcc

SEQ ID NO: 163711 - DNA, 783 bp, Zea Mays
tgcacagcaacacaaagcaccaaaagtagtcatcttattgcgatcatgagctatttctcaaatgtagtacatatataactacttgcatgtccaatatatcagggttattaaaacctcaccagttttgaagccctccccgcgcttcacgggtacgacgctccgactacggtgacacgtgtaaaggtccggacgcgaactcatcctcaaactgagctttgagatatcgtcgtgtccgactcccatacccccacgccgtgtccggctcccatccctcccacatcatctctgtctcctcacctcgcgctcgtcgctcgtgctcgactcgctccaccagccccgctcgccgtggggcacaaccttccaccaccacccccttcgtcgccgaccacgcgcttagagacgtctaggtcgccggtgttggcgacctgctctgtgacacttgtggctccggcgacctgctcctctacgaccgcagccaccacaccttccgcctccccccaatcgccaccaaggtgcccatccagtcgcctccccatccggccacaccaccatgctgtcaacggccgcgtgcctcgcagctcgacacctcctcagccttacctctgcatcgaaagccatcagcctctcgcttgcttcgtttccagtcgagcctcttctctgcccaactcatacccccaccattcccccaaactcgattccaggattagcagctttcgacgctctaaacatggtccaccacagttccgtctctagactccttgttattcccaggcacaagagtct

SEQ ID NO: 163712 - DNA, 506 bp, Zea Mays
aaaatgatagtttacatgtaaaatcaaatgaaattcatcaaacgaggtatgagacatacttgaatctaatcatacatgaaagatactggtgatgatgtaatacaattgaaggcataagtattatataatatgttgcataaattaatctataaaaaatataaaactaaatgaactttagttatgcattattggtgagctgaataatgtaagtgaaaagaagcataactattagtatcttcatctgtggatcatgcttcgtcgcagcccttagaactttgtctatcatttctccaaatgcctcggatagttcaatctgcttggacacaagcatgtgatggctttgttgaagagaagcgcagtacttgtcagcctccttgtcatgcgcatcaaacaatgattcgaacattggacgatgctgggtgggtagacaatttagcttgttgctaatcaaatatttgatgcgtgggacatatatgttgaatatctcagaaaccggccgttctaga

SEQ ID NO: 163713 - DNA, 563 bp, Zea Mays
atgatgggttcaatagtgtaggcttgagtgaaaaccttaagtaacacctggggagttacacattccttgccaatatctgccttgccctttgtcgttctatagaatttcttcttctccttcttccctttcttttcttgtacctggtcattctcattattaggacattgagcaataaaatgactagccttactgcttttatagcatgaacgatttcatttgttcttgttggggtagtccttgcgtcccttcaatgtagtcttacagcgctttattacaagcaccatttctacctcattaagttcgacagcctctacttgtgccaccttgtttggtagcgtctttgtgctggtcattgctttaagtgcaacgggctatgactcataaagaggaagaggtccgttggtgatgtcatcgatgtaccttacttctttcaccaccatgcgcctgcttataaatttgccaagaatttcctcgggcgacattttggtgtacctagggttttcgcgaataagattaacaagatgaggatcgattacagtgaatgaccttaacatgaggcgcac

SEQ ID NO: 163714 - DNA, 1336 bp, Zea Mays
cgggggtccgggttgtgcgtacaggggtccggtgctttcttgcggtggtccggtccaactgatacatcctgggatgtatcacttttctcgccacgtggtgcccctgagccgcccacgtggtggggtcgggtgttgttcatcgtgcggctagagaacgtcgtacgggctctgtgtcttcatacttcagtaaggggtacccctgattcagggtaccgacagtggcacccgggcccgcctcaggggaggatacaagcctgcaggtggggccaaagtttgattggcgattggctcgctgcccctgcgcacccgttgatgcaattactgccggtccgcccatggtcacgccgactgccacgcctgtccccgcggctgactgacccatgacctccgcacttaatgtctttgttgggccatgcgcagggtgcctcgagtcgctgcattggttttgaaaatttatcctctcagtcttctgcgacggccccgaggagacgcgatattggcgcgagcggcggtgcgacttctctgcacccaaaaaccggcgcgccgggtgcgtgacatgtgggcctgggcccccatgctagaggttggaccgctagttgtagcaaagatgaggggcgcactaccgcggggcggtagcatgctccttgtgcggtggttcgcctttttgatcgttggtcgtagcaaagacgaagggggcgtactaccgcggggcgatagcacgcttcctgtgcggcggttcgccttcttcgcactcgaaggccagcgcgctagctgtatgacctgtgggaccgggccctcgtgtcatgggatggataccccggtgtacatcgggggaggcttctcgcgacgcttcgaggcgggagcaggggagtctgcctttaaagaggggttcatccctcgagtagtagccatgccttgcttctctcccactcgcggtgtcctttcgcctccgagctctctgcgcccctttgccttcaaggtctctgcttcgcgttgtcgtagtttgccatggccttgtgacttcatcccgagcgtgcccagactgagtgagtgctcgaaatggtataccgcctgcttggatggaatgcgccgacgctcggcgaaaggatttgcaccggtgttatccaccccgatgagcttgccgctagagagtttgtgccttttgtcctccccagcatgccgattctaccggtcttgtttttcctctgctggaggtgcgcggccttgtgggagcagcgctcttccaccggtgcttggcttcaaggatgttcatcagcctcgcggtggtggggagcgagctgagtcgcggcttcgcctcccacatgggctggtgctc

SEQ ID NO: 163715 - DNA, 669 bp, Zea Mays
gctctggtctaaaaacattcctttttgccttaaaagagccatttttatgattataacaacataaaacattcaattttattagataaaaacatcactagagtcatcagaattactcgacgggggtaagacaacccctaggcatgacctcacataggtcgagaaaacccctgaacctctgtctcatccatacacagcaacaccacaacctatgtgagaacgacgtggcccgaactaggccttagacctgtactttgacgtgagacagacaaaggattttttagcccaacctaaaattcgctcccacaaaaagtcaaactcacacgttaagaagtgttgctcagactacctaaccaactcagatgcactttcacagtcatcaaattacaacaatgtcattattaaatctactacttttatagcatatggttaagaacagaatggtcaatattgtgcaatggaggccatattagtgacctaaacgacaagtcgatcaaaccattgggagtactataacttggttattcacaagtcttagaaacaacaaacacaaatagaaaacaaactataataatatgcagttatcgtctagactagttagatgcccgtgcgctgctacggtttctatatatcagtgactccaacatttgccaataaaaattttacttaaac

SEQ ID NO: 163716 - DNA, 491 bp, Zea Mays
aggagaacatagggatgctgaaacaagagagcagggagcacaaacagacctggaattcgctgaccacggcgagggctctaccacggtggcggaaacagaattgggggaaaagagaaattgggaggctctgatggataatccgaggcaaggatcggtgcgttggatgcataattacctagcggagccgtgggtgcgctcaatttataggctccgggggcggcggcgcatgaatttgggttggcacagtggcggtcggagatgaaaggggtcacttgcgctcgggattagtggctttcactgtggcggctctccggcgatcaccgggcatgtatgacgcgattcactacgacgtggtacaacgctttagtacgtggcgcggctacaatcgccggcgaactccgacgaggacacctctgtccactacgcggcaagtgtcacggtgaacagtccggcgataagtctctctcccttcccccgagttgagatctttc

SEQ ID NO: 163717 - DNA, 432 bp, Zea Mays
atgccaatgcagaagctttttgccgggtacatgaactgcattatcagacgaaggccaagacagatggtcttcataagaacttcgactgctacaactttgcatatacaaaagatacaaaggctccagtgattggctatcgcaccaaatggccaactgggtggacaaatgaatggttttatgtgaaagcagacgagaagagaagggagaagctgatgactatggtcatgaagcctatgagactaagcttcgggatgaccaggcccttatgccatatgcaacttggctctccataccaggtagctgaagttgagtttagggtggtagctgccgaaattagtactagagacctagtacaagaatatttggcaaacaagacatttccaacttacagcggttggggaatgacgaagaagaaagaagcggggaagaaac

SEQ ID NO: 163718 - DNA, 613 bp, Zea Mays
gccgatttggactcctgcgtaccttggcaagaaggcaacgagaggggtcccagatcctcatgactctatactcagcctccacgcatgaaccgttctcatccagctatcccaagctggtgatagagttcctcaacgcggggatgtagtaaactccggtgagctgcctgtgctcaccagacgtggcggtgaagacgactgagctagcgcccttgatctctaccccggacgtgtccccgaacgtaacggagcctcggacgctagagtcaaactcggtgaagaactcccgtcggccggttatgtgatgagtggcgccagtgtcgaggcaccatccttcgatcatgtctttgctggagccgtcaccgaggaaagcgcgtggtttcaactcatcaaggtggaggagtgctgatgcggccggtgccgatggagatagctcgatgcttgcgtgtgctaggagcagagcttcctcctccgcctccgcctgtgcgacgttggtctagccgcgtcgtgactgttgacattccttggctcagtggccaagcttgccacagttgtgatagccgtcatctcatgccgccttcttgttgcccacagcgtcgccttgggcgcctccgtg

SEQ ID NO: 163719 - DNA, 882 bp, Zea Mays
gtaaaagtgttggactcatagggctgttcttctcaatgaatagatagtatcatattgagggcctttttctttccacttaatgatgtgtttttggcttaccaggatcatgtgggaccagctccgatgaagcttttccatttttcttaggcatgcaactccgatgaagctgctggccatgtcgtcctccgccggcctatttccatggccacgacaaaattgaggatcggttaccacctacctgcgtccatcggatgaacctatgtcgctgctgcttaactgcacattgagattgagattgtgtggttgtcgctgctgcttaactgcacattgagattgagattgtgtggtgttttgtttcaggttcagcctcaccgcctactgtggggaggacaacattgtagttttagactgctgctctacaagtacctactgccctacttcattttcagggtgcccttatttctaagcctgtatgattcggctagcagatgttagtaccaatttataatacatctctaatttatattttctatatctaatttcacatgcagcctggtcactttgcatgtgatggtttgaaatattatatgcatataccatatcatgttccctttgacttgatattatttgaaaacttcatgtgtggcacataacttttgtttttagtttacaggtcactgtatctttttcaccactgtgttggaaggaggttacattgcaaaaatgcaatgtgttcctggttcttgcctgcggtgggctatttggttgcaaccgtggcttggaggctactatctaggcaggttgaccccacctcaagtgttcctagatcaacaagcaaacaggtctgtcgtattctccccacctcaagtgttcctagatcag

SEQ ID NO: 163720 - DNA, 704 bp, Zea Mays
attgtacatagaagggtgcacccacccacttggttaccaataaataatcccgcattgtacattgatggaacacgcttaacaagacgccatagttccctgcctactattttgttgagcacctgaataccctctttccctagtgtttgggcccgcttgaccatgtgtcgattggtaccaacaatccactcttgcctttatgttatcctttgacttatcagaaatgtccataattgttgcccaaagtgcctcggtgacattctttttagtgtgtgtcacataaatgttgtgtgaaaagagtaggtcatcataataggggagccgagtcaagcccgacttttgtgtccacatatgttgctcgccatataccacaaaaccaccttctgggttggccacgagaccatctatctgttgatgaacttcggcactagtcataacattgtaggtgggtggcctgtcactacgataccttttcgtaaagttcttgatgtctagtcgaaatgcatggtcatgagagagaaattatcgatgtttattgaacgacaaatattttccacccttcttcaaccaaatgaacctaagagcttccttgcaaactgggtatgggaacttaacgtgaacacaccaggtgcagaatagcccatacgcttgtaagtcatgcatgcagcactggtactaaacatgcattttgaagtttgtcttcgtag

SEQ ID NO: 163721 - DNA, 757 bp, Zea Mays
ggttgattggtttcggttcccacccggatgggtcgggacaccgggagagatcgacacgaaccccccaccctgtggtggtgacggaggagagagtggaggaggcgtcgagtcacgttgacgttcggggtggaatattaccattccagttcgggatctctctctcggtatcttagctcaagctcactcgcggtctctgtctgccttgccgatttcgtccggcaagtctcgtgcctccaccaacggaaaataatgggtgccctttcaccggtgccatagccagccactggtgctacgacacatacaaagatctagatctgcgccaggagttcccatccattttcacgtctttatttgtgtgtgtgtgtgtggctccactccttgtgtttccgcaggcgagttcacttatgcatgcaccactatcacagcgacaaaacgccaagcaaaaaaaccaaaagccctctctagctaaagaatgcacgatcgagagagagagagagagctcaggaggaatcaacaaagcagagtgggttccaagcctccaccagcatcggacaagcaatgtacccggctcatcaggatcaggctagcagtcccgtcagcttatatatcctgtcaatggagctgccattcctgacgatgcgttggatcctgatgcaccacagcaccaccacaaaaggaaaaggtgattagacgcgcggagcggagcagacggcgcgatgattaaaacgccagccacggaatgaattttctcgcgaat

SEQ ID NO: 163722 - DNA, 739 bp, Zea Mays
ggctgtcagcctccttccaccatgaatgcagggtgatgaacgcggtggatgccgtggagatcggaatgccgtttttatgcgcaatcacccgccgaactacttgtgccctcggcatgtttttctgcgtcgtcctcatccgcaagcggttacgatcggtcgctagtttcgggggagattgttgggactccgttactcgactctagcaccatatatacggatgcctcatgctcctcgtccctcaaagatgcacggtagctcgcatgcatagggtctcagtggaggcagagagagagagaggtaggagatagagccggatgctgctactacgtcccacacgaggagcttcatcaccgagctgatgcgtcgtgatctgcctctactaccaaggtcgacgcaggtaagaagtcttctattggattcgcccctctctgctctatagttcaccgatacttggtctgggtggatcgcgtggtcgtcgggggcggcgcaggcgctgccgtactcagagccagagaaagaagacgatctcgcgaccgtacgatccggattgtgcggatgggattagatccggggttaacccaatgtgagccatcgatcgtcagtttgagggctcggatttgatgcaaggtaccctttcactcaattagattcaggccgttgagatgtcatctgatggttgtggatggataccggttcataagagtgcgttgtgatctggtccacccaagtgtgatcggac

SEQ ID NO: 163723 - DNA, 489 bp, Zea Mays
gtttcccgctgatctaatagttatgggtaatctggatgcgactatagatgacatcctagggatgaattggctaaccaaatatcaagccagtcttagctgtgacaagagaacggtgaagttagtatccttatcaggagaagaggtgttagtggagttggtcttgtctagaccaaggaaaggaagctgtcaccaagtcaccgcccgtattgaggagattgaaccatcagaagctatcaacgtagtatcagaattttcagatgtgtttcccgaggagttaccaggtatgccacctgaaaggaaagttgaatttgccatagagcttataccaggcaccacccctatttccaagagagcctatcgagtgtccggaccagaattggtggaactcaagaagcaaattgatgagttgttagagaaaggctacatcagaccaagtacctcgccttgggaagccccagtgctatttgtggagaagaaagatggaacaaa

SEQ ID NO: 163724 - DNA, 924 bp, Zea Mays
ggccgcgtcgctccttccacatgggttgcccccgcttgtggagtcccatgggtcgccaggacagcaggattttctccgtcgagtttctaaggctgttggcgccgtccttcctcttccgaaggcagtgcggggaggccgacgacggaggcagcccacttcccttccggacgcgatacgccgaagtcggcgcgttgcggggttgggagtggagcaagttcagcatattcccaaagcaagaaggacaatcatgaagtccatcctcacagagccggacagtgaacatttcagccaacaaaatctggatgcttatgcgaagctcttccaagcacccttgtctcgtgcccaggtggaggctctcgctgctctctttggatgggtgatgccggatgatgaaggtgaggttgttccccctgggacagccactctggtctgctgattacagctcacggtcgcctactattccaactgttgtcctatggatccttccctaatcctattctggaatgttcgcggtctcaactctgacgctagacaggatgttgttaggagtttggttgattcattaagagtagatgttgtctgtttgcaagaaacaaagttggttaattgcgatcgtcgcacagttttgtcaatgttaggcgctgattttgacaataacttcatttgtctcccctcggttggggcaagtggtggggtgctgattacttggagagaaaaattaggaagaatcgttgcctctcgcgtggactccttcagtgtttcagtaaaattcaaccctgctgatggcgtggcttggtggctcacctgcgtgtatggtccgcagggtcatgacagaaaaattgcatttattcatgagttgagagcgatcagagctgcttgcaccgggccttggctcctagggggtgatttcaatctcattttcag

SEQ ID NO: 163725 - DNA, 759 bp, Zea Mays
acgaagacttaaaaggatgatgagcatcaacaagagcatccaccagagacacaagggtgattagcaagtacctgggcacgaagaggctcaaagtcatcacgtggacgagtcaagaagtcatttgtgcgacgaaactcaaggttagtcttctgagtgggatagaactcacatgtgctaggagacatatgtggaccaaagtatcaagttgacgcctgacaatagacatccgactgtagaactcatcaactatagaatcaccctaacataaggactactgacgaataccatcaagataagtagagtgactcaagataagtagagtgaccagtacgctcctagcgattttaagaagggtccacatttgatgagaactgtcacactgaataacctctgcagcaaagcggtcctccatactagcagtgagaatagaaccagctcgagcatcctcatccagccatatccaatatgcactatactgagcctcatatgatgccagctgatcaccataatatgcaagcagctgctccttagcctcaggagttaccttatctgatatcacagattgggctggagccttaggacgatgcgggtagagaagttcgccagtaagaaaatcacatagacgaagaccacacatatgccaccgcatgtgagaaacccaaacacgatagttagtgccatcaaagatgagcagacaacgtgtaatggtacacccccgttcggcgcagacgaagagcaacaatcgatgacgagagcgca

SEQ ID NO: 163726 - DNA, 528 bp, Zea Mays
ccaagctcaccatggtacagtataccccaaactgaatccgatcacgggattcatttcccctcgtcgccggtgatccttcgtcgtgtgtgttgattgatcgtcgcgattcgtgcaccacggtcgggggataactacggtgaggtaaaaatcttggcataggatcgactcgagctcggttgcggctaagcccgccgtacccccttgctcatcggtcgatcggataagagctcaccgccattggttgatcactgccgtgcgccgcgtgtgtaggctctgtaccatgtcgcaattagttatgttaagggatccagtgatcgccggaggaagcgccacggtgaaagtcacccatcccgagcaccagtatccctgtttccctccggccgccagcacaacctcgaaaaattggacaccaccgacgatgggaactataaattgccacctccgcccgctccgctaggtaactgcgcagccggtgaagcaatctgcaccttgaatcctcccctagaattcaccaatttcggatttccc

SEQ ID NO: 163727 - DNA, 867 bp, Zea Mays
tcttaatgtatggtgttatgaattattgtatttctctatgtcttacctttgagtgagcaagtggttttcgatctggtgtaaatggtttatcggacaagatttgatagactgatggtttattccgtttaagcgtgtcatcacctctaaggcgtgactcggtcgctaaagctagaataatctgggtggttctaccacaactcccatccttagaagcaaagcctaatctcggtctaccagttcccctcttgaactgactgaccattatgcccaactaggactcacagcacgacacccagctcaagatagatcgaaggtatgtattttcttccttgatccttgtcttgtcgtacctgcaaaactcgagagcagactgcaagctcctcacaaagtgcacactgcacaggttcatatgcactcactaagctagccttctcaagcgaggctatcctagcgttcttctcctctagctcagtctgcaaactaggacaagcagtacacacccaacaagctagagctagatctcaactcatcacgctcatctagcagggtcgcatacttggtttacaaagtggtgatgttttacatgtgtagggtgcacccatcacactcagtctcgtcggacaccacaactggagctctagcagactcaagctccctaagagtgttgttgtacttgctcttgaaatcttttctctcacgagaagcaatcctaagcaacttatcctgactagccaaatcacttatcaactcctctaccttagcgacgagatcatcagtggaatgtaatacctcaaacgttgagtcgttgtcgatgtcctggtcgccgtcgcccaccgaatcatcagcaagggccatggtgaaaaggcc

SEQ ID NO: 163728 - DNA, 1141 bp, Zea Mays
caatccagcgcgcgcagcccactccatcccgcgtgcgccgacaagcgggcccgtttcgtcagccgctccctcacgcgcgcaagggatcgcctttcgctgacctgtgtgccgatttcgaactcgcgcgcgcggtgcaggtgtctctgtcatgcctggcccaccgcgcagtgcccacctttcctctacctcgcgcgcagggcggagtgcctcaacggccgacccgcgaagtccggcctcagctaacccaccgcccgggttctcgcgcctataagaaaaaccttcttgacctcgccctcccctgcgcacttgaatccaccagagtctccgtgagatcgtacacttgccgttgcctctgaccgagaagaagaagagagagaagcgagaggcgcggcggcgattgggggttcgcttccaccgccgattaacccgaaatatggacctgggggaaggaggagttggatgtgtggagggtggacatcgtgatccatcggctcggagggactcaggtcaccggaaaatccccgtcgttcgtgcgtaccgcggcggagctgcttcgctctatggtctgctccgtcgtcaactcaaccacgagtaagtactcccttccagaatttgtcgtggcctcagcatcggttagcaactagcgcggcgagaaatcatgcattgtaggccagcgggggaattccggccatggcgcgccaccgtgcggggcggcgccgccgtgcgtgttccgttgggggaagatcgtgcaccgtcggatccactgggaacggctccgattagatctaatgtacctattcgcgcttcaggttatgcaccgtccgatcgggatcgaatggtggacactcgtagctgggttcattaaatctgggccgttgatggttcatcctgcggtcctcactgcgtaccggttcgatgtaatgcagatctaatctgcgcccttcaaatctaatcagacggctcacatccaaccataccccttcgggcgccattctttctaaagagaccctagaaaatagggaaatcaacccgcagtactgcaaatagaaatctgtgtctcggtttattttgcgccaggacccctgccttcctctgtaatattgggcccagtccagtactgttttaaattgattaaatgaat

SEQ ID NO: 163729 - DNA, 817 bp, Zea Mays
cgtgacctaggcgaagtctacagttgaagtgtcgtctgacccttgggcgcggttctgcgctgttgttgatggcggtcgaggggggtcaccgaggcgtctgcatctggtgaagtcacggcggctgctgtcaagcagttgtgctttgtaagctgttatcgctctcttttttatgaagtctgtttgtggtaggttgtcgcttttgctgaccaggtggcgtctgagcacttgtggatctcacgactacgttctgagaagaaacgactggaggataaggttgagtgacttcagaccaagaatactgaagctatctgggacaagtcttccactaagaataaaagttgaaatcttttggacaaggtcggcacccttgagaaggagaacgagggccttagtcgctagttgggcgagctaaaggaggttatgatcaagtcatagtcgaaggcccagaccgcctgggagcgcgccgccacattggagctagaagtgagaaacacgaaggcctatcacgagaaggtggagactaccacatagactggtgtggatcgagctcactcgctttttgttgacgttactgcgacctgggtgctgaggcaacccccttcgataagtttcagggggagccggggacccacttccttagctagttgcaggaggagctagagaccctctcgtcgatcgtgacagggttgatgtcctatgcctcccgtgttacctgcgagggtgctgccaacgccctgtctcgtgaaggctaccgtcactttgaggtcattgatccgaggacttcgacggggtgttttccaagtcaaagacacattat

SEQ ID NO: 163730 - DNA, 733 bp, Zea Mays
cgacgacgaccaccagactgcagagagcttgctttacggccaggactactggtaggaggaggaacttatcatcctatatgctgaacctcaacgtacggcgggaattttctcctacgatatggtttccgatttcacgacggaaacacagcaggtcgagcacgcgtacgtacgccgtgtagatttgtacgtagcgtgcattatttatttacataaggtttctctgtacgtatgtgcgcggtccttgttctctataggctggctgcaccgatccatccatcatatctttgtacttgatatgaaaaacaaaatatatatgttagcagttaatattggctagatgcatatatacatatttttttgccagcacatcattccgacatccaaacaaagttcaacggaagtgccgcgcgtgctagctgccgccaatcaagtgtcatatcttgttgcatgagctcacggcggcatgcatcacaatcttctatttactttaaaagagaagaaaagaaaaactgtagaatcttgatgtcttctttatatcctccatatcatcatatatatattcgcgcaccgattgatggaaggggatatatatagcgatacgcgcaactgggttgtagtatgttaagcaatttctttcgtttgatgttgaatctgtggcatcaaccgtctagcaggatgcatcccgcgtagcacgatttatacaccgctcaccagagtactctcctagctaaac

SEQ ID NO: 163731 - DNA, 700 bp, Zea Mays
ctcgggtggccataaataggtcggagccaaagccttctctccccttttccttcgccagcgcgcagcaacccacacctaggctcaacctcaccatcaccagggaattgcggatgggagaacccgccgccgcgactatccttcaccaacgtcgtggctggacctccgcaccgaaccccaaggacctgcttggcgcggaaagctttggccctcatcaatttggacaacctctaccccgggaccgagcaatttcacgtcgtggtgcttctccgtcgcggcagccgcggtacctcacggtctgtcctcgccatcgctccaacccctcggtatgaccctcgactaccttcaccgtgattatacgaacgtgatacacctttctgtactgaatcggagcaccgtaagcacctagtggggggctcgccggacttctccgccgtagaagtgtggatgaggcgctgcgttcgacctcgggttagggaaaacgaagcggagtcgtagatctatgatcggacggtccggattaaacggggcgtacctattgggtaggatagatctgcgccggtgatctaacatcgggcggctggcggtatttttttgaatcgtggccgttaatactcgatcctaggtctgatggcgcgtaccgattcgaacgggccgctggtctaatctggaccgctagcggttgatcggacggctccggtta

SEQ ID NO: 163732 - DNA, 592 bp, Zea Mays
ctccagcggacaacgttgatgttggtagagagatgagggggccttggcttccgcgtactcggctgtggctagagggcggtataatgacgagatgcggaggcggcaacaggtcccagttttcttttatacgctcacactggtaaagcctgattccaagggccgttcgggcgatccgatttcagcggacgacaaagcggtgtaggcgagtttgttacgaggaagacgaagtttccggcggcgctggcgtggggaaagtgaagaggagtttcagtccgatggggtccacccgccattgccacaaatgcgaccatcgacgtggagtcggagccagggagtgggccccataggtcggtgaaggtggagagcggtgagactagcctgcatccatgcagacagtgccagaggtttatgtactcgcgtgatggctcggctgagctgctgccgcgcgggcccggcctggtagtgacacgaggtgaaggtggactggctaattcctgggccgtggtgagaagttgggctgtgcaggtttgggagtagagtggactgggccgcgcggatgaatggccgagattggagtgaaatcggcccaagc

SEQ ID NO: 163733 - DNA, 780 bp, Zea Mays
atttgcaaaacgttctaccgaattttctaatagtcactgacatcttacactgaggtccctgaaacttcgtttcttctccaaataagtccccgacgtcgagcggcgttgcgcagagctccggcgagcccatacaccggtcgactcacgcggcgactggcgccatacttcgactgataccgaattcaaggtccaatgagtgtttccccccacttaattttactaatggcttcctggtttgctctggccgcagtgaccgaggattttgcggatggatgaatgtgttcccggtgattaagggggttctagttcaattggacgggtcgatgagcatcaagggtaagcatgggtgctgaaacaagaatataaatggcaaaatcggacctgaattgagcggaccgcggcgacgtcaagacacgcaatgttcttgagcagcttggggaaatccgaaattggtgaattctaggggaggattcaaggtgcagattgcttcaccggctgcgcagttacctagcgaagcgggcggaggtggcaatttatagtttccatcgtcggtggtgtccaatttcccgaggttgtgctggcgaccggagggaaacatggatactggtgctcgggataggtggctttcaccatggcgcttcctccggcgatcaccaaatcccttaacataactaattgtgacgtggtacagaacctagacacgcggcgcacgacagtgatcaaccaacggcggtgagctcttatccgatcgaccgatgagcaagtgggtacggcgggctt

SEQ ID NO: 163734 - DNA, 647 bp, Zea Mays
gactctgtgtgcctgaaaatagtggcgcaacttcctggatgcaacaagtatagcatagataagcttgtgcgtctcaaggtacctggcctttgcctcatggaggacttcgctgacgtagtagactggcttttggatggttcggacccctacggttggtcccgagtcttcaagctcttggccttccatcaccatcgtggtggtcggatcaccaccttctcccgggggaactttctgactcccttggggttgttgtgccgtcctttcggcgaccagcaccatgctcactgcctctgtagccgttacaatgtataagtacaacggctcccctggctctagagctaccagtattggtagggacacaaggtgctgcttcaactcttgaaaggctcgttctgcctcctcagtccaagagaatggaccggacttccgtaatagcttgaagaaaggcagtgccctctcagccagtcttgagatgaagcggctaagggcggccagtgaccccgtaagcttctggacatctttgattcgggtcggaggcctcattgtctctattgctttgatcttctctgggtttgcttcaatgccccggtgcgaatccaggaatcccagcaacttccctacggagacaccaaagacgcacttgtccg

SEQ ID NO: 163735 - DNA, 941 bp, Zea Mays
gacagattgtaaacgtgtacaccaaagatagaagaggcaaggagatatggtagctagcgctgtaaaaggaaaagagataatctgttactatctttacctccttaattatctcctggccgttgtctaggtgctacacctcccctatatgtaagccacggctggggcttttccagtcatcaatccatcaacacgcagcacgcctgtgacgacgtttctctccttccaagcgcctctgaatctctcacatggtaatcagagcttagggttccatggcaacgagttcaagcaccatcaccaatccattcttcggcttccaagtgaccgagaagctatccaagaacaatcatgcgtcatggagagcgcaggtcctcgccgcgatccgcggtgctggctacgaggggcatctcaatggcaagaccaaggctcccgatgctgaaatcgtcgagaagaagaccgacgacacgatcgtcaccaatcctaacccagcgtttcaggtgtggtattctcgggatcaacagatcctttggctcatcctagcaagtgcggggaaggaaattcagccacaaatcatcagtgcagagacggcggaacaagcatggtcgaccgtggagaaaatgttctccgcacagacccgtgccaaaacaatgaatgtaaggcttgccctcactactacgaagaaaggtaatatgtcaatcacagattatgttgccaagatgaaaggtttagcagacgagatggctgctgtcggtaaagcactagatgatgaagaactggctgcacatatctgtaatgggcttgatgtcgattacaattctgtggtgacatcagtcaccgctaggactgatcccatatcgattcctgagctttatgctcaactgctcagttttgagaccaggttggaactgcaagatggcggctcgtatgctcacgtggcaaatcgt

SEQ ID NO: 163736 - DNA, 488 bp, Zea Mays
gctgagttgtgggcttcgtcgagcaggatttctcgtgcctctccctttggtatacacaaacggtccctgaactaaagggttccttcttcatctatcttggggtctgggagttgttctttccgagcgctttctacaagacttgccgtctcggtgtctcggcgctgagccttgcgtatgaggtcttctagcattggcttgacttctaggctgccattgtctcccaaacaagcatttagtttagctaattctttcttccagtcttccaagaagttggttgctttctccccgaaaggttttcggctgagggcgtcggctacaacattggcctttccggggtggtggtggatctcaatgtcataatacttaatcaattccagccatcttcgctgatggagattgaggtctggctgagtgaaaatgtacttcatgctcttgtgatctgtgaagatgtgacatttgtttccaatcaggtagtgcctccgtatttt

SEQ ID NO: 163737 - DNA, 846 bp, Zea Mays
tgccaattaagttgtaacactgttcgtggcaattgacacttgtttctgttcaggtcatcagccattcaaggagataggagatgcgctggcgcgctgcccagctgccaccgtcacggactcgatgacgatattaggactcgtgcttggcagtgaatggacgatcgtggtgtcgtgagagacgagtacaagcaactaaacgattaacatagagtagaagctctcgaggcctgtaactaatagttcctaacatgtgtttctgctctttctccagccaccttctctagccaccgatgttgagtttcttgcggtgaatctttattttcttcgatatgcttatggtacatagtgatttaggcataacaatcactaagaattttaggtatggcgagtgtcatatcttgccacattaagagctccgcccctgatcactacccactttgaggaggagctccaaacgagccaagtgagcatttactcgaataggtggtgagcaagaagggaaacacaccagattggtgagcacagggtggacgaggtgtagctgtagtattcaaaattcaagaaaaataattaacacgaatagggaacaagtgtagtaatcttgtatttaattatatgcacacttgaattaatatagtacaatgtgtgcattgtaacgtatacaatttatttgatgagggactcagtgcatagcaatgacatacaatttatttgatgagtgattcaggcaatagggaatcacgaacaagagcaaacaatgcagagttcgcttaaaaaccgaatactctgattttccaacacttttaagagctatccgtcgtaatatcgtttctggctgcagctgca

SEQ ID NO: 163738 - DNA, 406 bp, Zea Mays
gtcatatccatcaagcatgttaattttacgtgcatatatttttacacaccgcatatttgtacttcactacataatgattgacaagattattaaaatcctacctttcatttactaggttcaaacaaggatcattcataatcaaagattccacagaccaaaaagaccaagaatgatttatgcaacaacacgaagctaactgagattcaaccattgtatacattgcacaaccttttgttattgatcctacccttttgtaactaaatataatgctcgcaagtataaacaacccttcctatgtggtactaaacaccaagatcagtttatgtgatgtaggaccagttttcctatgtggtactaaacaccaggatcagtttatgtgatgtaggatcagttttcctatgtggta

SEQ ID NO: 163739 - DNA, 321 bp, Zea Mays
cccctccttccctgccacaggttctaataagacaaacacccacacctcattgcccttcaaccatttttgaaccttcagggctgaaacctggggcacttctgtcaccgcaactgaatctcccttcaaccaaatcctttctccttgatgctgaaatggcaacactttctgatcccagtcacattccattggactttgagctcttaaccaatcaaacccaagtatagcatcatacaccccaatctccaacaccctcatggtagatacaaaagtgtgtcccctgtccaccatctaatattcttcaccctcttgtcacttctcaac

SEQ ID NO: 163740 - DNA, 802 bp, Zea Mays
gacgagggaggagagggatggccgcggccggtgcggggaaggaggagctcggggcggcccttttataggcgcgcgagggaaggggggcggtggagcttcgcggcgccggtgagctgcacagcgccggccataaatgccgcacagcgccgtcgaggagacaccacggtggggcggtaccggcgaggacgctggtcaagggagggggaggacggagcggtgccaaacttccctgtgcggcgagaagacggaggaggggatggaggtgatggccggaggtgaccgtgatgaagggacggcgggaggatgatgaaacggctgacaagcggggccacactgccagtgggagtgagcgtgcgagagagagagggcggctgacaggtggggacggttcgtcagtgagagggagggagagcgcagggcgaactggcgcgcgcgtgggagcaggccggaaatggtccgaggggagaatgagtgcgggcacgtggggagacgaggccgcgggtttgggccgggaatcggcccagcaggggggaaagggtttttctctttttctttttattttctaattcctatttccctttttgcatctttttcttttgaacaaattattttgtgggtaatctaggtgctggataatagaatctaagtgaggtgcttgtgattaaacaaggtgtatgcatatgatgaaagaaaatctaagggagttcttggaattagaggattagggtttcaaccctaggttaggattttgggatgttacaaacctaccccacttaaaggaatctcgtcctagagattcaga

SEQ ID NO: 163741 - DNA, 804 bp, Zea Mays
gcggcggccaaaggggtggaaagggtgggggctgccacaattgggaggagagggggccggctagggtaggggaggaagggctcccatccatcggatcgagatcaaagggccgaacatgctctcccatctgagctcccgaccccagcagaaaaaatgccaaaagatctactgcttccctgaggaatgcctcctaaaactccaaaccccaatgccacaaaacatgaaagaaaagagaaaaagaaatttagcttctttcagaaattgggatatcacactctaccccccttaaaaagaattcgtcctcgaattcgaccactccaagcaaagcatccaagataccccatatagcaccaccattcaaaacatgggtccattattggtcttaattaacacaagaacttctacctcggactaattgtctaaggaaactacacaacctgatatccagcatgaaacaacatgcaatgaagctcaaagcaagtcatagatgcaatcaacactacgatttgacaccatcgaatttggatgcagctatacatcaacatcaatgtcttcaaacaacactcttttatgaaggggtaatatgcactaagcacaacccttaccagcttcaacaattcattttaattcaatggtgaaacatccacaccagatgaatgtataagaagatcaaacacctcccctcaaagcaccacaaaacaagtggttatattgaaacaaaactcctaatcttcctaaaacttgttcttgccatcatgaaaagataatcatgtaatctcacattctttgcaccccacaaaaggg

SEQ ID NO: 163742 - DNA, 545 bp, Zea Mays
gaccatttcagtattcactggttgctcacacctttccatcatttcagaggctcttagacaaggctctagctattgaacacaagcgtgttcaactaggtgaaatgaagagaaaggccattacctagcggcaagggagcagcagcatttgtccttgctatgttccgccccagggtacaccagctcgtcctagaggaggacagcgcccagctcagtatgcacctcagggcactccacagacaccacacactcgttagactgcccccattggcaacccggtgaaaccagcaggacatagtatatgcaccacatgcttcaagtgtggtcaggttgggcactatgcaaatgcttgtctgatgaggaatcccaacacacccgctcagaacaagcaacagactccaacatctagcaagggattcaacattgccaggtcaaccaagtcagtgccgaggcaactgttgatggagctgacatcgctgtcggtatgttttacattaattcaattcctgcaaccatattatttgattctggagctacgcattcattta

SEQ ID NO: 163743 - DNA, 684 bp, Zea Mays
tggtgaagcatgaaatatgcgagattgaaaggttgagagcacaaaagaatgctgatgagctttgtgatgccaaagagaaatgttatgaaagatccttggcctgtgctaagagtttaaagaacagcttcgctaaggttggagaatattcctctgagcaaaactttatccgcggtgaccccgatggagttatctagtggatcagcggggaagccgaagcttttgaagaaattcttagtgatcgggggatttctgtgccttcgccggtgctcgtggggctgcatcaattctggaaaaggtcgactgtgatcatgtgaaggctgttgttcagccagagttttgtaacaccccaggtgttacttagggttttcactcaaggctacactattgaacccatcatacatgtggtttagtttgagcaaaagacaccaaacttgggatcaagatcctaagtaggtgtaacccatcttagaagtcatgccttggccttctcatgcacctaaagaggagagaagagctcaaccctaattcaaatccctttaggcaaatggagccctagaggggagtttagcaaaaaggctatgtaaactacattgtcatgacttgggctaattataaaagttgtagtacacttaataccctacaaaaaatagaaagagagtgaccccaaaaagatttcagaaaaac

SEQ ID NO: 163744 - DNA, 605 bp, Zea Mays
ttccgccacagttggtatcggagcaaattccaccacagagaaggacaataaaccatgaataccaattttcaaaatctaaaacttgcctagaaactgctacgaatcgtcaggactagaccgctagacctaggacaaaaggccttaggcattaagggggaaataggtggctaattaagtaggccccgtgggccagtacttagacttttaaggatgccctaaaagcaccctattattcggagaggagacgttacttccagcatgaatgcattataaatacaaaaaggaattaaaaattgagctaacccgcttcctttaaaaaccatccaggctcttttatttttcttccttccaccataatctttacctttgataccctttcgcagatgaattcacccacccccgctagtggaggagacactcgttttagctctgacttcctttctcacgatggctttccttccatcttgtgggaagtgcttaactccgccggttaccctacgccccctttgtacacggtgcagctgtatgaggagcatcgggtaccttgttgtcaggtccggctgactttggaggctcatccccttcagccgggttggcgttctctt

SEQ ID NO: 163745 - DNA, 674 bp, Zea Mays
ctccaaaaccgtccgatcgttggttgacatcaaggatttaatgcattgaatgggtatgcgccaactaatcccagccgcacgcgcacggatcaacggcttaggcgtcaaacgcacgaaatctattcctagtcgtccacatgggaatcaatggccaacgagtcatcctcctccctcccagaccgagccacggcggcgcgcccacatactacggcggagctccaccggagcacaccgcacgcgcacaaaccaggccccatagccaaattcttcgggtgctatgcatagagaagcgtaaagcgaactagatggatgggttcttaccttgattcaggcactggacgaaccaccccacgaagtttggcggacgcacggcggagttcgcaccacgacgacgaaattcgagggcttcggccgccaatcctcagcagggagctccccggttcaatccccgacgcacggcgagactcacagggccgaaatcgtggacgcaacgtcggagaacacgaaattgggccggcggcggcactgcttcctctctctctctcccttcgcatggcaccagaccagggggtgcagacataggggcgatgagagggtagctccggcttcggtatggcctcaaatacacacggtacaaccggcgccctgtgagcaatcgactccagcgcccgcgg

SEQ ID NO: 163746 - DNA, 821 bp, Zea Mays
agtcatcatcatcatcatcaactgctgtgtcctgagctttgaactgatgaagagtagaatcctcggcctgagagtcaaaaactagagccggtgctggcacaggatcctcaggcgtcggacggtaggacccaaagacaaggtgtgaggcctcaagtgtgccctggaaccgcggaggccgaatcagctgagcaaaaatgtgacatagatagtgagcatatggcaactgacgatgtgcacgcagaccatccaaaacggtgtcctcgatctcacaaataaggaaatccacaacatcaaactccgagtgacagaccagggcaccaaggagccagagctggatatgagtggtggcctccctgtaccccatccgcgggagaagtgtccgtctcataagctgatagagaaactttgctgcagtggtgaaatctgtcggagagcgtcacgacccatctgagaagggcggtcggaacagagccgcgacgtgagctgtacccggagcaacaccgctgtgagggcgacgaggaggttcagaggtgccatagcataagttgtgaagacgagtcgatgactcgtgaaatccaaatagctggcgaatctggctggcatgaatagtgacatcctctcgctcaaaacgaaacctcatccagtgatgatcagggtcgatccatacagtcgcgtagaaaactctgacccattcctcaacatacctgtcgctggtgtcaaaagtgagagaaggccagacagataggtgaggtgtacctcagagtcagcactagcggcaagcagaaatgcaggaagatccagaagctggtgcactcgcagag

SEQ ID NO: 163747 - DNA, 488 bp, Zea Mays
ttaagacctgccaccacacctacaagggtgttgaggcgatcttctccagcttcacctagaacaacactggtctagctttctccacgaagacatagaggaagatgtttgtattccgtgttgtgcagctgctttcgataagtgtggttgagagaccacagggctcttctagaagcattgctgtctaaagcagcataggtagacagcagcgttagatactcaagggctgatagagtcatgaaacctctgtctcctgcaatcaacactctgatatgcacgcgagtgatgtagtaacaagcctgaggaggctcaaacaatagccttgtgtcatatagaggtcggatgtaggttcctagcgcatgcagtacattttgtcgcaagtttgggaagtgtcccatctcaaacattgaggtgtaatgctcggtgacagaccatatcccaacaaagttgtcctcttgctcatcgttggtttctttgttgttgttttcttc

SEQ ID NO: 163748 - DNA, 460 bp, Zea Mays
ggggctttgacctctctcctcaccacgctgcaatcgacctcgtcggggctcgggtttgggggagaataggtgtgggaagggagacttagaccgccgccgtgccttcccatccatgcgtggtcgctggaggccgtaggaggggtcggcgaccatcaccggggtaccccgaatacgtgcgcgagatacacgggcatcgttggaggaagcattgctgggaatttctcaccagaatttgttctgcggtgaccgtccaccttgcaccatggacacacccgcctacgctgcaagtgctggtgagtgccccctctgcgagttcggtttcatcttctctctgcgtagcacggtttgggtcagggcttaggcgtacgggctgggggaattgcggtccgcatcaatggcgccgtcgtaagggcacggccaccgccgtcacccggcctcagggtagaagacgggatgcgcg

SEQ ID NO: 163749 - DNA, 760 bp, Zea Mays
cgtgcttggtctgcaaagttgtgatgttcgacatgtgtagagcgcactcatcgcattctatcttgtcagacaccacaactaaagctctagcagactcaatctctctaagtgtgctctcatacttgaatttaaaatctttactctcacgagcaacaatactaagcaacttatcctaactagccaatgcagccgtgagctcttctacctcagcggcgagatcatcggcagaatgagatacctcaaaagcagtgccatcgtcgatgtcctggccatcgcatcatgaccaagcgccatgttgcaaagaccgcttacggtggcagtgaggaagcagagtccgttcagcttgtcctcgactcacttgttggtctcctcatcgctcgagaaagacgttgcatcgtcggagtcttggttgaggtcactgaaaggggcaaggaaggcatgctccttgatattggccttctagtggtacttcttcttgagcgcttccttgttgaatcctcccttggacttgtgcttgcctgaggtgtactcctgcttgcccttgcgccgaccagagtggtggtcgcgtgggccacctcctgcttgcccttcttggggcaactagcgacaaagtggtcggtatcgccacagctgtagcatccatccttcgacccgccatgtcgtcggcttatacggttgttgtggaaccacatgaaccaactggccacaagcgccagctcctcatccctaggctctccacatgctctctgtggtggtcaac

SEQ ID NO: 163750 - DNA, 768 bp, Zea Mays
caaacaggcaaacaacagcctgtgcacgatcacaacccttggcatcaacctcaggaagggcctctgccggtacatcatcaggaaccggagcagaagggcctgcaccctggtccaagcatggcagtcgccgaagtcgcctcttcttccttttttccttgacaggtgtagttggacggctcactcagcgtggacgcttcaggcgggcgccttcgagtttccaagtctccacctcttcaccaagttcttgcccagctatgataggcattggctcggtgtgagttgagtcgaatgattcccgagccagcaagctaagcacaacatctatctctgtgtcatcagtgctagccggcatctcaaaatgagtttgcttctcatcctctggaagactccgaagtggggcaatgaaagcctcaatgtcctcagaagagggtcgcactctaagacccaggctactgtcacgagcaggagggttggacacaaactcagagaatggcctaagtggtggcaggttccatgcagaataggccccaggagcaccagcatttgaaactctacccctcaggatcatatccagtcggctcatcagatctttagtggggatttttctgttcgtgactcgggtagaatcgttgacaccgctgtacaaataagcagggtatgccctgtcctttaagggctgaatgttcttgaaaatgaagtcagcaaccatagcttcagtagtcagacctctatccttcagcaagcagacctcgacaagcagtactttgg

SEQ ID NO: 163751 - DNA, 335 bp, Zea Mays
ctcagaatcgggtggttgatgccctttctaggcgaccccatgaagaagtattgtgccattctatgtctgtcctgcagccgacatggtgtcatgatgtcagtgagggatattggaaggatgaagcagctaaagttttgattgctaaactaactcttgatcctgatgctgctcccaattttgagtttcgagagggattacttcgctacaagggcaagatttggcttggtaataacactgggttgcatacacaagttttagcagcaatgcatagttcacctattggtggccattcaggttttccggtgacttatcacagggtgaagcagttgttcgcc

SEQ ID NO: 163752 - DNA, 993 bp, Zea Mays
cgccgccgagagactaacaattatggtataaatggattagatgtttagtaaactactaataattatatagaaaaacaacgaggtggtgtattcatacatttatttggggcgtcgcatcaaatatcggtgagcaagattctgtatgtggtgttgcttgaggagtgacgtttgtgttggtcggcatgttcttgccaacgtcaccatgttgaccctgaaaaaaatgtaatggttatatgctatttaaagaaaatgatgaatacaaaccttcaatgaaaatacaagtaataaaaaaacattaccactggggttgtaggtgttttgtttcgtttcgttatatttgtatgaaccagtggatcaatgtcagcttcatcagggcaacttcgtaatagtacacgaatatgttgttgccttaacagtaattcatgtacctatgtgtctgtcaactgcgtctcatgctgggatgctggagtagacatatccggtacagtttgagtggccggactcatacatccttctttacgtatcatttaagcaaaaaaatacatcgatttaataatggcatcataacgatatcgaaaaatgtttgtataactttttagattgacataaagaccataaaactgactaacctatcgaatggggaagaatatcatctgattttttagttggtttctgcacatcataaccatcttcattgtcctctgactcaacacggaggacctcatcaattaactcgcaaaaaacatcagatagattgtattgtttctcaacaatctgctgaagagtctgtttaataactgaacaagccttgccaacctccgtatcatgatgtgacaacttctctatgaatcccaggcggtggcgggatggaagctggttcagcttgcttgatatcaaatccctgatgagcgggagttcgatgtgaatggtgtgctgtccacatgggccaggacgcggtacatcaaaagtgtttatcctattcttatgctgttg

SEQ ID NO: 163753 - DNA, 619 bp, Zea Mays
ctcctctcctgccctcgcttggtgagcagccccttctccctctgtcttctctctctctctatttctctaggcagtgcaccccttatttccaccctttgtgcccaattcaaaatcatgtgaattccagtgaatccatgtggtgcaatgtgttcctatgtggccattgagtatccttgcaggttcctagctccttcgggaaggttttcccaccccaaatagtcttttcaccgaaaccctagaaccccgcacgtcacgtgctcggtgaaatgcccaaaccagccaaaaatgctccaattgaacccagatttttcaggcaccttcacaacatctccagtaacatattcgcaaaatttcacgcccatccgatattccaggctttaatttcatcaaattccccgtttcgagcgatcgtttccgagccgagtgcccaaatctctttttcttcgcctaaattcaaaccaagcacacacttcactcatattcacccatataaacctatttgtgaagtatcggctcaattccacgtcatttcgtgcctcaattcgaattccaaacctcctatggcactttttatcgttcaaacgctgttttcacgtcgtttgacctctcgttcgtctca

SEQ ID NO: 163754 - DNA, 714 bp, Zea Mays
gtgagtggcatggaaaggtgttgaatagttggcaatatcttccacttcgagctgacatatgggcccaagctaagggaagagtgcaactcacttaacagattattagctagtattctctttctctgtcaatggggatgtgggtgatggagatggaatgaagctagatgccaagaaatagaactacatagatatatagggactatgtagtacgtacgtagtatagtgtgggtggtgagctagcttagagcgatcgagatagtagtaggcgatgcatcccaagcgatgatcgatcgagttccagacaaaagaaagcatccaatcaaacttcttctcatgcatggatcggaagaaagaacaagcaaagaaagatgccttgtttcttgagctgcccctgcctgcatctgcatccgactccgacgaccataatgcaagcccgtaattaattaagctgcgctgggaagagctttggaggaaggcggagatgacaaactgacagggacacggattgactcactgatggatggatggatggatgggattggacggcagctggctgccttggcccacttccactgcaaacgcgacgggtgcaggctttatagtccatctatccagctagtacgtagctgcaccgcattcatgcatgcatgtttcctttgctagctttggttccaaaccacaaactggaaatagtacgtaccgcgcgcgccacca

SEQ ID NO: 163755 - DNA, 862 bp, Zea Mays
gccgccgtccttcgtggttgcgccacaccgtgaccttttcaccatgtagctataaccgtggcaagcaaggagttactgcccttgaaccgttgtaccgacaggcgccacgatgaactcgtccaatggaatatctcaccaccgtcgtgatcgcctttgtctcaaattggcgaagcacgtagccggcacctttaaattgagcactacactcgctccgcctctctgttacacgctcataccaccctcagttagtctctctcatgcattgtagcccctagtcgctggattgccccgaaatcgggtcactcacgccgccatgagacaccctgccgtgaccagccgttcccaggtccgttcatacctctctatgccatgttttagcattcttgaatgttcacgaagctcatcggctcaaccaattgaacactacggcgacagggcatcgagaacatcacctcgccgccacggaacacttctgagagtgcactcacgtcgacatactctccccgtccgcttcatccaaattcacgtgtgtacccgacctctggtgagtcagtgaaactcgccctagcttcaatttaaacgctaccacattttgttgttggagcacgcttaccggagctctagcgtcgtcgtggccatgaacaagcaccaattaggatcaggcaagtccaattgggtgagggcatatgctcgggtagacttgtccacgatgtccgactgattgatacctcaagtaagggtcaccgtcgctgggaaaccacgaccttggccaagtgctcaactcagtaccgtcggggaccttgagccgtgaagaaacaaaatacaggggcctttgtgcaactgtcagcgagatatgtgaata

SEQ ID NO: 163756 - DNA, 539 bp, Zea Mays
actgggaatgagttctttcactgtttcttgtgtcgctgacaggttgcaaataaaccctccggttttctattcctttacccgatacgtcctcgacggcgatccgcgctgggagccgagctccggcgagttagaccggccggagggggccaagaccagcgcctagactaagactaaaccaaatccatgaccagggagtatttcccccaacataattgcactaatgatcaagggttttgctctggccacggtgaccgtgagcagtgcggctagatcatcgtattcccggcgattaacgaggttctaacctaattggatgggtcagcgatcatccagagcaagtgagaatgccaaaacaagaacgcagatggcgagaagggacctgatttgggctggccacaacgaggtgttcttcgtggtggcggagacttgatttgggggaagatggaaattccagagctcgggtgaacgattacgggtgggagtgggtgctaaggcttcgcgatgacctagcgcagctgcccgggggctcaatttataga

SEQ ID NO: 163757 - DNA, 506 bp, Zea Mays
cctggacctgggagcgcttgtcgaggtcggggaccatgcggaagcggcggcggcggttcttgacgagcgtgccgacggcctcccgccaccggcgctgcgcgtcctcggacgggttcttggccggcacctcgaaccgcttgaggaactccatcgacttgttccgaaggtacgccatggtgatgttagatgagtaatggctggctggaactggaagctggatcttgtaagcgaaaccaacaacggatcactgcgcttgcgatcacgtctgcatctctctggtttgcttggcgctgccataggtggatggaggggcaggcaatggtcgcggatgggaggagagcagatcgagcccgcggagtccgggttgcaggggagtgagagggagagggaggcagccttgacgaaatcacaaacctaacagcctctgattcccaggacgctggatctccgtacgtttcacaccacgcgtgtttcatcccatgcatctcgcccgactgaaacgattt

SEQ ID NO: 163758 - DNA, 459 bp, Zea Mays
gttgttgtggcgttcttggagcctggtttggtggagggtctcggaaggctggcgcggccacggaacgctgaccgcctcaacaaaaaacaggcaaaacaacgactggaggggttttaaattgggcggaagccgcacgcatcggcgtgatgctgcaggtgtgggtttattttgctcaggggttgatcgaattggcgcttatttgcaacgggcacaccagcacgttgcacggtgcgggttaggttggtgacgtgacgtgcgaaaacttttaacgtggcacacattcgaaattatttaatggtcatgcgagaattttcaatcataaaggcgagattcactgaacatttgacatttttagatcttaaattggaaccaagcatatacacgacactttgttgggagtaggatatcatatacccaaggatgacatgatcgaacggtagaatcacgattttattagtt

SEQ ID NO: 163759 - DNA, 798 bp, Zea Mays
gggacaacaggagggagtttgacaactccacgtcccgttccttccactcccacgacactcagctgaggatgttgtgcccctatacctcttcttagaacggcagggctgaacacatgattcgcaccgcgaacaacgtcatgcgttccttgttgttctaggcctcccttcccgcccgctactaggtcaagaggctggccactgctacatatttgctcaaccgccaccccaccaaggcggttcctcatccctactttactctctttggcacctctccctcctacgatcacattcgtgtatttgggtgcgcatgcaatcctaacctttttgccactgcccctcacaagcttgtgtcccgttccactcactgtgttttccttggtactcccctgatcgcaaggggtaccgatgcctagacctccactcacagagctcgtctctcgtcacgtcgtctttgacgagtctgacttccctttctctctcttcttacgctgcctcctcagaataccacaccctcctcgaggcggactctgttgctccctctatcgtgctatgcacgaccacgcccccctcgcgctgcctcgcgtgaccccaacgccttctgcgccaccatgcgcggccctgtcctctcccgtgctgccacgcgcagccctaatgtccccctcgctgccccgtgcggccccgccatcctccactgacgcgacttcttcgtcgcgcttcgtgaaacctgtccacgtctaccagcgacgtggtcgggctgctgccttggctccctcccgcacggagacactagtgtatcac

SEQ ID NO: 163760 - DNA, 1017 bp, Zea Mays
tgctggtgttgtttctggtcaggtggcatctgatcattcgcctggagggcctgctcgtattgtgaagttccttcgtcgctccagggagccctatttaataagtcaaccttccagttaggtaatctgtcagcaatcttatccaccaggggccagagttgttggttggataatctatgaagggatagaggaaggcccagatatttgcaggggaaggaggcaatatcacaaggtaacatatgctggacgtccaagatagtctcctcagagcaccttatagggtaaatattggatttatgagtattgttatgaagcccagaggcatctccaaagagttcaagaatatccagagtaatggagatatccgactgaatggggtgcaggaacaagactacatcatctgcataaattgaaattctgtgaagatttttccccaaataaagttgttgaagtaaaccagcctcctcagccctggagaaaaggacccctagaacatcctgcttcgacgaggagcagccaaccctaaggatgtcactttcctccgactgggctttggaattgggagaatttcagatggccttttactgattttgttgaagaagtccacccttcttgcttcgtcttgtgcctggtcacttagggacatatcatctgaagcaaggaccataggtccaagaccaggttcaggcagggccagcattggtggctcagcacctggaactaaattggaaaccagagcatccaccatccaagttgtcgagttcctttggttgtcaggcatctgtcctgtcattgccttcctacgtgagtagacctttagattgtgtgaaacaggaggtgggacgtcgcaaattcctgtctcaggctactcagaagtaggctgaggcgagacaggcacatgcagggtcctctcaagccatccaacttccaaatggggcgagacaggcactaggggcgtcgtctctggcgacccaggtgtatgctggggcgagacgtgtgtcagctgggccaactcaggcg

SEQ ID NO: 163761 - DNA, 650 bp, Zea Mays
gtttatactggttcaggcaggtgctctacatccaatgtagtactgatcttagtatttctcttggtcgtgtgttacaaagggcgcaagtgagaatgagagggggagggaaaggagaactggtacagaatgctcctagctctcttgccagcctttgtaactagtcacccccttttatagttcaaggggagctccctttacagagagatggttcatttgaagtagagcgagatctgctatctacgagagttttctataacgtagctcttctaacgtcgttttttgacacgcgcataagtgcatgactagtatggtgggttgctctgccatgtcctgttggtgggctactatagagactctggtgcttagagactggtgttgaggctcctccgtagtggaactcggctagtcccacgtcatagagttggtggactttaagggtcagacatgatgatgcctcgtcccgttgatggagactctccatcaatcccccaatgtgttgtggtgtcagttaaggcggtatttgggggtgacgtgcctcatcgtggctggcgtgggtcaaccatgtttgcctcgttttcatgctaagcaggtaaaagccatgcgcctgccagaagcgtgacgggggtcgtggagctagggtccacatatgc

SEQ ID NO: 163762 - DNA, 818 bp, Zea Mays
gtggggcaggtgacacacccgacagcctggttgggcacactaggttggaccagtttgcaggggtggtcggcctgggcttcctttaactattgacatggaagaacaagcatcaggaaacaaaaatgcaattataactgcagtcgaaacgaaaccttcctgcctcctctgttgcccataacatcgatggtctaatcttatactatatcactcacaacacccacgtcttcaaatttggaggcataatcttatcaccggtctagatgactagtagattgacagttgagaagagagacactttagctacaacctcaatctaattatatcgcaactttgaatagtccaattttctcctgtcccaatagcagaaacgaataacacagaattcagaagacaaaatccccatccgaggacctccaacccaggtgttatgaacaccaaatttgaattgaaccaccaacaccccgatagcagaaaacaggagcacaaaatctagaggacgaaatccatatcttacaagctccacatcccagtcattcgaatgcaaaatttgaactggaccttcgcaaccatcatccataaaatagaatccaacaccacaaagccgagtagagaaaaccctatcctagaagctccaaatcccaatcacccaaatgacatatttgaaatggaccttcaacaccaacatccggcgataagaaaaaatattgtagtcctaccgacacaatcaatccaaaaacctcccctaaaacgcaagcctcacatcctctaatccgaactgctcgtatcgtaagcccatcagcaaatccccaactgctagt

SEQ ID NO: 163763 - DNA, 1123 bp, Zea Mays
gtcaccacatcaaagttgaagaccaattataggagaacaactttgctaaagagtgtgagctcagttgttaagaaaaatttagagataattgagcccaaagttggactgtcaggctgatggaattctgaaattcagaacttcagtgaaaccgagctaactttggacttggatttaaacatgatccaatgcaagtttgggtatgattcccataacaaatttgtagatggtatattgctctacaaatttgttgtagagtgtggatcacgttgccatatgaattcgagagaaaactgggcttcaaactgggctgtcaggttcatttagctgaaactggccatggtacagtaactcaattggggatcagaccaccgcgacagaaaaatctcaccgccggcgacctctttgcgccaaaattcatgccgccgccgtcctgcttcgagtgcggtatggagtggataacgtcggggaggggtaactcgtacgtggcaccatctcctgagctcggccggagttactcaccggcggccgccgtgactcagtaaagtccgctgcgatggcgctcatgccgtaatcctccctcactgtaccttctaccgacgtgggcgacgtgcgcttgtgatgctatcctcggccgcgaggtgaccaccgggccggcgcggctataaatagcccatgctccgcggcgaggtatgagcatcacacacaccgtaggttgaaccgaagcagaaattcgtgctgcctctaccccctcctcccaaattggttgtgcgcagcaaaactagaaccccttatagccgtatagccccaaagccccgccctcaattccactcgtgaacgccgcgacgccattttcccctaaatcggtccgccgccccgtgaagaacagcccgtccgtggccgaaccgctctggtaaggctctgcctaaattgagtgttgtttctgcaactccataagcttgtgatgctcaccgtgacgcccgactactcaatccggccccggatgagcgggaacgtttgcccatgatcacggtttccgccgtgcacatggacaagccgttctcagggtgttcgtgccaaattgttaggtgttccgaggtccctggtagtcgttaatgcctccccg

SEQ ID NO: 163764 - DNA, 520 bp, Zea Mays
gggcggtctagattaggtggggagtgctgagtaattcgggtcgttgatctcctgcacaacagccgagattagatagttcttacccgttcgcacgattggacagatactgttgatccgcgatccttcggttcagattaggtctggtttcattaaaccgtggacgtggatctcagatccagtggcttggattgcgtaccgattcatgtaaatctagatctaatctgggccgcaagtacgtaatcgggtggccaggagcagaggataccctttcgaccctagcaaaattattaaagagcccctggggttctaagcaatcaacctgcagtcctctgcgcagtgcggcgtgtcttaggatcttttgcgccagcacccctgcgctttctggaatttgaggcccaatccagagagcattgaaaatcagaaattaatttttagtgcataaataaatgttataacttgtttaatctgtagaaaattcatatgaacttcaatttggtccattccagttcctaaattttca

SEQ ID NO: 163765 - DNA, 529 bp, Zea Mays
cggggaaacttcttcagctgctactccaaaggaaccaattccttctacacagaaagctgaggaaccggccaccttgccgaaggcacccttagccaagttagctgagccgaagactgataaagttgaggagccaagaatcgagggaacaaaaacattagaagttttaagcccttcggcagaagtgacaatgttgaaggcataaaaaggtcttgcggcgacccccaagagaaaaaggatggccagtgtactagatgtgctggagacggtagaggcttcaagctctactccagggaaaattgccaaggcttcgaaagtgccaattgaaatcgaaacaaaactgaccgaagccaaagctacaatgagccaggctagcgccgaagctaggccttcagagcctgccacggagaaaccctcgaaaattggagaaaaggcagcggaggaagaagctatagaacagattttgcctgaaaaagctgccgctcctactcctgaagcaccttccgaagaccttggttatattattcaacat

SEQ ID NO: 163766 - DNA, 858 bp, Zea Mays
gtcttttgcaggtctcaacctcgccaggctttttggctgtctcggccctggcgattctatctgcttactgtgttcacgaacttggtggtttctggctgtgctctgtttcgtcttaacagatacacttttgccctcccagttattgggtttgggttccttcccatcgacgaacttaacccctatgatgaatagtcgcaatactattaattattctgactggtctgttttaagttttaatgtccgaggtattaacgccgtggttaaggggaatggtattcattgtgtgattagggaatccaattgcgatatcatctgcttgcaggagacgaagaaggaatcttttgttagggcagacctaagaaggttctgccccaattcttttgatgagtttgcttttgtcccttcgataggaaactcgggggggttcattactgtttggaatagttcgaagctggatggcagtgttatcttccaaaacgagtatgctctttcggttgaattttctgctatttcgtcggaggaatcttggattatcaccaacgtttatgcgccctgttccccaactgggaagattgaattccttcactggttttccaatattaatatgccctcggaaaagcgctggttgattgttggagactttaaccttacgcgtaggcctgaaaatagaaataccgctgggggagaaatcaacctgatgctgagttttaacgaggcaatcagccagctcgacctgttggaaatccctctccatggcctctcctttacttggtcgaacaaacaaagggagccccttcttcagagactcgattggtttttcatgtcgcaagaatggtcggtctgctaccctgatactct

SEQ ID NO: 163767 - DNA, 315 bp, Zea Mays
gggttatggggcacctgggtgcgttatacgcgagctccggcgggcagaccgccgtgtggcttgtgcgccgccgtgcgcgaattggggacttggggaagacggcggctgggatcgtgtgggccgtagatctcaggatctgcgatcctggacacgcaccaatcgaatccttatggttctggtcggaaccctcgatctcggatccaacggctgtagacacgtaccggtttgtttcactctagatctaatcccatccgttgaaagtagatctaacggctcagattcaccgataccccttcgtcgtgcgcttctttcaaa

SEQ ID NO: 163768 - DNA, 670 bp, Zea Mays
tttttccaccataccgttgctaaaaagttggaatatagagaattcaaacaatagatcaccttttaaaccacaaatgacgtttctatgattttgagggcactatattcgcacgagagggtattagagtgcaactagtggatgaagacgttattgggctagcaaatgaccactcaagtaaaacaccacacatcaatttgccacatcgtttctcaaaataaaataaagaccatggaaaattttgccaaactgtgtgggagaactgtccaaacataagttaaggttgtaaggcaccttttttccaccatacagttgctaaaactgacgtttccttttctcaaaatataaagaattcaattcaatagatcaccttttaaaccacaactgacgtttccttgtgtcaagggcattgcattggcacgagagggtattagagtacaactagtggatgaagatgtcattgggctacctactgaccttttgtgataccaggtttcctataatcccctctactcaaggcatacctagtcgtgtttatgttcactcaagaaaaacaaaacacatcaatatgccacatcgttcctcaaaataaaataatgaccatggaaaatttagccaaattacgtgagtgaactgtccaaacataggttaaggttgtaaggcaccttttttc

SEQ ID NO: 163769 - DNA, 1037 bp, Zea Mays
gcatttttcagaccaaatgtcatgaccacccattcaaataaaccaatgaagcctggacatataaaggccgttttagacgcatcttcttcggccatgaaaatctgattatatccggcattaccatcaagaaagctaataattctattccctgatgcattattgattaatgtgtcggctatgggcatgggatactcatctttaggagttgctctatttaaattgcgaaaatcaatgcataccctaagcttacctgactccttctccaccggcacaatattggagacccattctgcgtatctacaaggtctaataaaatcagcttctagcagccggtggatttcatccttgattcgtgggagaagatctggacgaaatgttctagctctctgcttgaaaggtctgaaaccggacttaatgggcagccgatgctctactatctctcagcttaatcccggcatctcagtgtaattccaagcaaagcaatccgaatattcctttaatagaccgatcatctcatttctaggatcggtctctagggtcttgtttatgaaagtcggccttggagttttaccatctcctatgtcgatctcctccaaaggatcggccgatgtaaacccctatcctagtttatcggatctctgaattcctctatcatgtctcccacagaggaatcagatgatctttgtgtgatggcagactctccggtcttaggggccagatcatctgtaatattgtctttacactgtggtagatgttcggtcttaaagtccaaactgttttgtgaaagaccagaccatccggccttagacgccgaactgtttgtgactaaggactcatgaattttgtgtgtactcatcatttaaactttatttaggatttagccgattttccatcggctctagcattacaggaatgaaacccttcttatctatacttatgaactggtaatcacaaaaatctactcatgtgagacatgtagcagtctcataagtccagagtataggggcatcggccacagagatacaggtcgatacatc

SEQ ID NO: 163770 - DNA, 519 bp, Zea Mays
tgcgacactccgcgcaaaagtcgcctaagggtgcagctggaatagcacaacaagtgcgttaattgaagtcttttatttaaaagacactccacgcaaaagtcgcctaagggtgcaaccggaatagcacaacaagtgcgttaatcgaagtcttttatttaaaagacactccgcgcaaaagtcgcccacgggtgcagccggatcagcacaggcgtgcgaacacggccaacaggccacatcaccatacaaattacagttacatacactcggtgagggcatcatatattacatcggctgaactttcgggatgatacccatctctctgtaattgaacaacattatcctcaattcctcaccctcgaaaaggtttcgtagatccccttcacctatgcttgccccaatcggcgaggacaacaattctcgtttaccaatccggtctacttgaagacggccacactccatccccatacgacggcgcctaccacttcgcaaaaactcacccacactatgtttcgacaccac

SEQ ID NO: 163771 - DNA, 282 bp, Zea Mays
gatgcatcctggggtgtattatctttccttgccacatggtgcccttagacctgcccatgtggtggggtcgggtgccgttctctgtgtggccaggagacgtcgtacagttcatcgaaagggagaaaatctacagaactaatggagcaataaaaccgacaagaagccaataacattatgcacaacacagttcatcgaagaaatgccaaaaactccacatagagcactgacagcccaacgacaacacaatacttgcttaacccatgtcactatacttcatccaac

SEQ ID NO: 163772 - DNA, 667 bp, Zea Mays
ttgtgtaccctgactatcgctacccgccgcgggggcaaaaaagaaagggtgcaacttctgggaaggctgctgcttcagctactccaagcgagcccacaccgaagaggaaaaagttgaaggtccttactcaccgaccgcgctacattgaaccggccatagtgcctgaatttggcggtgagacttcttcagctattgaagccaaaggacctgctcttacgcagaggattgaagagccggctgcaatgccgaagactgacaaaattgaagaaccgagaatcgaagggatgaaaacattagaagttctaagcccttcggcaggagtggaggtgctgaagacacaaaaagatctagcagcgacccccaagataaaaaggatggttagtgtactagatgtgctggagacaataaaagcttcaagctctactccagggaaaattgctaaggcttcaaaagcgcagattgaaactgagacaaagctgaccgaagccgaagctacaatgagccgggctgacgccgaagctgggctttcagagcccgccaaggagaaatcctcggaaattggagaaaaggcagcggaggaagaagctatagaacaaattttgcctgaaaaagctgccgctcctactcccgaagcgccttttgaagtccttgattatattattcgaca

SEQ ID NO: 163773 - DNA, 339 bp, Zea Mays
agctagagtagtggaggtggtggacacaatgggtgtgtggatgactcgtgagcaacatgagttggtgaagtgtgaggtggagtggaaactaggccggaaggagtggggcgagcagtgaggagcgaggctgggacacgaggcgatgaacatggtaggaaatctgatcaaaagaaatccgtagctgacctccctgttcagcctgatctattgctgctgctgctgcaagtgctgcatgggcggctctgtccagatgcctcttctttctgccctcttgctgctcaagatagacagtcttgcccttgacctatctgaaggggcaaggagggtcctcgtcatctc

SEQ ID NO: 163774 - DNA, 433 bp, Zea Mays
cggcagtgtggacgcgccataaccgtccgatccagaatctaggaaccgaattagatcaaagccccacgaaccagtatgtcatgaggaccgttgattccaggatctatggcccgaaagtcgttctacctatgatccaagtcgagtcgcacgatcccgattcagtggcctggattttattaaactggatctaatcctaatcgctcattcctcatccgacgcacctgattatatcacctgaattgttacctgatcccctaatctgagccctttgttgatgataccactgtttgcacccattctacctatccgagagaagacaacggccagggacggtgacgcagttagcccgcatggcggcgcatcgacactgtgcaccgcattccaacccccagtgccaaaattgctccacaaatatgcttttcctgatgttgaa

SEQ ID NO: 163775 - DNA, 1398 bp, Zea Mays
gaaacccttgtaactttcaaattatggggtttgtgccctaggtcaccacatcaaaattgtagcccaattataggtgaacaactttgctaaaaagtgtgagctcagttgttaagagaaatttggagaaaaacccaatcaaagatggactgttagactagttgaggtctgaaattcagcatgacagtgttttaagatgaactttgagctcgattttgaaggggatccaatgactttttgtgagtacacattatagaaaagatatagatggattatagctctacacctttgctgcagaaagttgacatagattccacataaaatcgggagaaaatgaagctccaatatgctctgtcagtcgctctgaataagtggttcccatggtacagtgcccaccagataaggtcgccagcaaacccaccgccggtggctttccgccgtgattcacgtcgccggcttcacgattcgcgctcgggtatgtggataacttcgcggcgtcaaaagatcgtcaccgcccatgacctggacaccacttcgactagccgtagtccatctcccctggatcaccgcccgcggtaaagtgctcaccgtcgaccgccgcctctcgaccatgcgccgcgtggctcaacccttccaccgcgtcgctgtaacttgctactgctatcaaatcaacgccggtgaggttgccacggcgtaggacactaattcacgtgcgccagtgccttcttcctcatctccgaccgccgcgtgtctcgtccaaattcgcggccaccgcccgtcctctctataaattgagcccgtgactagctccgtgaggtcgtcaggtaactagccaccgctaatcggccacaatcatccacccatgtgctcgaattcggagtttcccccaaatccgatttccgccaccgtgaaaccaagctcaccgtcgccagccatactccggttagcccctcccctctgctcccttgtttaagcattcttatacgtctacgatgcttgccgagccattgaattgaactaagagccctctggtcgccgggaacacgaccgtatagtcgccatactcacggccaccgtggccagagctccatagttgatcaatagcgcaattatgttaggggaaatgatcatggtgaccccgatttcatgtccgccgctcggagaacccagccatagccccaatcggccggtccagggcctcgccggagtctctctgcgcgcgtcgccgtcgtggaccgcccactgcgaagaaatagaacctcaagggcctctgtgcaaagcgtcagtgacacaggaaaacagtagaaagaccggattcaagttaataagaaccccgagggtatttttgcaaagccgccagcgcgcgcgggcgcctttctgccttagctgggccgcctgggc

SEQ ID NO: 163776 - DNA, 841 bp, Zea Mays
ctccaaaccattgttttgagctgaaaggatgtgtggatggacctccaatcggaagtgcaaaaactgtctctgacagtctaggctataaagcaaatgctacacccagcagcgctgcactaggcaaatcaaccggtacattttgaccagcttttgggcagaatcagaagcttttcttaactaccgcctcctttggtagacacattatcagcctaagcaaagcttttgttggatgagtttattaatctgtcgacatttttgcatctttacatcagtggttcattgtattttcagggagaaggaccggtgtggaaaaggacgccgggcggtctggtaggctgggctacctgcaaagatcatgcatttgctttggttgctccatgcatccaccaatgattgcctcccgctggaatgaacatccggggcaggagaggaaagcatagaaaggaagagcatactggccttcttcctaagcaaaataaaggcaaagaagggtggatcactcgacctttccgacaacggtggaagagagctaggattacaggtgagaccaggtgaggcacatgagtaacatcgacgacgacgggacctgcgatgtggcacagtaggagacaacgacggagagtgtggacgacggtgaggaggaggggaccgtgacgtggacaccagggtgatgcaggcgacacgaacagcgtcgctgattcccttccccatctcccacctgcactgacacacccacgccctgatttgggatggatgtatggatctggaatcaagccgtgaagatatttgaatgttcgtttgaattctaagacaaggattctaagacaacaagacacttttc

SEQ ID NO: 163777 - DNA, 2164 bp, Zea Mays
gccatgtacaccccatctttgcagtagccgaccatggagacaaggttcttgtgatggatccgtgtcaagatctgtgcctggacttggagaggtggccggccggcccgccagagaggtcatgcatgcatggcgactagtcaattaatttccatgcgtgcgtgtgattgtgaaagagacggctataccgtccgtacctccgtgaggaactccttggcaccctgattggacgactgagacctcatcttcaccgccacctgagtgccatcctccaagaagccctcgtagacgtatccaaagccgccccggccaatgacacgcttgaagctgtcggtgatcatctctaggtcctcgtatgtgaaccggcggttctcaagccgcagcgagctaagtctgtgttcgtcggccgccattgaagcaaggctcgtcggagtcttgtcccggggcttcacagagacgtccgctagccctgaatgcaccggcggaccagtggttctcgctcgttcaggatggccgatggctggctagctaactagctagagagcgcggtcagtcgatgctttactactcacctcgcgtctttcgccgccgcagaagacaacacagcagtactgccaacgccaccacgatcagagccataggaacagcgacgtagtagatgactagcttgctctttccttgcggcgccgtctgacatgaatccccggcgttggtgcaaaggtctggattatcggcatagctacacgtacagagatgagagacagatcgatactgtcgtcgtcaggctggaaattaaaggcggtatcatatcatatcatgcatatatgtctgctagaatgaagaacaaaattatagaggataaagataacggacattaggtttaaggagccgtcttggattcttttgagaagactagagggtattggtccgctgagctgattccccgtcaaatctctggaaggtgtaacatgcattgatgtgagccgacgtgtgatgctgatgcatgcatattggttcatgaaatcgcaagatgcagaataatttgccgagttaatcagcagactttacagagttgtcagtgacggcagttgtgacagggagctagggattgagcccgtcaggttgttgtgtgacaaatccctgcaaatcaaaggacatgtcttatagctacttgagatcatgcactatatatatgcatgactaggaggttgcaataaaatttagctgctggcagatgaagaactccgaccccacacgtacgtacaaggattggacagccttgagatttgcgaaagcagatgatatgtcaccggtcagaccactgaaggacatgtttctgcaaaaaaaatatatatatactatataggattattatactggacgctacgctcttacgtacgtacgtagtacggagtaatgaccacttacagggcagtaatttttggaggatcagaaatggcatagctgcacgtcagtccatcccacctaaaagtcccagcaacgcacgggtctcccatccagttcttcttcacctgatacttcgccttgatagccttcatagcagagactgttgatattgcgcattatactcggttgagtttcagttataggtgtacatttgggttgtgcttcatagactggtctaaaacacacaattttagacatgagctaggtctggcacggcccaatctcgtgggccatgactggaccttaatttaagccaacggactggcctagcacgtcccatttaggtaagacccattaaaaccaactaaacatagagtctgtatatgaaaaggaagcacactaaacatagagtccgtatataagaaggtttttaatgagacacccacaaccacaaaacaacccgactttctttggacatatatgttttgcacctctgtttatatattattgttgtatggctatgtattgttgttgtatatatatgggcaggactaggacactaagatatcatgggttatttgcgccggtccggcacacataaatatttgtgggtcgtgccatagttcgatggctcaacacgacataacatataattaaggttatgctttagcggaccatgctttagtagacctgtaccgtgccgggccagctcagcccatatatacatgtaagttcatctatagtatggaatggactctca

SEQ ID NO: 163778 - DNA, 720 bp, Zea Mays
tgcacgagaggggctagcagggggtgggttggatgcgtaacaaggaggcggagtagggggtatcttcaatttatagatcccggttgagcttatcatgaattttggattgggatcaagttcaccgtggccgggatatttttacagtggtctgctcaccgtggcgcgcgagaggggattggttcagggatggcaaccgattgcttgccacgaccacgactgtatggggaagtaggcgactacgtgcctttcactgcgatcacgtcgagcaccagcggcgatatttcactgaccacgtggcaagtgggcacgtcggtgttccagctcaggcctaagttctcctcacccacgatcttttcacccgccacggttatccacttcacataggcatgaattgcggcgcgaagatcatcggcggcgatagattcactgaatcagtgatcttcttcaggtcactgtaccatcgcgattacattcagccgttctgacagagcaagttcgggagcgatttactccaaaaatcgtacaacactaggccaagcttggtataacaaatttgttcactaatgttagggcttcaactttgccatagtgaccctagtcttaactccattgaattgaccacaaactgtctccaaagttgaccaaatgtcactggacttcaattttcagaactaaagttgtctgacatcccgacttctagggcattttatcccaatttcc

SEQ ID NO: 163779 - DNA, 727 bp, Zea Mays
ggccgggagtcgccgtcgccgtcgccgtcgcctccacttgtcttctccatcccgtcagatttacgagaccccatgcaccgatcccccttttttccacaattccagtgttccactgcactcaatccaagaagacgcgattcagatctgccatttacgcgcacatatgcaaagggctgtcggttaatcactatacaataaaaatcagcgagcgaactggatgtaatgccgtctcgtcttcacggccagagggcagtgcggttgatgagacagcgacggcggcgacggcgatacgcggcaatatctgtaaccggttggtggatagggcgacatgggtcacctgcgctccatgagcaccgctcgtttgcgagtaaaaaaaaaaatcctcgttgctgcatgccttgttcacaataatctgcaggttttaggtggcgtttggttcctcatgcattttgagaagttgaatactgcacagagtgcattatgaaccaagactcacggacggtgcatcttatgcaaataatctgagctccaccggttgccgtagtcgtggtgccccgaatccattcaagatattactggtgaactccgatgtgagcgatagagccgcccgtcagtcgtcctcgccgacgatcgtcttcagatcttctttgagaaaatttcttcaatatcatctaaaattatatcaatcccttcaatgtaattttcttttaatgctattaagtttaaa

SEQ ID NO: 163780 - DNA, 355 bp, Zea Mays
ctgattcctatgatttacaaggacatgtaaattttcccaatgtttaaaaacatgtatcttttgcaatgattgtcaaactaggacatggtttttgaggcgctgcggcgtcctgtggcgctgggggtacgcctggacgccttataggcgatgcctaggcgatatggcatagctaaaaccctgtggtaccccacggtgcctgtagtacacctcaacaccatgaactaggaaatgataccatgagtgcattaaagataggtggaactgaagtattcaaccataaatttcaccaaatcagtaccaaattttctcttatctctctattgtttattttggagtcggacgacagtgagtttgg

SEQ ID NO: 163781 - DNA, 284 bp, Zea Mays
gtcgaacacgaggataagctcctgcagccagtggttggttggttggtttcctcgcccgtgccgtgcgcagctgaagccgatggaatgaggctcgccgcagccaagcctgccgccatcaccgtcgcccagcggcagccgatccccatccccacatgcagctccagccgcaatcaggccaagaagagccgccgtagcgcatggagggtcgcagtggcaagccgcgacgccgccgacggcgacgcagaggcgggcgcgggccagggccagggccaggcaccgacggg

SEQ ID NO: 163782 - DNA, 674 bp, Zea Mays
gggctagaggggcttcttctttctgctcagtctggcatccttggcttctggtcttcttgcggattttctttgcgggggcgagcttctttagcttcttgtcgtaatccatcttcagggttcggtaggcctcacaggtgttggtttcctcgccttccgctatctcgagactctcttgaagggacgccttttcccttgtaagttccctgacttgttgctccaggctttccacccgggagtttaggtgagtgcagtgggaggcaaggtcatcatattggttatcgagagtgtggaggtatccagccatgtagacgatggtggggtcatcctcggtagggtctctccctgacagggcctgaagtcttttcctccaggcgggggtatttttgttgctgggtggaaagtagcgaagggaggtttcaaagactactctgctgtagttctggcatagctatcggagggcttttcgggcaacattttggcaagtatctgggaagcggtgtcaagtgaaagtgacttggatagacgggtggttcgggtagtttcggctctctcccaggtagactgccatagagcacttctccattccattctcgagatattccttccagacatattctggcttcttgcggatccccatgcgaagcacacaacttcgcaacagatgtgggaacccc

SEQ ID NO: 163783 - DNA, 600 bp, Zea Mays
gttccagctgccattggccgcgacgaagctcctccgatgcgcgtgggggtagcaggactcccagcggccgaagaggactcgagttcatctgaggcggcggtcttctctcgctccctccttctgccatagcgacgacggaaatccttcctcacacggcctggcgtggtggtggtctcgacgtggcttaggctgcccgcagcggtagccgcgcggcgcccccttcccttatatggcggccacagggacgtccctatgcgcgtgttagcagaatttgcaggtaaaggaagaccagtaggaagataggaggagaaggagaagctgtcgtatagaactggagagttggtacagaatgagtttgttatgctttttctgatttctctcctttaccagctactcccctataacctccagcgttaccccaacttagagcacacgttcacacattccggccacattcggcccaccagacgcacagcgtcttacacacgccaatccggcccaaacaccttcacgcttgccttcctcgctcttgttccccttctagtttccacatcagcaggaacccgagctcttttatctccttgctttggtgcatccatc

SEQ ID NO: 163784 - DNA, 357 bp, Zea Mays
actgatataaacaactgcaatgctcctgcaagatgatcacaaacagttgagacacattccatcaaggtagtatgcaccaagagaagttgatgcattttttagtgctaatataaaattagcacaaaacgatgcctaataacaccggaaaaccctgttacgatacaatttacacatgaaacaaaccaccaccacccgaagtgaaaatatgctaatcagagaaatgagaccatcttagttcatgacaacggactacaacagcagcacagctgcacagggaagcaagccagtcgtgccttgctggatgctggtgctggactgctggctgtctcctacgatcctgcctggcttggtcattgc

SEQ ID NO: 163785 - DNA, 1226 bp, Zea Mays
gcgcaatagtgaatcacaagagctggacgacaaggaagatggcacgacatatcggcaccagggacgagcggtttgcttcatgcgagccagagttagcaagcttgggcgtggatcttagcggcgtggtcaaacgcgtaagacgacgacgagcttgagcaaagaaagcgaggaagacgaaaaaatgaaaactggtggcgcaacctcaaccctaaccaggcaacaacttttatagaaaaactaaagggacccaatcaatcaaaggttggaaagatgcccccccgaaaccaccacttgataatccagggcagcattcataccattctctagtcttcgggattgactcgtcagttcgagcctttgcccttgagggatactattggggagaaggccaaacatggccttgatcattggcaaacatgacaccccttaatcgtttaccggactttgatgccatcttcaagcatgcatgactcatcatgccgcaaagacgctactgaggacttcgctccttggcgaattggtccgaggaagaccatgcctactcaggactccgtcatctacctcaagcatgcaagacccatcgaaggccgtgaagacgctaccaagtcccgaggaagaccttgccttctcgagacttcatcatccaccatgggcttgcaaagcctattgaaggccacgaagatgccactctaagagttggccggccctaagggcctgcgaggagatttgaggactttgaccccttcgctcaaagtgcacgtgtcgttccactgaatgacctaagagacccctagagtcctccggcttgtcaagggtttcatcgaggccttcgagggagcagggcccccacatccagggctccccgttagttgagggaacgcgcacaccaatcgtgctagtgcgggtacacaattgagtgcttgtaatatgagttataaacaccctaaagagtaaagacaatgttgtacagaatattctagggatgtagcaagtagccaagggtaggttcgtacttagggtgaccccttggttaccctataaaataccttaaaaaggacgttcgtgaactactattacgcattgtcatctcacttgtttggacccccacagtgaaaggtcccaacatcatccatccttcttctcacttcaaaatcctctcgaaaccagaacgagataccgtatgtcgtgattttcaagttcttaaccaaacagatctcataatttca

SEQ ID NO: 163786 - DNA, 415 bp, Zea Mays
cttgacttgaaaaatatgctctgaatcatctatggtaatcaacatgtcatccatgtgtaatagaagtatagtgtggcctttgggagatgtatgaataaataatgctcgatcatgattactaggagaaaaactagcagccttgattacaaaaactgaatctctcagattaggcacgagggacctgtttcagaccatattaggcacgacgaagacgacaaacatgccccgagggagcatcaacaccaagaggtggatgcacataaacttcttcacgtaaatcaacatgaagaaaagcatttttgatgtccatctgagaaatagtccaagaggatgaggctgcaacagttatcaaagtaagaacaatagtcatatgggcaactggagtctcatcataatcaagccccttggtctgttg

SEQ ID NO: 163787 - DNA, 652 bp, Zea Mays
ggttagagtcttgcacttttaatgtgggattaaccctattttacttactagcattattattgaaaacaatcctttcattggtaggacgtgaaactttggtgaagacagtcctttcagcgcacctatctaccatgtcactgttttctcaactaaaaatggttaatcaagaaaatcgatcaatattggagaagtttcttgtggaaaggcaaggagatagaaaatgttaatggtggtcgctgcttggtaagttggccaacagtatgtgcaccaaaagacttagggggactaggcatcttagaccttgagcagttcgctagggcactaaggctaagatggtattggtttaaatggaagcatagtgacaggccctgagcaaacatggatatcccttgcgacaaaagcgatagagacttatttcacacttccacgattgttactgctcgtattggcaacaaatccctcttcttgcattcaagttggttaaatggacaagccccaaaaacctagcacctcatgtctttagcaaatccacacagaaggacatcattgtttagaaagctccacagaataatgcctaggtttctcacctacatgggttcacaacacaagagttcataagaaaatatgttgccttgtgggaggcaattcaaga

SEQ ID NO: 163788 - DNA, 330 bp, Zea Mays
ctaatctgccactcgacaatgcatataatttgacatggcccactcgaccacggcattccctggtcccagccaccagccactcaccctgtcaaccacagacgtgggccacggaccagctccagcctccaggtaaccaggcctccacacgtccagcttcgttcccaaatggcaagggcgcaagggcaggcattcctcttcctccttcctaatctgctctactacaagggtttcaagcgtcgggtggtggcagcgtgagcgattagaggtacgcgccgttcagttcatcagccatcacccgtctgggactcagtgtcaggtacgcgccgcccc

SEQ ID NO: 163789 - DNA, 277 bp, Zea Mays
tatgtattggtgtggatgttgaagttattttagtttcattccagttataaccatcttttgaccatcagaatataacaggaattttagttctatgtcctttgctttagctggtagcctggtaccatgagtccgtgaggataatgagactgttggtagggtttctttttccactcttcttttaaacaataaagcaaatgtaatgtggtggagtggagtggacaaatgtgacatgctcaaatatataaaattagaatgcgcttgggcaccaaaggaaatt

SEQ ID NO: 163790 - DNA, 395 bp, Zea Mays
gaaataaccaaaggttctgaacctgcattgtgctaactcgtcaatcattcctaaaatgtgattccttttttcattcagagttcggttggataaattaagatggattgagatcttagttgttaaggtagaagcaaaagcaccaccactgaatcctgtactttaaacggtgatagcaacagttgcggtcttcgatatcttagtgtgttacttggtgatagcagcagctacgatctccaatattctagggcatgtttgcctccctcttctaaacttagagatctaaaagctttagaatgttttagctttcttttgatgtccaaatctctaatgtaaggtgggctaaaggttaaagccaactttagaccacctgatgcatataaggaagaagggtccac

SEQ ID NO: 163791 - DNA, 725 bp, Zea Mays
ggagggtggtgtgtttcttcctttcgcccgctggtggttgaagaggagtggcctcgtttgggatccggtggttttcgaagcccttcgaaagattctgcgatggatccgaagagcaagaatcctcagaacccccagtgggatcgatggggtcctaaagaaaatccgcaggggccttaatcttggaacagggcaagaaacctcagttggaaattgaagcctacactcggaaaagctgagcagcaagagggtttgttgtccccttcccccggcgaaggaactcaaacaggtaaccctatcgtttctcctttacctctgaagaaagatgtcgatcttgttcgtcctgctttctgtcagaaatgtggagttgaagggcatcatgctagaaattgctttaacgcattgtggtgtgatatctgtcgcaaggagactcatgttacatctcgttgtgttctgcctaagcaaaacaaacccaccatgcccatagttggtatggcagtagatgggttagggttttacctgtctcatttcgctaaaccattgaccaaaaaaccaaaaagggttttcatcggtctggttaaagtgtttgaggggttagtatcggcagaagatcttgaaagagattttggttttcatttcccttggggtaagatgtggaaggctactaaatgtcattctggatttctgatgcaattcccctcccaagaacgtcttgatgaaatgatcag

SEQ ID NO: 163792 - DNA, 486 bp, Zea Mays
ggcatgtgtgtgtaggagctgtgagatgcagcggtcgtttttgcgctagtgtcatgcactcgctggtggttccgtccacgtatgatctagcctgaggtggaagatgggaaataataggcatccaaggggaaataggaaatgctaatcaaatacccttgcatagatctagagctactgtgtaagccaaactataaaagtaagcacacagcctatgtaagcaataaataaagtgtggaaacctaattgagatagagatgcataaactcccatcaatgactctagtatttttactgaggcatcgagaagcacacgcttccccctcgtttttgttgaagcctctcacaatgatgccctcacaagggccaagctctcggtcaggtaactctgtggatagcctttagttcttccccacacataagtgcgcctccaagatagcctctctcagactgcttcccatcatattcactatcaagcttctgaccaaac

SEQ ID NO: 163793 - DNA, 816 bp, Zea Mays
ggaactcctaattttgataatgctttccaggactttcaggcttggttccagaaaccattatctaaggaggcaggggcagctttggaagccctattcaacattcatatgccggacactgaacacattgacaaggcactgatggggattgcaggtgaagctatagaagaaacacaggatgagatggacaatctgcaagcggaagcaaggagcaatgctgcagcacatctggtggttgtctgattccttgctagccggtgtgggtgtattttggtttcgatgttgtactgcaactcagttttagtcccttttgcaatctgctgcgctgagctactggttatgggttttattttggttgagatgttgtactgcatcttagtttcaacttcaattgcgaacagctccagatatgttgcgctgctgctagtttccagccttgttgcagactactattccaaggcaatgatgacccttattaatttaacaattgttttctcgtgtgatgctattagtctggggttcatccatgaattatgtcagattttagcatcctctcttggaatgttagggggctaaatcagcaggcacgtcacgatgcagtgcgtgaattgatctcagacaccacctaccaccttgtttgtttgcaagagactaaattatcaacaatcgatatgttcacaacagatgctctaggagggccaaaactcaacaatttcaggttcaagcctgctgaaggaaatagtgaaacccggggaggcacccttttgctatgggatagtgacgtcttagacccgtctaatgtaactgtttgggagttcc

SEQ ID NO: 163794 - DNA, 688 bp, Zea Mays
gcacgaggcaaaccaatcaggagacgcaaggatttgtttgactagagaacgggccaccacaactccacaaggcgccctacgtctccattgtggaagtcagtgagggacccatcaaggtctactcttggtcagacttgaaataacctctttccaccaatccactaagaagtcttctttccactttcagtgggaagactagcctttcttacaagaccaacgcaaacagcctacacaccctcgggtcctgctggtgacattttcccacctaagaacaaagttccaagagaaagatagcaacgaaccaaagatcttcgacttgctcaagttctcgaggatgggataactctcaaagcttcccaagctctgtattgccacaaaggcaagctcacgaagtttgggacaccccctaatcaaggtttaagctttctctattcaaacactcacaaagagagggagaggaatgcccaaggactattctggtcgttgataagagtggggaggatcaacaacatgaaatggtgagtggaagaggtatttatagccatcacgccaaaactagttgtttgagtttgagttgacaaatccgacctagccgggtattcaaaccgactagccgttggcccagaagttggtctggtcgggtttgtggttggggctaaaattttgagtggagttttacttactctct

SEQ ID NO: 163795 - DNA, 901 bp, Zea Mays
gactgagtctcctacagatcaggaagtggccgaggcaggcgtgctgcttactgaagtcggattactgaaagaaagaggtctgactgccgaagctgtggtcactgattttgttttcaagaacattcagccactgaaagatagggcctatccagcatatctgtatcaagggatggccgactcaactcgggtcaccaataagagaattccttctgctgacttggtaagccggcttgaaatgatcctcaggggtaaagtttcgaatgttggtgctccagtggcatactcggcttggaacctgcctcctcccaaagctttcaccctttttgtgtcaaatccgcctgtgactgatagcaatttgggccttagagtgcgaccttctgctgaagaagtcagtactttggtcgcttcgctcggggcaattcctgatgatgaacggcaggtttattttgaagtgcctctgaaccctagtgatgccgacataaacgatatgcttgatctgttagctgaggattcatccgatgctgctcctgatggtacgttggcagtggtgccccttccagaggttgatacaactttggatgtcccgaaacctatcagcactcgcccgaggcgccctagccgaaccagtcagcccgagccttctgctgatgagcaaaagaaaaagagaagacgcctccggcgagtatccagttttgatgaggacgccggtaccttagctcctgctgctgaagaagtgcctgcaactggtcttactgacactgatcccaatgggtgtgcccaaactgttgctgatcccaatgggggtgttgtttgcgttgccgccgtggaggatgaagaggaagaaaatgagactcccttaactcggaaaaacagtcggcagttcatcgccagcggtggaagt

SEQ ID NO: 163796 - DNA, 477 bp, Zea Mays
gccgtcgcgctcgctgctggcactcaccacgatcggagcagccagcgaccctcgcggtcggcttaccgcacaacagcaacctcgtcccaccctcggatagcccctgcgcgaaccccgaccagccactgcgaggtgggcgccatgtcctcgctcgtcaagacggacatcacgcgtctacccctgtgcatggctccccgcacgacgcgattcgcagaaccgcacgtggatgacaaccccaaaaccacattcttgtagcacgcactcgcgttcgcttgcgcgtagcccatcgtcgaagacgatgtttgtctaccctcgcatgtgtttgtctaccccccctcctctacaccctatgcaatgtcatctacgctttttttttgtgtatggatagcctcgccattgtgtcattctcaatgtcgcgtcgtcgtcctgagataagaacgtctaccccatcatcgtctacccatgtctaccctcgtc

SEQ ID NO: 163797 - DNA, 553 bp, Zea Mays
gcttctatcggaacgacaaaagaaaatattaatgaatcaacaacactcacccacaacgaaaagttcgagatatttctgccgcatcagctcctcaagttcccaagtagcctcgcgctcagactgattagtccataagaccttaacatacttaattgatctctttctcataacacgctctgaggactccaagatacgcaccggacgacactccaaagtcagatcctgctgcacagcaattggttccatttcgatctgatgatccggatcccgcaagaacttcctcaacaaagagacatgaaatactgggtgtacccctgccatggaatccggcaattgcaagcgataagccaggctgcccacccgggccaagatagtgaacggtccaatgtatctcgggctaagctttccggagacaccgaaccgaatgactcctttagtaggtgataccctgagaaggacttggacacccactacaaattccaagtcccgcctcctcacatcagcataactcttctgacggctctgagcggccaaaattttctgacgaatttcc

SEQ ID NO: 163798 - DNA, 1776 bp, Zea Mays
tctttttacacctttaaagattatcagcttatttccctaatttatttattttatttatctgaaaaatggacggcggacactatttctatgaaatccatggtttactctgtgaataccaggacctaattgtaatgattttataaagggataggattgcgagttcgttttcccagaaacgaagggtttcttagaaaaatggcaaggccgacagtggccgccagatgtgagatctatggctcgttttactctacacgggtgatgcattacggtccttggatcaaggatccgcgacctaggtttaaataagagaaggggtatatctcttattatctcgacagtagatgtgccgatgaacggtcatcatccaccctgcccataacgcaaatgacgacgacacaacgtaattacgtggcggagcactgccagagtattgcgcgacaacgcgctcccgggccccatactcgaatcccccggtgctatgcctaaggaatcgcaaggtgaacgagacgaataggtccttgccacgggtcagacgaccgacgtcacggtctacgatggtcagcggatgcgcggcggagtgtgacgatgacgagcaattgctcagccctggcctggtctcttggcttcgttggtatgcggacgcactccctgggcccctttgagtcacccatacggtcggtcgggcaacggcaaagccaatgtcgaattggccccgcagtgtcctaccctagattccgcttcctctcaccctcccgcgagctctctctctctctcgctttgttgttggtgggtcatggcgatggaacgaagaggtggaagccccggcacccggtattatagccccagggtaggtcggttggagggtccgtcgtagcgcccccagcttcgcgtggccattgctttgaggtggggaagagcagcagtgcatacggccccatgtgtcaatggaaacgtgacgccattggtcactggtccaaagggacccatgcgctagagaaagagcttggtgcgcgtacgaggtggagctagacaaacgggcccgagctgcaaacgaggggaaagggaagaaggcacgacgctatggctgacaaggggacttggtgtcggcgccagatatccgggctgagcgcaatggcgaactaggctggtcagattcggcccagccacgaggaaaggctttctttttttctttttccattttatttttcattcttttgtttcgtattttattttcttatttctttcattttcagaattcaaactaaattcaaatataagtttaaaatttcagattttaaattgtacagtaaaattctaatataaggtaaccctcactctaacatttttattattcttctatttttccttatggtttacttatattaatgtaatccacttaaaataaagtattgctccttgactcaaatttccaaattcaaattcaaataaattcgaacttcagagtttaaatgttctattcatacagtaatgggatggagttagtattatgtagagttctccggttttgtttatgttatgtctgattatgttggtacattcgtaaaataggtattgtcgaggttacaatgatgatttaattgtattgataaatatatatgtagttgtatataaagtgttgtagaaacgcctcaattatgcattgttgtagttgtgttcatgatttagaagtaatcgtgttgtgtgaagattaggtttaagatacagattattatgcgaggggtgttttagtgaatgtataagttaggtgtgattgaa

SEQ ID NO: 163799 - DNA, 439 bp, Zea Mays
cttcgatgtttgttgtttttgtgaggactcgggtctcatgggtttatttgttaggcggccgacttcgccgatctcgtcgcgtcgggtgccctgactgtggacgttgctgccgaggtcgaacgtctccaggcacagcatgcggtgctgtgcgggagaagtcggctgcggagagcaagaaccgcaggctcactacaaaaaaatgtcatgtttagtacaaaattggtcataaaaagcatcttatgacgaaaatgctgcgtcataagggtcgtcatataacaaccgtcacattatgtaccttttgacgactgttcagagtaccatcacataatgtcatcaccttttgtgatggctgcgttcgtccgtcacatattgttgctatatatgacggtgttatctgtcacattttttacagtcaacgcgtcatctaaagttgggatcg

SEQ ID NO: 163800 - DNA, 417 bp, Zea Mays
cgacgcccttggatctggatcctacggtacggatataatgaagccgagatctcgccgcagccctcggatctagatcaacggtcaccattactcgtggcgaaagggtacgccaactctaatcctgaccgtctggcccgaatccaacggccaacataaaacccccccttcctaagtcatccccaaaccccgacggtcgtgcccaccgcggcggagcgccatgaccggagcagcacccacactaatcctgtcgccatcccgcaatttacttgtgctacactgacataagaccatggcgaacacgaaggaggtgaagaataccggaaatcgggtgcgcagacaggttgttctcgcgttggggcggctcggcggtgctctatctactccagcgaggaattgctcacgcaccgcaggtcccaa

SEQ ID NO: 163801 - DNA, 747 bp, Zea Mays
cccggggtcgaaacgccgacaaggggcatgtaagggtgctgaaacaagagagcagaggacaagatcggacctgaaacgagctagccacagtgaggacctttttacgatggcggaaacccgatctgggggaagtgagcaattcgggggctcaagtgaacaattggagacacgagtgggtgtgctgggtgcttgaatacctagtggagccgagggtgtactcactttatagggcccttgagcggtgactcgtgaatttgagctcgcacggtggcggtcggagaggaagaggtgcactggcgcaagcgattggtggcatttaccgtggcaagctcaccggcgatcaccggatgggctaagatgactcacgacgacgtggttaaagcatcgaggcacgtggcacaaggttggggggctaactccggcgagcctatcgagagtgaccgtgacacgagcgggtacggcggtcggagtaaaatagcgaccagagtacatccacggggtgatatttcttacctctctgtgttatccaactgcgcagggcacgaatcaccgcggctggcatgaatccgagtgaacggctcgtcggcggcgaggttcagtggattgggacatttcagtggatagagcgcctaacaaccagagttgcaacgcctagagcttggatttctatgcaagaacatgccaatccatctataacaaacttgtagccctacatacaaactacaattctgctatagagatcttgct

SEQ ID NO: 163802 - DNA, 638 bp, Zea Mays
cgtccgcttaatttggagtctgggtgaccgtgcgctataaactgttcgccacgcgctctgtcagtcttctgttctctcccgcgctccctcgaagcttctagctgggtgccgccgacctccatcgcccggcacaaccacatccggtgatgtttgtagcgctgagtttgcgatggcatactggccgcgagcatagagctggacgagcagcagccaccgcgggagcacacgagagcaaggacgacgacgagtcagcggcgaccatgtatagatgagagcagggtcgacggcgaccatgtgcacaggtaccgttgacaacaagtatggtggtggtggggaggcccagacatcagcttcgatcttcactagcgagctctagccttgcaggatggaacaatgggagggattgccatgccgctggagattggaggctacacgaagcgagaggaagaagaggaatagacaacaaactgcttcctgtatttgggttgtattttagtttgctctgtagtggagatatttagaagtcttgtttttttaaagaaattatttttatgtacataacacacaatttgcaacttgtaaatgaatattaaaaaatagtgattacaaaaatattcgtacatgtaccataatttata

SEQ ID NO: 163803 - DNA, 1646 bp, Zea Mays
ctctattcaccatctcatgtgaacaccacatttaaaaacaaaggattaataaaagtcataccattaaattgtgcatcatgttggtttttgaatgtgtatctagttttatttaaaatctaatctcagacttgaaattcttatcatattttaatatagtaatccaaaaattcgaaatagaaaattaaaaagaaagaaagagcataatggtgtatgggccaagattgctcagcccatcacctcatcccattccgtcggccaccccctccaaaatccttttctttattcatttgccagaacctatgtcaccatatcatcagcatgacataagcatgcaaattaaccaacggttgtatcacagcctcatgtgcttccgcacgcgctagcgtctttgctcaaccgtgctgacacatgggaccccttgccagcttcctctcccttgttcacgagcacgaacagaacgagctgggtcatcttctccaggactcgcgtctgttgcccagagccgtcatgcgcatcagattatctctgtctgccttctctccctttgttccgctgcctggtggccccgggtcatcagtgtcgtcgtcttcatcccaacggacatgcgagcaccgcggcgccaaactcggccggggctaaattccgcgtcccgggattgtcgctcgaccggtatttctcatgcctgggtatatagctcgtgaccgtctacctgcctccctcaaaccgcaccatcaggccggaccaccattgtcggacagctgtgaagaagcgtgccgccgctgccgtagtagttcgcccccagcattgtccgggtagggccggtttcgggtcgataaggtgcgcgcgaacctgagtatcgtgctcctgacagcaatcgggggccggagttggtagtttgaggacaatttctcgccgccgattgtgctccgccgcagattgcgtggttccgtggacggggggttcttctgcgccactgctggtaagttttccattcccgtattcatcatcatgtgcgcttcacgccaacgctagcgggctcgggggtagtgtccttgggcacggaacagggggttcaccggtgtatcgccgtcgtggtcaacacggctgcagccgtggtgtttctgggaagaagatgacgggttcgtggccgtcggatcgtctgatctggtttagacggctgggtctacccaggttgaggatggcgcaggaccgtaggatcttaagggacgactgcaattagatccgggttcccttctcgcgcggtcgatctctgccctccatcggaaatcgatcgtcggagagcgtgtcttcaccgttttcgaatccggaccgtagttggctaatcgtagggctgtagcgtgatcggtggagtgaatcgatcttggccgttgtccatcgatcggacggttgcgggtgaacgtcggctcaggatgaagatcggtctaatcaggggcgcacactaccgatcttgcggccgagttctaacgataccctttcgccatggtaaactgcaaaagagccctcggattgtaatgaaatcaacccgccgtccatccggcttgattctgagtcttaggtcttttatgcgttagacccctgtcttctctaataattgtggcacagtctagagagatagaaaataagag

SEQ ID NO: 163804 - DNA, 400 bp, Zea Mays
atttacacccctgagagaccagaaaccctaattgaaaccctggaaaaccctaaatccaaaccctagggggttaagtgcaaaatcagtgcacttttgggctaaagtgcaaaaaccatgacaataaggtatcctaagtcaaatggttcacaaatatgtgaatttgcaagctaaaccctgatttttggacttatttgcaaaaagaccccataggtgttctagtgctaagtctggaaatcagtattttggctcaactttggagctttaaaactttcaaattagtgagaattcacctaagggcaccagtcctagccccgtttggccggtccacgagctcgctggagctctgtcgcgctcgtcgtcgtcagggacctcgacttggaagggaatagaacgtggaggt

SEQ ID NO: 163805 - DNA, 661 bp, Zea Mays
ccctagccgccgttctcgtgtgagtctctatcacgtgggacccccgtgtcatcttcagttccctacgcgccttgcccgcagaggtttctagacgggcccgctggctagtcgcccgcgcgcgccgcacatatcaaactcgtgacaccgtctggtgggaccatccaatcaactctatccctctcctctcaaccacttcctcggatgctcggctgaaaactcgctggaagactcggcaacggaccgcgcggggcccatcacgaccgcacctcccatgcggtataaaacccctcctcgcagtgttccaaccccccctccccgcttcatccttcttgccctcatatcatccctagcggtcgcgccgtgccgtcgaccttgggccaccccattccagtgccttccgtccgccacgacgttgcaccaaccacccctaaacatgtgaatcaccgcctagcctcactccgtcggtatcgccgcacccgtactacttcagaattgtcggggacctagccgtcggtcacctgtttgccgcaccagttcgcatcgtgggtagactgcatctctcctcgcgtcgcgtggcaaaaacttcgcgttgtcctcgtccggcctcgtccgtgcctcgtcgtcggtgagtcttcctcatgtcgtgctcgctttgaactac

SEQ ID NO: 163806 - DNA, 761 bp, Zea Mays
gccatggactacaatgttgatgaatgcagactataccactcttgttgattctatcaacaccttggagtcactactagaaatttgtaactatcaagatgtgaacccttaactggcattggagaaacaactacagtcaagctcgagttgtttctgttttgggctactgaacatagaaaattataatatgtagaattcacacaacgacagtagttaagcttgagccatgtttgtcttgccctatgaaacacagaaaatgatgcttttgtgaaaacagaaaatgatgcctgtgaaaccagatcctttgggaccatgaacaaatttgtttttgtgcattgtactaggtgatatggcagaggtataactaggatggcttgtaccttactacctccatcccgaaaagaatgcagttttgtctatgcacctcgacaagcattccttttgggatagtggtagctacaagtaacgtcgttacgagagggacagaaagagagcaagagagattttattgtgcttccactataaggtgcacttgctatcctgagaatggttaaatatgagccactcaaatgatctttttcttttagtacactgtctgaatagtcgtgccaccttccaccaattcccatggtagtttttagaggttggctttgttgttgttacaggtaatgatacatctaatccattgtttgaattggttaaggcttctattatgttctatactcgtgtgctcttgtctgtttattcttttgtgctactttgtg

SEQ ID NO: 163807 - DNA, 569 bp, Zea Mays
gttgatccattcatctgcctccatgggttctgctgcttccttgaatatcggcggcctggtatccatgaaatccttgaagttgctatactggttgactccatgagccccctgaggctgcccatggcgggtcttgttagcaatgttgcgaagttctgcctccatgttcctctacaagttctccatgttcctctgagctccaagaaattaggcgaagaactactctggtgtgaatggcggaggtggaggaagtggtgcttcttggtcaccctcctagttaccactacccgaagctctagtggcccccgagttaatgcggcgagtagtcaccatctgcacatttttactacgagtaagcggcgagtcacgttgcacatatgtgaaataaggaaatcatgacgtacaacatatcatagaagaaaacttcatgtgaaaaattgtaaggcaagaatcacatcccaacatgcacaacaacaacaacacatacttcataatatataaatgcacatacaagcaaattgttcctctcacatcccaaccaaccaaaagagtgtttttcccacacacgcaca

SEQ ID NO: 163808 - DNA, 640 bp, Zea Mays
ggggagcatcacgggcacacaaggacgttgaaacaaaagagcagagggcatgagcggacctgaggtgagctagccatgacaaggtcacaccgctcggtgttcttgagtgatttgggggaaatcccaaattggggagctctattggatgtttcgaggcacgggttgcttcactggttgcacaattacttagcggagcaggcggggtcggcaatttataggctcccacaacgatggccggtgaattggagggagacgcgtggcggctggagaaagagaaggttactggcgctcgggattagtggctttcaccgtggcagctccaccggcgacgagccagggccacggggttgtttatggtgactcaccgtgacgtggtaaagcgttgaggcacgtagcctggctagataacggcgaacgctggtgatgccaacgcgactgaccacggcgggacacgacggcggtgagaacagtggccggagtttatctccagtgcgatatttcttaccgaggagcgcttatctgagttcggtcgggcgtgaatcgtgacgccggcgcggatctgagcgcaagatcaccggcggcgaggggggtgaatatggtgatctgtttcagttactgtaccatcagatccatcttcagt

SEQ ID NO: 163809 - DNA, 1274 bp, Zea Mays
aaaaaaaagagaaaaggacttctccatgcctgggccgcactctggtcacagcccaaatgcggcccctccctctcgctctcacgtgggccaccaaccggcccaactcctcagcaacagtcagcccacgcgcgtggagtcgttgccatgtgggtcccactctcccgatccccgctcagctgcgcgcgcgtcgggttaggtctcagataggtcgggcccacgcaggcagctgctcaccgtgtacatccatatcctcccccgaccactgactggtggggtcctctcgacagtgccatctctatcctctcaacgaactccatgccgtagcgaacgtcgattccgccgggaagctcggcttctgtccacgcggactccccatctagcctataaaatcctagcgctcgtgaccctgagccatagccatcgcaagccggacaccaggagaacaaaagaagaacacgagggagagaaggttggccgccatggggaaatcggagttcggtcgtcgcgtgggcctccaagctttgctggggttcatctccatggcgcggggacggttaccatgaccacccggtgaaggaccgcgcctcggcgactccccatggtgatctcgtgctccgccgcaagaccaccgacggccatctggatctccggtacgttaaccctcctataagtcttatacccacgtaacccgtgcctagctgctacgatagttgtgactgttcgtcgtgggcctttttcaccggggtgctcctcgccgtggaagggctaccggcgccggtcagccatgaagagagagaaaggggggatagaagggcgcgggaggaagaagaatagcctaggccgtggatctgtggccaacggtggggattagatggggaaataactcttcgatgcattaaatccgggtcgttggtgcgatcgcgggcggatcggatgtagtcgtactgtgggccgtagatctcaaatcctggggtctgtattgaatgtcgttcggattaatgatgatctaattgtagccgctgatagaagatcggacggtccaggatggcccgtaccccttcggcctggccgtcttccaaaagagcccctcaccttatgcaaaatcaacctgccatcctgtgcggagttctctgtgtctgggggattttacgtgttagcccccgagttttcggaaaatagtggccgccgtccagagtctgggaatttcaggaaataaaatctaaaatgattttcaggataaaaataaatatgataaacttagaaaattcataact

SEQ ID NO: 163810 - DNA, 1518 bp, Zea Mays
gccatcctcgcgtggtgtagagttgttgacatattcccctcctcgagatccagcttgcccccaagctggtgcaaaaggaaagtgttgtttcaccattacttcatcttcccatgttgctagagaagtatcacatcccgaccatttgaccaaaacctgtgacactgtcttccctccacgccagatcagtcgcgtttctagaacagtttcaggaatttgcaacccagtggaaatgtctggtataactggactaactgatgttcttgaacccacttttggcttcaattgtgagacatgaaacactgggtgaataccacaacccactgggagagccaattcataagcaactgagttaatcttgcgtaccacttcaaatggaccaaagaacttaaatgccaattttggatggggtcgagaacagtggcggacgcaaggggtgggcaacgggggccacggccccaccttgatttttataaactcttatacatagacttagatatataataaaataaataaacttttatatacacttagatatataataaaataaataaacttttatatagtaggttggactacatttaatgaaaactagactttgatctaactttttctcggtgcttcactactcagcccactccctacccgagtcgtggtgctcatggccacatcgggatcctgcacgcagtacagctactttgacttctaatccgcaccgacagatgtgtaggctattagtgagattctaccttggcatcacagcaccaccccgccctggctatctcacaagggtcctgttgcgccgtcacaacgttaacgcgacaatggctatcgcttgctgccaccgcctttcgcctcgtcgtcgccatctactgtcgcatcgtcgtctgtcctcgctaccccacgcctattgtcgcctcaccgtcgtcattttgcggtggagtcgctgactctccacaccgacgtgttgatgcgcccgcttcgccctaacgtccagtccccgtcagtccacccttttgttctctccaactctcctttagggtggccaaaatgaagtttcaatattcatgttgttttagaacactactcatattattacttaatctccatgttattatcatagaactatttttatcaaatagtctaatatattgacttgtcttctacgttatcgccctacctgaaattttgttctgcgtccgccactggtcgagaagcaacagaagattgacaatatggctgaagcttaaggaaaacctgttggccaacagtgagaacccgatcagtccgacctttgtcagcttgcttcttcattctctgttgggctcgttgaagatgcaattgaatctgctggagcatcaactgtctttcctcgagcataatctgcagatccgggactgcacactgtccacttgcatccagaccaaaatgcactggtttgtggccatacaacacttcgaatggtgaagtacccaaagctgaatgagagttagtattataccaaaactcggctaatggcaa

SEQ ID NO: 163811 - DNA, 368 bp, Zea Mays
ctggcagtgctggaggtgtgattgctttgccagttagtgagggcaatcccaggctgaacagcatggtcaacttggccgttgtgctcaacacagagttggaccacgcccttgatgagttgggcaaggttcgggcggaggttgcggaattgtgtgctgaatgcgcggcacgccactatctggatggtggttctcccgcccctgtcgggattcagcacccttaccgttcaccgccccgtggtcgcttcgactatggtaccccagactgcaggacccggatagatttggatccctagatcgacagagtcggagtctgtaataatgcttagttcggtttcttagtctagtcagtcttagttagagttagtttg

SEQ ID NO: 163812 - DNA, 446 bp, Zea Mays
gcgtcatgtagcacttactcccgtcaagttttatcatcgggtgggccgaagcactatctcggctcgccgccggtagcctgggcatcgcgcggtggtgatgttggccgttgaccgttagatcgtgataatgcggccaagattagaacatggaatatcggttcggaccgggggatcgtagccgttgatcatgagctggacggttaatattagatctcgcgtcatgaattttgatccgtggatcctagatcctatggacctcgcggcataccggttcagattattatcagatcagatctgtgccgttcagttgtaatcgggcggccagcgggcagcgataccctttcggttgcaacttttacaggagagccctctaactaaggtagaaatcaacccgcagtatgtctcgggatagactgagtctgggagatttttatggatgagccccg

SEQ ID NO: 163813 - DNA, 1016 bp, Zea Mays
ctaaccacgagcaatagaggcaacactagtctcaggtgaaggggttctccagagtgagcggtgtccatgctagaagctagctcaatctcctcagggtcctcctcctcctcgctatctctgactacctccatctcctgctgcatctcctagtggtgcatttccaagtgagcattggtctcatctagttccacatgtacatcatggagctggttctctaggacctaacggtattgtccctaatttccacttgctgctcaagatcacgggtgtggttagtcatctgatcaatttggagatccttctcaccaactcagaggacaagtcaaccacgaagacctccctgccatcgagggttgtcttggcagtctgagctaatcctgtcaagtgtgccatggcatcgctttgcagagccagtaggcgatatagcgcactcttgcactgaatagtgatcctcccaacctggttaggttgcatagctcacacatccttggcgtagcgtacctggtcacaccacatcggatcatccctcttattagcggggaagagtccgagagggtgcatcattatctccagtgggtgatatccatagaaggtcatcaaagccttcatggctgcatccttagtggtgtcatccactttgaacccgactgactcagagtctagcgaacgccatcatagctgcaaagggtgaggctccaaggtcagccaaaccctacaacgtggcactcgatgcttctcgtacagctgcaccatgtatagagggggtgcgaggtacctagctgcgctcaacacctcccaaaaatagatggaaaaccctctcaggaaaggtagtcgaagctaaaccgggtgtctcctccgtcattgggtgtgggagaagccatctgcgtaagaaaggtgagtgtgagtgtaggggaaaacactaaaagagagaaaggtgtgctgggggtaaaagggaaaatttctgcatgggttgatccatgttgacttagtctactttttccttagcaatttttatc

SEQ ID NO: 163814 - DNA, 1088 bp, Zea Mays
gtgctcaaataagtttaatctctatagtcgatttgtagctggtatgtagcactacaactttgatggagcttggggatgttgccatagaaattttggaaggagctccaagtctgtctgtcaggttgtctgaaggaagtgctccatggtacagtgaccgaattaaattcagagcacttcaccgccgtcgatcacccctccgccgcgattcgtgccgccggcgttaggactcgcgctcggggtgggtggataaggacgtgcggtgaaagatccttgccggcggtgagctggaggtcactccggtgactcaccgtggctttcttttctactttgcggctgggcagataacctcgccggtgcaccgccaccttccggccttgcgccgcgtgtcctaaccacgccaccgcatcgccgtgactccctctaaactctccatcgaccaccggagttactgccacgacgatgaacacgtgttcactgcaccagcgttcttcctcacttccgaccgccgcacatcaacgcccaaattcacggtcaccgctgaagagccctataaattgaagcccccgctagctccgcaaggtcatcctccacccggccaccgctaatcgctagcagtccttcgccagagctcgcgaattttgaattcgccccaaattcctctccgccgccgagaaccacaccctaccgtggccagccttccccaggtctgctcattcccttcttgttcctgttctagcatccttacatgatggtgatgctccctgacccctttaattgaaccggaccgccagggattgccgggaacacgtaccatttcttcatcgtccgcggttcacgtggacagagcaggatagtttaccaaatgagaaattaacttaggggaatcattcggggagagttcaattgagtgttagccgctcgggagcgccggtcatagccccattcggccagtacaggagctcgccggagcctctccgcgctcgacgccgtcgaggacctccctctgcgaagaaaaagaaaccgagggagctttctgtaaactgtcagtgacacaagaaacagtaataggaactcgttttcagttaacc

SEQ ID NO: 163815 - DNA, 360 bp, Zea Mays
cggtttgcctctgtgccggggaatctagcggggatcagtggagctctggatagtggcgtctcgggatttttatctctgggagggcggttgcttttttcggcgggtttggagttccttttggcgcccttctgtcgagtccggccagcctagggatcttgaccctcctcactcgtcagagctttaattctttcctcgggaggaacagtgatggatctgacacattttgacggatttgaccttttttatcctactgacggacggggtgtaagcattgtccggacggcgagcgacagatttctgcaacacttccctgcaaccctcactgcatgatgtgatagctggcgcccttgcaggcacaaa

SEQ ID NO: 163816 - DNA, 554 bp, Zea Mays
gccggtgacgtgtcacccgcttattatggaagtggatcgaaacagtgtttacgatagcatacgacctacgtctaacttgcataaatttcagttacgcccacgatcagcgcgcccacgatcctataatatagcagatacacgcgcgaactcgccgtgaatatcgcgcccacgatgatggaaatgtgcatgggagaaggaaagaatcccacgcttccagaaaatttatacagcaataatcgggtgttagggtgcgagtggcagaaggaagtaccctgtactgaaagatggcagcgccatggggtaaagagccgatcagagagtacacgaagctgacatcagttcatcgatcaaatccatacttggatatcgtatcaatggtgcagggagatcaaccagtaggaaaacagtttggctcggatgcatatgcacatgggcaaacagaaactgccggaggggcaattactccaccagcagcattgagggtgccgggtgttgatgatcacagcacatctgatgcatcgaggatgaccataaatcaaggaggacaacagttg

SEQ ID NO: 163817 - DNA, 409 bp, Zea Mays
ttagtggccttttctcctgtgagtttgtccttcccttcctctccaatgtttgtgtcttagggtttgtgtttcttgctgaggtgtccatgtcgaggcgtgctggatggcgtttggcagggcagaggcgactgtctccctccagtgaggtcgaggtgaaccacgagttgccgtcatcgtcagagtcgggtcgtcgccaccgccgcacccgcaccatcgacgatcgtcgcctcggtccctgtgatgcgactggtggggtctcgaagagcgtgttagctagctattgtgtttggctatgtgtccggttcgttcaccttctctcctagaaagaaacttgcgcagatctcatggagtgctattattgttttgattagtttcttgtcgattctgagtgtgcatgaatgtaaagccc

SEQ ID NO: 163818 - DNA, 420 bp, Zea Mays
ttaatatgacacaaaacatgaatcaaaaccatccaatacattacccataccaacaaaacatcagttcagtgcaaactattcagttaagtcaccaccattgagaggacaccacataagttaggtgtcgttttgaatgccggctttatataatagaatgtattttttgttcagaccatattatgtgatcaattatagaaatttgtctaactgtagttttgaggaatataaaacatcctttatatttgagacactcatgccaccaacctcaaagctagtaaacattcggtttgatcaaatatggtgggtgtaagggacaagtcagatgagtaaggtacatatcatttctcgggcgatgtcaaaaagacagttaccatggcagacaaccaggcaacgtttgtcacttatggggtaagatttgca

SEQ ID NO: 163819 - DNA, 718 bp, Zea Mays
gagggagagtcgtataggacgtagagagagagatggagagttgtatagaacgtatagagagggagagtcgtatagaacgtagagagagagatggagagtcgtatagaacgtatagagagggagagagggggagtcgtataggacgtagagagagagatggagagtcgtatagaacgtatagagagggagagagggagagtcgtacggatattatcgagttgtgtacccctttcatcagattggaacaaaagattagaacatatatacaatatcatactaagttcttacataatacgccgtccatcatactaagttcttatatataatatcatactaagattagaacatatatagtaatttatacttttctactcctcgtcgtctatcagtgtcgtccaatcgatctcctcatcttcatcgtcggagatgttggtgatgacgagcacggagacaacctcgcgtgcagtcgtcggagccgaggagcccacctcatggtggtgagtagacgggcctgcggcggcgacacgttgacggcagcgattcgagagaactctgcatgcgcgcatgaaaaaccggcgtacgacgacatgatgattgagcctcgaccggcgccggagctcaaggtggcggcgatgcatgagccgcgccgttgccagccgccccgcaagggtacgtgccttgaggcgcgctgcgagggcatccactgggtccattgagg

SEQ ID NO: 163820 - DNA, 285 bp, Zea Mays
ctttctttactattgtggttagtgccataccggctagtgaaacaggcagagaacggcttataagcgttggtgcagccccaaatgttaacttgctagtggctcaatgacgttggtagagaacgatttaggtaatgttgtagatatttgttttgcttggcgaggaaattggcctgctgggttgcatgcgttgggagggcgagggagcagagctgcgcgttgggcccgacgtgggaggctgggaggcagaaccgtgcaccatccggggtgtggacgtctacactctcc

SEQ ID NO: 163821 - DNA, 1629 bp, Zea Mays
ctctttgacataggaggcgatggaggagggggagacgaccttgtaggagatggagatggagacagagaagcacccgtgccatggatggcaccatcatcatctggaagaggaggagacgggtaccctagccaccacactgggaggaataatgatgtagcgcttgcgccacaaaattactccatgctctacttcttcatctaggcgggtcttctccccatcacctccagcaatgtctagatctagccactcccctatgggcggcgctgataactctatccacattgactcgataatatccaggtggaattaaactcccatggattcttggtgtcatgttagggtccataggagaaacaaaaccgtacgtgcgccaccaggactgtgctatcccccatgggaatgtgtagctcacatatataccgtaaaaggatcagtgatgtcattatggggaagtgcagcaatgcgtcatcctgtgcaacaacaacaccacagtggaagtgcagctgcttcttcgctaagaggggctgactccctgctgctttgatggtgactgcccttggctaccccactgtagcaccacttgtcgtctgagacctcctcttggatcatcgcgtccctcattcgttctcactcctgtgactcaagcatcgcctcctctagcctgcagatccactctgcctcctcattcttctttcgctggcggcttctataggtctcagcatcctgagggaagccatgccgccacggaatcaagcctttgcctcacgtttgcccagggtgttctggagtctggagggcgcacacgtcagctcatccttctcttggttcggctcaaactcaccactggtggaagcatttagaatctcgataagtctttgtgctggcgttgcgagtgccccaccaaaaaccggacgtccggtctctgggtctagtcagtgatcccccatgtgcgaaaaaccaatgctgggaccgctcgggccaatcgagtgattgtagagcgatccctttgccaagcaggtcttcttccatttttcccactttggaatgccagtcctgtagccacctgatcccgttttatgatggtttttttttgcgcattctgctggttccatttcgatattacctcaccctcttccgaggtcttatacctaacaaatctgggccagtcatccatcaactttttatacaggctgttcgcattgaaatctggagttcactcattcttgacaaagtctttgtacaacttattcttccagctctggaattgtgtgtggccatcttcttgagattccagcttctaactaattattttgtatcttcgtcaatattacttggtagaccgaaatgtgcaatgtcttcatcctaaggaaggtccttatcttggtcagaaacaaaagtgatatgaggagcatccttcttcattttccattcatggatagcctgtcccttacacgagccccacagtggtgtatgaatttctctgtattcttttctggctgcagtggttcgccggtattaggatcgatttctgtgactaggaagtgaccctcaaacggttttgtcgtgcctcttacatttttactgcttttcatcgaggtcgtgttagaaactatggtgcctaggatcgat

SEQ ID NO: 163822 - DNA, 650 bp, Zea Mays
gccgacttaagccgattgctccgttagtagggtatagtggtcaccccgagttaagtaattgtgccggttgacagtgaacaattcgagtacttttgaagtcttttattgatggtatatttcctagtttacagagtacattgtcgtcccgatagcttttgagatctagctaggggtaaaacttccagagatgttctatgttccatgagttcccaatttccgtgccatccatttgactaaggcgatacgatccaggccgagtgacttctgctactatgaacggtccttcccatagtggcgacagtttgtgccgtccctccccagttagaattcggcggaggacgaggtctcctactgcgaaggatcgatgccgtatggccttgtcatgatagcgcctcagagtttgctgatatcgggctgactgaatcaccgtattcaatcgttcttcttctagtatatcgacatcctccagtctagtagcttcagcttctaaagtccactggaatttgtctaccttcttgagcaacttatagaatggtaagcccttctctcccagcctggatatgaatctgctcagagcggccatacatccggtaagtctttgtactttcttctatgatcgtggtgcttccatcctcatgatagcctcgatc

SEQ ID NO: 163823 - DNA, 656 bp, Zea Mays
caagagtggatctagttgcgttatgtgatagaccaaaccaagagatgaagccgcatggtagtggaaagacatggagaaggtctaaggctgattttgtcctgagcaaggcccataggagggtagtactagagtggaccaagatgttaatgttccctaatgggtatgcaactaacctgtgtagggggtgaacttatctactatgagagtcctagggatgaagagtcatgactaccacatatggattgaacgaattcttccggcgatggtttgaggctatgtccatgagcatgtatggctagtgcttgcagagttgagctatttcttccaccagctttgtgcaaaggagttatctcggactttgattgcagacttggaaagaatggcacctgcggtattgtgtaagttggagaagatctttccacccagcttcttcaatccgatgcaacatttgattctgcatctctcgtatgaggcacaaatggggggcatgtagggacgttggtgcaatccaattgagaaaatgtctaaagactatccaaaagaagtgtagaactaaatgcaacatcgagacttccattgtagaggcatacatagtggaggaggtgtcaaacttcacaacaactcactatggagacaaactcccgagcgtgcataat

SEQ ID NO: 163824 - DNA, 474 bp, Zea Mays
taattttttcctttgaggggaatttcctgcaggcctaccgaactaataatttcattgaatgtgaacacatctgtcatattaccaccctccctgtttctattttctgttgaacggtacatgttgaagtcacctactatcatccaatcttgatcatctgcgatatgaaggttgtatagccagtcaataaaattttgtttctcctgcccttggcacggtccataaaccgtagtgagattccattgattagcattgtgcatcgacgtgaaaccaagagtgatttggaagtttgaggagctaaggacctgcccggtgaagatggaggcattccagctgatcagaatacctccagaagcaccacaggaaggaacaaaagcgaactgattgaaacgcttaggtgccatttttttgaacattgtcatatcaatgttgctcattttagtttcttgaatacagaatatagagcaatcactttcc

SEQ ID NO: 163825 - DNA, 522 bp, Zea Mays
cccgaccctagcctcggctctctgcttggtcaaaatacgggatataggaatcagacttcctcctcctgattaaaggcaatagccaggacaagggccatcccgacggccatactactacaggagctcgggctcgcctcctctcaacattacgacaacccttgtacttctaggctccctccttgcggctataaaaggaggagtctagggtccccaggggacagaggacaacacttcatcatttgccctctaccttcgatattggcactagcctcaatcacccacagagacttaggatccactccctctctctcgaccagtttgtatcccgtactatgagcacttaggtgtaagataatataagtctcacccctctcgctataagtagggtcttctattgcctgaaccaggataaatcttctgtcttcttgcatcacccatctggatcgggggcacgtagcacaaatacaatagttggttaggacccttgggtaaaaacactgacactagtcttatgagaaaagg

SEQ ID NO: 163826 - DNA, 686 bp, Zea Mays
ctgcgaggctttccttggaattcctcctcatttcgggctttggaaatacctctaccgttgtcggctcgggatggatggaggacaacatcagcttgttggtggtgccagcctcgacgtcggggtaggaaagtcgaatatcttgatatcaccctaaaggacaacattaaaggatggcgccttgagtggtttaccatggagaaccacaacaagtccctctccccttgatcggggaggcagcccgacgtccacacgcccagctagacagagtcccccatagcttcaaagctagccaaatctaggatgctgcttgccaaaatatgtgcgccgaaagacaaggcctgactgctgaagtttttgttgctgactttgtcttcaagaacatccagcctctgaaagatagagtgtacccagcttatttgtacactagggtcaacgaccctacccgaattaccaatagacggattcctgatgaggacctgctgagccggattgacttgatgttaaggggcaaggtttcgaatgctggtgctccctatcttattctgtctggaatctacctccactgagtgccttttctgaattcatttccaatcctcctaatcaagatggcagtccgggtcatagagtgtgaccctcactggatgacatcgatgctttcatcgctccattccggaatcttcctgaag

SEQ ID NO: 163827 - DNA, 690 bp, Zea Mays
tgcccctgtgtgtgttgttgtgcagcatgtgcagcagcagtgccagccgctaggcggtaagagccccgtggcatagaagatgtcgcttcttcccccatagggaagtctccaaaggacgagtcgtgatgcttgacgatctgtaccatcatgacgagcaaggaaaacaggaaagaaatctaagcctaacgcccccctacctggcacgccaaatgtcagagggaaaatccaccggccgggtggcagagtgcatccgccctgatcatgagatgaggggacctagggactgtctgattagctagaagaacatgagaacaccagggttagattggtttgggccaccggagcgtaataccctacatgcacttggagttgtattgcttgggagtctctatgtgttgtccgttgtatcattgtgtgccctcccttttatagtctaagggggcacatacaaggaagccgagtcacgacaggtgggcccaggaatatagtaataaaagcatactacatggaacaagtaatgtcgtcggtggacagagatcttatcctggtcaccgtgcagatttcctgaccagccaatatttcgcccagtcttataagcatacgtgtgaaggccctggcataggttgtagcatagactgtcatgttggcatgcgtaggtgcgttgcgcagtcgctcgtgttgtcacatccg

SEQ ID NO: 163828 - DNA, 828 bp, Zea Mays
tggaagaactgggaagggcagggaaacgagtaccaggggcactcgactgatttttaggagcagggacagtagtgggacgaataaagacaagctgcttgaatggatatgaaggtgggctaggcgaagaacaattttgattgaaaggtcggattactaaccttgttctcttttcaggtccttgacttgatctctcacccgcatatccctttgattttccgtgtcctgcatttttggcttcaactgtcagtgctgtactgacagccctgctgtaggtaaggtccaaacatgttgccattttttgctggagcctgtctttcagtcccctcataaaatagttcttcttcttcaggtctgtatccacctggtcaatggcgtactgggagaggtggttgaatttattgagatactgcatcgtcgtatctcctccttgcgtctccgtgcatcaaattagcccaaacttctgttccattactcgcacccattcatcggcttctaagggttcttccgccttgacgaagagtggtgggcgagtttcggagaattacaggtaagtagtatctcgtggtccttgaggaggagctcttcctctgtgctgttgaaattggctggccgccatctcgcgcagaaagcgcgtattgtcagcggtggcgttgaccaaggcagcgatagcctcagccaaagtaggaggtaccgatggcgggttgggagtgtcctcctcaccacgagatgtccccgcaccatcatgtgcacgagtccgggatggcatctgaggcaaagaaacatttggaaaatataacatgccaacatacaccatcatattacattgct

SEQ ID NO: 163829 - DNA, 589 bp, Zea Mays
atgggatgtaaggtgaacggtatgaggatgtactgaacacctcttttgactgtgagggttgcgtggctaacgaaacaaactccttctgcttgtcgatggtatgatgagatgttcttatggtctggcctttgtccttgccacaaaacaagcagaatggtttccgtgggggtgcattcaatctaccaccaaagctttggcctccccttcctcctcttaaagcaggtggacaaaacgtgttgtgcgaaggttgctgctgagagcttgcatgttgatgccctgactgacactaaaactgggccatcttttcctcaccctacaccaggttatggatactttagacatgccttggatcaaaccatcctctgaagcccctagcgacttcagtgtaactatggaattcctcccttctttggcgaaaatcattgtcaacccttatgtactcatccattttttgtagcaatttttcaagggagtgaggaggcttccttgcaaaatactaagcagttggtcctagcctaagccgcttgaccatggcctcgatgacgatatcatcttgtactgccagagcctaggcccaaagccttagaaa

SEQ ID NO: 163830 - DNA, 618 bp, Zea Mays
agtttgcactgcccacttgagccggatcattcctggcagcaccctcgggggctgggcagtggcttgcatttcccacccggatcaagtcatccccgacaacatcctcgggggctgggcacgtgtcaacaccatccttggggtccaagctctccgtggtagccacttctaaggctgatgggcccacaactacttccatgagaccaggacgacccaagtcagtctcccgatcctcaagatcgcgctctaaggtcgacgaagcacgggatgacctcaacccagcatcaagcacatcagcgcaaacctccatcacaccatcatctgctggctccgataacaaatcctctggaaccatatcctcgagagtctgatcaaaattggccagggacagttcttgcagaccaatgagagcagacaaagcaggagagggaactccactactttcaccactggcaatgaattgccgactgtttttctgagtcaaaggaacttcattttctccctcatcatcatccacattagcaacacaggcagcacccccattgggatcagcaactgactcgggacacccattgggatcagcgtcagtaaattcagtcgcaggcacttcttcagcatcag

SEQ ID NO: 163831 - DNA, 564 bp, Zea Mays
agaagtgatcacagccagagatgagggctcccgtgtcaaatgcagatgggaaccgtgggtcggggcttagccccacggcaggtaccataccaagaggggctctgcaactctcccctagttgggaaggacccttcaaggtaacgggagtacaccgacccagggggaaccatctagctacgactggaggagtaccttaccctgatgccaaatatctctgtaagttctatccatagagcaagactaaggggtcgagcctgtttccttcttttatgtaactagataacgcatacgtgtacggcaacccggtgggtctgcccccatgaacccggactattggtctgcacacatgcacgacaagttatgaagaagaaactaccccctcagccgtactcttgtgatagttccatcttgctgctccatggtcctaccttgcaatctttcagataatacctttcagctaacccacccgtacgatttccatctgtctgacatggcgacatctgaattgaacaggcaggcttgcagattagggcccctaacgtgaaagtagggatgtccgacagc

SEQ ID NO: 163832 - DNA, 1395 bp, Zea Mays
gatactgggtcttgttctgctggctgatggaggagggcgccttgcgggcagatgcggaggtattcttggggccattcaccgagttagagtaggcgggtcctgatggcttcagctagggacagttgttcttgaaatgactgggatctccgcagtgccaacatgcattcgccgggggttggttgcttgcaactaagggggcatggaaagagctctgactctgctgactgaaccgagatggggtgggtctagctggtctactgaagctgggtcccttgggtggaaatccaaaggatcgagttttctggtgccgatcttgctgctgagcccggaggacttgaaattttctcttgagatggcctttttttcctcctttgccctttccacttgcatggccttgttggagaggtgagagaaactgaggaagtcttggctagccaggatggttttgagttctggactgagtcccttcaggaagcgggccatcttcttgacttcggtattgacgtcatctggcgcgtagcgggctaactccgtgaacttgtgcacatattcactgacagatcttctgtcttgagtcagttcccggaactcgtcttccttgagctgaatgagcccttggggcacatggtgctcccggaaagccgtttcaaattccgcccaggtagcatctctgatggtgacgttgaaggtatcccaccaggctaaggccatcccggaaagttgatgggcagctagttgaacacgctgattttctggacatccgatggcttccagctttcttttaatcgtgcgcatccaatcgtctgcatcgagggggttgctagatccgacaaacgtgggaggcttgagcctcaggaaatcccccattctgtcttgcggtcttccaccattcggacgctgattttccagacttcgagtgaggacctcgatgagtcgggtttgattggctagaatttgggctagatctaagggtagttctggaggtgcggggaggtgggtttcactttcctctctatcggcttccctttcagctctcaggggaacactgctccaatcccggaggcggtaggcgtggttttatccaaagccatctgccaggggaatagagttactattatgcacatgccaattgttttcaaacaagttattttattcattacaccagtacattacaagcatatggctgcgacaagttgtactacacgcgagcattccctgaggtactaccgaattctttttctagagtgtccccaaattccttgagaagatcatcaaggctggcgagggacatgtcctcgacatcggacagattctctatcctggcgggagctggtgctgggggagctttcttcttcctctccgtctggcatccttggctcgtggttttcttccgaa

SEQ ID NO: 163833 - DNA, 441 bp, Zea Mays
gaaaggacgccggcgctgctgctgttctgatgaagtaggatcaacccagatgaaaaggaagcgggcaggacctgagcatggtgcagatcacagctgctgaccaacttggcgaagtccaaaaccaaggcgagtccgacgagttcagttgggaatgcgtcgggattgaagaggtgttgggcaccggggcgagcgtgctggtgtcgggcgacctcgatccgagagcgagggagaagctcggcgctcggcgcagttgggaaggacgagcaagcaaggaggaaaatggcacacgagcggttgacaacgactagtgcagggcgctggcgactttggtacaacggcctgacggcacatgggttctggcggaggtgagaaacatagggagaaggaagtctcgaggtgtatcattgctacttccaccgactggggtacacaggttttctt

SEQ ID NO: 163834 - DNA, 516 bp, Zea Mays
tattgtcccgacttgtgctttgggtgaaagtggaagattagtttgttcgtgctctggctgcatctttggaaatggcctcagaattcaaaggtctttgcgtgcgtaggtccctttcatgttgacttttgtagtaaggccatcaagtttgttgaggtgagtacatatgagatattttgttgacaagctacgagacatgagctgcgaatttcgtgtcctgttctgtgagtttcgtcgattgcaactgccatattgtataaaatgatgtctgcaatgggctactgacttggcctatctaaggtgtttactgaacagttgtaatatttgacctgctgatttccactgcctcacgatctagtaagtagttagctgtagctgatagggtatgtgactatagcaatatatcagttggactagtatgtaaaaatatgtcgtattgtccaaacagccacatgtggatgtcgactggagtttatttgtcattgtttttttttcttgctatatatttgtctgtgctat

SEQ ID NO: 163835 - DNA, 582 bp, Zea Mays
aggtgtctagcagtgagccctgattggttagccaattcaggaggggaattgatggactagggttaagctttgttgctagggataggagtggcactcattatggtaaggatggggagtgtagtggcttgacaccttcacagaaacctccaaccatttcctagcctatcaaattcactctaactaaatcttccacctcaactgtgcgagatgaagtgtttaaggaacctttgatatctccacctcaaaaactagtgtggtatcccaaacctaaccatcttaaaaacccacttgacaccttgccctacacctctagtgatccccttcctagagcaccacaaccacccaagttgactctttcccaaaaaagactccacctaagagagaggtgaggtaccactgcgagtattgtgagagggatggtcacttggttgttttctgttttagaaggaagagagatgataggtggggtattgaggtgagtattagggacatgcattgcccttctcatggtgtgcatgatcctcctattcaaagatgtgttgctaggcctagaggtgctttgccttaagtgacttggtctca

SEQ ID NO: 163836 - DNA, 473 bp, Zea Mays
gctgtggtcgctgatttcgtcttcaagaatattcagcctttgaaggacagggcatacccagcttatctgtacagtggtatcaatgactctacccaggtcacaaacaggagaattcccactgaagatttggtgagccgactggatatgattctgaggggtagagtgtcaaatgttggtgctcctattacctattatgcgtggaatctgccaccttacaagtcattttctgaatttgtgtccaaccctcctgctagtgatggtggtctgggtcttagagtgcgaccctcccccgaggacattgaggctctgattgcccctcttcggaatcttcccaatgatgaaaaagcaaactcattttgagatgtcagctagcacagacgatgcagagatagatgttgtgcttagtatgttggctggggaatcttccgactcgacccatgctgagccgatggctatcatggctggacaagaac

SEQ ID NO: 163837 - DNA, 626 bp, Zea Mays
agggaaaggaaaggatcaaaggaggagcagcctaggggggttggggggcgtcgattgctgaatgagagagaccggcggcgtcctgcgtgcgctccagctgccatatgggcgcgcgacgcatcctcaacacggcctgatgtgctgactggaggctggaggctggagagcaggaagaatcatataatagtgtagtgcaggatctcgactcgacgcgcgtagcaggccggtaggtaggcaggcaggcatgtcatccaggaaaggcagaggcagatcggtcagtaaagccctgtgccgtgactgtcatccagcctgaaaggaaagcttcaatccaacggtgaacagcgccggtgggaagcgtgtgctgcccttgtgggcttcgctttcggcgaacaacgcttgcactgatgaaaccgataccgccggccgccgctagtcctctgcacacatctggctttggtcaaacgattcacgatgatgattcgatgaaggaagctcgccagctgagatgagatcgacgagaccagttcgacagacgggcaggcagtccatggggataggcgagccgagggagggacgcagatcggcacagggcgggagacgagacggcggtttttcgggaacatgtg

SEQ ID NO: 163838 - DNA, 566 bp, Zea Mays
tgtatgtgaccgtgatgtcataacataataatagaagaagaatcatctaacattgcatatgaaagattggattctgaacgaggatgtgagctcttaaaggcagggaacctcacaggggggaaaagagagagagagagcaaaatgataaatgatctgtggcctaggaggtaaagaatgatgcccaggcccagataagatgtgatgaatgaaaccaccgtgggaggaggcgatgatgaaacaacaggcagaaaaaggaataagatccggccgatcttgggaacccgatgttccactcacagaacgcaagtggagccaacttttgcagacaggaaactggcacatggcttggacaacgacgccggaatgaggcgacgctgttacagccttgttcactccgtgcgaatcctcagatgcgaacttagtacatttgtagaaagtttgcaagatcagccaccaagagctagctattcaccgtcatggacgccaagatcagccgtgatgtactcatgtactcctaccacctcgcgctgccgcaagaggcattcacaccagcgcaacgcctggcc

SEQ ID NO: 163839 - DNA, 381 bp, Zea Mays
ttattggcacatatacccattatcacatgtggttaaaacttggaggagagggagtgcttaagaccttggaagcatgagtgagttaagaaataccaaggacccaagtattacccaagcttttaggcaataatcacctagggcaaagaaggattgaaccttggacccccccttcttaaagcctttagttgagagaaagatcaagcaaatgcacatttcataatttaaacccttaaccaaagtttaagagtaccaaaatgtttacaaaagacagtaaaggaactttgcaaaaagacccctaaaagacccctaaatcagcccccaagtggagaacactatggaatcacccccattccctctaagtccaaaatcagccctaatcta

SEQ ID NO: 163840 - DNA, 491 bp, Zea Mays
ccagcaatagaaaaagcagaagaaccagaaactgaaaaaggaaaaacaacagaaattttgagtccatcatcaaaagttgaggcgactaaaggccaaaaggggacagtagcaactccaaaaagaaaaaggatggttaatgtgctggatgttttagaaacaattaaatcttcgagcataactccgaagaaaactgctaaagcttctgaagtatctgttgaagcctttgttagtgaagcttcaaagcaacaatttgtaactgagattggaccttcagaacccaccaaggtaaaacatttggaagctgaaaagacaaaattgacagaggcaactttggaaactgaacaaacaaaaataacagagcaaattttagtcgaggaaattgacactgccacccccgaagcatcttccaaaatgcacgactatattattcgacatgcttcgggaaagaaattatccgaagaagagatctttgaagctaaccattatgcccg

SEQ ID NO: 163841 - DNA, 734 bp, Zea Mays
aatgggagaaccatggtcccaaactttggactgcagcagaactgaagcagttcggtatggtttgatagatgagaaacaaatatccctcctcaccactctctctagatgtttctgctatattgtggataaaaggagctgagacttggagagctagaaaggggggatcacgttggatatttttactgcccaaagggtggacgatgtagagttgaaacctatctagaagggggtgactcagctgcttgtgaattgctatcaaaaccatgttaaaccaccacatcatgtccctctgttcatggatctagggtggaatgaggcagtgcaaccatgtgcccataaccatgtctcttttggtattccagagccctccttaaccagcttctagtgaacccagccgcacacaccttgccttgttagaagtatttagtttcaaatcatcagtgcttcactcccatttcttcgattcaggtcatcttgaactgaatgacttgtgtttccatgaccatcccatccaaactccccactaaccatcacaggggtgtccaagtcttccctcgacagttgccctgggtgtggtgaccacaacgacctctttcacccattcaccacggtctgccgcttcaagggtaaaactcctttgtgctagttgtgttctatagccatctagtatccgtgaagctctctggcttggttgtttgaagtttcccgtggtccagtgcttagaacgccgtaga

SEQ ID NO: 163842 - DNA, 493 bp, Zea Mays
gtgcagccggaccaacaccataaatgcgtaagatcaagtgcacaagtcgcttatgggcgcgaccggatcagcgaaggcacacagtcttatcatacaaattatagttacatacatgcagcgagggcatcacacattacatcggctcaaccttcgggatgatacccatatccctatagttgaacagcattatcctcaattcatcgccctcaaacagacttcgcagctctccctcacctacactcgccctagccggcgaggccagcaattcccgcttgccagtcccgtccacacgaaggtgaccaccctccacctcaccacgatgacgcctatcacttcgcgacaactcactcaccctccatttcgccaccgcccttcgtcgcctatgcctaacactcgcacctggaagatcctcatcacccattacacgctgagaagcctccgccgcagccaaatccaatgccgcaaagtaatccaaatcctcatccgaagactc

SEQ ID NO: 163843 - DNA, 598 bp, Zea Mays
cactgacgtgggtgggaaacgacagagagggattaatgggggtgtggctaagaaaggagaattcgagacatcatggacggggtgagagtatccgttggggatgtatcggttgctaactctaaatcaaagtgacttacaaattaaaacgaagagtattacactctccctataaaaaaaattgccattctagctttttactaagtcaatgaactatatcaactacataaagtgtacgtgtgttacactaaataattataagtaaagtacttaacaagaaatatatttctcgtgacatatctatttggaatcataggtgttcaaagcattttctacaaactaagttaagtttaagcgaagtttgatttgaatccaaacccaacccaaaagcagtgacttatattatattcagttgacggccgatcgaccgggcggcgggccggggcgcgcgtgagtgactagtagctaggtccacctccacgcagaatctaggccacagaatggttccacacaccgatccccactgtttttgttcccacccccatgcaagcagcaagatattattctccacccgacgactgagccgttagccgtagagtac

SEQ ID NO: 163844 - DNA, 354 bp, Zea Mays
tgccgaagctgaacagaccgttgctgaagaagaagatattgaagaggatgaagaagattatagtattttgatcccatcaaaacccagccatctagattttgagaaatatactatgtttgaagctgacatgcccatgatgatgaagttgggttactttggggaagctgaaaggaaacttgtccgatttgccggagaagataccaccccagcaccaaagaatgatgaagtagtggttttcaagatctttttcagagcaggactgcgacttcctctaaatgagatgataggggaagtcttgaaaaatttcgaaatatatcttcatcagctgacccctaacgccattgttaggcttag

SEQ ID NO: 163845 - DNA, 518 bp, Zea Mays
gttgaatttactcccgctactgtgctttttgattcgggagcatcccattcatttatagccactaagtttgtggaaaagcatggcatcccctctgcacccctagctatccctttggtcacccgaaccccggaatcagacctcctatgccaactcaggtgctcccaagtcagaattcttttaagtggggtagtgttcctggcggacttaaccgtcttgccatcccaagggattgatgtcatcctaggaatgaattggctaactaagcacaagggtatcatcagctgcgcaagtaagaccgtccttctcaccgatcaccaaggaaaagcagtttcctgtcaagcccagccgcccgccaacgatccaatgatgtttaatctggcggcagaaaacatgtccataatcgaagagtttgaggatgtatttccggaagagttgcctggaatgccacccgaaagaggagtggagttctatatagatctcattcctggcactgcgcccatcgcaaagagaccataccg

SEQ ID NO: 163846 - DNA, 1504 bp, Zea Mays
caagactttgatgaatctactattacctaaaacgaattttattttggtacagaggaagtatatatacgagaattatgatactccatccgttccaaaatataatttgttttagacaaataatcatgcattcattattcattaacatatgaatgtcatccacatgtatgtctatatttctacttattaagccgatgcaacttcctccccatatagaccgtccacgtcggctacaaaatcctagacacacctgcagatactacttcgcattgtagccgtacacgtggccgaaagctgttccgactgctccaccagtatgcgtgggcgcgtggctgctggcctgctgcttctgttatgaaaggaaataaaaaaaaaatgggaaacaacatcgcctagaaggatcccgtggccttcagctgcttcaccagcacgtgtggccgatctatcttgctgtaaaaaaggaaataaaaaatgaacaacatcgactattagaagggtcccattctacctaccgtgtcgcaccaggacgaccctaccgaggcagcagcgacggtgcagctgcctacgccggtggatatctcccgtgtctgtcgtttttaggtaaatagatcattttcatgcttcccttcgatttttccatgttcattactcactgtacctttctcttgtatttggtttgaaacatttgtaatgtgctctcggatctacaccgaaaatcacatgcttttttgttccctttttctctccatctacaccgaaaggcacaaattatttttggtctcttttttatgtcacattagaaaccctaaatgtgttttcccctggaaaaaatcttgcaaaaactaaaatcgcgtagtgtggagcttcctttgtattttactggtcgccgcgcatccactcacgcgttcgtgcgcttcaaatgctacctaaaagccatgcttcttcgttcttttacctgctttacaaacgagtttacggtgttgtatttccctaaaagaaggggtgattcgctctgagctaacaaaaggcatgtttagaggtgcaatattatcccattagaaaccctaaatgtgttttcccctagaaaaaatattgcaaaaactaaaatcgcgtagtgtggagcttcctttgtatattcgctctgagctaacaaaaggcattttagaggtgcaatattatcccaaaaatgtagacttctctctatcatttcttatttttaccttttgcagatgtcatttcttcttattgtattgccttctaaaaaaatatttaagtttcagatgatatgaataattaccttttattaagtttttaatacgtactttcgatgtcactaacttactttaacatacatgttaaaagggatatcacatagaattcagaattatgccttcgatacaccaacaattaacaaatgtatatagattatgccttatttgtaagaaaatatctaattatcttttgtttatgcatcctaatatagatgtgatccaaggtgatattaaag

SEQ ID NO: 163847 - DNA, 636 bp, Zea Mays
catgattagtcacatgtctcaaaagtagatggcaaatcacacaaggagatcatctcttatataagctttataatttgggtattacaagtaggcacttgctcaaaaggtggtggtcctgggacaaaggaaggagatggtgaccacacactcattactgggttacttgaggcgtttgaggccgaaggcaaacttaacattgtgtcctgtaactgagactagacatattatgggatataaggtgaatagtacgatgatgtactgaacacctcttttgactgggagggttgagtggctggcgaagtaagctcattctgcttgttgatggtatgatggcatgttcttatggtatggcctttgtcgtcgccacaaaacaaacaaaatggtttacttggaggtgcattgaatctaccaccaaaacttcggcctccccttccgcctcttggagcaggtggacgaaatctgatgtgcgaaggttgctactgagagcttgcttgctgctggcccgactgaccttgagactgggccatcttttcctcaccctgcagcaggttgtggatcctttggacatgccttggatgaaaccttcctctgaagcccctggtgactttggtgtatctgtgaaattcctctcttcta

SEQ ID NO: 163848 - DNA, 591 bp, Zea Mays
cttcttctttttctgcccatcagcaggagaagcaggctgattggctcggcaagggcgcttcgggcgaacattgtcagacctctgaatatccaaggctttactagcttccgggagaggcgccaccaccaatgttccagcaggagcggcatcagaagaatcctcggctaacatatcaagcatggcacttatctctgcatcactgggatccaaaggcacctcaaagtgaacctgccgttcatcatcaggaatttcttcaagcgaagcaaccaaagcactaacttcttcggcagagggtcgcactctaaggcccaaaccgccatcaccagcaggaggatttgacacgaaatgagtaaaggccttggaaggaggtaggttccaggccgagtatgcaacaggggcaccaacatttgataccttgcctctgagtatcatttcgagccggctcaccaagtccacagcaggaattcttctgttggtgacccgggtggagtcagctaggcctcgatacagataggccgggtatgccctgtccttcaatggctgaatattcttgaagacaaagtcagcaaccatagcctctgcagtcagacc

SEQ ID NO: 163849 - DNA, 707 bp, Zea Mays
ggttttcaaaaacagacagagtgaggatggtttggtagtgagaaacaaggcgaggttggttgcccaaagtttttgccagaaagagagtattaattatgaggagacatttgcccttgtttcccatttagaggccattagggtccttttagcctttgcttcttcaaagggttttaagctttttcaaatgggtgttaaaagggcctttttgaatgggtatatagaggaagaggtctatgtgaggtagcccctagtttttagagttccaagtttccaaaccatgttttaaactccaaaaacctttgtatggtttgaaacaagcccctaaagcttggtatgagcgtttgaaatctttcttactcttaaagggttttaaaatggcgtctatggacaaaactctttttcttctcaagcatggcagtgatacctaggtccactacgatggtgctcgatgctgatgaggacgacaagcccgtggaccaaatagattacagtagcacgattggctccctcctgtacttgactgcgacgaggctagatatacacttggcagtgtgtatgtgcgctcgtttccaggcttcccccacacacttctcacagacaggctgtgaaacaaattatgaggtacttgtgtttcactttggagtttggtttgtggtactcttattctactgttctatctttatgcagttactctaatgctaattttg

SEQ ID NO: 163850 - DNA, 829 bp, Zea Mays
tgcccaggtagttctgccgctcgccatggtttcaccgtcgttatgcggatgccatagaaccccaccgtgtttgttgccctggtaagctccgccttatcacccaccacctggaacgcccctcggttcaccctttccccctttggatcgtctggtccgtgctcactgaaggatttcctatgcagccgaagagccgccgccgtcgacccgcgtcctcgccgcgccccagacgccgttcgtgagcccctgactctccacttgaggtaaccatcctaacctttcccttattttccactgttgtgtactttctcgcccgcgattgctcgccggagtgcccccggtccatagaggacgtccccctccgtcgtccagtcgcctcacacccattcctgttaccccgatcacgccatagtgttcgccaggtcctccctaacctccctggccatctagaccacccttagtgcccctagtagccccagtccacttcgccgctgccggctgcgctgtctttgatgcgaatggcacctcccctggtcgaccggagaggacaaagtccttagcgcgcagatcctaaccgtccagtcttcatcggatggtctggatatgaggataacattttgcgtggaccgtggagccggagccattgatccacgatataacggctagcgcccccgcgctctcagccccccccccccccgctgacccatgggcccaactgcgctagtgcctccgcccttccctgccccacctgtcagtcgcgcacccgcgctcacccatggatttaatctcagtcgttcgcttgtgatcgtgcggcccatattaactgataccc

SEQ ID NO: 163851 - DNA, 464 bp, Zea Mays
agaatcatccaaatctgcatccaactctagaaagcacaacccgggtacagaaatcttaccagaaacaagggaggacaaccattccacgatttcacacctagaccgccacggcctcgaagcaccaccatccgcctcagtagccgcctcgggcgactgtgatgacgaaggagatcacctcggcgatgattgtgagctcgcgtaagaacccccttgcacgtggtacaacatgtgacgtgggctccactctcgccccaccaccggtagctgcttcgcctcgcctactgccacggtcgttggacaccaccaccacctcccactgtgtccaccgcccccctcgctgccacatcgaacggatgaagtgcctcaccttcacgcgttgggtgttcgacgagatcaactgtctcgatgcggcctcctggaactcccttattactgcttacgatgagcgaaggcgagatctggag

SEQ ID NO: 163852 - DNA, 623 bp, Zea Mays
gggcacccccgttcctatcaagtggtattcaaagacttaggtattactctcaggcttaccctagtttagtttaggtttttcatcctataactccagataattgccatacaaaaaaaatatcccgctgtcctagaacccttgtttagccttgcaatttcgtttcagattgctttgttgagtttgtgtccgtatcgagtcttgttgctggtttaggtcgtgtcgtcatcgtagttcaaccgctccatcgctgttatttgtttccaccgctatcccatccaccttacccagattacaagtcgagacaccacattactctatttgcctcgctagccgccttgtgtgaattctcaccacgctagccctagattaggttgcaagccgcattgcattgcaaccctccttgtttcatcatctggcgcttacctatttcttataccagggaggtttgtgcccctgtgttctatagccgccgctacagttcctaccaatttgtgccctggaaaaccataacttgaggtaccttccataaaacgggcataacttttcgctcggtgctccgtttgagcttaaatttttacagctgattcctgactccattctagggtgacccaaactggcctttg

SEQ ID NO: 163853 - DNA, 324 bp, Zea Mays
ttcttatgaaaatattagggaacaaaaagaaactactgagttctgtgccagttaggtttattacaaaatgtttcacgcaatgcttagcatacatgcttgtctttgagactgacacatatagaaggatagtctttgacatgaactttgctaatatagctgcctttgagatttggaattttcatttagtgctctaaactaagatgtgacgatatcacgatacacattcttgtaacatgtttgttgactaggttggtacaaagaataatgactgtttattttaatgctaactagctcctttattcattttggcatcatattgacatt

SEQ ID NO: 163854 - DNA, 438 bp, Zea Mays
tggatagaaagagtaaaaattacacattcaagctcattattgcatagcatatgatatgaaaaattctacagctattacaacaatgagaactcatctcatcacatcataaaagtgtttgtggcattcgagccatgcatgcatcaaatagttattacagaccgattgttcattacaaaaataaaggggtactgcataaagggtactgcataataaactttctccccctttttggcaacaagaaccaaaaagagagagagaagcgtcaatccaatgatcaccagtggggaggaggatgatgaggagcaaagaggtggtgcgccaggtcagaggcaaagtgttcctctccagactgggtcggaggaggagcactgccagaagggtcctggggcggagggtaagaggacgattggcccggatccccgtgatacggaggcggga

SEQ ID NO: 163855 - DNA, 709 bp, Zea Mays
tgaagaactatcgtatgtgtcgacgggtggcaagggaagaagagaagggaacgctcgttgttggaaaagattggaggcctcgacctctagaacaaacaggaggaaggtatggagcctatcattcctcttcgcgtttatggtatctagagccattgaaaggggcaacagtgtgtggttgctgaggagagcaacacaccttattctccccaacttacaatatggtatctagagctagggttagagcttgtcgccgccatcacctgtaaaagtgtgcgctgccgaccacctccatagcctggttgtgcctcccctcgtgcctgctgcttcgtgcactccaagaggagtgttgcacctaggctcctcgaactccaaagtcgccgccactgcaacaactccttcgccagccgccaccttctctgtatgttgcattcgctgctgccgtcgagctcgtctgcgccggtgtcctctccaccaagctgtgtgtggggcgcgcacaggaggaggccagcagggtccgtccactcgactccccctctaaatggctattggttgccctgttgtctgctttgctctccaaactgtgatagtctgattggtcagcaagggatagtgtggggggagttgctgtgtgaggcaaaatctagcacatccagggttgttgttgtagtaggaaggagaaaagggaaggaagcctagtttgattgtgcag

SEQ ID NO: 163856 - DNA, 445 bp, Zea Mays
tttacgttacatttcgtgaaccaaacggcaccaaaaaactaatgcagtcccatcatgcaaatttaaaagatgcaagtactacgagatcacatgtttgcaaaccttgctcagtcactggatttcaagcaactgtgattctttctaaactacaaaggagaccctacaactctgcacccaattcagcttggattgaaagcttaagctgttgaaaccattgcaatcgcaactggcaagaagggggtaccacacaccagccgggagatcaccaaccatcaacaaaccttagttcaatcagcagtggaccaagatgaaaattgaagtgccatatatgcaatgcttgatctcaacaggcaaagccaaattatgagctagctaggtaccccaacctagtcctatgaaaaagcaagcgaaattaatgcgctatgatccccaaccccatgacatg

SEQ ID NO: 163857 - DNA, 510 bp, Zea Mays
gcgggctcccctacacccatgctgcctgtggagaagctgtctctccatgacggtgatcccctctctctagaagatgctacgcgctatcgtagcgcagttggtgctttgcaatacctgtcatttactcgtccagatatttccttttcagtcaatagagtgtgccagttcctctcgacacctactacagcacattgggcagctgtcaagcgtattttaaggtatttacgagctactacctctcatgggttatgcttcaccaagtctgggtctatgctgttgagcgccttttctgatgccgactgggccggtaatccggatgatcggcgaagtactggaggctataccatctttttgggcaataatttggtttcttggagttcacgcaaacatccgactgtgtctcgatcgagtacagaggccgagtacaaagctgttgccaacactacggctgaacttatatggattcaagtttttcttcgagaacttggcatctcattgtcacgacctcct

SEQ ID NO: 163858 - DNA, 1396 bp, Zea Mays
tgtatgtagtggtagtgcgcatgcatgctatgctagacgactttcacaataatctggtttctggaagggaaatacatgtggttggtgggttgactgactttgtcgtgttgtttgtgctcaacacgcagcagactgggccagtcaagcaactggagtattgtcctctctgacgacgtgctcaagacgcggagaggtttatattatatatatatatatatatatatatatctgtggtgtgctctcgaggtttattatgtcagttatcaaaataattcaatgctttacttgatgacttcagttctccttgtacctcccactcagaactctgagcttctgaacatggaacttgactaataaagtaataatactgctgatgacttgagacttggcaatggtctctttcttgtcgtctatctgaggctcaaggcctaaacttcaaaggtgggattgtgggaagcacaaatctaatctatcgaatgtcctagtggaacgccatcttgacttgaatgatgacttcagttctccttcgttgctatatatcccttgaacctatacatacgcgtatctctcactcagaactttgaacctcttcatgctgcaaacccttcgcccaggatcgcaatcccacactacaaagtgatccatctctgggccttgccgacaacaaaagcaactacagcgtgagaatacttggctaattttctttagttacgcatgtatcctctgttttggctccaagttcatcatatatacgtattcgtttgttttcaggcttttttctgcggattgttgatggcggcgatggtgtgctctgctgtcgttagcgaaacagtgagtaagatcgtctcaagcctcctcgctaaggatgatggcaagtccagtgcagcagaaaacatagaaaggctggagatggcacacatcaagatggagtccgcgctgcacatggctgaaaaatggcaggtcactgatgtgccgctgctaaggtggcggagcaagctgaagcgcgccgcagaggagtgtgacggcgctctgcggaggtgcaagcagcgcgccctggaagaggaagagatccggcagtcctcgtttcccaaacggattgctcatgctaccaagtcatttatctcgtctttccccgccgccggcgctagcagagatgagacaagctcaggcagtagcgatgtccggagattcgagaggtttgcagacagttcacatgaattcctcaagttcgtcgaggtcggtggaaccccctggaagtacacgttcttcaaccctctcatcggccatcttcttgcagggaaatctatgaagtaccacgcagttcacatgaattcctcaaggggtttatatcttggcttcatgctgcggctctctgaaagcactgacatactcggcg

SEQ ID NO: 163859 - DNA, 601 bp, Zea Mays
caaggtcggagatgccaggggtgaagatggggccaccagggtcgccagcggttcgagaaagtttggcgggaaggcacatggtctgatcgagggcgatagggcagtctggagggagtccagtggcatcagtgccgcaggcgggagtggtgtgaaaaaacaaagggtgcttgaccatagggagccatggggtcagggtcaagaagatagttcaactcaggaaagaagtcaatggtgggctggaagggactcgtgaagggaaaatccgtcttgatgaagatgtcgtgttgggagatcaataggcgatgagtggtgaggttaagacattgataccctttgtgatccgggagtaaccgaggaagacacaatggttggagcgagggttaagcttatggggagcagtgacagaaaggttggggtagcatgcacactcaaagacgccaaatggtcataggatggagtggcgctaaaaagagaaaagtggggtgtgcagatgcaaatcaacccagtaggaagcaagaacggatgcctaaatagcaaggagcacatgatattgttagtagtgtgaatcaggcacgcaaccttgacattctgagaagtgtag

SEQ ID NO: 163860 - DNA, 474 bp, Zea Mays
gatgagcgccgttgtcgtccaatcggttttgggcgatcaggattagaagagcgggatgatgaaacccgaaccgttggatgatgagatctaacggcttggattagagcgcgcgcacggttaatacggaccgttgatcttcaatccagtatatggtaggattataccggttcgttgactcgtgaacctaatctgagctctcggcttgcgatccaacggctcagatcgcaccgtaccctttcgccgagccaaaattgtaaaagagcccctcaccttttagcgattcaacccgccatcctctggagctgtgctccgtgtctggcgaatctttcctcgaaccccctgacttttcctaaaattgaggcccaatccagagaacatataaaataggtaaataaatgcagaaattgatttttaatataaaaagaattcctaaaacttgtttattgcatagaaaattcattctagctccaaatt

SEQ ID NO: 163861 - DNA, 1398 bp, Zea Mays
gtgggctggttgattacaactcaacactataatcccttctaatctccctacaccgtgttacctgcagatgtatagtcgtgacaatcccccttcagatcttgcttgaccccaagtacaggcctttagaaatcttgatttgaccactttgaaatcttcccatgttgcacatgttgatggaacacttgaccatctgatgagaacttagacaatagtagtgttcccttccatgaccagtctgcgatccaagatctccatcggaacgatgctcccactgtcgagatccactgtctgaggaagagtatcaaagtcgagtataagtgggcacaaaaggcttgagttgtgagacatggaagacaaggtggatctgagcttcctgtggcagttccaaacgttaagcagatggcccaatcctctccactaccttgtaagggccaaaatatctgaatggcagcttagggcatggtcgattggccactaactgttgagcataaggttgtaatttcagaaacagttgttctcccacataaaactctctaggaactcttttctgatcagcataatgcttatacctcttctgagctcgagtcaaattagcctttaacatctcattatgctcagatatgtgctgtagaaattgtatagcccccacatcctcatctcgtctgaatattgggacagcaagaacagatgcttcattgccatataaggtctagaaaggtgaacaacccaatgatgagtggaaagatgtattataccaaaattcgactaataatagccaagacttccatttctaagggttagagtgcatagcacaacgaagatacatctataaacattggttaaccctctcactttgtccatctgtttagggatgataagttgtgcttaatgctagcttaatgtctagtgatttgaacaaatgcttccaaaacccacttgtaaagaccttgtctctgtcagacaccactgtcttcggcacaacatggagcttaatcactgagtccatcatgagttgagcacttgagctaccccttgagttgtaaatgggtgctttgaaggaaagaagtgggcatctttagtaaatctgtctaccaccaccagaatagtatcatacccctcaaattttggaaacttctctatgagatccacggtcaggtcttgccaagctcccttaggcactagaagaggttggagtagcccaggtggcaacttcctttctccttttgcctgttgacagactacacattgcttcacaaagagctcaacatttgtcttcaatcctttccaacagaacaattttttactttgtgataggtaggcctgggcattcggtaaaaaccgaaacttcggttcgattatttcggtttttaaaaacttcggttttcagaaacaactagc

SEQ ID NO: 163862 - DNA, 1074 bp, Zea Mays
gttaactcaaggcgggagaacagtcagtgagtatgtgcacaagttcacagagttggcccgttacgcgcctgacgatgtcagcaacgagtccaggaagatggcccgttttctgaaaggactaagacccgagcttaagaccatcctcgccagccaagacttcctcaacttctctcacctctccaacaaagctatccaagtggaaagggcaaaagaggaagaaaaagggcacctcaagaggaaattccaagttctccgagctcaacaacaagaacgtcaccagagagctcgaccttttgggctcccacccaggggaccaagctttaataaaccatctggacccactccatcgcgctatagtcagcagagtcagagctcccttcagacaccctccgttgcaagcaaccaaccgccagcaaatgtctgttggcactgcggagaccccagtcacttcaagaataactgccctcacttgaaggcacccggaccgacctactccaactcggtaaatggccccaagattccctcggcacctacctccaaggcacctccttccaacagccagcagagcaggactcagtaccagggcagagcccgtgtcaaccacgtcgacgctcaagaagcccagcaagctccgggagtagtgctcggtgagttccttgttgaatttactcccgctactgtactttttgattcgggagcatcccattcttttatagccactaagtttgtggaaaagcatgacatcccctctacacccctagccatccctttggtcacccgaaccccgggatcggacctcctgtgccaactcaggtgctcccaggtcagaattctcttaagtggggtagtgttcctggcggacttaaccgtcttgccatcccaagggattgatgtgatcctagggatggattggctaactaagcacaaaggtatcatcagctgcgcaaataagaccgtccttctcaccgatcaccaaggaaaagcagttttctgtcaagcccagccgcccgccaacgatccaatgatgtttaacctggcagaagaaaacatgtccgtaatcgaagagtttgagga

SEQ ID NO: 163863 - DNA, 407 bp, Zea Mays
gtccaacttcaacaggagtgtgggctatgttggcatcagcagttttccttgaatctttagcctgcgtgctaagagctttggcagaggcaggagctgatgtctacatggactccagaacagcgtccagcatttccttggagtcactgctagaatgcttgatggcttcagcaatcctactgcgcatggtggactcaacaccttcaactgctctcatgtcttctctaattttggctcttcggccagatttgtactagccttgactggcacagcatgacctggctctatggcaggagcgacccctgcacgttcaataagcttcagcacatcggctatctcaataagttgtggtctatgtgtcaaaactttcactttttcgccctcagcgcactagaagatgccgaagcagc

SEQ ID NO: 163864 - DNA, 383 bp, Zea Mays
ttccttcctctctattttcatggttttattcccaagttagagtttaaatttttatggatccattgatatgttgttaatgactcatttattttattaaccacaaatgcgtaatcgagtaaaactcagcatgatgcaagatttatttaggtgtctttggggtatttatttaattgtgtaagtggtgtgttcacatatgatagtaagtagaaataacacacacaaatagataaagggattaattcctcctattttattatatgttacaaactgggtgttacatttaacctaacaacaaaatagagatcctgacctaccgacaccatgtaatccatcctacccacatatatctacaatatgtccctaactcggatgatcacaccaag

SEQ ID NO: 163865 - DNA, 443 bp, Zea Mays
agaaagagtgccatttccgggaaagatgctgctccagctgctccaagcgagcccgcgccgaagaggaaaaaggtgaaggtccttactcaccggccccgatatattgttcccgaatttggcggcgagacctcttcgactactaaagctgaagaatctgccctcacacagaggaatgaagaaccggctacaatgccgaaggcatcaccggccaaatcaggtgagccaaagaccattaatatggaagaggtagaggttgaaaagacaaaaatattagaagttataagcccttcggcagaggtgacagtgccgaaggcgcaaaaggatcttacaacgacccccaagaggaaaaggattgtcaacgtactagatgtactggaaaaaataaagacttcaagctctactccagggaaaacagccgaagcttcaaaaacgcgaattgaaac

SEQ ID NO: 163866 - DNA, 920 bp, Zea Mays
ggttgggatttttgggatgctacaaacctaccccacttaaaggaatctcgccctcgagatatagactggatttgagaaaagataagtgtattccctcctcaaggagtcctcactctcccatgtagcttcctcttctccttctctgctccactgaactttacagagcttcacttctgaggtgcgggtctttctgactgctgaatcaagaatcttcactggcttctcacggtactgaagatctttctgaatctgcactgcctcttcttcgatgtgactttctggtgcttgcaggcatttgcggagctgggatacgtgaaacacattgtggatgtcggacatggattccggtaattccagacggtatgctgcgggtcctaccctgtcgatgatgggatagggaccgacgaatcgcggtgctagttttccttttacttggaacctcctgacaccacgcattggagaaaccttgaggtagacgaagtctccttcctcaaatatgagttccctccgcctgttgtccgcataattcttctgccgactctgagcttcaagtaaccttctgcggatcagagcaacattctcttccgcctctttgacaaaggtaggtccttctagtgctttttcccctacgttggaccacatgagaggggtctggcatttctgtccatgcaatgcttcgaatggcgacatcttgatgctggcctgatagctgttgttgtatgagaactctgcgtagggtagactggattcccaacttctatcaaatgctagcacacatgctcttagtagatcttcgaggactttgttaactctttctgtttgtccgtctgtctgagggtgataagcggtgctgaaatctagcttggtgcccatagccttctgaaggcttgtccagaatttggaggtgaactgggttcccc

SEQ ID NO: 163867 - DNA, 1813 bp, Zea Mays
ctagtccctccttatttatattgtttagaccattactagtgatagtgatgcacgtcttgctcatggattttaatggtcataactagcaccattacatgttaatgttagtaacatgatagggcagctatttgctggagaaacatgacatgatagggcatatatttgctggagaaacattagtccattttaatttgttctattgttatgtggggcgcagtgtataagcgtcggccacagcagaaggagggttagtggatgagaaagaataggaaaggatagattaagttagttgagaaagtctagggatgaggattagccgcctaagagatagattgagtagttgagatattctagggatgaggattagccgcatcctccctcaggatactatttaatgtaatgaaatgagaggaacaaagtaagaaagaagttgagtcctgtcgagtacctaggaactgggtacccaaggtaaggctcataacctcttttcggcccgttcgaccgggtaagtccgcgaggcggagcggacgaccaagtccccaccgagcaagtctgtgaggtgaggtggacgaccaagtccctgccaagcaagtccgcaaggcggagcggatgaccaagaccccgccgagtaagtctgcaaggcaaggcgaacgaccgagttcccaccaattggacctgcgaggaaggaaccccagcccgacgcagctggcccacgtcggctacgaagggacgcaccatccttaggccacgcccgtgtaaacgtgcgacgcaccgaaggcgcgccgaatagtcgtcatcagggcacgtacggtgcgacccccgcgtacggactcagacacaccaccactgcgttttggggccagtcaagttcggtcgtcggatgacctcagtaccatactctcagcagtgacccaaatacctggaaggattggacagtatgccataccggatgtatgtctacaacacgttgaaggatgacgtagggcccatgacgacgggacgaaccatgtttcgtacgaccgcgccgtgagactgatccgcgagacccacacacactatcacgaagacatgtagcagactcgctacagggacctgtatggcggatgaacaggacggagcgccataccaaaggtacgacaacgcacgaccctacagacgacgtcaggaggaccatgccacccagaggcagcaagccaagctccctcccagtagaatacgagatcatactgtaaagtcctcccttgagttataaaagggcagggcaaccttctttctacacacaagcacacaagctataacacgatctattgcaattccagcactatactggactagggccctggcctgaaccagtataaccctgtgtcccaagggtgaccgccctggccaccagggcccctcctgggatggacgcatacggcgatgaatcgagaaggacaacctccggggtggccacacccgtcacccttaggatgacttgggtcgacggcgtcgccaccctggggggacgggatgacacatcacccagcggaacaaccccgacagccggagggggcgttcctcccagcggtggaggcacgaaggcctgggagacggaagcgtccccctcgccaccagggtcacgtccttcacagacttatgcggcacgtacgcgctggctgggaaggaaaatatgaaaaacataaggtaacagatggaagtcagagataagaaggcaagcaactcggacgtaccaggaggagcgcttatgggtggtcaccttcccttgggcaatcgccaaaggaaccggaggtcatggcatagcccgtggagc

SEQ ID NO: 163868 - DNA, 1047 bp, Zea Mays
gcggggtcacagtactattcctggagtcactgacactttacaaaaacatcgccctagttctatttcttcacagcccgacgtccacgacggcgaatagcgcagggccaagctccggtgagcctacaccggccgattcacgcaacgaccggtgctctacttcggcgcaaacctaattcaagccctaataagcgtttcccctcaaccaatttcactattggagctcgaacacgcactgtccacggtgaccgtatgatcaacagacattctaacgcattcccggtgatctaaggtagcttagctcaattgagttggtcgaggagtatcaggggcacacaagaacactaaaacaaaaaaggtagagggtatgagcagacctgagacaagctgaccacagcgaggtcacaccgctcggtgttcttgagtgatttgggggaaatcccaaattggggagctctagtggttgattcgaggcactggttgcttcactggttgcacaactacttagcgaagcaggcggggtcggcaatttgtagcaggcttgagcggtggctagtgaatttgagagagacgcgcggcggccggagaagaagaaggttactggtgcgcgtgattggtggcaattaccgtggcaagctccccggcaaccaccggacgagctaacgtgagtcacggtggtaaagttaatgtgccaaggcacgtggtgcaaggctgcgaagtggctatctccggcgaacccatccaaatcgaccgtggtctgctcgggtacggtggccagagtaaaatagtggtcggagtgtatccacggcgtgatatttacttacccccggtgctatccaactgatccgagcgtggaacaccacagcgatagcacgaatccgcgcacggctcgtcggcggcgaggggatcagaacctgatccttcctgttactgtaccatgggattgttcttcagtcagcctgacagaccatgtttggggcggatttcctcctgattttacatggcaacaagaccattgttctgtagcaaatttgtagcctaatgatccag

SEQ ID NO: 163869 - DNA, 278 bp, Zea Mays
ttatcggccatcgccgagcggaagcggtggaggcggaggggatgaggtgcgcggttttctcttctctgactattctcttaggttgcagaaaccaaagcagaaggcaagcgcaaatggcagggtaaagaaccatcgccggcccctcttccaggcatataaaggcccaggcgagatccacctaaaacttcgcccgaacccgtcgcgaaattcaaactcgaaggtgaaacggtttttctgttcctcgaacgactcacgcacgtgcaacagatgccccgcga

SEQ ID NO: 163870 - DNA, 683 bp, Zea Mays
ctgccgtcgtcgattccggtcctggttccgttggggactcaaatccgggtggtagccttccaccattgtccctgtcaggtgctcgtggcggaagtgagcgtgatcggcgattggtgcgacctcaattgctcaccgacgaagagcaccgagcctggatccgcccatcgccgtggcctacaccagtcaagcatccatttgcggtaagatgcatacctgtgtgctcgttatactccgtacttcgtgaaaaccctgagacccgttggaattggtgcaccatgtggccgattcaccttgctccggcgatcccccgtcgagaacggtggcagcgccaccgaaattcacgtcgggtagaagggggagcggctcctggccgtccgatctcgacgtgtggtcaggattagggagggcgtgtaccccttcgtcccattaagtaacagccgtggatcccagatcctgtggctacgactagatctctttatttgaaacctaggtcgtcagatccaaaaccgagggcctagattgcatactgatttgtaaagtctgggatctaatcgtggcccatgaaatctaatcggacggctgatctcgtgcgataccccttcgtgcgcgcaaattgctaaagagcccctggaacctttacaaattaactcgtcgtccattagtcactatgcgttgtgtctcgg

SEQ ID NO: 163871 - DNA, 532 bp, Zea Mays
cgcagacacaaactcccctaagtggactgcgggtttattacttctaaatcggagggctcttttgcaaattggtctcgattgaatgggtatctcacgccctgggccgcaggatcacaaagcaacagcccagatcacgccaccacttaaaggaaatggcgaacgattgtgaccctcggatcatggatccatggcccagatttgcacgcgcgaaagggttcgccagatcgattctccacctcacatccctggatcatcggtccgcccatcatctaatcttaaccgcttgctacggaatcaacggccaatggcccgtctcccacctcccggttgcgacaaacagagggcaaccggagcatcgccgacgagcaatgtgccccggccgcatagctcaatccccagtaccgatcaaacaatcgcgtagtgtacgacaatgcgaacgcgatagagtttttcttaccggaagtcgaggcgtggatatcaccggccacagcggtagcggcccagcgtgccaccacggactctggcgagcgat

SEQ ID NO: 163872 - DNA, 702 bp, Zea Mays
ggaatacctgtaggagctatgcacttagacttttatggtaaaaaacaccactttgatagataatgtcacatgaaggtgaacatcacttataggtgatatttaggatgagatatctataatttgaactttggcacatataggttaaagcaatttaagaaagaagttatgtgcggggaggggatatctggttgctatatttgcatctttgactaggcatagagccgatgccagggccgagggctcgatcatgtacctgagcctacctaatggggaagctgcccatgacgtagtggttggagcagtgccgagtacggcaaaaaacccttggtaatatgtcagctccgctgtttcttgtgacgtcgggcgccctttcatcgataatatcgaagccgaagccatgctcgggcgaggcggaagtctgcccgaggccatggccgagcccgctctgggattcgtagacatgcatgacacagttgaaggagtggcctcctgtaggattcacagggagcaggtagccgaggccgggctcgggtgaggcataatttgtttcgaggctgaggccggctttaggtgaggcgtagtttactcctaatggccagcccgcgctttgtcatatgctcgtcccatcaggatttgacagatggcatgggggatagagccgatgtagcttggcattcgtcatcatagttggtgaaagctgat

SEQ ID NO: 163873 - DNA, 496 bp, Zea Mays
agatccgaccgctaggattaaatgagatgaaggggtacgcgacttttaatcctgaccgcacacccgcgatcaggcggtcctggtgcttcttccccagccatcgccgggtaatggcggtgcccaagctcccacggcgacgcccgcgccgccgcgaggcaacctcgatcatcgctgcgctaccgaagacttaatccgtcccaaaataaagtggaggatagggcgaacacatgactggggaaattactgatgatcagagcgggggaggtgtctgcccatgaaccggggcggattgttggcgacgcaaatgctccgatgataaattaggggtggccccactatcgagtccgcccaagattgccttggatgaccgcccagtgactcgatggaggccccaggcctgatttcggacgtcgggtgacgccgtggtgtaagatccgcggcggcgctgcttctcgcctctccgctccgacgcacacacacccctgtcctcacggtg

SEQ ID NO: 163874 - DNA, 571 bp, Zea Mays
atgagttctagctcaatcggctggtcgagaagcatcaagggcacataagggtactgaaacgaggaaacagagggggtgaacggacctgtagagcgttggccatggcgagctcactcacacggtgttctttggccgatttgggggaaatcccaaattggagctctctggtgaacaattcgagacacgagtgggtgcgctggatgcttgaatacctagcggagcttatggcacgctcaatttataggattcatgagcggtggcggctaatttgaaggagatgtgcagcggccggagagggggaagagcactggcgcaaagaatttgtggcgttcaccggtgcaatagctccacgattgtactcttaagtgtgccacagtcactaccgcacagtaacaagccacagcgtggcacaaccgaggtcaccggagtttccacggcgacaccggcagtccggccacgtcgcaatggctacaggcgcggtgataagcctctgctgcgaccaaatccacgcccccgcgcgatctttttaccttcccgtgaatatccactgcgtgccaaacatgaatcacgg

SEQ ID NO: 163875 - DNA, 467 bp, Zea Mays
tagcagatgtcaagagaaggtcaaacattttaaggaaaaataaaacatgttatataatttaagaagcatggtttttaagatgtgtatattttttatttgtttggaatcaaatgtaagcagtttagtaactatattgaataacaacagttgtttttggtactgacatgagtacatgacttgatcaacaaagacattcagtttaaggggggaaaactcttgacatgcagcactatagtagtttgtttgattgtttccactggatcagagagtactagggttccaatgaaagtattcgccagaaactactgggcctgtttggatcacctttcagttatagtaataatctctaggtcatttaaaaaaatctctaagtgatccaaacaccctagattatggttgaattataaccaacagattactggaatcctataatccatctcaaacctgctaatacgagattataggtg

SEQ ID NO: 163876 - DNA, 434 bp, Zea Mays
tgcttctttaatctcgggaattaacgtgataaccccaaaattaagacgttggatatccagcttccctgcgtaaaagtcactgaacatcatgatcaaatcatctttaataagattccagaactttttgaagaaagaggcaccaaaaccatttgggccaggggctgactcattgtgcatttgatcaattgcctatttaatttcactaatctcaaacgtcttaaccagggagtccattccctctttgctggtcattgatctgtcactccaaaagttctcactcagcttcatattgcaggatgtgttcggaccaaataggattttgtagaagtccacaatgtaggcgatcagtgctttttgatccatacaaacccccttgtccgtttccaaataggcaattgtgttcttccttctcctcccattagcatagagatgaa

SEQ ID NO: 163877 - DNA, 276 bp, Zea Mays
cgcacgtggggcctgcccgtcagccccgcgcccaccacgtcttcaacccacgtcctgcccagtttccctctcgctcgacaccgcacaagtaggagcagtcgaacacgcccgctcgtgccgaatcgtctggctcggagcttgtcgtggagcccatctgcgccccgtccgagctgagctcgccctcttccaccctccacattcctctcctcttcgcttcttgtagcgtcccgatgcgacacccacccgccatggacggagctcggccgagcatcctgg

SEQ ID NO: 163878 - DNA, 493 bp, Zea Mays
gtttgcttgaatgtaagcgtggaaattagggggatagagtttcccgctaacctcatagtaatgggtactcagggaatagatgttatcctagggataaattggctgggtaagtaccgagcagttatcagctgtgataagaggacaattaagttggtgtccccactaggagaggaagtggtgactaagttagtctcgctcaagccaaggaaaggaggttatcatcagatgactattgatagcaaggaggcagatccacttgagactatcaagattgtgtcagagtttctggacgtgttccctaaagatttaccaggtatgccacctgagcggaaagttgagtttgccatagagcttctttctggaaccgcccccatctttaaaagagcctacagtgtatctggaccagagttggttgagctcaagaaacaaatagatgagctatcagagaaaggttacatcagaccaagcacctcaccttgggtcgctcccgtcc

SEQ ID NO: 163879 - DNA, 704 bp, Zea Mays
cacaggtaaaagcacgcccgcgtgcgctcgcgcgttgccaggtttgcacagagaaccctggccatttgaaaaattggttaatagccctgcacactatttctatatgtcactgacatttgcgccaaggaccctcactctctattctttcgcgaattgaggtctccaaccgtggacgacggagcaatggctctggtgagccaagaccgaccaggaagtgcaacgactaggctccttctttgcttgacccctaattcaaaccccggcgacaagaatccctcaactaattgcacaattctaggtcgagaactcactgtccacggcgatggcgaataccgaggataatccgaggtgttctcgatgatctatcatggtctagttcaattggccggggctgctaagcatctacagcacacaagagtattgaaacgagagtgaggagggcatgagcggacctgcagaaggctggccacggcgaggtgttcacgcggcggtgttttgactgatttgagggaacttcgaaattggcgcgctctggtggacaatctgaggcacgggcggttgcgttgggtgcgtgactacctagcagagctcactgggacaacaatttataagtttcatcggcggtggtgtccaattttgaggtggcgtgctggcggccggagagaaggacgagtcaccggagccgcataacgtggcatttaccg

SEQ ID NO: 163880 - DNA, 722 bp, Zea Mays
tgtttgctcatcaaatacctaccatcactcacctttacccttaggggtgtctacaactgcaagagttgcatcccttttaccactccagccgtgttcactcatgaaactagttgaactgcctgaatcaaccaggaccaaaacttgttggcaatgaatagatgcccacagactaattgttctattgtcctcacttccactgacaacggcaacaaagatagccagaactccctcttccgttgatgcctcagactgttccttagtctcctctttctcatcctcattcacctcctcattgactgttatcgcccacatttcttcgaccaaatgcaagggaacactactggaacaacaatgattgtagccccacttctctccacattaaaaacataaacccttagctcttctatatgcctttaatgcagtgagtttattttcttctgccatatgtccagtaactgttgtcttacgatgttctccatatggggtaaacccacgacttacagggactgctactaaatttactcccactgaattaggcttccctagtggttttgaatacccactcatctccacccttctattttccctttttccagtgtgcatcaacacaacctcttgcaacatggctggagaacaggtggtgtccaaatcaactggacgttgaatcaccacaaatgacttaatatcatccttcagcccatccacaaaccgagcagtaatca

SEQ ID NO: 163881 - DNA, 814 bp, Zea Mays
gcccctgcagatctccatgaggaccgctagctgtaatagggagcatgttgtcttagttttaatatgtatcgttttctactgcttatacaatgttttgtttctataaattataactatagtagtccgaacaactgattttaatactaagcgagttatcgaggatattgttatggtagtgtccaccgttgaaagttttggcctttgcgcgctggtcattttgcaacgtaaacctagtactatgaatcctgggctattgcagtgcatatatatgtcgcgcgacctcaaaatcattgaaggccttttcatactgtccttccttattataagggactgtagtgtttgcgactgtccaaactttttctagctgttacgagaggtggaaaagagacataattaaattaatggcggcgttggacgacatcatatataaccccaagtttctagacaaaatcgactgcatctgaatgaatgacagtgacttctctttttgttagcaacactaatctgacgaactcaactcaatagcatgaaaacgctaagcatataatctggtacaatcagagaggagtttagggagggtagcagcaagagaagtagaatggagaagcacaatagctgttgtgttctagaagggagagaatccgggtacatgagagaatggaggaagaagatgagcagtagttggaagatagagtctaggttctcaaaaatcattcttccctcctgctttcctgtacagttccctcttttgtagctggaggtgacccattgccaacctgtcgactgcatctgaatgaatgacggtgactcctct

SEQ ID NO: 163882 - DNA, 638 bp, Zea Mays
ctaggcgtctagtcagtcattagggcacgatggctctcctcgaagcccctcgctacaggggacagatgaaggttcctctagtaccacgaccgccgttggggtaggacctccactccctccaacaaaggacgcgggggcaagaataatggaggcctgagccgagtgagacaacccgtctgttcggcaaacctagatcaaaggccaggaagccagccagcctaggatcgagtggaacattcattcttggccaggaatcgatccacgtgaggggacacttggatttgttctaggtggagaagtgagaatggggagtcaaaatgagatggatttgttctcgatccgggtcaaaacgaacaactagatcggattccaatctaggccaatttgttcaacctggaaggaggctggaaacatgccaattcgaccgatacgaacgcgccatgggtgccgacggagttggcttccgagcctgctacgaaaaaggctaaccctcatccgccttgtccaaattacttgcgggaaatgaaaaaatgaaccggaaacactagacccgacgacctcggtcgagggtggcggggaaaaggttcccgacgacataatcgtgctgcctctcccattgaaagcaggcaccaccctcc

SEQ ID NO: 163883 - DNA, 424 bp, Zea Mays
gggtcgatagagtggccagcaccgccgatcgcagccctggatcatcacagagtgccgggatgtcctgggggagtatgaaggattcggggacgaaggactcaccagtaatccccttcaccaggagttccagctcctcccaggacaggtcggtacccagcccgcgctggatccggtcgatgtcgttcgagccggtgaactagcaacacaggcacgccctcctctgcagcagcgtgatccggcacttcaggaagtcaccgaccacgtgcatggaggtcagaccaccggttgccaggatcttgattctgtccagcacaggcaggagctctggcgatagcgactgcttggtcctccagtgcttgcggtcgagggctagcccattgctcggcagaacgaggcggtcattggcctcggcgctgacgatcac

SEQ ID NO: 163884 - DNA, 823 bp, Zea Mays
gttggcgggtgtcgtcgggaggaattgcggggcggtatacaacttgcacactgaggattcctcgccggtgtgccatcctcgccgtgcaatccgcgcaccgccgtcgacgacgcgcctgtggtcaccaaactaaggtgaggaccctcgccaagccttcggttacctttgtgaatacagtacacctagaatcgtagtggtcaatgcagttgtgggagagcgatttctcgccgccgcgagctgtcaccgcagagccgctccgtagcgtgagctggatccgagcacatccgatccccttaagcgatagctctgtgtgatttgctacaggctcgctacctagatctcgagttgggggtaggaatcagggctctagtccgtgattgggtgttcctccggcgatgctccgccgggtgggaggtatgtgccgccgtcggaagcaccgtgggggggggggggaagacaaatcgtcggtcgcggattcacgaatggacagttaggattaagtccatcatacccgtttggtcaagtgtatctgtgcccttagatcttgatcggacgttccagtggttgggttgagcgctttaaaatctggtgtgttggtcatcaatcggacgggagccaacgcttaccggttgatgggcaggcatatctaatcctagccgtagatttaggatcgtgcgaccctggtcgaaacataccccttcggccatgaatttttgctaaagagaccccgccaaactttggaaacaacccgcggtcctcagggtactattcactgtgtctcggggatcttacaccgaggcccctgaccttcctgaaatttgac

SEQ ID NO: 163885 - DNA, 440 bp, Zea Mays
gcccggagcgcctccgcctcgggcccgtcaatctccaccaccgagtagttggggttctccatggtcaccaccaccggcgtgccccgccggacatccctcccccacgggtaggccagcctcaggcccggcgccattgccgccgacaactgaaggaaagaacagcactcgcgaagcggcgaaggtaagggaacaccagcaccactgacacttctgttctcaccggggccctctgcctccacctacccgccgtcggtgctgccgagaacgacgcggagcgagcatctctagcatcaagagccgcctcccgccgcctgggatcgcggaatgcagctgcgtctgcgcgggtgggtgggaatcagatggattcacagtaactccccgagcttgccgcgggctcaattcctaatcttccaccgccgcaggagagatgagcggagcag

SEQ ID NO: 163886 - DNA, 591 bp, Zea Mays
tgcattatcgagaaaagccagtgaagattctcgattcagccattcgaaagacccgaagctcagaagtaaggctttgtaaagtccagtggagcagagaaggagaagaggaggctacctgggagagtgaggactcattgaggaaggaatacccttaccttttctcaaacctagtctgaatctcgagggcgagattcttttaagtggggtaggtctgtaacatcccaattttgatcccgagtttagaaaccctaaactcttaaacccccctaatcatctcctaacaccccatgaagcattatattcatcatatgcatacaccatgattgctagtagcacttctcatagaatatttcattttgggcacttaggaaatttatattaatttttgtttaaagggaaaaaggattaaggaaacagagatagaaaagaaatagaaaaaagaaaaaaggaaaatcccttcccccctctcggctgggccggattcggcccaagccttctccccttctctctcccacgtgcccgcactccttccccgcgcacggcccacgcggcccacctccagcgtgcccgcccacgtgtcacgctcttccc

SEQ ID NO: 163887 - DNA, 551 bp, Zea Mays
caacctatatcaaagaaaaattgaagaaatttagaaacgtcggcggaatcaattgtacccggaacgaatccaatccatcccattccaatcaaatagcttcatagatctcacatgcaggaacatgaaaccagtcggcatcatcgcccgctcctccatcgatgtattcctatgcgagcgcgggagcgagtagcagactcggctttagcggatggagaacatccgccacattcaggggacgtcagtgtcgtccactaagatagaggaggctttagcgcgtgctgcttgaggcgtagagtagttctccatccactacatttatcaaacaaaacactacagttgttgttagagacaatcttaagccatatttaagcctccaccgtagaaacgccccaccccatcttcattatcctttaggtgagaaatggctccaacaacaccccaagcctcacccgatgtgatggagagtctgctcccccgtaaatatggaaacctctaatctccctctactctttaattattctatttctttgtgatattaatgtttttaagta

SEQ ID NO: 163888 - DNA, 922 bp, Zea Mays
tgaaacttgacgactaaagtgttcggagcaaaataatcccaatcgcgcatcgtccgagaaaaatcatgcgcaagattatgatctcattcgttcttcagcacactgttgcggctacaaaatcgggtatacgttcacagatattgcttcggctaatttcggtcgaatcacgccgaacgaattatcagtgccgaattcagtttatttcggtctgtcgtttcttgcccgatccaagactttggatataaatgacgggtgcaaattcatctgattacaagtattcgctaaatcaaaaccgtgactgcgggtccgagaattataattgagcttcgattctcgggtaaattaccgtgaccataaaatcatgtattctgaccgtagatcaaatatctcgtgttttgattcaaaatatctgtaattttatttctaaaataaactgaaaggtaggaaaaatctaaataaaatcccagcccatcctcatcttttcaccgttcgaaatctctctctctctcttatccacttcagcggtcatcctcatccaacgctgggatttttccactgccgtgtcgtgggctggcttcttccccagccgctccttctcatctctccctctacggtcgagctcccagcctgcacttcggttctctacttctctgcgtgtggcttcacccctggagcaaaaatcccgccgcccctacgcagatttttctagcgtctatatctctgtgcgcaggtccgagccactgttcggctcgagaagaaaatcctgccgcgcttgatttctccctgcgcgtgcgttcacccagtgattcctcccctctcccagctcgtcttcttctctgctggtcgccggtgctccagctcggctcctcaccggcgggatcctggtaccgcgagctcgctggacgctgctccttggacgggc

SEQ ID NO: 163889 - DNA, 601 bp, Zea Mays
actggagggagctggccacgatagccaaggctcgaaaagcttggcgggcggtggcgcggcgtgctcggggcaaattccggtgatctttggctcgggcaggacttgtgagcgcgcggggaggtatggccgtggctcggggttgctttataggcacggcgtggtgcatgggcggccatggaccggcgagcgcgcgcgagcgtgcactggggagcgcgggtgcgcgaacgggcgtgaaccgggggtgttagccacggtcgaacacgtggaaccgttgcttctgcccgagttctaacgccgattgggcgcaaatcttcacaaatttgggcaagatcgctgtgaaggatttgttcccctgacagtgctttgtcttttgtgtatggacgtcgcgcggttttaggctaaggacagagagttgtagcgtcaccaaggtgccagtgtcagaatgcctggtcccgaggtcaaacggtgccaaaaccatgccaaatgaatttggtttgagttcaaatttttccagggtgtgttcaaggaaatttggcacaactttgatatttggacttcttggttttgagttttgaaaaatagagaacgcatttgatctttg

SEQ ID NO: 163890 - DNA, 601 bp, Zea Mays
gtcgatcaagatgctcataggatgtcgccgcagagtcctggtattttttaaaagcttcagtcatcgtgcgcatcatctccttcaattccatctgagagacacactcatcatcattaagcttaggccccttgtccttgtccatttgattctttggtcctatcattgttagcacaaaacagagacaaaaaggcaacaaacaatgtgaaccctgcaactatctctcagggtggtggtggtggtggaatacaaattatgaagcatcttaccccgctcttacaacgttcttaccagcactgcaagtggcaaacggtgaccggtgtgactgtccaatgagcgtgggtgtgattgcaaatgagtacctattctgctcgagagaaagctggagctatgggaaggctgactaaatatatatatgtggcacacaagtcagtaacagatagcaatgctgaataagtgttccaagtactcgtcctagttgctggcctagaaaatgtaatagaacagctggaccaaggcacaagaaaggaggtacaagtatatgggtgcaacaagaaaacaggcttggggcaaaataatcacagaggtgcacataacactggcg

SEQ ID NO: 163891 - DNA, 279 bp, Zea Mays
gccacaacaacaccctttagtcgtatgaacatcggaagcatccttcacacggttatacgacaacaatctaaacgttgtgttacacaagacatacatctttctttgttgcgagtataaccatattacggcatatacccgcacacctcaataaaatatcttgcgccaccaccactacaatacgcccatttatcgcctatatgcgcacgaattcctttcttgcgacacatgcactcaaaatcaatccacgctacacaaatacactatatatgaagcgtaatt

SEQ ID NO: 163892 - DNA, 557 bp, Zea Mays
ccgatgattaggctctgataccatgtaagaactagatcgatcaactaatgattgtattgatcagaggcaatagcctatatatgtattttacactgctcaagcatgtgaggctgaatcgcacaaggcatgctggtgaagtgctatgtgcggagggcagttcccagacgtgggcaacaagtgcgggagtcagttgagacctgcacgaatcgatctagagcatatttggtgaactgcatatccggtgaactgctaatacagtgggcgaggtgaggaggaagcaacatcttggagaccggcatgtttgccatcacgattgtcgacgaaggagctctgaggcggtagaggtatggagcacgacggtgatgagtaagggttttgccaaaaaaaattaaacacgggagggttttgccattagcggcaaattgggattcaaaatgttttttgtgttgttggttttcatattagtttttgaaacgaatagatggcccgccaaagctagactgatacaatgactgtgcgttgagacagtacactaaaaatagacattcgctaaaaat

SEQ ID NO: 163893 - DNA, 440 bp, Zea Mays
tgcggtgggggaagcagggcgccgccgggtgccgtgaccgaggttaggggaatagccctcgccgtggatcgtcgcatggacgaccacgattagaagcggagtaccggttcggccaagggagtgttggccgtccgatcggtatcgtacaggtctggggcatgttccaccattttagatctagaccgcagatccgccatcgtctggtgctggaccgatctctggtcgtagcgaatctcagccattaatcattaatcatactgttaatgtgtcataccgcttcgggttgaggacattctaatctgggccgtcggcttgtaattcgatggttccgatcaagggatagcccttcggcccgacccctttgctaaaatgcccctatgtttccagggaaccaacccgcggtccagtcctgtgcgctatgtgtcttaagaatttttacc

SEQ ID NO: 163894 - DNA, 480 bp, Zea Mays
cccacgaaagggcccctgtcggtcaaaggtggtcccggtttaagcccatggcatcgagtgtagaagagtaaaggatgttgagcctgctcccaccactcattactaccttcttcagtcataccgaccccatgatgggactgacaatgagcgggtatcactcaggttaggggatatgatctaggtgagtggcgcaatcgtaggtgatggtgtggtcagaccagtcgaggaaaaccagagacgtttgtcaggcccagaatattttgcgttgttccgacttctgatgtcttcttggcgcgtagtaatctgaccctctgaagatcagcaggcatccggtctcattcgggaaggcgactcctcccttctctcgcttgtcacccttcctaggtttcaccccttttcgagtggcgttcctccacccaggaactttctcagcaacctagagtccttgtaggcgtgtcggactaggtagcggtgattcag

SEQ ID NO: 163895 - DNA, 716 bp, Zea Mays
atgataactccatctaactttttcctttgtaactcatgaatggattcgtggaggataataactccttctaggatattacgaccagacataaaagctgtctgtgaggggctgacaattctgtctgctactagacctattcgatttgtgagaactttagtaatgattttgaatgacacattaagtaagcaaataggtctgtaatcctgtattttatttgcattgtctttctttggaattaaagtgattattccaaaatttaagctgtgaactggtagggaatttttatgaaagtccacaaacaacgcaaacagatcaaacttaataatttcccaaaacacttgataaaactcagctggaaaaccatctggtccaggagctttattatgttccatattaaatactgcctttttaacctcttctatagtaaaattagcagtgtctaactctattttcacatatggctccgcattggcaaagtacactgtcttagctactatccatcctcctagcagactctgcatcacacacaccacgcaaaccggagccaggtgtcggggctccctattcttccgtgttctacctcttccccttgatcaacagtagccatggtttccgtgtgggacacggtattggcctcagtcgacacgaacggagtatggtagtagcacggatgcgcgtccgtttgcggagtccgctggaactctgaaagactggaa

SEQ ID NO: 163896 - DNA, 738 bp, Zea Mays
aaatcatatcctgacaaatctcttcctgtcaaacaccgcatattaccgtgctgccattccattggcgtttccatgagtgtgatacacatagcggtgtttgcttcaatcacctccacctgatcacctacccattgaaccaaaaactgatgcaaagtagatggcacacaaccattagcatgtatccagtctcgccctagcaaaacattatacctccctttcacatccaccacgaaaaggccgttgggacagttttgctgcccactgtgagttcaacagacataattccttttgcttgtgatggcctcccctgaaaacccacttagattcatatttgtcttaattagctcactctctttgtatcctaacttagaaaacacggatagcgacattacatttacacctgctcccccatcgaccaacatgccccccattggcttcccatcaatgtgaccacgaacatataatggtttcagatgagatcccttctcatttgttttttcaaacacagcatgctcagccccgaatgttagctcagccacatctccctctcttgctctgaactcagtaggtaaaacaaacgccatgtttatatccatgtccccatgtgcttcaacactttcttctttatcggaaccactgctgttgtcattatctttttcctccttggccaatcgtttctccctccacgttttcttagggataaccatcgggctatcctcattaaaccatctatcacgc

SEQ ID NO: 163897 - DNA, 382 bp, Zea Mays
cattgctccgttctcacttgttgcaattcctgctgcaaacttattgcgattcttcctgctgatcagctgcacgtgcaggtttagttgttcctgtaaattgtatctttgggtagcaaattgtagttgtgcttgtaaaagcaacaagttatcatttggtcgcctgacatcaactgtgtacttgtttgtctcaaaagacagcacagattacacgttctaaaaatgtgcactatctgtctagtaatcgtgttttttcagcattattttcctctcatttcctgacggtaaatcgagaaaaggtcgtagagctgcgactttcagttcataaaacaccagtatgtatcagtattcaccaaacagaaaggtagcaattacaaccaatgtc

SEQ ID NO: 163898 - DNA, 390 bp, Zea Mays
caaatcttagcccttgatcggggatctagcgactgagggtgtaccggttcgggcaggctgatcgggagcgttgatctatgggtggacggtccagaatcgattgagcgagattaaacccaggccactgatcgttgatcagacgattaccaattcgtacctcttcatggggtgggccgatctaatcctagccgtgggagtgaggtccaacggccagggttcgtagttaccccttcggcctggcctttttgcatatgagcccctatagaatacagaaaccaacccgccatccctcacgtctgtgcattgtgtcttaggaataattgcgtgttagcccctgcgcttctcagattttggggtgcagtccggtaaatagaaaatacaggaaaaaga

SEQ ID NO: 163899 - DNA, 513 bp, Zea Mays
ggagaagatgctcaacatcgcccaatgctctgaccaggagaaggttctttatgcttctagtggtctgacaggtcctgctgctgactggtgggattattatgttgctgcccatgacgctgctgacactattacttgggcggaattcacaactcagttcagaaactaccacattcccactggattgatgaagatcaagaaggagtttctatcattgaagcaaggcaacatgtctatcagcgagtaccgtgacaaattcatccagatgttaagatatgctcctgatgaggtggtagatgatgaaaggaagcaagagcactttacagaaggactcaacgggctcctacagtatgcactggttgctcacacatttccatcatttcagagcctgctggataaggctcttgctattgaacacaagcgtgttcaattgggagatttgaagaggaaggccattacccaggggcagggtagcagtagtgttcgtcctcgctacgttccgcaccagggtacacc

SEQ ID NO: 163900 - DNA, 380 bp, Zea Mays
cggatatggaatggctgctactatagctggtacgcggaggacacggattcgccaactcgggccgacaatacggacgcacaacacgtctggtcggaggcttggcacggagaccaagagaagatttgttccacattgaaggaggaggagatctcagtctgaccggaggcatttattgctccatgtactatgtatttattactatattcctgggcccatctatcggggttcaggaggaagtagtgagtgcccacccttgatgtataaaagggaaggcacatgcactaagagggacaagcccattcgagctcgtctagtacctgagaactataaccaagagcaagtctttagctcaggcaatacacctccacagtggacgtagg

SEQ ID NO: 163901 - DNA, 789 bp, Zea Mays
caactttgctgcataatttggtatgagttgccattgagatttgggagaaaatcaagatcaaacattgactgtcaggtgcactgaatctgacttcgccatggtacagtgcctcagcagatcagaccgccagcgcggcaacttcaccgctgacgaccgatttccaccgcgattcatgccgccaccggtccaatttgtgctcggggtgactggataacacccggtgtacgtcgccatggataactccggccataaacaaattcggccaccgtactgcacacgccgcggtggaagtcgataggcacgccggcgacagccgccttccggccttgtgccacgtacttgggcacctccaccgcatcgccgtgaacccttgtgactctccgtggctcgtcggagtgactgccacagtagatgccacggattcacgcgcgccagtgaactcttactcctccgaccgtcgcgcgtcaccgctaaaattcccggccaccgccctcccgtagtataaattgaccccgccgtgagctccgtaaggtagtcaagcgtccagccaccaagaattagcctcgatcgttcaccatggtgtgcgaatttagaacttcccccaaatccgcgcaagaacgccgtaggagagacctcgccgcggccagcgcaattcgggtcagttcataccgactgctccctcgtttgagtgctttcatgtacccttgatgcccatcgacccactcaattgaactgggttgccttagatcaccaggaacgcttgtggtcgtccgccttacccgcagtcac

SEQ ID NO: 163902 - DNA, 546 bp, Zea Mays
cattagaaatttagaataaaagaaaaaactaaagtaggccaggaacccccacccctcagccttttggcctagtcggcccatttcttccccgccctcgcccgcgcccgctccccctctctctctgtgcggtgtgtcccacttgtcggcgccgccccctcgcccgcacgcccgtttcctcatttccctctctgccagcccgatcccacttgtcggcaccgttgcccgcgcgtgcgtcctctccatatgtattgtggacccgccccgtcagcgtgcgctgttcgctcgcccgccgacaccctagccccgcctgtcaacccagtcttcccctccccgcaactgccgctcgcccgacacgcacgcacgccgcgagagccagcccacatcacgccccacgaccctagcttcttttgagcctcgcgcacacctgttctctttcccctgcctcattcctctcgctcgcatcccatctcgcgcacagctgcccgagctcaccggtgacgcgtgcccgccgtgccaaaccgctcgaagctctagacgccgcgccaa

SEQ ID NO: 163903 - DNA, 854 bp, Zea Mays
gtagtagtgctcccagttcagatagctccgcagtcacaatggcagtgatagcaatttcacccgtggatttggatacctgtcggatatctgacccgacgaagccgagtatagatacatgttttgacccatgggttagatccgaatccgacccgaagccggatgagcagggattaggatattaccttccacccgcgggttatccgttggatatccgaaattgacccatagtgtactttttttggtctagtccatattatatagcaaagaacaaaccctaagagcatctccaagagaattaaaaaacgaccccgaaaaagtagttttaggtgcagggtaaatagtatcgagagtttttcctcctatgtacaacatgtgacgtaaaataggatggaaaatatgaaatggaccggtgaacatggagcccagtttcactcaatgaattttttgtgcagtggcctgttttcggttatgttggctgatgtatttcttggcgtgacatatttcttggctgacgtatttcttggccgatgtgagatggatgggccgacgacgattattttgggtcaaccaaaatgttccatgttagtagctacacatgagggaggtttgagggctatcaaaaagacgggagatgtttaagggatttgttgaaggcttcatttttcacttttccccaaatttctgtttaaggaggattttaagggacgttttggagatgctcttaaaatgaacccgacgccaaatgctcccaattccccactgttggccgctcgttctagccttgctggcttgttgcgttgtgccccatggccccctccaagtcccataggccgcaacaccgctggtggctggcc

SEQ ID NO: 163904 - DNA, 446 bp, Zea Mays
gtccaggcgactctggttgtttgcatctgatctagtcatctgcgaaactttggccagtggttatgagctatctaactcgagttccccgtgttccctaacgtgcaatcgaaaagaatatgtatgactttagttctgtaggtacagtagtagtctagtaggtgatacgtatacgtaggctatgaagtcaacgaagaagtctagttagctaggggtgtagccgtgtaggacgagttggttcggcatatgtcggctcacgattcggaaacgcggcatcaggaattcaggatcttcgatggggacgattctttcgcacgctcagacagtcagactgctttgcactaaaacaggagtttggaatatgtcggtcattctccatttggcccagccgcttattcatggacatcctgactagtctctttttcggctcctcgccatattagtttagc

SEQ ID NO: 163905 - DNA, 768 bp, Zea Mays
ggagaacgttggcgggtgatgactcataaaatcccggtgtttgtctctggccgggggtgcattatactgttgctgctgatgctgttgattcagctggttctgctgaatctgctgaacagttgcagtgagtccttgtagaaactgcatctaggcagcaatgaactgttccatgttggggttcggtggtggtggtggtatctgttgaccacgttggttcctgttgttgttgggtccttggcgagtgttcaccatctgattggtcaaagattgaaattcttagagaagtggggagtagaaaagattctagaagggaaatatcctaagtttatgtttttttatatgctcttatggccatcattccataagaccattgcactcaaacaaaaatccaaatcaaacatagcaaccaacaccatcacatggttgttattgttataaaaataactttaaaagagtattcgtcgtctgacacgggaactaacttattacaacataaacttaaaatttctaaagcagcctggtgacggatccgggctcctcatagtgaagcctcttgcggggaggagacaacgccatggcggggacctgggcttcaggcggatcccatccttgaagttgggcttccagggctgcaatcctggcatgggcatcctccagctccaagtgcaccctagagagatccagggtggcactgtccaggtcggtgttgagtccggccaccacaccagctagggtgttgaggcgctcctcaccagctccatctagaac

SEQ ID NO: 163906 - DNA, 887 bp, Zea Mays
gatcaatgcaagaaatgaacaatatcatggaattagatgcgctctcatgtcagaagatggacaagaccagaggagaccgactacctgcaactgcgaggctaccaggcaaggagtatgtcactcaagccttaaggccaggcaaaaagaaaagaaagaagaaaaaaggagctgtgtcatctctgcctgtcaactcgacagctcctcaccaaaccatatatatatgcagagatagggcatgcatgacatttccaagggtgacctatcagcgatgcagattgcaatgagatcaggtgcatggagagcccccccttgagcttacgctacttttctttttcctggccattgaaaaaagagaggaggagagagccagtcccagagcttgaagagaaccaaaccatgctttgctgggctacacgccttctgttctcggagctgcggcccgtttctttcccatctttccacaaaatgaggcccaagaggacgctttcaccatcagaatcagaaaacactgcttccgattcgccaatcagaatacatacagatacagcagcgcttgtcgacgacaaggaccgcttgagttaaggtctgttccacttccacctatttttaacccatcgtcaattaatcattgctcctggtaaagaattagatcaccaaaacactactaagcaaaagctttttcagaggtggcggtagagagagacggttggctcaggaaagctcctgcgtgcaccgccgacgcagcagcgggagtggttgcaaagagagatcattacctgatagatcagtaatagaaaactaaacatagatctatattctatcatgtttgttttggtctggtgctctgctacttattaatgcaaattatctgatctcgtccatctcca

SEQ ID NO: 163907 - DNA, 898 bp, Zea Mays
attgattttgtgcacaaatcatctatcaaatctcaagcactaggaaatttcattgttgattggactcctagcccgcaagacaaagctagcacatcagacaaagttgtctggacaatcttgtatgatggttcatggggatctttcagggctagtgccgcaactgttgttatttcaccatctagagtaaagacatcatatcctgctaagctgtaatttcagtgcagaaacaacatagcagaatacgaagctctactactaggcttgaggaagcatcacaagccaggtggacaagtcaagtatggcaaagaactcggcattagaaaagtaccttcatatggtccaaagaatggattcctccttcaaaggcttctcattgaaaaatatcctaaggttggataacgagcacactaacatattagccaagtctgccactcatgggctcccactacccccatgtgttctttgaaattttaaaggcacgttcggtgcagctgatggaaagagccatcttaatagtgtctcccacacataatgaagattggagaacataaattactactttcctttaggggaaccatctagtagatgacgaagaatatattaaaaggatgcagaccagaatatggccataaaagataataggaggggagttgtataaagaaggtgtttgctcacccttactgaaattcatttccagaaatgaaggtcaagagttctaatatctccagtccgaaggtaagtgtaacgccatgaatttgggggtataaattttcatctccaatattcacccaattcaggcattactctattttttcttcctatttcgctccttcctcctattttcaaagcaatataaagactagtgtctgtatcgcgtgtaaccaaaacctaagttgat

SEQ ID NO: 163908 - DNA, 657 bp, Zea Mays
tctgagccgcggcgaacaggtatgcgccaggagtcatccgattccaacccgacggcccagatttaaatgaatctgattcactcgtagccattggatcttatatccacgggcacgatttaatcggacgacacatcctcttcggttctaatccgtgccctacattcccgatcggacggcgcgccctccgtcttctacactgaggccgggtgacggcggtggtcgtgcccctacggcggcgccatagatgcggactgcaattcccccagcccgtacacctaagccctgacccaaactatgctacgcagagagaagatgaaaccgaactcgcagacggggcactcaccagcacctgcagcataggcgggtctatccacggcgcccggttgccccatggtggagatctacctccagtgagcaattggtggaagataagccatcgatttcgcccgcaatcgccgtggtcgactccacacaggttctgcgcaggcttttggtccgaacataggcatagaacaccaacagaggtgaggatccgtggtggcgcaatgcgccgctcccagcgcactaacgacttcgcccttctcctcgcgattctggcgctggcctttggtgtatgtgtgagacaaaggggaggtgggacctgacgctccattttta

SEQ ID NO: 163909 - DNA, 495 bp, Zea Mays
gcctaccatcctcagactgatggacagactgaaaggactaatcaagtatgggaggacacgttgagagcttgtgcccttcagcatggtagtagttgggacaaaagtctaccttatgctgagttctcatataataatagttaccaggccagtctgaagatgtcactgttcgagactctgtatggcaggaaatgcaggactcctctatattggatcagactagaggaagacagttctttggacctgcacttattcaagaggcaggagaacaagttcgtataattcgggaaaatttgagggtagctcagaccaggcaaaagagctacgctgataatagaagaagaccactggagtttgaggaaggtgatcatgtgtacctcaaggtgtcaccacttcgtggaatgaggtgatttaaagttaagggcaaattgtcccctcattttattggaccattgagagtttttaggcgagttggagagatgtcctatcaactcgagc

SEQ ID NO: 163910 - DNA, 453 bp, Zea Mays
aattcaactaagttgacattttctcttgtagatggttcgtacaatccaaaccgcccggaacaacaccaactacatccctctgccacgacaagttcccgtctacctagtggtagtcaaggaaatccctgtggatctccctcgcattcgtgtggagaatggagttattcaggaggacaggtcgaaggagtttcttcctacgcccaccccattggcagaatcactagccttcgcagctgtatcatcatcttcagcaccgccagcaccagcagtccaaagccctgctccaagaggcgacgacccagacgactctggtgacgatgatgaagaagacgaagatggagaagaagaggaggagaacatcaacgaggaagccaacggtgaacaacaggatcacttcgtgtgggtatggcctgtcaccgaacattatatgtggcggaaccacccgaatttttc

SEQ ID NO: 163911 - DNA, 715 bp, Zea Mays
atgacatccgcagccaagttcaggacctagatgacacttgaagtcaagtttagggacccagaaatagcattttgaaagtacagggacctagatgacacctgaaggctgaagccaagttcagagacccagaaatgacattttggaagtagagggacctagatgacacttctcgccaagttcagagaccgcccataaatttttcttttttagtttcgatgacacgtgagctttcatggggatgaaggaatgcctcaccagtgtggctgcatcaatgaatgggatgtgcagaaactcggtgatggcgtcaatgccggcgaggcatcacatagagcacttgacctgcaagagcacaactgacaagtcaatctgtgactgaaggccatagttaaagattaatcggggatggaaatgagaaccataagaaagcatcatggaagccgaataacactggtgggatcataagttgccaaaggaaaaagtggcgagacaaactgattttatactacaggaggagagcggtggatggtggtatggcaacagaatgcacaagtccctctcacgaggactgttcgtctgcaaagaatgtcatgtgataggtcactggttattagttattactaaaccaaaaagcacaggatgcaaagagatggacgtacatgcatggatggtgctgagactcaaaggatgatcttagtggcttagtgaggcccttact

SEQ ID NO: 163912 - DNA, 627 bp, Zea Mays
cagcgcagcagttaagaggccctgccagcacctggtggggaaattatgtggctatccagcctgccggccatcaagttacctgggacgaatttaaattggcatttcgggagcactacattccagaaggggtgctccatatgaaacatgaagaattcatgtatctcaacaagttcaaccatttgtcccagtatgccattgatcaggtcaacactgacctgaagaaaagaaattgttttatgaggggccttaatgaccggctacaatggaagatgaccacctgcctcgacctctcttacagtagggctatcagcatggtgctagcagttgaagccaagtatgcaggcccaggaaagtcaaagggctatggaggtgacaggtccaaccaagggcctgagaagtgataaaggttggtgatctgaccttttaatcaaaaccattcttcaccacatccaccctcctacccctttaaacagcctataattatccgccctgccactgcccccacctcaacaaatcagccaagtgtccctggtactcgtttccctgcactccagagttcatctactggctgcttcaattgtgggaagtctggacacttcattaaagactgcccatatccgaagcgga

SEQ ID NO: 163913 - DNA, 854 bp, Zea Mays
tgaagggagaagtgcggagagggagagaaggaggcgaattgccgcgggtggcggaggtcgcggagctcggttgacgtcgggtagtgctcggcgccgtcaattggacatcggggaggtgccacggagccgcattggacagcagggtgtgcgtttgctgtctcggtgaaggcgtctgtgcactgggtgcgggtgaattgctcgatgtgtccacattgccgccgcggacccgcctcgcaccgtgtccggcctcgtcgggtctccaattctaggtacggaaacctcagccatgtccgtctcgtttagcgctatgtgtaggactagttaatcggagtatggtgcgctggggcctgtgaatggcatcgtcgacggtggttctcgtcgccgccgcgcggtggggtattttggccggagggaagacgatgtgtggtggtcggtcaatcaatggatcaacggtccagatcatgtcgcattgtaggagggttctgtgtccactggatgtcaatcggacggtccaggatgaatctagagcattttaaatcagcgccgcagatcgcgaatccaaggggcctcgtgtgcgtaccggttcgggataaaatcaatctaatccacaccgttcgcgtctgatccaatggccgagatctgactgtaccccttcgcgggtacactttacaaaagaaaccttacgtttttaggatttagaacccgcagtccatggaccctattctctgagtctcggtaaacttacgccaaaacccctgatgtttccaaaaagtgacgcccagtccagaggataataaaaaccgagaaatgattatagaatttagtttttaatacaaaaacaattctagaaactt

SEQ ID NO: 163914 - DNA, 316 bp, Zea Mays
tagcagaccttatttcccgttgacacgatagagcttgggatggtcgtaccctcagtggaagccggcggttgagctgctggaattatttgcatctgtggagtggtcatctgttgaacagacatcgcactcgccaattgctgcatcaattctagaggaggattcgatagcatttcaaacatcaggcctttgaactctttcttggcctcctccttaaaataattcgccatctcttccttgtatcgatcacgtttcttgtacagaccttcccattgtggtccgaatccttccttccatccttccttagatgagattcctc

SEQ ID NO: 163915 - DNA, 406 bp, Zea Mays
ccccgcctataaagtgagcccgccgccgcaccgtgatgcctcgcacctccccagctcgctgtcgtgcattgcagtccgagtcgagcatgtcctcttccccctagccaaagaaccagccaccttcgatctccccaacgaagaccgcgatcgtcgattcgagtggcaggtgagcacctccccgacgccaatcgcctcccttcagactcgattgagcccttcttccaccttccagagccatccgtgagctccggtcaaccatggccatggcgccgagcagcagcctccctgtgcttctcccaaaatcttccactcaagagagatgcgccgtggtctgagggtcattttcccccactccctgccctctccatcgccctcctgagaagctgatttgagccttgagctcagc

SEQ ID NO: 163916 - DNA, 500 bp, Zea Mays
tccggtccaaggggtttttttccaatccagaccgttcccagcctaagagaacaaggtcttagttgtaacctaaccacatgcgcatgatggggctcatgcctcgtccccttggggtgacacacatgagcacaacgacgacctagagtggaattagtactagtaacaataaattattttctagcatctacttcgactagcatcaatctagagcgagctctcgatccttgcatagatcaagagggagcaattacccctatgtaggtgctccgacaaggactagtggggagtgttgactctccttgcaaaaatatcattgtgttcatatccctctctttacttacacatttacacttgtgcaattacttctgtgtctttacattccttgaattgccattctagagtaggattggaaattagggtgcaaaactttatgcacaaggggtgaagttagttaagtgattggttttaattattgcaagaaattttacattagcctaaat

SEQ ID NO: 163917 - DNA, 430 bp, Zea Mays
ctacgattgtgctgttcagtgctctaaccacggagaatcgtggtccgtggcggactccttcgctccggtgaacgattccctggactccgatgacttatgtgcccaagcgaatgatcacacgtgaccttcgcacgctggcgaaccttcgcgacctctccccaagcaccatacgtcggtggatgcgatcaccgagcgtggcggctccctctcctttctctctcttgctttctgtcaatggtggccctctctattcggtggtctaaatgaatgggtgaggaggtgtggctgaggactatatacccgtgaggcagggttcatgagctggcgaccagatttcatgggggaatctcaacaaccggatcgagttggttgagagtttggcagtggtttgttgtgaggtgatccagaagagaaacagtgctctggttag

SEQ ID NO: 163918 - DNA, 713 bp, Zea Mays
gatgacggatggccacgggtgccagcccccgcgctcgcggctgccgagcgcttcttctccgtccactcgtttcccccccccccccgcagccgcagcagcacaccacatatgcatccaccggcgtccactggctcggtcgcgcgagcgccaataattgccggcgggtttcggcccgcgtccgcatcgtccgtgtcacctgccacacgacgcaacaccggccgttgtttctggggaggtcaattgttggtttggcttgcgccctaggtacctgtggagagcggaaacaacatggctaggttcactgtcgtcgacttgttcgtctgcatctgccatctgcatccacggtcggtatcgcctttggtgtcatgcgcgcagcggggtggccttgtggggctccatccggtggaacgggacaccagggcctcccatgaggccatgatgcaaggtccgactcgttctcgttcctttcccccgctcaagttgtggagggccttttgcccttttctggctgcacacacacagacacagccttctcccttcgcctcgtgcctccttcatgagtcatgacacactgcggcgcttgatgggccggcccgccccttcgaacaaagttgggcctccatcccagtccgcaggccgagacagagtgaactcacgtcgtgctgccaacgacgcaaaaaccgtgtgaagccctcaaatctcgactatggccc

SEQ ID NO: 163919 - DNA, 980 bp, Zea Mays
tttttttcaaacatgttattttattcggcactccagctcattacaagcataacaaccaccacagattacactatgcacgagcgttttctactaaagtgtccccaaactctctgagaagatcatcaaggctagctggggacacttcctcgacgtcggaaaagttctctatccctagggaaggtagagttggcagggcttcttccttcaagtcagtctggcatcttggctcttgaaacgcttctagatcttcttgacgggggcgagcttcttcagcctcttagcatagtccatcttcagggtccggtatgcctcacgagtgttggcttcctcgccttctgccgtctctagactgtcttgaagagccgccttttcctccttcaattccttgatttgctgctctaggctttccacccgggagtttaggtgggtgcagtgggagaaaaggtcgtcaaagtggttgtcaagggtgtggagatatccagccatgtagattatggtagtgtctcttcattatgatctctccctgacaaagcctggagtcttttcctccaagtaggggtatttttgttgctgggtggaaagtagcggaggagtgtctcagagacttccctgctgtagttttggcatagttggcagagggctttttgggcagcattctggcaggtatctaggaagcagtggccagtagcggtgatctgaaagggaggttgattagggtagcttcagctttctcccaggtggactgccatagagcatttctcaatcccgttctcgcggtattccttccagacatactccggcttcttgcggatccccatgcgaagcgcacaactccgaagaaggtgagggaatccttccacctccgagcaataggatgtcttaaggacaaaggtgccttccatctggtagcaagagaagaagggttgttaataccagggaaactagagaaggttctttaagaggttaagatgtcttttttt

SEQ ID NO: 163920 - DNA, 526 bp, Zea Mays
ctcatgcgtggatttaagcactacaagaaatttgtccttttatgacaaaatacctaatgacaaggtcagttatcgtcatataatgtcacataatatgatggaattttttgagtcgtcataatttcatgaggccatgaagattttatgacgatagtgtttttgttgtcacataagggtacgaagattcgtcatatattgtcaggcgccaggagccggtagacggttttacttttatgacgcttagatgtgcctttatgtgatgatttggcggtgtcactttatgtttttccaaaaaaggaccgtacccctttctgttgaccgcattcactttcccatctcccccacaccatcgaagacggaagcgagcggagggcggcctctggcggtgcggaggacggcgagcggtgggcgagcgtcgtgcggctggtggcgtctgggctgtgcacgaccggcattgggcaggctccgggcgtagctagctccccgtctccccaggtgacggcgcggtagcctgggcggaggcaac

SEQ ID NO: 163921 - DNA, 631 bp, Zea Mays
ggcgccgacatgcgggcccctcccgtcagccgcgcgtgtgtcttcacgggcatcgctctctggtggccgactagcggaccccacacgcccgtcttcgcgctcacgtacacccacgcctgactcgctggttcatgggacccactagccagcttctcctaccttgccgccgagatctccgtgcgcacgatgcccacctttttcccctttcttcgctcactgtgcgcaacgtccgccgcgataacgccggagctgatcggtgtgcagaccaccctcggtcttcgccacgtcgtataatagcgcacccgtgatccgttcctatcccctgctaccccctcacgcgagctcatttcccagaaaacctacagctagccacggctagcttggagcttatgggggcaacgaatcgaccgtcgcaaggcattggggcaatctcgggcgactgccgaagctagccttggcctccctgggcgaagcaagtcacctggtcgttacgaattgcacgccgggcacatgtttccgccgttgtgccgccattcgctatggccagaggaaatcgcctgcttctacaccgcttcgttacccctgtctcctttgttcggttcctcgattgatgtagctctcctccgatttg

SEQ ID NO: 163922 - DNA, 1024 bp, Zea Mays
aggagccatggtgaaggttacttgccaggcagatgaccaagcgctagtggcattcggctacaccagaagcaacggcaaatacagcgtggtcctcaagggactgccgattagtagcagcagcagcagcaactacggggctgctgactcgtgtaaggtcgagctacacggagcgccaggaggatcggactgcaacgtgccgatcgagctaaacctgtcagggctcagcgtctactcccgatcaagcgaggaggtggtcttcaaagcgaaccagataatggcgttcgcgtccaagaacgcgtttggctgttcatcgaaaccacagacgcagtcgtcatcaccggttcatccctactacagctccccaccactcatccctcaccagtacccctcgcctccggtgccggcggctacccacaggtctccaccaccgttgccgttgccgttgccgttgccttatcagtattcagcaccaccaccagcagcacctgctgctaaccagcttccatccccagcgtaccagtacatttcgccaccgccttaccagcagcagcagtccatgcttcccaatagctaccagactccaccacctccacagggcacggagtctccagtactacaaccccgcaagtatctaccacctccatactactactacaactctccaccagcaccacaacaccaccagcacagctacgtacctccaccaccgctagcttaccagtaccctccacctccactcatccacaagtcgccgcttcttccatcgtcgtcaccagcggctccataccactacaactctccacctacctaccagtatccaccacctccgtatagctaccaaccttcgccgccacctgccggcctgtactctccaccattattgcctccaaatgctccggaacacctgcatccaaatgtcccccatgcgaaatctccacagccgcctctccacaccccaccacctccgaacggtgccgtgccgtcgccgtcgccgacgacaccacctctgcgctactacacatcc

SEQ ID NO: 163923 - DNA, 484 bp, Zea Mays
tgggcatcgacgtgatttacacgtgcccttccttggtacggagtcttgttctgttggctgacggtggagggcgccttggggcggatgccgaggtattcttggggccattcaccgagttggagtaggcgggtcctggtggcttcagctgtggacagttgttcttgaagtgacttggatcaccacagtgccaacatgcatttgtcgagggttggttgcttgccactgagggggaatggaaagagctctgactctgctggctgaatcgcgacggagtgggtccagctggtctactaaagttgggccccttgggtggaaacccaaatgatcgagtcttctggtgtcggtcctgctgttgtgcctggagaacctggaacttccttttgagatgtcctttttcttcctccttagccctttcaacttgcatggccttgttggaaaggtgagagaagttgaggaagtcttggctagccagaattgtcttgag

SEQ ID NO: 163924 - DNA, 355 bp, Zea Mays
agctagtcgatacagtgggggacaggcaaccaaacaagagctatttacaaggtacctagagccaactcttgaccggcacaatccagacagctaggcacaaacattacgcaactacaagtgcagagccattccatctactaaagccagctgaacaatccatccacaaaagcgataaacagaggtgaccaaggtgtacatccacaaaaggcaagacatcatctttgacgtgttcagactacaggtttgtcaaggctgcaaacaaatataagaatgtgagtataaagttccataaatattatgcgctgggtctttgaagttaatgttataccaaagaaagatactaagcacatgtata

SEQ ID NO: 163925 - DNA, 384 bp, Zea Mays
gagcgattaaattgtatagtgggtactcagacacgtcgatcagactacatttttaattggctgagctatgacattggctgagcattggctgcgccctggcaacacgacgcattatttgtgtcgtaagaactcggctgcgtcatatgattgctatgttgtactctcgcttaatcggaccactcctgttgagttggaccggcatcgccgagtcacatatttttcgtatgccctgtaggcactgttcgtctgtcgttatcaacgagccacaattgcgtctgttgcgcacgttgtgtggacttgtcgcttaccccaattaccgagccacaactgtgcctgttccgcttgttatggaggcttattgcgttgtcgtagcccagatggcca

SEQ ID NO: 163926 - DNA, 335 bp, Zea Mays
aagaaattaaagacaacggctaggagtctgcagagctggaatgccaaaaaaattgggaagattaagctgcagcttgagatggctagggagctcctacatcaattagaggtggcgcaggacaatcgttccttatctcctgctgaattgtggctccaaagcatgctcaagaagcactcccttgccctgtcctctatctctcgtaccatggcaaggttgaaatcgcggattgggtggctcaaaaaaggggatgccaatacctctctttttcatgcacaaacaaggttcaggaagaaaaagaatttcattgcaataatacactcagaggatgggcaaat

SEQ ID NO: 163927 - DNA, 777 bp, Zea Mays
cgtttctaaagctcacaccgatgtctctgccaccaacatcatcaagctaaccttggaggcactcctggcagatgatcatctgcacttttatgatctcatgaggctcgaggaggaagaagtgttgcgacaactcgttgaatcgtgtgaataggcgaaggaaaagtacatatcacacttcacggtggatcgtcaccagaagatcatccgtcaaggagagatcatatggaatctctcctaccttcgcctcaggctgtaagtatttttaatcaatattttaagattttcataaaatagggatcaattaaaacaatatataaatgaacctattaaaggatgggtgtgtttgtatgaaaaatctactgtccctagttttcccttgcatgaacctaatacagagccacccacaccttacacatcgactacaaatgggtcatctcatacctagccattgtatggtatgccgatgaatacgttcataacaccaccacaaccgtcgtcgcttggcatgcaaccagttgtctagctctgaacatgattggaccatccgagaaccatctcggaccgtctagttaccttgcggatcgtccgaccctacaagcccacacgtagaccacccatgaagcatcgtatatgatcggaccgtttaggccggtcgcgagacgtccgaccccttacgctggaccatccgggtacgcatacgcaggagacggagctgcacaatatgcaccatgtttgtacccatcacaacaacactacgccaccctaccggcagcatat

SEQ ID NO: 163928 - DNA, 414 bp, Zea Mays
ttgtcatcaaggtgtgggtatcccctgcaacttggtgtagttattaataaagtcagttatttagttgggtaatccctttatttccattttcctctttatctcaggagctgtcagtgaggatgatcaattgttcagtgttatgaagattttctatacatcttttcttatgctgaaagactgcagagtcagatctgatatgtgtgtgatttctacatatgtctgagaacaggcgcagaggtgcaaggcgtgctcagctagaacagcaggtaccccaggaagatgtagcttagcaacagttgccactgccacccccgattaccattgagcagatgttcttgatgcagacccaagcagtccaagcaattggtcagaccttagcagcgatgcagcaggtgcagcagcagccacccccac

SEQ ID NO: 163929 - DNA, 765 bp, Zea Mays
gttaccacaacattcattgtcattgtattgttgtgctgttgaaaaatttaaccatagccgaagctttttcactgcattctcgtgcaaagcatcatcttgatttagcttcagcaaaagaaagagcttcgtcaaaactgtaaaaatcattagcttcgtaaaaactgcaaaaaaatcatcatcagatggccagagtacgctcgactgcaagggtgacccgtgaaggagaggaggccaaagccaccgagacagccccgatccccgaagtcatgagacaatcgggattggttgtgacggaggaagttattgacaaaggtgcacctactgctgaagctgaacaagctgacatcaaagaagaaaatgttgatgaagaagaggaagactataacactctgatcccatcaaagcccagccacttggattttgaaaaatctactgtgtctgaggccgatttgcccatgatgatgaagctgggttatttcggggaagctgagaagaagcatattcgttttgccggagaagaaaccactccaaagccgaaagatgacgaagtagtggtttttaagagctttttcagagcgggattgcggtttcccttgaacgagatgattggggaagttttggataattatgaaatctatcttcatcagctgacccctaacgctattgttaggctcagcgtcttcatctgggcccttcgaagccaaggaatggacccaaatgctgaagctttctgccgattgcatgagctacattaccagatgaagg

SEQ ID NO: 163930 - DNA, 874 bp, Zea Mays
gtacaaataatttctcggttttgcacccgtgacggaccatgtagacatgtcgacgtggagccttcttagagaggggaggcaaaatgaccttcgttgtccctttccttgtaaaggattgtattcaacggttagaaggcgactgctacaacctacgattgcacattgttcttatccctccctttccacctcccctccatctaagtgcgttgagggaagatggagagcacatcaatgtcccgatgggcggagtcctatgtttcaaagagggaaggtgaaaggttcattgctaacatgagcgagctcttaccacgtgagtgtggactagatctgtttggtgaggggaccggacttttcattgatcttgtgccttgaatgcaaacgagaaaggatggttgagcttagttgtgtgaagggaaatgagaatagggtagggtattctttaaatgccctaggaacacaatcggggtacgtgctcttttgagaaattgttcactgcattttttgtccttgtggaagttgttgatttgtggacttgttctttacatttttaagatatgtagatgcctggaaggtgtaccttttacctttggtagaagcagtatctacaagttcttgttgatgctaaggtgagcattgaactttagtgggaggaagaagagaacagtggtgacggtttcgaggaagaagtgggatcaactagagtttatgaaagcgagaatgtagacaacaacggtttggccagaacggatgatggcttggtcaaagtagtgaagatatcgatttcgttggtagtgtgtgttcttgttgtgctagtgttgtatgtgttcaagtagagtaacgaaatgtgtgtgtggtcgtaaaaaaactctataaa

SEQ ID NO: 163931 - DNA, 370 bp, Zea Mays
tgaacgtgttagtgcgttcactctaataatattaatgatcggagagagtacattattagcatgtaggtggcttctagccgtttcggcttaaccaattttttgtgtgattcagaaagttgacctatctttggaggtccttgcatctaattatgccccttttggtttactatggcatgtgttgctgacctctgtacgccacacatctgccaaatgtatcctgtgttttttcccttccaaccttgtgatttggatttcttgaattcaagatttctgaaacttctagctttgttttcatcagacgaagatttcttaacttgcatatttatgaacatcaccctaagataagcacaatcattatggttgcaccgcc

SEQ ID NO: 163932 - DNA, 493 bp, Zea Mays
gtggccgcccgatcacctatatgcggccacgattggacttcgggcgcaatgaagaatcccgcacactacccggacgtccgatctaaaaccgaccgccaggattatatcgtcgcaatatgtgaaccggtatctaccctcagccatccaatgacctcccaatggtctggatctaattgagtgaaatggggtaccttacgtccaatctgaggccttcgtttcgatccaacgctccccagatcatcttcctcaacacgccctgcgctaccgcgacattcactgcacacgcttcttcatcgcgacggcggatgccagagctccctttcattgatgggcgtgaacgcgaacaagatctggacgccacaactcgcccagccaaagcgcccgcgccacccggagattaagcggtgcaggggtaccggcgcatagaccacactctctctttctttctcttctctcttcctcatagctctattcggccaccgatgtagattct

SEQ ID NO: 163933 - DNA, 624 bp, Zea Mays
ccactcattgaatctctatgattcagtgaagtgagcgttgaggaacagagaaagtgacaagtatatcttgtaacctctttattttagtgctaaattatgatttctctttgtttgacttggcactccacggctccacaggtcctagctcccagctcccagccactcatccaatccaaaatcgttgaacctggcattctgcacccttgtctccatcattgcaaaggattgtggaagcttacttcacgtgaacctaccctttgctgctactttctgcccatgttcaatgtcttttttatgttgtgtgttctttggatgatatttgggttgaccaggtgatgtgcacctcctttgtcatcccaccactttgttactccataaatgtagtgacatgttggggatcaagcaacccacttggttgatgaaatgccacaccaggaatgtcaggattccacatatgagcaatgcatataatacaatgcatgtaagaccttagctatttagttcaatcttacattctcaaaaaatggctatatgatgattgaaatgttcagagctcacttttatcttttgctgttgatgatgcaactttaattttaccatagttctggatcaaactcgattcat

SEQ ID NO: 163934 - DNA, 281 bp, Zea Mays
ctccgcctatccccgtggccagaaggctcccggcgacaattcgcggtatggactccctccctgtactcgcgtccgcctatatcgtgtgtagtagcgtcctgggcatcggatttgggcattcgggctgttggtgactctcgccggtgatggcgccaccgcgggcggagtgctccgccgtgcctgttcaccagagaggaaacgaagagagagtgtggacgttctgtgtcgtcgatcgcgggattaacggtccaatttaggctctatgtaccgattcggggtgg

SEQ ID NO: 163935 - DNA, 399 bp, Zea Mays
gggaggatggagtagtgctgagatgtgagctgtcaggggtgctatgccaccatgaggatgatgaggaggatctgatgaccataacataagttatgaatcttcgtagtcgactcgggcaacccaaacaactctttgatctaactaacctgcaaagtcacgtcctctccctcaaacatgaagtgaaaccacttgcggtcaaggtgattgcaaattgtggcatagaaagctctaacccactgctcaacttgaagaccacccaaactaagcagtgcagacaaagcagacaaatatgtgatgtgtgcctcaatagctagacctattgcatgtcgaagtgttggaatatccaaaagtcgatgtggtctcaaggagacatgagcaagtctctgagcagtaaagaat

SEQ ID NO: 163936 - DNA, 538 bp, Zea Mays
ataagttcttagtattatttttatacataataatcaattttcggattaaatctagatttataccagattagtggaccgcggccataaatttagaagagtgcagggtgtaaactgtaaattccagggaccccagtacaagagctttcccacggctaggatggcgggttgatttgagcaaaggccaggggttcttttacaattaggctacaacgaaggggtatcgttgatctctgaccgcacgattttaaatcgacggtcccgattaaaagaaccattcaccgaaccggtacactacaggggcccttagatgccgatccaacgtttcctattttaaataccaatgctccagccacagccgttggatagcagatcgatggtcaagcccgagctagtatgggatgatcacatcacacacgttgatgggttgatcaacggcttggatcgacacgaggcgaaacggtatcgttggacctaatcgggactgtccgtcaacgatccgacggccaggggccatcacctacctccgaccacgcctgcg

SEQ ID NO: 163937 - DNA, 1160 bp, Zea Mays
gtgagcatatcgcaccgccttaagtcactgccgacctaaaccgattgctccattagtagggcatagtggtcacctcgagttaagtaagcgtgagcatgttgcaccgtcttaagtcattgccgacttaagccgattgctccattagtagggtatagtggtcaccctgagttaagtaagcgtgagcatgtcgcacctccttaagtcattgccgacctaagccgattgctccgttagtagggcatagtggtcaccccgagttaagtaagcatgcaggttgacagtgaacaattcgagtgcctttgaagtctttttattgatgatatatttcccagtttacggagtacattatcgtcccaatagcttttgagatacacctaggggtaaaacttcctgagatgttctatgttccatgagttcccaatttccgtgccgtccatttgagtgagacaatatgatccaggccgagcgacttctgctactatgaatggtccttcccatagaggcgacagtttgtgccgtccctcccccattagaattcggcgaaggacgaggtctcctactgcgaaggatcgatgccttatggccttgtcatgatagcgcctcagagtttgctgatatcgggccgactgaatcaccgtattcaatcgttcttcttctagtacatcgacatcctccagcctagtagcctcagcttctgctatgttttcaaagattaaccttggtgccccaaacttgagatcagcaggtagcactgcttccgaaccatagaccataaagaaaggtgtgtttccatgtagagctcgactaggttgagttctcaggctccaaacaacatacggcagctctctgatccactttcctgcgaacttttcattcttgtcgaagactttctttctgagcgcttccaatatcatcacgttggctctttctacctaactgttggctcttgggtgcgccaccgaggcatatttgatctgaatgctcctttgcccacagaaatcgaagaactctggacttgtgaagttggatcccaggtcggttatgatgctattcagtattccaaacctgaatattatgtcttgtatgaattccactgccttagctgaagttagagaagcaatgggtttgaactctatccatttagtgaatttatcgatagc

SEQ ID NO: 163938 - DNA, 358 bp, Zea Mays
tacactgtttatagataaagttagtaaaacagtgtcatgatcctcgaagaagggggtatgaaaatgactagaaataactgatttaggcaagatcaacatccgatacttgagaacaggttatagcagataaccagataacggggcagaatcaatgaaggatccagagattcggatgataaagccaccacatgattcacaaaggaaaagattactagatccacgcgaaagagaggtagtcgcatgagatcgattaggatgagcaccagaaaggttatgaagattcgggacaggatctatggaaagaaacatggccttgatagggtttgtgcaactagacaccaaacaaaaaaaattgttt

SEQ ID NO: 163939 - DNA, 779 bp, Zea Mays
tgatgacggggcaggccgggtgggacgaggcgtccgtgagctgggcgcggggcatcatccgcgacggcaaagggctggacatcgtggaccctagggtgcgggacgaggccgccggggcggaggcggaagcggagcgagagatggtggagtgcctgcgggtggggtacctctgcacggcgcacgcgccggacaagcggccgacaatgcagcaggtagtgggggtgctcaaggacatccggccggcgcctcccacacccggtccgggcagctgagccaagtgccaccagccacgccgggggggtcggactcggacggacacatgctcggggtcggggtcgctggcttgcacgaagcggcggcgtggccagtggccgttccctcccaatcgaggagaagcgtccgtccgttgttttgccttatgccttgcggttgcgggttatccatgatccaccaatggatcgggagcagcttttgctgttgcacggggtcctggtggcctgatgtagtgtggaccagaacgagacctcgttgtttgtactttgctgagatgtgaatgtaacagttttctttgccacttttcattgatgagatgcctgatttctatcttctcttttaaaaaaataatgtatccatccatttgtttaatttttttcctgtaataaaattgatctcaactttacatgtttataaacgaaaggtaaaggttattgcatgaaaacaatattttatttcatttaaatgaaatatagcgagtcccattcatcaggcacgttgggcct

SEQ ID NO: 163940 - DNA, 668 bp, Zea Mays
gagacagtataggaaatcatcttcgtccgtgttgttgaacactaaggccccctttgggtatttcagttctcgggcatagtgtttggcttctgcaatttcttcttcagatagtctttttcccgaagcatgtcgaataataaagtcaagatcttcggatagtgcttcggaagcaggagatttaacattttcggccacatccttctccagagccatgctagtatctggaaaatcttgttcagctctctgctccgttgcggcaggctctgcctccgtgggcactgagggcccagcttcggttttagcatgagtcgtagcagtttcgacagcctttttcccaggggcaggagtcagcgcccttgttgtctccatgacagcgtctagtacgctagccattcttcttctcttgggagttgttgctggagcctttgcaaccttcggcaattctgcttctaccggtgggctcaagatttctggcagcactattgttttttctagctctggttttttggccgcctcttctttggcttcggctggctcgactataggcaccttcggcaattcaatatgtcttgcctcggcggtggaagatgtcccttcaccaagcttcggcactgtgtccgtttcaatgtatctcggtcggtgtgtcaagaccttaatctttttgccct

SEQ ID NO: 163941 - DNA, 573 bp, Zea Mays
gtgttcaggacatcaatagtccaggcaaaaatgcacctcctgttccaaaacaaaagaaatccaaggaacaaaactttacagcaccagaagacatactcctttgtactacatggttgcaaattagtagtgaccctattgtgcacactggacaaaggagggaggggctttgggctagaattgaaaaaaggtacaatgaacaaagggggagtttccttgtagacttaacagagcacttagcagcagatgggacaagattagagctgatgtcagtaaattctctggatactacgccagagtccttagagagaaacaaagtggcttgagtgacgaggataaggtaagacaatttgaactaatattatttatactacaactttgtgtccttgtactaattgtaattgaacatccaaatttgcagacatcgaaggcagctactttgtttgctcatgaggagaacaaatcattccattatatgcactgctggcatcaattgaagggggaaccgaaatgggagagcatctgtcaaggacattcgttcagaggattacatgcaagatctatagcatcttcggg

SEQ ID NO: 163942 - DNA, 738 bp, Zea Mays
attagataagtagttgatgattattgcccatatttgtttagataaattcagagattttttcaactgcttttaaagggttcaacaaccgatgatcagaacaataccaatatgatcgaacaacacgcctattgcgtaaatttgtatcatgtatggatatgaatttccatgaaacttaaatcataaggttttttagcccccatgaatttccatcctacgttcgccactgttccaagtcgtagatccaccttacgatgtctccagcaatatcccctaaattttctccctaaaaaaacattctctgtcatttatagcacactctaaaagattccatcatctatatctttcccatctccagcagtgtcctccaaatctagtcctctatttctaccgtgctaacagaattattaaaatactttatttcccctcaaagttgcattgtatttcatttgaaaatcatgtgcgtattggaattaaatgaacaaaataattatttaaaaatcgagattagtggccttacaagttaattatgagaacacaaatttagacttcgcatgcacattctttacttgtctctcctcttccattggtacaacgaactccataccagcaacattcttcgtgttcgttctaaacggacatttcatcatgcacttagagcgcgacagggcatgttgtggccgtgaggtgagggatcgtgacgtagatggctaggcacaatcgtgagggagcgtgaagcat

SEQ ID NO: 163943 - DNA, 615 bp, Zea Mays
ttcatgttgcacaagggtctggtcatcccgaagcttaaattcagtgggctcatgaccatcgtcttcaacttctccctcctcttctcatcgtccttgatatagaaccacactcactcttccagccagttggccacttggtgcgataggtgaggccggagccttcgtatccttgcgatacgcgaagttataacagccaaaattttcatgtagcccgtcttctctggccttcgtttggtaatgtagctcgtgcactcggcaaaaagcttcggcatttgggtccatcccttgtcctcgaagggcccagataaaaatgatgagcctaacgatggcgttaggggtcagctgatgaagaaagatttcataattatccaaaacttctccaatcatctcgttcagcggaaaccgtaatcctgctctgaaaaagcttttgaaaactaccacttcatcatctttcggtgtcggagtggtttcttccccagcaaaacgaataagctttttctcagcttctccgaagtagcccagcttcatcatcatgggcatatcagcttcagacacgatagatttctcaaaatccaggtggctgggttttgatgggatcaaaatgctaaaatcatc

SEQ ID NO: 163944 - DNA, 384 bp, Zea Mays
atcgaaagcgagcgaccgaagcaggtgcagaaatgacacgaatagaaatcgaaaacacgagagaagaagaaggcctcaccaggggcggagaagatggccaaagcgggcacgagaggcggtgcagtagttccgtggcgcaagggatgctgcggtttcatggaagaagagagagggagggggttagcgacaccgagatgtgtgtatatattgaaaggagaaggcgtgggaggtggttgctgattttgccatggctcgtatcctgaccgagcgagtgagacgattgtgtacacaacatggttgatgttgcgtgacgaggcaagacaagaggatagatgggggtagacgaggttagcggacgtgagcaacatgtcgttcggtgatttc

SEQ ID NO: 163945 - DNA, 1091 bp, Zea Mays
gaaaaaattagagataattaagcccaaagttggactgtcagactacttaaagtctgaaatcagactgacagtggactgacatgaacttcaggcttaatttcaagcaagatccattgactttttgtggcagcacaatatagcaatgttgtagatggtatattgctctacaacttttctacagagtgttgatcatgttgccatataagtttgggagaaaatcaagctcaaaaacggtctgtcagactgactgaaccctattcgccatggtacagtgctctattgtggatcagatcggccgcggcagaaaaatctcaccgccggtgactcccagccgtgattcgtgtcaccagcgtcaggattcacgctcgtggtggatggataacgtcgtggggaaaaggatctctaccgccggtgagctggaggtcactccggtgactcaccgtcatctcccccttctgctttgcggctggtgcggatagcttcgccggtgaaccactgcctctcggccctgtgccgcgtggctttgcctttccaccgcgacgccgtgactcgctacggctgtccaatcgtcgccggtgaggtcgccacgatggtggacacgagttcatgcgcgccagtaactccctgcccctccgaccgccgcgcgtcgccgttaaaattcccgaccgccgctcttgcttcctataaattgaaccctccaccagccccacaaggtcatcagccacccaaacaccaacaatcgctagcaatcgtgcatcagtgagcttgaatttcggttttcccccaaatcaagcttccgccaccccgaaacccacctcaccatggccagccccattccggtcagttcatcctcccctatccctcgtttaagctttctcatatgtctacgatgcttgtcgaaccaccaatttggactaggggataccaatccacgggaacatgctcatcagtccgccatgctcacggtcgccgtggctagaacaaaccgtgtgaccattagtgaaattatgttgggggaaatagtcggggtggatccaatttcgtgtccgccgctcggtagcgccggtcatggccctgttcggccggtctgc

SEQ ID NO: 163946 - DNA, 647 bp, Zea Mays
gaccgttgatgcggtctttatcgacatattgtgtcttagtttttgtggggggtttttgtgggtatattacatggctccgccacattaaaaacctcaccccgggaggaaaagattacgggccggaatgatactgtttggtgaattacaagggtgtgttagccctgaggattcaaacaaaaaatttgcggagattatcgatattccaggaatgctctaggtcctcgccggatggcgttgttagcctgcatgcgctgggggacgccttcgtcttgacgatgcaaggaccctcccactttggctccagcttgccctgtgactctgtccgagttgtccggacgagtacgaggtccccttcatcgaattctcttgggacgactgcgtggtcgcgtcaggccttcgtttgagcttggtatttgttgagagcctacagggcgaagacacggtctccgtcgatgaggtctttggaggttggttcgtatacgtcggggacggctgaagcgcttgtccgtggtgacccatgtttgatttcctgcggggtcatggcctccgatctgtatagcaggtgaaagggagtgaatccagtcgccagtcattcggtcgtgtttagcacccagactgcttcaggtagcaggtcggcccatttaccc

SEQ ID NO: 163947 - DNA, 563 bp, Zea Mays
ctcaacttcccttctttcttcaagtttgtatggccgccgcgagtctcgatgcagtgacactgcatcaccaaggagcactcatcgtagttggtccttgtcagttgcaagagctccatgacgcggggattggccatgatgctcaagccttctacgatcttgggcaacatgatgtcttcaactttcatcaacctaagctctaataccaaatgttggctttgcctaggaactctcactctcaagaactcgactcacatgacgaacaaaaggaagaagatgaatagtgtttttcgtgacgacatacaccacaaccgcgaactagctctttttcacttcactagacttggctactacaaaatggagtagtacatgggctacaaataggtcagggtgcaccaagtttcatatcaagcctaaccttcatgccatgatctacacacgactcgagtcatttgctcatcctgcatattgtggctcccttcacatatatcaacaccactcaaaccatgtagtcctaaccacctatgacttgcttgatcagccccaacatctctcctacatggaaa

SEQ ID NO: 163948 - DNA, 540 bp, Zea Mays
attctccgagcaaaagctgctcaagggcgcagccggatcaacacaacacggacgtaacaacacctaccaggtgcgaagtcgtctacggcacgcacaggtctatccatgccaaaatcacctaagagtccagcaaactcaaaataggcacaacaaacaacacgaagttatcccaaaagaacttcggtacatcaatacaaagggcacaaaggcgccaccaagcgcaattcagcgcacaacacacgttgcaactacatagtgtacactatacataggatattcacccatcacagatgtgcccatcgtagttctttggtgaagagggggagggcaacaatttcgctcatcgtcgccaaagaacggcgatggcaacactcattattacatcggctcttccttcgggataagaccagcttcccggaaattaaacaacaacaacctcaactcttccccttcaaaaaggtcctgcaggtccccttccccaatacacgatccagacgtcgacgccagtagctcgcgacggtgtaacaccctgaatttggg

SEQ ID NO: 163949 - DNA, 949 bp, Zea Mays
ctcgatttcgattgaatgcaatgcaatgatggcaacaaggaccaagctaagcaagcttatcattagcctgctcctcctctgtatctcgatctttttatctcgtttgcaatgatggcaaggaccaagttaagcatgcatcacgcagtggccagctcgatgatccggataattcagaattgcttgctgcgtggaaatttaatgcgactctgtgctagtacgcagccaagtcagatcgtcgaggccggcctgagacaagggggcagctgagctgggtactcatcacctagccccatatatgcatgcaatatactgctagctacctcaaatgcagttaaactgatgaagaggacaggacagatgatctgccacataactgtaagctatatatagctaccgcgtatatatagtacggcacaggagattttcactggatctcacatactagcctgcagagagagagagaaagcagaaaaaggttttatagttcaagtcacacctagcagtacgtagtggtaatcaatcccccaacctattagcttgatttcgttggtgagtctgtggccgtgatggattttaattggaagaagaaactgaaagtcaaggccacactcgatgctgttgctgtcgatgcatatatatgctaccttacctggatcagaattcagatgcatgcagatggattaatggagaaattcattgcaaccaccgagccatcgagaatactccctcctaccaccacttgtctcgctcgctttccctccctctgtctctgtcgtcctccctgaactgatcagcaagcagcagggccgttcctgaggggttgccgagggtgcggccgcaccggacccccaaaaatagagggccactagacgctagcattttttcctgttaaatctatctatcctagacacaaatacgcaaaaagcgattgcgctattgaccagtctcg

SEQ ID NO: 163950 - DNA, 494 bp, Zea Mays
caaagatgaaacttggtcggggacaggagcatcgcaggatctcagttgggcacatatagaaccaagaacatcctgtaattatgaaaagataagcaaaaagctatcttgccagagggagcagtaaaaaagcaaaagatgactcaccttaagattggagaggaacaagggaagacccaaagcaggaagaggtgatacattgcttgatgaggagatgttagcagcaacgatatcaaaggcgcgactcagaggggcctcagccttgtcagcaagcgacagactcccggcatttggatcactggcctctaaagtgaacagaccagcgagagccatagagagatgtgtcaccgcgggctcctcggattggactagatgcgacccaacatggacgtgcatggaagcagcagaaggggagcctgccccaacaccctcgggggctgggtcctccgtggcagccacctcgaaggttgaggatccctcaaccatgtccataggag

SEQ ID NO: 163951 - DNA, 903 bp, Zea Mays
ggcgattcccagcacccgccggcgacctcccctctccggcgaccaccgtgctccggcgttcgtgtgcctgggctcgtcctcatccctcctcggtgagcaatctctttcctcccctctgcttctctctctctctgtttctcagacagtgccacctccttgtgtgtcaatccaaatcttgtgaattcctgtgaaatctagtgaaaccatgttgtggaatgtgctcccctgtattccttgaactctcctgcaggttcttagctccttcgggagggttttcaaacctcaaatagtcgtttcaccgaaaacctaattcctcgcacgcctcgtgctcggtgaaatgcccaaaccagccaaaaatgctccaattgaacccaaatttttcaggcactttcacaacacttctagcaacatccttgccaaatttcacgccaatccgagattccaggcttaaatttcaccaaatttcccgttctgagcgatcgtttccgagccgagtgcccaaatccctttttcttcgcctaaattcaaaccaagcacacacttcactcatattcacctatataaacctattcgtgaagtatcagctcaattccatatcgtttcgtgcctcaattcgaattccaaacctcctatgacactatttatccttcaaacgtcgttttcacgtcgtttgactcctcgatcgtctcgtctcgtgttttctgtgccatatctctctgtgtatgtatttattcacatttcatatacttatgactatgtgactaatacgtgctcacctcttctgtcatttcagtgaccttgattgcccgtgtgccgtctcccgtcctgcctggatcgtcacctctcgtgtgagctttccaggtagtcatctcattctttgctaaatctatcggtcatttttgc

SEQ ID NO: 163952 - DNA, 655 bp, Zea Mays
gagttggattgagtctcctactgccttggaggtgacggaagctagggttctgcttgctgagatatgtctgctgaagaaaagaggtctgactaccgaagttgtggttgctgactttgttttcaagaatattcagcctctgaaagacagggcgtatccagcttacttgtacagtggtattactgactcaactcaggtcaccgacaggaaaattcctactgaggatctggtgagacgactagatatgatcctgaggggcaaggtatcaaatgctggtgctcctattgcttactctacttggaatctgccacctcctaggtcatttttcaattttgtgtcgaaccctcctgctagtgatagtggtctgggtcttagagcgcgaccttctcctgaggtcattgaagctctggttgctcctcttcgtgctcttcccaatgatgagaggcaagttcacttttcagtgccagcaagtccggatgatgtagaaatagatgttgtactcaacatgctggctggagaatcttctgactcggcccatgctgaaccaatggctattagggttgtacaagagcttaacaaaacagtggacacccgaaagcctgagggtattcgcccaaagcgtcctcgccaagttagccgcccaactgcgcctgttgag

SEQ ID NO: 163953 - DNA, 559 bp, Zea Mays
cctcaaacggtgacatcttcaaattgacctggtaactattattatatgagaacttagcataaggtagactcttgtcccactactaccatgctgaagggcacaagctctcaaaatgtcctccaatacttgattagtccgtttagcatgtccaccagtctgaggatggtaggccgaactaaaattcaacttcgtatccatattctcataaaaacttttccaaaatctggaggtagactgtgatcctctatccgaaacgattttcttcggtacaccgtgtagagacacaatccgagccatatataactctaccaattgagataccttataagtagtattgaccgaaatgaaatgagccactttggtcagtctatccacaataacccatatagaatcatatcctttcgaggtgcgaggcaatccagtaatgaagtccataccaatctcttcccacttccactcgggtatctttagtgggtgcagtagtccagctggtttctggtgttcaaccttaactctttgacacgcatcgcacatagacacatgtgcagccacatctctc

SEQ ID NO: 163954 - DNA, 440 bp, Zea Mays
aaagatacgaattctgaatggaagcacaaaaatctgcaatttggtgtacacatgaactagcagcggacccacatgtcttagagttagacacatggaatcatcttcctcccttgacttctacacgcacagcagtagggaaggggagctcgaacctgagacatggaggggcttgcgcgtgagcagggatggccgtgccgaggggatgctgctcgcttggggactgctggagctcgacgtggatgagcatggagccgacctggcagaggccaagcaccatgggggagagggtcgcctgcccttgctgctggattccaaggggaacagggaaccggccatggagaaaaaaaactttcgtgcgtcacagagggagagagcagggagaaggcgccatggaaaaggggagatgctcggccatggcagtagcagggaggggcacaaag

SEQ ID NO: 163955 - DNA, 554 bp, Zea Mays
cacagtaaacaatacaaaattacagtagacaagaacaatgaggctgatgctctacatgctgagagatatacctagctagcacaattgtgatagtctgcacgtacatgtgtatatacatatggggctcgtgtacacacatatgcatatatatacaatttcattatgaaatgcaactagactcgtagaacaaggagaagagagggaaaaagggaaaaacaggacctccacattgtaaattgaacaccggccgcgggacgtatagaagcggaatccataggccaaagaaaatacatcaaggttttacattttacaacaaaaaagaaatcgtgaaatcctaaaaaacaaagtctgcaggagatggagggaggccgagtggaaggtagatgcatcaggaaaaccgcctcctagaacacgcaggttcccagctaaataaaaagaaatgaaaagtacaaagaaaactgcagcgcctagaaggctcttggcctctcgctttgagtattgggatgtggacaggatggcagagggccctccgtccagcggaacgacgaagcgcc

SEQ ID NO: 163956 - DNA, 472 bp, Zea Mays
tggatggacgatgtacacttgtccaggagcggcatatatgcagcaatgctgtgtggtgctatttggttacgctttaatttgtcttgccgaacaatgttatttaattggatgcagtaaaatctcagtaattggtgcattacttttaactaccacgagtaccatttgcaagtacaactgcattggcgtcttctcgagtaccgtgtgataaattccaaaacatacttatgtgtcgcgcatgatgatgcttcaaatagtaccgcgcgcgctactagtactatgattagggcatatatatatatataccgatcggtggcgccggtacccgtatcataatatttcgatacgaatctaagtacttgttacaaccacttggcaagtcttttaattccttgtacgggcggtattaagattttgcgattattagtaatcaaagcctcgagcttgaggacaacccaccactcaccaggctgca

SEQ ID NO: 163957 - DNA, 897 bp, Zea Mays
cgaaaatagaagaccccaacagttgtggtggaaccgcccaaattattctggcttaagtgcctaggtcccaccttagagacgatgacatacttaaatcggaataaactgttaggctgttgaatctagtccgataaaaccacttacaccagatcgaaataccacttgctcacttgaaagtgaggcatagagcaatacctgacaaaatcgagttgtgccagtagtggtatctttactcttctttttctcgaacggggacactaattttggtgcataaaatttagatttctttgatggccgtggatcccttgatggctgtggagaaggtggattccttattggtggcgtagatagtgggtcaccaagaggatgagaaggagaaggtggtggagacggtgggtcagaaagaggatggggagaagcatgtgaagtttgaggaggtgatgatggatgtacaataggaactgcaatttgatgaggcagagacggttgggcaggtgacgacgatgactgtggtggatcaaccaattcaacatcccttcgaggccaaaggatgacattcttgatagcgtgtccaagtgtcacaataccatcaagcccaaggatggctagcatgttgtcctcggatccttggacaaccgtcatcacttctaccctacaatagtcttatggaatgtcgcttccatggaacttatgtcctgagatcacaaggcatgtggctactttctttgttaataccatatcttataactagtgtgcacgccacatgccttgtgatgtcatcaactggatagtggacattatttcccatcgacgcaacaaagcttgggacgatcgtacaatcggtggaatactgtggttgagctgttggaattatttacatctgtggagtggtcatct

SEQ ID NO: 163958 - DNA, 615 bp, Zea Mays
atcggattggctttgccattcacagggtaatggtgaacttggttaacaccggtgccaccggtgtctggattccaaatcgccgcagtcataatcgcagttcatctcgtcgtcgtcgagcaccaccagtggtggttccccctccaccgccggcgacagcaacgtccactcaagtacctgcatcagtgtttgaaatgggagggacttacccgtacggttactgtccgtttcacggattcggaccatgtgctctgcgcgacgccggcgtgctggaggctactctcaccgctgcccgccagtactacaactctcaagcgcaacctgatgcagttcccatggaggagatgctcgccacggtcgcggctccaaacctttactcaccgacaccgcaggtggaacctgctgcaccacgttggagaccaccaacaccggcatcgccaggtttcggtcgtcctccaaccagagcagcaagaacagggtgtccacccttcttcaacgacaacgaggtcataccaccaccaccatccgtggccccgatgccatcccctgccttgattgaacgcagccgaggtgcacaaatcagattgtgggcgaatctcaactccgtcaaagtcgaat

SEQ ID NO: 163959 - DNA, 540 bp, Zea Mays
gccagcgcagccgcttcatcgccgacgaccgatcctcgccgtgattcacgccaccatcgtgggattcacgtcgccgatgacccgataaggccgccaggtaaaagccatgccctggggataactccggtgactcaccgctgtacttcccccctgctttgcggctggagcagataggcttgccggtgaaccgccgcctctcggccttgtgccacgtggctctgcctttccaccgcgtcgccgtgactctctatggccgtctaatcgtcgccggtgaggtcaccacgacggtagacacgagttcatgcgtgccagtaactccctgcccctccaaccgccgcgcgtcgccgttaaaattcccggccgccgctcttgcttcctataaattgagccctccaccagccccgcaaggtcatcagccacccagccaccgagaatcgctagcaatcgtgcatcagtgagcttgaatttcggttttcccccaattcgggtttccgccaccgtgaaaccaacctcaccgcgaccagccccgttccggtccgt

SEQ ID NO: 163960 - DNA, 468 bp, Zea Mays
atgccctacagtctgaaaaacgccttgccaacatttgttcgggcgatgagtaagacctttggggacctgattcgggacaaggtggagatctacgtcgatgacatcgtggtcaagactagggaggggtcgactatagtggaagacttgaccctagttttcggcaagctgtgggaacccgcaccaagctaaacccggagaaatgcatcttcggtgtctccgtagggaagttgctagggttcctggtttcataccggggcattgaagctaacccggagaaaatcaaggctattgaggtgatgaggcctcccacccgaattaaggacatccagaagcttacggggtcactggcagcccttagccacttcattttgaggttggctgagagggcactacccttcttcaagctcctgcggaaatcaggcccatttacctggaccgaagaggcggaacaagccttccaagaattga

SEQ ID NO: 163961 - DNA, 614 bp, Zea Mays
ctcccaagtaagcgtgccgggtcccttggatggggtccggatccctccgagtaaggtccgggccacccataacgaggtcccgggacaggggataccatggcctaagcaagggtctggtactgacacatgtccaggcttaatcctatgcgcctgcgctccccactcaagcggagacccgatgctgccacgtggcttgttgcctgtgacgtaagccagcgggcggagcctgacgtaaggcctctgggccgcgcggtctctgcatttattgcggagaggacgcaccgcttgtccaacctgctgacaggtgatgtgccacctcagcatttattgtgacctgtccactcagctggcaggcggcgtgcctgtccagttcattgccaaacagtacgcccgtgctgcaaggtgcattgtgttcgtcatcacttatgcgttgccagggaagcttcccctgcacgccaataccacacagatcgcggatgtcagggtgcaagaatattgctccagcaaactccaagtattacatccattatattcctaggccgacatgtcggggctcagcacccttgtacgcgccccccttgggctataaaaggggaggcatgcaacattacaaa

SEQ ID NO: 163962 - DNA, 340 bp, Zea Mays
gtagatgtattagaaacagaactagtaaaaggcagcctagcgtgttttcctagctggcaggcatggcaaatgcggcgagctgctttattacactgtatagctgaaagcttatttagggtttgaacggcggctggtgctggatgaccgaggcgagcatgccacaactctggagcaacgacagcaacatggcagtgaggcagcagacgatgtggaatggtgtagagatccccgttgctattgcaccgaaggaggaccgttttggtttggagatcctcaacagaaaaaccagaagcgtcaaactcaatggaacagttattgtcgcgagtaagctgtcgaacag

SEQ ID NO: 163963 - DNA, 1110 bp, Zea Mays
accatcttaagtcattgccgacttaaggcaattgccccgttagtagggtatagtggtcaccctaagtgaagtaagcgtgagcatgttgcaccgtcttaagtcactgccgacttaagctgattgctccgttagtagggtatagtggtcaccctaagtgaagtaagcgtgagcatgttgcaccgtcttaagtcattgtcgacttaagtcgattgctccgttagtagggtatagtggtcaccctaagttaagtaagcgtgagcatgttgcaccatcttaagtcgctgccgacttaagccgattgcttcgttagtagggtatagtggtcaccctaagtcgagtaagcatgcagattgataatacatagttcgagtgcccttgagaatgaagtctttttattgatgatgtatttttcgattacagaatataatgctgcctcgatagcttttgaaatctagctaggggtaaaacttcctgagatgctctatattccatgaattccctatttctgtgccctccatttgagtaagtcgatatgatcctgtcgagtgacttctgctaccatgaatggcccttcccatagtggcgacaatttgtgtcgtccttcccccgttagaattcggcgaaggaccaagtctcccactgttaaggatcgatgtcgtatagccttatcataatagcgcctcagggtttgctggtatctgactgactgaattactgtattcaatcattcttcttccaatacatcaatatcttctagtctggtgacttctgcttcagctatgttttcgaagaccaaccttggtgccccaaacctgaggtcggtaggtagcactgcctccgaaccatagaccatgaagaagggagtgtttccatgcaaagctcgactaggttgagttcttagtctccaaaccatatacgacaactctctgatccactttcccgtgaacttttcattcttgtcgaagactttcttcctgagtgcttccaatatcattccattagccctttctacctgaccgttggctcttgggtgtgctactggcgcatatttgatctggatgcttctttgttcgcagaaatcaaagaattaagagctagtgaaattggatc

SEQ ID NO: 163964 - DNA, 659 bp, Zea Mays
gtggagtcgagcgatttggcctgagctttcaacgacttggactgttcttccaacgcggtggcgatgctcggatccgccacccctgccatccgtgctcctctcgtgtagtggtgcactggctccaggctcagcgatcgtgggacctttgataccagttgttagcaaccagtctgctaacagggatacgcacacaaactggagaagaggaagagagggatacagaggaattgggaaccttcccccgagatagattagggtattcagatagatgtttcttacatgacaagtccaactctctccccttacagcatataagaacgttacagttaactacgccactctgggccggcaaagcgaacgctgggcctcctggcacggcgacccatcttccttggcgctcgccccttctgcatgtcttgctcgtgctcactggtatcctgagtacgggggctgacagggtcccaccagtcagcagcttcaattgcacggtaatccggtggaggctagcgccagagacctgcgtggaggcgacgacggatgggccccatgcgcaagtgactccatgcgaaaatcgtgcaggcagtggctgggtagtgggccgcgtggaagagagctcgcggagatgggcctaccagatcgcatttcggcccaagcgacaa

SEQ ID NO: 163965 - DNA, 740 bp, Zea Mays
gagcctcaataggatgagcgaaagagacgacacaagagagaaatccaccagaggtgcatagttaaacaggagaaaccaccacccacacggaggatcccaagtggtctagtcgaacagcatagcagaccaccagccataggccatagcagcaggtggcagaaaacacagagcaccaatgtgtgcacacctctgaccgcacagatggggattgcggtggtcggacgtccattccgctcctgaagatggatggagacggacggtcggtcggtaccttccctccttccgcccctgaattcggacagggcgacagacaacagctccgccggccgcgtgtacgggtgacggccctgcggacagcagggactagcggggatgggtgcggagatgggcagacgagcgccgcgacgacgctcagatcccgaacaagcaaacacatgttcgcgcgaagacgacaaagacgaagacatacggctctgcgtcgattccaatgggaactgtgacgacaggctcccacgacggacggtgcgcgccgtggacggcacgcgaactcctctaaccggcggcgcggagattccccttcgtctgacggacgggtgcgcggacgacgaattcccgtgtgcggactccatgacaccagcttgactgctcctgcataacgactagacgcgactgaaaacaaaagtcgaagattgacgaggccgcccctaggaccagagtttgatcttcccgggggcagagca

SEQ ID NO: 163966 - DNA, 1124 bp, Zea Mays
ttcattgccaataagcctagtggtatccagttccctctgaaagttgtggtgaattggtgccacgcaatgggagcattttcagggtaagcggtgcggaaatgagaccaccacatccctgtaggtccttgcaattggtgcactgcatactctgtcttgagatcttctaagagtctcaatacacggaacttctactccatcgtgttgatccattcatctgcctccaagggttttgctacttccttgaatatcggtggcctcgtatccatgaaatccttgaagctgcaatattggttgactccctgagcttcttgaggctacccatggcgtgtgttgttagcaatgttgcgacgttcttcctccatgtttcgttgcaagttctccatgtttctctgagaaatgttgtgaagttctgccaattcacaacacattgtccaaaacagccacatctctaacttggacaacttcatctttctcaagtgtaacttgagccaactcttcctacacctgggctaactctgcagcatgcgcttcctgagcctggtacaactggttctgcaccatggcaagagaaccattgaccacctccaaattgcgctccacgttgttatacagctgcatcattgcaaacataacactggatgttgtggtgtcgctacgctgctgctcactatcacctcctgttagagctctaccttctggttggtcccacttagggttgaaaatatcgcccctaggaaagactccaagcatggcggtagcaatctccccaagaaaacggttcaccaaatcttgaagtatcttataagcggctctgcttgccccttctctgggtgtgcggcctaacaatccaaagtgccagccacccatcaatggattatctggccgaggcttgagcacatctgtcacccagatatcttctcctccagagcacgatctcctatcctagaattaacgtggttcctctccctctgggtaacccaaagcgaaaagaatgtgccacaacagggtaggcacaccatactccgaaagaaaagagctgcggcgtcgagaaacacgtttagccagctggtgacgaggcacatgtcctcccatggacttatgggcagtgagcctgcggtgagcca

SEQ ID NO: 163967 - DNA, 943 bp, Zea Mays
gtcgaggaagaaagagacgaaatgttatttctcaccgtaatgagtgccatttgtgggtaattaacgctgaactccacgtttacatttgaaaacaagttttctagaatgcctgttttggtgctccacaaaatggtggaatttaactcaactccatgtttcgttttattttttggagcagaattgttggagtttaggccatttgacaatcaaatcgtggagcagaggggagcagtcccaaccgccgtgaggcagccggagagtcatggtatcttcaatggctaaagagtctaaggtaaagggaactcggtagagtgttatagcaaggtataggattctgtaactaatttttacaattacaacttattggtaggtagtgatcgagcttagctctgactgtccaagttttggtagttgaaagtgttgctgatgcttttagaattcattcatatagcgcatgattggttaggtgcacgcgtgaagccacgctcgtgcgggactggccggccaaatacgggcgttggggtggcgtacgagcatatgcagctaaatagctccaaaatgacttattttacaacaactcatgcaacactcatctcctacatctctactatattaaagcagtcgtcccacgtcatctttttacaaagaaccccttgtatttcttaaaattcaatctgcggtcttagatcatatcccatccctatcctatttgttcgcacaacaatgttttcgcagttgtcgctctagcaacaaaccccgtccatttcacaacaaccttcgcccgcttcttccaccgttgcaccgcctctagataaggatgctcactaagtgataaaagttgcatcgagtccatccaactctgaaccacctcgtcaccactagggaccgagagcctatctcctagctcactcatctttcgctctggcgcgagctccactcctcc

SEQ ID NO: 163968 - DNA, 618 bp, Zea Mays
cgtttcttctctgctcggcccacaaaacaccccacgcgcgtgtcatccaggatggcccattccgcgtgcaagccatctctaagggacctcctcgcgcgcggccagggcggtcgttgggtcctccgattctcgtgtggtcgcgcggggagtccgggatgccgccgtgaatctcgcaggtagcctcgccaaatcattgctcgcggtaggataaagctaccctgcgcttccccctctttctctccacgcaccgggggggaatcgaacctgtcagccgcggttgaccccgcccgggtggccgttcgtgcgggccgtgagggagagagggaggtgctcgcgaggccgccattgaatcgagcttagaagccccgtcgcgtcctgaggatagtatctgggtgctcgctgtggaggttggcgaccgggggtcaagtgtgtgctcgccggagtctaggaaccatggcggagaggcgccatcacatggaacgggaattgctcattggagcgattgaatcctgcccgcgatccacctcatgttgcgggctgggcaccgtccgactcgacgaatcaatccaccggagcatcgcgaatcgctcatcagtgtcgaacctccgccacggtgcc

SEQ ID NO: 163969 - DNA, 430 bp, Zea Mays
gggctttacatccaccttgcgaccggcccaactccccacttactcctcctgcacagcccaccttccccctttccattcctctgttcatttccactgagtccctgtcaagtggcccctttgcgtcagctacgtcttctcatatgaaacgctcgccggggaatccgcgcgtggatcgctggcgaccgcgagatccgcgcaacaaccacaccatgtaccccgcccggattcctgcgcaagcctatttaactgtgcccctcgttcccctctcctctggcacatccatggtcgccatgaatggatgcacaaccgggtgtgttgcgccaccgctctgcgggcccgccatggcccttgtgtcgtgccgtcaagctccgcctgttcatggcgatgtgttctgtggcttcgccgcgcagaaccgacgcccgggagctcg

SEQ ID NO: 163970 - DNA, 427 bp, Zea Mays
gggagccattgggtaattgacagtggatgcactcaacatatgactggcaacccacggatgttcacctcactagatgaagatgttgatgaacaagataaaatcacttttggggataattcaaaaggaaaagttcaagggcttggcaaggtggcaatttcaaatgatctttcaatttcaaatgttctcttggttgcaccattaagcttcaacttgctatcagtgggtcaactttgtgatcttgccctcagtgcttattcactcctacagagattgttgtgtctaaagtggatgatgagtcagtgatattcaaagtatttagatacatcaacctatacttagtggatttctcttctgaagatgcaaacctaaggacttgcctctttaccaaagcatctcttggatggctatggcatagaaggcttgcaca

SEQ ID NO: 163971 - DNA, 441 bp, Zea Mays
cgggtccagcacttctcaagctcccttccattgatgctgggtaccgtgtagtccaccacgctcacggggctcccgccctctgcctccttgaaaacccaaacgccaacaggttcctccagttatgctgccctctgatataaaggttacacataaggaaaagattaataatgtttctgtttattcctcgaaaaaacaattaccgattttatatcaggatttgggagagtgcaaaggcagaaaaaggcgcaagccacattctttttaaggtacgttgaacatgcacataaaccagtgccgatcagaatgggctaaatcatatgggtaaagcagtaagtattcacatgacattggcggaggaagagtaatgcttactccattcatttttgttcattggtttacctttacaagggtgctttttgtttgtttgtcatgaaaggaatc

SEQ ID NO: 163972 - DNA, 1080 bp, Zea Mays
gcgcaaagaaaccattttctacttttcactctacacctaagaagaaaatgcagggtaatgtgtttaccttcaatgagaaacgcgcacctaaaacggtggatcaggacaaaatgaatcaaactactgagtcgcctggtagtgagtctcctggttctgcagaagaaagagaaaacagtaaacaaccatctcattcacccctttctccaactgaagatgaagggactcaagggagtaaaagttccgaacaaagctttgcaaaaggtcagagtaccacattgtcattctgtcatacacttcatatacaggaaagcatttgactagatcatgttacattcccttttgtttttagtgttccataatggtagaaggcaaatgcaatgatactttgtaccgtgacctattcccctttccacgcatgataaaccatgtacatgttttggcgctcaccgtgcagtccgtgcctcttagtgtttctggtttattaatctgtttgatatatttcaggtttgtctacatttccaattattgcatccttacccagagttccaaacatatatttgcatgaactttaaattaggttgttctgttatcttgtcatttcttcatgactttcttgtttgtcaattacagcaacgtaaaatagtttttaaacggagaatatattcaaatgaagatacaatattttgtaatcaatggaataacacatttttcatatcgtgcatggtagattacgtatatttagtctgtattattttatatgttcaatttgcttttttttttggattttgactgcataactttcagatcttatctaacgatgtttatggcatgctactcatagctaaatgtggttcttcaaatgcaggatataaatctcaaaaatggattccagatatcaagggcacagataaatctccccttgagtatgttggcaggaaaacaaaactaaaagaggatagaatgaacaaaagatacttatcttcacctactccttttgccacttctggtaaaactacttaccttcattattgttgactccattgttagcagtttataaatgttttttttcaggaacacaag

SEQ ID NO: 163973 - DNA, 727 bp, Zea Mays
cgacagatgaataacttggcatggattcctgggaccatcccagttgagttgcaggatgttgtttgtgagcatggtggtactgctcattaggcttaggttgctatcgaggaacagtttgtcgaaaaccatgaggatcatgttctccacctcgatgtagcctttcggtttcgtctagggagtcctctctgtcatcgagtactcgcaccagatgataggcatggtgacctccctctgtgaccttggggagcctgtctttgatcgtgcattcatcctcaaccttctttgtggcctcaatgagcactacgatcatcttcacacttggatcacttgctcggtcatgttcctatcctttcacaaggttcacaatgacttcatacttgaggagctcaccaaggggccacttccttgctccaacgttgctaccactctctacaactccactctcaggggctagaccttgcactcgtcctcttccactcctactctagggggattgtcatcgtgctcacctatcccttacatgtttgactctatgtatcctccccacccacctaggccaagggggtctaggggaagaggtcgctatcaccggaaaggcgaccataatggtggggtggctaccgggatgctccttggccctccatctgcaactcatggaccggtcgtatctctatgtggctcggcccatccctaggtggacattcctagcgtcttcctcccccacagc

SEQ ID NO: 163974 - DNA, 492 bp, Zea Mays
ctgaaacgtgacggggtgggtccagctggcttgttgaagcttggtcccttgggtggaaacccaaaggatcgaattctctggtgcctgtcctgctgctgagctcagaggacctagaactttctcttgaggtgacccttttcttcttctttagccctttctacttgtatggccttgtttgagagatgcgagaagctgatgaagtcttggctggcgaggatagtcttgagttctggtcttagcccttcaagaaatgggccatcttcttggcttctgtgttgacatcgtcaggcgcatagcgagctaattctgtgaatttgtgcacgtactcactgacaggtcttcctccttgagttaattcccgaaattcatcttctttgagctggacgatcccttggggcacatgatgttctcggaaggcggcttcaaattctacccaagtagcattcctgacggtagcgctgaaggtatcccaccaggatagggccatcccag

SEQ ID NO: 163975 - DNA, 666 bp, Zea Mays
caaaaagtcggggactcttttgcaaagaagactggcccgaaagggtatgaagggtacctggtcgtcggatcaaaacgtgcgctccatattagaccagctccccgctcgaatcggtacgcaacgggatctgtccgatccatgcttagcggtcacgatttaaaatacacagatcattctgcgccgctcactacaccatcgacggcccggatgtatctactctcatcactacccccgatcgaatctgagtcgtagatcaaggattcgacggtaagtgcgctctcagtcacatccacctaactccggccaccggggcttatcccccgcggcggcaccatggccggaccactcgatccagtgatctccacggccatcgcctaatctgtcctatgctacaagtaaaggataacaatacgaagcgatgagggtcattctcaccatggtgcgcgtaggaggtgcagcagctcacggtgaagggcgaacccacaacagcgacacgacgacgacgagaaattcacccgttctcgatgcaccgcgacccccgccaaggccaccaacacactctcgatgcccaatgcagcacccaaactccacactgaagccccaacaatggcgtcaagagttcactgatggcggtcgccctcagctcactcctctgctcgcggcgag

SEQ ID NO: 163976 - DNA, 620 bp, Zea Mays
ccatttcaaagtgtgtagcatggaatgaacatgaacatatgtacatatcagttcaatgcaaggagcaaggtggtgcaagtttatatattccagaacaggatggcagcagctcatatgaagctacgaagcatgagagaggccaccagatgggcggcatgcactggcctgtcgtgtacatgtgtcactcgagccgtcacggcgggaaaagggcctaatttgctcggacgcgcgtgttgtgtcgtacgtacgtcgcgcacttaacaaaagcggcatgcatgattacccccgtccctttgccgagtttggaacaccacgaatccacgattagcagcaaaagcaaaatacgagagcgcagggtagtagtacctggagggatcggagatgcatgcacgttgcacgagacatttgaggccagatatttgggtcatttgatgaacagttcgcggacggattggggattggggatttggctcctccgtccgcgtcgctgttgggccgaggcgcgcgccaggcggagcgagagagttcacgttgcgaagatcgaagaagcgggtgaagacccaaacaaaccgtgaaaaaatttctacatccccaatacaaacacactcttttgtatcccc

SEQ ID NO: 163977 - DNA, 1411 bp, Zea Mays
gcaaggggcggaggacagcagtcctcggtgaacatggcctccaagggaggccgtggtggtggcaactacaacaacaacgctcgcggtggcgggcgtggaggccgtcgtggtggccgcaaaggaggtcgcagcggtgggcgatttgaaccgggcgtctactgccaagtctgtggcaaggagggacacccggcctaccgctgttacaatcggtatgattcatcttatcaaggccccccacaaaagactgctgctgctgccactagttcatatggtgtcgacacaaattggtacatggacactggagctacggaccatgtcaccggcgagttggagaagttgactgtccatgataagtatcacggtggtgatcaggtgcatgctgcaaacgggacaggtatggagattgctaatgttggtcacagttttttgcattcacctaatcttcatctccgaaatatccttcatgtcccacaagcacacaagaacctttgttctgtcaatcggcttgcacgtgataataatgtttttcttgaattccatcccaaccactttttcattaaggaccaggtgtcgaagaaaactatccacacaggcagatgtgaaggggggctctatcctttgaagctactgtccaagtcgtctccaaataagcaagcccttgctgccgtcaaaccttccacttcactatggcaccacaggctgtgccatgcatcgtctcgggtcatccagcaggtcctaagtcgtcatcagcttcctatttcccataatcgaaataatactagggtgtgtgatgcatgtcagtcaggcaaaagtcaccaattgccttaccccagatccactagtgtgtcgagtcatcctatggatctcattttttccgatgtatggggccctgcgcccaactctattggtcgtcacaattattattcgagtttcattgatgatcacagcaaatttgtttggatatatttgttgaaacacaaatccgaggtatttcagtgttttcaagattttcataaacttgttgaacgtcaatttgatagaaaaattcgtgccatccaaacagattggggaggggaatatcaagcactcaattcttttttaaagcgcataggtatagaacatcatgtttcctgtcctcatgcgcaccaacaaaatggatccgccgaacgcaaacatcggcacattgttgagatgggtctcaccctccttgcacattcatctatgcctttaaaattctgggatgaagcctttctcactgcagtttttcttatcaatcgcctgccgtccaaaatcattgataacaaaaccccctttgagaaactttttggccgtccaccagaatacaccttcctacgcacttttggctacgccgtgtggccaaatttgcgcccatataattctaagaaacttg

SEQ ID NO: 163978 - DNA, 324 bp, Zea Mays
ctggtatggtctgcagttgttgtgctggtaaatgttgttgttttgacaagtactggcaagcttcgcacctctgaactaagtcggctgcatcacttttcgccgttggccaatagaatcctgacctgaaaaccttcccgactaacgtcttggatgccgcatgtattccacattgcccgacatggacctcttccaaaagtcgcttcccagtagatgagagaatgcacttcatgaggacgcctaatgcacccctcctgtataatgtctccccaatgagtgtgtagtgggccgactgtctggcaatgcgctcagctgaatttttgtcat

SEQ ID NO: 163979 - DNA, 308 bp, Zea Mays
caaatacctcacatgttctctgcatattgtgttattttattgatttataattataatgctgctgaaatcctctcaaagtaagtgctcggaaaccataatttctcactcatctgttgaccctgaatgaatcttcatactacttggccttttcaggcatgaagccgaactggcaactgcggcaactcaaccattaccagatgacaatgatgacctgatcgagtagatgttgcattatactactttatcgatctacatgtctcgcccaatgcgtcttctcataagttctcgtgtcctaaactttgggatgg

SEQ ID NO: 163980 - DNA, 922 bp, Zea Mays
ggatattggagattttagagaacggacataatgtagttaccaaggtaggatcaagagatgagaaaggtaaaggtagtacccaataggagcacaacaaaggatggagttgaaaactcgtaagcgacaaggaagatgatacggccaagggaaaataggtaaaatacaactataaaattgagatggaagagagaaggttttaaaggacaggtataacataagcatcaaggtaagatatagaggtgacaagggtaaagaagataatcgtggaaagcataaccaaggatagagttaaggcaagacttgtgaagtggcgaagtggagagagtaatcaagggtaacataagtatggttccatcagaagggttgaagtaaaaattcattacccaaggaagttacaaggaaacaacgagatcaccaaggatgtgcaaaataaaatgaccgctcatggatcattaagaaacaagtgtggtcaagggcatgttaactaaaatgtcttaaacagacactggggtatgaacataagcatacataaaaacatgagagtatgcaagactccaaggacacgaacatattaagaccaagggaatagaaattgttgaaagataatgacttaaggacggaataggaagggatctcaaaagacaagaaggtcagggatatataaactaaaatatttaaataggaaacatagttttcagaggtaagtatttgaaacaagagtattgaagaatctagggatacgagcatgtcaataccaagggaatagagatggctatacggtggcaaattaatgacagaaaaggaaagaattccaaaggcaataaggttatggtgagggggcatctaccaagattttgcaagcacaagagtgagatcagatctaatagattgagagaagtatagaccatactagaataaaata

SEQ ID NO: 163981 - DNA, 490 bp, Zea Mays
ccagaccaaagacaagatacaagcagcaccatacatatttggctaacgcgcagtgcacaaaaatgtgatcaataattttgttttctccacacagggagcaagatccacagcctttccaacctctttttttcattaccatcacaccttgaattttcctattataaagttgccacaggaagatcttgattttcaaaggtaccctgcacttccagattatacaatggatgtttttagagattcccccatctgttctaaacctgtaaagagactttgtagtgaactggtgagaattgtccaatgcccaggacaccacgtctccttgagaacatgtgtattcctgaagctcagaacacatgtccatccactcatcaaattcagaggtcgtaagagttctagtaaaatccaaattccaacttccatcctccaggcagtcagaaacccgaacctttttgttcgagcagatgtcaaaaacctggaatatccaacgctc

SEQ ID NO: 163982 - DNA, 337 bp, Zea Mays
cggcagagcgcatcgccagacagtcggctcactatacactcattggggagatattatacagaaggggtgcatcaggcgtcctcatgaagtgcattctcccatccactggaaagcaacttctggaggaggtccatgttgggcaatgcggaatacatgcagcatccagaacactagtcgggaaggtcttcaggtcaggattctattggccaacggcaaagaacgatgcagccgagttagttcagaggtgcgaagcttgccaatacttgtcaaagcaacaacacctgccagcacagcaactacagaccataccagtaacctggcctttcgcatgctgggg

SEQ ID NO: 163983 - DNA, 649 bp, Zea Mays
cacgtcggcatttgcctagaggaaggcgacgagcgcgagttcctatttttcctccagatcacccgcaatgcgagtggtctggggggaatccgcactgagctagatggccttgacggggacgctgtctgctccggatggctgcacctttggcaccttggtagacgccttggtaccggaagtcgaggggtccctccctccattgtccgagcgagcagtttctgccaccagggtgtgtagcttctccatagccgcaagcgcagcggcgcgatcaccccgcacggtgaggaccctagctggggatggcatcttgaggaccaaatacccgtaatggtcaatggccatgaaccggtacagggtcggcctgccaatgatggcattgaacgggaggttaacctccgcaacgtcgaactgtacgttctctgtgcggaagttttcctctgtctcgaatataaccgggagcgtgatgctcccaaggggatacactggttgagcgcccactccggagaatggacgagagggtcccagtcgggaccctgggatctgcagctgcctgaacgcagcgtggctgatgacgttgcgcccagccccaccgtcgatcagaacatgatgcagcttgatgttggcaatgacaggggccgtgatgagtggc

SEQ ID NO: 163984 - DNA, 537 bp, Zea Mays
catgctttatgatgccacatgcccatgtgtcccaaatcatggttgccagtgtgccttgaacaggcatgtcagcgtccctaaccttctactcctacatcatgaacccatatgtcagatgcgcatgcacactgaatgggcagacaatgactctcatgtataatttaatttgttgaattttgaatggtttgtcaagctagaaatattgtgcggctgtcgaggaaaaggggattccatagttccacactgtttggtagttcacaattattgccagttagcctcacaaacattgatcaaactgtttggccatttggccgcctatggatcgtagcctcattggtgtcttattcacctgccgacacaagccctgaaagcgaaacgcttggagggtccttatgaggctatgagtcgataatgagataaagaagctgctgctttgtcaggcgtcaagctgtatggttgaaacttgacagactgcatacacacgcaaaacttagatttgtccagattatgcgttcaaagtcagtcagatctaatccc

SEQ ID NO: 163985 - DNA, 483 bp, Zea Mays
ttaaccctaacccctccgctcctcgacgtcggccatcgctaccggctccagactccggtacagcggtactccgtcctcctccctcgtccctccctccgtctatgtctgtttgcttgcttgtagttgtagctgtgcagaacacatcttgtagctgtgcagaactcatctggatttggtgcagtacctgtgtagctgcctgcctggtcgttgttcgcttgatggtcgctgttcgcttgctattgttgttcgcttgctggtggctcagtggttgtggttgtgctatgcctattcacttgctgtacgtcggtgtcagtgtgattcactgatgggtgatggttcactgtcgtgtcctcctcaccgtcgcttgtttggacatctatattgataactcatcatcctcccgagtcctgacctcctcactcaccctcctaattcctattcccatctggctgtctcccagtcccagactcctcacaagctagc

SEQ ID NO: 163986 - DNA, 375 bp, Zea Mays
gctgattctaccgtccatctgtcgtttactgtttgtctgccttttttaatcgtacaagcatcgagttctctagaagtactcctcgagttctccagaaggtgctatgctccgggaggaagtaagaagagttcgcgtgagacggaatcccagtctcgcggatgacaggctgcctcagcgtcgctttctttcccgaatgcagaatgcttcctatttcgacgtcttttctgaagctaactgtttccaccattcgcacctccgtccccatcgcccctgcagtgtcgttccttaggagtcaggaagccatcgggtcgcactagcttgcgccgtccggatgtcatcatgctgcatgcccctatcgtccatctctttgtttcc

SEQ ID NO: 163987 - DNA, 676 bp, Zea Mays
gaaggctgagccgatgtagcatgtttgctagcctcgctctcgtgttgcgatagtgagtaaaaacactgccctcccctgattcgcaatagagagggagggcaacaagatgtgatttgtattattatgcaatgtgggcgacagactcttcgttttgtgtatgtaaactatgatgacgccgcgtgttgcgcttgttgtaagattgtcttgacttgtgatcgtgttggcgtggcacttagatgggatggggacctcttcccgcgggcgataacgaatgcttctggcgcatacccggctgcgcccttaggcggcttttgttcggccgcatcggatagtagagacttcacacccttagggtgaatcgcgcttattatgcatgtccgactgctcccttaggcggcttttgctcggacatgtcttatagtaaagacttcgcacccttagggtgatgtcgcacacttatttgtgcatgtcaggttgcgcccttaggcggcttatgcttagatttgtcttatagtaaagacttcacacccttagggtgatgtcgcacacttattgtgcatgtccagttgcgcccttatgtggcttttgcttggatttgtctaatagtaaagacttcgcacccttagggtgatgtcgcgcacttattgtgcatgtccggctgcacccttaggtggct

SEQ ID NO: 163988 - DNA, 391 bp, Zea Mays
gtcgtcagtcctcccttgcctttaccggacaaggtctgaaggagatgctggagtactacgacaatgcggtgagtccgtgatggggattaccatttgcgtctccttgacatcccagctcgtgcgtgtgaaatcgtggagctttgggacttcaccgggccgcggtagtacctcttgtcacgttgcagctaaacatcggtggtaacttttggaatgccattggtccatttgagagtttgtctgttgtggttcagggcccattgttaggtggtttcaatgctatgcgaacgtcaccctggaggtggtgttttgtgatgggagtaattgtgcatttgtagtcccatgattcattgtcctccataactttgtgtgtgacttggttgttttgatgacg

SEQ ID NO: 163989 - DNA, 819 bp, Zea Mays
attatccttattattttatttaatgcacaaacatataaaactccaacaagatgcactttcttttattttagtatcatttgttttaattaatcactcttaattatatgtatgctctttttatacataaattagggatacccaatatagtatcactttacacattttgggtattacaccactgcctcggtcggcttctccagctcctcacggcgcgcggtgcacacgcacacgccgcacacctcaacgaatcagaacacaaaatcaagaacaagaacaagagtaggagtaagagacaaaccaagatccaaaaactaaatagacttataatctgagatagaaaactcacctgcaacaccggagcactggatccaccgatgagagggcagaggcagaggtacaggagcgagctttgcgcagatcgagtttaggtttagggttactagttacagttaccaggtgagagaaggagagatgcagagagttcatggagaggatggagcgagagagagggagaggagcaggagacgaagattagcaatggtggctcactggcatacagctccgccgccactagaggcgagggcacgagaattgccctatcgggagccaggactcgggagatggagaggccgagagagaggagagaagagtagagtagaaaaatctagacactagggttcaacacgatgttgaggcgggggtagtgggggagccctccccatattaacagaccaccgctttgtcgacgtcttacacgggcctggttggcagcccaagcacggcaagtgccttcgtgttgtgtcgggcatcggactgcac

SEQ ID NO: 163990 - DNA, 832 bp, Zea Mays
ctcccatgtagtcgacgaaggaggctcgcccttccagtggacgaggagctggcgaacaccacgtgcgaggcgtgagcgagtcacgcgttccggctcaggtgccgctgagccgtagtggatcggaggaagggccggcggttcagtcggtggcgtgccggcgaacttcttcaggaggcccacatggaacacatcgtgtaaccgcgagcgtgctggcagctcaaggcggtacgtgaccccgttgatgacctcagagacgcgataaggcccgtagaagcgaggtttgagctttcccttggttggcaaatttagggacgacgcgactcgttgtcgaaggcgaagccacacccaatcgcagatggcatactgaacatcacgatggcgtctgtcgtagtacgacttgtagatagcttgtgcctgctgcaagcgatagcggacgtcatcgagcagctcgtcccgctccgccatgctcttggccacggccgccaccctcgtgttgcccggctcgtaggatcgaatagaaggaggtcgcgtccgtacacgagcttgaacggggtctcctagatcgctgtctggtaggtggtgttgtagatgtactctgcccatggaagccaccggagccactgcctcggcctatctcctgtgagacaacgaaggtacataacaatgaccttgttagcagcctccgtttggccatccgactggggatggaacgccgacgtcatgtgtagcttcgtcccagtgaggcgcatgagctcccgccagaatgctgaggtgaagacggggtcgcggtcggagaccatggattgtggaatgccatggaggcacataatct

SEQ ID NO: 163991 - DNA, 659 bp, Zea Mays
aattagggttcagatgcatcaagtttagctcatagaaatcaaggagaccgcggaaaaagggagagatgggaagagcaagcccgcgaatgaggaaaggaatgtaaacgacagattcatgggtatcctctgtcggaactgtgacaccgcggcaaatccgccaagagcagagctcttttggaagcgaaaccccaacttcaacgagatgaaggaggtcggattcagaaatgatagacatatggttaccagcgaatggcagctggctgttggggtagatgggcgggatgattgcagcaacggtgctgtgcctcttccgctttggcgccatcgcgatcttctggcagaacgagcaggatcgaaatcttagggaaacagaggagtggttcgaagggaaaaggtgaagttagggctcagaaatcaaaaaagcgcgtcgacgcgagtataaatggagtttcccgggtcgggcactatttctaaagtgtcaagtcactactcgggaaagcaaagtttcaggcatcactcggcggttacctctaaaatgccggttgtatcaggcatatgggcgaactatcaagcgcgtaaacagaacaagcagcaaaagacaacaatcacttggagcaactaaagttcttcattaatattggagggggttacacaaactc

SEQ ID NO: 163992 - DNA, 697 bp, Zea Mays
caagtgcgcaaaatcgaagtcttgaaaaggctatccgtgcaaaagtcgcccaagggtgcagccggactagcacaacaagcgcgcaaaatcgcaggcacatccgtgcgaaaatcttcgtcgaaaaactatccgcacaaagatcgattacaggcgcagccagaccggcataataaacgcgctagaccaaatgcacaattcccccacgggcacgactggatcagcgaaggcacacagactcatcatacaaattatagttacatacgtgcagcgagggcaccacacattacattggttcaaccttcgggatgatacccatctccctatagttaaacatcattatcctcagctcttcaccctcaaaaagatttcgcaactccccctcacctacgctcaccccagccgacgaggccaacaattcccgcttgccagccctgtccacatgaagacgaccaccctcaacctcactcaccctacgcttcgccaccgcccttcgccgcctacgcccagcactcggaccgggaacaacatccgtcacacgcggagaagtcttcgccgcagccacatccaatgccgcgaaataatccaaatcctcatccgaagactcctccgtccacaccagcgaactcccagaaccatcagactcaaaaaacttagacacagaatcatccgaatcattttccgcaaccgtggtcgaagc

SEQ ID NO: 163993 - DNA, 701 bp, Zea Mays
acttcggaagacgcttcgagagctggagcgacagctttttcaggcaaattctgttttacaccctcttcttccgctgccttttctcttgtttccgaggatttctccttggcgggcactgaaggcccagcttcggcgtcagcctagctcagtatagcttcggcttcggtcagctttgtctcggtttcaatttgtgttttcgaagccttggcaattttcctggagtagagcttgaagtttttatcgtctccagcacatctaatacactagccatcctttctctcttgggggttgctgctagatctttttgtgtcttcggcgcctccactcctgccaaagagcttagaacttctgatgttttcgtcccttcggttctcggttcttcaattttgtcagcattcggcattgcagtcggctcttcaatcctctgcgtaagagcatgtcctttggcttcaatagccgaagaggtctcaccgccaaattcaggcactatggccggttcaatgtagcgcggtcggtgagtaagaaccttcacctttttcctcttcgctgtgggctcgcttgaagcggcttaagcaacatccttcccagaagttgcaccctttcttttctgcctccgcggcgggtaccgatagtcagggtacacaaatccaatagcgtcaaaaaccctatttagtcttttcttttttcggctcccgaaggcc

SEQ ID NO: 163994 - DNA, 298 bp, Zea Mays
cggggcactcgattgtattgaaaaggaggttgatgtccttgatgaagtcataaccggccatggagacctctgtgcgctggtagcttctcgtggtatagcttctgccttcgtaaaagccgggtgcaatcacgcgagagctgtcaacaagccgaatttcaatctttcatcatcggatctggttgacattccaactgaagcccgaagcatagggaatagatttattactcagatttgggctaagggcgggcgtgaattggttggacacgaagcccgaaagctgcttaacacagtatggaat

SEQ ID NO: 163995 - DNA, 540 bp, Zea Mays
ccatatggttgtatgcgagacgtggttatgcgcatgatgagtttagtaaaaatccatcggtgtcactagtgttaagttgaggtttatttgcgcgtggacagtaacagtgtgtttaatacttagaactcttagtcgatggtagaaattgtcttggcttaaatagagaggtggtgacatgcccgagtagtcatcgctttctctatatttataggtcaagtcgtggcaatgcgtattatgcgctcgttaaattatgcttcgcatatagcgtatgattgtgctcacggtttcgagaagacacttcaaataagtcaagtaggtttgtaatgcaagatgtgtgatgaagttagtttgttttaggatatttgttgagatgctccattcaggtgatagacatgtgtggttaattcaaaccgagttgatgtatgtgacgatgatattcatgaattaagtagatgtcctgaaattgtgtagtgaagcttaggttaagttgcaagtgatgtgggaatgttttggtaaagatgtatataaaatgtgaactag

SEQ ID NO: 163996 - DNA, 689 bp, Zea Mays
ggaatacctcaacattcccctcaaggacagcattaagggatggcgcctcgagtggttcaccatggagaatcacaacaaatccctcctccctcgatcaggaaggcaaccagacgttcgcacgcctagttgggtggagtctcccacttattcagaggtagccaaagtcaaagtactgcttgctaaaatatgctcattgaaggacaagggtctgactgctaaggccgtggttgccgacgttgtcttcaggaatattcaacctttgaaggacagagtttaccctgcttacttgtatacatgcatcaatggttctaccggggtcacaaacaggcagattcccaatgaggacttgctaagccgactagatatgatattgaggggcagggtctcaaatgttggtgctcccttagcttactctgcatggaacttgcctccgcatagtcccttctctgattttgtctccaatcctcctgctcgatatggtagcctgggccatagagtgcggccctccctagaggacatcgaggccttgattgctcccctttgggatcttcccgaggttgagaggcaaactcatttcgagatgccatctagtaccgatgatgctgagatggatgtcgtgcttagcttgctagccggggaattgtctaactctacccgtaccgagtcgatggccattgcgactggacaag

SEQ ID NO: 163997 - DNA, 867 bp, Zea Mays
gctccgcggcccacttggcaatgttgcctatggagttagagttgtgcagaatggcctttaacgggtaggaggtcaccaccacaaccctgtgtgcctgaaaatagtggcgcaatttcttggacgcaacaagtatagcatagataagcttgtgtgtctcaaggtacttggcctttgcctcatggaggacctcgctgacgtagtagaccggcttctggatggttcggacccctgcagtcggtcccgagtcctcaaactcctggccttccgtcaacatcgtggtggtcggaccaccaccttctcctgggagaacttgttgactcccctgggtttgttgtgccgtcctttcggcaaccagcaccatgcttaccgtctcagaagccactgcaatgtataagtacaatagctcccccggctccggagctaccagtattggcagggacacaaggtgctgctttaactcttgaaaggctcgttctacctctttggtccaagagaatggaccggacttccgcaatagcctgaagaaaggcagcgccctctcagccagtcttaagatgaagtggctaagggcggccagtgacctcgtaagcttctggacgtccttgatgtgggtcggaggcctcattgcctcaattgcctttatcttctctgggtttgcttcgatgccccagtgcgaaaccaggaatcccagcaacttccctacggagacaccaaagacgcacttgtccgggttcagcttcgtgcgtgttgcgcgcagcttgtcgaagaccagggttaagtcttccactagggtcgaccctctcttagtcttgaccatgatgtcatcaacgtatacctctactctgtccctaatcaggtccccaaaag

SEQ ID NO: 163998 - DNA, 481 bp, Zea Mays
gctgggtggaaagtagcggaggggtgtctcggagacttctttgttgtagttttggcatagttggcggagggatttttgggtagcattttggcaggtgtctgggaagcggtggccagtagcggtgatctaaaaaggagggtgattttgttagcttcgactttctcctaggttgactgccatagagcacttctcgactccattctcacggtattccttccagacatactctggcttcttgttgatccccatgcgaagcgcacaactccgaagaaaggtgaggaaatccttccacctctgagcaataggatgtcttaaggacaaaggtgccctccatctggtagcaagagaagaagggtcattaatattgggcaaagaagagaagattccttaagaagttaagaggtttttcttttaaagaaatctttttaggttagggctgtggtctacggccagtcctatggctctgataccacctgaagcg

SEQ ID NO: 163999 - DNA, 558 bp, Zea Mays
gtggctgcggagggaggatctagacgcctagggaggggcggggtggacctaggagacgtggcgatcagagttggttgctagggggaacgagaggcggggcgactgctgtggagtgaggaggctctcgttgctcgtgcggccgcggacgatgcggattgacacagacagtatagattgaagggggcagaacagggggaggcagcctacccccttaccttcttcatagtagtagagatatgtgcaccctcatagtgctactcaccaccctcatactgttactctccatcctcattctgctgctctccaccctttccatcctcatagtgatgatatccaccctctctaccctcacgttgcttttcatcttcatcatgtgatcttttaagtgattcccgactacaactcagcaatgccccgtgtcgactattgttgaaagaactcccatggaaaaaggttatttgtcgtcttactcatagctccctttgttagttccttgaacttacaattcatcttattcaataaaatagcaaaagtagtccaacaattataatttaaaag

SEQ ID NO: 164000 - DNA, 443 bp, Zea Mays
gatacttttcccccttcctttttcttcggcatcccctagccgctagaagttggaaatgttctatttgccaaatattcttgcactaagtccctagtgctgatctcggcagctaccactctaaattcaacttcggctagctagtacggggagccatgttgcatgtggcacaggggccttgtcattccgaagcttaatttcatcgggctcatgacatagacatcatattttccctcttcttctcatcagcttttatgtaaaaccattcactcgtccacccggtcggccacttggtgcggtagccgattacgagagccttggtatcctctcgatatgcaaagttatagcagccaaagttcttatgaaggccatccgctctggccttcgtctggtagagtaactcatgcactcggcagaaagcttcaacattagcactcataccctgg

SEQ ID NO: 164001 - DNA, 504 bp, Zea Mays
gtgcgagcttcggactcctcccgaaggtcacgctgttgctgaacctgacgatgcccttctggctgttgattgtgactcggggcaggcgccaatggtggtggtggtggcaactgagcccaggaagcttgggaatgacttgcagaagcaaaaggggccgtgggctgttggttgcccacatactccgggatataaagagagtaacacgaaccagtatgcaagacctgcttcggctagttctgcggtgcttcggcttcagcgatttccttctgcttctggatcgtgacttggcacgtccttgtggtgtgtcccttatcttcgctacataatatgcagaatagtttcctgggctgattacaaaaccttcccccgaagcttctccccctctgcctctcgggactggtggcctgtaggaagtttgttgcattcccaaagactgcgagctgtgctggctgctctgagtatggtttgtcctgtcatcatttgtattgggattgtggattgttc

SEQ ID NO: 164002 - DNA, 356 bp, Zea Mays
ggcgaagggaaatccgggagggataacgaccgatggcgatctgctagggtttggcttaggcgcgaggggatgagggtagatggtgatccgggagaagatgacggtggattagattagggttgcgagcggttagggacgcttgggatgatttggggggcgatggggtcttaggtgaattcagtcatggaccacgtgggtgtgatccaagcggggtgccggtgtgggactggtcaatcacgtcgcaactaatgtgtttttgcgtaaaacagatacaagacatgcgtaaatgtttgtataactaatcgtaaaatcttctcggtggtgtgtctggttcagtaggtcggggtggttggggc

SEQ ID NO: 164003 - DNA, 519 bp, Zea Mays
agcgtgtcccttgtaacgctgtgtgccttcccttttatagtttaagggaggcacatataaggatgctgagccccgacatgcgggcccaggagcataatggaagaaatacattgtgaataactaatgctaacagagtaacgcatgagtaatcagcgggagtcatgatggttgcagtccatgcagcattgataggtagtaacccttttctcggtaacgcaggagtaatggtgagtcattgccctcgatatggtaacatgtgagtaactacacggcccaagtatcatggactgagcatgccgcctgtcagtggaatggacaggcgcacgtcttatccgtaatgaatgcgaaggcgcgcgtagcccagaggcgtcatgccaagttccgcccgttggcttatgccgcacgcagtatgccacatggcagcatcgggtctccgcctgagcggggagcaggagtctatgcggataggtccggatcccaccagaccaggtctggacacgtgtcagctccggacccccg

SEQ ID NO: 164004 - DNA, 562 bp, Zea Mays
aatggagcaatcgtcttaagtcggcagtgacttaagacggtgcaacatgctcacgctgactcgacttagggtgaccactataccctactaacggagcaatcggcttaagtcggcagtgacttaatacggagcaacatgctcacgcttactcgacttagggtgaccactataccctactaacggagcaatcgacttaactcgatagtgacttaagacggtgcaacatgctcacgcttactcgacttagggggaccacataccctactaactgagtaatcggcttaagtcggcagtgacttaagacggtgcaacatgctcacgcttactcgacttagggtgaccactataccctactaacggagcaaccggtttaagtcggcagtgacttaagacggtgcaacattctcatgcctactcgacccagtataacatgcttacgattattcatcttagggcgatctatatgcctcatcagctaatcaattagcataaaataggaaaaagcttcaaaaccagcacactgcatttacttctgcaatcataacaactgttgaattccaac

SEQ ID NO: 164005 - DNA, 590 bp, Zea Mays
cgtacttggtaatgaatgccgtcttcggaatgtctgaaggtcgaatcctgagctgatgataacctgacctcagatctatcttagagaacatgctggctcctcttaactggtcgaacagatcttctattctgggcaaggggtacttgttcttgattgtgacctcattcagagctcgataatcaatacacattcttctggtgccatctttcttctccacgaatagaacaggggcggcccaaggcgaggtgcttggccggatgtaacctttctctgacagctcgtcgatctgcttcttaagctcaaccaactctggtccagatactctgtaagctctcttaaagatgggggcggtgccaggaagaagctctatagcaaactcaacttttcgctctggtggcatacctggtaagtcctttgggaacacatctgggaactcggacacaaccttgataatttcaagtggatctgcttcactgctattaacaaccatctgataacaacttcctttctttggctcaggcgagactaactcggtcaccacttcgtttcctaatggggacaccaacttgattgtcctcttatcacaactg

SEQ ID NO: 164006 - DNA, 547 bp, Zea Mays
aaccaaagcactgacttcttcagcagagggtcgcactctaaggcccaaactgccatcagtaacaggtggattcgatacaaatagggtgaaggctttgggaggaggcaaattccaggccgagtatgccactggagcactaacatttgacaccttgcccctaaggatcatttcaagtcggctcaccaagtctgcagaagggattctcctgttggtaacccgagttgagtcggctagccctcggtacagataagctggataggccctgtctttcagtggctggatattcttgaaaacaaagtcagcaaccacagcttcagcagttagacctctctctttcagcagtccaacttcagctagcaacacacctgcctcagctacctcctggtctgtgggagactcggtccagctcggggtacgaacgtctggctgtcttcccgaccgggaggttatcaactataaaccactctaggcgccatcccttaatactgtccttaagggggatctcaagatattcagttttccgcccacggcgcatctccaagctggc

SEQ ID NO: 164007 - DNA, 602 bp, Zea Mays
gatcagaagaggatcggattgggtcgcggggtgaagtttatcaaccgcgcctatagctgtgcgacgtggccagaccatcagtatcctcatggagactccggcaacctcggttatgccacgccgtggctcgttactgtgtggtagtaactgtggcacacttaggattacaatctttgagccgttgcaccggtgaacgccacgattaagccaccagtgctctcccctctctccggccgccagcgcgcgattccaaattcacgagccaccgccctcgggccctataaattgagcatgccatcagctccgctaggtagtcaagcatccagtgcacccacctgtgtctcggattgtccaccagagcgctctaatttgggatttcccccaaattggtcaagaacaccgtattgtgtgagctcgtcgtggccagctttccacaggtccgatcatgccttcctcgctctcgtttcaacatccctatgtgctgtagatgcttagcagcccggccaattgaactagatcacactagatcaccgggaacacttcagattgtccttggtttgcgctgtcaccgtgggcagagagattaggagccagaatcttgc

SEQ ID NO: 164008 - DNA, 864 bp, Zea Mays
atgcgcagacttagtcaagcgatccactaccacccatatagcatctctgccctgaggagaacgaggtaaacccaccacaaaatccatggtgatatgctcccatttccactccggaatttccaatggcttcagtaaacctgcaggtcgcttatgctcggccttcacgtgctgacatacttcacaggcggccacatacttagaaacgtcaaccttcatccgcttccaccagaagttttgcttcagatcttggtacatcttggtttcgacagggtgaatggtgtaaggcattttatgagcttctctcaatatatccatcttcacctctgatttctaaggcacacaaaggtgacccctgaaatgaaccaaatcattctcatcgatggagaactctcggggtttaccatcgccaaccctctttcgagcttcctgcaataaacgatcctgctgctgagccgcacacactctctccatgagggaagattgaataagcatacgggtctcctcactagcggtgccgacatagcacaaggcgatccccaaacggtccagatcagcaatcaactgcaaggccacttttgaaaccccggacctgctaagggcatcagccaccacatttgccttccctgggtgataatgaatagacaaatcataatctttaatcaattcgagccaccgatgctgcctcaaattcagctccttctgagtaaaaatatacttgagacttttatgatcggtgtaaatgtcacaagcctcgccataaagataatgcctccacgactttagagcaaaaaccactgcggccaattcaagatcatgagttgggtaattcccctcatgcttgctcaactgccttgagccataagc

SEQ ID NO: 164009 - DNA, 584 bp, Zea Mays
caaggaggtatatcagtcaaatctttagtaaccaattgagtagagacattccacatataatagttccgacgctggctatttggtgccaccatcgccacctctagcacctccatcaagaccccatgactcaaaggatggtggttctagcatagtctctcctcctctagtgacgagtaccactaatgaccatatgtcgacactcctcgagtgcagatataacaacaacaacaacttgccatagagcagcatagactgacaactgagtagcgagtagcaatagatgatggatgtgaatctagaacgagaggcagataatcatgaggagcagcattgataggctaaggcctcatagtttgaatttgaattgaaaaccctagagaaaaagaaatagaaaagcaattagaaattctagaaacaaaggaaaagccatttcggcccaagcgagcccaccaggcccagccccccgcgcgcccgcgcctgcgcgcctgccgcccctgacaggcggaccccgcatgtcggcaccagtctgcccgcgcgctctcctctctctctctctctctctcgctacccagtggggccgactt

SEQ ID NO: 164010 - DNA, 1128 bp, Zea Mays
ccagcgccttgttgtcctccatctcctccttgccgagaaagagggtcgttctcgcgacaggcagcatggtgttggtgaggtcttagaggagctccttgaggcggtccatggtgtcgacagtggggatcgcaatttgcaaaacggggagcggagagtttggcaatagagcagtagacctttcgcaatgcgggcaatctggtggatggcgcgcttgtacccattggcatcacttgagatgtaggggctgacatagccctcgatcctgctattggcgatggcctccaccaagccgagggcgttaatgcgcttgccctcatgaggctgcagcgtcgagtgggaggaggaggagactatttcactacgggagggggggagagagtcagaatggggaggcgtcgttggttgattacaaagaaatataaaggggtcctattttgttgtccttgttcgatcacatgcctcgaatcttatctacggtgtttgttggcaagaagcgagaaagaaacagatcttcgtgcttcacgcatgatgatggaatgcttgtgacggtggaaactagtactttatatagtagagactggtcgagataacacaggctacttagaccatagtcaagccacataagcgcaagatcgtcgccaaaattaggggacggagggggacgaaacaggcagtgacgaggatatttaactatttgtcattcttacggacggcaactctttatatgtcactttcatgatgtatataacatatatgccactacttttgaaagattctatatttttaccacttttacctatgtggctcgccacgcacgccgacacgtcgtcgccatcatagattagcacgggaaatgtctcttttgtccctcgctagagtctgatctctccctcccttcccctgctacaaccacaacctcgttaagcctatcatggccacaaccatgcccaacctcctcatcagcgttgagtccatcgcctccactgcctccgtcctagtacaggatcgggtgtttcgtctcgttgagttgctcggtgaggacttggtcgtacgcttcgcctcatagggttactcggcaaagggttggtcggacgctctgcctcgcaggtttgcttggtcgggagttgg

SEQ ID NO: 164011 - DNA, 591 bp, Zea Mays
gcctccgtgatgtagctatgggtagaacttcctgagatgttctatgttccatgagttcccaatttctgtttcgtccatctgagtgagacgatatgatcccgaccgagtgacttctgctactatgaagggtccttcccatagaggtgacaatttatgccatccctcccccgttagaattcggcggaggacgagatctcccatcgcgaaggatcgatgccgtatggccttatcatgatagcgcctcagagtttgctggtatcgcgctgattgaatcaccgtattcagtcgctcttcttcgagtacgtcaacgtcttccagcctagtagcttcagcttctgctatgttatcaaagattaaccttggtgccccgaacttgagatcggcaggtagcactgcctccgaaccataaaccataaagaagggggtatttccatgcagagctcggctgggttgagttctcaggctccagactacatatggcaattatctgatccactttcctgcgaatttctcattcttgtcgaagactttctttctgagtacttctaatatcatctcgttggctctttctacttgcctgttggcccttgg

SEQ ID NO: 164012 - DNA, 620 bp, Zea Mays
acccaatccattgccggtaccgcccacgctggccaaggctatcgctgccttggtcaccgcaaccgctgacaacacccgcttcctacgtgaaatggcgggacagcaacttcagcaatagggcgggagggcttatccgcaaggaccccgcgaaactttgtacttggatttctcggaaacctgtcccccactattcgtcaaagtcgaagatcccctcgaagctgatgaatgggttcggatcattgagcagaagttcggactcatccgatgcacggagacccagaagccattatttgcggctcagcagttaagaggccctgccagtacctggtggggaaattatgtggccattcagcctgccggacatcaagtcacctgggacgaatttaaattggcatttcgttagcactacattccagaaggagtgctccatatgaagcaagaagaattcatgaaactcaagcaaggagtatctcaataaattcaatcatttgtcccagtacgcaattgaccaggtcaatactgacctgaaaaagaggaactattttatgagaggcctcaatgaccggctacaacgaaagatggacacctgtcttgatctctcctacagcagagctatcagc

SEQ ID NO: 164013 - DNA, 613 bp, Zea Mays
ggctggatggcttagattgatagaggaaaagtgcaatgagatttgtggaaattaccttactagagagcatgaagatatgttgtctgtctttggaagtcatgggaagcttcgacttagttacttattttttggaacctagcatggtattctcctataaatatgtacctatgggtgctaccatcaagcacaacaacaaccaatgcatctagcatctcctattcatgcctattgcgccgccacatacgctacttcatccctattgtcggcatgcagtagtgatctggagagcagtctctagaaccttcaccctagtgatcctgcaccgggagatggcgaataagatttttaggtagtgctctgtgtgaccgcttgatcgcgtccttgttgtcttcaaccttgtcgtcacatctcatctgcagcgcgtcgcgttggtgtctcacgtcgtcgtcaacaacaaaacaatattgaatgtcgttgtcatatgctctaccccatcatcagcgagaaacaaagctacaaccatctcccgctcatcatgtttttgatattgttctatctaatctatttagatattattctgctagatcaagttttaatcttaattgacattatg

SEQ ID NO: 164014 - DNA, 702 bp, Zea Mays
gcgagctccagtggggtcgtcgacggcgaactcgctacgcgagcctggtcgcgacgaggaggaacggtgacggttgcacggcgccacgtgtaaaatactccgacgagggatttcggcacgtcgactacacgtggagcgacggcacgggcgaaacacgacgtcaacggcgagctgagcgacgtcagtgtggataccgaacgcgggcagagggtgcaaggactccggtgaggctcgacaaagaaagggactgctgccacgaggaggaatggaagagccagcaccaaagcaagtagcaacacggaggagagcgagcagagagcagtcgggtgcagcgcagcaaagcaacatcgagcgacgcgagcagtagcaagcagagaaggtgtggcggctgaggagcgcaggagcaagcaggagcgagcagccaagagagggaaaggtgggctcgcagcggtgaagaggagaagaacgacactagctttataggcgaggggggagagtggtttgcggccagattcaatactccattaacgcggattgaagaacaacgttacctactcgaagaaacaaccgtggccactaatgacagtcgcttgatggggagaaactaatgcgacgcgaactgtgcgggctcggctggcagcggctactcgagttctggcggcttctgtgtttctacattctgtttcttgctgctggtttgag

SEQ ID NO: 164015 - DNA, 1729 bp, Zea Mays
agctgccacaaaaagaaaaaaaaaactaatagcacggtacaggcataccaaaaaataaaaataaaaaaatattggtcgagaattcctgaccttttttcttcattatcctactctgacagatttctggaaagcaccaactgtgtcggaatgtgcacgaacctctgcaaaatcccatgccagaggttcatccaggattcacttggcacggctgtctacatgtctcccagtaagttttttccacacctccgcttggtcttgtccatggaaacgattacccgatcgagagaataacatgtaccgagagtaaaactgcttccaagttttggattccaagaaaaaaataatctgctcctgccactgactaaagctgggaggaaaattgattttttttcagtggactgtcattcaagccagcaaaaaattaactgaaacttcccttggtcacaagcctaattactctgtagctcaacattacacaactcgtcatgctagctctgaaacagaatcttaatgactctgaaagcaacgcaccaagattctcacatggaaaaaaaaataatacagaagttagtttcataatgtaaatctatctaatgatcctgccacgtacaccgtctgaactgagacactacacctttttttgggcatgggaatcacaaggtgccgtttggtggacagaaaagactgaagtggaccaacatgtctgtaggttatagagcaattgcaatcaatctgtacagagaaaatagggtagctcttacttgtaactcttagtggaaaactactagtaacagagacaagtgttgagatggtagtgtctattccaaccattccacaattcagtgcttaccaagtacagtacaagcaccttgactagccagcatgtttcaatgaacaaagcattaatctctcttactcccccccaagcaattatttcgagcgttgactgattcttggcgaatatttcaagcacacaaatcattgtatcaaggtcaaaagatgttgacatttaataacatcggtccaaataattggacaccagtttgtgttggacattactaggcactccttttgtcatgtcaagttgctatcaccgataagtggtaacagccatgaatgttagcttaatggcaccgattatgatctacaggcttatcttcactactttgtccattcttatatattgcaaagcagtgttttaaaccttactaaattatctctgtatctgatccataccaaaaaaaaaaagaggatattagcttatgttctgttctaataagccctttctcagggataatggaacttactgtactatattaccactgttcagattttgaggacatgagctgcgagatgatctttggacagcaaccacctgaagatgatccagcactgaagcagccctgcttccggacaaaatgtaagcctgcactgagatatctgtacagatttaatcatatttcctcttaaacttctcataccctttatttaatctatatgcaggcatcgcaaagcagaatcatcaagtgaattgctctatttgatttgagaggaagtggatatgtaaattactatactactatcagtggaaattcccaaaattacatgctttcatgtttattcccttagtaagcagcatcagtttcatagattctttttacttgaaaacatagcagaaggcaattctagtatacgtcaaattgttaggaaactggttgctgatcaagag

SEQ ID NO: 164016 - DNA, 541 bp, Zea Mays
gtgataccaaatggtaaaagaaggaactcaaaaaccgctatgcatgtaagcactgatgccaataccgttggcagccaaaataagcatagacatagagagaggaaagatgttgagcaataccacgtgatatgagcggaagcttatctggcaaatcttacctgttgatgaatgagagcttacatggcagatttcacgcgacgatgagctgagccttatctggcatatcgtagatcctacctgacacacaaagagacacacagagagagggtagatgttgagcgacatcacatgacatgacatgctatgaaagtgtatttagtagaccccacacatcgatgagctataacaaacctggcagatcccacatgttaatatgctatagatgctcatctagaacatccagtccaacacgacacggtatgacacgagtttgtaccaggcataaccaacaatgaccaggctagagacaacactttgggccctgtgtgccatacctctaagaagcatgggctttaccatctattcatgcacaacactatgt

SEQ ID NO: 164017 - DNA, 644 bp, Zea Mays
tgaagtgaaatggtttttttagtttagtcatggttaatacaagtttgatagtagtggcgcttgctggtgtgatcactaggttcattcaatgaatcttccttcttaagtaataactaattcctaagtgtatgaggtgtgttggataagtgtgtggaatgcatgagtggtgtgcttaggagtagaggtaagtgatgccctccaccgtgctaaatgtagacaagtaggtagttaagtgggataatagcagtagggtatgttttgtgagtgatggcttgcttaagggtagatactctgctaggttggactaccttgtagaggagaaggtgatgggttgtatgatttcttaagtagtagtcaggaccgaccaagaaaagatagactacatgttcttggatgacgtagactaccttatgacactgacttataatggaaagtaaaccataaaggatattaaaataagcatgcatccctaagcatcatgcatctcctgcactgtgcattacctactctcatgcctgcatacatgcatcatacaggatcacaagaggaagtgccagtaggagctgtcgaggagctgatgaggcttctattgaggaggttgagcctaaagccgaagcccaagagtgccctgaccaccgccctag

SEQ ID NO: 164018 - DNA, 324 bp, Zea Mays
gttcttgtcagatcacgaatatcaacctgttcaaggtgatccaatccccttagccctatcctttgtcttgttagtccatacttctatacaccgcgttgtttcagttcggtgtctctatcctgaacttctgtgtctgtggtaaagtacccccatctaatgacattcttagtcgcggtaaattgttgaattaagaagaaaatgtgttgcgacacagttgtctatcttcacacttttgtgaattgatttaagggtgtcactgttttttcctaattcacctatcagtctgcttgtcggtgttttggacccgggggaccctcaaccgac

SEQ ID NO: 164019 - DNA, 1116 bp, Zea Mays
ccccgagcgtgacggtggtggtgactggtgagaggttactgaaaattattccgccattctccatgattaatctccaacatggttgcttatagcttgcttgtggcttgtgcgtgctagggccagtttagaacacctaaagatagtcagctaataaattattagttaggttaagccagctaataaactaattatgagttgtgaggtcgttaacaattagttacagtattagttggggtgtttgatagccagctaacaaggcgtgttctctctaatcatacatacctcgatgcagtagtatagagaaaaataaatacattttttagtctttgaacaacttacgtcttatattgagtgtcttgtacattgagttttagaggttcctaacggatctttaatcgattcctatttttgtttctaactttatatagtggagtgattgtaccgagacacatggggtggaccggtggagggcctgttatggtctattatagcagctgctaatgtgggtccgaacctggttggatgtccgcacgtagaccaaccagactcatgttatgcagttcaatgttttcacgattagtcacgattacttgttcaaatcggtttggaccaaacacgattaaacatccaagtaggtttggaccaatcgtgattaatcgacaacttaaaacattgatggaggtacggtgtgttggctacttggtttcatgttacacctatgtacccaggcttgtgatactttagcgtttgtttgattagctgcatgtataggtgtggcttggcccagatatattgtttatctagattagcaaggtaggcatggcatagtggttattgtatattgtcttccatccaacaagttgcgagtttaagtcttaccatgcgtattgattttttaccttacttttattttgtcgtccgcgtggagaagcttttcttatccgtgatatatactcatcacctgcagaatatgcaaatgaaaaatgatgctaaactaggaagtaggaacagaacaaggctgttgtatctgtctttgagaatcgctcaagtgaacgtcttagaacgcaggatcacgaaagattatgaaatgcgaaaacactttcgcttcaattcatg

SEQ ID NO: 164020 - DNA, 528 bp, Zea Mays
cggatactaaatcgggtgatggatgccctaggcttcgagtaccctgattatgaaaggcttgacaatgaaactaggggattgaagagaaaaagggttgtgagtgtgttaacaaggcaagcatagaggtcagttgaagtaggcaagaataagaaattaacaaagaaaccgaagctggcataaaaaccttcggcaccaaagaaaagaaaggttacaagttccgagcacggagatgaagagggaccttctccaccgaagcatttagagaagaccccttcggcaacttcggttggggtaacataattttttgaggtaatgactgcacccttacctttcccaatgctgagtcctctaggatccgatctaacaagcttgttacagccacaaaagaaaattgttgagggaagtgccgatgcagaggcgggtaaagacccttcggcgcctagcagagggaacattcagaagaagcatcgaatgatgaatgtgatgagggccatccttgacacccctcctccagtgattcaaaatgaa

SEQ ID NO: 164021 - DNA, 442 bp, Zea Mays
gcgagattggtcttcactctcaatagccaaacagtgtacattgtgttgcccagggatgatgtaactttctatgttatgggccgcctgttggtccctgtaaactattatgccccctaagggtcatgaatcttcatgcatagatagaggtcatggatggtgacctcgagcttattgatcaaacccttgtctaggatggcattataggggtaaaccatgtcctcgtgttgggggtggcaccgaatgatagtgatgttcccccaaatccatacaaggggttgtctactggctataataaattatgattgatttccatgcaattgaatgtgtgtaggaaaatgatgtctgcctggctgccattactgacgagtgtcttatgcaactcccaaccatctatgttgtagtttattaccattgcttcagtgtggaggtactttgcaagtcc

SEQ ID NO: 164022 - DNA, 297 bp, Zea Mays
cgcccgcttatccagggaagcatccttctccttgaggttctcctcggccagggcaatgttgctggccttgtcctccagctcccgctcccatttttggatcctctccacagttgcggtctgctgaacccgctgctcctccaggatttcgttgaaggcactcagcttggcctggagctctgtgacgacctcctccctctggttcaaggcctcctccttcttggccaacctcttctccttccggcttgcctccagctcccgggcgtacaccttctggaggtcctttttgtagtccttgcg

SEQ ID NO: 164023 - DNA, 273 bp, Zea Mays
ggaggtagattggagggcgttaggtggatggaggccgcgacatgtggaacgtggcgcggttagagtaagaagcgggaggaggtggaggaggccggatgcggacagttctgccaaagtggccttaggcgagtcgtgactgcgcctgctacccgggcttggcctcggatgagtcgtgactgcgtctgctgcccgggcttggccttggatgagttgtgactgcctgtcccgcttgggcttggccttagacgagtcgttattatgtctcacgctcga

SEQ ID NO: 164024 - DNA, 742 bp, Zea Mays
gggacacggatcgggggttagcttgagttggttgggttagggtttgtgctagctattgagattcggtgggttttgctttcttgcggcggctgggggcactgctttagccggggtcgacgcgcgaatcgggatgagttacgctactgcatctttgcgatttcactttctgatcgcggtttaggcttcggatggagtgttggatggtttgatcgagctgatatttgtgggttgttggagatcattgactcgccatctttcggttttgctgggggcgccttctggtttttgaatcttttgacctggaatggatcgctggacatgtagatttaggactatttattcggtctttcctagtttgaggctaagtttcttcgtttttctgtgtggcttcgtggggttagctcgatcatttttgtttggatttgtactcgttgggaatttcatacgattcttgaccttttcctctgctcttcgtcactgaggtttggggttgtagttcatggtaaactcaaaccgaacttcagcaatgcgtgatttatcacttgtaggataccgtcaggtcaaaaaatgtatagaacttgatcaaactctttttccatagtctcatgtagcacaatgagcattccttcctagcttagttacatcaatagtgtgagcaagaggacgcataacagttctggacttgaggattcacttgtttgttagtattgattaaatggatcgtcaccttattgaacgtgct

SEQ ID NO: 164025 - DNA, 605 bp, Zea Mays
tttcgagataggtgcagttccgggtaataattcaatagaaaactctatatcactgtcaggtggcatacctggtaatacctccggaaatacgtctgggtattcacacactaccttgatattttccaggggcttttcttccaagtgattcaccactgtctttccttttgcatttgttggcttgtctgtgctaacttggattctttcaccttgtggacttgtcaacataattgttccgttgacacattgtatcactccatcacaacttttcaactagtcgcatctaagaatcacatcaataccgttggatcctaagaccactaggttgactagaaaatctattccttgaatcttgagattaacatggaggcatgaatgtgtggccttcatgtcacctcccggtgaactaatgtgtaacatctccataagagggtgctttggtatgttatgtttttccatgaatgatgcagttataaatgaatgcgatgctccaaagtcaaataaaactaaagcaggtatggagttaataagaaacatacaatacactacgtcagcatcctcaagcactgattccgctgtggcgtgattgaccgttcctctactctggt

SEQ ID NO: 164026 - DNA, 672 bp, Zea Mays
ctgcttagcatggttccgtaccctaagcctgcacgctccaccactctgcaatgggtaccctagtatttggaactatgatcctatgggtccaggcatacggcttggtttcccaggctaaatcctgcaggtcctgttgcatgaatcaaaggatgacagataccagacgatgggtccaatgggtgtgctcctaacacttcaaagccgaagctgtgtgtaggtctaggtcccagtccagaggtaggtagtctcaaactgtagagactacctcctagggaccggtccaccaatttttctttggtatattggtatccagcctcgacacgtcgagcctacctccctcccaggggggccaagtaccaggtggaagttgatgacactatgatgctacacataacaagggcaaataacatatagataagttccagtggaacccttgtcttgtctctacaggtcgtcggtaggatcgcgttgaaagcgtgcgaccaccatctccactgcatcttgtacgctctctcgggcggcatcttctgtggcggctaccggaccatcgatcacctgcgccaaggatatggcggggtcatgactcttgaagcacgtcaggacatagtctaccaccgcccgacagagcttgctgccctctgcctccaagcgggcaccgaggatctgatctag

SEQ ID NO: 164027 - DNA, 556 bp, Zea Mays
acggtgacagccacgataacccgctccggtgaatcacctcctctcttcggctgccagccttccctttcaaaattcggagccaccgctctcagacactataaattgagtgtgttgctagctccgttaggttgtcacgaagccagagcacccgccctcgcctccgatcgtccaccatagcgctttaattcgggtttcccccaaattggttctccgtgccgctgtggatagctcttccgtggccagcgtcgcctgaggtagttccatcccaattaccgtttgttctagctcccttagggtgtagtgatgctccccgtacttagaagttgaacgctactgtacctagtcgctgggaacagcttgatctttccctcggtacttgtcgtcatcgtgagcagaggggattctgggtcggactagctcaattaggggatgaactaggttcgcctgggatcagggatgctagcgcaatgcttgacttagtcagtcatcgccgtttggggcgagttcccgcgaagagatggccgacggcgagcacgccgtagccagggttcggttt

SEQ ID NO: 164028 - DNA, 920 bp, Zea Mays
ctgtcagccgggagtgaatcgaccccatacaaacagatattctgtcccatgtgagtaaaagacatccatcgccgaccccaatgaattctcatagggctgtggagttctaaccaatccatacccaagacaatatcaaccacgagtaagtccaaaaccttcaaatcatgctgaaattgatatgaagcaatggtccaagtgcatgcaggaacataaaaattacagtgcagcaacaccccaattgcaaccttcaccactgttgtattagtcaaggaaaccatagccgataatcgattagccaacgtgtagctgatgaaagagttggtactacctgagtcgaccagcaactgaatttgatgtccattcatcagcccatcaaacaacaatgatctagttccagaaaatcccaacaaggcatcagaagaaatggtaagcaagattggtaatttgttctgaatttgtaccatcaacatcctgttccataatagcccaaagttcctccatagcatgcagagaaactgaagaacacttgtgatcacgtgaccatttttcagcacatctatcacaaagtccacgagcccttcggaaggccttgagagatgcccacttgtcatcagttgaacgtccagcagactgcagtctcttgtcgtcagtgccctgacccaacttgtccgaaacaggtggtggaggtagaggtaatggcccttttgcatatggtcttgaaaaggtagattgatcaggacgacgaaattcccttctcttgacgggttcagccacctcgtcctgcagtaaggcaagagaaaaggcagtatccaacgttgtcgggcgatgaatagtaactacaactttaatatcgtcacgcagtccatcaacgaaacgacaagtataataaagcatgtcagtagaggactcataagcaacca

SEQ ID NO: 164029 - DNA, 616 bp, Zea Mays
ccctcggggcccccatgaccgatgagagcctcgtgctcaacctcctctgtggtctgagtcctcgcttcgatcacgtggcgcccatcgtcacccacatgaagatgtttcccacctttgcggaggccaagaacaatctgcttctcgtggagctttgcctctccgccgctgcaaccaccgctcccgccatggccctctacagcgtacctcgggctgccccctccgactctgtgggggttcccgctcaccgcactccgaccctgctgccctctagagctccgcgacagactgctggctttagggggtctcgcaaccgcggtcgcggtcgcaagggcggacgaattggcggtggcccgtcgggaggctgtggtggctcatcgggtggctctcagtggctatccttctacaacccgtggactggcaccattcacatgtggcccgggtcgtccacgggagcctcggcccctcaccccaccacctctcagcaggttttctttgtcgctgcaccccggctcctccatagcctcagcaaggtcttctatcactcccggggtctccgacccagcccatgtgggggccctggattaacggatgggatgcgcagtccctcgccaactcc

SEQ ID NO: 164030 - DNA, 743 bp, Zea Mays
gttttggagctttgtgatatagtgaagagttttttaagaacatataagcgtactttcctggagggtggctgggagagcggagggcactggcaggcaactgcgctgccgctgcctacagctacaggggctgggtgctgggaaagccgggtggggactgttgcctgctacagctgccggggccaggccgtggctggctgctgcggtcgcacgagaggagagcccactcttgagtgcctatgtttagtcacctgttttgccgagctgctcagtaatcttcataacatttttccatatgatcatgatgaaatctgacaagtaacaaaaaaacaagccaggcgaaaaagcatggcattgcataacatttttgcatacttcaaatttgttggcatttgtttttgtgctcattgccaaaaaaagaacaccacataaaaggaatgagacatcaaagccattccaatatcacctagatctcatccaagtgagaggcttgtatggctgtacttgagcatcagctaagcacaagcccaccaaagcaaaataatggccctcattttctacccatttattgactcctacattctaaccttcgcattagtgaactcgtaaagtaacaagtctatagtccttctcgcacactttttcataggacaatcaccaactaaaatctatttgtccaacctctcaagcctctaacccgtgtatttcctcttcactttgttttcctttgcttctctaacccgtgt

SEQ ID NO: 164031 - DNA, 594 bp, Zea Mays
aggtacttcgtcagatgtaacctttatctgacagctcatctatttccttcttgagctcaaccaactctggtccagataccctgaggctcttttagatatggtgcggtgccaggaataagctctatggcaaactcaacttttcgctcaggtggcatacctagtaagtctttagggaacacatctgaaaattctgacacaaccttgatagtctcgggtggatctgcctccttgctatcaatagccatctggtgacaacctcctttccttggctcggttgagactagcttagtcaccacttcttctcctagtggggacaccaacttaactatcctcttatcacagctgataactgcttggtacttatctagccaatttatccctaggataacatctattccctgagtacccattactatgaggttagcggggaactctatcccccttatttccacaattacattcaagcaaacactatcggctcaaacttttccaccagctgaatcaatttgagttggtgttgacatggtagttattggaagattatgcgcctctacccatgatgcagtaataaatgaatgcgttgttccagtatca

SEQ ID NO: 164032 - DNA, 558 bp, Zea Mays
gccaaatattggattttggacttatttgcaaaatggacctcatttgagttctatactaagtctgaattttaggttataagctcaactttggagctttgtatctttcaaattctagggtttttgccctaggtcaccacatcgaaattgtagaccaaacaaaggagaacaactttgcttaagagagtaagcatagttgttgagaagatattggagataattaagcccaaagttggactgtcaggctgatggaactctgaaattcagaatttcagtgtaacagagctaactttggacttggattcaaccttgatccagtgctcaactaagtttaatccctatagtcgagttgtagctggtttatagcactacaatattgctgcagagatctagacgagttgccatttgaatttgggaggaaatggagctccaagatgatctgccaggtgctctgatgaggtcttgccatggtacagtgtcccgatgtggatcaggtcgccagcacggcaacttcaccaccgatgacccatccgcgccgcgattagcgccgaggtcgtgatg

SEQ ID NO: 164033 - DNA, 588 bp, Zea Mays
ttccacaatcaaggggttatggtctgacagttctctagaaagctttgtcaatctcacaaaagggaacatgatttcccaaatcttactcatcattactctatcaagcttcaccagagtgggatccttctagttatttgactaagtatatccaccatcagacatatatatttttcagtccgtatttctgtataatatcattaattcttagcataagacaatctgataatattgaagtcaccacccacaataaatggatctctactattttcacaaaattctaacaacaccctctatatattatcctctatatgtaaataactatattagagatctattttatttttaatctgttgtttaaagtatcaaaatgaatagatgagagagacaaattctatatatagaggatctaacaacgtctttaaaatctaaagaatcgtttagagaatgatgtacgtgtagaggataaaattatcgtctacaatttagagtacacgtcctttacaagcctgttggagacgatctacgatccgatgacacgtgacacatcaatacgtgacatacataggaagctcgtgacctagaagcccg

SEQ ID NO: 164034 - DNA, 850 bp, Zea Mays
aatctggatgtgctacacaagagcattgtagattccctcaccactcttgagagaatttataagtttaccatggttgatcttcaaaagaagaggactgagcttgagaaatcccaagttgtggtgaagaaactagacaacttgctggcctctaaagattctgtcctcaaaaacatgtgtgcctcatcaaagacacaatctaaagatttggaggtgttgaagcataacattggggtcttaaaaagcgactgtaaggtactgaaaggctacttatgacaaagctatgaactgatacgtgcagctcgactgcttgtaaagaaatccacggttattgtccctgaggatattgccatggtcattcctttaatggtagaccttgatacaggagcttctgcccaagataggtcggggtctgctcctgttctaaaggatggcactgcttgactacttgccctctgcgtattgtgtttgttttagtgttgttgaatacttgccctctacgtaatgcgagcatatgaatttccttcttttgaaacaaggagcttaggattttgctttgttctatgtgggagagcatgtagtcgcggcttgagttgggcgcccacttaatccaattgctctattggtagaaacttttgatttaactggtgggtacatgcaacttaatataatatcagatctgaaggtctggagtttgaatcttggtcattgcaattaaataaaacaattgttgtttgcaccttatagaatcattgtattttttatcaatcttaaaaaaatactggtcatgaagtgtattttgcgactcttgaagatgttctaatccttgttccttaaatgttgtttgttccca

SEQ ID NO: 164035 - DNA, 744 bp, Zea Mays
ttctttcaccttgaggacttgtcaacataattgttccgttggcacactgtatcacaccatcacaacttttcaaccagttgcatccaagaatcacatcaataccgttggatcctaggaccactgggttgactgagaaatctattccttgaatcttgagattaacatgggggcatgagtgtgtggccttcatgtcacctcccggtgaactaatatgtaacatcttcttaagggggtacttaggtatgttgtgtttttccacaaatgactcggttataaaggaatgcgatgctccagagtcaaataaaactaatgcaggtatggagttaacaagaaacataccatacactatgtcggcatcctcaggcactgattctgcagtgacgtgattgacccttcctctactctggttctgcggagtcttgttctaagcagatccgcgagcgggggtgttctggtcattcctctggttattgcttttctgaggtgtctgctggttgcgctttgggcagttgctagcatagtggcctagctcaccgcacttgaaacagccattgggttggactggtgcgttgcttctggcctgcgtgttactggcgccaccttgacggttctatgaactcccaccagacctctggttggtctgagagttgctcctttgttggttctgactctgattatttctctggctttgttgtccagagcgttgcacttgataattgtttccaccttgatttccagagcggt

SEQ ID NO: 164036 - DNA, 572 bp, Zea Mays
ttggtttatatttatacataaaaatgtgtgggcggctacaggataatttgcaggtggacgcggatatgcatgagagttttggccatgcacaaaatgtagatgctagaaaggtaataatggtattaaagtgcatgtgggactgcatattattatatgctgaaaaccatctgtaattttgaatgtagaaactagattttgctgtcgatgggacaatctaggcgagaccaaataacgcaaaaccaaagggaagaacaatcaaggggagtgaacaaaaggttattaaattgggcgcgaaatgtataaagaagaagaacaggaaatgccaaaagtgtggaattgatgatggtcacaacagtcgaatatgtttgtcgttggaggagaatagggttcaattgggtagccttgctagacgtaagagaggatgatcgcctggatctaggaacaaggttggaactaacgctcctcattggaatgagacgacaacttcaaaaaacacacagttgatattgacaacagtgagtcacccagtgactagtatgtggcacaaatggtgtatcatatgttatccgaac

SEQ ID NO: 164037 - DNA, 450 bp, Zea Mays
aaacgagaggagttttaccaagttaataggcccttaccacatgcgctatagcagggctaggctttctagtatcaaccttcctatttttggtgctagagttctatggaatatatccctacgtccatctctatgagatgttcatcggtgtacactcaagtttggtgcttttccacaatttcttcatcctttgacggacaggagggggagacatccaaggtggttgttatttttagggatgcaacaacaacgaccctagagaatttattagcgtggatgcatcgagacgctaggagaactggaggtaatcctagttctatgttaggaccaatgtctaggaccgcctcaccttcactactattgccctggtttcttatgcgagtacatgggaggctctactgaggctagccttagagtttaccctagtgatggagaggatctggatgttcgctt

SEQ ID NO: 164038 - DNA, 441 bp, Zea Mays
cgcaggatttggacgccttcggtctccgtgacgcatttaagcatcggttgactgacccccttcttgtaaagttggccctcgatcagtgcgaagtcccggcttcggtggtggaggcgcttggcctcattgctatcgattgggtgatagtacccctgcaggtacagggttattggcgcccgccagtcttcgttcatgatgaggttgataatgcggtggccctcgctgtcgttggttatttggagcccttcagggctgcggacggcgggcatgccgatgacgtggtagagcacgtcggagggtagggcttcacccctggcggctgccttggccaatgcgtcggcttcttcattcttggcccggtccacatgctgcaatgtgaatcccttgaattgtctctcgagacttcggatggccgcgaggtattgcataagtgcggggtcc

SEQ ID NO: 164039 - DNA, 499 bp, Zea Mays
gtttggagcacgtgcgtgggcaggttggtttgtcgagcatagtattgacatacttcacatgttcgcaccaccgagtgctcgtcggacactgtagtaggccaatagaaaccctgccggagggcgtttcccatgaggcttcgtggggtggcaaggtgttcgcaggtcccgctatggatgtccttcaggagctgcatcccttgttcgatcaagatacaccgttgctttattctgatgttccccctttttgtacaggtttcctctaatctgggcaaaggacttggctcaccgatggagccactgtaatggaagttacggtatggtgttctctaatcgcctggagaacctgtcgaggggtctccaccttctacaacaatgacagactcatgggtcggtgggacgacaccttagtgtctcttgccctcccgatgtgtttcttcataatgaacggttggttcgaagaggtcggtagcaaaaacccctggtggaatagtcgttcgtc

SEQ ID NO: 164040 - DNA, 366 bp, Zea Mays
gaaaagtgactagttagacaagcatgttggcaatatctagaataagttgggacttcacaaaagatttcttccaaatgatgcagcacgcagcacgctaagcttcaacaacagtacttctttatagggactttcatcattgctgcttggcaaatttgaaagcaaagaaataagtttgtttttgacagagatcacatgtcctttggatctgggaaaaggctccttctgtgaagaaatggatttagtgagaaagtgtcatgttttctttcttgtatagcttccctagattagtcctgcagcccaccttggtggcttctctgatcttttgctgctcctttgaagcccctccatacagtgttgttcttgttt

SEQ ID NO: 164041 - DNA, 446 bp, Zea Mays
ctattttgccctgtcgccgtacccacttgcaccggcgacgtggctgcgcgaccgttgccgtcgtgccaccgtctagctcagttgtgacacgccttaagtcatctcaccactcgtcgcaagccgtgaagtcttggcagtgactgtcgtagaccgtaaactagtgagcgccacgttagcaactccggtgactcttccccctttctcacagcaagcgcttccccgtcctaattcaccctcctcgtggtcgtcctctataaattgatgcctcggcctattccgctagattgttacgaacccagagcacccactctcaccctcgattagccaccatagccagagaatttcgttcttccgccaaatctatcgtctgcaccaccgtgagacgtcgcgtcgtggccagccacctccaggtccgccctcaccctccttgtccgtgtttcaatgcc

SEQ ID NO: 164042 - DNA, 959 bp, Zea Mays
ctgcctcctcccaaagccttcacccttttgtgtcgaatccacctgtcactgatggcagtttgggccttagagtgcgaccctctgctgaagaagttagtgccttggttgcctcgcttggggagattcctgatgatgaacgacaggtccattttgaggtgcccctgaaccctagtgatgcagagataagcgctatgcttgatttgctggctgaggattcttctgatgctgctcctgctggggcactggtagtggcgcccctcccagaggctgatacaactttggatactcagaaacctgccagtactcgcccgaggcgcccttgccgagccagtcagcctgatccttctgctgatgagcagaagaagaaaagaagacgcctccggcgagtatccagtttggatcgggacgctggtacttcggttcctgctgttgaaaaaatgcctgtgactgaatttactgatgctgaccccaatgggtgtacccaatccgctgttgatcccaatgtgggtgctccatctgttgttgatcccaatgggggtgctgcttgtgttgccaatgtggacgacgaggaggaggaagatgaagctcctttgactcggaaaaacaatcgacagttcatcgccagcggtgaaagtagtggagttccctctcctgctttgtctgctctcattggcctgcaagaactatccctggccaattttgatcaaactcttgaggatatggttatagaggatttgttatcggagccagtggatgatggtgtgatggaggattgtgctgatgtgcttgatgctgggttgaggtcatcccgtgcctcgtcgaccttggagcgcgatctcgagggtcagaagactgaattggatcgttctggtcccatggaagtaactgagggcccatcagccttagaagtggctaccgcggagaacctggacccccagggtggtgttgacacatgccca

SEQ ID NO: 164043 - DNA, 740 bp, Zea Mays
cgacaccgctttatacactttctctagcgttcggctcacgttttagtgaggacgcaaagcactatcacaattcagcagcaatgttgcaacctgattctttctccaacgccgcaacttgatgccaagcactatcacaattgtgactagatggaaactattatccagcaacctgtttatgagctgcaagcaacctaatatttgtgctgctctagaattgcaaacaacctgagaagcctttaattggtctcatgcctctgcaccaaccagactttgattttagtacaccagtgactgggtggtgatcgaatagccgacatgcacgttcagcaaaacaggcgcagaaaaatagcccttgcatgatagatggttagtgttcaaaaaggtctaggtcatttaaatctgaaattgtttgttgacgaagctggcaacccactatacaggcgcggaaaatagtattgttgcctggaatgcctctgcaccaaccagtttgttggatgaaggcaggcgacatcgttgagccaaacacagcaaatacgatgcacaagatttgttcctcggcaatgaatggagaaattaaaccaggggcattacggggagtttagaagatgatgaaaaatgaaaggaaaaagaaatattaaaaaaggttagaatactattttgaagagtaatatcaattataaatactattatagagaaggttattttaaaagtaccataagagagaagcctattaaaacaag

SEQ ID NO: 164044 - DNA, 1123 bp, Zea Mays
caaaaaaagagaacaagctaaatttagttaccaaaaatgtggcgaagtgatactgtgtctgtgtgtcaccactcgccagagcttattgaaatgactttgaaatttagttaccaaaaaaagagaacaagctaaatttagtttccaaataaaaaagagaacaagctcagagtagcgagtgtcatctccacaaagttcagaagatcgcaccggacccaccagtgctaatgcatttcatcacaacttgttatacccttgttagttaatcttgatggcacgatttatatgctcagatagggcttgctgtctggccggtgtggtactagtcttgctagcgaatgtggcggagtaataatgtgtgtcaccactcgtcaccgtgctttatacttattcatcacagcttgttatacccttgttaattaatcttgatggcacgatttatatgctcagatagggcttgttgtctggacggtgtggtactagtcttgctagtgaatgtggcgaagtgatactgtgtctgtgtgtcaccactcgctagagcttattgaaatgactttgaaatttagttacaaaaaaagagaacaagctaaacttggtaacgaaaaatgtggcgaagtgatattgtgtctgtgtgtcaccactcgccagagcttattgaaatgactttgaaatttagttaccaaaaaaagagaacatggtaaatttagttaccaaataaaaaagagaacaagctcagagtagcgagtgtcatctccacaaagttcagaagatcgcaccggacctaccagtgctaatgcatttcatcacagcttgttatacccttgttagttaatcttgatggtacggtttatatgctcagatagggcttgctgtctagccggtgtggtactagtcttgctagcgaatgtggcggagtaataatgtgtcaccactcgtcaccgtgctttatacttattcatcacagcttgttatacccttgttaattaatcttgatggcacgatttatatgctcagataggacttgttgtctgaacggtgtggtactagtcttgctagtgaatgtggcgaagtgatactgtgtctgtgtgtcagcactcgccagagcttattgaaatgactttgaaat

SEQ ID NO: 164045 - DNA, 628 bp, Zea Mays
gattcaggcatgagaaagtagagagcccctatcaccaataattcccatgcctgtgcttgttatgtggccaatgaattcttcattctcgaacagaactggatggtcctatctgtcgtaatccacaatgaccatttgtgttttaatcgggtaaaatgcatgtatgctattcttctggtaggaattgagttgctgctgaatattctactaggtgggatgttaatgttttaccgtgcatccgaatttctacttgttgtttacttagagttcaggtcatttggctcacaagtggttggcctccagcgaatggttagggtgcagatgacttgatcacgagggccatgtggatgttaagggtgcggtattatttccacatggattccgttgcccttccagtgctctctcttatgtttgatgtcctcatgataccatttggggtagtatatcaatatcttatttatagttgattgttactttgtgcaagttgcaaagcatagggacaccattactatgtacaaacttcatgtcttgtggtgtaaggacttattgtcgatcacttctctgttaaattaaatctgttttactatcttagctaaatgaattctcagatgtcaaagaaaaataaaatcac

SEQ ID NO: 164046 - DNA, 783 bp, Zea Mays
caacaagaagttttagagagagggaagttgaaagtaacaagaccctatggggttggcaagcagttgaatgcaggggttagaggagaaggcaaacctcaaattatggggggtgatttgtctaaggagaggcaagtaagggagttcaggaagttgaatggattgtgttatgcgtgtggggagaagtttgagccgggtcaccttgctaaatgcaccaaaagggttcaagcacatctaaatgctgttattaccaaggaggaacccattgtgctcactgatgatgtgttgaaacaactggaacaggaggatgataaggaggaagtatgttgtaaagtgtctctgcaagctatggctggtagagatgatgagaacagtatgatggtgagtgcaatggtgaataaacagaatctggtgatgctgattgattcaggaagttcatcaaattttatcagttctcatatggtgcaattactggggttagcagagatgggttgttctccagtcaaggtgaaggtggctaatggggaaatcatggtgtgtgataaaatggtaaaggaagtggaatggtggtctcatggagtttctttttgtattgatatgagaattttaactcatagtgcttttgatgtgattttggggtatgaatggctgagacagttcagtcctatgcactgtgattgggaccaaaaggtgatgaaattcagacataagggggtgtgggtgacactcaaaggtgatgcctcacaacatcagaattatatacaagatgtctcagttttgcaagtg

SEQ ID NO: 164047 - DNA, 619 bp, Zea Mays
tgctgaagaaatcacttccctttcgaatgaaatcgtgcatctattcggggaatatgcacacaccgttggaacaaagggaaatagtgtttactgtcagatttcaaccatctcattggggggtgtgaagcacttttgctgtttatcatagttcttcagtctgacactctgactcatcgcttattatggacgttcttgcacatgatgtaatggcaagagcaaacgtctgtgctgctatagtggcaaatttcttgtgctctacactctgactcttgctgtttatcatagttcttcgcggccagagcaaacgtcagtgctgctaaagtggcaagtttcttgtgcatatattggggttcctgttttccttgtgctatagtgccaaagctgaactttaattgcaagttatcaggccaaatgtttgtagatactgctgataatcacgcactgcgggtcagctaagcttcaggaaacgataggcgaaacactggccacgagtccagaccatgttcctctcttccctgtaatggtcgccctttcctacacagggcggctagaatgcgcagcaagggtcgagaggcctgtcggcagtgcgccccttgcgaccgcgtgtgacagtgctgag

SEQ ID NO: 164048 - DNA, 437 bp, Zea Mays
taagtatagtcattttattatgtaggatgaaagatgggtaggttagggtaagaataacctggtgtaagaaagtttatggtgagaaagatctccttgttgggtggtaatgcatctgaagatcgagtttgacttctctccttccttgacgaggttgaacttgttcttctctggtcttggtctcattggttcgagattagtgtatctcagcggagttggggcaatatggttagaatagtttatgggtgagatagactacatgatgtgggtcaaaatctggttggtcaggtgagggttaatagattatgcaatccatcaagactctattggttgggtcagacctcatgcatgtgactgagttggtttaaggcactagtttagttttaagtgcatgaggggtatggccgagttgatctaggatctcaaacttgtttatagga

SEQ ID NO: 164049 - DNA, 292 bp, Zea Mays
cgcagatggatggacggatggatcagacagagctagcttgtactccagcgatcgagttggcttggctactacaagcccttcaagtggtggtggtggccgcgctggtgccggggtgattaataatatagtaggagagcggcttggagaaggacaagagaataggagatcgaggggatgtctctcctcggaaactggctgtccacgaagcacaagcgctacggttagcacgcaagcagctcgtgctatgcgcggtgggcgtggcgaactggcgagacgctgtggctggctggcg

SEQ ID NO: 164050 - DNA, 1131 bp, Zea Mays
acagctgtttttttttctatgagccaaaccaaagtattccagactgtgagtggaggcatgttcttgctcctcgccgtcacgtgcatggtaatgcgtgcacggcgcggcgtgcatcgctcccagatcttcccccggccggtttggttggcggtgccgctgcaggtagacagacatgcatgcatccacgaccacgacccatgtggtacacttgccgtgctgttcgcaaggaaataaaggtgactcgtttagcttttgacaaaaaccatcagaacacaaagctgtaatcataccaggagcttaattgatatgcatctttctttttaatatatggcattcacatgagaatatcaatgctgcctgatcgagaagatgcctcagatcagaagcctataagtaatgtccacagctattccagcctccattctcttcagctagctcttctcacaaagcaacaccattatgaatatgaagtgtcccactgccaaggcgctttctgtggccaccctctcagctctgctcatcctcctcttctttgtcctgcgatgtggctcttctgcgtcgccatcgccgcagttgtctattgcgaggaggagcagaaggcttctgtggacgccatgccgtgatgccaactcttgctcgacgcctgtgagcgggttcaggcagttcttcaaggcgccagcgacagtgttcgagagcttgaagaagatgcccaagagcaggtccaatccatcacataattaattaggccgaggtcgtcgatgttcttctcactctagcttacttcgttcttttgtagtggatcacttcgcctgctggtctatttagttcaggataggcaccagcatgtacattattgtggggggcaaggctagctagcttaactgcagctcggcatgtatgtacgtttttttgaagcaaaatcgatgtctagatctgtgtagtatatgcttattcacatgagtgacaaaccagccgtaaatgagaagatgttaacggtgatatatatcgtgcacttttagtggattcttcttttgctatgagatctcagaaggctttttgtacattgcattagatctcacatggttcatgcaacattggcgcctgtttcaaacattacaattttcccattcg

SEQ ID NO: 164051 - DNA, 377 bp, Zea Mays
cgattggtgccgagtgatccctagctcctcccccctcctagcgatcgatctagctgttgaatttacaccgtgatcgttccgttctgcggattttggatgctcaagtgctcgtactggtgcggaggggatttgatttcgtgggggctttgacttattgatcacccgtcgttttctaggacaaaccttatcgcaattaattcactcctttaccctttgctctggagtatgccatcattttgtcctttgctctggagtatgccagcatcttgctttgacagttcggtttgatatactgaatgtacagtgcagcagctgtgctgttggctgaattatgagtgagttcagaggagccttataattattggttgacttcactc

SEQ ID NO: 164052 - DNA, 937 bp, Zea Mays
tcgaggagtcaattgataatggtggtaaccttgagtaccatgttagagctaggcccttgagggatatgatgaatacttggatatggtggcgtcgtcccccctgatgatgtgattttgacctggtagctcatgatgtagtaggttggattctgtgttaccgttgtactttggataagtgtctgttatgtaactttgtggctaggggaggcttggagctgcggagcgagaggacttcacttgtcaaggtagttgagcccttggatggtagctggtgcgaaatggtgtaagttttggttggccacgccggccgactagtggtggcggggggtcttcgtggtgcatgtcaacagtttcttgctccatatccctagccttttgttcctcatctagtatcatttgtctgactctagccttaatattggttcactacctcttggatgcgagtatctccctttgtttttataggtgattgttttttatgcgaagtactcatagtttgagttggtctttgactgagacgcttatgcgaagtactcatagtttgagttggtctttgactgagatgcccatgactttgtcgtcttctatgatgtcttcggcttccagagggtaaagcttggtgaggggtctcgagggaggtctttagaattgtacgtgcaaacggtgcctttatgggtgagagtgggttttctgttcggggatgtttgttgtttattgctctgtcgttcttgggtgtggcctcaggggcatcattagtgagggttcctttgcatttcttctcggcgagggtcgccttcgtagcatcacccagtgatgtgctggctctgattgtctctttcttgggggccatcgtgggtttgttctttcgtagcacaaacggtggacgccaaatgttggttccttcctgacacgtggacaggtgggcccaacacttgag

SEQ ID NO: 164053 - DNA, 665 bp, Zea Mays
tggtggaacaaaggagtggcagtgtaaacattgcaagaaatcgtacaaaggtagtttaactagagttcgtgttcatttgcttagtccattacctggtaaaaagggacagattgcacgttgtatgtcattgcaaaacaatcccaacaagagcaaagctttgcgggaaaaggtgaaataagctgatagtaaaggatgtcatatgagatcaacatcagggacgtccactccgaattcgttagcaaaatcatttggagtagcccaaagagaatctgtcgatatggaaattaccaaatttttatgtgctaacggtattccattcaatgtgttgaggagccctcaattttcacaaatgataatggcaaaaaaatagtccaaaagattataaaggtctgtcgagtgagaaggcaaggacaactctcctagatgcatacaagagaagtgtggagaccgacttagcaccccttaaaagtacctggtaagttcttaattttattgcctttccattgtatgactttttttcaaaaactcacttttaatcatgcattaggttgacacaaggtgtttcggttgtgtccaatggatggacggatataaaaaacaagcccctaatcaatgtgattgcgtcaaacagtcgaggttaatgtttcttatatgcagaagatttc

SEQ ID NO: 164054 - DNA, 515 bp, Zea Mays
cccaggtttgtcacacaacctgcagctcatcttaatgcccatcctgcttagtttagtccccttaggtgcttcccccacctctctagttctttcagtttttggccttcctggcattttgacaaaagctggtggttttggtctaggcatgtctgaaattggccagttagcttggccctcaacaggctggaggacatgtgcataggtcttcaagtaatctgctttggtgaagcatggtgcaatgaaatcatctagcagctttgatgccttgtagatgcagctaatagcatggcagcagggcagacctgagagttgccaatatctgcaagtacatgttctaccaaccaagttcacaatgtacctcctgtcttctttctcttgcacctcaaagccatcttcaccattccacagcacatcacagctaccagacctcagaatgttgatttttaatttcttgaagatattaggacagattgttcctgtccacttctcagccttggccctattctcttgtatcc

SEQ ID NO: 164055 - DNA, 730 bp, Zea Mays
aagccgctgccgccagccaccgctacacgacgcgcacccagctgatgctcgctcatggcagcgcggtagtagcccaacagtaagacgacgcgttcacgaccgtcctctgcagcgacgattctcctcctactggcggcaatcgttccagcgccctgcatttcttgagtcattccttccgtcattaatcgccatcacagtttcagtttcctcattaaattcaagagagcgtcaattgtcatcaaatccgctttaatccagctaatctcctctcctccagtctctataaaacccaacaacccctttccctcgccaacaacagaaatatcacttcctgttcgtcttcccattacgccatcctctgctagtgcgaacccagtcgcgcgtctacttgcttcgttcatcggcgattgttccaagaggcacgctcgcccttcttctccatttccgtgccctggcgcccaccgtccatacctccatgctgtccctgcgccgtgtcatccttcctagtaccaagatttgggtgtagctgcaccatcgactccagctcgccagagttcgttattgctcgcctctactcgcacctctccacaagtgctcagtccctaccgtgctgaagatcgatgacgagcaaccatcttgccatcctcgctgttcatcagcactgcgtcttgctcgcacgccacgcactgcgtcctctgccctcgtgtcgaagcctttcacaccggagttc

SEQ ID NO: 164056 - DNA, 857 bp, Zea Mays
accggtctccgtgtgcggagaaggcgaaccgccacgtgaggagcacgccaccgtctgccgcagtgcgcctcttcatctccgcaaaagcagcggcctagcctctaacacggggaccgggcccacgagtcatgctccttgggtgccgatctccgtgtgcggagaaggcgaactaccgcgtgaggagcacgccaccgtctgccgcagtacgcctcttcacctccgccgaaaccaacagcccagtctctggcacgggagcccgggcccgcgtgtagagaagtcgaaccaccgctcgcgccagcaccgcccctcctcggggccgccatagaagacagagaaggtggattttcaaaaccaatgcagcggtatcgaggcaccccgcgcatggcccagcaaaaccatcaagtatgaaggcgacgggtcagtcaaccgcagggacaggcgtgacagttggcgtgaccgaaggtggactgacggtaattacaacagcgagcgcacagaagcagcgtgtcaatcaccaaccaaactttggccccaactgcaggctcggtccctcacctgaggcaagcctgggggccactgtcggtaccctgaatcaggggtaccccttactacagtatgaagaaacggtgcccgtgcagctatctctggccgcatggtgaatagcaccctactccaccacgtgggtggcccaaggacgccacatggccagaagaggtgatatactccaggatgccatcagtgggtccggacctccatgagagagcgacggaccccctgtacactcaacccggaccttcgagtatggtccgggactccaaagtaagcaagtcggaccccttgggtgggacccgaacccc

SEQ ID NO: 164057 - DNA, 426 bp, Zea Mays
ggctcagcacctttggctgttctgctgccttttctgattccggctctttgatcgggccagcactagtttcgatcggcattgcaggagctattttggtgactaacggggtagcctctgcactttcaataagcttcggcacttcggtcgtctcaataggcttcgccctacgtgttaagaccttggcactctttgccttcggtgcactggaagaggctgaagtagcaactttcctctttcccccttgccttcggataggaaaacaataatcacggtagacaaacccaataacatcaaaaaccctgttcagcctccttttccctcgagcgccgaaggcaactgtcatggcttcgtcttctatcctcgagtaggctccaagtagctcatcactcattgcctctatagcgtctagccagtcatcatttggct

SEQ ID NO: 164058 - DNA, 396 bp, Zea Mays
ccaaagcaataatgacgatgtctgggagaactaaacacagatgtttagagcaccaaattttcttgcttttgacacgatgtcttctacaaactttggtgtaatccaatctaaaacgtatttgcctgccaaagtccctacaaactttcttttgatgtaaacaatatatccatgccgaaacaaatactacaactagaaaggcatgtagctatagttctgacatgccatcttttgcggtctttaggaccaatattctggtgcctcaacaaatatgtacatataactaggaatttgctatcaactatggttagcttacaacccactgtaatataacacatccaatctggacgtgatcctatatttgcatatcccaacttttcagtggtacaaacatattcg

SEQ ID NO: 164059 - DNA, 1074 bp, Zea Mays
aaataggggggaattagggttccaaacctcgggttgaatttttttgggatgttacaaacctaccccacttaaaggaatcttgccctcgagatttagacggggttcgagaaaaggtaagagtattccctcctcaaagagtcctcgctttcccaggtagcttcctcttctccttctctgctccactgaactctacagagtcttacttttgagttgcgggtctttcggactgctgagtcaagaatcttcattggcttttcccggtactggagatctttttgaatctggattgtctctacctcgatgtggttctctggtacttgcaggcacttacggagctgggacacatgaaacaccttatggatatctgacatggattctggtaattcaaggcggtatgcggcaggtcccactcttccaatgatgggataggggccgacgaatcacgatgctagctttcctttcatttggaaccttttgacaccatgcatcggggagaccttgaggtatacgaagtctccttcctcaaatctaagttctctccgcctgttgtgtgcataacttttctgtcgactctgagcttcaagtaattttttgcggatcagggcaactttctcttcagcctctttaacgaaggcaggtccttccaatgtcttttcccctacgttggaccacattagggggtctagcactttcgtccatacaatgcttcgaatggtgacatcttgatactggcctgatggctgttgttatatgagaattcggcatacggcaaactggactcccagtttctgtcgaacgtcaacacacatgctcttagtagatcctcgaggaccttgttgaccctttccgtctgaccatctgactgggggtggtaggcggtgctgaaatctaacttggtgcccatagcttgctgaaggctcttccaaaattttgaagtaaactgtgtccctctgtctgacactatcttccgagggataccatggagtctgactatttctttaagatatatccgggcaagggtggctcctccaaaggtggttttcactgggatgaagtgggctaccttggtaagac

SEQ ID NO: 164060 - DNA, 638 bp, Zea Mays
gttttttttttttgctcactgaacatcctttcatctgtccatgccacatgaacataaccaaaccagtaattggccttaccttttgtccctatcatattaactatgaagctggcgactgatggatttgcttggcatcatcatcaccttcccatgtgatgatagcaacctctattttaatgcttttcgtgatgtcttgcctcgcatatgcttttgattctttttcttacttgcacaggcactaatgaattgttcagcccggatgtctggaaaattttatcttgctaatagtcatcctacgacatcatgattcatgaatgcataacattgtatcatatcagtaccaaacccctatacctgtcttggtcacattaccagagaccagcatgaaatttgcatgttcagggtgttctatagagtgcttagcattggtctgtaggggtacccccaaacatgtccctacataagtgcttttgttaaacatgatttgtgccgatgtaggtgttcctttccaatgaatcacatgatgtattactttagctgttatatcagcacatgatgtattactttagctgttatatcagcgcaggatgccggccactcgaaatacatatggttccttggctttaatccgtaccggc

SEQ ID NO: 164061 - DNA, 744 bp, Zea Mays
tcgcgatccctgcgcagttctcgcccaccactgcctcacctcggccgcgctctccgcctcgccgaaccgccgaccggagcgccgccgtcgccgtgcagggtgcctgtttctcgccgtcgaggtgagctcgccccaccctctctctccttccacgttctctctcttccctcgccgtgcccagaacctcgtcgcgcgccgtcactcgcctcgtcgagtgcagccccggcctcgacgcgcgatgtgcccgtgcactcgccatcgccggcaccttcgccttctcgccatcgagcagggagccgtgccgtgtctcgccacgcccggagtcctcgccgtagtttcgttgagctctgtcctcgccgtgcgctatcccgaggtgagattagacagcttctcgtctacccccttcctctcgccgtctgtggcgctcgacgcaccatggtcccgtgcagccgcgccctgctgcaattcgtgacgcagcgtcggcggcgagcagctcgtgcctgctgttgtcgtcgtctccctgcgcagcaagccccgatcccccggcgtgcagaccccgcgcgccctcgcctcgtccctgcgtgcagcgaactcgtccccacgccgcgcagtccaagctcgccgcgctcgctgcacgcccagcacgcccaaccgcgattatagttagcgccgtagcggtcgttcgccgtcgaacctcgcccctgcgtgtcgcagctgtgttgctgcgtgctcgccgctgcccag

SEQ ID NO: 164062 - DNA, 1173 bp, Zea Mays
ctgttggcctaggttccatgacctacctgttgcgagtatatcttcggctagtgctgtaactctaccttgcggtaatgtagctcttcggaccgagcatatttctcgaagtgatatagttcctgcagagttgaaggtgattttcttgtgcaatggttgtacaggtgtcatgtgcgaaggcagtttatcgtgtagtggatcatgatctgatcgtcgacctaaggcaactgtgactagaacgatatgaactttttgtaataatcacgccggctatctttttctagttgtctgtagagggagaatttgtctaaggcgtttgtctcatgtctgtaaccctaaaagttgagcaaaaacttgtcgcgaagggttttccatgagtcaatagacatgggtggtagccttgagtaccacatgagggttgagcccctggaatgcggcttgtgcctgaggtggcctctcgaattgaaaattgttctgattgaagacagcatcaagggttgacgatgagggggtttcattctgcatttcagcaagttcctgttcaagggccttctcctttcttcctcttccatgattattctggtctgcatgtttgttcgctgccttttggctgtgaggatttatctttgcttctagatatggttgtccatgatgcttctctttgcttctagatatggttgtccttgatgcgaaggccacgaagtttgagttcatcctcagacgagatacccaagtactcaccatcttgaaagttatctttgtcctcttaaattgtgtggggtcccatgggtgggaactcaggtggtgcgtctctgaggggaaggtcttcaatgtatgtgtggatgttgccttcaggtgtgggggtcctcgttgtgagggtgtatgttgtttgctaggctagttttatcagtctcaactatggctggcaggtgctgttcgtgaggattgccttgcctttcttgtctatgagggctgccatggcggctttgtctagagagtaggtgctcccggttgtctctttcttaggagccattgtaggagctgtttggagcacgaacagtgggtgccaaaatgttgggtccaactaccatgaatggatgggtccatacactttgggacacaagcgcccaggtgcacgaaaagacaatgagtagggaactatagtgtcttgttatg

SEQ ID NO: 164063 - DNA, 753 bp, Zea Mays
ggccgcccgattacaaattagtggtccagattaaactaacctaagccgaaacggagtgagctcacggtcgcccaatccaggatcgaccgcccagatttaattaaggcgagatccagccgtggcctttgatctccgatcggacggaccatggtgattccttccctagatctaatcccatccctacatcatgaatccaacggaccagctgttgcttccttccccaaagccagacgcggcggcggagcgcacacacatggcggcgcacgccggtgagctaccctatctcggcgcacggctacacgattcccaaatcgactgggtgcaacacgacgcaggcgcatgggcgagtcggtccagggaattcttatcgtgtttcgatgcagcagaggacgcggccatggcgtagggcgataacagagcaaagctcgcccaccggcgagcaatggtgggttctccggatggccccgaaatcaggcaatttcctgcgcgagttcccgtggtcccgacgaagacccacaagcatcaccgagacctagtcgacacccacgcagagactgccaccggcggcgcgagcagacgctccaagtttgacggtgaatcttggttggctgaagatggagcgagggcaacgcttcgactggtgcttaaataggggcatgcaactaggatctcggttggtcacttagaaggtcgaatcgcggattccattggtcgccagcgatacatgcgcggactccccgacggcgcccacgg

SEQ ID NO: 164064 - DNA, 640 bp, Zea Mays
ccaggggtcagtctctcatgctgcgctcgcttctctcttcctccaactggcacacggggaccaccctgtcattcactcacaggtgtgactcactaccaccgcgttgcaccgacacatggaccccacttggcagtcccgtgcgacccagcccatctcgtgacgtcgattgcacgcggagcccgcacgccaggggggtcgtcttcttcatctgaactccgcatccgccacggtcaaatcaggggggtgggtgggtatctcggtcatggggtcgcgcgtgcgtaactgtcgctgcggccgcgtgctctgcggggctttaaagctactcatacgggagccctatcctcgtccaaccgcattccttttcgaagctgagagcagcgcaccggagttcttaaagaagagagagagcgtcgtgagacaggcggccggtgtcgggtctcaggatcacgaagctcggtgggtcttgctaaagccgttcgtggtctttccgggtgcgattgtgggccaacgacgccgcaactgctcgccatagttcaagcgccaccgcggatccactctcctccgtgggcaggctcgctacttcttcaatcatggtgagaacgcctccgtatgactcgccttcatctctgctccgtttacc

SEQ ID NO: 164065 - DNA, 402 bp, Zea Mays
gatctggccggggccggctgagatcaagtcgagggataatgattcagcgttcggaatctcgaccgtccgatcgtggtggggtgtgtgagattagatcgtgaagtaatgaacccgagtcgttggatattgatgggtggtccagattaaatccagccatacccttcacctcgtcgcttactaaccattgatcctagaataggcggtggagattagtgtgaggataacgtttcgactcgattgcaatatgaccgttagatctagatctgagggatgttatcgcgtacccgttcatatttgtggcgttatgatctgggccattggttcagatctgacgatcaatatccaccgataccccttcggtggggcggttgtctaaagaagcccctgggcttaatgggaatc

SEQ ID NO: 164066 - DNA, 345 bp, Zea Mays
cttccaaatggtccaagcacctaggatcactaaagaattgaaaccttttctcacaagatccgatgcccgggagctgctagacttccaccacgactcaaaggattcctcatgagctggatacagaccccgcagcgccactgaattaaggaaatcaaaccagaactgcctagcaaaaacacacttgaccatcaaatgatttatggtttcagcctcttggtcgcacaaggggcactgctctggtcggtctagccctctttttctgagcctgtcagcagtccagcacctattatgttccacaagccatataaagaacttgcacttcccaggagcccaagatttccacac

SEQ ID NO: 164067 - DNA, 557 bp, Zea Mays
gccctccggtgttgtagccacttgggtataataaatgcgccctgttttcttgaagttcttgcccgttgaagtattagccgtgttcccctttccttggttggaattcccaaagttttgttggaagttagttttattttgcttcgggtatggacagtccttgatgaagtgcccgaacttcccacagttgaagcaaccagtagaagaactagggagagtagggaaacgagtaccaggggcactcgactgattggtaggagcgggggcagtagtgggatgaatgaaaacaggctgcttaaagggataggaaggtgggtgaggtgaagaacgattttgattaaaaggtcggatcaccaacctggttctcttctcaggcacttgatttgacctttcacctccaaatcccttggattttccatgtcctgtatttttggcttccactgccagtgcagtactggcagctctactgtaggtaaggtccaagcaggttgccattttccgctgaagtctgtcattaagtcccctcataatgaaattctttttcttcaggtctgtattca

SEQ ID NO: 164068 - DNA, 744 bp, Zea Mays
ggagaaacatagatttaatttgaaaaataatttatgtacttgacattatatcttctttcaggggacttacacaacaaaattgcatgatgaattgcggaagaacaatattaaagctctctgcaatgcagatctctctgtttgaatttttatccgtggaaaagatgtttccctttcggaaacatttcttagatcaccaagaagacctctaagagatattggaggaagacagttgcacagaggactatcctgatcttctttgcagggcagatgcgtggtcgagtttgacctgtacttctcaagtattggggagacaaggatgctgatatgagaatgtataagtaggctgccacactgtactatattatataataccataaagcgtgtcaaagaaagatgatagttactataaataattgatgagtggttgtgtgcatatgtcgtctcatatctgaaggtgatcaaattgttagtgctcgtgcatgtgctgattgaaactgaaacaactgttggcggtgatgatatgatgttaagatttacctagagatagcttgttaagatttgctcttcatataataatatctcatgtaatatgctcttctctataatctgtccctatttcactgtctctttcatgcttatcctcttgatataccattgaacataaagacaaacaaccttaagaacactaatattttgttaaatactttgtatattgttgcccgttgcaacacactggcatctaac

SEQ ID NO: 164069 - DNA, 362 bp, Zea Mays
ggaacaagcatcacataggcatataaacctttgaagcgttctagccatgatgaggggggaaatcggctgtgaagcctgtgatggtcaccaagccgagcagatggcacacagcataggagcaaatcaggtatggggttttgggagggaggttacctagtctgaacactaccacttcactcatacgatgaccacgagttagagctgaagggcaggggaaagacttcacacaaccaagccctagtgcaactgatcaagggcaggcaactctgagttcagcccatatgtagtggagagtattttctatggtgccagcactgcatggcctccacacgtggctctcatgcccaggcaccacactagcc

SEQ ID NO: 164070 - DNA, 472 bp, Zea Mays
ggcgacttttgcgcggagtgtcgcacgcgagggtagtcagcgctgcccctcgcggtgacttcggtgtggtcgaatgccgaagaccgtcgatgcggtcttttttgacattggcttagttttttgggggggtttttgcttgtatattacatggctccgcctcattaaaaacctcactccctgggaggaaaagagtgcgggccggaataataatgtttggtgaattacaagggcgtgatggccctgaggattcaaacaaaaaatttgcgaaggttatctatattccaggaatgttccaggttttcgccagattgtgttgttaatctgtacacgctgggagacgacttcgtcttgatgattaatggtccttcccactttggttctagcttaccccatgactctgtccgggttgtgcggacaagtacgaggtcccctttgttgaattctcttgggacgactgcgtggtctggccagg

SEQ ID NO: 164071 - DNA, 646 bp, Zea Mays
tctttgattgaaacactattactcgaagcttagatgtacgcgaacctagagaacggagtctcgtcgagggtagaggtggaggcaaggcttgtcgacggtgtagtgcggctctacggtggagggagcactccggcgaggaattcctgatgatctgtttatccttgcacccaaaatctttgcctcttgtcttccttacatccccacaaagcacccaggcacaaaaccggacctcgaacggcgacgctcctcaatcccgcccatggcggtggtgcttttccttcggtgcgctccgcgattccctcggtgccctcggatttgtgtgctctcaacgtttgggtggccgaggaggaggtgggaggggtcctatatatactcctagaggacgagcaggcgccaggtctgctggaatggtgtggtgcggggagctcggttgcgcctaacgtgagttgggtcagaggacggatctgacggtggtagcacaccgaacagagagggaaggagagggcacgagcatggcagcgtagcggtcccacatgccagcatcaaacggtggaaatggaggcgcacggtgtcacgagcggcaagcggcccgggcccgcctgtcagtgacacccccgtgcgactgatgttgggcccgtgggtgcgc

SEQ ID NO: 164072 - DNA, 464 bp, Zea Mays
aaaggaaagagttatcgaatcacaagagaaagtaccaagggcagaccagcaggaatacccatcagaacaactcccaaagttctcagttctgctccggaaatcagagtgggaacaacaactatcaagcacaatgctctggacaacaaggtcagaggagcaacgaatatcataaccaacagaagagcagcactcagaccggtcaaaggtctagtgggcaacaacagaatcatcaaagaagcatcacgaacacaccggccaagaacaacaacacaactgccctagttcaacctaatggctgtttcaagtgcgacgaacttggccactatgccaacaactacccaaggcgtaatcaatagacacccagaagaacaacaaccaaaggactaaccagaacacacctgctcgtggatctgcccagaacaagactccgctgaactagagtagaggaagagtcaatcatgtga

SEQ ID NO: 164073 - DNA, 361 bp, Zea Mays
tgagaaaaccttaacaaggcaaaactcatacaaagaaaagagtgtaatatgatggatcaaaacaggtcaaatatcatggagaattacttcccctgatccttgcaagcatttaagtcttctcataccaatcacatcaacacatttctgaaaatgttgagtatggtggagattttgtgaatagatcagcaagattatcacaagactttgtttgcaagatgtttatatctccattttcctgaagtcatggggataaaacaatttaggagcaatatgtttattaatgttgctcctgatataacctgtttccatctgaacaacacaagctcaattatccttatggataatggtcggtgaatcagtt

SEQ ID NO: 164074 - DNA, 550 bp, Zea Mays
cgggaattagatcaatgtagaactctacttctctttctggcggcattcctagcaattcttctgagaatacatccatgaattcttctactatagatatgctttctgctgctaggttaaacaccattggatcctaggcgggtggctgagcctgacatgaaactgactttccttggtggtcagtgagaagaacagtcttatttgcacaacttatgatgcccttgtgtttggttaaccaatccattcctaagatcacatcaatcccttgggatagcaagacggtaagtctgcaaagaacactaccccacttaaaagaattctgacttgggagcatttgagctagcatagaaggtctgaccctagggtttgggtgaccaagggaatttctaggtgtgtagagggaatgccatgcttttccacaaaactaatggctatgaaagaatgagatgctcctaaatcaaaaagtacattagcgggagtaaattcaactaggaactcaccgagcactactcccggagcttgctgagcctcttgagcgtcgacgtggtttact

SEQ ID NO: 164075 - DNA, 710 bp, Zea Mays
cgggagcgctatgttccgtgtgcttcgtgtcgtattgggctcgagagttttttcacgacatatttatgagttaatgacccacgtccctttacgacgcacgacgacgacaggccgtgagttagatcagaaagaagtacaaagactttttttcaaaagcaataatggtgaaaaccaagtaaactgatgctttacgtagagactagtacaatgcctacgcgttgtgacgacacataaatattcgataaaattttaagggaagatgggggttaatatacaacgacagaagattctgggtaagggccacagagacagaaaaagagataataagttgagagttatacaacggcaacaacaaagaggcggaggaatccaagcaagagataagacttatcgtacgtggttggtttgtcagacgagaagcgggtgatgcaggacgacagtagaaactattacttatgtgtttcgtgcgtgacgcgggacgaccatccaaactattttatctagtttgttaggcgaggtgtggggaggagaacagacttatgtgtttcgtgcatgacgcaagacgaccatcgaaagtggtgttttgtaggagtagagatattggaggataaaagcagcaaaactaaaagtccctgttcgataaggaggagggaggtactagggagaaagaccccaaaacattttctaagaaaacatcaattgtgctgcta

SEQ ID NO: 164076 - DNA, 381 bp, Zea Mays
gtagtaaagcccatccactgttacaaaagtggtatgcttcctatcttccctagacatctggatttgatggaaaccagagtaagcatctaagaatgacaataggtcgcacccggaggtagaatccacaatttggtctatacgtggcagtggatacgggtccttgggacatgccttattcaggctggtgtagtcgatgcacatcctaagcttcccattcgccttggggacgatgactgggttggccaaccatattgggtgatgaacctcttcgatgaagccagtgtctaccagcttccggacctcctttcggatgaagtcctgccgctcaacagactgtctgcgaggcttctgactcaccggcctggcgtcggggttgatctt

SEQ ID NO: 164077 - DNA, 607 bp, Zea Mays
attttctgttcgaacgaatcaaaatttgtcttcattacacaatcactgtgcaggagcattctcgcaggggaccttgccagcaggatcaccagagggagaaggcttactcacaccagcggacgcggcaagaacgtcagcaacaatgttgtcaggcaccacaacacgaggtcttttcatcaggattcaaccagcacgaacagctttggccatcgctttatcacacatcggtttcatgataccatggtcatgctctaagaccttaatgtggcgacgagcaatttccaactcctgcgaaacaagtttcttcgaggcgcgcaactatttgatgatggaatcttttgaagacagtaacttactaagacgcgacacttcagtctagaaagccctcagctcaaccctatgatggtcaagctctgacatagtaaagcgatgactcctctccaaagtagtaagggaactgctggcatcacgatatagtttatccaaactgtcacgggaatcaagaagtcttcgcatctcctcctacaggcaagaagagcactaaacatcgaattaaaggcgcgaaacaaaggcatcaggaacagttagaaaaatctacctcataggc

SEQ ID NO: 164078 - DNA, 451 bp, Zea Mays
cgagggcatcggctaaagcaatacaagtcgatgcatctgcatgtaccttttctacgtcatcacctacccattgcaataacatctggtgtaaattagaaggtatacaatgattcacatgaatccaatctctgcctaagatgagaatataattcccatctacttcgatgatgaagaaagcaccagcgagggtctttgtcctaatggttaactcaatggacctgacaccctcggcctcgatcgtactgtcgctcccaacaccgctgagcgtcatattagtcctgatcagcttattgtcctgctttcctaattttctgtacaatggataaagcattaaattcacgaatatcccaccatctactaacattctagaaatcagtatttcatcaacatgactgcacacaaagagcgattttaattggttaattgattcctttggtttggtaaaaactgt

SEQ ID NO: 164079 - DNA, 464 bp, Zea Mays
atcacgacgttctttcaggcattcctctctcccctgacgcagacacggctacacgccccagcagggcggcaacaatggctcgcgagagctccacgccacaaagctccgacgaccacgtcgaattaccctgtgcaaaatgtaattggaatatgggctttccagaggaggtacttcataccagctatgatgaatccgcggaggccgaccatggtgggggatggtttaacggtagggctccaactccggtgagaaattcactggtttctggctgttcttcagccctcaatcttctctggtcgtgatccttgtaccgaggcgacacacccttaccacatggcggacaccgagcagcaacggaggcaaggcaagggcgcggcagcttcctttcttctcgggcgcaaatggcgcgctaatagtggtgcccggtgtagcagacctctggttagatgggtcaaacggtcgcg

SEQ ID NO: 164080 - DNA, 579 bp, Zea Mays
tactataggagaacaactttgcttaagtaactaagctttgatttcatacaaagtatggagaaaaacaagcttaaagttgtgctgtcaatgagccttaggtctgaattttcagaaacagtgaagtcagatgaacttaaagcttgattttgagtaagatcctgtgactttttgtggatgcacaatttaacaaagttagagctagtctattaggctacaactttgctgtagagcattgatctagtcaccatacaaaatcgggaggaaattcgcaccaaacatgatctgttagactgactgaagaagcttctgatggtacagtggccagaaagaactgttggttcagtgaaccggccgccggcgaccctgcgcgtggattcatgccggtgaggtgattcgtgctcactggtgcccggataacgtttcgcggtgaaaagatctcccccacggatgagcttaaggcactgttccgtccggccgccgtgtcctctcagtcccgatcactttgaatctaccctcgccggagttagacacatcgcagtcttgtgccacgtgcctccgcactttaaccacgccgccgtg

SEQ ID NO: 164081 - DNA, 316 bp, Zea Mays
taccgaccctccctagtatttaggtgttgcgtaccttgcggcgttcctaaaccctgagttccacgaacccttcatgccatcacaaccatcgccagtggggtgaaattgggagagagggagaagaggtcgccgccgcaccgattccttggatcaccgtcgtctggactaccagaaaggtgcgattggctagcgcggtggtgcgtagattgtctgtgagccaacctcttggcgcggggtcatcgggactccactaaattcgtcgccggaatatcctacgctactaccccgggcgggcggatgtggacaacccacctgg

SEQ ID NO: 164082 - DNA, 367 bp, Zea Mays
gactggttctcccttagctgtctccatggacgttcatgttgggtcgccgctggttctatcttaggaagctgtggtgatgggttctagttttcccattagcccaactggcccgatcaccttagaggtcggtggtcctggcaccgaggattcgatgggtactcctggagctaagatcccattgggcgtcgcactgagcatggactacactcttcctttggtgtctaaccctacccctaatgttgcttctgtcattgcttttccgtctgatagtatctcgatgcctccagccctgggatttcccttgttcctttccaaccttcaggtatgtgcatccctactctgctctacccttatcagtggatgtttt

SEQ ID NO: 164083 - DNA, 447 bp, Zea Mays
ctggcctggtagctgttgttataagaaaatatgcatacggcaaactggactcccaactcttgtcaaaggtcagcacacaagctctcaataaatcctcgaggactttgttgactctttctgtctgtccatctgactaggggtgataggcggtgctgaagtctagcttggtgcccatagcttgctgaagactcatccagaatttcaaggtgaactgtgttccccagtctgacactatctttcatggaataccatggagtctgactatttctttaagatatatctgggcaagggtggctcttctgaaggtagtttttactggaatgaagtgagctaccttggtaagacggtcgattataacctagatagaatcgttccctttttgggtccgaggcagtccgattacgaaatccatgcctatttcttcccatttccatttgggcactggga

SEQ ID NO: 164084 - DNA, 553 bp, Zea Mays
actatgactattttggattaatgagctaaggtaatgtagaaagctatatctttcagcacataaggtatgtattgagattagatgcatgattacaatattggaaacaattaatctctgcaatgttgtaaactcacatgcgtcttatttggggcatccattgagatattgcacttcttttttggtggctcaaagtcatcatcatcatccacaggcatagcaatgtttttagcatcagctgcaacacccctctttctatgctgcggaggatcaccatcagaccgcgtatttgtagggtctgccatgtcagtcgagcatggaatgtcaacactgaaacattcttgacttgactcaatgattaaacgcttcggattggttgggggtcgatcaaccttccgcattattgaagcagcagcctgcaaaagaacaatgtaaaacatatgtgctttattgaacactcaacacagtcatacacattacaattcatcaattgagttatatgaccctaacaacataaatgtcaacgcagtcaaacataaaaaaaatcgtatcattg

SEQ ID NO: 164085 - DNA, 498 bp, Zea Mays
taagtgtagtgtttggggaagtaggtagacccacagccacatggaggcgaagaggacgagcacatcacggtggaaagaggcggcgacgagcgcgtgaatcaataggttgaagcagcagacagtggtgttacagcacttgcgctgctgtcatcgagtcactttggtggtgtggacgcggatctcgtgtcaattcctatgtcatcctccgcgctcacgtgtggatgcaggtgcttgcactctttggccaacggtagtagccaacggtggagcccgggcacgtgcctaggctagccaggctttggctctgccagtgcgcatataccacgatgactagacgaaaccaagagtaatatgttatatgtaatgtagctactcaatttgtccaatagtatgtgaattcggcatcgtggctaggaatggtaacgatatgaaacctatgaatttatggtttacagactcatatccgcaaggtaaatattaaaatcgcaactatacatg

SEQ ID NO: 164086 - DNA, 751 bp, Zea Mays
ctgcgctcggtgccccgtggcccccaccaagccatccgaaatcgcgcgaccactgccgcctccgaaatcctgctgccattgttgccgtgtgaagaaccttcgccgccatgccaacccgcgcggggccagccaatctgccgtcggagctatccccggtaagatacctagtcagctcgctttaaacctcgcgtcgatatgcacgcttcctggctcgatttcgctcgctgtagctcggagtgcgccacacgccgacgtacctccgccgcggctcatgggcaggccaccgtccgtcgccagagtgctgcgtggttcgactgtcggtaagaagtccctaatcggtttcccctatgtctttgctacgtgctgcgcacctcgaaacggggtttggtgcagggaggcgggataacgttgtcgccagccatggctccgtcgtgccttcgcgttctgttgtcggtcgggcgccgtggtgagagagaggggattggggggagaatggtgaagggcttgggctgttggatcatacacggacggccccgatctaaccgcgcatacccttcgctcaatagaatttgaaccgtagatcacgaattgggcggctcagatcggatctcgtgctccaacctgcggatcgattgtgggccgtggatcttagatccaatggccgttggcgcgtaccggttcacttcacctgagatctaatctgggccgatcagtggcgatcggacggttagatctctccgatacccctttg

SEQ ID NO: 164087 - DNA, 443 bp, Zea Mays
gggaaacaacacctagaggagacatcggcgccacctgcacaacggtggaatgtgaggggagaaacatgagatcctggtgccctgctggctcctgctcatcaagatcttcaaccaccagtcccaaactcttaccatgattttttagtgcagccaataattgttattccgacgtgttctttgtttcgtgctaatctctgttgtgatattctgtgatatgctaacggtggattgtttggtgattgcgtagggtagggagagatacggtgtcgcaaggctggaaccatctctgcatctaattgatgagccaaccccgtgttgggtcttttcaagcctttcaatgtgctgttgttgcgggttgggtggtgacggatgccttcaatattatcccgaaaggcttgactaaattgaggtaagcatagcatgctattttatcccacattgtg

SEQ ID NO: 164088 - DNA, 910 bp, Zea Mays
tcccttcggatgggcgaaaggaggctccattagggcttgaaatgcctctcatattcggttcttgttacatgagcttcatttggctgctgctgatctggttccgatccgtggaccctgaccgagcttgctgtgttgtaatctgtggtctggatgcagcctaggtactcaattactcaaattagggtgttctatgtgctcttggtgtagtaatgatttaggtgacaggatagagtagaggtttacgtggatggatggctctatggctcagtgcacttccacgcatgtgcgaatccactgtctcatcaatcggttgccaaggccataaactagtaacttgagtgtgtttatcttcagtttcagttgtgtccttagtgacatgatgcttcccttatgtgtttccgaatctaattagggtctatgtggctttacttctcgatcagtgacacctctagggagtaagatcacggcttacgcagtcttctgaagcattagttcgtattgttagacttgcatattctatttggttgtttatgtctaacctgtttcaagtagttcatccagggacaataagactgtcacaagcagttgcccagttatttacaagcaaccagacaaaagtgtttctgtgttaagttcatttgataaactaatcaacctattctgtgaattctttctttttgtaactcagtctatttcttgtacatgctgtattgagtttactactgtatgttcaaatcttgtttaaggtgtcataatgaggacttgaactttagatagaccaatggatgcagtatgtgcatcacgtaacactaaagcatgttactgcacatttatctctcagttgatatgctgacactattgttattggtctatatgactggttatgccatctgctaaaattatgccctta

SEQ ID NO: 164089 - DNA, 461 bp, Zea Mays
cgtataacaacagctaccaggccagtatcaagatgtcaccgttcgaagcattgtatggacgaaagtgccagacccctctaatgtggtccaacataggggaaaagacactagaagggcctgccttcgttaaagaggcagaagagaaagttgccctgatccgcaaaagattacttgaggctcagagtctgcagaagagttatgcagacaacaggcggagagaactccggtttgaggaaggagactccgtttacctcaaagtctccccaatgcgcatagtcaaaaggtttcaagtgaaagaaaagctagctccgcggttcgtcggcccctaccctatcatgggcagggtaggacccgcagcctaccgccttgaattaccagaatctatgtcagatatccacaatgtgtttcatgtatcccagctccgcaaatgcctgcaagtgccagaaagtcacatcgaagaa

SEQ ID NO: 164090 - DNA, 820 bp, Zea Mays
ccgggactccgttctagtggttctgatgaggactaggtcctcttcttcgaactctttaggaatgatagtgttgttgcaccattccttcgtttgcacttgttatctgttcaatgcttcaagggcgagaacatggtctccatcgataaggtccttgtaggttgactcgtcgacatctggagtactcgtggtgtttgctcgtggagatccttgatttagttcttcttgtttcattgcttcggattcgtacatcaagaggaaaggagtgaacccagtagctctaaattatgttgtgtttagcgcccatatgacttcgggaagttggtctgcccatttgcccttcttgtcgtcaagtagtctcttctttatggcgctgaaaatcttgtcgttggtgcgttctactactccattggattgtgggtggtagactgatgcgaacactgcctttgtgccaatatagtcgcaaaattacctgaaatcttgattgtcaaattgctttccattgtcgactgttagtcttgatgggactccaaactgacaaacaatattctgccagaagaatttttgcgttgtctttgatgttattgtcgacacagctctggcttggatccacttggtgtaatattcaacggcaacgaaggtgaattttaacttgccttgcgctgttggcagtggtccaatgatgtctagtccccaacgatgtagtggccaggtatgtgcaatgagctttgtgagctacgaaggggcacccgttcgaggtgagaatttttagcatgcttcgcacgaacgggtcacccggttggccgcacacacaattgctggc

SEQ ID NO: 164091 - DNA, 657 bp, Zea Mays
attctaatgggctttggaccaacttctcctttttctcatcaactttgacataaaaccattcagtcttccagccatctggccatttggtacgatagctgataaccggagacttcgcatctttgcgatagtcaaaattgtagcagccgacgttctcatgcatcccatcttctctagcttttgtctgataatgaagctcatgtgcccgttagaagcctttggcaagcggttctgcccctggcttcggagagcctagatgtagacgctaagcctaacgatggcgttagaagttagctgatgaagataaatcccaaacttctccaaaacatccgcaatcatctcattcaaaggaaatcttaatcctgctttaaagaagcttttaaagactaccacctcatccttttctggcttcggagtaatttcctctccgccaaagcgaatcatcttctttttggcttcactgaaatagcctaacttcatcaacttaggcatatcatcttcggtaacagtggacctcccaaactctaggtggctgggtttagatggcagggcactataatcatcttcagattcaccttcctcagcaccaacctgctcagcttcagtggcaggtgcaccttcgtcagaaacatcctccggcactaccagccccgaccgttt

SEQ ID NO: 164092 - DNA, 727 bp, Zea Mays
ggcggctgcgccggctggcgaagaccctgtggcaactgctccttcgcaggtggcggggtcgtgttaggggagttgggttttatggttttatttttgtgatactgaaggtcggttgctgcgcaggttccgacatctgggcctacgcaagcaacccctactgatgttgatatttattttgtggcggctgcgagtgcagtgcctgttaatgataattcacctggttctgaaattgaggcttggtcaccggacggggtgattttgagagcccgttttcgtgtattgaggagtcttctgatgaagatttagattattttgcttcttttgatgtggccgcggtggaatccttgtcgcggcctgaagcgtgcgaaatgtcgtctcccccggctagggcggtggccgaagagcaccgccggcgaaaggtggtgtcaaagcacaatgttggcgagatgtgcgaagtgggaggcgtcgacggatggggatggaacgatcccgtcttcggctagaccgaggcgaccaacgagatttgctgtcctcgacgttcgggacatgtattggggagggggatctacggaatctttttgagggtgaggagttgaagatgatgttgtttaacttttgagaggcgggtcttattccgaaggctaagccgatgtagcgtgcttgctgccctcgctctcgtgttgcggtagtgagcgaaaacgctgccctcccccggcacgcaatagag

SEQ ID NO: 164093 - DNA, 982 bp, Zea Mays
atccatggcaaaggacacctctattttggctttgatattgcaactactaccatattagtatttataaacccgaacatggtaactttgatgcctgatgtgcctaaggccgactcaaccccaaccaactgaagtcgtagcttgtcaccaaaagactttagatgacctagagattaatgttgtctaggatgttcagggataacacattgagaaatcatgtcctagccttgagccagtagtcggcgtgatacctataggtggggaccaatctcaaggcgccttgatgatagaacaaccagtgtttaaccgcttggctctcctgcaacaagtgttagacaatgtgggaagagatccaggcccaagttgtttcagtcaatgcaggtgcctctaatgtcgcttcaattgttgtatgttcctatgctgtcaatctaagtttacccagcatatttgagaaaccttctagcttgctactctagggtgcagatctccaaatggtcctgactccttctaattttagtccactctctgtttttgaagatgctcatccattgccacttatgccttgaacgacaggttctaaattttgcaatttactatacaagacttgttgaagcagggttcctgttgggtgccttctcctactgaaactcctcaaaatagtaatacatcaatggttttcaagtatgtttcaggtcattcaaagcagtgatgaagctagccttcattcgacagcctttggttaaacaatgtacacacgaaggttaagctaggaagttttgacccatggtctgagcatgcaacggcaagaaacgaaggagaaagcttggagacttggtaagcacatgtgtataggaaaagacgttagtgcccctagaggatcatgtagtccccatgtatagggtctgaggacatgtttgtaattttatacgaagttatactctggctcaccactataaatagaggtacaatgccatgtagacgggca

SEQ ID NO: 164094 - DNA, 587 bp, Zea Mays
cgcgggtcatggtggtttggccactcggctagcggtcatgactggagagaaaggaggaggggaggtggcgcgagggaaggagaggggagagtagacgctcacccacgggatcgctggcgaggatggagcttggctcgacggtgagtgatccggtgcacaggcagtggatggcgaggcacgaccggcggcagagctccgagcacgaggaagcacagcgagacacggctgagggtcccaacgtggcgcaaggacacgacggcgatccggtctggtgtgggtgatcctcctagctcagggggtaacagcgcacaagcgggggcgggctgggcgtggtctgcgagtgggaaagcggacgagcgagtgagagggggtttgagtaggggtcggacacgtgggagggggtcgatacacacatgatgtgggtgcgtccacggcggggtgtttgggctagtagttagaggagggagggggagctgacaagcggagcccatggggcggcgacataggcgcgcgggcacacgaactggtaacaacgccgacggggcggggccacggcgtagagtgcaggggagcgcgcgcgggtgaag

SEQ ID NO: 164095 - DNA, 646 bp, Zea Mays
ttgcttcaataaatgtgtctcgactctggtaaagtgttgttgactgtccgagcttcggactctttgcgtgtgtcgcactgtttattgaacttggcggtgccattttggttgttgattatgagacaaagttggagccatgagtggtggtggtggcagggcccattcagatggggagtgtcttgccgaagctactaatactgtgggtagttaattgccacatactcaggaatgtacggggaatagcacgaagcgatatgcaggacctgcttcggctgattctgtcgtgcttcggcttcagctatctccttttgcttctgtatcgtgacttggcatgtcctcgttgtatgtcccttatcttctccatagaataggcaaaacaaccttcttggttgtgagctgaatcttccattgaagcttctaccttctctgcctcttggggctggtggcctaaaggagctttgttgtgttcctaataattgagagttgtgctgatgcccttgagtatgaattccctgtcttcacttgatatgggattatggattgtcatgacatgccttgggtggagtcttcccccgaagcacctattccaaagtatttgtaggcttctttccttctttgccggaagtcattatcggctctgatattc

SEQ ID NO: 164096 - DNA, 823 bp, Zea Mays
ttgacaactttctttgcagttgtagggctcaagaccttcgtagtttccaacacaacatctagcacgttggccatcctcctcctcttgggagttgccgcagaagctttctgcaccttcggcagtttcacctccgtcggagggctcaaaatttttggcacctttattatttcttcaactcttgccttatcaaccttagcctcgattgacttggctatgggtatcttcggcgttacggtcgcctctttcgtgctctgtgcaattgaagcagtttctattgcttcggctgctgaagaggaccctgtgccaaattcaggcactacgatcggttcaatataacgcgaccggtgggtcagaaccttcacctttttactcttcggcacaggcttagctagggtgaccgaagcagcaatctttctctttttctcttgccctcgcagtgggtagcgataatcggggtatatgaagcatatcgcatcgaaaactctgttcagtcttttctttcctcgacctccgaaggctgcggacagagcgttatcttcagccttggagtatgctccaagtagctcatcactggtagtttcgatgcacttcagccagtcatcgttcggctcatcaaatttctccctaaacctgaaggtatacttcagtcggaccagactactatcactagaatcagtggtagtctccttcggcatttctcagctttccacaagcggccataccctgaaggctatatgttcttgaatcaaatctcttgtgctaatgaaggagcaaacagtgctgaaggccctctggcacgctttgacagtatcatgaatttcta

SEQ ID NO: 164097 - DNA, 563 bp, Zea Mays
tcatgttggagtttgtttgtgcatctaacttaaaattttgaagttcaaagctggatttgaattgaaatagaaattagaaaatgaaatagaaaagaaaaaaagaatcaaatcagtgtttgggctgcaacttccatggtcggcccatctcattcttttcctcctctccaccgctcggcccaagcgtcagtgcacctgtgacgattactacctccgccatgtggggcccgggttgccagactcttctccttctccgagctgaaatcctgcaacaactcggctcggttgccgccatggtcgtcgccggagatcctggggtcctcccttcccctccaactaatcgtcctctgtgcggactcgccctcccctataaaaagtatggtcgcctaagcccagaacatcacatcgtaggctccgaacgagagagagagagagatcggggcaatgccggtgctgttcggctgcctcaccggttgcgccgtagcagagagggaattggagagcccagtgcccccaccatcgcctcgcctggtggaatcgccatcgagtccacctggacaccaccg

SEQ ID NO: 164098 - DNA, 860 bp, Zea Mays
ctgacacctgacaaaagcaacatgttcaagctcaccgccaccaaggagaaacgctagctgcttttcctcgagaagtacgaagaagccaagatgtggtgggtttgcttgacgaatctgacattctgactgaagtttggacatagcattggggtgggtgcctgactgcctggtcagggttcgcaccgagatccttggacggaagaactgaggcgatttcgacacaatcttcttgggctcaaacaggtgaacggagaattcaggtcccacttcatccgacgatcacgcatccactccatttgccactgacctctctgttactgcgtccaggggtaagatcttgagagagcaacgcaagaacagagctcactagtagctgtatagcaatcttcgttttcttgttaaaaagggagaaaaacaagagagcacagcagatatttttgtattccattcctgaacctggtctcactttccattccattccattccattggatgccaaaccaaatcacaacccgtggttgaaaccaggacaagctcgcaagaatttggcatcagcagtccctagtagccgtttggaccttccgtagtctgaaaccaccaaagtttggccacggaatctgtagacatgaaaactaacaagaattaacaacaacaaaatggatcacaacttcaaaacaatattgcaacattgttatttggtgtatacacaaacctgtcaaaatcttcaaaacaatgttgcaacaatggccacgtctccagatttttattaggtgtatacccaaacctgtcaaaatctggaaactacgaagcttctgttctgaagatggctattgccagggaacggcggtgtcttgtttgcgc

SEQ ID NO: 164099 - DNA, 402 bp, Zea Mays
ggggaacagagaaattcgcgggctctggtgagtaattgaaggcacgagtgggtggattggatgcttgaatacctaatgaagctgagggtgtgctcaatttataggctccgggggcggtggcttatgaatcggggatggcgcggtggcggccggagagaagagggtgtactggcgcagtgattagtggcttgtaccgtggcgagctcaccgacgatcaccgaatatgcttaacgcgacctactgcgacgtggtaagacgcccgggtacgtggcaaatgaccggcaggcagccaacgccggcgagcttatcggtacaggccgcaaatcatgggggcacgacggctggccaccggagttatccctaggtgaagatcttttgtcttggagtattatccggtcattg

SEQ ID NO: 164100 - DNA, 292 bp, Zea Mays
actttagaagtataagaaaatcaaatatctgagtgcttatcttatttgctagcaccactaccaaagaattttcgcatcccacctctaagattttctattgtagcattcagttatgcaaaaggcatagaagatacgaaatcacatcagattgcatcatagatcagcatcttgatgatcaaactgttgctttctttaataccgaatcatggcctgcatggaatgatgtgcttttgggccattccagttgcctttattcattatggtaacatgtcatcatagtattataacagac

SEQ ID NO: 164101 - DNA, 1427 bp, Zea Mays
catcaggtcgaggtcgaggcagcagtgcaaacacgagcaaggtattagagtcattctcagatcaagtatctgctgaagaggatggagatggtgctgactctagcactagctgtagtgtaggatctgctagagctggagcagtcacagaaacagccacgacagtactggtccgacgacctaggtagagaagtccagggtgaccgccctaagcgaagagatggttgtaccaaaagagtggagctggggtcctgactttatagcgggcacaacagcagcctgaagggcaggaggtggagcagactgcactagagggataggaacatcggtgtgctgaaggatgtgagtcatgaatgcccggtgctctacgttgtctgctaacaactactgttgaagggtgtcctggtggtcctgaatggtctgaaacatggatagcatccgctcggacaactgctactggatagttgcctgtcgggcctgctatgctgccaggtgagcctgctgctgagtgagagactgtagaatcacagccaatgtagggtcaaatgcaggaggagcagccggaggagcagtactagagccactagcctcgtgatcatgggaacgaggtggtacgggaggtggtggtagaatctctagatcctcgtcatcggaagaagtatctgcagctgcaccctgatcctcaaactgtcgaatggtctcatcctcaactccgaagtccggtgccaatggatcaactagagtcgtagcagtgtcctcagaagatgggtggtagaagccaaactaaagtctagaggcttcaagagtagcctggaactgaggaggttggatcagctgagcaaagatatgacagaggtagtgagcatatggcagctgacgccgagctcgaagatcatccaacactgtatcctctatctcatagatcagaaaattgaccacatcgaatactgagtgagagaccagggcaccaaggagctagagccgaatatgagcggtagcctctttgtatcgcatcctcggtagcagggtgcgcctcatgagctcatagagaaacttcacaactagggtgaagtcagtaggagaatgccgagagccgtttgtgaacgaaggtctgaacagagtagcgacgtgagttgtgctaggagctactccaccgtgagggcgacgaggagggtctgaggtaccatagcacatgctgtgaagcctcgtcgtcgactcagggaatccaaataactctctgatctgagctgcatgcaaagtgacgtcctcacgctcgaatcgaaacctcatccactgatggtcagggtcgatccaaattatggcatagaacactctgacccactcctcaacatatctgccaccgaaagtcaacaaagagtataaccctggcagataagtgatgtgaccctctgactctgcactgatcgctg

SEQ ID NO: 164102 - DNA, 359 bp, Zea Mays
tggatgcacagcaaatttctaccaaattatgaatacaatcgtctattgattaggagataacaatggtagtaatgggaaataacttaagaaattttaaggggaaacagctagtacccactgaatgaactgaagttatcaaacataactacatgtggaacatatgattgagataaacactagtgggaacattatttttttgcacggtcagaagtgcctaatcggctgaacccttggtggtcagaggtgacggcgtttttgtttgcgtctggactgctttgtctctcactaaactattgtaattttgttgctccctggtaatgaaattcggtttgactgctgtagacaaaaaattgggaaca

SEQ ID NO: 164103 - DNA, 748 bp, Zea Mays
gaacttgaggttcccctaggccgtgggtaggggcctgacgatgtccaggccccagcgctgaagaggccatgtgtgggcgattagcttcgtgaactgcgaagggcttcccgatcgtggagaaaatttctggcaggcttcgcaggaccttgtgacccgatttgcggcgtagatcatggcgagccagtagaaaccttgccggattacctttgcgactagtgccctgggacctacgtgagagccgcaagtcccgctgtggacttcgcgcaaaatttggacgccttcggtctcggtgacacatttaagcatgggttgactgacccgcttcttgtaaagctgtccttcaattagtgcgaagtcccggcttcgatgtttgaggcgcttggcctcattgatgttggttggatgatagtaaccctgcaggaacatggttattggtgcccgccagtcttcggtcatgataaggttgactatgcggtggccctcgccgtcattggttatttggagcccttctgtgctgcggacgactggcgtgctgatgacatggtagaatacgtcggagggcagggcctcgcctcgggcggctgccttggccaacacgtcagcctcctcattcttggcacggtccacatgctataaggtgaaacctttgaattgcctctcgaggctacggatagctgcgaggtactgcataagtgcggggtccttcgctgcgtagtctttctcaacttggccggcgactaccttggag

SEQ ID NO: 164104 - DNA, 402 bp, Zea Mays
ggattggataaaaaacactcactgaaaatgcatcgataaccacttcatcctccatttcttgtgcgtggtctgtgtctgccaaggatggtgctgtgacattggagcttgcacctacaccaagattcccatgcctgctactaattttagggtgcagtctggacgccttggcaccgcgaagagatgccactgaactgtgatgcccgccacgtgcgcccatggttatgggatttctagcaacagctgtggtgtccactctgcaagatttttgcggtgccgcaacatggcttgaagacacagagtgctgaccagctaccttgccatgtcgacctgctccaaactcgagatctggattggggatggatggagaaagaactaattgagtgaagctttcatagtgtcggc

SEQ ID NO: 164105 - DNA, 402 bp, Zea Mays
cagagttgctggagtaggcgttgaatttaatgcttctgatcttgacagacgtgctaccaaaaaatcatgaaggcagttggcataattgctgataatgtaggaattgaccagagggctcaagaggagtatgctgatcttttcaagacatctttgtctgatattcatgtaaaagcccttgcagccttgtttggctggcagcttcctgaccacttgtagggtctgggattggatctcctttgtttttccctttggttgttctcatcgcccttgtgtcaatgaatctggaacgtgttctgatatggaatgtaagaggattaaattccttagctaggcaagactcagtccgttctttagttgcttcctcaaaaattgatatcatttgcttacaagaaactaaattgg

SEQ ID NO: 164106 - DNA, 837 bp, Zea Mays
ttaatacccaaaggggaatttaagatttaaaaaagggaattctagaaaattgagaaaagagaaaacaacattaaacaaatgaggtaaaataaaatatataaataagaatatatttatttactcaaaaatttgaatttggtacactttgatcatcaaggaatctcaaaacaaatttaaattcaaatgtgaattctaaaaataaaggggaaaagaaatcaggaaaaaggaaaggaatatacctgcgcttgggctgttctcactattcggcccattaacccttaacctcgcgccggcccatttgctgcaactggccgcgccacctcgccgactggtggggcccgctcgccaggaacgtcttcctcgccgtagcgtacgcgcggaggaatcggatcttcgtaacaaacccctaagatgcctggtcgtgcggcagcccgattccaagtccacttctccgacgaaatcgccgcccaatcgccaactaagcaccggccgtccgtacccgacgcgcgatgaaaactgaagccctctgttaccgccatggccgcacggaatccgccagctcggctgaccgtccctgcggactataaagccaaagtggctattggactcgttcgctccgtaccctcacaccctccccgttcctcgcgccatcatcagtgagagagagaactccttcgccgtgtggagaatgtgccgccatcgtccagtccgcaagaactcgcgggccaggctccaagcggcataatcgaaggtgaaaccccatccatgtagttcgtgttgccttccttcacgtttggcactatttcgtgttgggtttcgtgctctggttgccgctcg

SEQ ID NO: 164107 - DNA, 767 bp, Zea Mays
tagactgctcttccacgccgagctcaatccatggccgtcgccgcaaaccattagccgttgcaaccatttgagtttggcgtggtcgcgctagatttgcactagggcatctcccttcgccccatcctcgagagtataaagccgcaatcaccttccccggcatctgtcccgggaatcactatcgacgcaaaggaaagattggagaagcaagccaccgacggtgttattgccttcgaccgctgctcgggatttgatgggaggtcggcggggttcaccagggaccctagctcgtggccgcgggttcaccgaaggatggtggtggctgagcagcacgaaatcactcatcggagcatggcaccgtcacagattctgcacctcgccgtgatcaactcacctacaatagtgccaaggcctcgatgtgtggtccatagcattcgttggatcacacaaaacatttttagggattggaatgggtgggaaatcgctcgtgtggtgcgtaatttgtcaccgcagttgatcgtccgcctcggggccacgcaacgtcgtggtcagcttccctgaccgtgctaaactcggtatgagcatctcccttctgttcccttttgcccccttgatgtgtagcaccttttagtcttgttgatggggcactggatcgcctgtggtcgtgcgtcggcaatcgccgccgccgtggggccactgtgccgacgagggttggacgcttggggtgaagaaggggacattggccgtttgatcctagatcaacggtcgcg

SEQ ID NO: 164108 - DNA, 791 bp, Zea Mays
gtggtgttggcaagccatcgttctttgatgggatgaactactcatattagaagatctgcatgtcagcttatctttagagtattgggtactgcgtctaggatattcatctcgacattgtgttggatgctgcaagtgatcaaatcactccaattcaaattgagttccatgattcaaacaacaaagctcgtaacgctttcttcttgtgtctctcgcttgttgagtttaagcgagttggtcatttggctatggctcacgagatctggtccaccctcaagatattcgatgagggcaatagttcaatggggaactaagaaccaaagccactaccatggggtccttggtaatacggcacacgaccagcaccctatcgggcatgaccaccctgtggtctctgtgcttcaggcctagcagcaagaggcaaagaacctctaggcctcacaggatgtctttgaataggaagatcatgaacaccatgagaaaggtggttcatcttctttctactcagcacagaaaccagtcgctcatctctcttcctcctaaagcaaaaggtagtcagatgcccatccctctcacaatactcacactagaacctcacctctctcttaggtagaatttgtttgtgggaggggcattagttttggatggctgaggggctctaggtaggggatcactagatgtgtggaaaagggtttcaagtgtgttcctgaggtggttaggttttggaacccacacttgtttctgaggaggggctctcacaggctcctcgatcacaccatttctcacaggggtga

SEQ ID NO: 164109 - DNA, 602 bp, Zea Mays
gttaaaccctatttccctttcactgcttctaatcaagattagtctgcgaaacgaaaaccaaaactagacgaacgcacgcctaggcacaacatcagacaaaataaatatgctccaacatgatgcaacaacaatatcaacttaggttttggttacacgtgatacggacaccagtgtctatattgctttgaaaataggaggaaggagcgaaacagcaagagaaaagagagtaacgcctaaatttgtgaatattggagacaaaaatttatacccccaaatttagtgcgttacaaccgacgagatacaatccccataccgtgaatggtcatgttattgggatcatctgaagggcctaagctggcatatgtgtttgcttcgcgtagaactggcagcctcggcaggaccgcacgatcgtgatagtgttcgctattggagtcggcacgtagaacccttgcttgaaggcgttgctgacgagggttcagggcgtcgtgtggtgcctgcaagcccccgaatgtatttctcctagcaactcctgcccttggctgattggtatacacctttgaagtattcccgatgggctgcatcggtacaactccttttcttct

SEQ ID NO: 164110 - DNA, 513 bp, Zea Mays
ggaggatgaaacttagggaacattgctggcgttgttgaaggcggtcttagcttaaaagagaaaggggacacatgacgatcaaacttagggaatgtttgatatggctttttttaagagcatttcttaaaattcggattactggataagctagatgtacagataatttgttggtaagagaagctaagtgtttggcggtcctgattttctatatgtcgattgtatttactgattacgaaatatccagaatgtcgatgggttgatgtactcttagttgttattgtaatgtaaattacatatgcactagttaatcgttgtatttaccttagtaccatcatgttttattcatgcaatcaacatgtaataaaaacctcgccacaaaatacataacttaatacaacatacatttcgcttttgtgtccgagcgtacaacatgtgttacaacataggaagctctcatagtacaatacattctcaggcaaccaaagcggctaagatagaatctcgaaatgatcc

SEQ ID NO: 164111 - DNA, 493 bp, Zea Mays
atataatttttttgtttgttcaaggtcttttgtggtggagaaggtggagcccttgatggcaatgctactggtagagacaatggtcataaagaggatgagggggtggagaaggtggagcccttaatggtgatggtggtggtggggacaatgggttagaaagaggataagaaggtggcaatggtaggtcaaaaggaagagactgggtagcaggtgaagattgacgaggtgaggatggtttgttagcaataggatctgcatgtgatgacccttgagttagggggcatgagaatatgatgatggtggctcgaccaattggacatcccatcgaggccaaaggatgaaattcttcatagcctgttcaagtgtctcaatacctttgggcccagggatgtctagcatgtcgtccttgtatccttggacgactgccgacacttctaccctgcaataatcttccagaattttgtgatcatggaactaccatcctagaatcgca

SEQ ID NO: 164112 - DNA, 579 bp, Zea Mays
acaaaagagcatgagctaacctgtagacgtctggccacggcgagctcactcacgatggagttttgactgatttgggggaacttcaaaattggagcgctctggtggacaatctgaggcacgggctggtgcgttgggtgtgtgattacttagcggagctcactggggcggcaatttataggttccataggtggtggcggctaattttgagaagacacgcggctaccggaaaagagagtgagtcatcatagcagtctgccgtggcggtcactgggcaatgagctagagtagctactgagcagtcactacggctcgcgacgacgtggtaaatagcctaaggcgtggcgcaaccgcggtgaatggtgcatatttcagtgatggccgctcggccacgtcgccgatgcaagtgggcacgacaatagggcggaacagtggcccgagttcatccttaacgcgatatttcttaccccgagcagttatctgcacttcactgagcatgaatcgcaacggcggcgacgatcacggcatgggatcaccggcggcgatacactgaatctggcgatcttcgtcaggtcactgtac

SEQ ID NO: 164113 - DNA, 688 bp, Zea Mays
cgggagcgaagccttaaagaaatttggcgaagattgcatggcacaagctacttctgaggcgagaccctcagctcccgccgaagcatgcccttcgggggctactcctgtacccgtggaaaaagaaagtgtacctgagaaacttaagtctcctgctcccgaggcatctaccaaagagctagaatttatcgtgcggcatgctttagggaagcaattgtcgggggaacagattgccgaagctaaacaatatgccagggatctgaagtatccacacagatccttggtatacagtgtgtaacaccccaggtgttaccagggtgttggcttcctaatggcacatctacctattatcacatgtgggtaaaacttggaggagagggagcacttaagaccttggaagattgagtgagttaagaaatgccaaggaccatagcattacccaagcttttaggtaacatcaccttgggcaaggtaggattgaacctcgggcccccctctcttgaagcctttagttgagagaaagattaggcaaatgcacattccatgatttaaacccttaaccaaagtttaagaataccaaaatgtttacaaaataccgcaaaggaactttacaaaaagacccctaaaagacccctaaatcagccccaagtggagaacactatggaatcaccccattccctctaagtcccaa

SEQ ID NO: 164114 - DNA, 318 bp, Zea Mays
tagcaagcattttggtgaccaacttagcaaaactatgaattaagctaattggtctaaaatctcttgcagacaaggcatcaactttcttagggagaagagctaaataagctgaattcagcatccccaacttgtgagtatttccctgatggagtgaattaatggctgccaacaaatctgacttaataatatgccaacaacatctgtagaattttccagtggccttatcagatgggagagccccaatagtgtcgcgaacctccttctcagagaaaggggcctccagggaactcaagtcaatagcgtctctgtggcaagcag

SEQ ID NO: 164115 - DNA, 559 bp, Zea Mays
gatcttcgtccaagaaatatcacagccaagcatcatcacggaccaaatggaagaatgcaacaccttgagttagccagagacagaccccaacgactggagagagcctatcattagtacataaaaaatgaagaagagtcggatgacaaggctgcggtagagcgcattgcaaggcagtcagcccactataccatcatagggggcttgctgtacagaagaggcacaggagaagtcttcatgaaatgcatccactcggccaccaggagacagttattagttgaaattcatgctgggcagtgtggtgtgcatgccgcatcaagtactttggtaggaaaggctttcagatccggtttctactagccaactgcgaagagtgacgctgccgagttagtccagaagtgcgtggcgtgccaattcttgtcgaagcaacaacacttgcccgcggagcagctgcagaccattcctgtaacctggtcgtttggatgttggggcctggacatgatcagacctttcaagaaagctcaaggaggttatattcatgtactggttgccattgacaaat

SEQ ID NO: 164116 - DNA, 907 bp, Zea Mays
ggtctccatgcggaggtggcaatgattgacggtggctctgaattccaatcaacagcgatgctagagttcaattctactagctggggagctttaggggaggtcgggggtgctactggtgcaaggaaccgagcgatggtgcactggttggcgttgtccatgttcaccagcgctcggatgaagtccggcgagcggtggcacatcgctggaggcgagtagagggcgaacaggctagtcgaggagcttcactacgaccagggaagcttgtggtggagcttgcgcggttgtaccacggtggccggtgcttgggtgacaaaggcgggcggtggcgcactcgactatggtgaaatcccggtaaagtgggctcggcaacggtcgaggaggaaaaggccgagggaagttcgttatttataggagcgggcgcgtgtgacgtggcggttcccgaccacggcgcagggcatgaactcgagcgcgggttggcgcgcgggcagacatagagagcccgttcggctactaccagctgacgtcgaacacctagcacatgttcgtttcgcggtcttcccttgcgtattatcgcttgtccgagcctgatcttagcaaaatcttcatctataatttgtttcttataccctaagctagagatggtgtatgggaatcgtcgggttttgctcactggatgagaagatatggtatactcaagtgtgatctgtccagcagaccattaccctgggtttggtcaagtcacactccaagttccaatgtcaccttctggtatgtgttagggcagctaaataggtacgactttatcaattggagccattagttttaggatctagatcttaatgaacatggagatgtctgatcagagggctgattttcaaactagaggtattctgaaatttcatttgct

SEQ ID NO: 164117 - DNA, 923 bp, Zea Mays
gccagcgtagcctgctcgccgccagtgaccctccctacgctatgattcgcgccgccgccgtctcaattcgtgctctggatgtcgtgataaacgctcggagcacaccgccgtggataagcccggcgattaaagtatcccggccaccgtacaaagttcaccgcggtggaaccagataacctcgccggtgcactgcccccttccggccttatgccgcgtgtcctaaccgcgccaccgcatcgccatgactccctctagcctcttcgttgatcgccggaatgaccgccacggtagaagccacctagcgcttgcgccagtaccttcttctacctccggccgccgcgcgtcgtcgcccaatccacggccaccgcttgcgcgctctataaattgaccgtgcccccagctccgccatgtacccaagcacctactgcacccacctgcatcccaaatccctcactagcaagctcgaattttggattccccccaattcggtctccgccaccgtaaagcacaactccaccgtggccagtccgttctggtaaggcaccatccaattcgcgcgttgttctcatgtccctgtatgctggtgatgctctccaaaccgtccaattgaactaggagcccaccaatcactgggaacacgaactaatgtccatggctttcgctgtcctcgtgggcagaacgaaataggtcaccaatcatgcaattgacttaggggaaatgctcggggcaggtctaatttggtgtctgtcgctcgagagcgccggtcatggccccgttcggccggtacagttgctcaccggagcgcggccgcgttcaccgtcgtcggggacttcaaaccgagaatagatagaagtgcgagggtgtctttgcaattgtcagcgactgtgttaaatagtgccttgggctttgtcgggatattcaag

SEQ ID NO: 164118 - DNA, 937 bp, Zea Mays
aaggttaggggccctgctccctccttgtcgtcttcttcctgttcatcgcaggcccgagtcgacgcttccgtgttccatgggccttctccctcgcgcgcgcactgggtaggctggtcttcgggggtggcttcaacgggctcggcccaatgcggcgaccgggaggcgtcgtcgcggggtgaagggtttcctcccgatttcattggtgcccattcttttccacatcttgcgtagtttctttctcgcctctggtctcttccgtgctcatcgcgttctagcttcagtggtggttggttttattctccttttcgcccgcctagggtagtcgaggagtggcccctcccgggtcgttcttctgcttctcttcggatggatccaaagaaccgaaaccctaactgggagcgttgggggcaaaaggatgctcctcagggatcgcaatcgtgggggaagaatcggagtcttagctggcgattgaagccggccgctggaaaacccgagaacaaggaagacatcctaacctcttcttctggtgatggcggccattcaggtatcctcaaaacccctcctcccaatctgaaaaaagagaatgaaattgtgcttcgttttttctgccaaaaatgtggtacagaggggcatcatgctagggattgcttcaagtctttatggtgtgacatctgtcgcaaagaaactcacaacacagcgaggtgtgtcctccccaagcagaacaaactctgtatgcctattgtaggtatggcagtggatgggttagggttttactcgtcgcacttttccaaaccactgtcgaaaaaacctaagagaagtttcattggtttggtaaaagtggtaaagggttcgatttctgctgatgatctcgaaaaggattttgggttccatttcccttggggtcgtacttggaaagctaccaagtgtcactctggat

SEQ ID NO: 164119 - DNA, 511 bp, Zea Mays
cgccgaggtaggtgcctataaataggaccctacgtctaactggttggtgtgctcattccaattcttcgaaactagagatatcagcctaatttataggatgtctaggcgtggtaaatctgctaaacaaaggtaagttttggatccgcctcttattttgtgagtctattatatttgtgattgttatagagcttatggaaatttaggaagggtcctttgaccggaactgccttcgacccgctgcctttgccaagtggtgttccagtgcctatgtgttttgtggtgatccttgtaaggttgataagtctgaggatcatgagacttatcgacagaggtattggatgtgtgctaactttgcatttgagccaactattgttcaacgtcggatgaatttaatggtgagaatagtcttataatatgttaacaatttaatggtgaatgtttttttgcatactaataattgcctgttttgtacactcctccaccactatgtgattttgagcagtggattgac

SEQ ID NO: 164120 - DNA, 1046 bp, Zea Mays
caaaaatgttattactccatctgttccaaatcattactttacgttagctctttgattttatatctatattcaaaacacatggagttcatcaatctatactacttattaaggcagtaaggggtaggttgtccattctctgttctgcctttccgattcccacagtccattctcattcccaacagctcagtctctcgcacacaacccattccaattcccactttccagcaagtgcacacagcacattctcattcccagcccattcctcggaccacacgctcattcccagcccattcctcgcaccacacgctcattcccagcccattcctcgcaccacacgcacacgcttcctgcggcaacaaaaaaattgcagctaggaggattcgaaccctggccacgctgcttatagtgtacagcctcaaaccaacacgctacacacgccttttgacttatatcaatgttttttcttcactttcttctgctctcgcgtccagcctccagtactcctctcctcacgccacataccttacctcgacggtctcctctcaggctctcatgcgacacgagaggccaaagaaaccacccgaaccagctccacgatctctatgttctgccagctagaggtgtcatggatggagataaatgcggaggtccgagcacgcgcagatgagggagatgacatcagcgtgattcaatctgtgaagaggagggataataacgaggtggagctccgacaaggtgtagattgccgatgcccactccgacgaggtggagattgtcgacgcccacgccatcgaggtggagctgcgccgcgacacctacgccgatgagaacgtcgatgtcggcgataacgagggtgggattgcttcggaacgccgaccacctctcctatcctgctcctctcatctcccctcatcctctaccttgatggatatggtacatcttgaaggtaagctgtactgctctcctatcatactactgtactctgaattttaattataactctatggcacctatcgacttggatatcagcattatgtccccatccg

SEQ ID NO: 164121 - DNA, 422 bp, Zea Mays
cgttaacacacaggctcttaataaatcttcgagtaccttgttgaccctttctgtctgaccatctgactgggggtgataggtggtgctgaagtctagcttggtgcccatagcctgctaaaggctcatccaaaatttggaggtgaactgggttcccctgtctgacactatctttcttggaatgccatagagtctgactatctctttaagataaatccgggcaagggtggctcctccaaaggtagttttcactgggatgaagtgggctaccttggtaagacggtctattattacccagatagagtcgttccctttttgcgtccggggtagtccagttacaaaatccatgcctatttcctcccacttccattcgggcactagaaggggttgcaataggcatgcaggcttctggtgctcggctttag

SEQ ID NO: 164122 - DNA, 441 bp, Zea Mays
aagagaactcccttttataagtcacacgaggtacctgaaaactagcaatattctgcagaggaaattcctgggttctatcattttgttccaaatgagacatcttagtattaactggcactggctgggattgattttcttggctaagagtgtcaggatactgaaaagagccagaagcagcagcatcctcactactgattgccttgaagcagttaggtagttctccaacccatgctccaatgtgagaatcaaccattacatcaccagggcagccatacgagtctttcattttcttaacaagtgacatgcaataagcttgtacctgaagagtaaatcagacaaactatgcagcacacataaatattgaatagggtagttatgctacaatccagttatgcaggcatattaattcagtattccctagacaaatataacaagcttgac

SEQ ID NO: 164123 - DNA, 845 bp, Zea Mays
aaagcaggagcagtcaggaaagttttacctcatgtgccatcttctcggagtcaagttgtgcattcagagaggagttcaaggagcgagcaccgtccaagaaagcagaagtttggattaagtcggcctggctctaggaatacttctcttcaatgtcagagcaccaccgagccaaatctgataaagcaacaaaagaagagcgcaagatttagaatgagcgagtaatgaaagcaaatagggaagctatgagctcactaacaattatttgatgccctcagatcatctatttgtttttgaagcagtagagggttccactgcatcagagacgaaacttgatcagggacaggagcaccgcaggatctcagttgggcagatacaccatcaagaacatcatatgattatgaaaagataagaaaaaaactactttgctagcaggaacagtaaaaaagcgaaagttgattcacctaaagattggagaggaacaagggaagacccaaagtaggaagagttgatgcattgcttgatgaggggagatcagcatgaatgatatcaaaggcatgacccggaggaacttcagtcccatcagcaggcgacatgctcctggcgtctggttcactggcctctaaagttaccagaccagcaagagccatagataaacatgtcaccatagcctctttggattggactggcgacgatccaacgtggacatccatggaagcagcagaaggggaacctaccgcaacaccctcggggactgagtcgctatcagcaccaccctcggggtctaggtcctccacgacagccacctctagggctggagatccctcaccacatccataggagctggg

SEQ ID NO: 164124 - DNA, 1038 bp, Zea Mays
caagaaacatgagcaaaaaattgcagaaaaaatggagaaaagaaatgaagaaaattttaggggggtgggatgatgggatgagctctgcatttataatatattaatagagatagtacaaaaagcagaaaaaatggttttgtttttaaatcaaatgagtcatgaaatcgcttgaacaaaaaaaactctagacaaaaaaaggaacttactaaacagtaaaaaacaaactctttaattcaataatagtacgaaatcacacttttattacatacactggggaaaatgaacatagaatgaacatgagatataacatgtcttttttttattggaaaaagaagctatggatcaaaacttgacgatgatgaatcagaaatctctgccattgctgctccaacatccatagaaaacacgaacaactacttcccaacggttcaaatatgctagttgacaatctgaggatcaatattctggtataaaaaaagcaaatcagaccaaaaaaaatgatgcataaaaaacaaaaaagctccataccaccatcagcactgcacgcaccacccacgaaaaaaaggaaaaactagaaaaacaaaataataagagcgcccaaaaaaacaacacaaattgaatcacaaaaaacctgaagaaacatgttgcaaactagagacttgtcttcagtgttcttctcactaaaatagagatccttggccaaggtgattcgaatttgagggatgtcctcagtgcggatcttgagcatcatatcaacaaatatatcccaatattccatgtattgaagtgtgaaaataccgcagtcatgcctatgataattaaagaaggcaaaattactacaagaaataatttgttgtggctgtttttaaaccatataaaatatgtagaaaaaattaagatagcaactgaatttggattctaataaaaagaaatgatagagttgaaacttacgtattttcctactttggtactgtaggatataaaattttgaatgatgatacataagcatgaccaactaaactaggcagagcaactcta

SEQ ID NO: 164125 - DNA, 463 bp, Zea Mays
gggaatatgacaaagaagtcatagaaaaattccatcgctagaatcagggttatattatactaagattagtgcacctgcagtgtacacttccctaaagacggtgtttagacattttgaattattctctttatggcattgtcgactagggcaccctggtctttgaatgatgagaaatatcatcaataactcacaaggacattgcataaatgtgaaacacttcccaaatcaagaagattttgtgtgccagggatgtgccatgggaaaattgatagtgagaccatcccccttgaaagtaaagaatgaaattctcgccttctcggaacgaatccagggggacatttatggtccaattcaaccactttcgggactttttcgatattttatgctcttaatcgatgcatcctcgaagtggtcgcatgtatgcttactatcaactcgaaaccatgcatttgcaaagttgatc

SEQ ID NO: 164126 - DNA, 333 bp, Zea Mays
ggatcgacctctggtttgatggtagcctcaagcaaccgaagctactagatctgcagggagaagaagtcagctacctcaattggaggcactaaggcaagaagcaatctggtaggggtctgaccctataaacctagtctgctaatatattacccaaagttcggtaaggtcgctcgcgtaaacccagtctctgtcgccttctgtagtcgagcccggtaagagcagcccctataaacctgatccctcacaatctctacgcaaggtctcacatatccagcaatgaagaaaggtgcgtagtctaggtgaattagctctgtcatcatacccttagccgag

SEQ ID NO: 164127 - DNA, 530 bp, Zea Mays
gccgcccatcacaggatctaaggccattgcttctcttccctactgagcaggaagcaaggcggcggatcaaggtccgcacggtggcacagcggcgatgcggcggcctagtgctccgaatctcaattaaatgagccctgacctcacaaaatatgcagcgatcacaggggtaccgacaatttgactatggtagttgattggggaaactgcacatacgctgaacatcaactcgccggtaacccacaccgacgaccccaaatcatggcgctagaccatggtctcggttacgggcatgccatagatgtagaaggacataaggcgaaacgcaatacgcaatgctcaccagggtttgcggcgtgaggatccctccactccgacgagcacgacgcatgcggtcggcggcggcacagcacccggcggagcaatttcctcccaagcgatgatggctgaggtggtagaaaggaggggagaatcacgggagtcggagggacccaggtatcccggtcgagcgcatacttatcccatcgcaagga

SEQ ID NO: 164128 - DNA, 939 bp, Zea Mays
ccctcctcctggagcgcttaccagaggcagtggtagatgtgctagcatccaccgtcgggctggtggatccggtgcgcatatccaccgtgcctggtcctgtctccgttcccgcatcgtcaccaatgccatcaacctcgatggcagcagctgaactgctaccaaggaggaaacaccgatcatcatcttgctcattctgagcttcaagtagcagttcctcggcctctgcggctttaacaaactcgtcatccatggaatcatcatccatggacattgccgctagcaccagaccacccacacagtcggtgtcttcggctacctcacggcaagtgccgagatgagatcttcatccaaagaccaaatcaaagcaaaacatatgagtaacggagacaggggtaaaggtaccagatctagaaggttagggtatcaaacgtttacttgcgttgtcagagcaccagatccacctactatgggacactggagtaccgaaccaaggatggtgtcatggcacaacacttgagcttgagcagatcgagagacgaggggagtcgggagcagactatcgattacggaaacgactgggagagccacagaggaaacaatgagagagaaggagcagcagatccaccgactacggccatgagactgagtcaccggagtaccagaccaagccaccaaggatggcacaacacttgagcttgagcagattgagagatgaggggagtggacgagcaggaaatgatagggagaggaaagaatgaggcatagagcagtacaacgatgaagactcgccggcaaccgtcaacgccgagattagaggcgaggcgaaggcggcggcgatggagcagacgaagacgaccagtggaggcgccaggcgatggcgtatgcgaggggagagctgctagggtttcgcgaaccagtgaggcgagggcggcgtttgcg

SEQ ID NO: 164129 - DNA, 644 bp, Zea Mays
gggaaatgccaaaggtaactatcaacaagtgtgacaaaggtgggctggttaggttgaaatacaccttcagatatgtaggtaagtttgttgagccagatgatgattggctgaaatgtatcgaagctacaagcgatgtactgcttgggccatattcaaaggcagaagataacgtgttatctgcggccttcggaggccggaagaagaagaggctgaatagagttttcaattctattgggtttatgtaccctaattaccgctacccgccgaaagggcaaaagagaaaaagtgcaacttctgggaaaggtgatgcttcagctgctctaagcgagcccgcgccaaagaggaaaaaggtgaaggtcctcactcaccgaccgcgcttcattgaaccggccacagtgcccgaatttggtggtgagacctccccggctactggagccaaaggacctgctcttacacagaagaatgaagagccgactatgatgccgaaggccgataatattgaagagatagaggccgagaaaacaatagaagttataagcccttcggcaggaatgacagtgccgaaggcacaaaaagatctcacggcgactcccaagagaaaaaggatggtcaatgtactagatgtgctggagacaataaagtct

SEQ ID NO: 164130 - DNA, 820 bp, Zea Mays
ccacgcgctctggttccgggctaatggcgccatgatgcaggagcggcagtggtggaggctctgtaggtggcggcccctggtacttcttgagcagccccacatggaacacattgtggatgcgggcatggggaggaagctctattcggacggcgacctcgttgatgagttcgacgacacggtacggcccaaagaagcgcggcttcagtttgccgcccaccgcctgaggaagagacgacgccgcgcgctgacgtagtcgaagcagcgcccaatcaccgacttgataagtgacatcgcagtgcacacggtcgtagtggcgcttctggtacgcctgtgcctgctccagacggtagcggatgtccgccaggaactccgtgcgctcctccatgctcttggcgacggccggcaccctggtttccccgagttcataggactggatggagggaggatcacgcccgtagaccacgcggaatggggtgtcccgcagggacgtctggtacgccgtgttgaagaggaattccgcccatgggagccattggagccacttgcacggtctgtctcctgccaagcaccgcaggtagatgaggatgacacggttggccgactcggactgcccgtcggactgggggtgaaacgccgtggtcatttgcagcttggtccccatcaaccgcatcaactcctgccagaacgttgacgtgaacaccgtgtccaggtcagagaccatgggctgtggaacaccgtggaggcggacaatgtcgttgaagaaagcttgggcgatggattcagcggagtacgggtgtgccaatggaatgaaatggcagta

SEQ ID NO: 164131 - DNA, 612 bp, Zea Mays
atcagatagttcatgaagacacatgtgaatgttttctgcacaaaaaactctttaacactttagtttgttgtgcattcgtacttttgtgccttagaataatatggatcgattagtcgatcagacatcctaatcgtccaagactctagaaaccgaccaacctatataatacgcccatatgctatggtgttgcggtggacatggcttcagacactgaaccgcgggtggagtaggaattgcaggccgacaaacaggcaacagccatacgcccatacgtccatgaacctatcttgttaggtcgagatattgttggtgggactaatggcagagccactactcagacaccctataggactgctaggtggcaatgtccaacccaatcgcgcgcaacaaagagcaacagtagcagcaccgagccaggtcagtacgacctcttgactccaaaatccccaaattcaaacataccgaacaaggaaatgattagaggatatattgcatcccaaattcccaacctctagatctcttgtactgctctcctctacccagacataaaaaatatgaaatcaaaggcacctccacccatcatcgccacccatgcttcttacctgtcctcgc

SEQ ID NO: 164132 - DNA, 708 bp, Zea Mays
cttggagctatgaatgagatattgaagcccatactacgcaagtgtgttctcattttctttgatgacatattggtatatagtcaatcatttgaagcacaagtgttgcatctgcagactgttttgcaactattgaaggatcatcgatggaaggtcaaaatgtccaagtgtgagtttgcaaaaaaatcaagtagcttatctgggatatgttattactgcacagggtgtagctactgatctggagaagatcaaagttattgagaattggcagactcctactaatgctaaggagcttcgtagttttttgggtctcgcaggtttttatcggaaatttgtcaaaaactttggtgtgattagtagacccttattcaacctgctcaagaagtatgccttattcgtttggacccaggatcatcaaacatcttttgacctgttaaaacaagcccttgtgtcagcaccggttcttgctttaccagattttacaaaacaattctgcatctacacagatgcctgtcagacaggggttggagcggttctgatgcagaatggtcatcctttagcttttctcagcagagctttgggacctaagaaccagggtctatccacatatgagaaagagtatatggctatcctactggctgtaactcagtggcgttcatatcttcagttcgcagagttcatagtttatacagaccaccgtagtttgtcaca

SEQ ID NO: 164133 - DNA, 913 bp, Zea Mays
cactgcacttaggaatgatgtgcaagcgtgccaaactgctttcaacatagtgtgcacctatattggcacaagagacttagttcaagagcttattgcttacaaagtatagcctcttgcaagcaaatgggaaatgccgaaggaagccgccgctggttctagctagggtggcctggtttatctgaagtatacttttcggttcagaaaccagtttgatgagcccaatgatgattggttggatgctatagaggcaacaagtgatgagatacttggagcgtactcgaaggcagaagatgaagctatgatggttaccttcggcgctcgcggcaagaagaggttgaatagagtgtttgatgttattaggttcgtttacccagactattgctatcccattcagaaacaagggagaaaaaggaaagtcgctgcttaggtatctgctagcgcgccgaaaacaaagaaaatcaaggtcttgacacacagacctaggcgcatcgagacggtcgatgtgccaaaactaattgaaagggcagaaactaccatcccccagttacagagaatgcttctgctatgtctgttgaggtcattgcagacctgatcagagtggtggaatcagaataggtagtagagaaggtaccagaacagaataagatgatgatggtgacaccgctgccgaagctgtcagttgctacaggaacattgaggaagaggaggatggtagtgttttggaagctgttttagagtctgtgaagacgccgcctccttctatcgacgttctagcggcaaaactgaagtgtcacaaagatgatcatcgccagcacttctgttcatgccgaggcgggaccttcggatactgcaccagaaaatcttgcggaagagagtcttccagaaaatccctcggcgcctgcttccgaagcgc

SEQ ID NO: 164134 - DNA, 522 bp, Zea Mays
ggtcggagctgtcctggccacgagcgcaggcggtggaggtcgtcggtggctcctgctccggccaaaccacggcggtagggttcaattaaagcgcacgaggagctccacggggtgatgtagaggccatgcgtgcaacgaattgagaaatggtgcagaggtttacccggtccacgtgctccgatggggttccgaactccggcgagcacgattgcgctattccggtggcgcgggtccttggttcaagcttgggcaagcatcacggtctcctaggggatctatccgaaggcttggatcgagcggaggagggcggaaaaggggttggccatggtggttgccctcgggcggctctggcgggtcgcggggaggtcaccggagctatgggagagctcggtggagttaggcgtggtacagaggaggcaacggggatgatggccgggcaccgggtgggcttttatagccgcggcgcgggcgtggtcacggggcatccgcgagtgcgtggggattcgcgtgcgggcatgctct

SEQ ID NO: 164135 - DNA, 275 bp, Zea Mays
aagatttaggtacatgtgtaaatgaatggaagtagttttaccgttttgtaccttctcatagagacgctctcttcattgtgctttgtccttaatcttagttgcttaagacctatattcaagacaatgtatggaaatattttgcacaatagagagttctacaactagtgatccttctccaggtcattgttagcatatattaaatggatcacaaactgcataaatgtatcatgaattctcctttgaacttagtgcatatcaagagatatcgattgata

SEQ ID NO: 164136 - DNA, 424 bp, Zea Mays
gaaatggctgattgtgtttttctgcagaactatttagaacccatagctcttattgaattgtacattagttttgtgactggaagtcgtgtgtttgcagtcaattgcagacacatgatgatcttgtttgttattgcaagaacctgagtcttgttgtacttatctgctctcaagatgttcttgtttagattaactgaatctgtctacttcttctgatactttatacgcagtctgcctgtccgagctttagcctgagttcctaatatgtgctgcaccccctccccctgtccgagctctagcctgaatttgtctacctcttccgattccttatatgcggtaacaaattgtccacaatgattgtagcatattactcattaatatacacttgtgtgtgaacctgtttgtttgcttgtctgctgcctgccca

SEQ ID NO: 164137 - DNA, 611 bp, Zea Mays
cagtgggcaatctggcatttgaaggaactgcaaaacaggtgtcattcgagttaataagctaagaaagtcaacatcatttgctaccccatggatttccacacacaaaaatacaaaatactgcaacatgccaacattatttgcagcttaagatcccatatggtgttgttaatttggtctagctatatatgaagtgactgactccatgggcatgtggtttacctccctgttgggcagatatcagactgagacaagctggcatggttgtagactgcgacaaagattgatgagtgatgactaatgaggaaccaaacaaatggtgagttcattatctagctaggatgttactgttttattatctaaaaaactcgctacagagttcactttaacttgtgttttcccctttggtttaatttgtttctaatttcctcctagctctatttgatataataatcactattgtgtcattgccttgatgccttttagctctatttaatatgataatcactattgtattcaatcatcacttgttttcagggcaaaggaagagcattttgtgctggttgcgatcttgcgcaaaggcattggtatgtgctggatttaaattgagccct

SEQ ID NO: 164138 - DNA, 501 bp, Zea Mays
tgtggtcatgagaaaccttgtttatttgtgatgtatggacaatcttactaaagcatcagctctatatgtgttaattaataagctttaagaagttgggtatataatcttatgttaatactaggaaatgtcttacacatcactactttgcttttagaagatggtagagatagagaaaataacttggagtatggtatgaaaaaagtccagcaaatttatacacatgtaacactcaaatttgtcaactaaattaattagatgggttgacatgagtcctaatattggaggatgtatgtaacaacgttgaaaatcctagagccaaaaatatatacttacattttttcctaaaccttacttggtaagtgagcatactaggaaccccaccctagatgcactagtttaaccctatttagatttgtggacatgtgtgcattaaagaatatgtgtttgccacttatttgtttatcatgaaatgtcgataaataagtgattaacttttatcaa

SEQ ID NO: 164139 - DNA, 764 bp, Zea Mays
gctgtagcgcgcggaccgttggcgtcgcttcacgcaatgcatgtatagagtcgatcggtggtcacttttggcagactccatccatgcagatgcaggttcttgaaagaagtaaataataaagctaaacaaataatagacaaaaggaagaaggggcccgtaccaatcatcaccatcatcacatgtgggtatggcacgccgcagcgcaggttgattgatctttctctcgtctcgtccgatccggcgtacgagacatgcatgccgatgaacgacgcgtcgatgctgggaagtgtgtgtagggatatatatagatagagatagggcccggggcaacgagtcgtccgtccgtcgacgatcatgtgctggcacgttgccgcggccagctttccaagcgacaccgtccggatgcttctggcctttttatctggaagaagatgatctagctagcgcgcgcgatcggccaacacgtatgtagtgtaggtgcctaggtggcctccggagtaatttatcaagcacaaaagtgagctgtgcattgcatctatccacagtaacgccgccgatcctacgtactaccgtgttctctagcaattgttaaacctgtgccacccaagtcatttgttattttttttaatgatggcataaaaaatcgaggtggctggcagcgcgcgtacaatatgtttccgggatccttgttccagctgccatgtcgtgccgtgagaatgaacatcgattgttttgattaaacatccgtacagcaaaattccctg

SEQ ID NO: 164140 - DNA, 446 bp, Zea Mays
gttggacaataatagggaaaaacgagtgtcatgtatagaattacccaatctaaacaacaaaagatgtgtgtacccatcactagttggcatgatcagaaccatgtcatctacacttatgggcactaatgaggagcgatgatgtggctcttcctaaactgcttccactcaatttctaaacaattcgttggttctccactcattcggtccacatcaacgtcctctccaccctcatactcatgctcttcactctcaaactcctgctctccaacctcatacacctattttctaccgtcgtactcttcatctttatcgtgtgatatttgaagcgcttaatgcctatatcttagcaacacttcccacctactagtgctaaacaaactccctaaaagggtattgctcatcctattcacgactccctttgctattttcttgatcctacgatatat

SEQ ID NO: 164141 - DNA, 338 bp, Zea Mays
atagtcttcgcgatagacttcgttttttgcgcacttgttgtgctgagtccggctgcacccttaggcgacttctgcgcggatagtcttcgcgatagacttcgttttttgcgcacttgttgtgctgaatccggctgcacccttaggcgacttctgcgcggattggtcgcacgcgagggtggctagcgcttagcctcgcggtgacttcgaattggtcgaatgccgaagaccgttgttgcggtcttttttcgacacatgcttttgcgggggattttttctcacatatattacatggctccgcctcgttaaaaacctcaccccccgggaggaaaagagtgcgg

SEQ ID NO: 164142 - DNA, 354 bp, Zea Mays
tttctcccacttcactcacctaaattcctaggtggaaagcctggagcagcaaatcaaggaattgaaggaagaaaatacgactcttcaagacagtctcgagatggaaaagacggggaagccaacactcgtgaggcatatcggaccctgaagatggactatgctaggaggctgaagaagctcgccctcatcaagaagattcggaagtgtttcaagagccaaggatgctagactaacctgaaggaagaagccccaccaacactaccctccctagggatagagaacttttccgacattgaggaagtgtctctagctagccttgatgatcttctcagagaatttgggtacactttagta

SEQ ID NO: 164143 - DNA, 652 bp, Zea Mays
gtatggtccagagcaaaggtggaaggagcgaattaacaactccatttggaagtctggatcgtcggctgagattgggagatagtaccctgctctttttggttgtgctgttgtgcagtcgagataaatctgtgcaggtgcagtgtaaggggaagagttagggattgctttgtaatgtggagactggagagaggtcagagaacctttattttagtcttgtgatacatttgagtttgggggttcgtctacacgtctgctttaaactggtccaatatcatctgtgaactgtggtgtggtgggggcggcgattcctacagcatcctgcagaagcttggtcgaattcttttcatttgaatgcatagcgtgtagctaggggacatcctaaacatcatccaaaagcaagcaagctactaccttcagatcttaaggtctttatatttaagtttctagatcaccttcagcttgttgttctagactatgacgattttaatgacaaaattttttttgtcactatattggaccacctctcagaaatgtgaagttgtgactaaatcatcaggatgttaatcgcttagagaaaaaagtatcgaactatattgctcacctttccttaatatacaaccactgggatatccaatgctgttagaatgaaaat

SEQ ID NO: 164144 - DNA, 639 bp, Zea Mays
tcaagaacacaagcacaagagcaccaagatataacaatcaactcaacatgatcacacaaaaggcactatcttttttagctcaattctcttgaatctgacaattgtgtagaatttgatgtcttggagttgttgcaatcaatgtatgaggtctgtcctagcccttgtattgaatgggagtcaatgattgcttggatgccttgaatgagttgtttgggggggtatttatagccttcaaccacccatatagtcgttaccccttttctagaacttctgtgcactagaggacaattcacgacctagacctggacagtctggcttctctcaacggctagatctgacatctcaatggatataactaacaatctagtggctagaactagcagatcaatgattgtcttgccttggtgacatcagacaaacggtccaccctctggccccaaacggtccgtgacttgctctaaaattcatttcttcaacttatcacctttgggttgcgccagaattcaataggtggacggtctgcgaattataaccaaatggttcgcacatgggttcggatggtactccacttggatctagtcagtccgtagtacaagagcttggtatgccacagtttctatccattttttgatcttggta

SEQ ID NO: 164145 - DNA, 419 bp, Zea Mays
gccctgcggtgatgctcggttgctgcacttcttcgacgaaaatcctaggtggaacctaggcccaactggaacccagttttgataatgcgtctgctgctgcattgcgatccctctacacgtggtggaattccaagccctcgaatttatcttccagcttccgcaccgtggcgcaatatttgttcattgagtcggttgagcaatcccagtccttgtttacctggctaatgaccactagcgagtcgccatataccattagtcttttgacgcctagcaagatggcgatgcttaacccatgaactaaggcttcatactccgcatcattgtaggaggctgggaacaagagatgaagcgcatatttgagttgatcaccaccaagggcaatgaaaaggattcccgctcctgccccctgcagcctcaac

SEQ ID NO: 164146 - DNA, 463 bp, Zea Mays
ctcgcatgaaaatgctcagggaagaagcacgctggtcggtcgacggtgaggctgtccatggtaccgatctgcggtggcgcgaccctgttccaagcagcagaccacggtagagttcaaaagctgagttgcatgagtttcactggtccaaggagagcatgggacactcaccacacgactgagaaagctctcgaggaacctgggccacggtgagggggagggtcagctgggcgtggtcaccaaactgcagagatggcacacagctccggggcagaccggacttggtgatggaaaggggttactcagacctgaaaacgagaactcctcctctcacgcgatggacacgagctcgagttcaagggcaggggaaagactccacaaaactaagccctaaggtgactgcatccagggacagacatccgtgagcccaatattaagcagtggagagtattctccagggtgccag

SEQ ID NO: 164147 - DNA, 567 bp, Zea Mays
gaaatgtttgatataccacctagctccagcgaacttttttgtcaacaaaggaaaaattaggtggtgatttcatattggagagatttaacactgggaagagtagggcacattgtgttgatgtccttacgcaacaagggtcattaatcgcgctatagaatggaagtgtatgggtcaaatgtgtcattatgtgaggttttggtggagaatggatattaaaagtacttttatggtcttggaatcaatgaacaacgatatggggtcgatatggacgcatccgctagtcaatatggcaatggatagtcagttggcacatgatccacttaatccttctctaatgaaagttggtgaaactatgtggtgttcaagaggcattttcaataacgactttgacatgggttcataacaagtgggaggaacagaaggaagaatgattggtgatgataataataatgatttagatgactccgaagagtaggacattgattatggagaaggtacctcagaagagtaatttaatcactacctaggatcaatggaggatacaatgttcacaaatttgtgtgtttg

SEQ ID NO: 164148 - DNA, 708 bp, Zea Mays
aggagaaggaactccactactttcaccgctggcgatgaactgccgactgtttttccgagtcaaaggagcttcattctcttcctcctcatcttccacagtgacaacacaagcagcacccccattgggatcagcaacagataaggcacctacattgggatcagtagcagtttgggtacacccattggggtcagcgtcagtaggtccagtcgcaggcacttcttcagcggcaggaactaaggtaccaacgtcttcatcaaaactggatactcgtcggaggcgtcttctcttcttcttttgctcatcagcagaaggctcaggctgattggttcggctagggcgcctcgggcgagtactgacaggtttctgaacatccaaagttgtatcaacctctggaaggggcacaactgccaaagtaccagcaggagcagcgtcagaagaatcctcagctagcagatcaagcatggcatttatatctgcatcactagggttcaggggcacctcaaaatggacttgccgttcgtcatcaggaatctccccaagcgaagcaaccaaagcactgacttcttcagcagagggtcgcactctaaggcccaaatttccatcagtcacaggtggatttgacacgaaaagggtgaaggctttgggaggaggcaggttccaggccgagtaagccaccggagcaccaacatttgacaccttacccctgag

SEQ ID NO: 164149 - DNA, 499 bp, Zea Mays
gcattttctatgaattatacaaactctaggtattgtttttattttaaaaactcattttctaattcatttctctgatttaataacccactggactgggccaccataacggaaaacagcaggggtctcggtgcaagagtttataagactcagagaaccccaggcatggacggcgggttgattcgtatttttcccgagggctctttagcaaatagaacccgcgaaggggtaagatctaatgtgagccgcacgatctaaagtctatggcctagattagatcgcctaaaaccgaaccggtatgcagccgtagtccttggatctgaatccgacggtcacggtttaatgaacccgcgatcggatttctaccgtacatcgcgagatctacggtccgagttcttcctagccgaagaggtagctaccatctaatcttggctgcccatcatcagatcaatggccacggcgcatccgcactactgacggccacccacggcggcgctccccg

SEQ ID NO: 164150 - DNA, 441 bp, Zea Mays
ctcgtcagaggtgcagcttccttttcgaacggccgcgcagatccaccacgttgatggcgatcaaagataagctcgatggagccgacgtcattcggccaccctatcccggccgtcatatcaaataatgtgcgcgccgttccattgcaattgcaattgcaatgtgatcggcgtgcttctgccgtaggtaggtaggtaggttggggacgcttgttgctatctggttggacgtcggatgcaggctgatactatcgcttaattagtagactacttgctcagctacggagaattggcgattgcttctcgctcgggaaatcaagtccgtctgcaaattaaggtttcccggttgttttgtgcgacgaaagaagtttgccaaagtggctcttcaacatgaggtgtctgtgtctcttcaacaaccggcagcgtgggcaagctaaggtggcg

SEQ ID NO: 164151 - DNA, 566 bp, Zea Mays
gagggtctagcttcagaaatagtctgcgccattccggcctcgtcagatttctttgaaactttagcctccgtcctaggcgcttcgacagaagcaagagttgatgttttcatagactccattatagcatctagcacattagtcattctcctttttcttggagttgctgcggggatgtttggcggcttcggcagttccattgcgcatggtggactcagtgccttcgactgctatgatgttttctccactttcggctcttctgtcacatttgtcctagctttgactggcacaaagcgacttggttgagagataggagtggccccctcaattagcttcggcacgacggccgtttcaatgcgcctaggtcgacgcgtcaaaactttaaccttttttgacctcgacgcgctagaagtcgtcaaggtagcagctttcctcttcttcccttgcttccacgaaggataacagtagtctgggtacacaaacccgatgacatcaaacaccctattcaatctctttttgccccaagcaccgaaagcagttgtcatagcttcatcttcggccttcgagta

SEQ ID NO: 164152 - DNA, 378 bp, Zea Mays
cgaaggctgcagtcgttaattgatcttcttttttggtgtagtttcccaaaatttcattgcacattgtctcaatcatttctagccactcttggcaaggctccttgaactgtttttcaaacttaaaacgataaggcagtcgcacaagctcaagtgttttcttcgttccctttagattcggtatgctaaattcacttagcgtcggagacgtcctgttagccaagtattcttgaactagatctctagtgctgatctattcagccaccaccctgaattctgatacagacagttggcatgttgaccctggcttcatgttgcacaaaggtctggtcattccgaagctcaaagccagcgggcacatgaccatcatcatcagtttcc

SEQ ID NO: 164153 - DNA, 507 bp, Zea Mays
ttaggaacgcctcgtcggagcaagcagaaaaaaaacgggatagagaggtcagagatggaaaaggtgtgaccaccgctgtcgacccgtgttctcgctatcggcgaagcctcaaaatcagcccaaggaatgtcactacgtcaccgggggtgcgcccgtggtcgagtcaggagaggtcgtccagcatggcggtctcaattgctcaccagagcaagttctccgccacgaggccaaatcgcgtcatcaccagattgccctgctgcataatcatcggtagggagcttccccgttgattcatggtaaccttcgcatcgtatcgcatcggattatcgttggtttagggtctaggatcgccgggatgcatgtctccggtgggagcactgtcgtgaggcggggcggcggcgcctttgtgtgggggcgaatggaggagataggcgctagagcattgatcctggattggatggctccgattgggtgaccggataccggttcatcccatttgatccgggc

SEQ ID NO: 164154 - DNA, 997 bp, Zea Mays
tccgcggctagattaacggattggattgggtgatgagactctatgccaaggatctaatccacgtcgtcaatttcgtcatccacgaccagtacgccttcttcatcctcccgagtataggccgaccggcgcaggcacatcagccgtggtggcgccattactagcgcatagggtccacgtgattccacccccaaacacaagaacaatcgatgccctacgacgaggagaataacgcaaacacaaaaagggcacttgccggagacggacatcgccagtgtacgttggtcacggcaaggggcgggtccgcggttccccaatctcaccggtgagcaatcccggtcggagacagccgatgcactgtttgataatgtgacacgcagctccgtcatgttacgacgaagctccagcaccacccttcccaagtcttacggcggtcgacagtgaacacagaccctctctcctggccccgagcaccgcgagtgccggcgagaccataaaaaccctcagggcgtattcgttttggccgggaacggcgaggaatgggaataaaaccacgtggatctgcctggtctggaattcttccccacccatggtagaagatgtgttcggttaacctactcgaggatccatccccggtcgattcccggcttctaccctgtccctggcccgggaagcagcccccgtccgaagggtgtggaaagaatccacagagcacgacgccgagcgggcatcggtgacaacgcaaggcggcatgacagcggggctgcacacgagcggcgacggcagggctgcgcacgagcggctatgggggctgcagcacggatctggccctccctcgcccgcactccgttccgcgcgccgtcgcctcgagcctcccctccaatttcgtgagtctctctcgcctccggtcaaatcgaacagcgacagcgacctggtggtctcccattcgcatccgacagctgtcttctcactggtagtcgtcaccctcctctaccttctc

SEQ ID NO: 164155 - DNA, 525 bp, Zea Mays
aagtcgcctaagggtgcagccggactagcacaacaagtgcgaaaaaaccgaagtctaccgcgaagactatccgcacagaagtcgcctaagggcgcagccggactagcacaacaagtgcgaaaaaaccaaagtctaccgcgaagactatccgcgcagaagtcgcccaagggtgtagccggactagcacaacaagtgcgaaaaaaccgaagtctaccgcaaagactatccgcgcagaagtcgcctaagggtgcagccggactagcacaacaagtgcgaaaaaaccgaagtctaccgcaaagactatccgcgcagaagtcgcctaagggtgcagccggactagcacaacaagtgcaaagaaaccgaagtctgccgcgtagactatccgtgcagaagacgcctaagggtgcaaccggactagcacaacaaaagcagaaacgacaacatcaaaccgtccgcgccgagaccgactatacgcgcaccagcacagcataacaaaacacaccagaccaagtacacaacaccttc

SEQ ID NO: 164156 - DNA, 667 bp, Zea Mays
gcgctgtccggtgtgcaccggacaggcactgtagactgtctggtgcgcccataactcgtttttaaaaaattctttcctgcccgaggccagggcatttctctctatccctcagcagctctcccttctctctggcgatctcctcagctcaccgccggcgaccaccatctccggcggtgctccggtgatctcctccagtgtgggctcagccttcttctcccttggtaaatctatcctcagcactgcctgccactcactctgtctgagctgaaaactctcaatcccttccacccttttgattcaaattcaaatcctatccaaatcttgtgattcaaagttgttgtgtaggtgccttgtgccctattggatccccctgcaggtcttgagctccttagggacggtttctccacctcaaatggccatttcccctaaaacataatccaccgcacgccacgtgctcgatgaaatgcccaaaccagccaaaaatgatccaattgatcccaaatttttcaggcactttcacaataccactagtaacatagtcgcaaaatctcatgccaatccgatatcccaagcttcaattttactcaaatccccttttctagcgatcgattccgagccaagtgcccaaattccactttcttcgcctaaaatcaaaccaagcacacac

SEQ ID NO: 164157 - DNA, 731 bp, Zea Mays
gggcaacaggatcgacgtctcttggacgggccacgctcttggccaacggctgggggctctctggctggtgcccacatcctatggctagggtctccccttcggtccatcacatgtctacgatcggtggcggtggctcgtgcggcttggacccatgggtgatcttggtgacttttttccgctcccgtgtcttcattgctttgctagtgtgatgcttagaaaccttgtgacgtgagtcgtcttagcgtcgatacacagattcgcttactttgtgatgtgatctacctttagatgtgtactatggactagattatcgtatgcctatcggctagttcgagaattagtcctcatagcacccgacatctaaagacgagttgtctgttacagagtttgtggttgttgttatcagctaagattaggtagtataatagcgctggcccggatagtgggtggtggcatcgttgaatcctgatctttgacctcagggagatatccctaggcatgaccttagttggttgtgcttggcaatggccttgctggaggcattgtttgttggtcaaggattgactctctgtagtgaaagcctttggtctggtcttcagtggttggaccatgacaacgatggtgtgtgtattatgttctccttggagatgttgtctttagagagtcttcgttaggacccatgttttgctatgttggtggtttgttatgaagacaacagagtgtgacgtagt

SEQ ID NO: 164158 - DNA, 400 bp, Zea Mays
gagagcaatagagaggaagggagagggcaggggaggttccttacctcaaggcggactccggggactcctcggtggcggtaatggcgcgatgacggcccgggtcggcggtggcggacctccgcggctgcacggaggacggcgggtgagcgcgggcagagggaaatagggagggggaggggaaactggggcgcgtcccgggttgcggacgtcgaggcgaagctcaccgtggcagagagcacggcggagctccaacggcgacggggaaacgggctcgggcggcgatggttagtggcggcggcgctttggcgtgcgcacagcgagggggaggtgagagaggggtctgttggtgcacaaatgagggagggggatagggcaagtggggttctgggctcaagtggcc

SEQ ID NO: 164159 - DNA, 613 bp, Zea Mays
agactttgacgttactttgtagtagcctttcctgtacgatagcgtatacgagtacaaattttagcgtaaatcgtagatatgttttgtatggcgaatggggccgaaaattaaggtgtggaaatcgcgcacatccgaccgtgtgtgtgttctggctcgagaagattttagcataaaatgtgaaccaaaacaacgtaaatagatacaaattttagcttaaatcatcgatctatttcgtacgacgaatagagcccaaattacagcgtgaaaatagcacgcgtacgacagtgagtggattctggccgagtaaatttaagagtataatgcgaatcaaaacatcgataatgagtcccagcgcgtccgacacgtcctcaggggtcggtcttgaggactagcgtgtcgaggatagcctcggagtcgggtgttggagcctcctcgccgtcgtccatgaacccggaggtggtgacctcgaccatctcgtccacttcacggtcccaccatccccctttcttcagcattgaccccagcttgtcgaggtagctttcgacccaccgcggggttggctgccggggtggcgatgggcagcctgaggaggacgacgacgatgaggaggcgg

SEQ ID NO: 164160 - DNA, 350 bp, Zea Mays
atggcacgatggatcacaaattgccctagctaaaaaggttggccctttttacttggattctcttgactctgggagtcgttttcctatatctggatttgtagatgacctgattactcttccctccaatcacactagatgctcttgagaagatatgctcaaaacttagacttaaaatatttgtgtcaaaatttgaataaatgtgtttagattgtcttaaatactaaatactatcaaacacattttttatacctttctgacccatgcctttgtcttcagcttaacctgaatcatcatattattggaggagagcttctagaattgtcagaaaatgaagtgcctcctgaacatat

SEQ ID NO: 164161 - DNA, 513 bp, Zea Mays
ttcaaaagcttgatatattgtcctccataaaaacttactttatatcaaaactcgtctcttttattttcaactcttctagtctgattttggtctatcagaagactctactcagaaggactacaagatgatcaagttaggattgtggaacttgaagtgaagtctaccggaaggaaacctttagaagctattgaagatgccccattctctgtcttatccccgccccacaagaagttttcgttatagatctcttggatctattatctgacttcttggctaggttgataggattgttctttagtattaagattttcgactagatcggtaatggtgatattatattataagtggttttctaatccctaatattgctatataacccttgacttcttatattttgttttcttgtcattgtattgtcatccttgcgcaatatctaccttgatatatattaaacttttgcctctctacttttctccttgataatgatttctccctattaaattcttacacttt

SEQ ID NO: 164162 - DNA, 682 bp, Zea Mays
attctagaggggctcatgtgtaaaacctactcggcgaaagggtatcaggttattaccgtcgcccgatctaggatcgagggtccagattagatcatggttttaattgaatctgtacacaattggcaccgcacgatgcccgatcagcggtcaaggacacgccacgccacccaccaaactcagatcgcacgatcgccatccaacgcccacaactgaacccagggaatcggtatttcccccaccgatcctgaccgtccgcctgacgatcaacggcaaccagccctcgtcttccccctaactagctttcccctaaataagcgacggcggcgaggaccaccgccggagatgaaattctccgacccgagcgcatgagaacccaattcgactggtctacacattgcgggtatgaaggcggatttgggtgaagggttcttaccaagatctgtctgcgcaagtaagccgaccacggagaggggcggaactgcaccaatcacacgctctgacgtgaaattcctgccgattcggggtcgaccagcacatctcgagagcacggacggatccaccgggcaccggcgcactcacacggccacacgcagagaagggaacgtcggcgtgggtagatttcaccggcggcggtggagttcttccgccaaggcggctttcggtggagaatttggggacgacg

SEQ ID NO: 164163 - DNA, 2102 bp, Zea Mays
cacggtatatccttttctccacattgaaatgtcaaggaccccggggcccaaggtagcagggcctcgactatgaagatcgtagtcgcggtccgtggtcgccggccgggttatacccccacgccgccgtaccccgtcggctgggttatgccccctggccaccgggttagatgagagaggaggaagagattggataggtaatttctaatttaattcctctccttgcggtacagggtatatatggcccttggcccaacaatctttcctaaacttaaggactaataataggaggcaacaatcaaatctcctaatttctctcctagcccaactatctttcctaaacttaaggaactaataatagaaggtagcaatcaaatctcctagccactttcggtggtcctttccttaaccaagcgctcggcgcgctcagcagcccggcgcacgtcacacgcccgacggcgtctagtgtacgtgcgcccccacatgacatctctcccctcctcaagaggcagatcgtcctcgagctggaactgagggtagtgcacggtgaaggtgtcgacgtcctcccaggtggctgatgttggcgaggtacccttccagcgaataagcacctggcgcacccctcgggccaagcgtgtcttgacagcacactctagttcaggcaccaccacgccatggtggaccatcggtaggggcggtgtagcttgtggttccgagccctggaacttcttgaggaggccgacgtggaagacgtcgtgcaggcgagcttggggcggcagatcaaggcgaaccgcgacttcgttgatgagttcgacgacgcggtacggcccgtagaagcgaggcttcagcttgtcaccgacgtaggaggcatggacgccgtggggcgctgccgcaggcaaaggaggacccaatcaccgacttggtgaacgacctgccggtgtccccgatcatagtggcgcttttggagcgcctgagcttgcagcagccgggcgcggatgtcctctagaaactcggcacgttcctccatggtcttagccaccgcagccacccgcgtctcgcctggctcataagaccggatggatggaggatcgcggccgtagacgacgtggaatggcgtctcccacagcgacgactggtaggctgtgttgaagacgtactccgcccaagggagccagcgcagccactcacgcggccgatcacctgtaagacaccgcaggtacatgatgatgacccgattagctaactccgactagccatcggattggggtggaaagtcgtcgtcatctgcagcttggtgccgctcaagcgcatcaactcgcgccagaagttggaggtgaacaccgtgtcgcgatccgacacgatggactgtggcacaccgtggaggcgcacgatgtcgacgaagaaggcgtgagccagactctcggcggagtacgggtgcgcaaggggaatgaagtggcagtatttgctgaagttgtccaccaccatcaagatgacagacttgccccgaacgcgcggcagcgcctcgacgaagaccatggcaatgtccgtccaaaccccttgcggcacggatagcggtagaaggaggccagccggctgtaggtgttcggatttgtagcgttgacacgtggggcatgcacgaaccatatcctgcaccaacttcttcatgttaggaaaatggaagtcgcgccgcagtcagtgcagggtacgttgcacgcctttgtgcccctcctcgtggacggccaccatgatttcctgaaggagggcgaacgagggtgggacgtacagccgcccgttgtactgcaccatcccatccaccactgcccatggcagtgttcgcgagccggcgtggatttcctcacgcaaggcgacgagagccggatcggactcctgttgctgacgaagccgctcaatgaagtcgaagcgaggtgcggacagcaccaagaccgcgtcgtcctctggcgtgtcccggcacgacagggcgtcagccacgtcgttggtgtgccccggcttgtactcgacggcgaagtcgaagcccaacagtttccccacccagtggtgttggggaatcgtcgagaggcgctggtcgagaagatacttgaggctgt

SEQ ID NO: 164164 - DNA, 386 bp, Zea Mays
cacattaccgcctaagggacggggtaacaagtcctagatgtggttgacaagtagagcctattactcgtccttcatagcatgacgctagtgaggatcgataagggtggtatgaacaaaagaaaacatgacagagaccaacggagaggatgtcaggaagaggacaaaatggtcgacaaggcaaagaaccctagcggcatatagagtcaccatcgggaggacaccgtgagggtctaagtgaagaagaggaggatggtacatcgctggctcagcctagaagcaaggcagggcactctctcgtgcatgtcgttgatcgacatgcacaaggtcaacatagtgggaataggctatgtcgaacgatggcactaagggaggtggacaacaatgag

SEQ ID NO: 164165 - DNA, 322 bp, Zea Mays
caggatccgatcgcgctttagctcttcgcttgtctgatccggaccatcgtgccccgatcggacggtgtacaacagataagctctttcgttaaatgttaaccgttggttcctgatcgggcggcccggattggataccggttcgatttagataacttctaatctgggccactggttttggatcggacggatcacagtgcctcgtaccccttcagcgcgactgttttacagaagagaccctacacttgggtataatcaacccgcagtacacatgccgtataaagtatttactcagtgacccagaattcttatagaataccccctg

SEQ ID NO: 164166 - DNA, 565 bp, Zea Mays
tccccggcgacgatgggacagctctagggagtcacggcgacgcggtggaaaggcagagccacacggcacaaggccgagaggcggcggtcaccggtgaagttatcggagtccgctgcggtgaacatggtactgtggccggagttgtttaatggccggagtctatccacggcgaggatatttacgcgaccccaagtgctatccggttaccagtgagtgcgaatcttaacggcggcgacgatcccggcgcgaagtcatcggcggcgaggggagcggttgatctgatctgtccaggcactgtaccatggcaatgcttaatcagtgtgtctgacagccaagatttagggccagattcctcccaattttctatggaaacatccccaagtctctgcatcaaagttgtagtgctacataccagctacaaatttgttatgggaatcatgctcaaacttgcattggatcatgtttaaatctgagccctaactccatgccattccactgttaatctgaatttcagatttcaagcagtctgacagtccaacttcaggctcatttatctcaaaattct

SEQ ID NO: 164167 - DNA, 716 bp, Zea Mays
aggccggccgattggggcaagtactggcgctctatgttggtctaaaccaaattcaggaccgagtgaaggttttccccaagttaatttcatagacaactacaccaaaaaaatctggccaaggtgagcgcgcggatgaactaacaacctacacgttcccggtgattcatgggatcttagcttaattgggcgagttggtgagcatcaccagcacacagagatgctaaaacaagaacaaggatggtatgattaaacctgtggaggactggccacggtgagctcgacccagcggtgtttaagaacagaattgggggaaacttgaaattggagctcatggttgcaagattgggagcgatactagacggtgtggtgcgtgatgaggttgaggagctaacggtgggctcaatttatagattccagggggcggtggcgcttgaattaaggatggcgcggtggcggccggagaggaaaagggctctggcgcatgacacagtggcctttcaccggcggtgagggttatccgagcgaccgacggctgggggggagtacggcatgcttagccgcaactgagctcgagtggatcagacgccgagatctttactgagttgtgcttatccatggccacgacgcacgaatcacggcaagcaatcgatcaacggcgacgggccaccggcgacgagatctttttttggcgctggcggtctgatcttcaacagagc

SEQ ID NO: 164168 - DNA, 313 bp, Zea Mays
gcgcggtccaccggcccgcgagccccgtgcgcaaggcggcggcgaaggagcacggcacccccgagcgaggcagcaggccggcgcgggtcatcagagacggcgggcccgacgctgagcgggcggcgttgctgggcggaggagtaggagcggagcagaggacgaagctggcggagggcgaggaaggcgcgctgggccaccagaacccctcggtggccatggagtgcttcatcttcctctagaggctagagctggtgtggtgctgctggtggcctcagtttctcctccacgtttttgttcgtctctcgcaaattcg

SEQ ID NO: 164169 - DNA, 841 bp, Zea Mays
ttttataacatcctggactgggcgccaattaccagaggcaacagggggcttagcgcaagtaaaccccagactcaggcagaccacccggtggactgcgggttaatacctaattacttcgggggcttttctgctattctgactcgcgaaggggtatcaaaggtttctggccttcggattcaaattctacggttacgattagatcgtcaaagcggccaaacggtaagcagcgccaaccctccgatctgagatcaagcgccaggatcgctcatcactagaacgaatagttacgcgatttgcggccgctggaccgaccatctacagtccggattctattgaacgaaggggtattttgcactctaatctcagccgtccgagaaccgatcgacggcgcctggtccatcatctacccccagccgtgacagacgacggcggcgccagcatccgtcgcactgctacggcggaggagtccggcgagcctcccctcaaagcgcacacgatgctccgattcactatggacaggtgcaaaacgatgcgaacgaccagacgaacgaggtgaggaagtgttcaccttggattatggcggcagcggttctggccacgcggagacgaagatccgcggtggagcttgactacggcgaggaattgctcgccaccgggggaagttttgcccaatgcggtatgggccgaagcttcgtctcgcctagcaggtacccaggttccagcgcagaggaccagtcgcggtgttggtgagggcagtcacggcggcggacttcacacctccgccgcacgcactaattcgcacacgtcagggttctaatggttgagcacgagtgacggctcg

SEQ ID NO: 164170 - DNA, 1768 bp, Zea Mays
aaatttaccacctgcttgctcaccaaacttgtcatggcggtatatgatagggaccactccaacttgttgttcaagatgacaagttaagaggtgagtctatttccagacatattctcataatctttattttgccagcaggagcagctgaaattattgacatttcttgtttattttcatttcataatcaccttaaatttgggcaaatcctatcgcttcatgtcttctgtttgtgaatcctcttttcatactgcactctgtagatttgcatagcagttatactatatgcatctcaattacatttagacatggatttagtcttcaacatgaaaccaaacctagtaattcatattcctttttctttcacatgtggtttaacaatttatgccaaagtggtattagaccattaagcaatttacgttccttctgcgcaggagatccggtaaactcccaccattttgttgtcgaactgagccgaattaactccatgtaagtaccctatcaatgtggatttttttattactacagatcattgcaccttcatttttcttttgaaatgtattaatttttttaccatcagaaaagttccatagttttactgccagggcttatcctgcttctgcagaaggataattttttttctttcgagcatagtattttgatgaattttggcacgaaggataaattttttaccatcagaaaagttgcatactgttgcaccttcatttttcttttgaaggatatattttgatgaattttggcagaaggtgttgataagaaatcaatttgaagtttaattagcttcatgttttgcagggaacaagcggtatttagttgggttttggaaggaattttcgcattgaatttagcttattagtttgttttcttcagcttggcatcaactttaaacatctctgtggtagtgtggagtcttttatagtgccatctatttctggtctcatatataaccaaccatcccagttaaccctaagctactagtttaatcacttcactgtacaagtaaactacgccacaataaaaaatgttttttttcatgattcattttttttgaaagaaaagctgaggaaaacccccgcagcaaaaaaatattaaataaaaagatgcaagccagaaaacaaggttactggacgaaccagagaggcaaacgggagagagagagtgggagagaagggagaggaagaggagaatcagctatctagagtttagccatgatagaatctagatttctttgttgatctcttcagatgtacagtttttatcttttatatgcatactttattgttatcatctaaggaatgtcgtgtctcttttcttttgaggggattgctattctgatgctgctcatttgttgacagatttgctaaaagtaagagacagtacatagaagcacaagtagaatatgctaaagaagaagctatactatcagttctgagaactcagttggcatcccaacagtcatatattcatcaggatagccattctctaaggtatgcaggatatgcttaattacagattgacagctagtggagcatgattagttgattttgaaagcttaactatactacaacagcatgacattattcttattggtttctttgagtttcaacattaaccagttgaaatataacaaaatccactggcatttctcttatcactaatatgtttgatttgtggtttcacttgtttcatattcaggaggaaaaactccgaacttgctgaagagcttaaagatctttcccatcaagtgcag

SEQ ID NO: 164171 - DNA, 428 bp, Zea Mays
atcaaaaaaagagaagaaagaaaagtacccaaaaaagtgttgaacaagattgtgaaagaaaagtagaacgatcagtttgtttatgtgcacaggtgctgaaagttcatcaagttgttcaaccagtttgctattgtcatttggtgcaaaattttggttgggtctgatcgcaacacttgcattccaaccatactccttgatttgcatcgaatctgaaaaattctttgcgcgcgtgtttgatctacttacatcactcgtatcttgtggtcagcactaggcagtgaacttctagttggatggttatttaactttacaacaactagaattcagattgcattccttgtttactattctccaccaagctccacatataagccatcgtaaccggtaatctggtcttgtattcgcttaaccatcactttattgttacc

SEQ ID NO: 164172 - DNA, 713 bp, Zea Mays
gactcgcccgaggcaagcctgaggtgagaagcgcatttctaacttgcccgagggcgtctcgagcgacgccccaggaggtacacgcctcggccaatcactccgatccggggacgtgcgtctgtacgattatctgccccgctgaaggtgttaaagtcaacaaagaatgacacgattagagtctaatctacctttactgccatgatgatggtcagggcacgaatacggtacactattcccccactctaatgactgtttcaaccaccgcgagtgtggctacatgcgacatataatcccagcctcggcctcgagagaaatcttcgcctcgcctaagctcggcctcgaccaactgccccaacaggaaagcacgcgcattaaataatgccacctactctcatgcgaacctcgcggaagaccatgccaagcactgtttcaaccactccgactcgacacacttggagaacatctcatctgcaccctgtataggctagggctcgaccgtttgcccatgctcccgaacctagcctcggctctctacctagtcaaaggaacatgctattgggattgggtgtccttctcctgatcaaaagacgacacacggacgagggccaccccgccacccataccgctacagggctcggacacatctcctctgaccacaacaaacaacatgacaacccttgtactcctgggcctcctccttgcgactataaaag

SEQ ID NO: 164173 - DNA, 407 bp, Zea Mays
tacagaaacaaatgcaaagaaggaaaaacgaacacacacaaactcaaactgttaaatgtgcatatgcgacatgtaacatgtttgagagaaacgctacccaatcaacagatttgtggcatcatggagctcaaaccgtaagcacctgttaagagtgaaaggatcacacagaccgcagccaaaggtgggttcatccgttcatgtaggccgatttgggtgtgtccatgcctaagcctataaacaagaaattggttattgctatagaattagcacctggtttgcacaattgcacccctaattattgctattaagttttcacctgatttgcaccccaaattagtataaaattttaacctgattttcatccccaatcctaactcatgcacttacaggcatcctgcaccccctct

SEQ ID NO: 164174 - DNA, 367 bp, Zea Mays
tctgagtttttgtttttgcgggggcttttgctggtgtattacatggctccgcctcgttaaaaacctcaccccccaggaggaaaagagtgcgggccggaataacattgtttgctgaattacaagggcgcgtgggccctgatggttaaacaaaaaaattctgaagattgtcaatgttccaggagtgctctaagtcttcgccggaaggcgttactagcctgtacgcactgggggatgccttcgacttgacgatgaatggaccctcccatttcggctccagcttgccccatgattctatccgggtggtccgaacgagtacgaggtctcctttgttgatctctcttgggacaaccgcgttgtcgcgccaggc

SEQ ID NO: 164175 - DNA, 439 bp, Zea Mays
aaaagtgatacgagcaaaatgactaagaggtgaaggtgagttcataaaaaaagtaagtgtttgcatttgtttgttctctaccataactagcaggataaatactgatctagctgtatggaacattgaacccaccaaggtaggtgcacaggaagcgaggtttatagcatattttttgtggacatgaatgtttcaaacagtttcaatttggaaaggagttaaaaatacagcctataaaacactaatctgctggaagaatcagttagattatatttgacagtcaacaaaacattattttatatactgaattttcatagccaccgattggtactcaaggtttgaaacaagcaatatagggccatgtatgccttgtgatgttttgatgatcaaactatttatttaatctatcatataacccagttcactactcaaacaataatga

SEQ ID NO: 164176 - DNA, 392 bp, Zea Mays
tgcgggttgatttggaataagccgaggggctcatttgcaaggttgttgcagccacattacttgatacgtgctggaccgtttgatcggagatcaagggcccgaagcagatcgcatcccgagccgttgatcaaaatccagcggccaggattataagacgcgaagaggtattcgtgttcctaatctagaccgcccgactaggatccaatggccccgcacccatctccaagctctggccggaccctggcggcggtgtaggacaccgcggcggcgccgcacaccagtgcaacccgaccagaccgtgcccgagcaccaaaccccgaactaactgatgtaactcggcgcaacatatgcggtagacacgtatgaagactcaccagtgatgtacacgatat

SEQ ID NO: 164177 - DNA, 584 bp, Zea Mays
cgggtggctcactcggcatggacgctttggacgggcaccctcgggtttccgagtctccacctcttcaccaagttcttgcccagctgtgatagccattagctcggcgtgggtcgagtcagatgattccccagccagcaaactaagcacaacatctatctccacgtcgtcagtgctagctggcatctcaaaatgagtccgcttctcatcctctagaagactccgaagtggggcaatcagagcctcaatgtcctcaggagagggtcgtaatctaagacacaggataccatcacaagcaggagggttggacacaaactcagaaaatgacctaagtggtggcaggttcctggcagaataggccacaggagcaccagcatttgaaactctacccctcaagatcatgtccagtcggctcatcagatcttcagtgagaattttcctgttcgtcacccgggtagaatcattgacaccactgtacaaataagcagggtacgccctatccttcaagggttggatgttcttgaaaatgaaatcagcaaccacagcctcagcagtcagacctctatccttcagcaagcagacctcgg

SEQ ID NO: 164178 - DNA, 939 bp, Zea Mays
gcgaggtagagcggacgaccaactcctgactgagcagctcgacgaggtggaggtcccaatctagtactgctgacccacatcagctatgacaagacatgtcatccccaggccatgttcggacatacgtacaacacaccgaggcacgctgggaggaagctatcgacatgactatatgcccccacatacggtctcaaatgtatccccactgccttgcagggctaatcaaccctagtcatgggggacctcatcaccaaagtctctacagtgacccgcatatcgaaaaggacgtgacaatacaccataccgagcatatgcctacgcatgctggtaggtgacgcagggctcatgatgacaagtgaagccgcgccacgcatgaccgcaccatgaggctaacccacaggacccgtcgtgcactactatgaagacatcagcggtcgacatgctacagggactcgtatgacgaacgagcaagatgatacaccatattgctacaatagctacgcacaactctatagaccacattaggagcactacgttgactcagtgcaaaagatcgccccctcgctagtagataacaagtctcctctataaagtcctacccttgagctataaaggggcaggccatcctctttcttcacacaaacgcaccagttataatatactccaaggaaatactatgatcagcactacactggactagggagcaagcctaaaccagtacaaaaatatgtcttaaactccacgctcgagtcctagcgattcaccattcgaagtgagttcgcgttagaatcccacaccgaacacaaatcttattgtcccccggttttcgaaaccacgacagttggcgcgccaggtaggggacggttagcgtgcccagtgacaccttccactccgatggcttagtatttcgcattcactagaggtgagacttacgctcct

SEQ ID NO: 164179 - DNA, 1088 bp, Zea Mays
ttcaatcatttctagccattcttggcaaggttgcttgaactgtttttcaaatttgaagcgataaggtaattgaacaagttcatatttcttctttgttgccttcatcttcggcatcccctagtcacttgacgttggatacattcggttggctaggtattcctgcaacaagtccctggtgccgatttgttcaacaactaccatgaattctacctcgaccagctggcatgctgaccctagctgcatgttgcacaggggcctcgtcattccgaagtttaaggacagcgggcacatgaccatcgtcatcagtttccccctcttcttctcatcagccttgatgtaaaaccattcacctttctagccagttggccatttggtgcgataactgagaactggagccttcatatccttgcgatagacaaaattgtagcaaccaaaattttcatgaagaccgtctgccctggccttcgtctggtagtgcaattcatgcactcggcagaatgcttcagcatctgggctcatcccttggcttcggagggcccagatgaagacactaagtctaacaatggcgttaggggtcaactgatgaagatatatttcgaattttttcaagacttcccctatcatctcgttcagaggaagtcgcaatccagctctcaaaaaaactcttgaaaaaccactacttcatcatccttcggtgctggggtggtctcttctccggcaaatcggacaagtttcctttcagcttccccaaagtagcccagcttcatcatcatgggcatgtcagcttcagacatagtagatttctcaaaatctagatggctgggtttggttgggatcaaaatactataatcttcttcatcctcttcaatatcttcttcttcagcgacggtctgttcagcttcgagaccggggtaccttcgtcagtagttccctctatcacaactagacctgattgtctcatgacttcggaaattggtgctgtatcggtgacctcggtctcttctccttcacgagtcacccttgcagtcgaacacactctggccatctgatggattttttgcggtttttacgaagttgatgtttctttt

SEQ ID NO: 164180 - DNA, 1264 bp, Zea Mays
ctctttctggcggcattcttggcaattcttctgggaatacagccatgaattcttctactacagatatgctttctgctgctaggttaaacaccattggatcttgggcgggtggctgagcctgacatgagactgactttccttggtggacagtgagaagaacggtcttatttgcgcaacttatgatgcccttgtgcttggttaaccaatccattcctaagatcacatcaattccttgggatggcaagatggctagatctaccaagaacaccaccccacttaaaagaatcctgacttgggagcatttgagctggcatagaaggtctgaccctaggttcgggtgactaagggaatttctaggtgggtagtggggatgccatgcttttccacaaaactagtggctatgaaagaatgagatgctcctgaatcaaaaagtacagtggcgggagtaaattcaactaggaactcaccgagcactactcccggggcttgctgagcctcttgagcgtcgacgtggtttactcgtgctctgccatggtactaggtcttgctctgctggatgttggaggagggtgccttggaggcgggtgctggggcactcttggggccattcaccgagtgagagtaagtaggcccagatgccttcaactgggggcagttattcttgtagtgactggggtctccgcagtgccaacaggcattagctggaggttggttgcttgcgacggagggggcctgaaaggatctttgaccctgctgactgaaacatgacggagtgggtccagctggcttgttgaagcttggtcccttgggtggaaacccaaaggatcgaattctctggtgcctgtcctgctgctgagctcggaggacttggaatttcctcttgaggtgacccttttattcttcccttgccctttccacttgtatggccttgtttgagaggtgcgagaagctgaggaagtcttggctggccaagatagtcttgagttctggtcttagccctttcaagaaacgggccatcttcttggcttctgtgctgacatcgtcaggcgcatagcgagccaattctgtgaatttgtgcacatactctctgacagatcttccaccttgagttagttcccgaaatttatcttccttgagctaaacgatcccttgaggcacatgatgttctcggaaagcgacttcaaattatgcccaggtagcatccctgacggcagcgctgaaggtatcccaccaggataggaccatcccggaaagttaatgagca

SEQ ID NO: 164181 - DNA, 2112 bp, Zea Mays
cctttgttcaatttaactgtgtggatatcctttaaacttgggtcttcttcaaagagtaaggcagcatgtgtgttcatatcaggcatatgaccatcagcatattgacctccagaaacaacaggttccttagttaacttgcttggtcttggaggcactaaagaagcattgcccactgctttccaaggatcctgatttgagaaaagtgaatcagtgtatgctggttcttgtgtagcttcaacacgatcaattccaacagtagcctgcaattgaaatttactgctacgattggggagagcacaaaccaagtgattgggcatttccttaggatgctgtagaggaggcccagcaggaagctgagcaccagagttagatggttgaacggtgaacttttcattagaaacaggtggttcaatcggaactctaaggttgctctggacaggcagattgagtggtggtcgctggattatgtcaggttggacattttgtgcaccaacatcaaaatcacaaggtggctgctcactgtgcctggcaatgttgtcctcttgggttaaaacaggagcagtaaaggcatttgtgatccccatatgataccctccagcttgagatttgcagaaagaagtaacatcattatttacaggtggcttcccaactttggcatgatcaatgacaacatgaggaatagaaggatttccttgcacactagattctggtggtgcaataggacccaaatgaactgcatgcatacgagcatcaatagctctagcatagtcatgaggaagatcacgggcatattctctaagcggttccactgctgcatgatttgaatctttgtatgcactggcaccaatgccttgtgggacattcactggaactagcggcggttgcatgctataagagaatggttgctgctggtacctgacatgatcttcagccccagccgaaggagaatgacccacaaatactccttttggagcaggtgcactagacactgggaaagcaataatggtgggttgaaccggcacaactgtatccgcatatgcagtcgcctggactgcaggttttctggcaggaagagtcgaatcaaattgtgccatcactgctgtgttcccagctcttggttctgccacatagttcgtgagtgttcctgaacttgcacctggattagatttgttggatgcggtgccttgatgtgggctgtaaaacattggagctgcctcaaggttgcccattgcacaagaacttccctgctcccggatagtattatccgaatgggcatgtggcaatgctttttggcacattgtgcaaccatcatacctcaatgatggaacagtggccgagctaaccacaacaggaattgtgcctgagctggtcaccactggcatgcttactgcgcttgtcatcgcttgttgggcaccaaatttctgcctctgcgcatcatttgtctgcagatgcacagaagacaaaggaggaagctgtgacagtggagtgtgcaccacccggtaactctgatcaacctgagcttgcactggccttgtgaactgcgtggtctctggaacaggttctacacctgcggaagcgggcttcaactttcccacttgagcagcagtggtcgccatagagcccgtcacaggaatgttgggcatgaattggctcatttgcacaggcacatagttgacagattgtggcaccccatgcacaccaaattgttgggcgttgatgtagtgtacctgctgcggctctatatacgactgcggcatctgctgcacataagcagcagactgaggctgctgttgtggtacgtaatgggtgccttgaggctgctgctgctgctgctcctgcacataagtggtcacttgaggcggctgatgctgtgttgctgctgcataaacagcagcaacctgatgaggcggcaacgtcgactgctctgtcctaaccaggatggggttttgagccgggatgcccatcgccagaggtgacgccgagactgcagtgagcccaaccgactccgggaaagcacggaggtaatgcgctccacctgaatacgaatactcagtcgcaacggaagcaggcggcggcaccgcccgcggcgacgtactttcgactagaccgctg

SEQ ID NO: 164182 - DNA, 345 bp, Zea Mays
tctcatgctcgctgcatcgactaactctcttagcttacctataagggaccctacgttccaactacctatacggatcctagtcagctcaattagcttccttacccctcgcacccgttgagacagatgcgaagacccttgcacatttgtcactacacccatgcgccaatgtagcgcgccactaagaaaacgacgacccaatccttgctcacttgacaccgcatccatatcacaacacagcgcgccaccaagggggtggcagcccagcccttgcccatttaacatcatacccggtttccgatatagtgtgtcgctaagagggttacgccccattcattttctattggg

SEQ ID NO: 164183 - DNA, 573 bp, Zea Mays
ttagatttcaactcgtgcacaacttcgtgcaagatgacgaccccttctaaaatgtttcagtttttcaagaagccagtctggttccctccgatgagccccttgggcaccgcagaaagcctatttgtgagcactttagtgaatattttgaagtctgcatttagaaggcaaatgggccggtattgtttgatgctactggcatccctgatcttggggatgagcatgattactccgaagttcaaccgttgcatgtctacttctgcttcgtggaaatccttgaacatcttataaatgtcctctttaatgatatgccaaaagtttttgaagaaatcacctccaaatccatttggacctggtgctgcgtcaacttccaaattttcaatgacttgaaagatctcttctttaaagggttttgcaagggagttcaaatcctcaatgctaagcctcggccgcctgttccagaaattttcctttaacttcatgttacaagaggcgttcggaccaaacaaaagtttgtaaataactgcatttatttgttttactgaccttttcttttgagtatttactcaaacaacg

SEQ ID NO: 164184 - DNA, 762 bp, Zea Mays
acggcaaaaatggattaaagaccaattttcatcatttgcgtacacatagatttctgaaaaaaaatctttgacagccaaccaaggtaataagtgcaaaaagtagctttgttattacagcattacatgaattgtgcgtaaactatatcaatatgaataagcatgcagcatgttatgagttgtggaattatcaaagattcccggacctaattgagcagaatcagtttggatcatgctttatggttctagatggaaaagattatattctgactcagttgcgttattttatcttggattaataaaatacctgactataaatacacaattcttatagaaaatagaacgtatctgcaccagaacagtattagaaatataggctacaactctacgatcgtttaatacttctgttttgcataaacacaagcactccagcatttgtgttcgctagctatgagctagggcagaagccactaccccttccccctcctgactcggaagaaattctaagaatcatacaatttgtgttcctcatcaattttatattgtaaactgtgctcatatttccaatcagaagtgctcacaagtcctaaatcctaaaataaacaaaagacaaccatagcagggaacctgtataattgtcgcatgctggttccaatcttggttactagagatagtgaaatctctctcctcgaggatggtttgctattattagccggttcaagaagaaaataaactgacaaagtaacagtaagtgaaaattatgtt

SEQ ID NO: 164185 - DNA, 1262 bp, Zea Mays
ttggacccttgtaattttaaactgtggacttttggtaaaatattgttatatcaaacttgtagagtggctataggagaataatctttattaagtgtcatacccctaaactatatgcagctaggtgaaaaggtggaccaaattggggttgacaggtttggatttcagacttagtgtgttgctgattgaaaactgaatttcagtaaaaagtgccaagtttaaagctccttgatgatcaatccatgtgtttttaaactttattttctacgtcaaacttggagatcaatgttggggagtaatccttagtaagggtcatgcccctaaagctacttagaactaggaggaaatggtgcccaatacatgctgtcagaatttgatttcagacttggttcaattacctaaaagaatggagtcctttccgctaccgccccttccgctcccacccctttcgctcccgtcccctggccttccacctccggccgactcctcagcccctccaacccacagcctcacgctagtcatcctcccaaggccagcggccacccaacctgctaccctggcgtcggcctcctctcctctctccgcccagtctgtggcggctcttcctggtggccgttcaaaggcacaacgatggtgtgaagaggatctcccttcggctgcttcccggagtgatttacgtcgctcttataaggaggcgctggtggatggaaggtccactgcctgcggcgctgcactggtggatggaaggtccactgcctatggcgctgacattggtgacggtggctgggtgaaggtggtgggacgtcggtctcaccatcggagtccctgtccccctcttcccttcagacccgttcccgttgatttacgtgggaagtgcttcaactgtttctcaccatcccaccgtgcggccgagtgtggcagtttggtgcggtgctttcattgtcgcctgcctaggcatcaggtgcgcgcgtgtccacatcggaagaagactctacaccacctagcgagggtgttagtgtggcatccagttcctaggaaggtcatctcagagaaagttcatctctacaatatggaaggtgtttcgcgggtcagcggtgatggtgatggagtgaagacgatgaagcgcactcgccgtggacagaggcgccgaaggatggatcgggtggttttgggcgcacttggtcgggtctcatctttggcatcatcatccttgccttcggtggtgcacccccctcgttcgcctgttcttaggcgttcaaggttgc

SEQ ID NO: 164186 - DNA, 332 bp, Zea Mays
ccctcgcatacgctgcactcgcctcgccgaacgccaattcacaaaaccctagcggctctcccctcgcatatgtcgccgcctggtgcctccactggtcgtctgctccaccgccgccgcctttgcctcgcctcccgtcccggcgttgacggttgccggcgagtcttcatcgctgtcccgctctctccctctcttgttctttcctctccctgtcgtttccgtaaccgctcgtccgctcccctcgtctcttgatctgctcaagtgttgtgccatccttggtccggtactccggtgtcccgtagtcgatgtatctggtgctccgacagcgcaggtaa

SEQ ID NO: 164187 - DNA, 602 bp, Zea Mays
cggagggaacagggatactggagcaggggatgggtggctttcaccgtggcgcttcctccggtgatcatcggttgaggagctacggcggttaccgatgagctagtgtggctagggacgacgtggtggaaggcttggagcgtggcacagtcacagtaaagcacgacaactccggtgacggccatgaggccacgtcgccggtgaaaaggggcatgggacagcgaggccacaatagctcatgcacatccgcgatgagatctttacctggtgaacgaaattcatacgcctgtggcacgaatcccggcgaagaggtggccgacgataagcattttgcgctggcgttctgatccttattaggtcactgtaccatggcgaaatcggattcagtgtacctgacagtcgaagttcagggccaaatttctcccaaattttgatggcaactcacttaaggttctgcaacaaagttgtagaccaaggattcagctacaattttgccacaacatctatagccaaaatcctactaaatcatgtttgaatcggtgcccaaagttcctgcagtgcactgtcagtctgaaaattcagacttaaattgacctgacagcccg

SEQ ID NO: 164188 - DNA, 1272 bp, Zea Mays
ctgaaggacgctaacctccgagcgtgctgctatttcttctagatgggaggtatagatgaatctgcgttggatcgtctctcgctggtcacagatatgacaaagcacatacgtgtccaggcctcaggtggaaggtccactacatccgaacttgggcagttctcgcctgtctttgtttggttgttgcgagtaatatatttcattccttttctcctatactaattatgtatactgaacgttgaacgctttggctattccctagctgcacatcatcttataaaccgtcaaacataaacctcaggggccctgttatgcatcagacacctttggtgtgcgacgagccgatgacaccgtgcttcctttactacaggaattttatctagatttggcagaagacaacagaaaaattactccacgagattacctagagctagcattgaggcctgttcaaggtggaggaagggacatatctgcaaagaatgcggtatgatagattttcatgggtgaaacgtagctttgtacttgtgcttggtaactatacgtatggactatacttatacttcttttgttgttctggaagatacgggactccatccgtgcactttttccggacagggaatgttttacacttgtgcaacctgtgaacaatgagaaagatctccaacgtcttgatcaacttcctgtaagtatttcttcctttgaactacagctgctatttgtggtcttgtacttaaaattctcagcaaatatcatatgttgcaggttagattcaaacttttcctaagttcatttacgcaaatagcaaagtacccacatacatattgttgtatatattttttgaccatgtattctgaatttctgattggattggactattttaaaaagtttggaaattttcttgaaggtagtgggttaaggtaccagtcagaaaaatgaagattttgtatgatgcagtgcaaactatattattttgtgcattttcccggtagctgtacatttttatggtaataacatatacttacatggtaccagactactagtccaataaggcagtctttaacacaacttcggtcactgatttgaattgtgatatttttgtaaaacctgtagattgctcttgaaacatatttacactttaaacagtttgatggcatgtacaaattatgtatgtccctttatgacgtgagtcagaatcataatgcacgttttggcataattatattgttctagcagattgatgttggtgcaataattcctaatttctgtgatgcaact

SEQ ID NO: 164189 - DNA, 780 bp, Zea Mays
agaagaggaagaaattccatggatccacaagaacagccgtcactacagaggcagcgacgggggcagtgatattccctcccaagccttgtcggcactcatcagccttcaagggctttcaatattagactttgatcaggcactggaagcggttgttcccaaagatattttatcagagcctcctgaggctgacattccgaccatatattcagaggtcccagatggtggtctttcactgcatgattctgctgggcaagaggtaacccgggtggtgtctcgtgcatcatcgacctttgagggcagtctttcatgcaaaagcgttgatctaagtcatacagctactatggatgtggctgaggggcctccagccctagaggtggctgctacaaaagacccagccctgagggtaccgttggtagcgacccagcccctgagggtgctggagcgggctccctctctgttgcttccatggacgtccacactggatcgcccctagtccagtccgaggaggttgcggtgacgcacgtttctacggctctcgctggtcaagtcgctttagaagccaacaaaccagatgctaggagcctgccacctgctgatggggctgaagttaccccgagtcatgctcttaagattattcctgctgatccccctcgtcgagccatgcaccgactcttcttgcgttgggtcttccctgttcctttccaatcttcaggtgagtcaactttttgctttttattgtttgtactggcgaattatcttttttgcttatctgttcatgac

SEQ ID NO: 164190 - DNA, 542 bp, Zea Mays
ggtgaccactataccctattaacggagcaatcggcttaagtcggcgatgacttaaggcggtgtgacatgctcacgcttacttaactcagggtgaccactataccctactaatggagcaataggcttaagtcggcgatgacttaaggcggtgtgacatgctcacgcttacttaactcagggtgaccactattccctactaacgaagcaatcggcttaagtcggcaatgacttaaggcagtgcgacatgctcacgcttacttaactcaaggtgaccactataccccactaacagagcaatcggcttaagtcggtagtgacttaaagcggtgcgacatgctcacgtctactagatccggcataaacatgcttacgattactcgtcttagggcgatctctatgcctcacgaaatagaaagaagtttcaaaaccatcacactgcacttacttctgcaatcgtaacaactgttgaattcaaacaacagaagaataaaaatagcattcagtaccaagaacactttctaacagaatattcgagcacattg

SEQ ID NO: 164191 - DNA, 698 bp, Zea Mays
cataaaaccatatagtcttccagccagctagccacatggtacgataactgataactggagacttcgcatctttgcgataagcaaaattgtagcagccaaagtttccgtccaagccatcttctctagcttttgtttgataatgaagctcatgtactcggtagaagccttcggcaaacagttctacccctggcttcggagggcccatatgtagatgctaagcctaacgatggcattaggagttagctgatgaagataaatcccaaacttcttcaaaacatcagcaatcatctcattcaaaggaaatcttaatcctgctttgaagaagcttttaaagactaccacctcatccttttccggcttcggagtaatttcgtctccgccaaagcgaattagctcctttttggcctcactgaaatagcctaacttcatcaacttaggcatatcatcttcggtaacggtggacctcccaaactccaggtggccgggtttagatggcacgacactataatcatcttcagattcatgttcctcagcaacaacctgctcagcctctgcggcaggtgcaccttcgtcagaaacatcttccgacactactaaccccgaccgtttcatcacttcggaaatcggagcagtctcagcagtttcagcttcttctccatcatgtgtaaccctagcagtggaacgtacctgtcggggac

SEQ ID NO: 164192 - DNA, 589 bp, Zea Mays
catctcctggcagacaaatatttccttgttgtctgggagacagtatagaaaatcatcttcgtcggtgccattatacaccaaggcccctttcgggtacttcagttctcgggcgtagtgttcggcttccgcaatttcttcttcagacaaccttttacccgaagcatgtcgaataataaagtcaagttcttcagaaggtgcttcgggagtagaagattcaatcttcttgggtgcgtcttctttctctagaacaagaccagcgcctgaagatccttgcttagttctctgctcagttccagcaggctctgcttcactgggcactgagggcccaactttgggttcagcacaagctgtagcagcttcgacagtctcctttgcaggagcgagagttgatgcccttgtcgactccaggacggcgtccagtacgctagccatcctcctcctcttgggagttattgcgggagctttcgataccttcatcaattctggctccgcgggcgggctcaagatttttggcagccctgctgtttcccctagcttcggctcttcgaccgcctttcctttggcttcggtagcatgtttcggcgcttcg

SEQ ID NO: 164193 - DNA, 911 bp, Zea Mays
atttgtatgaaaaatctactgcccgtagttttccctcacatgaacctaatacagagccacccacacctaacacatcggttgcaaataggtcatcttgtacccagccattgtaaggtatgccgatgaatacagtcatagcgccaccagagccaccgtcgcctagcgcgcggctggctctagacacaattggactgtccgacatattctgtcagaccgtctggtatattctgctggaccgtccgagcatacacaggcacgtgcgtagaccacccaggcagtgccatatatgatcggaccatccgggtatacccccgaatcgttcagtcccagaacgtctggtcccttacaccggacagttcgggtacgcgtatgcagaaccaaaggctacgcaatatgcatagtttttgcactcatcacagtagaactatgctacctcaccagcgatatattataaccatgccatgccaccttgtttgcacagggccgaatattcttgggccactaaagagcccaagagatatagggtaggagggggtgatattaataggacacctaacacgcagtttgaacatccctgggaggaaagccgacaaaataatgtttagcaacctgaggttttcacccccatacataatggatggtcaccatacatggtggaaacaattatggatgaggtagccaggttggttagagacaagctcggtgttagtgtgtcaggcatgggacagtcctattggaaaccttataatcaccaatttgacttcgtgccatatttgcaaaggaccatgataccggatttcttttaactttctagtgaaggcggggaaagcatgcacaagtacgtaagccagttcttagcgcacctaggagaattggctgataggaagcctaccgtgtctgtttattctcgt

SEQ ID NO: 164194 - DNA, 715 bp, Zea Mays
cttttccaaaactgcagctatgttggcttagcctatacctcagaatattactgaactaaggggatttctgggtctcactggttattacagaaagtttgtgaaaggttatggagttttagccaaacctttaaccaagttattgcaaaagcaaaacaagttcagttggggagaagaagcacaacaggcatttgaggctctgaaacaagcaatgactactactccagtgttggctctgcccagatttgatattccttttattgtggagactgatgcttgtgatataggaatggggaccgttttgatgcaagaagggagacctattgttttttctaagcaaagctttaggtgaaaagaacaagcacttgtctatatatgagaaggagttcttggctttgattttggctgtggacaaatggagaccctatcttcagagagatcctttcatcatcaggactgaccaccagtcccttacttttctgggagaacaacaattacactctgaacttcagaaaaagggctatggctaaaatgatggggttgcagtttcagatagtatacaaaaggggtggaaaatattgtggcagatgctctatccagagtgagttatctcatggccttatcccaagtgtatgaggtacaacctatttgggttcaggaggttttaaattcatatgaaactaatatggaggctcaagagttgaagactcaacttttg

SEQ ID NO: 164195 - DNA, 294 bp, Zea Mays
tttgtgattttggatcagtgataaaaaattcggaatatttcgagctcgtttgctggtactcctttggaaacgtgcctttgatttctactaatgctaaaaaatttgtgctatttacagaactgccattctgctagtttgttacttttaccttgttgtgcttcgataggacacgtcttagccatcaattgtgacttgtgctttggacacttattgaacttcgctaatctgcactcgatttttgctaatccttgatattaatttttggcctcccaagctccacatactttcttctga

SEQ ID NO: 164196 - DNA, 846 bp, Zea Mays
tcctcggacttgttgatccatgcaaaattatccaaaatcagatgtcaatgtcgcgtgccatgctagactgttggagcacactaatgaaagtttaggaatccaagtggcacaatatgttaagttggaggacataagtgacacaccatataagttctaagagtatacgtactaggtggcgcaccacatgtgtggagagactccaacgtggcattgtcactgtgagatgaaaggcaacgcacctcctaggattggttgctcccgtttatatctagccacaaatattacaatggttgttacagccggagagatttccagagaagatcaaggaggagacgcagctccatgcatatctatgcatatcttgaatatagccttccaaatatatctaataccccctcaatctgacacgggtgaacaatgttcagactgcgccgaaatgtagtgaaatacggagatggcagaggcttggtcatgatgtcagcgacttggtctttaatggaaatgatccgaacatcaagctgtttggtggtgactcgttcgcgaacaaagtgataatctacctcaatatgcttggaccgacaatgaaaaattggattagcagataagtatgtggccccaatattatcacgccaaagtaccggtggtcgggaaagtttgactcctagctccttcagaagaccttgaagccatatgacttcgacaatggcatccgcaatggctttatactcagcctcagtactggattgggagactgttgattgcttgcgtgaactctaggaaataagattggcaccaaaaaatatagcaaaacctcatgtacttcttcaatcatccgtgttaccggcc

SEQ ID NO: 164197 - DNA, 736 bp, Zea Mays
aagctgtgcaagtaataccgtacctctcgctgtcggacgcggcaagagagtagtaaaccgtgcagtcgagatcgtcatatggtttaatgttggtacggtaccaaatgctgccccgccaagaacgacaagtgtgtgtcgctctaattaagagaggggagaaccttgtaaagataggaatggcgctgcaattggtctggttcaattaacttgagcaccaccccatcctttgttgctactactatctactagcggctagcgctacaccctagtacggtagtagtaacaacaagtgcatgtcatattgactggacaactcgcgcatttattatgcgcccagaatccgccacctgtttttttgtgatgatgcgttgcttgctgtgttcttggacgagtcacggtttggtgattgcgttgtgtgtcgtaatgattcgacatttttaattgtagacgatcgagatctacctctttctttctcgtctgacacttgtctttgtttattcatggtgtttccaggccagtgaattttacctttggacggacgccatgcagcgaaatgaggcatggactctctctctctcttctggctgcggatttaatatgactgtggctacgatttctatataaattttacctacagattacagctggagcaatttcgagcagctgcggcggcaagccagccaactgtctgtctcccgtagccgtagtccggtgctggggctgtgataaagacctg

SEQ ID NO: 164198 - DNA, 622 bp, Zea Mays
cagtttaatctgttcaacgtgttgcagttcttgtcagatcatgaagattaacctgttcaaggtgatccaatccccgtagccctatcctttgtcttattagtccatacttctatacactttgttgttttagtttgttgtctttatcctgaacttttgtgtctgtggtaaatctctactactctataaggacctaacgtagaccgcggtgcacggttctgcctcctcacggcgcataaggcccacatgttagtgtctcccttcttccccgtgcgcgccctctcctctctacccctgcatccacatggtcctcaatcccctcactagtcaatgtctcagctatggaaggaaaaatcacgtcactgccatagaaggaaacacataccctcgccgctatccacgcctcgcagcaatccagcacgcaggaatcccatcgtcgacgacgcgcaggaccaccccgcccaatcgttcttcccatgcaccgcggatgccccgcccatatcctccacgccccaaacgcaatccacgtctcgccgccatggaaggaatcgcaacccaatcccctcatcgccatccagcgcacaggaccaccatcggcccgcatcccatcgcaagtttgcaggac

SEQ ID NO: 164199 - DNA, 564 bp, Zea Mays
acgccatatatatctcaaaagacaaagccctcctttccacaacgaacgaacatattcctcccgtcgatcgctccagacactatcaccttccacctctcagcttcactctcaagcctctactccatcttcttgtgaagcttctcaagattctcgcgatcgcatgcctttacccttcctctctctctttctctctctggtcatcttactaaactacctccaatgccggtgccaatggcggcagctcagttcctctagctagtctcccaccgtaattagcaaacccggagaaaaaaagggaacattcgacgccaccccgtgatgaggccttcgccacctttgctcctgttcgtgctcctgcacttcgcgctcctgtccaccattgccgccgccgatgggaatgggaatgggaatgggaacggcgacctgcgcggcgacgcgatggcgctgctcgccctcaaggccgcgctcggctgccggccgggcgcgctgcggtcgtggtcggagggcaatgccgggtccgtgtgcgcgtggacgggcgtccggtgcgcggccggacgcgttgtc

SEQ ID NO: 164200 - DNA, 555 bp, Zea Mays
ctcaattcaaagctcctatagagcattcaagtctccttccactttccttctttctccccagacttagatttcaaacaagggtgagcggctgagagaaaaaggcaactaagcttcatctttttcgttcaatgctttagtttttcatctagtcattacactttaggcatcgtccatctctgtgatgcatgattatcgctacaccacctgcaccaatagcgtatatcagtcaagtgattagagttccattgcacctatagttgccatacctttagtgttagggcctgtagatatagtagcacatgtggctaagaccacaaagacattaccttccttggtggcttcattagacccccccacacacatcccttctcttcctctagttagcctatcaacgtttgaggcataaacaactccttctagacatatgaatacttcatcagatttagatgaggatgctctagtgactcagttcaagttcacacctcaccctctatttattggcacaaatgtatcttctccaccttaggacccttaggtttttgacctattttgttg

SEQ ID NO: 164201 - DNA, 531 bp, Zea Mays
gggcaatcctgaccaacttcttgacaccgaagactgccttccaaggtcgacgatgcgcgagatactgcccgggatacctctaatcccatgtctggaatgtcagagcaaacatccatcatatcaccagcagtcagttacgacagcatatcttcaggaatgacatcctcatgggcctaatcaaaatctgttatggataattcttgaaggctaacaagggcagacagaactggagaaggaatatcactatcccccctactacttctgtaacgccggctattcttacgaattagcgaaacttcttcttcctcttcttcgtcctcatcaaaaatacggacaatagctggtgcacgatcacacccattgggttcaacttcaacaaggttacacccattggggtcagcttcaataggatcacacccattgggttcagctggtgcacggatacactcgttggggtcagttggtgcacggtcacacccattggggtcagtttcaacacgtataccaccattgggatcaactacagtaaag

SEQ ID NO: 164202 - DNA, 769 bp, Zea Mays
actcgattgaccacttctgactgtccatcagattgaggatgaaaggcggaactcatatgcagcttgacccctgctaagcgaaacagctcggtccaaaacgcactagtgaaaaccgtgtctcgatcactgacaatggagcaagccaagccatgcagccggacaatgccatcaaagaaagccttggctactgaggctgttgtgtatggatgtcccaatggaagaaaatgcgccatcttggagaaccggtccaccattatgagaattactaatttaccgcccaccttgggaaaaccttccacaaaatccatggaaatatcactccaaatacctgctggtactggtaatggttgcagtagcccggcagggtgcaagtggactgacttgttgcattgacacaatgagcagcccttcacatattctctgacccgttggagggcatgagcattatagaatgtagcccgccaacggcgcaccgtcttctcgacaccttcatgcgccccatcatgggcgtcggccaagaggagtggccacagagatgacgcatttggcacaaagatcttgcctttaaacagcagcaacccatctacttcaatccatccctctttggtcgtccctgctgccagctgagcacagatagtctccacttgggaattagtggtcgcctcatctcgcaggttgtcaaatagcgagaatgttggtagtgacatgctatgcagattgcccatgggttcctctctccgaaacaaggcgtctggagcaccattcaact

SEQ ID NO: 164203 - DNA, 385 bp, Zea Mays
ctcgccatgtaacgttcgatgaatctgtgtttcctttttctaacatgtccacatctgcctcggatcctagcacgttggatttcctaagcaatgatgatgattatgctatttttccaaagtctagcactgcagctgcaggtactcggtctggcgcgtcctcaccagctacctccttgctgcccactgtcgagcttgactccagctcgggcagccctggtgccccatcaagcccggccagtcccagcatgggaaaccctggcaccccaagcaccccggagatcagcacgggtggatcaaccaccaccagtccaggcggacctgtcatgcctgaccctgctgcccctgtggacacactgtctcaggttgctgctagcagggctgggcg

SEQ ID NO: 164204 - DNA, 671 bp, Zea Mays
tcgggggggtccactactttcctccgctttctaactatcttcttcaagacttttggaggactgtcatcaaagttacgcttcttcgataatggcataaagtcatcatcctcctcagcagcctgccttgtattgtgtctaacagtttccgccggaacgcggggtatgtcgacactaaaacactcttgagcagactgaattataatccgttttggattagatggaggtcggtgtacgttcttcatgtatgatgttcctgccaaatcaaacaacacatatacataaaaacgtaaaggagcaataaaaagataagcgccaatcagttcagttcagttcatgaccatgcattccattactacataaaaaaagcatgcagctgcactactaagatctatgcatgttgtgcaaaatacgaacaaagggggccgggagaactgctagggcccactaggaagtgtttggaggtagggatagggagacgtgctgctgcgttcttcatatatgatgttctagccaaatcaaacaacacataaacatcaaaaacttaatggatcaataaaaattctgctcatatgcgacatccaattaatgtataagctggctatttcgtgcgtgctggccctaattgtacaacaagatgtttggggcataacatattgatgtatatatcataa

SEQ ID NO: 164205 - DNA, 404 bp, Zea Mays
atccaatgggtttttgtggcagcatcatatggcaatattgtagatggtatgttgctttacaactttgatgcagagtttgagttgagttgtcattcaaaaattaagagaaaaccaagctccaaagtgctttgtcaggctgtctaaataccactcgccatggtacaatgaatttggggatcagaccgccagcgcagggtcctcgccgctgatgaccttgcgccgggatcgttgccgccgttgagattcgcactcacgggtaactggatagcgctcggagtcgcgtaaatatcctcgccgtggataactccggctataaacaagtccggccaccgtacaagcgtcaccgcggcggaattcgataagaacgccggtgaccgccgcctcccggccgtgcgccgcgtggc

SEQ ID NO: 164206 - DNA, 707 bp, Zea Mays
acaacactgggctggggctcatttaaacaggaacatagggggctcgggataagaatccagagacccagtgcacagttgagtatggatggcgggttgatttcactaaagcccgagggctctttaacaaattgcgcacggccaaggggtatcgcgcgcacagagccgcacgatcaagcacggacgcgccagattagacctctactcaaaacaaaccggtatctcacaagcgcccttggatccgaatccaacggtccgatagcaataatgaagggcgcggtatcgttgtaatctggagcgttcatcattcaactaacggcccatgcctaacctagccgaaagggtacgcgagatcaatccgtgccgtccatccatcaatcaacggcccctgcgttctccttctccccagacaccagccacggcagagccgccggaatccctgtggccgtggagctcaccggcgcaccaaagtcggccacccagagttcaaaaccaaatcggataggactacacgatgctaacgctattgcgaacctgggtggagggtactcaccggaaatcgagggtcgaacgaggccggccacgacgcagttcgtccccacggcggcgcgcggacgacggcgagcaattagaagcgcgccgatggatttcttcgccaagagatgccacagttagatttggtagctgcccgcgatcaatcctggtcaccc

SEQ ID NO: 164207 - DNA, 527 bp, Zea Mays
gcgcgaagcggtatgtcgtggtccgggccgttcgatctgaaccggacggaggggatcagaccggagaaacagacggctgcgggtggcgctactcctctccgcggcggtgaggtcgccggagttgaggcaggcgcgagctagggtggctctggggtcgccgaagtagggcagaaaggacgagggtgccacagcgaactcaatggcggggaagaggccacgaatccacgggcagagaggggagaacggcggtgagaaggcctcaggcgggccagagaaactccggtgagtgattccggccacggggaggggacttaaggcgcgctaaggccttggttggcttcatcagagacaggggtgacacagggaactactccggtgaactagaccgggctaaatcggccggccaccgcgtgagcatggcggaccgccgcagtcgagcaccgacgaaggcgaaattggacgaacacatgacgcaataagggaaattgggcacagggacgggtgtctcaccttggggcggagctcag

SEQ ID NO: 164208 - DNA, 501 bp, Zea Mays
cagcgatcacgaccattggattagataagggcgcaccagattaaatcattactcctgcgaaccggtatccgatctaggccataagatccgaatccaagggcctcggtttaatgcgcgcaacacaccacgcgaccacccgatcggacatcgacgaccatggtttaatcaagcgaaggggtaccctacgttatgatcatcgtcgtccgctggccatccaacggccgagcgacatcgttcccatcccgagcgtggacgcggcggcgccacacaactccccggcggcagagcttgccagtgaacccttcctagcgattctgagcgccaaaccacgattacctaggtgctaagcgaaattgagggtgcgatggacaaaggatagtgcttattaccggcaatagcgaggtggaggggccgtgccacggtgagaggtggaaggacggcgcgcacactgctccgacgagcaattcacctaacccgccggcgctctcctatcaattgcgg

SEQ ID NO: 164209 - DNA, 931 bp, Zea Mays
ttggatggtctttgggctcggcgtcagctgccatatgcacactatctatgccacatatttgctcagttgtttcggcctccttagttccaggccacccttgaggcctccagactgcagtttggtttctaccgcccagctcctaaggacacaactctagctccagtcgatccacttgcaccagatctcagggttgaggacgaggccatcagacagtttgaggatcagggtgcagctgctgatacttcctctgatgatgatgaggatctggggtttccgccaccacctcatgtgccacctcgttcccatgatcacaaggctggtggctctagtggtgctcccccagctcatcctccagcgatagaccccgctctagctaccacccttcagtcactcactcagcagcagactcacatggccgcagagcaggcccgtcaggaagtagagcaggccaagcaggtagccatttagtagtagttcttcgagtggatgttgtcgatgttctagactattcaggaccaccaggacactctccagcagcaacttctagcagatagggcaaagcaccaggcttttatgactcatattcttcagcacaccggtgtttcgattcctccaatgcagtctgctccacctctagcactttaggctgttgttgtgccagccattcaattaggaccccagctccactcttttggtccttccatctctccactcaggccggtcaccctagacatctcgacctaggtcgtcggtgcagtcagcgtttagccactagtgcctctagcgtttgctatctccactgttgccatggctattttcgtgtctgctccagctccaacagatcctacatagcagccagcgtcagaatcaccaccagctccatcctctactacaaatcctggatctgagactgacagaaaaacaaacaaac

SEQ ID NO: 164210 - DNA, 747 bp, Zea Mays
gctaggctacttcaaagaagccgacaaggggttgattcgctttggtggggaagaaactatcccaaaaccagaaaatgatgaagtggtggtctttaaaagcttcttcaaagcagggttgagatttcctctgcacgggatgattggagatgtcttggaaaattttgagatttaccttcatcagctgacccctaacgccattgttaggctcaacgtatatatctgggctctccgaagtcaaggggtggagtcgctcgccgaagccttttgccgagtacatgaacttcattatcagacgaaggctagggaagacggactgcatgagaaattcggctactacaattttgcttatcgcaaagacatgaagacaccagtggtcagctatcgctctaaaaggctgacgggctagaaatctgaatggttttatgttacgattgatgagaaaaaggagaagctagtgcagtgcccgctggagttaaccttcgggctgactaggcctcagtgcaacatgacgccgggggcaccatgcccagatgttgtgtatgagtttagaattgtatctgaacacatcagaactagggacttagttcaagaatacttggccaaccaagtatttccaacgctgagggaatggggtatgccgaagcttgaaggaaagaaaaagaagaatgaactcgttcggctgccgtatcatttcaagttcaagaaacacttcaaagaaccctgccaagaatggttggatacaattga

SEQ ID NO: 164211 - DNA, 945 bp, Zea Mays
gaatcactgaacttgtatctaacaacgtgtgttggatcggggatcaatggtcaagattgtaatcgacgatcacccctcagatctagcctcaacggcatggatctaatccgtacgaatggaactcaacatttaatcggggcgctttctccccaaatcctgattccggccacacgcgcacggcgacgcattacccacatggcggtgccatcgccggcgttcctcagtctacgtctctagctctcggtcttcgcccggaacactactaaacgaagagaataacgttgtgaatgtgttggcgaggtccttaccggaatccgagtggtgtcccgccttgtccgcggtgctcggcggaagtgctgcgatgacaaggaattccggtgtcaatcgtgcaccccctactccaaattccgcacgataactccacggggcccgatgaacaatgttgcacaccctccggatcaccaatcaccggcatcgaggagaacaacgctgcgtaaggtcaaccggtctgcccgagcgactaatggcagtgcacagaaatttgctggggatagactcggggttttggtagtgcttgcgcgtggtcgagacgacccccgtcatataggctttgcccggttggttgggtttccccggtgagaagcgcgcgtggcgagttcgccgatcgttacggtgcgtggttggccagttcacggggagaggacctgacgactgggccccacattgcagtggcttacgtgcgcacgacaactgacgccgaggcccacaagtcagcaccgtgcagagggcgcgcgaccgagatggccagctgggccaaaatggtggtggtcggcccagtttgcacagtttcgtttcctgtttttattccatttccaattcctttctatatattcaaattctaatatttgaacttcaaacttgagttatggatccatcataaaaaat

SEQ ID NO: 164212 - DNA, 757 bp, Zea Mays
gaagggcactcagcgcctcaagctggccctagtgaagaccatgcagcagcgtctgctccggcgcaggtagaagggacacattagggttgttggatttctttttgtgatactggaggtcagtttctgtgcaggctccgacatccgggcctgcgcgagcaacccctgatgatgttgacactaatattttaatgactgcgaatgcaacgccttttaatggaaatgtgtctgagggttctgaacctaggtcatggtcctcggacggggatgattttgggagccctttttcgtggattgaggagtattcttaggaggatttagactactttgctgtgttggatttggccgcattggagtctctgccgcaacctgatgcacgagaagtgtctgccaccccggccaaggcgatggccgaagacccgctcaggcgaaaagtggtgttgaaacagagcattggcatgacatcacgaagtgggagacgtcgctggatgggtatggagcggtcccgtcttcgactagatctgggtagtcaacgcgatctactgtcctcgacgtccggaacgtgtattggggagggggacttgcagaatctgtttaagggcgaagagttaaggatgatgttgtttaatttccgggaggttggtcttattccgaaggcggagcctatgtagcaattttgctggcctcgctcttgtgttgcgatagtgagtgaaaacgctaccctccccctcttcgcaatagagaatgagggcaacaaaat

SEQ ID NO: 164213 - DNA, 559 bp, Zea Mays
tttttcctgagtgcctctagtatcatcccgttggctcgctcaacctgcctgttggctcttggatgtgctacagaagcttgatctgaatgcttttttgctcgcagaagtcgaagaactctgaacttgtgaagttggatcctaggttagttatgatgctgtttggtatcccgaatctgaatattatgtcttgtatgaattccacggccttagttgaggtcaaaaaggcaatgggtttgaattctatccatttagtgaatttctcgattgctaccagtacatgagtgtatcctccttgcgccttcttgaaaggtccaatcatatccagtccccagcacgcaaagggccaagtcactggtatggtctgcagttgctgtgctggtaaatgttgttgttttgacaagtactggcaagcttcgcacctctgaactaattcggctgtatcactcttcgctgttggccaatagaatcctgacctgaagaccttcccgactagtgtcttagatgctgcgtgtattccacattgcccggcatggacctcctccagaagtcgcttcccagt

SEQ ID NO: 164214 - DNA, 785 bp, Zea Mays
cctcatcttcatcaataatgcggacggtacacccattgggatcagctgtggccagattacacccattgggttcagcatcatcaaggtcacacccattgggatcagcatcagtcgggtcacacccattgggttcagcttcagcaaaaactggcactggcacatccctagcagcaggagcagaaggaccggcatcctgatccaagcatgacactcgacgaagacgtttctttttgtttttcttcccctcagcaggagaagtcggttgattggctcagcgaggacgcttcgggcgaacactatcagacctctgaatatccaaagctttgccagcctctgggataggtgctacagccagtgtttcagtaggggctgcattagaggaatcttcagccaacatatccagcatggcacttatctctgcatcacttggattcaaaggtacctcaaaatgaacctgcctctcgtcgtcagggattttgccaattgaggcaaccaaagcactaacctcttcgggagagggtcgcactctaaggcccaaaccactatcaccagcaggaggatttgacacaaaaccggtaaatgccttggaaggaggcagattccaggctgagtatgcaacaggagcaccgatgttcgacaccttgcctctgagtatcatctcgagccggctcaccaaatccacaacaggaatccttctgttggtaacccaggttgaatcagcgaggcctcgatacagataagccgggtatgctctgtcttttagtggctgaatgttcttgaaaatg

SEQ ID NO: 164215 - DNA, 350 bp, Zea Mays
ccgtccaccaaagcctaataaaaagaacagatgagtgtaatgatagcagttcacacggtgcaaaaatcaagacaagatatattacagtacctggagattggagaagaacgaagggactcccaaatcatgagagatcaattgatgacctggcgtaaggtcaccacccgaagcagtttgcaacaaactggcagaaaccaactcagtgccatcaatagaactcaaaacttggccagcggggacgctgccctccaaagcgactccctggttcgaagcttgggcaaccaccatgcagccggagtgcgggggcgatcccgcatgaacgtccatggaagtacaagagggggaccccg

SEQ ID NO: 164216 - DNA, 867 bp, Zea Mays
agcatccacatggtctaggcgatggcggcgcctggctcccgtcggcctgcaccggcgacgcccagctccactcgacctccaccagcggcgtgcgactccccactgatctactagcggcaccctccaccagctagcagcagtgaaagctatcttattcatcacgtgttagcatgaatgctactgttttcccctttgttttcaaaacttaactcgattggcgggttaggttagccttgtcagtgactgaagctgagttgtgtagctggacaagtatggccgggcatagctgggcggacaagtataactgggcatcggtgggcaatcaccagaacctgaggtgcgacggcaagaagatctgagcgacgacggccaagtgacagaggagagtacgccgatacacagagacatgagagtttatttcatctaggggcaaaacagtcagtccaaaagctaacgttcagctaaatttattttatgttttagataacccttaaatggcattttgtctgtaagacaatgtttgagaatggtgtattagtgaaacacgttcacatgataacatttgggcaaaactcagttttcataatgacataaatccaaatttctcgagtgtggacacagagacgtcggatcgtctatttcggtctgttggtttcggtggttggcggctgttaggctgtctccaacaagacccgataaatcaccctgtacgctaaatgtagtggacaaagacgttcgacacgcctccaacaacagccgctatagcatccggtaaaatttagggtgtgttcatcgccctctactcttggcggacttgctgtcgctcgctatccactgtttcactcgcgcgtcgcgttcactcccgcg

SEQ ID NO: 164217 - DNA, 530 bp, Zea Mays
gatagtgggctggctcatgctagtattccagtagtgcttgaagaacggacaatgtcagtgatcacatgcatactcccatctcctcaagcgcttctcaatacaacgttcatactcttcatccttaggttcatgttggcgatgttgcctatactggtactcatatttcctgagtagctgttcagacgcaagttgttgaaatcgtacatgtcaaacttgctcttcagtgacgtactccttttcatctctttgtggccagtcgtctggattggccttattcttctacatgtcacggtgccttgcaggccctgccatgttgatgttgaacaagaatacttgatctatacactctaccatgttgacgcttaggaatggctggctatcgaccttcattgtaaactgccccaggatcagccgaccctgctcgatagccaattggatgtagcagcgaagttctttgcaatcattggtggcctgtgtgaatgagttgtgccatttgcagtatggccttccctgtagctcttgcactatgg

SEQ ID NO: 164218 - DNA, 329 bp, Zea Mays
gagagggagagggaggagggggggaggactcaccggagcggggggagatggcggtgcttcgcgaattgcgctcgggcgaggggaggaagagagtggtcgaggccggtgcagggaaggaggtgcccggggcagcctttttataggcgcccgaggggaggggagcgacggagctcggcgggcgccggtgaggtgcacagcgccggcattaatgccgcacagcgccgccgatgagactccacggcggggcggtaccgggcaaggacgttggtcaaggggggaaggacggggcggtgccgaactcttcctgtgcggcgaggggacggtgatgg

SEQ ID NO: 164219 - DNA, 1309 bp, Zea Mays
accgcgggttcatttgtgaaaagggaaggggctcatatgcgaaagaccatggccaaaagggtaaggactgcattgggccgccagattagaagtctacggttcagattagactataccattttatgaattcatatgcatccatggccataggatcaaggatccacggcccgaaaccaaccacgtctacatttcatccctggtcctcgatcccccgatcgacgattcagatacaatgcgctgaaaggttactactatgctcaatctgagccgtccaactgggtgtcaactccaagagaccctcttccacccacgttagcagactaggaggcgccaccagtacggcgacgacgaacgccggtgagccctcccgactcacgcactcaccctaatcccataatcgaacgcggatacactatgtgtacaccaatgcgaattacatggagaagtccttaccgtgcgccacgcgagcaggagcactgaccacggcggagggcggaattgcggtggttcctctacttcggcgagaaattgccgcgcgactgcccaagttctggggggtaaggtcatgacaccattgggacacctctacgaccctcccaagccatctatcgaggacagagcgactctggacacaagccgtcgacggcgctcttccgcttttctctcttcctgccgctcccgagctccgactgcgtcactcccctcccgatctctctctcacgctcggtcgcgggtagcatgcgttgatgggaggaaaagacggcagcccaagcgcccagtcttatagccccgaggaaggccgggcgaggattccgccggtgcccaccatcatcgcgcggtcgttgcggtgaacctgtagagggggagatggcgctggggaagtgtggggtgacgcctggtcatcttatgccccactttccccgcgagaatagctactatccgcaactaattccctgcgaagatggagttctaggcgcggtcctcacgggttgtttacacggcgcggcggccagtggaagaagaaccatccccctctgggcattggtcccacttgtcaacgaagggcgctctgtgcggctgacgacatggcccacatgccagcgatgcccagggagcgacgcgcacgcgaggccattgaagtgggccggtccatcggtagagggatgagggtttgggccgaaaggaggggaatgaggcccacatggctggaattgttttctatttttgttttattccctattttcaaattcaaatcaaccttcaaatttgaacttccaaattttgtggcaaatgggtcctccaatttaat

SEQ ID NO: 164220 - DNA, 825 bp, Zea Mays
atcctggcaaggccaatgttgtggcgaatgccttgagcagaaaggcccagtgcaattgtatgagcatggatgcaagagtcaccaccctgtgtgatgagttgtgcaaactaaacctggaagttgtttcttcaggtactttaaattatatctcggtggagcccacattacaagagcaaatagtcagggcacagattgaagacaagggtgttcaggttatcaagcaaatgatcaagcagaaagcagaaaaatacaaatgcttccggcaggacagcaaaggaatcctatggtttggagatcgattggttgttcccaaggaccctgagctcagaaagaagatattggatgaggctcacctttcaaaattctccatgcacccgggcagcaataagatgtatcatgatctcagatccttatactggtggaccagaatgaagagggaaattgccaagtatatatccgaatgtgacacctgccagagaatcaaggccagtcatttgaaggtagcaggccctttgcaaccccttcccataccatcttggaaatgggaggacatttgcatggatttcatcgtgggattgcccaatacctcccgacaccatgattctatttgggttattgtggatcggttgaccaagaccgctcatttcttgccagtgcacaccacccacaagacagaaaaatatgcagaaatctatgttgatcaaatagtgcgtttgcatggtattccaaagaccattgtatctgacagaggagcactgtttgtggcacacttttgggagcagctacaagaatcacttgggacccatgcaataaggagctccgcat

SEQ ID NO: 164221 - DNA, 511 bp, Zea Mays
gccatttccccaaatcacctaaagattctgaagggtccaataaagcgtggggataacttgcccttaactttgaatcttctcattccacgaattggtgacaccttgaggtacacgtggtcaccctcctcaaattccagtggtcttctccggttatcagcatagctcttctgtcaccggcagaggtgtcgcgtggaggtcggaccgcggtggggagcttcacgacacgaactcccggctctggtgaacaattcccgccgtgctatagcctcggaggcgccaatcctgcctcctcttggatccacacacccggccaaaagtgccagagcacccgccagaggacgtacggtggaggaaattccccccggcgtgcacccagcaacttcccccactcttcaaatggcgcgcgcggagtggagcatttgggcaatggcacggggcttggcattcctgagcgcgaccgaggcttccccccttctatttacaggcgacggctgcggtggctgagctggct

SEQ ID NO: 164222 - DNA, 542 bp, Zea Mays
gtgctgttgtgattatagttggtcttgtcgcggacggtttgatgttgtcgtttctgcctttgttgtgctagtccggttgcacccttaggtgtcttctgcgcggacagtcttcgcggtaggcttcggttttttcgcacttgttgtgctagtccggctgcacccttaggcgacttctgcgcggatagtcttcgcggtagactttgattttttcgcacttgttgtgctagtccggctgcacccttgggcgacttctgtgcggatcgtcttcgcggtagactttgattttttcgcacttgttgtgctagtccggctgcacccttgggcgacttctgcgtggatcgtcttcgcggtagactttgattttttcgcacttgttgtgctagtccggctgcacccttgggcgacttctgcgcggatcgtcttcgcggtagactttgatttttttcgcacttgttgtgctggtccggctgcacccttaggcgacttctgcgcggatttgtcgcacgcgagggtggctagcgcttagcctcgtggtgacctcg

SEQ ID NO: 164223 - DNA, 596 bp, Zea Mays
gctgaaataagtacagggacatacaaatatcactattgtagtaaacacttagtgtaccatatcacacataggtctgttagttgttaagtaatgcagtaacaagtaaattaagagaataccaatctaacaatgaaatacagaaccaactcatatacaggggcggagccaggtcattttggtgctgtcagtggatagccataattttaggcgaattatatataaaacagtgctaagaggtgattatgagatagatagtacccattaaataataaattgatagcattggtcagctccgctactgctcatatatgaaagtgcttatacaaatcaactaattatcatactgcagcggctaatcctctattgcacttacaaatctgaatagaagggaagagtgagaggctgagataagagtaacctgctgtagaaaatgtgtgaaagcctgaagccctccctgtccctgctgattgttgaatctaaggatgaacaaccaaagagaacactgtagcagattagggaggcgagatccataatatcagacggccgacgagagctagcgtagggtcagagtaggaggaaggccacaacagcttcat

SEQ ID NO: 164224 - DNA, 794 bp, Zea Mays
gacagtggcttgggtcttagagtgtgaccctctcccgaagaagttgaggctctggttgcttcacttggtgatctccccaatgatgagaggcaagttcactttgagatgcctatgaacccaagcgatgcagagataagtgctatgctggacatgttggctgaggattcttctgactcggtccctactgaaaccatagctgttgcaactattctagaacctggaaaagccttcaatgctcaaaaatctgatagtgctcgcccaaagcgccttcgcccggccagtcatccaactgctcctgccgaggggaagaggaagaaaaagaggcggcttcagcgagtgtcgtgtttgaaccaggatgctggcccttctgctcctactgctgaagaagtaccagtggaactttttactggagctgaccccaatgggtgtgaccttgatgatgctgaacccaatgggtgtgatccggccagagctaaccccaatgggtgtgttgttcgtattgttgacgaggatgaggaagaagaggaggaaatccccttaattcggaagaacagtcggcgttacctagtcagtggggagagtagtggtattccttctccagctttatctgctctcgttggtctgcaagagttgtccattgcaaattttgatcaggctctcgaggatatggttcctaaagatctgctgtccgagccaacagatggtggtatgatggatgtttgctctgacattccagatgtgggattagagttatctcgagcagcgtctcgtgcctcgtcgaccttggagtgtgg

SEQ ID NO: 164225 - DNA, 1043 bp, Zea Mays
cttcgacctaaaccaaattcactacctggagaacgtttcccctaacttaattgcacaaatggtgagctatcaagctctgtccgcgtgaaccgaatgggtggcagacagatgatcgtgttcccggtgatttgtgagcccgcagtccaaattggtggttcggcaagcatcgtagacatgtgagaaagcttaaacgagggagagggagggttggactgagtgggaaggtagctggccgcgatgaggtcgatttcgggtgacgaaaacctgaattgggggaactccggaattagagctcgctggtgatcggctaggggcaatattaggtggcttggtgcgtgatgatgttgtgaagctagccgcgggctcaatttataggaggagcgagcggtggtgatcaatttggccgagccgtgctggcggccggagatgaagaagaacacggcgctgtgaattcgtgtccaccgtcgtggcaatctccccggcgacgatgggacaacaatagggagtcacggcgacgcggtggaaaggctcggacatgcggcacaaggccggacggcggctatcgccggcgttcctatccaattccgccgcggtgacgcttgtacgatggccggaatattttactggccggagttatccacggcgaggatatttacgcgactccgagtgccatccggttactagtgattgtgaatctcaacagcggcgacgatcccaacgcaaagtcatcggcggtgaggggcgcggttgatctgatccatttcaggtcactgtaccatggcaactactcattcagtgcacctgacagccaagttctagggcagttttcctcccaaattcctatggcaacatccccgagtatctgcataaaagttgtagtgctacataccagctacaaatcgactatagtgactgagctcatttgataaatagatcatggttgaattcaaccccaaagatggctctgttacactgcaagtctgaatttcagaataaaccagcctgacagccaagctttgagcttaattatctctggattgttc

SEQ ID NO: 164226 - DNA, 324 bp, Zea Mays
aacagagtcttcctgctttggtgcttgggggtgattttggtggtgtgggtttgggtgatgcggaggcggatgcgggggtggaacaacttgtacttcctgatggtgccggtatgcatggttgggtggatgctggacgtgatcgttgttgtatggttattgttggtggtggtggtatgtgtgcgcgacaactctctggttgtcggctggctgtgctcgagacatcctgtccctggtggccttcgtttccgggcaatctcttgttgggtgtgcgcaatcctcgccatgaaacatgtagtaaaatctgcatggttgctgcgtccgtcc

SEQ ID NO: 164227 - DNA, 428 bp, Zea Mays
ttgtagttgtaggagtagtaggttatatgtgtaggatgttggggctggttcctagagggccgacccttcttccattgcaatgtgtcccctctgaggaataaaaatttatatttaccactttcttttgatgtgctttgccttctcctcagcttgtgcattgtttgacagttctggttacgcgcgttcatcctgataatttctgactgactgatgttgttgaagagtttgactgacattcagctagcgctcctgtctgatagcccgactgactttgtttcactgagggtctggtccgagttacctcttcccctagtgcgcccgacttaatgcgcctatacatccctgctggcaatcccctagtagtgaaccctaactctgctttttctgccttgatccaatttttgaaatccttgctcatccttgtgatt

SEQ ID NO: 164228 - DNA, 2825 bp, Zea Mays
gggtaatcgactagtcatgtttcgttccgtagataagtaaggtttccgtattcctctgctgccccctggcatgtatggggattctcgtccggttgtttacctccaatcaggagcagttttgtcttcttcactttggttttggcttcatggtttgtttagtcttgttccatcgctttccaagggatttggcgcttgattattcgtttggtttgtacggatctggattaactcgtaaaccatttgctcgcggcgcgtcgtaattgttctgtctcgttttttttaaaaaaaaagtcgtgctaccctttacgttgccagattggggggatcgcttctgttttctatctgttatcgcatagatcaacattttatgataattgttctccattagactctgttctcgcatggatcaatttttatgataattgttctccattacactatctgttctgctgtgcaaaattgtttggtttcgcatggaccaatgaacataggaattgctggtgagcttttctgtgaaactgtctgtgaactgtgcccgatctttggattttttttgtttcctctttaactttttatagcttacggacacggggcacgttctatcttgcgttcttttctcgagcaaactcaagaggcgtttctgtgctactgttgttgattagaaagtttagtgaagcatataaaacattttttctgtgggtgcaggaatcagtagagtagtttctttctggtgaaggtctggtggaatagagacatattttttgttgcttacagggaaaaaagtataaaaacattttttgttgttaatgtctgtgttctgcccgtgattgcctgctttactagctggcagcagtgtccgcttcgagctgtgcatatccatccaaccattcatgttgactcgtccacgtggaattactgcatagtttggcaagtaaggaatgctgtagtggaatcttcctggcatgttgacttttagaggatttgtcagagcaggatagagacttttgccttgcaccgacggctgcctggcaacgtcctgtttttaaatctgctgagatgtccctagagcgcattgttggaacagtttcattgttgttatgctgatgaaagttcagcgcgtccgctgtttgatgagtcgtactttgaggtttgcagacgggcttatttatatacgtggatgttcctccctccacacccgcctatgggctgtggtagatcttaaaaactggtccattatttgttgctattctgccgatcacttttaatgtgtacgagatgtctctttattagctggatttagttagagcatctggctgctataagcctataacatacaaccattagtcctagagttggagctatgtgatgatatttcttctagcatttgtcaataattgcgggcttgttccttgcaatttttttgggtgatggagatgattgcctttgcttaattacaatcacgtgatttgttatggccttatgggagacatatgtatgatggtgcattttttcctgctacagcaaacgtgtgccacctagagtcaaataaagaacatttcaaaatgccttgtggaattctaccatttctttaacaatggctgttaactgaagtatcgtcagtatattaatatttggtctttcttcgtgaggctgccttgttgaaaacctgcgcaatatcacttccagactctcctcttggagatgcaagttataccttacactttcttttctgaaaaggcatccggcaagaagttttccaggcatttattagtatagaagtttagcttaggctttatctgttgtaatgcacattgatgattttgacttttgacagactattttgatcagtataatgcctttctatctcatgtagaaccatctgttgaaccttttggcatattggttttatatgtaataactagcacttgtttgctatattggtcaggtttttgcatttggatcagttccactaaagacttaccttcctgatggggatattgatctaactgtccttggaaatacatcttatgatagtactttggttaatgatgttttctgcattcttgagtctgaggagcagaatagtgatgctgaatttgtagtgaaggacttggaacgaattgatgccgaggtttattctcctatatacacatcctataccttcctagtgattcgttttggatggttgtttaggcaatctatgatattgtaatccgagttcttacttggcattttcattctgctcgcatgatagttaaactgaaagctatctgtccctcatctttctctttgacatgttattcttattgtttttcacacccatctaattatctgaaattcatgtccatccaggtcaggctcattaaatgcactattggaaatattatagttgatatctcattcaaccaaactggtgggatctgcgcactctgcttccttgagctggtgattaacacattttattttgtggaaatcatatttcaagaacacactcttcttcactaaaagcccttctggttaaataagcacttagctcattgaatgtgtgggttgttcaacattggtttcttgtgctgtctaggtgtactttcattttattatcataccaagtcatagcaaataaatgatgattccttcgtcaggttgatcggaaagttggaaaaaaccatctatttaaaaggagcatcatattgatcaaggcatggtgctattatgaaagccgcctactaggagctcatcatggacttatatcaacctatgcactggaagtacttatcctttatgtattcaatctattccacaaatctctccacagccctgtggag

SEQ ID NO: 164229 - DNA, 2092 bp, Zea Mays
ggttgatcggctaggtcgtcgatcgattggggcaggtgatatgggtaccgatcgatgtgtttggaccgcagctgttatcgaccacatttggtcgataatggcagtcgatagctgagtggttgcctctggtctgagttgtttcattagttcgaatttgaaaataatccaaaaaatcataattccatcctataaatagagaggggggcttgaattcattcacacactttcacctccgattctcaaaccctctccttcattcgcatattttcatctccgtttcgattcggttgctttaacctttgtttcatatagatctgaggtggagtcacaacaataaaacattcacatactttctcaatgagcaaactccacaacgtcctaagacccctgctagtgcggggcaagttttcttcgatggtcattctctagtccaccatcagcgtcaggaaggtacttctcgtcccgatggcataactcctcaacctctctttctttacatgtatgcccctcctccatatccatactgaccatgtgtaaaagctccctcctactattaagccaccaacgaccaatgctcctcctagcactgatgaagcctcttccaccgatgctcatcctacacaacctttcacttatttgtatcctcctccatacatgtacaagtatccatacactcctcatccatatggtgctcctcttgcgttctttcccaccaatggtgttcctcccatatatggtgttcttactccatctcatgctccctcaagcacgatagtatcaccaagaaggtagtgttgatgcccatcctgtcgactggctacaacagtatagtgttgatgcccatcatgttgaaggcatggaagaatatatcatgttggcctggctgccattgtccatgagggccttgtgtatttctcatcctgctatgttacaatttatgaccattgcgtttgtatgtggggcattgcaaaggttgacgtcgcttgcgtcaaacgtcaaggggacgtgtgaccattttgtttggataattgtcctgctaactacaacgtgattcacactttgataatagtctcttctttgtctcttgttgtcgaagtttgtgctagaatctccgttgattataccttgaactgggggctgagggtaaccctcttcttccttgggtgcgagcttgggtagctgtcttttggtgttggatcagctagggtggtggtggtagaagttgtagcctttcaggatggttatgtaggagttggtagttttgctggtactgttggtatgggtggtagatatcttgataaggatgatggaattgtggttggaaagtatgggttatggccttcagtagttgctctaggtggcccctcgttgtcctcttagcctcaagtctctctttggcttctttggtggtgcggcaatctctagttggatggtcaacgtcctcgccgtgaaaacgcagtaggacctatgttcacgcatggggtcgcggtcacgtcccctgcctctaggtgctctaccacctctactcagttgttgattgtggttgtagttgtgagggggtcctcaaattgttgctgttggttgatgttgtggacttgctggtttggaagtggaggcagctaacctcgggaccatggtttcgagtttattgtgtgtgagggctccattggtttgcattgtgcctcaaccttatggtaatggaggtctttggatcttgcatatttctcaaatagacgatatagctcttggagggttgtgggggtttttgggtgcaatgactatacaaatggcccatgtggaggccactaatggcatagtggatatggcgattctgtctttgaatgatggcaactatgatttgagtgacaagaatttgttgtagtactcatggaggcattccttttccaactgttgacacaatggcggctctgcgagagcatctatttgcagcatgtacccatggaagttgagcaggaacttctcccgaaagacagcacatgagtcaattgagaacgagggcaatctggtgtaccatgttagggtggggcctatgagggctataatgaatgacttcgtcattgcgtttttgtcg

SEQ ID NO: 164230 - DNA, 416 bp, Zea Mays
cgcaacttcctggacgcaacaagtatagcatagagaagcttgtgcatctgaaggtacctggcctttgcctcgtggaggacctcgctgacgtagtagaccggcttctggatggttcggacccctatggttagtcccgggtcctcaacctcttggccttccgtcaacatcgtggtggtcgaaccaccaccttctcctgggggaacttgttgactcccctgtggttgttgtgccgccctctcggcgaccagcaccatgctcaccgcctcggaagccactgcaatgtataagtacaacgactcccctggctccggagttaccagtattggcagggatacaaggtgctgtttcaactcttgaaaggcatgttctgcctcttcggtccaagagaatggaccggacttccgcaatagcctgaa

SEQ ID NO: 164231 - DNA, 928 bp, Zea Mays
gccacaacaatccaccatgcaaaccaagatcatgagacaattaggcatcccacatgacatcaacgagagacatttcagcaagcattggagttgcagtaccttatgcaaccaccagaggccctagcacctcgtgctctagctttgttgctagcattttggcgcatacctgaggtgcagagcacatttcaggtgatagaggcagcaccccatagcatgtcatccccgaaccttagtttccaactagagaagacccaccacgcttcaattgtgccacaaatcgctccatcttcacaatgttctggtcactaatgtccaacattgttgatggcttaaattatcacccccacgtatgatccagagtcaattagctgctccaacgaaataccttgcaagccatcaccatccaacattagaaactagaaagggttaaatgcttattctagcaagcccatcgtctaaacattagaatcttgcaatatacattctgagtctagatcacatgtctcaatcagtatatagtcctaatagtcagcaaaccccaaaaatgcacataactcagtgacagttgtaggtgtcggccaggataacaatgcctcagtctttgccagttcagtggccaccccttgggcaggaaataatgtgtcccaagtactccagagattgttgaacaaaagaacacttagagtgtcccaagtactcacagtatagctcatatagatgttcattgcttcaacaactaaaattaacttgcctccatactgacatgccctcaagatcatgttgagtgactattctccatggtctcaagccacatgtccatgatggaagacacatatggatgtccttctattacaaatttcttgcttgtgattcatggtacaactactcgggctcatatgttgtgccttcactggtgtctaaatttgga

SEQ ID NO: 164232 - DNA, 551 bp, Zea Mays
agcaggacatgggtgttgggaatggaatggggtgggaccggtggcatcatgcgccgggaagggggcaacaacgggcaatgtcgggaatgggacattcgagcggactggttcgagtgtcgtgaggaataatgggattgatcagatatatgcaagaactatattaaggatgaggatgggactcgggaggactaggtcgttccgactaggaggtctaggactggactggtttggtctatccaaaacttttatctctactacgtaaaacaccagttttcatcgttctacggttttcatcgacgtcatgcacactcacatttaaatggtacaaagctaaaattatatacagatagggatccaaacaatggttgttgatttcaatcccgaattcacgaccacctagccaacagaacacacatgttttttgtgttttatactctatacttaagcataaatgtaaactataacaacatacgacactttgctaatttttctatacttaacaataaatgaacattacatataagatgtattattaaaaactgagggagggc

SEQ ID NO: 164233 - DNA, 578 bp, Zea Mays
ccctgagaactattcaccagagtcactgacaattccaataaccccctggctttcccctttcttaacccacgctccctcctcaccggaacactagccgtagagagaaaaagcggcggcgtggcttagcagcggtgagagaggtccgatggagggtcgggtgaggtctgggggcttctggcggtcacatcgagggccagatcgccggcggtgatggctagagtagggctggccgcgtgcgcaagcgatcgggctcgtcggcgacgcgtgctccggcctgctcacggcagtagagttcattcaaattgctcggggagcttcacgagaggtcactagtgttgtatgcgcaaggaatcgaagagcggctcaccgtgtagctcggtctacgtgcgtcggcggtcggacgaagtccggcgacgtcaatccagcacctccggtgatgtggtgttcggtccaagggcttggggagcttcactgagctccagggaggctagccgagggattggatggggtggaggagggctagagtggccggtctatggtggtcggggctcgagcggccgctggcacgccgtgcgcag

SEQ ID NO: 164234 - DNA, 519 bp, Zea Mays
aacacgacacaatatttgtgtcgtacgaacttgtttgcgtcatgtgattgttatgtcgcactctcgcttaatcggaccgcccctgtcgggtcagaccaccatcgccaagtcgtgtattttttgcatgccatgtaggcactgtttgcctgtcgtgatcatcgaaccggaattgcgcttgttccgcatgttgcgtggacttaccttgtaactagactatcgagccacaactgcgcctattgtgcttgttacgaagacttgttgtattgtcgtagccctgatgaccgcacacactttgataccagatacgctgaagcttgtactcgcgtacacaaaggtgagttattcgtacccttcaagtcacatcatagtacaaccttcgcaaataattttgtttggctctacattttgtttgatttatgttgtgtggcatcaaatatatatatatatatatataaaaccaattgctcataacaactttcacaagctttatagttctttgtagatctggaaaattaatga

SEQ ID NO: 164235 - DNA, 488 bp, Zea Mays
cgacgtcggcgttttagaagtaacagccgagtgataacggaccacgtcggccgctttggaaatagtggtcgagtggagtcaggtaacgtcagcgtttttagaaataacagctgagttaatttgggctgcgtcggtcattttggaaataacgaccgagtgatgacatggcacgctagtgcttttagaaataaccgctgggtgatgacatggcacgcctgcgttttagaaataaccgccgggtgatgactgggaactttttagaaatggcatctggcccgggaaaaccccatatgtactgcactgtcgcacgcctccacgctccgtgccctagtttctgcttttctgcatccaggctttctctgctttcctgcaatattgcttctgctccgctcgctagcgaggttgagatggtgcccaagcggaaagcttcgagttcgtctgtcgcaatcattccccccatcgatcccaacattcagttgcctttcgca

SEQ ID NO: 164236 - DNA, 850 bp, Zea Mays
ttgcgcgtgaggctaagcagccatatcagcagcttctgtgtgagttcctcgttgtctcgcttctccgtaggccgccgctcgcccgctccaccgtctgcaggaccgccactcacgtttgtgcccgctgcttgactctgcgttgcgtgcctatgcctccaggactgcaggggggagaaagatgttattgacagctaaaaagtacagggcacgacaacacaattatctactagcttatctttgccttccccggtttggcagtttctctgacccctcatctactattgcgtgagtccctcatctactactgcgtgagtaacaagagtaagtagcatatcctttcagaaagcattaaactgaattatgtgagtgaaaaaggttttgagagactctgcctgttcgattcaatgaagttgtgtgaataccagtgccgagaaaacattaaaaacatttatttgatgggtttcacgcattcaatccaactaaatcgtgtgattgaatacgtttatttgagaagctttgtccttattttatatttgtttgctgtaaaatactttaagttattgctttatattaaattgtttgttgtcaactaaaacgtatatatacacacacatatatagatttgtacatgtagttctatataaaatctgccataccttaatttttgtgcgtcctccgtcactgctcaccggaacatattttcttctatctcggtcgtgccagtggatcggtatatttagattattttattcgcaatatatgtagcattatttcatcttgatggattcttcagacgagacaaatgaaatacccgttgattatagctaattggacaagcattcaaaagttg

SEQ ID NO: 164237 - DNA, 565 bp, Zea Mays
ccaccgacggggcctcgacgggtgtttctagggaatcgttttggtgcactggtggtctgcgtggggtctctgggctctggtggcgatccgggaaccggtaattgctcgtcggcacaacaatttcaccgccgagccgcactacctcgtggatgggcctcttcaccgctcgaccatcggtgagtaataccccatcatctccgccatctctttccccacgtgtagcaccgctagggggtcgcttagcgcacaaatccgctagccgtctcactccggcgatgtcctccgccgcggagtgacgcgcgccgccgcggttctctgtccacggaggggaaaagaattccggccgtcgatttcctagtcctcggcgcctgggattttgcagcaacgtcagacagcgcgacctccgccatactcccgctcttccgtggtcgggcatcacctcacctcggctggtcacaagtgagttcccatcgtgttcgtcttcctttcccccacatcatgccctagcgaattggagtatggcgtagccggattcctgggagcactggccaaccatggagtcgcc

SEQ ID NO: 164238 - DNA, 513 bp, Zea Mays
cgggccacaagatttgttcgtgcataggggaggaatcatggactgcgcctccttgacatcccggatcatgtttgtgaggtcatggagctcggggttcaccggggcgtggcgatagctcttctatcgcacagcttcactttgctggcaacctccgcgatgctatcagtcctcctgccagatcgacaatggcagacttagacctcctagcaggtgactttgatgccgctgtgaacgctgtactcagggtggtgtcggtggaggaaataatttgtgagcttctgtatctccgttccgtggctcaaccatttttgcaacgcatatcgactttgggtcccctagatagcctcaggatttctcttagtctgggggcgcttttcgtgcaacttttcccatttgccatacccgcgcgggatgagcccctgagtctctgctcgatgcagagatccgtctaggggtcatcccatccttttgttttactctcccccgtgttaggctggacgttcgggtttaccc

SEQ ID NO: 164239 - DNA, 904 bp, Zea Mays
ggcctattcaccccctcttggctacatctagatcctgttcccggacaaagtgaactttcagggtgactactacctctccgacgtttccgatggatacaactccgacgatgagggttatgacccgactcgggagtcttccacgacgggcacgaggagcacggcgaaggaaaccagcttggcatgccttgggaggccaacaccctggcaccagccccacacgctacagagtcaagagaacaagatacggttcagacccccacgaggagtcagatagcgcaccttgagcaactccatgaactacacgccaaactaggagatgaattagaatggctacaacaacttgggcacgttcacgagcaggaagcagtaggctttcgttgtttggcaagctacatgccaaactcatagaagaacaggaaccacattgcacaatgatacaatgaggtcgtcgttgaactagcgaagatagcttcggggcgaactacgattccctcgaaacgtcttttccagggatgtccacaagccttccattgtaatcaaggaagcacttgaactagctaccaacaccagcaggcctccatccgaagagctcgaagccatgcagatcgatggagagcgagacgaggccacaacaacctctgactagcggaccctgtacctggagtacctcctccgaggagaactacctctcggcaaggctgaggctaggcgactaactcgacgtgccaagacattcgtcctattgggggaagaaaaggatttgtactgatgcagcccctcggggatcctccaacgatgcatccccaacagccaaagtcgggaactattaggcaaaatccactcgggcttgtgagcaccacgtcatgcccaaaccctcatcgagaacgccttcatgcaaaggttt

SEQ ID NO: 164240 - DNA, 964 bp, Zea Mays
gattttagggcaaagaccaccacgaccaattcgaggtcatgagtcggataattcccctcgtgcttcctcaactgccttgagccataagtaatcactctgccttcctgcatcaacacacagccaacaccaattcgagaagcatccatataaactgtgaaacgcttaccactctcaagcaaagctaggataggggcgttcaccaacttgttcttcaatgtctgataactaacctctcaatcactggaccataccaaaagaacacccttctccaagagtctagtcaaaagcttagcaatgctggaaaaatttggtatgaagcgctaataatatccggcaagccctaagaaacttcaaatttcagagacactagagggtctcttccactccaccacagccgcgacattcttgggatcaactgcaatgccctgctaattaatcacatgacccaggaaagccacttcggacacccaaaaggcacacttcttcaatgtgccataaaattgattcttcgtaagggctcccagaatgagacggagatgccgctcatgctcttcctttgtctttgaataaatcagaatatcatccaggaacacgaccacaaagttgtccaagaactcatgtaacatcctattcattgcttccataaaagcagcaggggcattagttaagccaaaagacatgactatgaactcgtaatgcccatacctggtgcaaaaggttgtcttctcaatatcctcctcacgaatcctcaattgatgataactagagttcaaatcaattttggataacacctgggcacccctcaactgttcaaagagaacctcaatatggggtagcagatatttattcttgattgtcacttgattcaaagcacgataatccacacataacctcttgcttttatccttcttctcaacaaacaatactggggaagtccatggcgacctgctaggcctaatgaaac

SEQ ID NO: 164241 - DNA, 385 bp, Zea Mays
gtgctcgagaccgagcaccagcgccttggcgactggtgcacccaactggaggagcgcactaaggcggtgtcctgccattttgcctcagaacgggccgagtttgagcaggagcgtgaagacttcaaggaggacatccggaaggtgtctgaccgagaggacgaggtgatccagaaggagaaaagcctggctaggaaggaggcacgcttagaccaaagggaggaggccgtcacagggctccatgctaagctgaaagcttataatacggtgctggagaaacagcgggacaagcaggctgcggctgaggtgaagctgcagaagctgcagcaggagctcatcgacagggccagcgacattgctcgtgccgagggaagccttaaggcggggg

SEQ ID NO: 164242 - DNA, 395 bp, Zea Mays
ggcatgtcctggagctcgggtacatgaacttttacattcttctttgaaaaaacaaacacaacgtgaataagtgtctgatgtgaaaccagacgtactctaatacatgcaggattgtacgtaggacgtggtagaagtttggtcaataatatgttactgccaacgagtagcagcaacccagattaaaggaaatacatatacgtgggtggtgcttgttcgtcactttagtaaaacagggtattttcgatggttaaagccatcagacataagttatttccgacggacggtcgtaggcttatgttcgatggtacccgtccctctgtcgtaaagcgtcaaaaatactcttatttccgacggtggccgttggacataagctatgtctgacagcaccttttggc

SEQ ID NO: 164243 - DNA, 583 bp, Zea Mays
ccccccctctaggcgacttttaattgatatcagagctaggcacttcatattgagtctaacaactcgaagtgatggctcgtagaagatcccaaaagaacaagaagacaactccgaaggagatcaatgaggtaactcttgaaatattactttccgattgttctaattatgattcttggtctactagggttataaatgcctttagaaccgtagatccacaattagaacaaattttagacaagagtattatacctcctagttatgataggaaaaatatttccgaggaagatcaaagatgtatacgcttaaactatctagcttttgacatcttagttaattcactaagcaaggaagattatcatgccctcataatgaatcattatgaacatattcctgatgcgcatgatatttggactagaattaaaatcaaggttgatgagtccaaacatgatagttccttttgtgcttctacttcctttggtatttgtaatactaacccttgcaaggaagaagaagaaaatgaccgatggagaccaaacgatgaatccacctctccaaaaggtttgtcttcccatttcgattccca

SEQ ID NO: 164244 - DNA, 635 bp, Zea Mays
ggggtatagagctaccagagccgtccgatcacaattacacaactcagattagatctttaggtttaataaaccggtatcctattgagaccgcacgatttaagatctgcggcccaaatttaatgaaacgctgatccaacctccgccaccggattcgggatctacggtcgcaagaagccttagccgaaccggtttctttggtttgatctagtccgtccatcaatcaacccacggccagccatctccgtcaacaaccctgccctcaagacggcggcgccagagccagtcacgacgaccgccattgccgacacacgccgcctagtgattccgttcctaaaacttctatccgaagggcgcttcgctaagtagaagagggagggaaatccctatgggcgaactcaccgaagacggcgaccgagacgatgctggccacgacgaggggcgataccgcggcggaggaggagcgtcgacgagaaattgtccatacgcgaggcgattttagacacccgcagcacccggattgactactgagaccccaggcggtgctctatgacacttccacggagctaaattatcgtggaaccgcagttggactggcgccgatatcacccacccgcatggcgatgtctgcaatttgc

SEQ ID NO: 164245 - DNA, 302 bp, Zea Mays
ccacggtgaaggccacgaatcaccacaccagtgactcattccttctccgaccgccaccgtgcccaatccaaattcactggccaccgctcatgcctgctataaattgagcatgccgtgagctccgtaggataattatgcatccaaagcaccagcaattgcctccgatcgttcaccagagaccgtgaattgctcatctcccccatttctgtttccgccaccgtggtagaaccctcaccgtggtcagcaaatcctaggtctgttcatcctccctgctgtcttgtttcaacatccatgggtcctcc

SEQ ID NO: 164246 - DNA, 740 bp, Zea Mays
ctggggctggctaagatgaggtacttggtctgatgtagcctttctccaacaactcatcaatctgcttcttgagttccaccaattctggttcggacactcgataggctttcttggaaataggggcggtgcctgggataagctctatggcaaattcaactttccttttaggtggcatgcctggtaactcttcagggaacacgtcggggaattccaacacaattgtaatattctcaattggattggcctccttgtcatctactgataaatggtgacaggctccttcttctagttcaagcaagtacagtttagttactatttcctttccagatggggacaccaacttgacagttctcttgtcacaactaacaatggcttggtttatgtgtagccaattcatcactaggatgacatctaacccttgagttcccattactactaggttagcagggaagtctaccccccttatttcaatccttagattcggacaaatcctatcggactgaaccttcccccaactgagttaactcttaaaggtggaatcattggttctatggagatgttatgtgcttctacccaagatgtagaaacaaaagaatgtgtggcaccagtgtcaaataatacttttgttgaatgggattcgaaggaaacatacctactaccacgtcctaagcatcctggattgcttcggcctccaagtggttcacctttccacggttgtaggcctaaccacagttgttgcc

SEQ ID NO: 164247 - DNA, 554 bp, Zea Mays
aagctgaaaatctcgcaacaacaatgtatggaattgacaagcttatatcagatatggttgcagaggagacaggtgtggctgcggaggaaagcatggccgcagtgtctgataaagggaagagaattgttgatacttctttgggagagaaagattttgaccttcggcacctgggtggccagaaactgtccgaggcagacaaagaggagttgaaagaatatgcaatatcttgcggctattagccgggatctttgctcttcggcggggttgatgaagaaattttaggatgtattcgtgaccgcaccggggcgaaaataatcggcactctatctaagagtgttggtttcccgaagctggagtctgacatcagtggttaccgacggcaacacattgtcggtagcctattttattccaatttcaaggtgaaatctttgtctagatttttgttacctttgtgatggattagaatgttctaaccttaacttgtttttcgtagagcatgctgctaagtaaggcgctaagaatgcaacatgatttcgaagataagaaaaatgaaa

SEQ ID NO: 164248 - DNA, 888 bp, Zea Mays
ccacattgggatcagcaacagattgggtacacccattggggtcagcgtcagtaaattcagtcacaggcacttcttcagcagcaggaaccgaggtaccaacgtcccgatccaaactggatactcgccgaaggcgtctctttttctttttctgctcatcagcagaaggatcaggttgactggctcggcaagggcgcctcgggcgagtactggcaggcttctgagtatccaaagttgtatcagcctctgggaggggcgccactaccaatgccccagcaggagcagcatcagaagagtcctcagccagcaaatcaagcatagcgcttatctctgcatcactagggttcaggggcacctcaaaatgaacctgccgttcatcatcaggaatatcctcgagcgaggcaaccaaggcactaacttcttcagcagagggccgcactctaaggcccaaattgccatcagtgacaggaggattcgacacaaaaagagtgaaggctttgggaggaggcaagttccaggctgagaatgctactggggcaccagcatttgacactttgcctctaaggatcatctcaagtcggttcaccaagtccatagaggtaatccttctgttagtaacccgagttgagtcggctaggcctcgatacagataagccgggtatgcccagtctttccacggctgaatattcttgaagacaaaatcagcaaccacagcttcagcagtcagacccttctcctttagcaatccaacttcagccagcaaggcacctgcctcagctacctcctgatctgtgggggactcgatccagcttggggtgcgaacatccggctgtcttcccgaccgaggggggagagagtttccataattctcaactatgaaccactccaagc

SEQ ID NO: 164249 - DNA, 1276 bp, Zea Mays
ggtattacaaatcctacccccttaaaaattaatctcgaccttgagattactacgagttaggaaaaaggtggggaaattctacttgtaattcctcttctctctcctaggtagcttcatcctctccatgatgactccattgcactatgcacattttgatcactttgttcctcgtaactcgaatcaaggtgtcaatgatcttgattggatgctcagtgtaggttaggtcaccctgcacactaagttcttccataggtaatcgttcctatgggacacgtagacacttcttaagttgagatacgtggaacacatcatgtacttctgatagattatctggtaactcaagctggtaggccatctccccaactcgctttaggattttgaaaggtcctataaagcgaggggatagcttgcctttaactttaaatctcctcataccctagaccggtgacactttaagatacatgtgatcacccacttcaaattccagtggtcttcttcaggtatctgcatagctcttctgcctcgactgcgctattctcaagttctccatgatcatctaacttgatcttctgcctcttgaataattttagacccaaagaactgtctctcaccagtctggtcccagtacagaggggttctgcactttctgccatataaagcttcaaacggggacatcttcaaacttgcttgatagctattgttgtaagagaactccgcatagagcaaactcttgtcccaacttccaccatgcttaagggcacaagctattaacatatcttctaacacatgattggttctctcggtctgtccatctatttggggatgttaggccgagctaaaattcaacttcgtgtccaggcactcatgtaacttcttccgaaaccgagaagtaaactgggaccctcggtcagacacgatcttcttcggtactccgtgtaacagactatgcgggatatatacaactcagctagcttggctcccgtgtaattagttctcaccgtaatgaagtgagccactttagttagtctgtccacaattacccaaatagaatcatacccaacgggagtgcggggttgaccaacgatgaagtccataccaatttcttcccaattccactcgggtattcttaaagggtgaagtaatccagctagtctctgatgttcagcttttaccctctagcaaacatcacacactgctacatgtgaagccacatctctttttagaccataccacaaatacttctgcttcagatcctggtacatcttggtactaccag

SEQ ID NO: 164250 - DNA, 538 bp, Zea Mays
cagattgagatggaaccaattgcggtgcagcaggatctgaccttggagtgtcgtccggtgcgtatcttggaatcctcggaccgtgttttgaggaagagatcaattaagtatgtcaaggtcttatggactaatcagtctgagcgcgaggctacgtgggaacttgaggagctgatgcggcagaaatatccggaactttttgttgtgggtaagtgttgttgattcattaaatttttcccttttgtcgttccgatagaagcatcaaaattcgaggtcgaattctttttgagggaggtagagtgtgatacccggtttgcaaagaggagaagtggaggttattgtttttgttctttttcctcattcgggtgatgcgctttgggaatttggaatttgtggaaaatattcacctgtaagacagtagaatttctttggttagttgtttgcgacggggtcgggagctgtcacatgggcgagttgggccttgaaccttgatccggcccattagccgcccccctttccccttgggatttttgcagccgcc

SEQ ID NO: 164251 - DNA, 444 bp, Zea Mays
gactggaggaaggtttcgtacggggattgggaggtattggtctggctaaccatgacgccgccgcgggagggggctgaactccggtgaccaaagctgggtgggcgtgaccgagcgttgtgggccatcgatcttcctaaggatgatccagattaggcgtgaccgatgagatccgtcgatctggcgatgaccggtttagattaatagtaggcaacacatttcgcgtagatagatctggtgcatccaatcccgatcgtgcggttgtcgttttgtaacggttcgtgggtatgtagatctaatctgagcccttgattcccgatcgggcggtcgtggtctgtggatacccttgcggccgagcgttttgcttaagagtccttagagattttgggaatcaacccgcactctgcagtatagtattatgagtcttaggattcttacgaggaagcc

SEQ ID NO: 164252 - DNA, 449 bp, Zea Mays
cggcaggttgattttactgaaatccgagggctcctatgtaaaaggggttctgcgaaggggtatcggcgaagatcggccgcccgatccaacgcggaggcccagatcagcctagtcctataaacgaaccagtatccaataacggccactggattcacgatctacggtccacacttaaatagatgagaccaaatccgatccgctggattccccatggacggtcccgatcacaaccctgaagcggtaaccggaatcgaatctccaacgtccatctgtgatcaacggcccacgcgcgtcttccccacccctatccgagccgggcggctctgtgcgcacacgacggcggcggcagaccgacaatcaccatctcggtgctccggtgaaccatcccacgtgccaactaacgcaacacaacgaggaactcattgtgaaagctatagggccaactcacc

SEQ ID NO: 164253 - DNA, 1715 bp, Zea Mays
ccctcgggggctgggtaactgccagcaccaccctcgggggctgggttttctatagcagccacctctaaggctgaaggcttccctgtcacctccatgtgagtcgagcaactcggaccaacgtcttggcattgaagactgccttccaaagtcgacgatgcacgagacactgctcgggatacctccaatcccacgtctggaatttctgaacaaacaaccatcacgtcatcagcagttggctccgatagcatatcctcagggacgacctcctcaagggcctgatcaaaatccgatattgacagttcctgaaggctaacaagagctgacaaagctggagaaggaatatcactcccccctcactacctctataatgccgactgttcttacgaatcagcgggacttcttcttcttgatcttcatcaaatatacagacaacagccggtgcacggtcacacccatcgggatcaactttaggaaggacacacccattgggatcaacttcaggaaggacacacccattgggattaacctcaggtaggacacacccattgggatcaacctcaggaaggacctctactggcacttcatcacgagccggggcagaaggacctgcatcctggtccaagcatgacagtcgccgaagtcgcctcttcttcttcttcttttcctcaacaggtgcagtcgggtggctaacttggcggggacgctttgagtgagcaccctcaggcttccgagtctccactgctttgccaaactcttgtccagccgtgatagccatcggctcagcatgggtcgagtcagaagattccccagccaacatactaagcacaacatctatctctgcatcgtctgggctagctggcatctcaaaatgagtttgcttctcattattgggaagattctgaaaaggggcaatcagagcctcaatgtcctcgggagagggtcgcactctaagacctagaccaccattactagcaggagggttggacacaaactcagaaaatgacctatgaggtggcagattccaggcagaataggcaacatgagcaccaacatttgacactctgcccctcaaaatcatgtctagtcagctcaccaaatcttcagtgggaattttcttgttggtaacccgagtagagtcattgacaccactgtacagataagctgggtatgccctatctttcaaaggctgaatattcttgaagacaaaatcagcgaccacagcctcaacagtcaaacctttgtctttcaataaacagacttcaacaagcaacacttttgcctctgttacctccgaaggggtcgaagattctacccagcttggagtacggacatctagctgcctccccgaccgagggggaagggacttgcagtaattctccacgatgaaccactcgaggcaccaccccttgatgttgtccttcagcgggatgtcgagatactctgatttcctcccgcgacgcagttctagactggtgccgccaacaagttggtgctgtcccccagccatcccgggccgacaatgatacatatacttccataggtcgaaatggcgaagaatcccaaggtaggcctcacccagatgaataaaaatggaaacttgcaagatagaattaggattcaagtgggtcaagtttagattgtaaaaatcaaggagaccgtggaagaagggagaaacgggaagagcgagaccatggataagaaagggaacatagacg

SEQ ID NO: 164254 - DNA, 501 bp, Zea Mays
tgcacttcgtctgcgagcgtgtcgctgcaggtgacgttcggattctcagcgcccccaccacgctgcagttcgccgacatattcaccaaggggttaccgacgagtgtattcctagactttcggtccagtctcaatatctgtacaggctagagttgcgactgcgggggtgttagacttgtattagggtttgggggtcttccctgtgcatttacactctcgcccctctgtaatgggccaagcccaacaccaagtctattaatatacaaccccaccctatactagggttagggtttcccacaggtagtgatattatgtctagtagcctgccatatgtgttagagtatatttgttagtctagatattgtgtctcataaactaccatatatatttgtagattgccttatctcctatgtcatgtactttatataaaccgcctaaaacctcaatggaagacataagattttcctacagcatatacctttgtctaacatggtaatcagag

SEQ ID NO: 164255 - DNA, 444 bp, Zea Mays
ggacctggtatttgtttagagcctgtaaggcgaagacgggttctccatggatgaggtccttcgaagtgggctcgtccacgtcggggacagctgacgggactgtctgtggggacccatgttttatttcttgcggggtcatggcctccaatccatatagaaggcagaaaggggtgaacccagtcgccctgcactcagtcgtgtttaatgcccagaccgcttcaggtaacaaatcgacccacttgccctttttatcgtcgagtagcatcttcttgacagctgtgaaaattttgccatttgcgcgttccacaactccgttggactgcgggtggtatactgaggcgaaggcaagcttggtgccaatggagaagcagaaatccttgaagtcttggctgtcaaattgcttgccattgtcaactgtgagttcggacgggactctgaagcggc

SEQ ID NO: 164256 - DNA, 754 bp, Zea Mays
taaagatatgcagtcactacgtccatcaactgcaagataaacaattttgtactgccaaagatattaaatatcggaatgttattacactcataactggtgaataagtttcattgaaatcaatgttgggtctttgcgtaaacccttgtgctactagccttgctttatatctcattacctcaccattttcatttcgtttccgaatgaaacccacttatatcccatagggaagatattacgtggtgtaggcattacagccgagaaaacttctcttttgtaaatcgaggttaactctgcttcaattgctgccttccacttgatccaatccgagcccttagtgcactctgccatggtcttaggatctagatcgttttaaaggtcctcaacaatcttcttggagaaatatatatcgacattggtagcttttctatcataggtttaaccggtctcaacatagttgatggcaatttcatcaccccttatagacccatcataatttcccaaattaatgtgtctggggtttaccgatgtcccagcctaggcaatttgcacatccgagctaggtcgcggatcatcacaatccacttgatacattgtatcctcttggtgtctgtttgcattcgctattgttctttgcttcttagcaacagaatatcgcttattcaccatacttcttctctctaggagttgagtggttttattcggtacttccactctttctggtgcattcctagaaggaatgaatgatttagtgaca

SEQ ID NO: 164257 - DNA, 501 bp, Zea Mays
cgtttcctcttcttcttcttcttcctaggtgctcgagtttctcggttgatttggtatagcctagttttgacctgtgccacccattgttaccgcgtactgattcgcttggagaaatttccccttttccctagatgattgaactactttgcttgttgatcagaagccaatgtttgcttgaaggggagtcgagttatttgcccaatgaattttataatgggcacaaactgggaattcgggtgaaatgtagtattgacgtctccgaacggtggtccattgagtgatgaagagcttgtgtaatatcccgatgagtatttctcatggcggacacaagaaatgctggtttgcattggataagactggattttgtagggcccaggttgtggatgattcttataccagattccatatatgtgacacccagaaaaccctccaagtatgctaattagtgctataaatgttgatctgtatgtacttgcaatggccaaggcttataaatccgac

SEQ ID NO: 164258 - DNA, 527 bp, Zea Mays
gtccgaacgtagctccaagccaaagttcacacagagtattcctcatccaacatcctgcaccacgtgggtcacttcctctactgcgtgggccctactactcgggagtggcaaccaccccaacctagattcgggatcaggcaaccacgtctgctcaggatttcctccccgccataacagttcgatgcaatctccacaacaaacctcacccaccgttcctatctatcccctcacgactatataagcaagccgcatcgcccctcgcacaccccatgccatcgtagagccaagagcacctatgttaggatgccaaagagtggtcaagcgaaagagagaaaaatccaccatagccgatatacacgtgctcgtcactgccaccccctcagtgtcgtgctcgtcactgccaccccctcagtgtcgtgctcgggagcttcgccatgcctcggaggtcatagtcggtgcttcacctggacagattgcgctcgagagcgcccataattgctcgtcggggcacgtccaccaccgcgggg

SEQ ID NO: 164259 - DNA, 426 bp, Zea Mays
atcacctcaaacactgagctcttccattggtaactgttcctcaggaacatggagacacttcttaagttgagatacatggaatacattatgcacgttagatcgattataaggtagctcgagttgataggccatctctccaactcgcctaaaaactctgaatggtccaataaagcgaggggacaatttgtccttaacttacatctcctcattccacaaagtggtgacaccttgaggtacacatgatcaccttcctcaaactcaagtggtcttcttctattatcagcgtagctcttttgtctggtctgagctaccctcaaattctgccgaattatacggacttgttcttctacctcttgaataagttcaggtccaaagaactgtcttcccctagtctgatccaatatagaggagtcctgcacttcttgc

SEQ ID NO: 164260 - DNA, 621 bp, Zea Mays
gatagaagctataaataaataaataattaccatactatgttcaaattgaacatttaatgtgaagaggaatttgtcacacacttggaattcaaaatggaattgaaattggatttggaaagaaaattgaagaggaaagggagcagaaaataagaaggaaaaaacaataggaaattggggaatggcgccttggcctaatcttcttccggcatagccaaacctaacttcgcgcatggcccattacctcccgctactcccgctcactggtgggggggaccaacacgtcagcctctccctgccgtggcacacggtcttctacaacactactcatggggccggtggtcagactcatccctaaccatgcagaccgtttcaaccgcccgcgtatggcagcatgggagctggggactggggtcaccctacgcccgaggataaaaaggcatggactggtggcttcactgcgaaccctaggaccaaggaccccctgggtttccgccgccaccattagaaccgagtgagtagggaacgagagagatgggcgcagcagtcgtgggaatcgagctgggctgcgtccctgtccgcgaatgggagccctagggcatcgcgggtgttcaccgcacccgt

SEQ ID NO: 164261 - DNA, 549 bp, Zea Mays
ttgttgcgctaatttgagcgtcctgatctggttgatctgtgaagattttcagtatggttgttataccaaaatgaaagaccattagtcctggtacacctttgatgcagacttgttggcatgtagtcacataaaaattgaagtaatcgccgttcgaaatcgacctgacagacatactgttcaccgaagttcagaaagatctcgccggggataagaccgccaccgcgactggggatgggtctgcggccgcggtaaaaatcttccgcgatgtggtgctaaaaccctgaagtggcgctgctcggttaatcggcaatcaccggacgctcgccgtggctctgcccgcgcaggtgagctcgccagcgcgtttacagctcagtgaacctcatcgatctccggccatctgcctataaattgagcccgagcactggttcttcaccacatcacacacacgagcgcttgtgcaatcgactcaatcccaccggagaactcagacagaccacaaatctcctcctccctgttcttagcgccgccgtgaaggacctcttcgtgggc

SEQ ID NO: 164262 - DNA, 466 bp, Zea Mays
gcacaccacccaacccaattccactagcatcacattcaagttcaaatgttttattgaaatctggaagttggagcaagggtgcatgagttaacttatctttgagcacgctgaaagcatcctgttgagcagcagcccaagtgaaggttgtacccttcttagtgagttcatgcaatgggtctgcaatggtgctaaagtccttcacaaagtgacgataaaatccagcaagtcctagaaagcttcgcacttgggtgaccgttgtgggaaccgaccagctgtgaatggcttcaaccttggcttgatcgacttgaattccctatggtgtcacaacatagccaagaaaagagacttgatctgtgcaaaaggtgcacttctcaaggttaccaaacaaacatgcatcacggagagcttccaaaacagcacgcaaatgatcaagatggtcttctagtgatttgctatagatcagaaa

SEQ ID NO: 164263 - DNA, 572 bp, Zea Mays
tatttatgtacacaaatataatgttacaagttttgtactataaactttttatacaattgggccaattattgatcaaagataataaagttcaatgtttaaaatacactcatgtctcatgtttcgatattgttttgaatgaaatgcaggaactctgcatatccattaatggggaaagagtttagaaaacaagaaacaaggtccgaggactggatacaacatcgcctaacacacacggtgggaggaacatttccagcagacccacatagagcaggtagttgctaaggggctgcaacaacccaattataaggtagatatagcccccctaaaacttaaaacatcctctttgatcctcaaggctacccggatagggtttagagagctatttttgaagatcctctggtttctctccttccataggttccatagagtgtataccacaatgtcgttgaactcacgcttttgggtttttgggagtggggatgacgctgcttcccaccggtccttaatgttagaggagtgagccaagtctgcctaggcacagagggtcatacctttccaagctagaatataat

SEQ ID NO: 164264 - DNA, 968 bp, Zea Mays
gggtgtagccggcgggggaccaaaggcttcaaaaccctagccgcccggaggttctctggtcgcagataccggccgtagtggagagaagcggagagagagagagagggagaaaagtaccaccaccacaattcaccaacacagttggcgttcggggctcgatttcaggccctaggtgctcatcggtgctggtggggctgatgctcggaattatcctagtcggtgtgggggagcacgatggccagattgttcatgcccgattatcatccgccacgaaagtcgtgcctcgacgaaattggacaattcggtggaaaatctctggtatggcgacccctgtccagttcgcttttgctccctccgtgcgtagcggttatctgtagggtaggaaactcaccggggcggcgttggggcgtactccgacggcaccaccatcacgcagagagctcttctcgccgtggctcgccgtcgggaggatgatgacagcgggtggccgttggattaaaatgaacggctgtgatcaattgctacgtcacgattcagctggatcgtttgggaccatggatcataggatagagggacgagattagaccggggatgtaactcttcagtcattggatctgggccgtcgatcttgcatcggacggatcaagtttcttaccggttcgtagtggccggaattctaatctgggcccttgggtctggatcggtcggctcttgtgacccgataccccttcgtggcctcaactttactaaagaaccccaggcttttgcactactcaacccgtggtccccatatgtgtaaagattatcacgaatcagccctgttatttgcaaattaaaccccaggcttctggaaaatagtgtccccagtccagcagccgtaggaaatttataatttatttagaaaaaggatttttagtataaaaaataactatagaaacttgtttaaatcatatctaattcattttaat

SEQ ID NO: 164265 - DNA, 717 bp, Zea Mays
gtaaagaaccctcggtactattccctgtctcactgacacttacacttaaacccctctcctttctctccttcacaagtccgagtcccagacgatggacgacggcgtgcgtgctctggccagcttgcaccggccgcaacacctaaccattcatgccttaagtcggtctatgcctaattccacccctggcgatcctaatccatcccttaattgagttagttcggtgcggagttcttttgcccacgacgacgacgagacccgagggaaaactgaggtgttcccgacgactaggcgcgatatagtttaattggcgaggtcgacgagtatcacaagcatgctagagtgctaaaacacaaacaaggaaggcgagggcagacctagagatagctgaccacgacggggtgactcacggtggcgcggagagtggatttgggggggaaacgaaattagggcgctacggtggacgatcggaggcgagggctggtgatttggcttcgtaacaacctagcggagctaacggtgcacttaatttatagtgtccgagagcggtggctccgaattttgatggggaaagctggcgacccgagagaagggtgagtcaccggcgagcgctaacgtggcatttacaggacaaggacttacagctgtcactggctgaccttcacgacttgcgacgacgtggtgaaacgaccgagagtgtggcgtaaacacgagaaacgg

SEQ ID NO: 164266 - DNA, 353 bp, Zea Mays
ccgctgctggcgatactgattttgtggtggcctcaaccgtagtgcctgccgatgataatttatttggctctgtatctgagtgttttgaatctgatgttgaatctgggagttcgttttcctagacggaggagtcctcggatgaaggcttggattattttgctgcgttagatgtggctgcagcggagtcttcgccgcgtgtggagggtgccggggatcttcctagtgcgagtactgggtataggcggcgaagggtggtgtcgaaacacaatgtgggtgagttttcgcaaagtggtaggcgccgtcgtatggggatggagcgtggccatcttcgagtaaaccggattggtaaacga

SEQ ID NO: 164267 - DNA, 1182 bp, Zea Mays
cggtgcagcttccgaaggtctagcttcggcaggagtttctgagggtctagcttcagtaggagtgtgggctatgttggcatcagcagtttcccttaaatctttagcctgtgtgccaagagcttcggcagaggcaggagttgatgtattcacggactccataacagcatctagcactctagccattctccttttccttggagtcgctgcggggatgcttgatggcttcggcagttccgttgcgcacggtggactcaacgcctttagctgttatgccatcttctctagtttcggctcttcaatcggatttgttctagcttagactggcatagagcgacctggttctatgataggagaaaccccttaacttagcttcggcacgtcggccgtctcaatgcgcctgggtcagcacgtcaaaactttaacctttttgacctcgacacactagaagttgctgaggtagcagctttcctcttcttcccttgccttcacgtgggatagcagtagtctgggtacacaaacccgataacatcaaacactctattcaatctctttttgccccgagcaccgaaggcagttgtcatagcttcatctccggccttcgagtatgctccaagaagctcatcgctagttacctctatggcatctagctactcatcattcggttcatcaaactggctcctgtatcgaaaggtatacttcagatagactaaaccattttggctggagccagcggcagcctccttcggcttttcccatccgtttgcaagtggccacactctgtaagcaatatgctcttggaccaagtctcttgtgccgatataagtgcacactatattgaaagccgactggcatgcttgcacgtcatttccaagtgcagtgggcggcctcctaatgccaaagcgagaccatatatggcactgaataaccccttttatatcctccctctgactcaagtcaaccttcacataaaaccattcttgcatccaagagcctagccactttttccgaaatgtcgacacaggttagctggcctcagtgcggtgcacgaagctgtagcagccaaaattgttgtggtattgctctttccaagtcgccttcgtttgatatgataactcgtggatattgcagaaacacctggcgtctagctctaacccttggctcctcatggcccatataaaaaac

SEQ ID NO: 164268 - DNA, 450 bp, Zea Mays
cttaattgggacacctcccgaccagtctcttccaatttgcggtacaaatcattcctctcggttgcagcttgttcagcaaccacagccgccaactcagactgcatcaacaattgttgttgcacccgctcaacttccttcagtcttccagtcatcgcctacattgactcgaacatgcggtcccaattttcctgcaccaaccgatctctctcatccatcgcctcaagcaggaaacgagtttgtaccgacggtttcgctggtggagccgtcgcgcctcctcttcccaacgccaactccgaaggctttgataccagttgtgatgacccgtggccgagggtagcagatctactccgacgtgagctctccttgctacggacgaggccaccacagtgacaaccgaggaagaactctctaggtaagcaagactcaggaatgattcgaatctctggattt

SEQ ID NO: 164269 - DNA, 399 bp, Zea Mays
tgaagtgtttcttgaatttataataatagggcaaccgaacaagttccttctttttcttttccctttgagcttcgacatgtcccattttttcaaagttgggaacactctaaaagccaagaattcttgcaccagatccctagtaccaatgtgctctgcaataactcgaaattcgcccagtgcaatttggcttggactctccgggttcatgtcgcacggggcctagtctctccgaagattaattctaatgggctttgaactagcttctcgtttttctcatcaactttgacataaaaccattcagtcttccagccagctggccacttggtacgatagctgataactggagacttcgcatctttgcgataagcaaaattgtagcagccgaagttttcgtgcagt

SEQ ID NO: 164270 - DNA, 1031 bp, Zea Mays
tatgaaacatgtaaggttcttagtaaaaaaaattgacacggataattatatgatttttttatcgcatatactttcccacataacctttttttgctgtagatgacggaaaatatgtcacatataatacttgggaagaaaccactttcttacgtggcacaaagtcaaatttatgctccaagaaatagtgatacagccaacccagtgataataaatcgtgaactaaaaattggagaactggataatagtactcgtggatggagatctcagccaaccatttctggaatttgtttttatccatatgcgccctcgaaacaacctgagcaagcattcactttggggaacataatgatatcgcacggtttaggatgggagaattatgatattgagtatattcctattccttctggttatgcggaatggggtacaataattcttgcaaaacattcttttaatttaagaggagatggagaaggtatggattttatctatggggccatttattgttctttatttggacaatattccatctcaccttcgctactgaaatctttgctggaaagatggaatccagattcaaacacttttttattccacgatggcgagcgtactgtaacactcttagatttgcattatattatgggtttaccagtggatggggaattttatgaggagtatgtcccgtcacatcatgagcgtgaaccatccatgttattatatcccaagtgcttatcacaacttttggaggtttgggatgaattacaagtggggggagaagtatcgctgcaagaatggtgtgactgttttcataatggaccaaggggactttcacactctgatgatatggaactttcgcttatttacaaagcagctttcatagcgatatggctttgcggctttgctattatcggagggggaccacgaattcgtcgcggggtattggtgatggcttcatggatagctttggggcgacgttttgctttggcacaaccaactttgtgttccttatattactccctgagattaatcagtac

SEQ ID NO: 164271 - DNA, 1014 bp, Zea Mays
tcttgactctgaagaccgcactccaaggtcgacgaggcttgagacgctgctcgggataactctaaccccacatccggaatgtcagtgcaaacgtccatcataccaccatctattggctcggacagcagatcttcaggaaccatatccttgagagcctgatcaaaatttgctaaggacaactcttgcagaccaacgagagcagacaaagctggagaaggaacatcactactctccccactgactaggtaacgccgactgtttttccgaattaaggggatttcctcctcttcttcctcatcctcgtcaacaatacgaacaacacaccgatcggggtcagctctggccggattacacccattgggttcaacatcatcaaggccacacccattggggtcagcgtcagcagggtcacacccattgggatcagctccagtaaaaagttccactggcacttcctcaacagcaggagcagaagggccggcatcctgattcaaacatgacactcgctgaaggctcctctttttcttcttcttcccctcgacaggagcggttggatgactggccgggcgaaggcgctttgggcgagcaccatcagatttttgagcatttaaggtttttccgggctctgggatagttgcaacagctatggtttcagcagggacgaagtcagaagaatcctcagccaacatgtctagcatagcacttatctctgcatcgcttgggtttataggcatctcaaagtgaacttgcctctcatcattggggagatcaccaagtgaagcaaccagagcctcgacttctttggaagagggtcacactctaagacccaagccactgtcactagcaggaggattggacgcaaaattgaaaaaagtcttggaaggtggcagattccaggcagaatatgcaacaggagcaccaatattcgacactttgtctctaaggatcatctccagtcggcttaccaaatccacagcaggaatcctcttgttggtaacccgggttgagtcagtg

SEQ ID NO: 164272 - DNA, 991 bp, Zea Mays
ccaaattcgatacaggcggcccaataatgagcagaagcgcgcctgcgcctgcgcccgcgccaactttgcattgagatccctgtccttttgaatatcccgaagcaaggtcaacacactattgagatgagtcactgacggtttacaaagaggacctccaccttccatccctttgcagactaaggtccacgacgaggaacagccctcgccgcaccccgtcgagccaattctggccggccgacgccatggctggagctcccgtgcgacagggacataattaaacttctatcaaacacttcccctaaatcaatttcatcaaggaggcattgaatcgagcagtccacggcgaccgagcggatggttacaaggacgaacgcgttccgatcaaacgacggcgaggacgaccgaattgaggctgaggaagggttcacgggctcaccaggagttatgcacacactttggtttgggcagaatacgagcagaagagcaggtcgtcggtgagggtgggtcacggcggcgttttacagagcaagggtgcattctggtgatgggcttcggccgaatttcaattggttggcatggagagcaataggagatcaaaggaaaactagaacaagaagcaatttgataaacactgacccgaagcgcgctgaccacggtggagtcccttgaggcggagcaagaacggaggaggagggaatttggggctacgcaagttctctggcggaattgagtcaattgcttaagcactgaggtgcgtaatgtggagaagaagcggagtccgagctcaatttataggccatcgaccggagttggagaagaagtgcggatttcagatgtgctggcaagctttccgcgcggcggattccggtgatggcacgggggtcgccgtttaaccggagcctgccacctcagtgaccttctaccacgacgccgaggatatttaccgcggccaccgatgaccattcacgctgcggtggcgttcttatcgccg

SEQ ID NO: 164273 - DNA, 1001 bp, Zea Mays
catggaaccatcgtagatgcctgggatccccagggaggtgatcgagcaccatatgaagatccacgctgacgccaaaccggtgagtcagaagcctcggagacagtccgttgagcgataggacttcatctgtaaggaggtccggaagctgctggacgctggcttcatcgaagaggtccatcacccagtatggctggccaaaccagtcatcgttcccaaggctaacaggaagcttcgaatgtgcatcgactacaccaacctcaataaggccagtccgaaggacccatatccacttccacgaatagatcaaatcgtggattctacctccgggtgcgacctcctatcctttctagatgcttactctggtttccatcagatccatatgtctagacaagataggaagcataccgcttttgtaacagtggatgggctttattgttatgttataatgccttacggtttgaaaaacgccttggcaacatttgtacgggcgatgagcaagacttttggtgacctgattagggacagggtataggtatacgtcaatgacaacatggtcaagactaagagagggtcgaccctagtggaagacttaaccctgatctttgacaagctgtgggcaacccgcacaaagctaaacccggacaagtgcgtctttggtgtctccacagggaagttgctgggattcctggtttcacaccggggcatcgaagcaaaccgagagaagatcaaggcaatttagacaatgaggcctccggcccgcatcaaggacgtctagaagcatacggggtcactagccgcccttagctgcttcatctcaagactagctgagagggcgctgcccttcttcaggctattgcggaagtccggtccattctcttggaccgaagaggcagaacgagcctttcaagagttgaagcagcaccttgtgtccctgccaatactagtagctccaaagccaggggaaccgttgtacttatacattgtagcggctacagaggcgg

SEQ ID NO: 164274 - DNA, 753 bp, Zea Mays
ggacaacagccggtgcacggtcacacccattgggatcaactttggcacgattacacccactgggatcaacttctgcacggtcacacccattgggatcaactcctgcacggtcacacccattgggttcaacttcagcacggtcacacccattggaatcaacttcaacatggacaccaccattgggatcaacctcagaaaggacctctgctggcacttcatcgcaaaccggagcagaaggaccgacatcctggtccaagcatgacagtcgccgaagccgcctcttcttcttcttcttttcctcaacaggcgtagtcggacggctaacttggtgaggatgctttgggcgggtaccctcaggctttcggatctccactgttttgttaagctcttgtccaaccgtggtagccatcggttcagcatgggtcgagtcagaagattctccagccaacatactgagtacaacatctatttctgcatcatctagacttgctcgcatctcaaagttaatctgtctctcatcattgggaagatcacgaaggggagcaaccagagcctcaatgtcctcgggagagggtcgcactctaagacctagaccaccatcactagtaagagggttggacacgaaattgaaaatgacctatgaggtggcagattccaagtagaataggcaacaggagcaccaacatttgatatctcgcccctcaagatcatgtctagtcggctcaccagatcctcagtaggaattttcttgtt

SEQ ID NO: 164275 - DNA, 1477 bp, Zea Mays
tcacttcctcaccttcaactaagattttacaagaatctcacaatactgcattcggcgcatagattactgaatatgagttcatgcatctaccaaaaaaatacccaataatgaaggaacaatgttaaactgtgtttaacctgaatcaccaatgctgacctggagggtgtccagtgtggcaaaagagtgcaggatgtgaacttggggcacagctgcagagatgacgatgtcgatagaaccagcactgctgaagaaccatccaaacaggatgagcctcggtgagaagggtttctgcttgaactgcagctcctggcgtggccaccatatcctgcatcgctcaatgtccatcactgctgtatcttgaggcttggggattgggtcctgggtgaataccatcaattacggcaaaagaaaatggtaacaaaaccaacctagaggtttgcatatgtgcatttataaaacataagttatgaagcgcaaaaggaaacaacaaaaagaaaaaaaatcatcaccattgtatacaaccagggcaatccatttaacatacccacagtagttttgtttctatttatcacacccacagaaattgtgttcccatttaacacacagtgcaacaattttgcttccattttatagaaacaaatggaaattttgtcaatgtcaagagtacggaacgaagaggaaagctcactgtgggcgatgcttattccaccacaggtgtggatgaaccgtcaaggagcaacaagcagactcagggtcagggaactggtgcaattcattggctccccttctcaatctgtaggctgcagggtgtcagttctgaatcagggatgacgctgcagggtgcaatggaagtgccagtgccatcaggcccatcacgcagcaaggtgcagaatgaggtaatgtgaggggtgaggtcgccccaaaatgctagccgcctctaagttgggttttgttgccaattgttttgttgtaaccaatgctatccactcagaaccaagccttaagcaaaatgaggactgcatcggagcaagtatctattcactagtaagcacaaacaatgaaaagatcgaccaattgtttttcacaacacccctacaacagtaggtacctaataattatacaatttcttgaagtagattgatagatctagtattcaagcaacacacataagttcaagcacaccagagtagaaattaatggggcatagcctttcatgcctgcagtggcttatccagaattttaactttgggtaccaagagccaagtctattattaatttattatatataataattctgtacaatacaagaaatattttggtaaacaactataaatttggtggctattaaacaaccaaaagacaaaaaaatgtaagacatcaacaatgcatcaaaggctaaagaggagacaagagatatagtatatctgtatatcaattaacaactagcatgaagtctgtactgcaatgtatcaatttg

SEQ ID NO: 164276 - DNA, 571 bp, Zea Mays
cgggccttagggcacattttcctttcaagtagtgactgcaacttcatggcacactcatgggctgggcgaccgatggtgcctcctccctctctgcttgttccccttccctttcaactagctagccttcaatggtgcccttttgcttcatctccccaccagcagtcaccattagggcttgtccggttagagatggattagagagaattaaatctcttgctactcaatttttaataggaatgaatttaattcccatcaatcctctccaatccacatgccaccgaataagaccttaaagagaaactcttcttctcccctctccatcccttataaaaggaacaacaggaccttctcacaccattcttcccttcccttccccacactagagagcgcttttgtgctgctccaagttgctggcaggtagtcgatgttcttcatccttcctgctcatagtagccaacctggccaagtcccagcgccacaacctcctctgactaggttctagccagccatagctccctctagccaggccaccacagttggcccaaccactcctgcctagccattgttggct

SEQ ID NO: 164277 - DNA, 402 bp, Zea Mays
ctatacgtaccctagcagtgtcataatagtatatttattcatttattatttatgctatattattcttacctgaagttctttttcatttacgaagggtgttctatcgcaacatgaagtccgtggatcatcctccggctaatcctaaacgtataaccatcgagttaagccaagaattcttcagtgttgagataccgcgttcggtctctactggagatcctccaaacacaaagcattctgttcatcgtcctgcacccgtcgagagaccatatgttattcatgaagccaatgaccaaattggatctggtgatgacgacgatgattttatgacacctacaaagaagcgtaatgctactggaagtcctatcaaaatcttacagaagacatgcacaaagaggatgaaag

SEQ ID NO: 164278 - DNA, 1036 bp, Zea Mays
ctggcatcgcggtacaatctatccagattgtcacgagaatcaagaagcgttcgcctctcctcctataggcaagaagagcactgaatatgagggtaaaggcgcgaaacagaagcatcagaaacagttaggaagatctacctcatgggccctcttctctaaatcaagttgagcgttcaaggaagaattcagggtccgagcgccatccaagaatgcagaaacctgattcagatcggcttgactctaagcatacatttcctcagcatcagaacatcgttgagtcaaagcttgtaaagcaataggaaaaatacaggaggtaaaatgagagaagcgataaacaacaaagaaagctatagacccactaaccgatgttcgaggcttttagatcatctatttgcctctagagcaggagaggattccagtccagcaaggacaaaatctgatcgggaacaggagcaccacaagacctcaattgagccgacacagagctcagaacattctgcaaacacaaaagttagcaaaagagactgtttgtcgacataagtaacgcagggcaaagatcagctcacctgaaggttagaaaggaacaaggaaatcctagagccagaggcatcgacgtgctatatgacggtggagtatcggcagaagcaatattgagagcagactcgagcctcaaaggaggattagagctcatgcccaaggcatcactctgggagacctcagctctgacagcagacagcggattcctagcatctgggtcactgacctctaaagtgatcgtaccgacaagagcagtaggacttgtcatcacgggttcctcagattgaaccagtggcgatccggcatgaacgtccatggaagaagccgaagaggagccgagctcggcacccttgggggctaggtcatcctcagcagcaccctcaggggctgggtaatccttagcggcacccttggaagctgaagcaccctcgatcatacccatagaagctaggtaaccccagcctgtaacctcaggaacagatgtgttcccatgaactgg

SEQ ID NO: 164279 - DNA, 1829 bp, Zea Mays
accctaggcgtaaaccctctccatagttgtgccccgagtcacagtcatacaaacgaggcatagaccctaagcatcataatcatcctatcagtcttgagttcgatctctttacatgtaaacaagaggcatcctcacaagcgtgtcaaaactgtttgtcaggtatgagttccacttttctccagactagttgatcaatctgatgcccctcctgaaaagctatcaccatgcctaggctaatgaaatatgttaggctgtacacaatggtttgaagaaacaacagctcctactttcagttatcatccagtataatcagtgaaggtaactaaaacaaggagtttgcatcatcatcaccaataatccctgcacgagcaaactccattcctgaagtggtgaaatctgttcacgtccctcacaacaatctcccgatctgtgaatttggagatgaacttggtgactgaatgacagtcctcacaaagcctgagattctttgtgatcctgatagcctctccactgccagtcttgataagcccgaaagcaacagccaacttctcactgtggccaagcaaaatcctctccttctcctcttcttcaatatcatacagaactgatctcgtgtcaggaacatagccctcatttttcatctgtgtcacaaattcaccaatcaatgcttgcagctcctccacctgtgggttcttgttgtcaactgaaacaaatgagtacagcttcttcttcacctctatccagctacagccaggcaccttctccagtgcatgctcctcaagtaactcctttagtacatcaacttggttctgcaatttagctcgggcataaatatctgccaagaggacatagtttccagcatttcggggctcaagatcaaagagatgagagcatgccatctcagcatactcaacatggccatgaattctgcaagcgccaagaagcgagccccaaacttgagggcttggttgaatacgcatgctctgtatcagctccacagcttcatccaggcgcccagcacgaccaagaaggtcaaccatgcaagcatagtgctcagcacgaggtgtgacattgtactccaccattgattcaaatagcttctttccctgctccacaagtccaacatgactacaagccccaaggacgctgacaaatgtgatgatatttggtgaaatgccttcctcaatcatctcctcaaacacctggagtgactcacgaccaaagccatgcattccatatccagatataagtgaattccacgacacgacattccttctgcgtcctatccagttgaagatgtagcgcccggtctcaaggcacccacatttcatgtacattgccatcaacgcattcagcactgaaacaagtaagtcaaaacccctccgaaggatatatgcatgcagtactttgccctgaccaagtgcatttaccccagcacaggcatgcaagacgctgacaattgtgatcgagtttggtaccaggtctgcatcagaggccatcatctcctgaaagatctgaattgcatcaccaggacgctcgttcttggcatagcacccaatcatagcactccatgacacaagattcctatcaggcattgaagtgaacacacgctcagcatagctgacaatcccaagcttcgcgtagcagtcaataagagttgtggcaacatgcgtgtgtaatccatagccgcggcggatggcatgagcatgcatctcccgtacacgggcagaggccggcaggtgcgacgctgacgctgcaatgcaggccttaagaccgtgcgcgtagctgtagctgtcgacggggacaccgagccggcccatgtcagcaag

SEQ ID NO: 164280 - DNA, 754 bp, Zea Mays
aataattagacagtgtacaaagtgccacaaagtttgaatttgaattgaagtttgaatttggaaagaagggaagatataaaagaaaagaaaaataaaagaaaaagaactaaactcggatgggcctcagaagcagaattcggcccagtaaccaaaatgcgctgcgcggcccatatctcgcgcgtgggcgtgcgccgacacgggggacccactggccggtctcacttccccgcgcccgtctcatccgtttcactgctgcgcgggcccgcgtgtcagccactagctatcgtgtgtgcgcattgcctctgcttggactggctcgctgccaggtggggacctcgcgccagtgaccatggacgaagtcctgtttatcttctcgcaaacggcttcgccgaacggtgcacgcgggattgacggccacggcatcagctggatcgcggcacgactccgtcccacggaggctacaaaggcggaccggctccacctcgtaacccttgcctcgttgacccttcctgccgccataactccaaatccaagcttacctcgccaaccagagaagaagggagagccgccgcggtgggatcccactcgcgcccacgattggagcctttcagttggctgtgaagctctgctagatcgcgggggtacttcccgggtcccccgttgggtagaacttggtgggggttggccgtcaatcgctcgccgacgcccaggctccaccacaggattgcgctgcgtcgtgggcagtcgtctgtac

SEQ ID NO: 164281 - DNA, 290 bp, Zea Mays
gcgttgttagcctgtatgcgctgggggacgccttcgacttgacgatgaatggaccttcccactttggctccagcttgccccgtgactctgtccgggtggttcggatgagtacgaggtctccttcgttaaattctcttgggacaaccacgtggtcgcgccagaccttcgtttgagcttggtatttgttgagggcctgcagggcgaagacgcggtctccgtcgatgaggtctttggatgttggctcgtcgacgtcgggggtggctgatgcatttgttcgaggtgacccgtgc

SEQ ID NO: 164282 - DNA, 476 bp, Zea Mays
tttgtcgtgttctagggacttgacttactctaacattttaccatttgttagagttaaaataatcaaatgaggaccaacaagtcaacttacaaattttatcaagtcatttcgtgcactaaaattaccacatacatttaacaaacgcattcaccacataaatagcatcaccacacatgacctcgacttaaccgtagaggaagcgatgactacttcggcatgtcaccacctctctacagaccaaatcaatattaactacatcgatcggacatcatatcacgcaacacttataatttactatctcaattacaaccatatcacgacatgcacttgagacacttcggttcaacttaacgcaatcactactacaacgtacatcggcacacatgtttgataacacacatttcaaactaaacctatctcgtcttccacacaccaattatatgtcacgtaatttacattttcaacccactctaacc

SEQ ID NO: 164283 - DNA, 547 bp, Zea Mays
gcattgctgaccctccttttgtcagttttagtaggcatttaaaggctgtttgtggatgcacatcacgaaattcaaaaaccacgagtaatgttaattagcttcatcggtgtgcttgtactgtcagttactcagttagccagttagcccttgaactcaagctgcgtctggaagtttagtttgcaagatattgttctgtttgtgtactttcaattggccagttagccttgaactcttgctgcggctggaagtttagttttgcaagatattgttctgtttgtgtactgtcaattgcccagttagccttgaactcttgctgtggctggaagtttagtttgcaaaacattgttctgtttgttccactatctttgagatccggccattcaagtccagaaaaactgccactgaaggaaattttcttagttttttcccatgccccaaacctccattccaaagggtgctatggtaccaagaatcccaagtttttcccgtgaaatttctttgatccaaaggagcccttagcttggattgcagatgttactgaagcacg

SEQ ID NO: 164284 - DNA, 599 bp, Zea Mays
ccgagctttgagtggattttagaaataatccattcaaaggtcttcatcttatgcttttgaaatcaacattttctgaatatccaaatgatgccatctgtccatgccttgttaggtctaaaatcaatttgatcggtgacatattggacgtctggctagttgaggcagatggctctcagctggacatcaccctgctctgtgcctcaatgcttctgttggttagacttgcgcttcagtagccacatttggacttccttccatctcaaccgatctcctccttttgtcgtggtatattcattgcgtatattttatggatatcacctgggcgacacacccatttgcctgagtagttgacttaggtccaaccagtgtcgtgttacgcaaagcggcgcctgttgcctgactcattttcaggcggcttgaattgcttattgaattcttgcgactgttcgacgaatgaggtaggaagtggttggtcaccccagcttctataaatagcatgcttgccctgactgttctcttcgcttgttctttgatcacttgctttcttcttcttcttcactccctccctttccaaccgaccatgggcaggggtaggaggg

SEQ ID NO: 164285 - DNA, 1431 bp, Zea Mays
tgtggttgctgaaggtgattctgatgattatgtgtctaagttttgtgagtctgatgattctgggagttcgattgtgtggacggaggggtcttcggaagaggacttggattattttgcagcgttggatgtggctgcggcagagactcctccacgtgtgatgggcgctgaggttcatcctggtgcgagtgctgggtgtaggcggcgaagagcggtggcgaaacggggagtgggtgaattgtcacgaggtgaaaggcgtcatcgtggtgagatggagggtggtcgtcttcgtgtggatgtgactggcaaacgggaattgttgtcctcgccggctggggcgtgtgtgggtgagggggagctgcgaagtctgtttgcgggtgaggaattgaggataatgttgttcaactatagggagatggatataatcccgaaggttgagccgatgtaatgtgtgatgccctcgctgtatgtatgtaactataatttgtatggtaaggctgcgtgccttcgctgatccggccacgcccgtaggcggcctgtgcacttgatcttgcgcatttattgagttggtccggctgcacccgtagtcgatttttgcacggaggatccgattgcacccttaggcgacttttgcacggatggtcttttgaggaagacttcgattttgtgcatttgttgtgcgggtccggctgcacccttaggcgacctttgcacggatagtcttttcaggaagacttcgattttgcgcacttgttgtgctagtccggctgcattcttaggcgacttttgcacggatggtcttttgaggaagacttcgattttgcgcacttgttgtgctagtccggctgcacccttaggtgacttttgcacggatagtcttttgagaaagacttcgattttgcgcacttgttgtgctagtctggctgcacccttaggcgacttttgcatggatagtcttttgagaaagccttcgattttgcgcacttgttatgctagtccggctgcacccttaggcgacttttgctcggagtgtcgcacgcgagggtagtcagcgctacccctcgcggtgacttaggtgtggtcgaatgccgaagaccgtcgatgcagtctttttcgacattgtttcaattttttgcgggggatttttgcgtgtattttacatggcgccgcctcattaaaaacctcaccccccgggaggaaaagagtgtgggccggaataagactgtttggtgaattacaagggcgtcttagccctgaggagtcaaacaaaaaatttacgaagattgtcaatattccatgaatgctctaagtcttcgccggatggcgttgttagcctgtacgcgctgggggacgccttcgtcttgacgatgaaggggccctcccactttggctccagcttgccccgtgactctgtccgagttgtccggacgagta

SEQ ID NO: 164286 - DNA, 1004 bp, Zea Mays
ggagatttccttcgagtcttccatatcgaggaggcgattgaggcaacatcaaagatatattgaccgtgatcatgtatccacctatgtccggttgatgcaagaatgcttcaatgactcatgcatctacccacggttcttctttagttgaaggtaccacatgctaaggatagcctcttcaaattttagagagggtgggtgagcactccacctccctcactattcaaactgatgtactcaaccataatggtttctccccccaccaaaagtgcacggattccctatgcatgcttgcgttctgtagcattctattgtatagaggtgttatttcatatttcgaatagacgtacaattctcatcccactattgaccgtcttggacaattgttagctaagggggaggaaaggagattttctggtacgatagagagtataggttgcatgcatagaaagtggagggactgtcccattagatggagagggcagttcagaagggggacactggatcctcaaccatcatactcgagacagttgtctcgtatgacttatggatttgacaagctttttggtgtggtgggtacgaacaatgacgtgaacatgttcaaccaatcgtcgttgtttactcacatgctatagggtgaggcaccaaatgtgaacttcatggatgaatggttacgagtacaaccaagggtactaccttgtcgatagcatctactctcagtggttggtgttgtgaagatcatttccctcccacggaatctaaagcagcagatgtttgctacatgctaggagggcgcatagaaggacatagagaggacatttgggggtgctcaaggctcgattccatattctcgctaccatagatcattcctttttccaccaggtactttttgtgatgatgcatgcatatatcattttgcacgatatgatcaatgaggatgagtgtggaggatcgtactcaatgtgatgctgtaatgcatgcaagctcgatgcatgatcaactccaaa

SEQ ID NO: 164287 - DNA, 571 bp, Zea Mays
gcccccccctcagaataatcagccgagtccccctggtgcttgtttcccagccctacctagttcctcaatggctgtttcaactatgggaagtccagacacttcatcaaggactgtccctatccaaagcagaataaatcaaattctcaacagacttctgagagcacgtctcaaggcaagggaaatgtggccaacagtcaagcaggcaaaaatacaaggaaaactgggcgagtctactacacacaagtggcgaccaccccagaaggagaaccggtaatgatgtgtacatttttcgttgccaaccatcccgccatcatccttttttattctggtgcgtcacatactttttatgagcaagacttttgttgagaagcattgcatacatagtattgaatcaaaggagggttttgttattcaatcacctggggttcaaatctttacaaaggaagtggtcttccacgaacccgtgagattggctgggcatgagttccctaccaacatgatagttataaaggggcaagatgtagatgtaattctaggcatgaattggttagcccagaataaggctattatc

SEQ ID NO: 164288 - DNA, 1667 bp, Zea Mays
caggacatcaccaaggatcggcacagaaggaccagcatcctgatccaggcacgacagtcgccgaagtcgcctctttttcttcttctcctcgataggtgcagccgggcggttcacatggcgtgaacgctttggtcgggcaccttcgggtttccggatctccacatcttcgtcaaactcttgtcaagtcgtgatggatattggctcggtacgggtagagtcggatgattccccggccagcaggctaagcacgacgtccatctcagcatcatcggtgctaactggcatttcaatgtgagtttgcctctcagcctcgagaagattccgaagtggggcaatcgaggtatcaatatcctcgggggagggtcgcactctatggcccgggctaccataacaagcaggagggttggagacaaatgcagagaatagcctatctagaggtaggttccacacagagtaagataaaggagcaccagcatttgagaccctacccctcagaatcatatccagtcggctcagcaaatcctcattgggaatctgtctgtttgcgacccaggtggaatcattgatgctggtatatacataagcgggatagattctgtccttcaagggttgaatgttcttgaagacaaagtcagcaaccacgacctcagcagtcagacccctatccttcaacaagcagatttcaggaagtagcgttttggcctcggttatctctgaaaaggtgggagactctacctaattgggcgtacgaacgtctggttgcctccctgaccgagggggagggatttgccgtgattctccacgatgaaccactgaagacaccatcccttaatgttgtccttgagagggatatcgagatattctactttcctcccccggcgaagctctaaacttgcgccgccgacaagctgatgctgccctctagccatcccaggccgacaatgatagagatacctccagagtccgaaatgggggagaattccaagaaaagcctcgcacagatgtacgaaaatggcaacttgcataatagagttagtgttcaagtgtgtcagatttaattcgtaaaaatcaaggaggactcggggcatgcttgagtttgccgtcagcgcggtgaggcaaaccacgacccctcctccctctacccatggttggttagataaggagaaagcgaagaagaagaaagcaatagatgattgaaggatgagtgaagagaacaacggtgcaagtaggctatttatagaggccgggggtgaccattcacttcctaccacgctcgccgaatagtcgcaagtattcattaagcaattcaagccacctgaaaatgagttaggcaacaggcgccgcttcgcataacacgacaccgtttggaccaaggtcaactgctcaggcaatatgattataccccacggtcacatcaagttactgctccaggacagtgtgctaaacgctctgcgtaccaagacaccccttgggcacacccattgggtgtgttgccaagaattttcaaaagattttctgaagaagtcatatccacacagtatacgcaatgaatgtactacgacaaaaggaagagatcggctaagatgggaggaagtccaaatatagctactgaactgcaagtccaatcagcaaaggcattgaagcacagagcagggtgatgtccagcc

SEQ ID NO: 164289 - DNA, 734 bp, Zea Mays
tccaatcgcgatcgcacggtccacaacccatcctggctgagccgttcattcgtagatcgagggctcccgtgtcgtcttcttccaccctgcgcccgcaaccgagtccgagcggaccatggcagcgtcattgccgcggtgcccagatcgctcgacccgcatagctaacttggatctctacggtgctacgtgtagagggggttggggtgagtccagggagcaaggtcttaccggtgatggcgacgcagaggacggttcccacgcagcacagcgggcccgctgcggagcaacacaccggtgagcgattactagtgcccaacgcgccaaacgtgcttggaggggccatgggcacttgcctgagaacgtggtgaagcttcccagacccgcagtcgagaccccatcgaaggtgtatacgcgattcgttcgtggcggatctccctctctcctccatgattctgcaatggcacacggcacaacacacgattcccaggtgctggtggagtcaagattggacggtggaggggggggtcccaggttatatatgctcgccgagggaatcccaggctaaccaatccgcgcggattccgcggacaccgttgccgcggcgagtccgattcaaggatgaagacgccctgacgccatggtcccactggcagaggcaccagaggatacccacagtcagtgaccaagcgcgtcgggcccgcgtggcaagaaatagctggtgcggctgacagccg

SEQ ID NO: 164290 - DNA, 482 bp, Zea Mays
tataaaatgtgccatcttagagaaacaatcaaccacaacaaaaacactatcgcttcccctcttcgtcctaggcaatcccaaaacaaaatccatagaaatatccgcccacggaactaaaggaataggaagaggcatatacaaaccatgtgggttcaatcgtgacttagctttttgacacgtcgtgcatcttgctacaaagcgctcaacatcatgccgcattcgaggccaaaagaagtgtgtggacagtacagcctccgtcttcttggcaccgaagtgacccatcaaaccaccaccatgtgcttccagcaacaacaaaagacgaaccgaaccaattgggatgcataggcagttagctctaaacaagtatccatcgtttagcacaaatttattccatgtatggccctctttacaatttaatgcaacctctttaagatcatcatcaaaagcatattgtcccttaattgtttcaagtcgaaaaatac

SEQ ID NO: 164291 - DNA, 960 bp, Zea Mays
gtttcaatgaaggtaggacacacacacgcacagcacattctgccggtaaaaacaacatggatgtgggcccttccttagatttctgctgctgactttcgttgaactaggtgtgctcatctgtttccagcttaggaattttccgtgaactggtgtgctcatctgcttccagcgtaggaaatttccgtactggaacatcgtaggaattttccgtcttgtagtctgtagggtcagcaatgggcgctgaaagtcaagggtgctgagcttgtgccagatctaatattgccgttgccgatggggaatggatggactaccctctacccatgcccaccccacttgaacccagtgattaatcagaagacatctctcaaactatccccaaactccaggaaaaagtttatttttagcccttaagttgtctgattaaaggagaacatatcagttacaaccaggcacattagtgtaaccgtgcaaccagacacattgagaacatttgtaaagttgtctgattttattattgtaaggagcgtgaggcctaaaagtccagacttcgtcaaaactttggtagctaaaagtagacttcttcatatgcctaaatggacatagattatccaatgggcaattagaaaatgatgtaaagaagagtagcctttcgcgttagtctccatccccatgtcatgcctccatggtttcgttaagtcgccgcttatcgaccaggttgggatagttgcctgctctagtccgggatgtggtcgtctaggcggcgcgcggactcggacgatgactcccaaacagaaatcactgcctccgatccatcacttgttcctgtttcttccgcatgcttcttctcgcgggtcgtgctggtccaggtccacacgcggcaggcaggccgtcgacggaactcggaaggatacggtagcacgggaacaggaagccccgtcttctcttctcgatgctgggcat

SEQ ID NO: 164292 - DNA, 585 bp, Zea Mays
atatttcttcctctcgtcgaacctattccagatctcgtgccccttttcgcgagattactgaaccgcgtcttctcgcgaacaacatgctgctcgcgtcggcgatcctcctctatcctcgtctttcccttcggcgtccacctcgtcatcttgggcccacgggccggctctgatcgtcttcgtctaattttatctaaccctgtctaccacccatctaactctgtctaaccctatctcgtgcaacttgccgcgcagctgtctctctcgctcggccaagacaagagccgtcgtgaaattgacaaccacctctcgtgccctctcctttctatacataccctctcctttctatacaatcgtacaccctgccatgaaccccttccctcttccttctcacacatgagcagcccacgcgttttcctctctatgcattgtgccttcgtggtcttagggtccacctcgtcgtcttcctcgcgtcgtcggaggagcagccccatcgtcttcctcgcgtcgtcttcctcttctttgattgcctgctcggctggtcttcatgtgtaggtgacaaatcctctccttctccctcgtcttcgc

SEQ ID NO: 164293 - DNA, 1725 bp, Zea Mays
cggttggttgcttgcaaccgaggggccctgaaaggaactctgacttcgctagctgtagcgtgacggagtgggtccgactggtctattgaagcttggtcccttgggtggaagtccgaaggttcgagttctctggtgtcggtcttgctgctgagctcggagaacttggaatttcctcttgaggtgccctttttcttcttcttttgccctttccacttgtatggctttgttggagaggtgcgagaagctgaggaaatcttggctggcgaggatggtcttgagttctggtcttagccctttcagaaaacgggccatctttctggtttcggtgctgacatcgttaggcgcgtaacgagccaactctgtgaatttatgcacgtactcactaacagatcttccaccttgagttagttcccgaaattcatcctccttgagttgaacgatcccctagggtacatggtgctcgcggaaagcagtttcgaattctacccaggtagcatccctgacggccttgctgaaggtatcccaccatgctaggggcatcccagaaagttgatgagcagccaattgaacacgctgattttcggggcatccgatggcttccagtttcctcttgatcgtgcgcagccagtcgtcggcatcgaggggattgctggatccagcgaacgtgggaggcttgagtctcagaaattctcccatcctgtcctgtggtcttccaccacctgggcgctggttctccagacttctagtgaggacttcaataagtcgggtctgattggctagaacttgggccaaatctagtggtagttctggaggtgcggggaggtgggtctcactcccttctccgccagcttctccttctgctcctaggggaaatcctgctccaatcccggaggcggtaggcgtggttttatccgaagccatctgccaggggaaaagagttactaccatgcacatgccacaattttttaacaagttactttattcattacatcagttcattacagcacacaactaccataagttcattacacacgagtgctatctagggtactcccgaactccttctctaaagtgtccccaaattccttgagaaggtcatcaaggctggctagggacatttcctcggtgtcggacgagttccctatcctggtaggaggtagggctagaggggcttcttccttctgctcagtctgacatccttggcttttggtcttcttgcggatttttcttgcgggggcgagcttcttcagcttcttgtcgtaatccatcttcagagtgcggtaggcctcacgggtgttggtttcctcgccttctgctatctcgaggctctcttgaagggacgccttttcccttgtaaattccttgacttgttgctccaggctttccacttgggagtttaggtgagtacagtgggaggcaaggtcatcatattggttatcgagagtgtggaggtatccagccatgtagacgatggtggggtcatcctcggtagggtctctccctgacagggcctgaagtctttttctccaggcgggggtattcttgttgctgggtggaaagtagcgaagggggttacaaagattactctgctgtagttttggcatagttgtcggagggcttttcgggcaacattttggcaagtatctaggaagcggtatccggtgaaagtgacttggaaagaaggatggttcgggtagtttcgactttctcccaggtagactgcca

SEQ ID NO: 164294 - DNA, 929 bp, Zea Mays
cttagaatgcattaactaggtaaaatttcaaaacaagttgtgatgatgtgacttaaggtgtacttaatactagggtagggtacttaaccgcggggagtaaaagatcttggcgccaggataagctcagacctggtcactagattggccaccgtacccacttgctctgcggccgaccgagatgatccttgccggcgttggccgcttgccgcccgtgcgccatgtagtcactggcgttaccacgtcgcagtaaaccgccttaggtagtttgtccatcacctgagacgttgcctcggtgaaagccacgatagtccgcgctggtgactcacccctctctccggtcgccagccttcttcgtcccaaattcggagccaccgctcctggaggctataaattgagtgcaccgttagctccgctaggttgttacgaagccagagcaccagccctcgcctccgattagccaccgtagcgccccaattcctttcttcccccaatttggttctccgcgtcgccgtgagccatcgcgccgtggaccgtcgtctctaggtccattctcgccctcctcacccttgttttagcactcaggcatgcttggcatgcttgtcgacccgatcaattgagctagaccgcacccaatcaccgagaacacctcggtttgtccttagcgttcgtcgtcgtcgtgggcagacaagctccgggtcggatttgtgcaattaacggagggcttagggtcgctaggggtaggaataggtgtcaagcaaaatagggcgtcagtcattgcgcatcccgaccggtataagctcgccggagggcgtgctcaccgtcgttcatgtcgtggacttaacgctgtgaagaaatagaagtagaaggggttttacacaaatgtcagtgaaaccggaatagtgccaagacctctttttgggttgttcaaa

SEQ ID NO: 164295 - DNA, 563 bp, Zea Mays
ctggaggctggagttcactcccggttgattgatccgcaggcgttggggaacaggggcgtagggctgtggatcctagtatcctacccacaggtccgtagagatgggagcatccggggggcatggagatggcagatggtgactgtacatggtcgatggccggcagctcgttgtgaacaaaagcatcctcgtggatcacttcatccctgtcttctattttcttgttagtggattatcgtctcatttttgcacacgaggtaagctgtaagccccatttccatctcataaaaaaacacaggaatacaagtgtctgacgaagcaaaagagtagaaagaaacaggctacttatcttcagcatatttgacctcagcctcagagtcagagtccgatagcccacacgagtgaacattttagaaacccaccaactcacgacagcgtaaaagagaacgactgcctattacagaccagccttgacaagcaaaaagaacacggagttttgtaagaaaaatggaccgggattcatggatagttaagttttaatgtttgatgataaaggcactcgacct

SEQ ID NO: 164296 - DNA, 761 bp, Zea Mays
cggcaaccacaccctcggattcgcgccagactctacgattcgtgctttagggagtactgatagttgctcggggtagtaaatatcaccgtatggatgaacttgagccactgtttcactccggtcgccgtgtctacctgactcacggccgattcggatgaactcgctggaattagccacctatcgaccatgcgccatgtgccttggtgtcttaccacgtcgcagtagctcgtattacacatgttcggtgatcgccagtgagctcgccacggtgaaagccaccaatctcttgcgacagttctctcttctctctccgaccgccacctcgtcatctcaaattcacgggccaccactcggggatcctataaattgagcatgtcgttggttcctcaaggtagtcaagtaaccaatacaccaactcatgcctcaaatcatccactagagctcgccaatttgaaatgtcccccaaatcggtccagagcaccgcgcgaagtgacctcgccatggccaacgtgctacaggtacgttcatgtcctctagttcctcatttcagtatccttaggtgctcttgatactccctgacccatcgaattaagctaggacccataagatcgccgggaacacttcttgttatccgttgatcgcactgtcaccgtgggcagagcgattgaggccttgaatctagaaattagttgaggggaaatggtggttaggagttaaattaagtgttcgccaagctagacctctagtcgttgccctttccg

SEQ ID NO: 164297 - DNA, 604 bp, Zea Mays
aacctttcgttttcttcttgaattaggtgttgtaatgttgcttgtacttgagtgtgatgtattttggatattaaggtctccttttgcaggtgttcattttgcatgtgaaggctcatgagcagtagttgttcttcattgttgacctcatggtcttcctctaggtaacttgtgaggtcctccttcatggttgggcgaagcattgacctcttatgtagttcttggagtaaggttgtgggtctgaggaatgaagacatgaattgatcctcgactagctaggtgttagatgattgcctctagacaagtcgggctagattttggttttgtaggggtggctatgggggttgaatggggtatggcaaggggtatccaagtggacactcccttttatgattggattgtttgatgaatctttacaatgggggagggggacctcactcttgttggttcattatggatgatagggcctgctccaccttagctattagagtttgatagttgaaggtgacctttgtttttgcagcgttaattattggagattgccttcgtcaccatgtacctaggagtaggttacgatcgagtgttcatcttgttgtgaggcatcatt

SEQ ID NO: 164298 - DNA, 317 bp, Zea Mays
agccggaccagcacaacaagtgcgaaaaaaaatcgaagtctatcgcgaagactatccgcgcagaagtcgcctatgggtgcagccggaccagcacaacaagtgcgaaaaaatcgaagtctatcgcgaagactgtccgcgcagaagacacctaagggtgcaaccggactagcacaacaaaggcagaaacgacaacatcaaaccgtccgtgccaagaccaactataatcacaccagcacagcacaacaaaacaacccagacaaagtacataacgccttcgcacacatatacaagcgagggcactcaacttcatcatacaa

SEQ ID NO: 164299 - DNA, 387 bp, Zea Mays
ccgagtgtctgtctgtgccgagagtcctgctctcgataaatgtgttcgttatctagagtaggacttagctgagtgcgacactcagcaaagagccagagtgcccgacaaaaagtactcgacaaagagacggattccgatagtgaaatgaggtgggacggtagttctctaacctgaatatattacacatgcacggaacagattatgctatggatctctctgtctttctcaagctttgactttccaaggaaaggatgcatccagggcacaagtactcatgttgacgaattgaggttgaggcatcatcaatctatacatagaaactaagatcaccacaagtccacagctagccaggcagatgaagaaactgactagcgctccatccgatcc

SEQ ID NO: 164300 - DNA, 839 bp, Zea Mays
cgaggaatcatctgactctactcgcactaagccgatggcaattgcgactgggcaagagtttggcgaagatgaggaaatctagaaacccgaaggtgcccgccggaagcgttcacgccgagtgaaccacccagctgcacctgttgagaagcaaaagaaaaggcgactccggcggttatcatgcctggaacaagacgctggcccttccacattattccttggagatggcccgtcgagcaccatccccgaggacaatgctggaggttgtagtgatgctcaggatgctggcggtgtgcttgatgaggaagaagaggaagaagaagaaattccgctaatccgcaagaatagccgtcactatagggcagcgacattcccatgcaaaccttgtcagcactcgtcagtcttcaatggttgtcaatatcagattttgaccaagcgctggaagaggtcgtccccgaagacatttcacagagcctcctgaagataacaatcccactatcagtttagaggtcccagatgatggtcttctgccgcatgactctgctgggcaagaggtaacccgggtggtttctcgtgcctcgtcgaccttagagggcggtcttccttgcgaaaatgctgatctgagtcactcggttcctattggcatggctgagggatcttcagccctaaaggtggctgacgtggagggcccagcccccaagggtggtgctggtagcgacccagcccccgagggtgctagggcgggctccctctctactgcttctatggacgttcacgttggatcgcccccagtccggtccgaggatgctgcggtgacgcatctttctacgactcttgctggt

SEQ ID NO: 164301 - DNA, 504 bp, Zea Mays
cggaaccgcataaaccttcggagcgttgaacaccgggcatttgtgctttatgtgcgtatcagtgccacatacttcacaaaacagcgccgccgaacactcactcatgacatgtcccttgccgtagcacctatgacagtagctcttgttgttcttaggcgcatccacaaaaccctccttctcttgatcggactttttcttctcttccacaacagcaggtttcgggtgtaccttcttcccatcactaggtaccgacatcacaggttgttgagcagcagaaggttgagcagcaccccctcccttgtcggcattcataccctggagagctgagagtgcttgctgtagcaacgccgctgccattcctatctgatccccagctgtgccaatacttccacctgcaaccggaccagtccccgttgtgccatccatgcccttctttggagatttagaacagggttctagcttgaattttgtttaaaacttccttggttgtgctgtgctgtcaag

SEQ ID NO: 164302 - DNA, 574 bp, Zea Mays
tgttgttgccttaccaactgccatggtcttctgttactgttttcctgcagtcgtgccatagttggttggatctgggaatatagcatgaccatatatttacatgttcgtcaggatagggaattcttggtgacagtcactgtaaaaaagattggtaataggtggtggtacaatgcatgcaaaaaatgcacccgcacagctgtggctcatggagattcctacaagtgcagcgatcaagtttgcgctaacattggcacgcccaaccaaaggttagtcgacatctcttcacttcaattgcctccattctacctttgcctcccaacaactctcgctgttttgactcccactcacatctaatatgcagcagctacttttctatgcatcaccctgagtgaacgttttcgtttcctatacacatggcctacccattttcactgtgctgactcggtatcaccatgtgttttaggtacaaactgcttctcactgcaggggatgagacgggtgacacagacttcatcctctttggtcggatggcgcaacgcataatcaagaagccgtgcgatatgctcattgccaa

SEQ ID NO: 164303 - DNA, 386 bp, Zea Mays
aaaagaatagggttttattcgcaaatgggcggacgaaggggcacggtgcattatgggccgctggatcatgatccgatggcccccgattttaaaacgtcgtgatttgatctggtgcgcacaatctgagaccaagggtccagatcagatgcgcaaagggttatgaagtcgtttactcccggccgtcagtccaaagatcaacggcggacaatggatctggccgaatcacttccccgaccaaatcccagccgttcctaacgggatcaatggctagggctaatctccttcccccccgactgccagcagacggtgcaactcgccagccaacgacagcgccattgccgtaactctttctcccgtggctccacgcataacccttaaatccagac

SEQ ID NO: 164304 - DNA, 711 bp, Zea Mays
aggagataatggtgctcaaactgcctctgttaaaagggaagatcagatggagactgtaggccaaaattcagaaaacaggaatggtaccagtgtgatgcaactaatttttgggtgccataacttctgatctatgaggttagggtccaagaaccctatagtaactttgaagatcctcgattagggaataagttatattaataaagtctgatatgttattgaccattataaagagaaaaaggtggttgaatagggggaggtcagtcaagtgttgtaaatcctaatgtgtagaaatatctgccactgatttttttcaccttgacgtgtcttacgttggtgtaaagtgaagatagagatgaggaaatggcagggatactcagaactttgcccatcaatgaaatatctcaagtttggaatatctgcttcagtgaaaccttatctgcctaccccctggcgtggtaaactcatccttgccttgctgtgctctggagactggcatggagattctcggttgagccacgcctccttacccatgcattcactagcacctccagagccccctttgttgtaatcccatgcacccagccatcgcctgatcttttccctgtctatttaagaggaaccgaaggggggaagggagtaaaggagtgatccttgtctatgtcgtaagccactgtgtgtagcttcaacatagtattgttgccttcacctccc

SEQ ID NO: 164305 - DNA, 439 bp, Zea Mays
tgttcaaaagaaggatggcaggtagagggtatgcgtggatttcagagacctcaatagggccacactgaaggacgaatactccatgccagtcgtggaagtgttgatcaacgcaggtgccgaccacaagatcttgagcttcaaggatgggaatgttgggtacaaccaaattttcatggccctggaatacatgcacaaaaccttcagggtacccagctcggtaggattgtttgaatatttggtcatgatttttgggttgaagaacaccagagttacattttccatgaccaaatagggaagctggtggagatttacatcgacaatgttgtagtcaagtttacatccaccaggggcatatagaagtcttgtgccaaatgctggaatggactaggaggtttgggctaaagatgaaaccgaagaagtgtacctttggggtaatgat

SEQ ID NO: 164306 - DNA, 301 bp, Zea Mays
atttgtgaatagcacgagtctgtggaggtgggatcaccctgagccatccgatcgagatccaaaggacagaacccaatcggtaacataatgaaccggtacgggacttgaaccgttcgatgcaagctcgatggcctagatccaaataggcacggatgaacatcatccgctctatcacagatcgagggattggatcgaagcgccaaatgggtaccaatgaatctaatcttgagtgcccattttttgatgaatggccaccgtcaatctcctacctcagtccgagctgagcgacagtgtcctgccc

SEQ ID NO: 164307 - DNA, 762 bp, Zea Mays
aggcctcaatcgaccgagccgtaggtatcgagtcattccgaggtccacccgattttagcgcagtcttgcgtgggacgaaaacttgccgacgttctcacgctgctggtgggatcctcgctaacattgttcgtgacttccctgcggctgcttctagcttccccaggggagatttcttcccggatgggtccgctatgcggtgcaaggctcccttctagtaggcgatgcaagagatggacctgaactgaaaattttcttcggggttgaaggtgatcattgtcttaaaggtgattgccatggagtcatccatctttcaacgtcgcaccacctacctggcgcgcaactgttggtgtttgggacccgactgcgccccatggtaatacccatgcagtgcttttgagtaggacgacgtcgttgattgcgactcgatggttcgtgtcgtagcacgtgggggtgacttgcagacttatacatgttcaggctgcgtagagttgtgtaataccctacttgctgtggaggttttggtattgatatgaggattacaagctgagagccgtgagtatgtgggctatggttatatgaaatggttggggtccctctctgtcttatatacacgatcagagagagttatcctactacaaggtgtgagttctatctcctcgcttacctccttctatgtcgtagactgtactcctacatatctggagtcctcttcatccatccgcccgagttaccgccaagggtttagcctgtcgggtgtgccca

SEQ ID NO: 164308 - DNA, 802 bp, Zea Mays
gttgattcaagcgcagatagaaataggggagggagggaagcaaaacgttcaagcagctccaaaagaaataagtggcaaaaggagatagaaaagagggaggcaaatggagctgggagacggaaaagactggcagtaaaactgtagagccgattagacaaaaggagaaaaaagaaatgaaaaaaaatttgggaaaaatgaatccaatgattttagtcgaactagatatttagccgaagcagcaagctcgaagatactgtattccaatttgtagacaaagctgactagaccacaaacaaatagatctggcagtgtcaagcctgttccacatcttacaaatgtgtagggaggatgggaatcacgttgcaaatcataacgcgtgtaagcttttccaggagacaacatgaacaacgggagaaagaaaagggggagacgatggagctaggagacggaaaatacgggcaacaaaaaccacagagccaaccaaacaaaagttggagaaaccatagccgacgaagaaatcgacggatctcaccaaaccatcagtcaccaaagcggacgatgcagcgaggataaaagcgatggaagacgagacgacttggagagggaagaggtagagggagcaaggaagaagagagacgaagcagcagtatcgaggagacgtggccatagtgaaagcatctgctagaagtcttgagaagcgaagggagtttccttgaggccagcagagcagtgttgtacacgacacggagacagcgacaaatggaagccattgattgtcgatcgagcggcgaggaaattttct

SEQ ID NO: 164309 - DNA, 496 bp, Zea Mays
cacattctgagctaatgataattgccagttgctttagaactgatgccaattattaatttgggaggctaataaatgaagaacaatgatctgttgtgttttgtattttacttttgattgtattctgaaacgatatggtattgcttgacattggatagtatcctgatatgttgtggtaactggtaagctcatcactgccgtgcaggggtgtccacagcaccatgtatgattcatctgtttgaatttgtccatgcaaactagcaaccaaaacgtgccctccttgcatgatgacagcttaggtctaatcaaatccatagctgttcataatgtgtgcattgacgcctccggcaagcccgcttccgcttccaccagcatcgcctgcatcgagttccatggcaacaatgcaaggtgggtgtggatgctacctccgttcaacttacctccattacaaacccaccttttcgccaagcccgccttcggagaggaaggagagaagatg

SEQ ID NO: 164310 - DNA, 655 bp, Zea Mays
atagccactacgcaaatcaatcttggtgaaaatgattgaaccactcaattcatctaacatgtcatctagtcgtggaatgggatggcgtatcgaacagttatagtattgatagcacgacaatcaacacacatgcgccaagagccatctttctttgggactaaaagaatgggaacaacacatggtgataaagattcatgaacataccccttgtccaaaagctctgtcacctgtcgttgaatttcctttgtctcttctggattggtgcggtaggctggacgatttggaagagaagcacctggtaccaaatcaatttgatgctcaattccacggagtggaggaagtccagccagtatctcattgggaaaaacatctttgaagtcctgtaaggagatcaagaacaacacgaggcagcgatgaaggtaaatcgttagttgaaagtaggacctctttgtgcaagagcacaaagaatggggatgtggtgtttctcacttctctcaaatcactcttgctcacaaagagacacttagtgtggcatggctgtttaggattggcatgaggctttatgtggctggatgggttagaactctctcctttatttgggttggggatctcactcaattttcttttgtcagattcctctcttgtcttgcgagcc

SEQ ID NO: 164311 - DNA, 317 bp, Zea Mays
tagaaagagaaaaaggaaaagcccaccctagctccttcccctagctggcctgctcggcggcccagcctacttcccctccctctcctgggcctgcgcaagcgcagcctagctcgccaaccccgcgcatggccacatgcaaattttccatgtggtggtgcatcttgtgcggttgagaaaatagaggaaagaactaccatatgggtcccacttcctattttctctcctgcgcataatctgcatgctaccgggaaccgcgcccacgatctccctcacgaaccgctcccaacagccctctgttcatcttcccaaaaccaccc

SEQ ID NO: 164312 - DNA, 443 bp, Zea Mays
gtgatattattactaatcttaaggatgttcgtgctgctttggtatgtgatggaatctttttccatatcagatgtgcttgtcatgtgctgaatttggtagctagagatggtatgaacgtgattgctagcaccattgaaaaagttaaatctcttgtgttgactgtaaaagggtctccactgcagtgggaagagcttatgaattcagctactgagtgtggtttggaaacaacaagaggtatccatcaagatgtttcaactcgatggaactcaacttatatgatgctaagtgatgtactgtactacagtgatgcatttgtgaggctcaagtctaaagatcgccgaaggtatgaaaagatttttccttctgatgatgaatggaccatggctgcaacaattagtcagtgcttagagatattttataaccttacaacactactatctggc

SEQ ID NO: 164313 - DNA, 663 bp, Zea Mays
gttctatcctgcccatctggcctggtccatccaacccaaccactttggaggtcagtggttccggtgctggaatcccaatgggtattgcacttagtctgggagatttagaaccttctgttcttgttcctgcttctcctgtgacttctgtgggtgctgctgcttctggggatgtctcggctgttccagctctaggatttccatttttcctaatgaacttgcaggtacttgtttatgtagctcgcattactttgcattttccaatgggtgttttgattgctaacttttgtcttagcaaggtgtcttagatcaagtggtcgttcaactgaaggcacatggagctctggtacctgagcagatatcttcttttgtcacagtggagtcctgttgctctttagaagcaaatagatgaattgagggctgccaatgctgataagttttttatgtcattcctcgctgacttttctcattctcgttcatatttttgatgactgtcagttgtttcttcagctatgacccacagtgctccgatgctgaggagagatgcacccgaaatcaagagagcttgatcaattcactaggttcgttgattgtgcccgtgccattaactcctccctgcaatcgaagttagacttggagaagaaaactcactaggtaattttctag

SEQ ID NO: 164314 - DNA, 277 bp, Zea Mays
aaaatcaactcaaaaattgggggcttgtgggggacagatatcccccgggtccactagaaggttggaaggcctcgcgaaagactccaggcccattattccgcaaggccaccccttcgtgggacaggggaggaatcactggcagaatggatcgacgcaagattggatcaactcgagcccaggcggctcaatggatttaaacgttatccgcagctttaatccgattctcccgcgcagcgccctcagacgtcggaactgaacgaggataagttgacaggat

SEQ ID NO: 164315 - DNA, 634 bp, Zea Mays
cggatatagaggattgatataaatgacgttgctggagacagccttagaagcctcacgtgaataattgttcatagtacaggaggtttgccataacgtgaataattgttcatagtacaaaagaaggtttgccataatgtgaataattgttcatagtacaaaaggaggtttgccataacgtccatgccttagaagccttaattagaagcctcacgtgaataattgttcatggtacatgttcaagtgaataattgttcatggtacatgttcaaatactatatggcatttgttcagaaaaattaaacgatgggaacgagagagtatgtgtatacgtgcaacaatactgatgtttctatgtctcgatgtgtgagtatgaggctatctgtctgtgagtcatctctgagccgttcaacacatctgtgggcatctaccagagattccttactagggatacagagccgcccccattcttccctcctcatctgctcgctccgtctcccgattcatgccatccccatacgaccactagctcctatattccacatatgcgtttccgtagcaattccttgcctggtgggaaacttagggcagatttgaagactgccgtcaaagatccagcgaggaggtagcgtatcca

SEQ ID NO: 164316 - DNA, 575 bp, Zea Mays
gcctcgtctggcgtctcgcctggcaggcacgcgggatggcctacaataatcgtgcccggcgcccacagaacaccacagctcccagccccagctcaatcaatgatgcgcctgcacagcaaatctgagtcccgccccctctctcacactccgattcaggctagtccgtccgacacaagcattgcacgggaatggaaatcaaacaatcatcgtagtcatacacgaccaaataagtacactgctatttatatgtgtgtatatttgcacggaaatttcctcatcttatttgggtgtgactagacaacgccatgcatggatggaggatcctcatgagtagtagctgtgaaccgacggactttgactcactgaacactgtactctcaccgcaccggggtcggtctctgttctttttttgttgtagatatacaaatcgaaaggaaatggaagaagaagaataagaagaagaagaggagggataggaaatggaagaagaagaagaagaggaggagggataggggaaaagaaatggaaagaatccatggacaagcgatgtaccgtctgaggtcgtctgatcgatc

SEQ ID NO: 164317 - DNA, 786 bp, Zea Mays
actattcttcttttaaaactgcttccgcagcttcgtttaacagtcgagaaacagcttcatccaaaatagcttcggccattttagtgatttcttcctctctctttgcttctgggtcggccgttggctcgaaaggctccgggggaggagatagtttagctgtgatacaaaacataaataagttcgaagtcacagaaataaaacacaaagtcaaaagcaattaagcaatacctatccgcctttcaagttccgcagttttctcagctgccttcgtcgcttcttttgcatcatgagaatctttttcactcttttttattatctcgtgcgccatctctcgaccgccattctcccagatgtcagtaaaaaatttcccgccaactaagcttgcttcggtcgaggggtcttttgtatcttcaatagataaggtagcttcggtttgggccaaagctttcacgtgatcacagcctaatttctcccaaatagccacgattcccctggcacctgagaaggcgcagacatccccgcgaccactcaaagcttcttcaaaggcttcaacttcgttgctgatccaatcaattgggccttcaggatcgccccttacgaagttgtcctcgctagagaatgcgccaacattggcaaagctagattttatcttttgcacacattccatggatttttcgtagcatttctcttttgaagaccgaagttctacaactgtcttctcccaataatttttccaatagttactggcgtctcggtcagcttcagcaattgcacactttaacttca

SEQ ID NO: 164318 - DNA, 395 bp, Zea Mays
tggcatcgtcaggagcaagattgttgttgcagcgaggttctggttggccctatgaaaaggccagagggggttcgggcccagcatcttccatgatacgatggtgaacgtagcatgactttgcgtgtgctccccatcgggggctctgcctgctgcttcctgctcgagaacatgtcgaagctgttatagccattgctactcctctccgagtttgtcgtgtagctcgtggagcttctcgaggtgtgtgatctaactccccatgggggtctaaactgcaccctactcccttggctctctagcgtgtggggctagtgccagtgtgttggcctcctgaggcatgccaagttggtttccttcatcatgctcctcgtgcccgacgtggaagcactaccaagtcg

SEQ ID NO: 164319 - DNA, 545 bp, Zea Mays
ctagaacaaaaattaccagattacaaaaaaataccaaacgacacagatcaagatggcagcggcgacgcgaagcatgcgtactggatctatgggactgtcgctcacttggggataacagaaggcggcgacgcagaaccctagctctcccttttctcacctccctccttcctgtgcaggggtttgggatgcgatcgagcgagctgagaggagagccaggacgggttgaattgttatatatgacgtggaggaggagataggggaccactgcagccggccagccgtcgtgcctgaatgggggaccggatttggcgcggatagataagtatcgtcggcgtgagcgtggatggataacgtcgtcggcgtggggatggcagaggagctattactcgcgagggcgattgctgaggaagcgggcgggcgggtgaccggaggagacggaggtgcgcgacttcatcgggcgttgggcaccgtgcgacgttggagtgcgggcggatggatcgacacaccagatcgataagtggcagaacggtagaactagggaagac

SEQ ID NO: 164320 - DNA, 624 bp, Zea Mays
cgcctgtcagcagggtggacaggtggcgcgtcctctccgcaataaatgcagagaccgcgcggcctagaggccttatgtcaggctccccccgctggcttatgtcacgggcaacaagccacgtggcagcagcgggtctccgcctgagcggggagcgcaagcgcacaggataaggcctgacacgtgtcagtaccagacccttgcttatgccagggtatcccctgtcccgagacctcgttgtggcccggaccttattcggagggatccggatcccatccaagggacccgacacgctacttgggagtttcgtaccgtactcgggggtctgattcgtgcgtacagggatccggcgcttcctcatggaggtccggtccaactgagtgcatcccgggatataccttcttttctggccacgtggcgccccttgagccgtccacgtggtggggtcaggtgctattcaccgcgcggctagagatcgccgcacgagcaccgtgtcttcatactgtagtaaggggtacccctgattcagggtaccgatagtggcccccgggcccgcctcaggggaggatacgagcctgcgggtggggccaaagtttggctggcgattggttcgctgcttttgcgcgc

SEQ ID NO: 164321 - DNA, 633 bp, Zea Mays
tgaattagaggtgcattaccatcctggcaaggccaatgttgtggcagatgccttaagccggaaagcccagtgcaactgtgtgatcatggactctaagatcgccactctgtgtgacgagttatgcaagttgaacctagaagttgtttcctcaggtgccttgagttatatttcagtggagcccactttgcaggagcaaatagtcacggcttagatcggtgacaagggtgttcaagtcattaaggaaatgatcggacagaaggtggacaaatacaaatgcttccgtcaggacaacaagggaattctatggtttggagaccgattggttgttcctaagaaccccgagctcaaaaagaaaatattggatgaagctcacctttccaaattctccatgcaccccggtagtaacaagatgtatcatgatctcagatcgttgtactggtggaccagaatgaagagggaaattgctaagtatgtatctgaatgcgacacttgccaaagagtcaaggccagtcatttgaaggtggcaggtaccttacagccccttcccataccatcttggaaatgggaggagatttgcatggattttattgtgggattgcccaatacctcccggcaccacgattctatttgggt

SEQ ID NO: 164322 - DNA, 634 bp, Zea Mays
ctcgccgcggtgctactgctgctactactcgtatttcctcaagcgcccgtggccgatgtacctcgtcaatttcgcgtgctacaaacctcctcctatgtctggtgaaccgcgtgcgccggtggatggattggggaaaatcgcgtcgcgtaaatttgcggggggatggcactcggatgcgggatgacggatattttggcagaacttgggggagctgttggatgggaaacttttttgtttccatgtctaaaatgggttttggggtatgttttagtcaccttttggagttgctctaataacctctcttaggatctttccttacttccatttggcgtagcaacatgatttgacatctcggcgtcaactcgccagacagacaaatacctattgcagagaccaaagacaggtaataattgacgttgctttggccgttttctgtagaccgttttcttttctagagaacaatttgtagtgccagcagtcactcgtcgatcaggcgttttaattagccccctatatatatatgtgtatttagagccctcggctctctttaactataggaagccccgaccacctaccgaccgagccgaccaaccaggtgtacagaccgcaccagaccgtttttggtttactgtcc

SEQ ID NO: 164323 - DNA, 426 bp, Zea Mays
aacaactactattttaaaactaagggagtagtatttgtctcaattcagcacctaaaaatataacaaacttaataaaaagagaggagaagagaataatcaacatataagtgaaaggggaaaaccgaggagaagagaacacttacaaaccagtgggacaataaaatggctagcgttgtctgctgtcatgctgtggactgtcggccttagagagatggaatcttcagtcttgtgctagggacagtaggacaaggagaggaagccaccaagccgattaagtctgccactctatcgtctagattatggaacagtgggtggctctctggctgaccggtggaaggcgaagtcggaggttggaggagctgctgaccgccacggtggagccgagcccgttcaggttgtgaacacacatctgcagagataaaaaag

SEQ ID NO: 164324 - DNA, 715 bp, Zea Mays
ggaaaagaaaataaaatattgtgtggataaaaataagtaaatgaaaatatattattcctacaatagattgtgaatttgtaaaatggactcaaaggtgaaactcactttcaaattcaaacttgatttaaaagtattataaaagaaaacagaaaatcaaaatcaaaagaaaaagaagagaccccttgcgcattgggccaagattttcgcccatcccttcagccacctcgctcggcccaacttcgctttaaacgcgccagccagccaaccttgccccctgggcgcgccgacgggcgggccccagtgctcagccccttgcttcattccccgcgctccccgtatgccggccggtggggccttcttgtcagttctatccccttcgtcaccacctaaccgaagctagcgccgccaccaaactccgcggatggctctcggttgttgggatttggcgggcctatgctgtcagctcgatatcctaccaacagattgaagtctgttgaaccaaacgcgcgaatcggactccgttttctccgccggtcgggttcatcgccaacctcacggaagactcgctgccgcaaccgactgcgcgggatacgcgactcagccattatccgctgtttttccttctcgccttgggtcgctggcaccgtgggacctgatgaccaggtccatcttctccttcctatcacccgcaacggaactggccgtagttcacgca

SEQ ID NO: 164325 - DNA, 453 bp, Zea Mays
gactatttgcaaaaagatcaagagaccaaagaacatcccaaaaattgacaagttctagaagttgacttgcgatccatgtgacaacccacaaaatcatcatcagaataaccacataaattaaagataggactaaagaagaggaataccataatgcaaactcaggagtgaaacaaaggtacctcatgatttgtttgaccgcccactagtgggaagtgcatggggaatcctagaaccgagcacacaaacacatgacaaagtgtatgataggccttgtcgtcgtcaagtacaaaagggagctgatcatgctcatttactccttttggtccatgggcccaccgttctcattggcatacaaggccgatgtggtggacatgggcgtcgaaagaggcttggcctcaagcatgtcaaacttctttcagacatccttcgtgcatttgccttagtgcataaatg

SEQ ID NO: 164326 - DNA, 2318 bp, Zea Mays
caaacaatactggggaagcccatggggacctgctaggcctaatgaaacccttagccagcagatcatccaattgccgcttcaattcaacctgctcctttggggccattcgatacggggccttatgaatgggctgcgtacccagaatcagcttaatctcaaaagttgcatcgcgctccggaggaatgcctggaagctctgccggaaacacgtcagcaaagtcacacaccacccagatgtcctgcacccgcaaggcagcctcaccctccaccaccatggagaaaaagattcctgacttccttgaccggccatccgaaagcaattgcgccaacaaggataacgtgaacttaggggaacttcctaagaataccacctccatacccgacgacgcctgcaataacactgtcttctaaaaacaggatataactgcacgatactgggataaccaatccatacccaagataacatcgaatgcccctaaggaaatcacaaccagattggccgaaaagacctcatcagcaagaatgacggaacacccctcacaaactgaacagctactaatggagccattagcagaactaaccaaaattgggtgacccaacctctgcaccgaaagaccagcccgcgacacaaagtcctccgaaacaaacgaatagttagcgccagagtcaaaaagagcatgggccaccaacgaatcaactgaaatcgtacctgtcaccacgtctccttgctctctgccatccgcagcgggtagtacataagctccggaaatacccacagaagaggaagctcccagagtgaaattaactgaagaaccccactgagccgccgggtgaggcagacgcggagctccaaactgagatgacataggggtagtcggtgcaggagtaggcacagccagatactgaggaaaaccctgcatcggcatgaactgagaagtcccaggcacataaaactgttgcggaggaggtggaactgaaaattgctgctcagtgcttgacatcatgttgacagtgccctgagaagaggaggaagtcactggctcccatctgagcttcccattgggattcctcctacacaccacatccttgtggtcttgactgcagattgaacacctgccattccactggcactctgcacggtgatgcgcatcaccacaacggaaacacaccagccccagcccgggcttaggaacagcccgaaatctctgagtacttcctcccaaagtacccaagttagaggattttccacgatagggatggtggcgctgatgctgagacttgcccctcttatgggctggacctccagtgttgcccctcctcacatcctggccacgaggctgatcaacacccgaagacttctgcgactccatggtatactggtgttgcatctccacacctagtgcttgctccactgtagtacggaagtccaccaacggaaaggctcacagggcatgcctgatggaaggtttcaggccctgacggaactagctcgccttctccatctcattataagccacatgagggacaaagcggaccatcttgttgaagcccacttcatactctgtgacagacttcttctcctgcttgtaggactgcaaatcaatcttcattttctccaggaaggtgaccgggtagaatctcctttcaaactgcctgatgaagacatcccaagataagactcctggtgaggaggagtgcgctgcctgcacgcctctccaccaaatttgagcctctcccttcagcagctgtgtgccaaagcgaacccgatctccatacacaatctcgaagacattcatcttatcctccacgtaagttagccaatctgctgcctcgaccggagtaccactgccatcaaaagaatccaacttcatgcccatccactgcatcagagaaagaccactgactggaagaggcacctcggccccaccacctggagcagcacccgcagggtcagcgcccccgggcactcctccaccaccagcaccctgagcagcacccacaggggcaacaggaatagcttgcctcagaatggccaactcctgctgcatggcctgcatcgcggctaacattgccgccggactcatcgagtccccactaggaacttgcggactaccccgagccctacaaggcggcatagttgcagccacaaggatgagaataataagtaaatcagatgggcatagcatctcttcagataatgtcaaactagctcagacaataacataacatatcaatagtaaagcagaaaacccatcctacatgtgcagtgtgtcaatttattattactccacttgctaggacgtacagcctattcctctg

SEQ ID NO: 164327 - DNA, 380 bp, Zea Mays
ctctgaacaggctgaccatgaacaccatgagaggggctgttcatgtccttcctgctcgactcagaaacccgccgctcatctctcttcctcctaaagcaaaaagaagctagatgcccatccctctcacaatactcacaatggtacctcacctctgtcttgggtggattttgttagtgggaggaggctttctttttggatggttgaggggctctaggaaggggatcgctagagatgtcgggaaaggtgtcaagtgtgttcctgagatggttaggttttggaagccacacttgtttctgaggaggagctctcacaagttcattgatcacaccatctctcataggggtgataggcttagtaggggtggttttgataagcttggg

SEQ ID NO: 164328 - DNA, 529 bp, Zea Mays
gttgtgttgtcgtagccctgatggccgcacacgcgttgacaccagacactagagcttgtattcgcgtggattgtggtgggttgttcaagcccctgaagtcaatacgcaaccttcttaaacaattttatttggctctatattttatttgactgtgttgtgtggcatcatatttatatatcgccaagtggccataacaactatatcaagctctatagtgcttggaaatctgggaaattaaattgaaatacaatgaaacacagataagttaattatctgttctccactcatgcataaagtttttacctgaagtaacccgaagaaatataatacaatgcatgaaagcctttttggcacagaaaacatcacaaattgggattttattagtaagcaataagaccttatcagatgagtacatgctagaatctcagtcatacattgctcaaccagatgttggcacattgctatttgtcgctgaacggcatgaagcgaactttgagataaatggctagtaccttagcaacacgaagtt

SEQ ID NO: 164329 - DNA, 616 bp, Zea Mays
gcgcgcgggcacgcactgaccagtgggccagggaggtcagcaaccgaggtcgggaggcggactgaccggtcggatctagctgcagagagcaaccagggacgcgcacccgagcgaccagatccaaaacagatagttgagattagatctattctaattaaacctagaccatcagatctcggatggacccccgagatccaatgacaagcgcagtcagggttccatgaccgctagtggtggcgccgctcgctcccacgacggaggttcgccggagacgagggcgcgggcgcgttgggggccataggacgctggggaggacataggaaggttcgaggtggcacgacggacacggtcgtgggcacgacaccagcgcggggacaccggagagtggcagtctactgcgaggttgcctagcggcagcgcggacttgctctagcaagcaattgcgtggacgacaaggcagtacatgggaaattaagggcatgagggagttgctcacctcgagaggaaactctgaagcgcttgagcaatggcggggacgaagggatgccttgggtcgacggcggcggggcttcggctgcacggggagaacgtcgatgagcgcggactgggcgaaaca

SEQ ID NO: 164330 - DNA, 557 bp, Zea Mays
gtgaggtacgaccttggatgtgggaccgagcaaatgacctatgggtcggtcacctgacttgcgactcgctaggagctttctcggtccacccatcactctacgtggggagttggagtgaatttcggtttttacctggtgcgaggaagttgtggcggaggcacggtaaaagctaaagtcatcatggcgtcattcggcgtgggcggcttgatgggacgtgaaacggcccactcaccgtatcataagtgggtggcgtgatggtttggttaaccaccatattcgtcattgacacctttccctcgcgtgctcccggtgcttcgtctcaagcggcgtgagccccataggacgtataatttctcttgcgacgcctaaggtgggagggatatcgatgcgacggtctctctggtgttgtccgtggggccccacattctaggtgccacttcgcttccctgttcctgcgtacaaataggaaacagaggcactcagagtcgattctgcttaccgggccttctcgcctgagcatctgtcgcctctttcccttggaaagcctcttgcgttcc

SEQ ID NO: 164331 - DNA, 624 bp, Zea Mays
ctcttttcctttttgccattcggcacctttgttgagacgctcgtaatcagggtattcaaaattcagagcgtccattactcggttcaaccttcgtttcggtcgggtaccgagggctgcagtcattaattgatcttcttttttagtgtagtttcccaaaatttcattgcacattgtctcaatcatctctagccactcttggcaaggctctttgaactgtttctcaaacttaaagcgataaggcaaccgcacaagctcaagtgttttcttcgttccctttagcttcggcatgctaaattcacttaacgtcggagatgtcctgttagccaattattcttgaactagatctctaagtgctgatctgttcagccaccaccctgaattgtgctatagacaattggcatactgaccctgccgtcatgttgcacaagggtctggtcatcccgaagcttaaagtcagtgggctcatcaccatcgtcatcagtttccctcttttcttctcatcgtccttaatgtaaaaccactcactcttccatccagttggccacttgctgcgataactaaggaccggagccttcgtatctttgtgatacacgaagttgtagcagccaaaattttcatgcagcc

SEQ ID NO: 164332 - DNA, 471 bp, Zea Mays
gctgctccacatcagcggtggaggagcaccactatctcctttggtaggggccggtatactaccgctcaacaccgcccctgtcatcgccaacatgcggctgcatcatgtcctaattgactatggggctcggctcaacgtcatcagccacgctgcattcaagcagcggcagatcctagggtctcgactgggaccctctcgtccattcttcggagtgggcccacaactggtgtatacccttgggagcatcgcactcccagttacattcgggaccgaggaaaacttccgcacagagaacgtccagttcgacgtcgtggaggttaacctccccttcaatgccatcattggcaggccgaccctgtaccggttcatggccattgcccattatgggtatttggtactcaagatgccgtctcctgctggggtcctcaccgtgcagggcgaccacgccgctgcgcttgcggctgtcgagaa

SEQ ID NO: 164333 - DNA, 743 bp, Zea Mays
cgcgctgtgccaaactgccctaagcgccgcctctaggtaagtaaccttcccccaaccttcttctgcactaaatctgtctcaccatgggtaattttggctcaccggagttgcccctcatcagactgccgcgtcttcacggcgtccggccggtacaacccttccccatgcccaaacctaggcgtagagtattcctaccctctcacagaagcccataccggcctcaatgcgccggattattccccatcgtggtgggtattgctcgccggagtggcctccattctgcccgaggttctcctccatcgtctacccgtcccagccccgttcttgcggcccaggcgtcgccatagtgttcgcaaggtcctccccaacctccatggctacccagaccaccctagcgcccctaaaaataccagtcaacctcacctcctgcggctgcgccaccgcgaccgcgcacggtgccgcccttcaccgaccgagctgataaacccccagaaacctgatcctggccgtccacccttgatctgatggcctaggagcttggataacgattcacgtggttcatggaaccagagccattgatccgagatcaggtggccagagcgccccgcgccctcagcgtgtcgctgtcccatgggcaccgcgcgtcaacgtctcaccccgccctgagccccacctatcaggcgtcgggcattcgtgcgaccgctcgccaggtctaatcctggctatcgatctgagatctaacg

SEQ ID NO: 164334 - DNA, 399 bp, Zea Mays
gttgtcggtgacataggggagggggtgcgaacgctcctattggcccgtggagacgcccgaggatgacgccatgtcgcggaaacgggggaggacgcgcagcttgtgctcgatgcggaggttgttggccggcgacggcggagcggacgttcttgttggccgacggtgacggggaagacgcgtaggggaggaggcgttgggtggtggcgattcatggcacaggcacccgcgtggatctgagcgaggcggggaagacacgcgggataggaggcgaagtggaggccgggagggggacgagcgtctagatcctatctgtcggagatcctacgggcagagagagagatagggtagaaccacggtgcacacggtctacattagagtcttatagagtagtagagattt

SEQ ID NO: 164335 - DNA, 497 bp, Zea Mays
ataacacggccggtgggtcagaaccttcacctttttgctcttcggcacaacggtggcggccgaagcggcagccttcctcttttttccttgccctcgcagcgagaagtgattatcggggtatatgaagccaatcgtgtaacacccctggtgttactgttactaaaacctaagcataacatcataagcatcagcatttcatatgtttgacacacctaagatgcatttactaggtaaaaatttcaagcaagttgtattgttatggcattttgcaaataagaccctagtgtagggtacttaaccttaaatagggatctgaagggtaaagcaagacccaaatagagtaaaccctgaagtttaagtgaaatggtcataaaatgttcctaagaatggacctacattacatttacacacctgagataccaaaaaccctaattggaaccctagaaaaccttaaacctaaaccctaggggatttagtgcaaaatcagtgcacttttg

SEQ ID NO: 164336 - DNA, 360 bp, Zea Mays
ttgttgcgccgccggctgtgcggctgggtaggggagaaagacgtctggccgttggatgcgttttggacggattggattagatcctcataccgtttcgattgcatccaaccgtgaccgtagatcgagaatccgatggatgcgggatgatctcggttagatgaagtagagaccgtcgatctctgatccaaggatcaggactgcataccgcttcatttaaacctaaacctaatctgaaccgtaggaagtggatcgggcggctgagatccgtggataccccttcgcccaggcctttttgcacataagcccctcggtttacttgaaaacaacccgtcgtccaccctgtacaacgcgctgtgtcta

SEQ ID NO: 164337 - DNA, 324 bp, Zea Mays
ggattttattttaatcctgtttttcttttcctaatccttgatctggactcctcggtaggggagggagtcagccggctagggatagctaccgcttcttccagacacggtgccagcctgccagggtgtggccggctctgggcctcactgggccctcattctttagccatggatcgacccatgacatcactccattttttgctggttccattggaaggatgagccatattggtaagtcctttgtgtgcacactgaggcggcctaccaccatggctgaggtggatatgcctcgtcctgccgatgatgaggtggaagatgtagtgtaag

SEQ ID NO: 164338 - DNA, 394 bp, Zea Mays
aaacgccgttgggtggagcggacgcagatgcccataccgccggcaccgagcgccaccaaacacctgtggggtcgcgcagtacctgggcccatcgcagcagtgacacaaggccttccatggggatgaggagtgggtgggtcaagcggtgtcacgtgtcaagacgcggacagagcaggaggccggcaaacacgggcgtgagcccgaaggcgttgtggttttaataacttagattttacatcgatgcgatgcaacacatatttggaggcaaagtatttcagttgtagtgtaggagaagataagactagttgtgtgcaagccaaaaattttggtccggaccaatgtttttttgacccaaaaatatcgtggtattggtaaaatcatgatttaaaataca

SEQ ID NO: 164339 - DNA, 626 bp, Zea Mays
gaaaaggtgacttcggcgactgtcatgcttggaccagggtgcaggcccttctgctccagttcatgatgatgtaccagcagaggcccttcctgaggttgatgccaagggttgtgatcgtgcacaggctgttgtttgtctatttgacgaggatgaagaggaagaggaagaagtcccactggtccgtaagaacagctggcattatagaggtagcgagtggggtagtgatattccttcttcagccctgtcgactcttgtcagtcttcaggggctttcaatatcagactttgatcaagtaaggaagtcgtccctgaagacatgctatcaaagccacctgcaaatgatatctcggccgcctgttcagaggtcccagacggtgggctttccttgcttgattccgctgggcaggaggtaacccgagcggtgtctcgcgcatcgtcgaccttggagggcagtcttccatggacgttggtctgagtcttctgactcccatggaggtggttaaggagccctcaaccttagaggtggctactgcagaagacctagccctcgagggtggtgctggcagttacccagcccccgagggtgttgctaataacgatccagctatcgtgggtagtgcaagccac

SEQ ID NO: 164340 - DNA, 716 bp, Zea Mays
cacgccatcacggatttgactgccttacggccgcggttgaacgtggcaagctctaagaggagtgccgtgctcggtgccatcgttgatcgccagctagggccggcaatggttatcaccgtggccgcggctgtgcttcaccacgcctataaattcaccccgtcctcgctcccttcgctcaaatcaaccatgctccgaccttcgtctccaaattgcgaagccatagccaccactcccgtctccgattagcccccctagccggagaatcactgtttgcccccaaatcggtctgccgcaccgcaagaacagagcgtgtcgtggccagcaccgttcaggtcagttcatgccgccctctccctcgtttgagcactctcataactctgtgatgcttgctgaaccaccaatttggactgagagctcaccaatcgccaggaacatgagcaaaggtccttagccttcgctgttctcgtgggtagggcggagtaggtcaccaaccgtgcaattaacttaggggaaatgctcggagtaggtctaatttggtgtccgccgctcgggaacgccagtcattgccccgttaggccgatctgctagctcaccggagctccaccgtgctcaccgtcgtcgtggacctccccctgcgaagaattagaatatggagggtttatgtgcaaaccgtcagtgacacaatgaaatagtaaaagaacccgttcccagttagc

SEQ ID NO: 164341 - DNA, 861 bp, Zea Mays
gagcagtgcaatccagaccagcctcctgaccctcaagaccgcgctctaaggtcgatgaggcgcgggacgctgcccgggatgaccccaacccgacatcgggcacataagcacaaacatccatcgtgccaccatctgccagctctgacaacagatcttctggaaccatgtcttcaagagtctgatcgaagttcgtcagagataattcttgcagaccaatgagggcagacaaagcaggagaaggaacaccactactttccccactagctatgtaacggcggctgttcttccgaatcagagggatttcatcctcttcttcatcatcttcatcaacaacacggacaatacacccattggggtcaacttcagtaggatcacacccattggggtcagcagcggtcagatcacgaccatcggtttcagcttcagtaaaggcaggcactggcacttcctcagcagtaggaacagaaggaccggcatcctgatccaagctagacactcgatgaagacgtctctttttctttttctacccctcagtaggagaagtgggctgattggctcggtgagggcgcttcgggtgaatactgtcagacctctgaatatccaaagcttcgctagcttctgggaggggcgctaccaccggtgttttagcaggggccgcatcagaggaatcttcagctaacatatccagcatggcacttatctccgcatcactgggattcaaaggcacctcaaaatgaacctgcctctcgtcgtcaggagtttcttccagtgaggcaaccaaagcattaacttcttcgggagagggtcgcactctaaggcccaaaccgctatcatcggcaggaggattcgacacaaaactgg

SEQ ID NO: 164342 - DNA, 308 bp, Zea Mays
tgaagaaaatggcattcactgcaagtaattgctaaggtgtgtagtttgtattaaaatgaggctgcgtcgaggttttagcatgttttaggcgaatgccagattgatatgctgtggtttgtctcctaaattgcatctgtccatgattggtacaattcgactgtttgctttcgtgcatggatttctggctgtcagaaactgtgtccaagttgttataggactgcacctcagggatcttctctatactggatactagtcagtattgtgaagttggcggatgagtaggactgtaggagtgagttggggacgct

SEQ ID NO: 164343 - DNA, 1038 bp, Zea Mays
ctcggcccgacacgagcaatgggccggcatggcgacccatttttcatatggcatatggatatggggctagcggccacacgcccccacccaggccacatacgcgaaccctatccctaatcccctcgccccctcggctcctccatccccgtctctagcgatttggcaccgtcgttctcgcctgttgcatcccatcgactcctgacctcgacgacggtcgacagacttctctctgtcgttgccgtctttggttctctagcctgcttggagttggagttcctccgtcctcccttgtccctccctccatttgtgactgacgactccctaaccttaacccctccagtctccggatccggtggttctagctcctcggttatgtaaggttcgtttatctcacctaatcccatctagatctggtgtctagctggtggttggtgctctgtgcttgtttgtggtgtctggatgtcgttgccggtgtgctgtcgcctgtctgcttgctcttcgccattcgctgcctcggctcctcgctggtggacacttgacatgaggagtggtgggtgtgaccgtgtgactcactaatggtgatggctcaccgtcgtcgaccttctcggtgctagctggtcgccattgtgggtcgtctgtttggacatctatactcataactcatcgtcctcctcacttgccctcatgttcccgtctcccattcccagtcccagactcctctcatcatgttctagtgttttctaacactcagctaaaaatcatcagcatctcttagcctctttgactctttgtcgtcgtctctagtgctccacctttcaaaggttcgtgtaatcgtctctactcacctcttcgttctacattcttgaatttagtttaattgtagttttggactattgatgcattatagtcgttgaggaaccggaggtgacagttctagccggtttagctcctcgggctcatggttgaagttgaggtcatggaccttgacacggttgcaaaggaggaggagcgctagcttgaggaccacaatgaggcaca

SEQ ID NO: 164344 - DNA, 1210 bp, Zea Mays
ataccttcaatgccatcaaaaaatatgtgtttccttagataccatcaattttaatttttgatcccttgaatgacattaccatccataagcagttaaacagcagttaaatatttgttcacagaccaaaatacccctttgttcacagaccacacatcatacagaatatagatctaatttgttcacagaccatataggtcatactggtgcacccaagctacaagtgccctcacagaacctagagatctccagaacatactagatacattatcaagcaaaataacgcatgcacaatgcacgccacacaaaagtgatagggatctcaaagtgatatggaccaactacagattcaagtctagaagctttctcttgctccttgtgtgggcagcagggctttgcctttgaggagttctgcttcttgtagacattgctggactatcaggtgccactgaaactttgttcttccttgtcttcccttgtgcctttgccttccctttagccttctttttgtcttttgtaggcatagaggtggtagttgttgttgtacccaaagacaacacaggatactcaatagaaggtgcctctgggtggtttgagccatgtccagatctacacatgagcaaaattatagcatgcaatggtcaaaataatatgggaacaacaaatattgagcatgtacctttctgggtttgtgcccaagctagctgaagcaccttggctgtaataaaaaaattaaaattagtgacaaaaagttaagcaacaatttataatgcaagtggaggcatgtacaattatagtatagatgcatacttaggtggaaaatgcattgttctaggtgttgattggaaaggcacgatggtgctctcacatgatgcttcaatgtttttcttccttctctttggtggacctctgcattgcatgaacaactatgagacattaacaaaatctaatagtaacaaatgcatacaaaaacatgggcttacttctcagctagcatagctgctatgtcatatgggtcaccattcttacagttataccacctatggccatatcccttgcaaatagggcactggtgtgaccccttctttcttgtagtgctgccaccagcctctgtacaactcttgaaccgctgagtatgtcttcttccagctgtagactttagaagtggtgggtgcatgaagaaaccatgattagattctggccactggtcctt

SEQ ID NO: 164345 - DNA, 313 bp, Zea Mays
gcactctgtggatgtatggttttgcttcgaaatatgttcattgttttaggcaggatcgtgatttgaaagattagatggcttcggcttccagtaaataatacacaacaatagtaccaaatgtacgtgggcttgccaacacccaacatatataaagcacgacactaaatggtgagcacagctgcacaggtcactggatacaactgtaggccgctaatccgtgtccattttgcacatagaaataagtgaaaactagggtagctaattactaagttggaaaacaaagttatagattagcgtctattgagagtctgat

SEQ ID NO: 164346 - DNA, 272 bp, Zea Mays
tttgcaattcaaccatggataaagggggtttcagtcgcctagagacatctgatccggatccgagggtccagatttgccccagcctttgagtgagccagcatgcgatgtggaccgtaggattcaatatcaagggccaagatttaatgtgtgtgcgatctgttcccacccctgcatccgcgattcaacggtcgagcatcactcgccccgaaacggtagctttgaccagatccacaccgttcctcacagatctaacggtctctgattcaacccac

SEQ ID NO: 164347 - DNA, 463 bp, Zea Mays
tatgcttgtgttgcatacatctctcagaattgtaaatacttatagtcgttgaattgacttgggatagtcctttgactggtatgatatacagtaagccaaatggtaaaggtcaatactgaatggaaataaaattggggtttatgtagccgaactacactgaattacaccctttggcatgcttaccattatctacctctgatctaccagaagtgagaagagtagacaaatagctatgaaatcccacatcaccacagagcttaaagctaaattagacattaacatgtccttggtcctcggagccagaagagtcatatgtcttgaccactagactactagtgatgataatttgtgatagaaatatgaagatcttgtagagacctgttgtatcctctctactccagatgatttcttcgtatgagaacagtactatctgttgttgaagacgaatcctaggcggataaca

SEQ ID NO: 164348 - DNA, 551 bp, Zea Mays
tttcccagtccgcaccagccccaaaaccctagccgccagctccagtttcttctattgcgcagggtccgcatcgtcatccactcaaagccactgacgtgtgggccatatttgacagctctatcttctaccgtgaccgagctcgatcgggtattgcagtaggttgttgcgatcggatcatggtggttaggattcgtgggcctcaatcctatctccttgcgcctttaaataccggctgaggtgctctgcgattcaacaatcccgtatggcatcgaggctgggagatcgtagcgtagagctgagcatcaaaaccaaaggaagaggacggagagagagagatagagaacgaccggtgctgtggatcttcatcgagcgcggtgtaatggttggactccgttcgtcgctctccgagggaggaagttgctatgtgtctccaaaactccaccgcacgacagccagtgcgaacaagtcgggacctcacggccgcgttgggcgcccacactgggaccctagcgccctgacacttctacctctgcgcctctgtctaccgctca

SEQ ID NO: 164349 - DNA, 640 bp, Zea Mays
ggcggaattggataagaacgccggtgatcaccgtcgcacggccttgtgtcgcgtgtccgagcctttccaccgcatcgccgtgactccctatagctgtcccatcgtcgccggggaggttgccacgacggtggacacgaattcacagcgccgtgttcttcttcatctccggccgccaccacggctcgaccaaattgatcaccacctctcgctcctcctataaattgagcccgcggctagcttcacaacatcatcatgcaccaagccacctagtattgcccccagccgatcactagcgagctctaattccggattttccccaattcgggtttccgccacccgaaatcgacctcatcgcggccagctcccttcctggtcagtccaaccctccctctccctcgtttaagctttctcacatgtctacgatgcttgccgaaccaccaatttggactgcgggctcaccaatcaccgggaacacgatcatctgtccgccacccattcggttcgcgtggacagagcttgatagctcaccatttgtgcaattaagttaggggaaatactctctaggtcgtggatttggtttagtctaaagctgagcaccggtcttggccccctccggtcggtctagctcgtcggagttgcg

SEQ ID NO: 164350 - DNA, 393 bp, Zea Mays
gttggaagggtcggcaattcccaacggagtgcttgaaatctctgcagttctgaagagtatgacgcatatccttgtggtacgggcactgggcgtcgaggatgtcgtccaatgttcgttcgcctccacggggtgcccctcgggcacgagagacgggtggtccagcggcatgaacttcttcgcggggcctcttctcccagcgcttgtcggtttgctggtttgtgtcacgccgaggtgcggacggagccggttttgttcctccgatgaggtcttaggcatgttcatcaacggtgatgtagaggtccacctccctgaacagttgtttagaagtggtcggcgctttttgtagtatggctcggacgaagaccgagtcattggatcctcggtagaagtcct

SEQ ID NO: 164351 - DNA, 783 bp, Zea Mays
cactaagcccagccaggccgcgcgcccgcgccacctgacaggcggacctcgcctgtctgcggcggttctccctcgtgcgcgccctccctcactcgctcgctgcccagtggggccgacctgtcggtgccagtttccttcgcccgttcgctctctctctatctgtctcgcgggcccggttcgccagtgccgagttgttgccctcatgcgtccccttttctctctctacaccgtgggcctaccctgtcagttccgccttccccgcgcccgtcgtggaccgacgcgtgcgcactcacacacgtagtcgggtttctcggccacgacgcccgcccacgcgcccagctcccctttttagagccccaccagtgccccgcgcacatccctcgcctcacttcgctcgacttcaccctctctcgcgctctgcccacgccgccagccgccgccggagacccacgcccgcgttctcggccatccaactcgccggagaccgctccaagcctcccggagctccgccccgaggtgagacacccgtccctgtgcccaatttcctctattgcaccctgtgctaggccaatttcaccttcgccggtgctcggccacggcggtccgccatgctcgcgcagtggctggccgatttagcccagtctagttcaccatagtaggtccctgtgtcacccctacctcttctaaagttagtcaaggccttagcgtgccttaagtcccctccccgtggccggaatcgctcaccggagtttctccgggctgcccgagactctctcaccgtcg

SEQ ID NO: 164352 - DNA, 512 bp, Zea Mays
ataagaaccagtgtaacacatgacacatttatatataacattgtttaaggtctatctcaattcaataggataaccctaaactttcgatccaaaaataagtttatcaaccatagcgactattttttccaatgcagtgcccatacactctttaagctctaactgtttactctgtttctgcatattccatgcgtgtatgtcaccaccctactaatattgaacatgaagtttaagaaaaaactataatgacaagcaacaattgatctaccaagttccacaaagattcaaaaccccggaactaaatgtggtaccggaactgtaaacaacatttagagcaaacatactgaacatgcatcgcttgttacaaaaaggaatcatattgtacagactacagactgacgctactgtaaaaccaacgaataagaagaataatgtcctgaaaatttttgtgatactggccatttgcatttcaagaggaccaatattgttctgtggaataaaaccttggagaaacc

SEQ ID NO: 164353 - DNA, 791 bp, Zea Mays
gaccgggtctctctggcggcgggatggtggaggtttggcccggcgcacgcgcgagagggtagcaggggggagaacgggtctctgtaagggcctttatgggcggtcggtcgtgcctggagaggatcctgggacgcgggcttcgcggcgcggtgaagaccatggcttcgatggactttggcgttttctgttccgcggggagcggccggccggtagcgcgattcggtaaggggcggcagacaggcatttattgagggctgggaacgagtccgagcggttcatgcgaacgagctcccgattagcgcggaggagatcacggcaagcgagtcgcgcgcgtccgtcgcgacgaggaagacggcagggctgacgaggtggtcccgcgtgacagcgacaccagagaatgcgcagcgcggaggtgtgaggttgagcagtgggccccgcccgtcagggtggacgcgcgcgtggtagcaaacaactgggtcgtgcagtgtgcttccttaggtgggccgaaatgagttccgcagcccaggtaagttctctttttctttttcttttatgttttattttctgttttcttttatccttaattcttttgaacataaatttgaatttgaatatgagtttaacctttgggtcaattatacaaatccaaaccctagtataggaatcacacatctttatttacttatttttctccaaattatttatttccctctctttttctaatttctagaatttcttttagatgtcaaattccactttggactttaatatatttcttttcacattatttt

SEQ ID NO: 164354 - DNA, 1250 bp, Zea Mays
tgtagtgtagtataagtagtaatgtaatgtaatgtagtgtaatgatcgaggggtggtgatgccgactcataatgtgccggtctcaagtttgtaatgaccccctgtgaatgaagaaacaatctcttgctgatctgttgttgcacgctctggtcctacatctgatggctcgttagcattttagaggtaatgtgcgagtgatgcctgcttttctgcgatctcaacttttccctagtcttcgacctgccactttgcgcccgacttaacacgccaacccataattctgttgacatccccccttgtgctccgaaccctagttcttgtttttccatctgtcgctttctagcttcctgagttcctgaatccgctcgcatcattcgagagatcacgatggcgcccaagaagagaaaacatagtgctactattccggtcgtctcgccaatcgaccctaatagttctcctactgcacttgtcggtctggttactttagaggtcagtgacccagatgctaggaacccactgcctgttgttgtagctcaggtctccctgattgatactctcaatattgcttctgccgatactccaccatcagatagtgcaccgatgcctctggctctgggatttcccttattcctttctaatcttcaggtgagttgattttttgccctgcgttacttatgttgacaaacaggctcttttgctaactttcttgtctgcagaatgttctaaactctgtgtcgacccaattgaagtcttgtggtgctcctgttcccgatcaggttttgtccttgatgcagtggaatcctctcctgctctagaggcaaatagatgatctaaaagccttgaactttggttagtgggtctgtagctttcttttgttgtttattgcttctcttgttttacctcttgcattttttctattgctttaccagctcatactcaatggtgttccgatgcaaaggaaaagtatgcccagagtcaggttgatctgaaccaggtttctgcattcttggatggcgctcggaatctgaattcttccttgaacgctcaacttgattcagagaagagggcccatgaggtagattttcctaactgctcctgtttcacgcctttgcttcgatgctcagtgctcttcttgcctgtaggaggagaggcgaatgctccttgattcccatgacaatctcgatagattgtaccgtgatgccaacaattccctcactatcttggagaggagtcatcgctttactatgtcg

SEQ ID NO: 164355 - DNA, 689 bp, Zea Mays
gtggatcctagcagcgctgcggcttcaagcaagggccgggggatcgctggggaaagggaagctctgcgtgcgaactaccgtgggtcgacggcgtgacgcggggaccggattgctcgtcggtgccgaggttacgtcgcggaatcgagcgcgtccggtgttgggtgtccgcgccatgtgactataggtgagtagctacctcggaatttcctcctttctctattctatggcttttacgcggtccgtggaggagcggtagccctgagcgaagtgtagatgcggaccgagatctgtgtgcacgccggtggttcaccgggagagggagaaagtgttctggaggccgacgcatgtgcctaggaggctggaggaggaagaaggacagtggatcgtcgatttcaccttcaacggtcgcgattagattagaaataacctttcgctaaggggaaaatctgaccgctcagtttgaatcggacggtcatggtgagtcgaaacctaataaaatctggggcgttggatcgggaatgggcggttctacgttgtccgcaaatttataatgcgcaggatctaatccggggcatcggctgttgatccaacggccagatccattccgtaccccttcgggctggcatatttacacttgaaaccctctggttctaataaaataacccgccatccacaaggatggtttcctg

SEQ ID NO: 164356 - DNA, 562 bp, Zea Mays
ccactaccgatcccacaccttagcatcctctcacgtgccctcctgcgcctagcccacacttgcagttgccaccgatgtcaggcactctcggtgcttccccgtccactacaaggtcacatttgtgatccctaaagctcactgcagcttccctgacctcccccgagctctcctcatccgttgttcagctctgtcgcaccaccctaacttcatcgaagctctctcgaccattgttcttcatcgctagctgctctcaccccatctaccccctcggtgaggcctcaggtatgctcactttctccctagctatctcctaagcccttcctcggttgttttggcctcctagagtgtcgttctggccaactccagcgagagtcctgccgtgcgctgccgcacgccacccctcaccccgtcgtcggccctcggctcatagagacctacgcgtgaagctgagccaaaaccccttggccgttgatatttgatcgtggggtcagtttcatttaaacccgtgttggctcgattgatttaatcttggccctcatatgttgatcggatagtcactagt

SEQ ID NO: 164357 - DNA, 584 bp, Zea Mays
atttcgtggtttcgtcactgtcttattttgttgaacacatgttctcctcaagtgggcctgaaaataggaccaagttatcctatcacatgttccgctcatcgtgccaacgaataagactagggttatggttctacagaactaaggtcaacttgaaggcaccatctaacctctcgatggtaatgaggctaagcatggagaacagaaaggctatcgaaccaccaccgcgtgatgacctcgatgaggagatctagaatcttgaagttatacaccagcaagttgaagctcgaaaacataaaccgcttcaaggttggtcaactacagcgacagatcgacgaagcatccaaagagcatcaccgcatggcaaaacaagatgagcaagcgggagatatacgtcattataatataagagacctccaccccaaatgacaaaaccatgatgccttcatctatggccacacttctcctttgacattggacttacaagttgcaccatggctagccttgtataggccaccacaacttccaatgtatgttggcctggcagactcgaaacaattcttgatgagccacgtagtgtaacaccc

SEQ ID NO: 164358 - DNA, 329 bp, Zea Mays
aaagaaaacttaaatgaacaagcctagcgttggctttgttgcaataccatcaagttagataaatgtaagcaaagccttcttaaacaggtatgtaagcaaagcgctgtgcaataccatcaaatatagaacaagtatggattatacaaaatgataaggctcaaaaacaagtgaaccactaatagttcttaccaaggttagcgtcacctcccaaatcccaactatgtgcatagtttagtacacactttaaaatagatttgcatcataggtacaatacttatagagaaaaaaatatacttgaactacagaaattattgaattattaatataat

SEQ ID NO: 164359 - DNA, 453 bp, Zea Mays
ggacaagtatacagtatacgtggacggggacggagacccgagtagcttgttcaggactcgacaaggtagtgttcgcctgctgcgagctgatgatatatgggcgcaccgcacatgcagaaacaagttcttcagccatcagtcaacgtgtcgtacgtagcaatgggaggaggacgatggcgtgaccatctggtactaatttcgtcaggcttccgttgtgggctttgcttgtcagcatcgatcctctccactgctctgcacatctagctaggcgacccacacggcttcagctggaacatggcaggcacagcctttcttgtgttcagacgcacaccgccgatgatgccggaaggccccggttgcagttgcagccagctccaccaagacagaggtgagaaacggacatgctatccaatccatggctccactccaccatgctcgatcgtcgaggagccg

SEQ ID NO: 164360 - DNA, 437 bp, Zea Mays
tttgtactaaaaatgatttctgcccttaataaattcaatttcctcagtgaactgtattgtgcgctcaataaccggaaaacccctgtgtcagtctgcaaaactccctagactcatcctaaaactacgcaggactgtgggttggtttctgtgttccacagggactcatatgcaaaagtgcacgaccgaaggggtacgaagcattttcggtcatcaaatctaaattccgcgtccaggattagatcctactgcggatgaatcggtaagcgacaataaccattggatccgaaaccgacggtgccgatctcatcatatcccataactgaacggatctgtctgatctcatcacaacggctcagatccgatcgtgtaaaggggtacccttatgatctaatctcgatcgttgcccacggatccaacggtcacggacctgtcttcac

SEQ ID NO: 164361 - DNA, 356 bp, Zea Mays
atttgtaataaagccattgagctagcaagtctatcagatactgtgtcaacaccattgagctccatgatagtatagttactccttccatgataagaacaaatcagtgagagcaaccatagtgcaacagtttcttcagaaacctttccaagtccaggcacacttaaaacatgtgggatatgccaattggaagaataatttgagtgagtcaaaattcagttagaactctaggatcatatcacccctcccccacccgaaaaaaataaggcaagcatggcagtgtctaggcactaaataacataacacgttctaatgcagtgatatacctctgtcaaaattcagaaattattcacatcacg

SEQ ID NO: 164362 - DNA, 855 bp, Zea Mays
cagagaattaacttatctgtatttcattgtattttaatttaatttcccagatttccaagcactatagagcttggtatagttgttatggccacttggcgatatataaatatacaatgccacacaacacggtcaaataaaatatagagccaaacaaaattgtttatgaaggttgcgcataatatgacttcaggaccttgaacaacccaccacaatccacgcgagtacaagctctagcgtatctagcatcaacgcatgtgcggccatcagggctacgacagtatagcaagccttcgtaataagcgcaacaggcacaattatggctcgataattggggtacacgataaatccacgcaacgtgcgcatcaggcgtaattgtggctcgcgacagacacacagtgcctacaggacatgcaaaaaatacgcgactcagcgatgatggtttgactcaatggaagcgatccgattaatggagagcgcgacatagtaatcacatgacgcagccaagttcgaacggcacaaatattgtgtcgtgttgccagggcgcagtcaatattcagctaatgccataactcagccgattaccaacgcagcctgatcggcgtgtctgagtacccattatacaatttaatcgctcaacgtgaatccaaaagctcaacacatcataaatatttagagcgatccgagtctacgcagtgtagtctgcacacacgttttgaataattttctgctaattatttactatgagaaataaagcagaaaaataataatagaattaatgcatgagcataagcagatcagatgcatgaaaacattttccatgcttaaacatgtattgtaataattatctgctaaata

SEQ ID NO: 164363 - DNA, 652 bp, Zea Mays
agctctgcatcccctttggaatgacttcagagtttttccacctttactttgtgataaatgttttagctctggtgcgtaccttagagagattaagtcgttgtgccaacgtagtcatgtctggggaaaagagcacctttattagcttcttaggcactcgtgcgagatgctacatcttcggtcccattaaaaacccttagtcccctttataaggaaaaagagtgccaaaacttgttaactagacaaaataccttcggagcttgtctacattccatgatcctggaatgtcatttccttccatgtctttgagcctgtatgaccctggtctgtttggagctattagaaagaaaaggtccttgccactttacttgcaatttttccgctatgtctggattggctacccttcgaaggacaagatggtctggtgctatgttctggagttttacttttctatttcgccacctcagggtttctaactgatgtttccttttgtgctcgaccacctccagcatcagttcctctacgacatcctttgagactttctcattgtccgaattttgtgccgaagctataatccttgtcgagcccaacttggattctttaggggtaactgcttcatctccaaagaggagcttaaatggtgtgaagtttgtca

SEQ ID NO: 164364 - DNA, 769 bp, Zea Mays
atcgctagcctcaatgctcaagtagaatgtgtccagaacatttggttgctcatatctatcatcctcaaccttgtgtctactcactacgaccactggcgtgatcatgtgatcctcatcctacgaccacgtccttgctgatgttgttccccaactactatcgtcctaacactggatcgacattgtggttctctcatggatccttggcatcctcaccattgagctctagggcgtcgtccactaatgaggggggcatcgctcactaggcctgggttgcactcaaggcccagttccttggcaaccaggaggtttgtgccctacaccttgactcctccttttggcccttctcctagggcgacctctttgtcaccgagtactgtcatcggatgaagggcatgacagactctcttcaagatcttggtgagcccatctccgattgcacacttgtcctcaaccttttgtgtggtctcaattggcacaatgaccacatgaaggccttcaacaagcgctctatgcccttcccgtccttccatgacattcgcaaagtggtacttctcgaggtcctcacctcatacgctaagtccactgtgtctgccatggccctctatggtgcgtcctccagtagccagccaccttgccatccatcaccggagagcctcctctatgccctcctacctcttctcctatctctagggctcctcgttaggcgactagctccagcagtggtcaccaacaccagctccagcggtggtctccctccccaaccgcctgc

SEQ ID NO: 164365 - DNA, 954 bp, Zea Mays
cttggatggctttgtgggcgagttcctggatgatattctgatttattcaaagaccgaggctaagcatgagcagcatcttcgtctcgttctgggtgcccttaggaagaatcagttctatggcaagttgaagaagtgtgccttttggctgtctgaagtggctttcctggggcatgtgattaatcagcagggcattgcggttgatcccaagaatgttgtggctgtggtggagtggaagagaccctctagtgtctccgaaatccgaagtttcttggggctcgttggatattatcggcgctccgtacaaaacttttctagcattgctaagcctttgactagactcttggagaagggtgttctcttcgtctggtccagcgattgcgaggttggctatcagacattgaagaacaagttggtggacgcccctatcctagctttgcctcagagtggtaagcgtttcacagtttatacggatgcttctcgaattggtcttggctgtgtgttgatgtaggaaggcagagtgatcgcttatggctcaaggcagttgaggaagcatgaggggaattatccaactcatgaccttgaattggttgcggtgatctttgctctaaaatcatggaggcactatctttatggcgagtcttctgacatttacaccgatcataaaagtctcaagtacattttcactcagaaggagctgaatttgaggcagtgtcgatggctcgaattgattaaagattatgatttgtccattcattatcaccctgggaaggcaaatgtggtggctgatgcccttagcaggtctagggttccaaaagtggccttgcctttgatcgctgatctagaccatttggggatcgctttgtgctatgtcggcaccgctagtaaggagtctcggatgcttattcaatcctccctcatggagagagtgcgtgcggctcagcagcaggatcgtct

SEQ ID NO: 164366 - DNA, 316 bp, Zea Mays
cgagcataaaagtataaagcacagcggatttaaaattccacatcaaatgacgtgctccaagtgctatgaaacaacagcggtgctaagtttataatttttgagtcataggaatcgccgtacaattaagagggatccgcgacagttaagtaagttgtgaaacgagccaagttcaaaatcttttgaaaactccttggagatcattttcccagatcatgaatgcccttgagaaaaacaaattttacttcccacaaagtctcctcttttgttctcttcaaaattctcaaagtttggtttcagcctccaaaaccggttcaac

SEQ ID NO: 164367 - DNA, 634 bp, Zea Mays
acacgacaagccacgtcgagctccaagttatgaaggccaggggtccgcgtagctcaaatgatggtgcttgagtctcatgctatctatgtcgtcagctatatagaatataagacgaccaggcgacctcaaggcccacgggcacatacggcttcaccagggtagaatgctcgatgactccttctttaagaagccaccactagccgacccctcctttcctactgaaggaggaggtcagttcccatacgaggggaggcccaaggagacggacaaccagacgcaaaaacgacggacggacggacgggaggaaggaggacgcacagacgaggatccaaaggcgggagccccgccgccactctgtagcccttagttccacctccctccaccacaagagatttgggagcctctcatccctctctctcgctcgcttgtaacccctactacgagcatcgatcagcaatggtgccggtagcgcaagcctcgaatactggatgcagagacgttctgaccgaaccaatataaatcttgcgcccaccacacacacaggtcttgagctcggaacgcacacacaaatttatttgccagagataagttcgaaacacggacacttagccccttttgatagatcaaattcgaa

SEQ ID NO: 164368 - DNA, 809 bp, Zea Mays
tgcggcgaggtcatgtgggcttggcgttgggctcatctggcatatgtgccgaggaattggcttgggcctgtaacggaattgaagggtattacgtatagtaagtgcttttgccatctttattctttaggccaggccatgtttttagtttagtttagtttttgttgaggacgacgtcgcttggtgcgcccgtggaccatgcatcatcatacatatgattctgctcgctgctgcctcgtgtccagtccagtccagtccagtccagtcctgcctgctaccagcaaacacaacatgcatgtacaccatgcttggttgcttgctattggctatcgctaggctatagctttgctgcaaacaaaggaccatgcgtgctgctggtgtgtagtgtagtgtagtacgagacgatgagtgtgttgttggcttcattctttcatgctctccctctccaatgataatgatggtccgatctctgattggtccaaaaccgacatctctcctggtagtctgtctcatgcatctctctatgatcgatcaagcatatatggagccagcctgcagagtcagagccactactgctgctgctgcaccacatgaataatagtatcatgcaccattgcatcaatcatatatgaactgctaaagtagagatgtatgcatgtatgtattgctctttgactggtaggtggtgctagtacccagtcaggagcatgtagtataggagaggatgaatgaatgtcttttgcattgcagttgagttgcttccatcagccggtcaaacagatatataatgcattgcattgcattgcctctga

SEQ ID NO: 164369 - DNA, 1220 bp, Zea Mays
gtgggcctgcttaggcagctctatcttcttcccccacctcccgcgatagccggcccaccttccttctccactccatgccagcccacgtccaggcgtttcattcccccacccgcggatcttgcccacggatgcatgtccgccttgccttggtccagcgtccacgcaaatagtaagatgtcactaccagtgggccatccccatcagtttctccttccctcgctcggagcggccaaactacaaacaccgcggacttccctcgattggcgcaacaaaccccatggaatctaggatttccaccactaacgccgccctcgttcagactccatcacggggtatatagggctcaagccgctcccacgttcactctccacccgagccacagccaccatggtcgagcgcaaggagagatccagagggaatgtgatggccgcctagtgcttcggtgccgctggtgccgtaggccgcaccgtgcgagagcggagaactgccttgacatggatcacggtaaggcacccatgcgaccttacctatcttcctattttgccttcctgcgctgggttgtagtcatcggggttcttgctgccttcatcggctgggcgcagccgcagcttacgggcgccaccacgggctcttcccacatcattactgggacacccaccggcggtgatacacaggatcgcgctcgcccgtataggttgcttcttcggctctgtttggtcgcgaccctagggtaggcacggtgtcattgccagccgagccggaggtaggagataacgttgttgccgtcgattcctggatcggtggcctaaatataatctagcgtatccccttcgtcgatgagtcctgaggcgtagatcttggagtgagtggctaggattagtccacccgtaccggttcggctgaaccaatctggtttgtccgatctagatctagcgcttgtgatcgatgtaggtaacattaaacccaggccgtcgagatcaaatctaacggttgtccctaggtaccgtttcatggggcttcgatctaatcaggatcgtcgattgtggatcggacaattaggaataacatataccccttcgaccgagtattttcttaaagagaccctccactttaaactattcaacttgtagtccaccccagctgtagcctgagccttgagagtcttccgaattagaccctgcacttctctgaaatcctacgtgcagtcctggaatccaaga

SEQ ID NO: 164370 - DNA, 719 bp, Zea Mays
gtttctgcaattaaatttgtactaaaaatcattttctagatgatttccctggttttattaattatctggacagggcactattttctggaaagtgcagggactaaactaaaaagatccccgagactcagagggctgtacagggtggactgcgggtagattcgtgcaaagcgtggggtctctttaacaaaaatgcacggcgaaggggtatgcttcaattctggccgttcagatcagatccagaggccagaaacggatcactaaccgcggcaacagacaaacgagcgcgaccgcttgatcgacgattgacggacccgatctaatctaccccgtttgaatccaatgcgcccgctccaaatcggacggctcagatcaatcactgaaacggtaccgggcggatctaatcctggccgctgcgcaggagatcgacggcaggtgctcaccctctctcattactttcctttcccccaccggacacagggcggcggcgcaaatgcagcagcgacagagcttcgtcgccgagccgcccccagggcgcgcacacacccccataatcaaattgacccactgctacgcaaagggaaggtggtagtgaacatacgaaagggagctttaccggaattcgtgcacgcggaggtggtcgaccacagcacttggcggacagacggcggcgctagctccacggcgagaaattgcagcgtcgctggtccgcaatcacccac

SEQ ID NO: 164371 - DNA, 326 bp, Zea Mays
ctgtaagcttctggatgtccttaatacgagcgggaggcctcattacctcaatagccttgattttctctaggttagcttcaatgccccgatatgaaaccaggaaccccaacaacttccctgcggagacaccgaagatgcatttctccgggttcagcttggtgcgggttgcccatagcttgccgaaaactagggtgatgtcttccactatagccgacccctccctagtcttgaccacgatgtcatcgacgtagatttccaccttgtcccggatcaggtccccgaaggtcttgctcattgcccgaacaaacgttggcaaggcgtttctt

SEQ ID NO: 164372 - DNA, 604 bp, Zea Mays
tcttagctgattatatcgccgactcgaagtcgatagaaatgaacacgtgagtgttgctgacatgaagtcgccaatctgcacagattgacagatcacgtgtgaaacgaaaacatttaaaaaagggaaaaaagggacagaacgaacaatagagaaagccacacttctaacgcactctatatgctcctcctagctgctggagcagcagcacgccatcaccgctcgaacgcaggcgcgcacatcaggtggccattgctgcccaacgctgacacgcagcagctgagtagcagaccatcccgattgtatgatggcaggcgcttgcaacagcagcaagctcacatctttcctccatgcctcgaggtccatgcctttgcttccctccacgtattggcaaagcatgcgaacaacacatgcatgtattatagggcgtagagctaatggaatataattgtccattagatcttgttctggagcagactagatgcagaaaggaaggtgttcatcctgtactagaaacaaacagcaggagtgagaaaagtgactaacagtaaaatgtccttgactggatgcatatcaccacgaaaaggatgtggatatgaaaagctct

SEQ ID NO: 164373 - DNA, 591 bp, Zea Mays
gttcaatcgtatgtgtcgggccagcccggctgtcaacgatgctacacaggacatgacaaagatggttcgacaaccggcacgagtcaaggctgaaggacgagagcaagggaacgacggacaagagcaaagagacgggcacaacagcaacagaagagtggctgcaacgtatgaatatttgggccagtgtgggccttgtaatcggcgctgggctgagcccatgatctatgtatatcacagaaactcaggacagggagtcggcatcgaagaaccagaacattgatacagtttctatcgtcctcacagatagttccttcttcccctttagttctgttctgctttctcctgtctcctctcgatctatccctcagtgtggttaacatttggtatcagactagcgcaatcctgatcgtcatccacgttcgattgctgtggtcggaatggaatccgcgatgcagcagattttggaagccttgggccagatggaggagcgattgacggcaacacttggaggcagatgcgacgcgatcgagcaacgcaacacgacgaccgtggcaaatctgaggggcggccgcgtagggctgggcgctggcg

SEQ ID NO: 164374 - DNA, 330 bp, Zea Mays
tttttctcttattagcagaagaatagacagttcgttccaagagaaatcatgatttttcctgtcattcactcattgtccattctccgagcggcgttgggattggtcaataatgaatcatgaattatattgtgttcgtgttcagcattatccttactaaccaccatgtcgtcaggctaggtaggaacacctccaataatcaacaccaattctcacatgcccacatgttttaaggtctagatatatttcattctttacaaggttgtgaatggagatctaactgtttcaatttgtctgatatattttgttgtgtatttcaatgttttattattg

SEQ ID NO: 164375 - DNA, 613 bp, Zea Mays
aatttgatagtcatacatattgccatacatataggagttcagctccatacatgactgctgtaaaatgtctgagcagcttaacttaaaacaaaatgtctgagctcagcttaacttaaaacaaaatgtctgaactccaagacattgagaccattagtttagttcacagttcacccataatgattgtccacaaggtcaaatataacattgtaatctagcatcaatcagaatcaaaggcatgtggagacttatcagattcagaggattccattgcaatgtcaccatcttctgaatccgatgaggactgctgcacttgaacttgaacatcacgcatcagagactgcaggcttcttaacttcttcctaggcttcatagacctctttctttttgcttgtacttgaacttgtgcttgtgatgtttgttcttcatgtgatcttccatcttgcgctggttcaacaacatcattcggaagaggtacaataccagtaatgaattcattttcatcatcaccaacaacatcatctacttccctctgtaaaggatctctgtctgttctctccttctttccccttagcttggagttaaatttaacaaacacaaggcctctcatcctatc

SEQ ID NO: 164376 - DNA, 751 bp, Zea Mays
cgaggctgaagccgaagctgtgccttcagtgtctgctgagacgaagcccgctgtaactgaggaaggggctgaacaagaatctccaggtattggcatagctacggagaaagaaatagccgaagaagctaaatctcctggtcccgaagcacagtctgagaatcttgattttattattcgtcatgcttcgggaaagaggttatctgaaggagagattgcagaggccaatcactatgcccgaaaactgaaatacccaaaagggaccttggtgttcaatggtacagacgaagatgatttcttatactgtctcccggacaacaaagagatatatgtctgccgtaagatggctaaaagtatgggatttccgaagctcgaggttggcctttccgccatgtcgaaggatgacctcgcggacaaccttgcatacaacagcctgaaggtacagaaattgtgaacttaaagtttaaaaacttgggaataaagtcttattctcatgctaaacctttatccttctttttcatagggcttaattcttagcaacgccctgagggcgcaaaagaatgcagaggatgaaagttgcacgatagctcttggcaaccttcgatcaaaggtaattcaactgagaaacgaagccctggagaaggataaaattctaatttcattggtgagtaaagtgaaggaagatgaggcgaaatacaacgcccaggccgaagctcataaagctgatgttgaagacctccggaaaaacttgcca

SEQ ID NO: 164377 - DNA, 1688 bp, Zea Mays
aggagcgtggacgatttggtggcagacttcgagctgggcttaaagactgcagcagtggacagctactcaagaaaactggtcgagttctgcagtctccaggcgctgcagatcatcacgtcacgcgatataggggagaagatcagcgagggctcgctaggtcggttcaccttcgatatgatgctggcctgggagaccccgactccgtcggaccaacagatcaccatggtatggttggtgacttgacatggtatgcggtatgccacaacatgaaaaatgctttgagccctggactgaagcacacgctgaattctacaggagagcgtagcgaaggagagggaagataggaaggagacccttggagaaggtgaagctgtgatgggtgatgagacgtcactgttctattcagacatcatgcctcttcttgtaagcatgccaatgcaaagaaattactggttaccagtgtgtcaatttgctctaagcagccaccaatctcgcaaaaataaaaataataataatattggttaacaggtgaatgaagagccaactgttggggaagaagcgtacgtgtggtttggatctgtgttccctttggcttgtgacgtggtcaatgctcgattcacattcgaagctctcactgccaccacagctaacaggctgcactaccctgcctatgacaggttcctgaaagagatggataagtatgctgcctgctccatgattgcaccaacaattcttcatctgtcggcactatcgttagatgtattgatgagcattacaaactcaaaatatgtattgatgagcattacaaactcaaaattcatttctaggtccttcaagttcttccaagacttgccaactccgactggagttgaattcgctgaggatgagttcattttgcacatggagggcacggcagggacacagagagtggtgaggcacattggaaccactagctggccaggtaaccactgtgaattgtgatgcactttgtttctggtcgcttccttttctcatgttctagtgatctgaattactactttgtttcataaaaaaaaatctgaattactacttacattcatcagtaaataataacgtataaccttactcgatatgtttcggttttctaggtcgagtgactctgacgaacaaggcactgtattttgaggcttccggaaaattttcatacgaatctgcaatcaaggttgatctctcagacaccggagtagaacaccaaatcagcacggcgtcaacaggccctttcggcgtgcctttgttcgacaaggccatcgtgttcgagtcactgtaagttccatctcacaaaaggacccttgaaacgatcaatcctacctggctacctgaaccattcatccgtgcagaccagagcctgtggtcttggagttcccggagatgaccagctcgacaaggcgcaacacgtggctcgctctgatcagggaagtgctgtccatccaccgtttcatctcagcgtacagcatagtgtcccccgtccacagatgggaggtgcactccagaaccatactaggagtggtacgtctccacgccgcgagggagatgctacggatgtcgccgccgccggcttccagcttcctagtgttctcgctgtacggcgacatgcccaagggcgacttcgtgctcgagcagctggcgagcaacctgaagcggacctccac

SEQ ID NO: 164378 - DNA, 718 bp, Zea Mays
cggagtttctcagacccgcccgagaccttctcaccaccattctcccctctctgcccatggattcatggcctcttccccgccatcgagttcgccgtggcaccctcttcctctctgcccaaccccggcgaccccggagcaaccctagcccacgctagcctcaacgccggtgacttcaccgccgcggagaggagcggcgtcgcccgcagtcgtctgtttccccggtctgatcccctccgttcgattcagatcgaacagtccggaccatgggatactgcttcgcgcacgcgcgcctaacgccctgtcccgtctgtcaccgccacctgcaaccgctcatccgccccggtccgatttttccccgtccaatcttgatcgaacggctcggacccccttggatcccgtttggaccccttcgaaccccttcggacccccctgtccgatcttgatcgaacggctcggacccccttggacccctgtagccgtccgtttcccctttggcgctgggccccgctcggtcagtgtgctctctccccctctgtcgcgggcaccccctgttccgcctgtcagcgctcgcctgctcgcacgccctcggccgcagatctaatctcagccatcagtttctgatccaacggttagattcagccgataccccttcgcgtggctgttttgcttaagaaaccccctggttttaggaaatcaacccgccgtcctctgttttagc

SEQ ID NO: 164379 - DNA, 323 bp, Zea Mays
gtctggggtaccatagtcgaagcgaccatggggcggtgagcggtaaggatgctgaatcccgacagggacgggagaaccaccatccagatagtggtgtgctgtgcactcagcatgcaattctgcaacctccgcccgaaccttgcccaactcgtcagtggcgtggtccagctctgtgttgagcacgacgaccaggttgaccatgctgtttagcctgggaatgccttcaccaacgggtgagacaatcacacctccagcactgtcggtcgaacggcgagggtagtacttcaggtcaaggccgtcagctaccccactgaacaacgagc

SEQ ID NO: 164380 - DNA, 581 bp, Zea Mays
gcggatggtctggccatgctcagagttgacctaccatttagcggcgaaggtcgtcctggatatgagtccatcgacacactagaatatggctggggaaacccatttattgccgatgtgtttggtgcaattgtttcggcgcctaatttatatgataaaaaagtaggcatgtgagtttttcctaatgcatgtgccatcctctctatatcctctgtgatacttttaatccgattatcaaaagaaattttaataggtggaatatcatcggctgacctggcatcacctatcgtggggagctgttgcagcaaggctgacatgtactcggcgtttatctccctctcttggacggccttctggtggcaatctaccctgaagtgcgagaggaaccacttatccgccaccttgagcacctgatctgtttgtcgctggacctcctcgtctattttcttcatgtcatattttaatctttcatgctcagcggccgataaattagtctgccttgtgttgctgtttgtagaagcaccgttttgatctatataatcggccatgtaagcctaattttgtagatctgcaacctcttcctc

SEQ ID NO: 164381 - DNA, 703 bp, Zea Mays
ttgggatcgatcgaagggatgtctggaatggtagcactctgttttcttttcctgggtgccatcacgattttttcaaacgatgtgaaaggattctgaaactcagaaagctagaaagtggcagaggaaaaaacaagaactagggtttggagctcgagaggacatcagcagaagtacgagttggcacacgaagtccggcgcaaaggggcatgccgataactcgggagagttttggttacagcaaaacaacatcactcgggcattacctttaaatgctagttagccgtcagacacaagagcagagcacgcaacagtagatcgacacgaaagcaggttttcattcaccagtcgagagatctttacaaaattgagatcgactcgttatgagtcggccaccacccctcgatcatcacattacattacattactacttagactactctacactactaattaaaatacattattctactactaactactactacgctatactaatatttaagtcgacagcattatgccaccggccttgccgtcgccgccgttgctgcctccttcgtcatcgccgtcgccctggccatcacctttgccatcacagtcgtcgccgctgccgtcgcttctatcaccatcgccgtcgccactgccctcgctgatgttgtcgccactgcccttgccgctgtcatcatcgctgctgctgttgccctcg

SEQ ID NO: 164382 - DNA, 514 bp, Zea Mays
gtgttcgcggcggcattctacgggacgactgggtgttctggagtttgagctttagtaaagttcaattagccgacaccgtgagaaacacgaggctaaagacaagctaaaacaagagacaattgggtgagtactgacctgaggagggctgcccacgaaggggtccttcacggcggcgctaagaacggtgaggaggagattatggcctaactaagtccctcagtgaaattgggtggtttgcgcaagcactcgtgtgtgtgatgcagtgaagaagcagcgctcgtggtcaatttatagagggatggccggaggtggacgagattcaaagatcttccagtgcgctggcgagctcacccgcgcgggcagggccacgacgagcgtccggtgaacaccgattaactggacaacgccacctcatggtttatgcgccacgtcgcggaagatttttaccgcggccgcaagtccgatcctcagccgcggtggcattcttatctcctacgaggtttgctgaattacg

SEQ ID NO: 164383 - DNA, 847 bp, Zea Mays
cttctcttggtcgccatgtagatctcctggcttatcgtgcccttgtcctgtctaatcggagcagggtgcaagagtaggttgtggcgtaggctgatgtggtaccacatgtaggggtgctcagacgacgtcgtcctttcttctctgcctgtttccctttgcctcggtaacacacatgctacagtgggagtcgtaatggtagcagcccaagcggcgcagagaatcaatggtcttgcctcagtaacatgtgagttactgtgcgacccgtgtaccgcggacacactgtctgtactggggcgggcaggtatacgtctcatttgcagttaatgcagatgcgcttcacacttagaggttgacattatgctttcccctatggcttatgtcacgcgttgtagaatacgtggcagcaccaggcttcgccttgtgtggggagtagtgactgggaccgcccttccttgtgacagctccggaccgcccttggctgggggtctggatggtgttcgggggaggtctcgtctcctctggtgttggccagcacatggcagcatcagacccctttaagccagaggtccgggtggcctgccatgagagtctaggccattcccaggggttcggcccccgggcgcaggtgctaagagccatcgtcttcaagacacgtggcaaacacggacccccttaagccagaggtccgggtggcctgccatgagagtctagaccattcccaggggtccccccccggcgcaggtgccaagagccatcgtcttcaagacacgtagcaaacacagaccccctccgctggggttccagagcgttgattataggtgctggccttcacttgaggccagtggcc

SEQ ID NO: 164384 - DNA, 464 bp, Zea Mays
ctacggtgtcatcgacgtatacttccaccttgtccctaatcaggtccccaaaagtcttactcatcgcccgcacaaatgttggcaaggcgtttttcagaccgtaaggcataacaacatagcagtaaagcccatccactattacaaaagcagtatgcttcctatcttccctagacatctggatttgatggaaaccagaataagcatctaagaaagacaaaaggttgcacccgtaggtagagtccacgatttgatctatatgtgggagtggatacgggtccttgggacaagccttattaaggcttgtgtagtcgatgcacatccaaagcttcccattcgccttgggaacaatgactgggttggccagccacactgggtgatgaacctcttcgatgaagccggcatctagcagcttctggacctcctttcggatgaagtcctgtcgcttgacggactgtctgcgaggc

SEQ ID NO: 164385 - DNA, 428 bp, Zea Mays
cagaaatcaaaaacactttacatccagccaaagtctcaactctcaacccaaatcaagccaaagtgtaagtagcaccagcaccttcatccagccagaggtcctcgaaggactcctctaattcattgtccaccacaacatgttgtgcccgctgttggcctagctcccaatgtttgatgcacaccaacatctccactgtctctgagttcaagcgccgtcgtcgatcctcaacaatcctaccaaacaaactgaaagtagactccgaagtagttgaggcaggaacaaacataatgtctctagccataattgaaagaattggataggttagtttatgctcatgccaccaatttaagatatcaaaatcatcctcataggtagccacattgtcactgtcaaggtaaacagttggctcacaaatacccacaccgtcc

SEQ ID NO: 164386 - DNA, 399 bp, Zea Mays
tagattgcttacttgttgtcactagagaatttatacctcttgtcatattgattaaatttctctagtgttttttattttagtcaaaaccgtctattcaccccccctctagccggtgtcctagatcctacaagtggtatcagagccgaggactccattgtttgtggatctaatcatcccggagttggacaaaatggctagtaacaacaatgtgcacattgggaagccactgcatttcgataggaataactatgactattggaaaataagaatgtcaatgcatcttagagcaatgggtggaaaaatttggccaattgtcaaggatgggtttgttgtgttgaaacaagatgaaccatcagctagtgataatgaaaacattcttacaaatgatcaagccatgaa

SEQ ID NO: 164387 - DNA, 458 bp, Zea Mays
gttttagattcggcagcaaagcagtggttttgtgggttgtagcatgtggactagctgactagactatgaacacagctctatggtctattgagtctggatatgggttgctgcatgtattgtaggtttagattgggtctccctttcatgtgttgatgccatacatataagatggtgcacgcatggtctcacgagtcacgactgtgtactaagcactggcgcaatcgtttgtgcacgtcattggcatgaatgtcacctaataagtggtggcacaatcgtttgtgtgatggatcagtggttatgactgctttgtcttttgtatggcgagcggtcacgactcacgagtttgtgttttattcaggatttgttcagtcaaaatagtctgcttcgattttgtttcagagcaagaatcattgagcattttcactttcttatttgatagcctgctcttctcattctct

SEQ ID NO: 164388 - DNA, 813 bp, Zea Mays
ctcgtagcaggcggctacgtacgcgtgcgttgtcaaaggctgcaggctgcgagcactcgtcgatcacgggaggacgacaagcatcgcatgcagcaaacacaactagaagatgttttttcaacagaactgccgattatattgctactagtacaatatccagggctttacgacggcagatcattcatatttgatggtacagtgcgacaattatacaacatgcggggtacaatagcgaaccagtgtgatacagtctctccataaaaaaataatttaaaatcaaactggacccttctcacaaaaaggataaatttaaaattaaagtggacatatggtccacatattagatattaaacaacagatattgtattttatcttatcttagccaaaatcttgataaatgtatgagttgaaaaagagacatttcactcttttttatagctcgcttgaccgctcgttctccttcagctggcgagatggtactatctgggagcactgtactgtatgcgacttcgtgttgtattgggcttgagtgttttctcacagcacatctgggaggaagcggcccacatcacttgacaacacaagataacagttgaaccgtggaaggacctttttgcaaaaaaggaacaatggtggaaaccaggaaaatcactgctttattggtgtagagaaaaggatagggctgacaatagggaattctccgtcggggaatacctcccatccccatccccgtccccgcgataaaaacattttctcatggggatccccacgaacacttgcggggaacgtttctttcccatccttgttcctcgc

SEQ ID NO: 164389 - DNA, 468 bp, Zea Mays
ggggggaatctctagggttcgacagccatggtggagaagaagcagacgacgacgattaagctagggttcagccgtcgcgagcattacaggtgaggagagctgaaaaaactgcatgctcggttgctggattcgtgggcccgatacacgtaaacagctgggcgaaatcaacgcgaaggcccatggaccgacacgtggattactgtttcgtaaacggaaacataagacatcgtaatatcaatatttatgtggggactagtacggctgcccagattgcgggaacacaatcttctcgtgggctcagatgcccgaaacatgcgcataccaaaaagtgtgtaaaccgttgcacgaatgagcataacacgtaataatatttgatgtaaccaggtggtacagtgagccaaaaagtctgcgcacctggtcggtgtggtccggtccgcgcacctggtcgggccttccaatagttataca

SEQ ID NO: 164390 - DNA, 2192 bp, Zea Mays
tcagatgaagggcacctgaattctggataagctagaaggtgtgtcgcattaaaaggaggattcaggtagagtcatagtcatcacgacttgggacaacccacttgtcatctatataaggatgagggagtgcccctatcatctcatctctcagttcatcacatctcagcttagctcaaatcattctcattagatctcagctcgtcaccacatcatagctcattagccctttcacagcaaccacagcaccactagatcgactagaaaactcactctccaccgtccatagctcacctataactcatgaacaccagtgatactcaaatacgcaacctcgataggaagtagggtgttacacattctagctagcggcttgaacctgtataaacccttgtgtgatccgacgtgtatccgcacgtaccatcgagtcgcaatcaatgacggcgtcctgttcaaaagcatcacgtggagaaccctgtggtgcgcagtcgggtcataaacacaaatagtcggtgagccaggtagggggtgcgacgtcgatgcatgacaactccaagactatcgtcttccgcaccctgaccatcttcaatgtctgggaggtttttctaatttggatccctctcctgcattgcagatcgagaaggcatcctgcatcgcatcacggatccatccgagaaaaggtcttctccgagggcatcgatcgcagaggcaggctcgtcccacccgacctcagcgaaaaccacttcgacgaactccaaggcacaaagacctcaaccaacctccgccctacacagaattgtgtccacttatattacctcagatcgctcgggttagtttaggatcgctcgaggtttcatattactcatactatttctattcaaactgcgcattacatgcatcgacaagttgaaatgttttctactctttgcgtactttcttgaattactttttggcacatggcctgcctcgacactattttctattgcatctcatgtttagctgaggcaaatcttctctgttccatctcatgtttcgttgagttatatggtttgttgcatctttctaaatacacctcaccaacccaaatcatctctgctccactcatgtaactggcgtcatgaactctatatggccgtcgctaacacggggtagtaggtctggtctgctgacgctacatgccttggcagctcctacagggtacctctgaaccctccacatgaggcaatcggctcaggcagtgaagtacgaccccattttggtggtacatgcctcatttgactcatgggtgacctctaagcccttacttacacaagggaactggctcgggcggcaaagtctgacccagttcagtgctacatgcctcgtctgactcatgggtgacctctaagaccttacttacacaaggcaatcggctcgggcggcgaagtccaaccccagtttggtgctacatgcctcgtctgactcatgggtgacctctaagcccttacacaaggcaatcggcccgtgcgacgaagtccgaccctagtttggtgctacattcctcgtctagactcatgagtgacctctaagcccttacttacataaggcaatcggctcaggcggcaaactttgaccccattccggtgctacatgcctcgtctaactcatgggtgacctctaagcccttacttacacaaggcaatcggctcaggcggtgaaggttgaccctagttcagtgctacatgcctcacttaacctagggtgcgctcaagccctactttacgaaggcaataactaaaggttgcacttcgacccatgaacaatgttatgcactctcactacacctcgacagcacagactcaattctcacttcataactcaaacaaatctccttcacattttcctacattttatttcatgccatcaaaatatccttaactaacatctaggtcacaggtaagtcttaataggatcttcaaagttaaatactcaaatttacatgatcaaacatcaagctcgccgaccacttcgacctacttgggggctaggccatcgcccgcctcgccgactcgttgcttcgtagcacgagggctgggtcatcgaccacctcaccgactcgctacttcaccagctcgggggctaggccgtttcccacctcaccgagtcattacttcatcgcctcaggggttgggacattgcccacctcatcgcttcac

SEQ ID NO: 164391 - DNA, 855 bp, Zea Mays
atctctgatcagtgttcaatgctggttatcgccctacaatctataattgccctgaggcttgcaatcaatgttctccacaagtaaccagagtggtacaaaagaaaacacgtgtattgatgcctgttatcttcgatcaatattctagtgtatcatttatttgctaccagggtcatatctgtggaaacatgctcaggtcgaggctacgtccacacagcacagcagccccgagctggacccactccacacatatgaagcacaagtgatcgaaacacagttccttgcttctttgtgcggccacatggcttgtgcccaagaaactcaccacactcagggtccatactggtgactagagaaatgaaatgaccctatcaaccatccattccttaactgcattgcttccctcacggttggcgcgtaggacatgtccttggcaccatattagtctgggtagcttccatgttcacgacgctcccactttaccggtggcattctgatagatatcccatgctcccccttatagtctagaaatgatgtgatagctaacaaaagtagcatggatgtccttgtatattacgaatcactcatattgctctgagcttgtcatccactctaagtatcaaattcaacttttaagcaccagcaccacaataacataatcctccagaaggttctttcataatgagcacatgaagcaacagaaaatgaatagtctggtcatgcttggcaatttaccatttcaagactagaacatgcaatcccgaccaaggtgggagcagggcatcaagatcagcatggtaccaggaaagggagattcatgagcccgacgaacttgccagccagattcgtgaagcagtt

SEQ ID NO: 164392 - DNA, 530 bp, Zea Mays
gaagaaagataattcgctaacatgtacaacatagagcaagagaccgactcacctaaagattggagaggaacattggtagacctagggcaggaggaactgaggcatggcttgacgagggaaggttagcaggaacgatctgaaagcactatctggggtgacctcagccccaccagcagacagcaggctccttgcatctagctcaccgacctctaaggcgacttgtccagttaaaactgtggaagcacatactgccatcgctccatcggaccgaggtggggacgacccgacgtggacacccatggaggcatgggaaagagagcacacctgaacaccctcgggggctgggttgtagcttgcactacccacaagagctggatcactactagcaacaccctcgggggctgggtagctgccggcaccaccctcgggggctgggtcttctgctgttgccacctctaaggctgaaggcccctcagccacctccatgggagtcggatgactcagatcagcaactcggcatggaaggctgc

SEQ ID NO: 164393 - DNA, 912 bp, Zea Mays
gggcacacccatggtaaggttctcctccctctcttcatcatcggtatcctcaaattgtgcaagcatgtcatacccacgtgcatgactattttcaacaaactctggaaacattctctcatcttcatgagcattaaggacatcatcctcaagagcttccacatgagtgtttgaattcatcctagttgacaaaaaagagataattgttagtaattagagcatttgtctcaagcacaaattacaaacattacaagacaaaaagtacaaacaaaggagcctccactacctacttaaacaaataggtacaattcgagcacgtggagcactactagcagtggagcagcactaactaggaatccgaggcactgaagcctaattaaatagggattaaataactacacatactaattaaaactacaatcaagaaagtggcatggaccagagccgcactatctactcggctactccatatggattagagagccgcactatctactccacaattcatcaggaccacagccacaatgcccctgtcaattagagcctcaccttcttgaagagagctagagccacgtgctggagtgaggagagcggggagccaaggcacaacggagtggggagaccgcatgcgcgttggagatggagacacgttggagctgcaaatccgatgctggagtggggagagcggctagccggagacgcgcgctggacctgggaggcccgcgcaggagcaggttgtgccctatgggagcacgacagctacttgtggctcctcctccatagcgtgcgctgtggcgtcctcctgaccctggtcaagcccgactcctctagatctggcggtgggcggtctgcggcggcgggactccggcagtctgcggcggcagacgagtggttgaaggtggcggagtggccgtg

SEQ ID NO: 164394 - DNA, 608 bp, Zea Mays
agggggtgtcctgtgccgcttagaccactgtttagcagcagcgcgtacgtgcttgagcttacctgcgagccgggcagccgcgtcgggacaggggagctccaggtgccatgcagggaggacctcagggaggaagagggggtgatatagccaggcattttcaaacttgaaaatttgggatttggggatggaggtagacatggaaaccagcagtggtttatggtcggatgttttcctgggtagagtggtgtgggaggtggaggggaaggaagaggtgtgggagttgttcacaaaagctcgatccaggcgagctaatgtgggaaccgagcacatgttagaccaggtgaaaaggcagtcctgtaactggagttcggcaacgccaaggtagtcaattgtgctattgaacagggagcaaaggtggttgtccaggtggccccggtttttgtcagcggtgcctctcaacatgttgaagtcaccgaccaacatccaaggacctgagatactggggaggaggtctgcaagttcagcaaggaaggttggagagtcttggtggttggatgggacatagacgttggtgatggtgaggggcgtgtctgttaggtgcgagctga

SEQ ID NO: 164395 - DNA, 401 bp, Zea Mays
gatatttcctacagtaaccttgatccgattccaaggggaaaacaacgaaaatgggcgcccaaagtcgctctgccatcacctgccacctgctggtgcagtctgacatgtccagagcttggctctataaatggcagctcactctctcccttctcccacacaccactcccttcccgtctctgttcggctgagcagggagctcctccttcttccccatggcgccctcccacatccatggtcgtctcccctccctgcacctcccagcccggccccttctctgctcccttgcgtggaggagatggctggaggttgaagaagacctccctgtgcctatgacgagtgggcccaaggccatgggtaagaacacacaaagttgcagatttgtgctcttccttcaaatattc

SEQ ID NO: 164396 - DNA, 583 bp, Zea Mays
gaaaaaaaacatagaaacatttatgagcggtgtcatatatttgtgaacgaatgtactaatagtttttaatccacataagaacattttttttgtacgacatattttattatagaatcatgacgcgtcgtcggtcgtcgctacgggacagtgacatacatacgagcaggggcgccagccaggcacgtacacgttacaagtgtacgttttggttagctagccttttttccggtgggtgatcgtgttctatttgatttgagtttgatacagcagtggacgcgcgcgcacaccacctgtaattatcgtgcttgatctagactcccccatacatacgtgacaactaaccgacacgtacaatatagctagcgtcggcggtgttagggagtaagctaagcaactttagttgctgaagcaaccccgctgtacgtacgtgcgcgaattggtgtactcgtgaatacataagcatgccgtcacggatagctagcgtagcatgcaaaacagtgatccaccagatgatgcgttcattgacgaagcctctcaactcatcatcagtctcagctactcgatcggtctactcgtactatat

SEQ ID NO: 164397 - DNA, 588 bp, Zea Mays
atcgcgacaacccaatcgctcgccggagctctgcagacatcgctggattgcgttgtgccgtggttgggtctcctttttgttcaagccatcggtaagattgtccctgtcacgctcgttttgacccctgctacgattgttactcatcggatcagagttcggggcattgatgcggctaattgatcgagccacccatggccgccgccatggattggggcgcctcgtcgctcggcgaccgccggatgtgtgggagatgagcggcgaatcgtgcgccgtccgattcatttcgaatgggcgagattagaagatgcggatacctgttcgtgatggggtctcggtcgttagtcccttgatggacggtttggattaaaaaagtgtgtggatgtagaatctaggccgtagattgttaatccaaaggctagggcaatcttatgcaagggagagatttcggaccgtggatctcggatcctatggtggcagttatgttttgtgtgcgatctaatctgagcgcttggctgttgatctaagggctcagagtcacgcgtaccccttcggctggcggtctttcgtatgagcccctgtcattctggg

SEQ ID NO: 164398 - DNA, 499 bp, Zea Mays
gtcgcatctgaggtatgccagtatgaatgagtgacacataggttccctttgttaacattatgatacatacgtttatgcgtttatgctaggagagagagagagagaagggaacgacatgggcgcaccgttccatatacccggtaacttccgacgacctagccctgacagccgtcagacataaccttatgttcgacggctgcccagaccatcggagattaacttacatccgatgtcattaaggacaagcatcacacataagggtggccatcggactttcgttcatttcatattgtgctaggtttaggcctagtttttagtgaggtttgcatacctcatgatatcaggtacttgtgcacaccatgtttgtacttgcacagtgcaagatcacaccaactgtatttgtggtgtaacatgtaccggagggaaaaaggcacgttgtgcttcgattggaagcttgatatgaagatagaggaaagtagtccatgataggctattctgg

SEQ ID NO: 164399 - DNA, 365 bp, Zea Mays
tgtcactaggtcaggtccaaagatttctcgttctctaggttgagaccagttgaggggtgttcgacaccttcttccatatagggcttcgaagggtgccatctttaggctagattgataactgttgttataagcaaactctaccaaggagaggtacttatcccagttcttgccgcaatcgatcgcacaagcccttagcatatcttcaagaatttgatttacccttttggtctagccatcggtctgggggtggtaagctgaacttcttattagcttagttcccaaagactcttgcaattgctcccagaatctagcaacgaattgggctcctcggtcagagacaattttccggggtaacccgtgcaaac

SEQ ID NO: 164400 - DNA, 622 bp, Zea Mays
gccaagttgcatatggcacaagtgcctagtcattctgaagcttagtttcatgggcttcatgaccatagtcatcaatttctcccttttcttctcgtcagctttcacataaaaccattcattttgtccacccggttggccatttagtgcgatagccaattattggagccttcatatcttttctatatgcaaagttgtaacagccaaagttcttatgaagaccatctgctctggccttcgtctaatagtacagttcgtgcacccggcaaaaagcttcggcattagcgttcataccctagcttcggagagccccatataaaaacattgagcctaacaatagcattaggtgtcaattgatgaaggtatatctcaaagttctttaaaacttcccctatcatgtcatttaaggagaccgaagtcctgctctgaagaagctcttgaaaacgacaacttcgtcctcttttggatccgcaacattttcctccccagcaaaccggacaagcttgctctcagtctccccgaaatagccaagtttcctcatcataaccatgtcatcctctgttacagtagatttcccaaactcaatgtggctaggctttgttgggctcagaatactgttatcttc

SEQ ID NO: 164401 - DNA, 551 bp, Zea Mays
tctgaaattcagactgacagacagatgctatgaacttcaagcttaattctaaataggatccagtggctttttgtaggaatcctatgtagcaaagttatagctggattgtggctctataactttgatgcagatctttggacaagatgccacaaagatttgagagaaaaatcgagttcaaatgttgactgtcaggccaattgactgaagaagcgccatggtacagtgttctctgtagatcagaacgccagcacagcagctctcaccgccgacggctccttccgccgcgaattgtgtcgccggcgtttggattcgggcgtcgcggtcagtagataagctccgacgagtaaaaaaaatcttggcgaaggaccaacttgcgctcggttgcggctaagcttgccgtacccctccctcgccggccgctcggataactcttaccgccgtcgagctgtcgccgttgcgtgccacgtgtttgtgcgctggtcctcgtcgtagtgactcactgggtgcatgtccggtgatcaccggagtgactgccacggtaaaagccacct

SEQ ID NO: 164402 - DNA, 870 bp, Zea Mays
aaataggccaaaagttgggctgtcagtctgcctaaaacctgaattatgatattcagtggcataggatgaactttgggggccattttgaagatgatcccgtggatgtttgagcatggttaccacagtcggtttatagccggatcatagggctacatgtttgctacaaacggattagtaagttcttacgcgaaaattcaagattttggcgtcacaaatctgtgtgtcagactgactgaagaagatcatgatggtacagtaaccaaaaaatcagcagattcagtgaactggccgccggtgacccttggccgggattagtgctgctcaccgcgattcgtgcgtctagtttgtggattgagttcgccggtgaaaagatctcgtcgcggatgtgttcaagtaactgtggcctcgctgttcctcaatcacttgcaccagcgacatggctttacggccgtcaccggagttggtgtctttcaccgtggttgtgccacgccccaggcctttatccatgtcgcttctagccgcaccagttcgccgataaccgccgtagcccctcagccggtgagtgccacggtttcacccgcgccagtagccttctccctctccagccgcgagcgcgtcttcacgaaattggacaccaccgccttgcgctcctataaattgatggcctggtctgttgcgacatactatcacaaagccagagcacccattcccgccttcaattagccaccatagctggagaatttccttctttccccaattcggttgactgcgccgccgcgaaccgcctcatcgcggctagctgcttccaggtccgccctctctctttttgtccatgttttagcgcccacacgtgcttgtgatcgtcacctg

SEQ ID NO: 164403 - DNA, 582 bp, Zea Mays
tcaattggacgaaggggtatacattaatccgatcacagccgcccgctggccatccaacggttgagcgacatctcccccatccatcacccggacacggcggcagcgctcaccaatgcggccgcgaagttcgccggcgcctcaccaattcggcgattaactacgcgattctacgctacgaagcccatttagctatgtggagaacctagcagatcataggatagggtactcactagggttttgcgtgcgcataggtatagcacacggcgtaggggggttcaccgcggcgctctcggtctccggtgagcgattacccgcgctccacgggctcctttacctcctcgagggcacgaatgccttccccacgtcccggcggcactacccgactgcaaatcagggacggggcgcgggtgtagcgaggattctatcgtcggcggccgcaccactactcttcactctcattttctgggtcgcgacagtcgaggtccggcaaaactagggtgcaggaggtcgacggccgctatatagcctcccatgctaacggattaggggtaaagatcaatctagtccacagatttcgcgggg

SEQ ID NO: 164404 - DNA, 582 bp, Zea Mays
caagtagtaacgacttggtgaactgatgtgtgtgttgtatacttgtatctattgtttgcttgcttctttgagcgcgtgattgaacgaaaaaaaaaatccatgtgatattgtgattgaatgtaaccgacgagttgatgatgggcaggaggggtttcaacttgggctacgcgttcatcaacttcaccaccacgatggcaccccgcatgctctactacgccctgcagaagtccggctggaccgtgtacggctccaagaaaaaaaaaaacgaccacaaggatgcgtagcagcagctgcagcctgaagccagtagctaggaaaaggagtaaacttgttctgagggaaaggttgggggactttggacggtagctgcgtctgcgtggtggtggtctgatcgggatgtctgtagtctgttccgtagagctagcgtagcggtagtgtctttgtactgtggtgtagtggagagtgtttgtgtgttccatttccatgtcatgtgtatacggtgtacctgttgtgtcttgaactccgatgaggatgagtggtagcagcgcgcggctgggtgtatggtttgtagtactagtaggc

SEQ ID NO: 164405 - DNA, 361 bp, Zea Mays
taggcatgtggctcatttatggcatgtgcatgagccccccatgccctatgaagctcacaacatgacgagggatgcctagagtctggctatgaggactaggggtcggtgtggagcaaagggagtaattttgacgcctgaattctctgccgcaatcgcacatagtctcaacaaacttaaagaagcacgaccagagagcctagacgacaaaggtgaataatgtcggacggacctttaccgagggtaaaatgcctcgttttaccacaacgcagcgatcccttccaagggaagccacttataaccgctcatccttggtctataaaaagaggagggtcgactcgaaccaaaaaggaaggacacaaag

SEQ ID NO: 164406 - DNA, 393 bp, Zea Mays
cgctccacagcagccgcaacgtgcgcgatgaccaggccacaccgcccactcctcgatgatctgctcgactccttcgaagacgtcttcaccaccccgagcggtatgccgccagcccatccctttgaccatcgcatacacctccaaccagggacgacacaagtggttgtgcgaccataccggtactcgtagctgcagaaggacgagctcgagcgctaggtggtagaaatgctagagcaaggcatcattcgccctagcacgtatgttttctccgcacccgttctccttgtcaagaaacacgacggctcctagcacttctgcatcgactaccgagctctcaatgaccgcacggtgaaggacaagttcccgatccctgtcgttgatgagctgcttgac

SEQ ID NO: 164407 - DNA, 837 bp, Zea Mays
cttgggtcagtctcatggcgtgcctgcatatgacatgacttcttctgatgggtcgtgtgttttcgtactcttggtatggtgttctatcttgttcgtccattgtaagagtccctatagcttgctctatgcatacgctgttgtacctgatgagtcctgcagaacgtgctcacggtaaggttgaggttcgtgtttggtacgacttcatcttctgtcaatgcccttgcatcaccctctagcatgcgcgagtgtgcactaggcatgttgtcctatcctttctggcatgtgggtcattatcgtggagactctgttgccctggtcccccttggcactgtacacatggcctagacatagtttggtgatgatgtgccctaccacgaccatcgtgagccaacaacgtggacctaggttccttccttgcaggtccgcttgtcatgatcttggtcgtacaccccgcctcacaggcttgctcaatggggacttggtcgtatgccctgcctcataggtttgctcgcgcggggacttggtcgttcgccccgcctcacagacttgctcggtggagacttggtcgtgcgcccggccttgtaggttttcttgatgaatgggctagaaagaggtttatgggccttgtcgtgggtactccgttcctgggtactcgacattatgtcacccacaatatgatcaaccgggtgatcttttacaatagaatgatggattcttaatacaatttgagaatgactagttgaagcttgagaagggatcgagtgacttcaagtatcttgattaggagcatcctcaacttcgttattttgttgactttgatgaattttctcatttaaa

SEQ ID NO: 164408 - DNA, 556 bp, Zea Mays
aatttagccaagatgtctcataatgtatttaattcaacaaattaataggtagcaagatgtatagatttgtttcttttgatctaaatgctgagaacaaatttaattttagaccaaattctaggatagtcgggcgcctacctaggctacccactaggtccgcccccgtttcagagttagatggattggtttaccacccctgcctacggcacacacagttttggaatacactactaaaaacgcctgcctgcactagcgatagtggtaatttatcattgttattgttccgggaaagaacatcactactgattttataactccactagcgcagtaagcccattatcgcttcgaaatttagcttcttggccccatgagctgctaaggtgtccacggtaccgaacatagctagtgtttcgtttcagagtatgatgcattggtttaccatccttgcctacaacacatagttttggaatagactactagaaacacctgcctgcactggcgataatggtaatttatcactgttattataacgggaaagagtgttattgctgatttt

SEQ ID NO: 164409 - DNA, 315 bp, Zea Mays
gtgggagtggccgcgaccgtcgatccgatcagtgacgactcaaattagacacggcgtaccgattcgtagaattgatcatggccattggttttcgatcgtggagctgtgaggggatcgagcgtaattaaattcggaccgtcagatatggatccaaggggggtccttgcgtgtagttctatgagggcgtgatctaatcttggcctttggaatctgatccaactgccagatccggtcgataccgcttcggtgcccactttgcaaatgggccccctgcatttctgttaaatcaacccgcggtccactgcggtgtagaac

SEQ ID NO: 164410 - DNA, 741 bp, Zea Mays
ggagctactagagacggaagcaacatgggagcccatccatgggaagatcatccaactcatttgtgctaggatgacattaaccattgtgcttgcacacttcatggtgtgatagattgccttgtcatggatctactccagcactaaggacctattgtgcgtccatcagtgtccccactaaaatctcagttcctaggttgtgggcggggtcatgaaggctcacattgaatattttgatgatagtatgttgtcgacattggtgggatgttcacatcattaaaggatggggcaaggctctaacacatggtgaggcatatgtcgagctgtaccatcactaggatgagggagccaatggggaacatgttattccctgtcagtcgaatgaccccctaggactaaccttggggccatcataggggatgggaggcctctactagtgagggagctaacgaggaaggaaagaagacaacttatgtgaaggatgtgaacccctaaaccaccaaagcttccatagcctccagtgtcaacaaaggtggagtgcagtgaaagagtaggccaagcaaaagcggcgatagttccacccccaaactagggatggcaatagggcgagtgggggtggggaccgtcgttccctgaaactcattccccatccctgccccatttagcttaatggggacaaactcatccccatccctatccccgctgatccccgttccccatttagggacccatgggaaatactat

SEQ ID NO: 164411 - DNA, 610 bp, Zea Mays
aggttatatattagaaaagcaaaaacaagtcaccctgctgctctgccttttggagccgtacaacttgctcctgagctaacatatggagtatacaagttgatgagaggccatatgcatcagtaaccacttgcgagctgttggtaccgtacggtgaaatgcatgcagcacttgagagcattggccctggatctatccatctctcgggatgtgctttgcttggatctaatccttgactgttatcgttgccaaggactcgtatactaccttaatagttatatcattgtcagtcagtcagtcagtcagtcagtcagtccgtcagtcaccatcatcagagatactctcccacagcagagggcatcgccaatcatgtgcagtagtgtgacaccctacacccccatgtgatgacctgaccccctcccagcttatagatagctgaactacagtaatggctctgttcgacctgagtcatggatcattttcacttctcagtcctcaccatctggactgaaaccgctacacaaccacaggcccctccccctcgccacgtcatcgagatacttgggtcccgcgcacatacggaagcagaaccccccgtgctggccagtgggcc

SEQ ID NO: 164412 - DNA, 455 bp, Zea Mays
cgaggacgacccgtagatggcggaggtgatcggcccacgtgctgctgtaaattaggatgtcatcaaagaataccaggacgaaccgtcggaggaatggtcggagcacgtcattcatcagggcctggaacatggcgggggcgttgcagagcccgaacgccatcacgaggaactcgtacaagccgtcgtgtgtgcggaacgcggtcttgtgcacgtcctctggccgcatccggacctggtgatagcccgaccgtagatccagtttggtgaagaatttggcgccgtggagctcgtcgagaagctcctccacgaccgggatggggaacacgtctttgatggtgagggcgttcagggcccggtagtcgacgcagaagcgccacgagccatcgggcttctttaccaggagcacgggcgacgagaatggggagtcgttgcgtcgcacgatcccctggtcaatc

SEQ ID NO: 164413 - DNA, 576 bp, Zea Mays
gaaaactctaagcctcaccaaggcattaggggttacctgatgaaggcaaacgtagaactttttcagcaccttcataaccatcttgtgaagtaggaattgaaggccggccttcacgaagcatcggaatacaaccacctcaaatttctcatacagaggggtagtatcttctctgccaagcctaaaaatagaagtgtcactgatatagttcgtattcttcaaaatttcaatgtgtcccttcataattgttgacatgacaaagtagatgtgacttggttttcatggctagtattcgtcgttgtattcctcgagctcaaattccttgctaccattagactctttggacaaactagcaaaaaatgtcttcagtaatcttttcaaccctagcctttccagtagcatcatagtacgcaacaagggcaagctccacactccttccttcactagccttttctagaactatgaaggttgttgagtatgaagctttgcgagtaaaaagaaagctttagatgcaaagaaagcaacaacaacagggtagcaaaagcaacgaatgtcgtacttagcagacacgaccatgac

SEQ ID NO: 164414 - DNA, 1153 bp, Zea Mays
agcatgtctacggttcagatttgtttgactacgaagatgcttaagtgactcatgatcagaatgaataacaaattccttagaccacaaataatgtttccatgtttgcaaagatcgtatgagagcatataattctttatcataagtagaataattaagaacatgaccattcaatttttcactaaaatatgcaatgggtttacctccttgcatcaaaacagcaccaatgccaactccacttgcatcacattcgagttcaaaagtcttaccaaagtcaggaagttggagtagtggcgcgtgagtaagcttctcttttaaaagagcaaaagaatcctcttgtgactgcccccaattaaatgaaacacccttcttggtcaactcatgtaatggggcagcgacggtgctgaaatccttcacgaaacgacgataaaatcctgcaagtccaagaaaactccgtacttgtgtcaccatcgatggcgttggccaactctgaatagcatgcaccttggcctcatcaacctcaataccctatgtagtgacaacatagccaagaaacaatacgcgttcgatgcaaaaggtgcatttgtcttggttagcaaataagcgcgcgacgcgcaaagcatcaaaaatagcacgtagatggtcaagatgttcagataaacaagtgatgtagatcaagatatcatcaaaataacccaccacaaattttccaatgaatgggcgcaaaacctcgttcatcaaacgcataaaagtactaggggcattagttaatccaaaaggcatcactaaccactcatacaagccgaacttagttttaaaagcagttttccattcatcgcctatattcattctaatttggtggtatccactgcgcaaatcaatcttagaaaatattttagaaccacttaactcatcaagcatatcatctaatcgaggaataggatgacggtaccggatagtgatgttgttaatggctctacaatctacacacatgcgccaactaccatctttctttggaaccaaaatgacaggaacagaacaaggactaaggctctcacgtacatacccacggtacaaaaggtcttggacttggcgctgaatctccttagtctcctcaggatttgctcgatatgcagcacggttgggcaagctcgct

SEQ ID NO: 164415 - DNA, 1176 bp, Zea Mays
ttccaaggtagaagcagtatcaaaatggaggcagccatccaacgtcagtgaagttcgaagctttctgggaatggcaggatattaccgccgctttatcaagggattctccagcatagcaagacctatgaccgaactcctcaagaaagaccataagtttgtgtggaccccgaagtgtgaaggaagtttccagatcataaaggagaagctcacgaccgcacccgttttgacactaccagatatacaacaggatttcgtcgtcttctgtgatgcctcgaggcaaggcttagggtgtgtactgatgcaaaacgagaaagtcattgcttatgcatcacgcctactcaagccgcatgagcagaattatcccacccatgatttggaattggcagccatagtgcatgccttgaagatatggaggcactacctaattgggaacaaatgccacatcttcaccgatcacaagagtctgaagtatatcttcactcagccagatctcaaccttcgtcagagaagatggctggaactgatcaaagattatgacctcgagattcattatcaccccggaaaggccaacgtggtagcaaacgccctcagccgaaaaccttttgggataaagggaaccaactttttagaagattggaagaaggaatcagctcaactgaatgcatgtttgggaaacaacggcaacctcgaagtcaaaccaatgctagaagacctcatatgcaaagctcaacgcctagactcagagacagcaagactcgtggaaaaagctcgcaaagaacaacttccggacctcaggacagatgaacagggagccctttggttcaaaaatcgtctttgtgtaccaaaagaagaggcacgagaagtcctgctcaaggaagctcacaactcagcctactccatccacccaggaactaccaagatgtacctagacctcaaaaccagatactggtggagagggatgaagaaagagatagcacagtatgtggcccgatgtgacacctgccaacgaacgaaggccgagcaccaaaagcctgcaggcctattgcaacccctcccagtgcctgaatggaagtgggaagaaataggcatggattttgtaaccggactaccccggacgcaaaaagggaatgactctatctgggtgataatagatcgtcttaccaaggtggcccattt

SEQ ID NO: 164416 - DNA, 667 bp, Zea Mays
cggaagctgatggagctgtgaagctgagaaggagcagcagagttaagaagccgaactccaaatatattggtgccaactggctgtaacacaggggatgggtgtatctctggttggggtttcagtagcaaatataaaaggcgaactgctgccatttctgtaatttggcttttggcttttggttgttgaacaaacccgaacagacttgaaccgcaaggaataacacctgtccacatcgccaatcccagatcgcgagctcctccctgtgaacgtgctaacagttggtattcggagccaatctggatcctcctcacgagtatcacaccagatttcaggcgaaggctggagggatggcgccgccgcgggttgaggattccttggcgcagttggtggccaaaatcgacgacggtaacaaggatatgagtcgacgcatggaggcaatacaagcaacgatggagaagatggagtccacggttcagggactggtggtcgatcgaagcgagttccagaaatggcggccaggaatcgagaagaaggtgggcgagatggcggacgtgctgagtcagatgcagcaccagatgaacaagacgacatcaaagggtaccacgattccaccatctacaacgctgggcgcggtaccagggggtacggtcgcatcgacaacttcttc

SEQ ID NO: 164417 - DNA, 281 bp, Zea Mays
ggggtaagaaagtttacggtgagaaagaactcaatgctgggtggtaatgcatctgaaggtcgagtttgacttctctccttccttgacgagttttggtcttctttggccttcatccttggagtcgccatccatatcaaggacatacggttaagatagttgtcgatgtttgggatgggtaggcccaataaggtttactttgcttttggagtaggtgaatttaggtaacatatcaagcgggttaggtaattgtgcatggccgagttgatctaagttaccaattt

SEQ ID NO: 164418 - DNA, 390 bp, Zea Mays
tgccccgacaatattgtcaaatgtttatatttccaaaataaaaggggaaggcatttgaatgtggactggaatttggatccatgcaaaagtgaaaagcgagcgagtccaatgcagagaatttactgatatcaccggcatattacgtggtgcgtgatggatctaagcgcacagaccacgcatcactagctcttttatgctttctgtccacaatttcatgccgctacaagcaggcaacaatctcccaatcttctccattgaaaattgcccgcggacagggacagcgtcccgcggcagtcttacctggattacaccgctgtcttgctccgtcaaaagtacgccactcactaatcgtccagttcttgcgtttttggtgcatcaatgacagcgaca

SEQ ID NO: 164419 - DNA, 754 bp, Zea Mays
tggagaaaatctgccttaattatgctctgtcaggcgccttaaacagagtttcccatggtacagtagcagaaataactcagatgcaatgcatctcaccgctggtgaccctccgccatgattaacgtcgatcgtcgtgattcgtgcgccgtgacttgcggataaccgtgggcaaggaaagatctcaactcggggaagggagagaggcttatcaccggactattcaccgtgacacttgctgcgcagtggatagtggtgtcctcgtcggagttcgccggtgattgtaaccgcgccacgtgcttagaaggtgtaccacgtcgtagtagatatccgtaggaggtcagttcgtcgtcggaggcattaccccggggagcgccacgatagtttacgccggtgactcacctctcctctcggccgcctttctcccctttcaaaattggacaccaccgcttagcgctcctataaattgttggccgggtctgttgcgccatgttatcatgaagccaaagcacccattcccgccttcaattagccaccatagccggagaatttccttcttccccccaattcggtcgactgcgccgctgtgaaccgccttatcgtggctagctgcttctaggtccgccctcgctctttttgtccgtgttttagcgcccacatgtgcttgtgattgtcatctgctcagcccattgagctagacttcacctactcaaccggaacatcttgatcggtgttcggtgtccgctgtcaccgtggt

SEQ ID NO: 164420 - DNA, 593 bp, Zea Mays
tacctcacattgttcgagcttctagtgtttttttgaagtgtagtagtcagacccgtcaaaggtcagcagacactcgtttcatcatggaatgcggggcccctactctcctgttcgccatccttctgggggttagaccctttttcggacgatgcctctttgcttaagaacttcctaagaaaacgacaatccttgtaggcatgtcgaactaggtaccaatatttcgggtatggggcttcgagtagatctttgaaatgattgatggtctcctcaataggatgcttacttcccttctggcccattatggctactagtaattcgtcgtgcccccacatgtccttctttctcttatcaggctattcgtcgaagcccccgttggactctttgtcgagtttggccttctgcttatgatggtcaaagatcgccccaccacatcttccctggacgcgtggctagttgctatgtcgaagagctccttcgtagttcgcatactcatttgccccaacttatgcactagagtatctgttatggtccctgagatgaaagcgctcataacgtcgacgtcgatgaggttagtaaactcgttgcattgccat

SEQ ID NO: 164421 - DNA, 372 bp, Zea Mays
agattaggatgggatacaggctgagtgccaaatcatcattcgaatttgagaaagcgttgcgaaactaaatttttgagagggaataagggggaacaagcctagagccactctggttgctccaaaagaactatcgcgtctatatacctaccggcgacaaagggggagaagccgatgcgctgccatcatctctcaaaattcaaaagggcacatacgaacagagattagctaagcaaagaggaattaaacaggttaagagtatgattgttctttacatggtcgatctatcggccgggacaaacgaacaccaccaaaagaaccactgttctagaaatgctactaccaccgaagggaaatcctactaactactcgacc

SEQ ID NO: 164422 - DNA, 485 bp, Zea Mays
ttaaacagtacccgcggcggaagaaagggcggaggggcttaccggcggcgagattgctccggtgaggtggccgagggtgtaggggaggtcctgacggtcacgacgatgtgcgggtcgccgtcggggatggtcggagtcgaccggtctgcgtgcgcaggtgggggagctcgtcggcggcgaggagtccggcctatccagggcgaaattgatcaatcaaactggtcagggggcttcactgggtgctagggaagacatgggtgcgaggaatttgacaatggcttaccggagagctcggtccacgcgtgcaggcgggcgaccgaagtccggtgagggtgatctcgggtttccggtgaagttttgccgggtccgagggcttggaaagcttcacgggccactggcggagctaaccgaagcgctggcgcgacttgggggtgactggagtgggctggccacggcggccgaagctctgaaagcttggcgggcgg

SEQ ID NO: 164423 - DNA, 557 bp, Zea Mays
atttcctctctcttttctcgtttcatttgattttctctaggaaaaaggttcgtagaacacattacagacaggttgatacattatactttcgagagtcttcggaatcaccccaaggactagaccgcacaatacttcatatgctccgttcttcgaatgagtccctagaaatagatggtattgttggggatttggagttagcctaaacccccgttctacgtacaacactggacaccgtacctcgcgttcagttggctaacacaactgcagcatgtcttcatcacatagacatgtatgtattcatcatagagaatagctgacagatagaaaaacatttaatattcaacaataaaataccatttgtataaattccagtagtttgttagagatgctacataaacaggtatgtgaaatacatgaacttgagcatgtcttcataacagagacagaaataattcaattcagactgtagactacagtttgaactgcaccattagatcaaacacaaatctgctggagcttctgtgatccaatcatatcacatgctcaatgatttagca

SEQ ID NO: 164424 - DNA, 657 bp, Zea Mays
attgcaatgatacatatacttccacaaaccaaagtgcggatagaaccctaggaaggcttcacagagatggacagagatagcgatttgaagcacggagttgggattcagatgagtcaggttgagagaataaaaattgagaagatcgtggaagaaaggggaaactggcagacctaatccccgaatcaggaagggaacagagacaactgattcatgattatcctctattgggacggtgatcccctgctagatccgccaagagcacagttccttgcgtggaagaacaccgacttcgacaaggtggagaagatcagactcagagacaatggaagcatagttaccgcagaatggaagttggctattaggatcgattgagggaatggtgggcatagtagtccctgttttttcttcctggatgccatcaagaccacacgaacgagagggtttgagcacaaccgcagggatgagcgagggtctcaagaactggattgcgacggagaaaaaatagagttagggttcgtttgccaggaaactgccaacagtgacgtatatgcgcacactaatttgggcgcatcatgacagacaagtaattcagaccagacctcaattggatggagtaagtcaggtggatttgttagttgggcctatcagacgaattca

SEQ ID NO: 164425 - DNA, 437 bp, Zea Mays
ctggacttcatggcagttagcggtatcaaacattgacactgagccagttttgctcgagtatggaggggagaataaacaaggctaaccatgtcggttcagataagcatgtttcaaagcaaaagcaacatagagcagtgaagtaaaggaactaaccgtcatttttaagccccaactttctgcgccttatgtagaacagatagtagccaaactcagaggactccatacagatgcacagcccatcggattcgtctacccactttccgtttccctgatagccgaacaagtacaaaacttatatgaggagacaaaagagaatcatatgcttattccaatattccatgctttgcttttgtgcagtcccaaggaaggcatcactaaggaaataagttcctttcactttatttatatgaagaacttttattgaattcttcttctag

SEQ ID NO: 164426 - DNA, 540 bp, Zea Mays
catggttgattggaagagaagagaaaagtgggagaataagcaacaaacgaccaggagaggtgtgaagacaccagcgaggcaggcagtctatttatagaggccagaagcaaccgctcatctcctaccacggccaccgaacagtcgcaaatattcaataggcaattcaaatcatctggaagcaagtcaggtagcaggcaccgtttcacgtaacacgataccatttggactaaggtcaactgcttgggcgatatgattacaccccgcggtcatgtcaagttactactcgaggacagtcagctaaacgctcggcgtaccaagacgtcccttggttacacccattggggaggggacgtccaggaattttcaatagattttcccaagcagtcacatccatacagtatacgcaatgaatgtatcaagacagaagaaagatattgatggagatcggaggaaagccaaatatagctactgaagtacaagtctaatcaacagaagcattgaaacacaaagcgaaatgaagaccagccaagagccatctac

SEQ ID NO: 164427 - DNA, 386 bp, Zea Mays
cccacaaggccacgcacctccagcagagggaagacaagaccggtagcaccggcccgctagggaggacaaaaggcacgaactctctagcagcaagcccatcggagtggatgacgccggcgcaaatccttccgccgagcgccggcgcaccccatccaagtaggtggcacactatgtcgagcgcccacttcgactgggcatgctcgagatagtcttacaaggccatggtaaactatggcgacacaaagctgaaaccttgaaggcaaaggggcacagagagctcgaaggcgaaagggcaccgcgagtgggagagaagcaagacatggctgctactcgagggatgaacccctttttaaaggcagatttcctcgctcgcgcctcgaagcgtc

SEQ ID NO: 164428 - DNA, 351 bp, Zea Mays
ggcatcgaaaagattagggtcgaagtgatagatgcgaggactgggttggagaggatctgacgaggaggctcatgacaagattgttttaggcagctaacaactgggttggagaggatccgacgaggaggctcatgacatgattgttttagatagctaattgttaactggttttagctaggttgaggtagctaaggactaatgattatttaaagggtatagctaaaaattagttggtcaatcagttgattcattctaaatttctcagctaattttagtcgctagctatttgtttttttgggtttagaatatgactatatcatatcaaaacattgatttttttctccacttaac

SEQ ID NO: 164429 - DNA, 918 bp, Zea Mays
ggctgtcaggctggttcagtctgaatttcagatatgcagtgacttggacccaagtttgagagccagtttgaccttgatccagtgctcaaataagtgtaatccctatagtcgatttgtagctggtaagtagcactacaactttgatgcagaggcttgggtgagttgccaagtaaaatttggagaaaatcgacctcaactctagctgtcaggtgctctgttgggagttcaccatggtacagtagcaaaggggatcagatcgccagcgcaatggttcccaccgccggtgaccccccctcgccatgattcgtgtcgtcggcgtcatgattcacgctcgggtaagttgataacgtcacggggtcaaaagatcgttaccgccagtgacctggaagccactccggctagccgtagttcatctcccctggctcaccgcccgcgggtaaagtgctcaccgtcgtcgtgccatcgccgttggccaccgcgtgtcctaaccgcgccatcgcatcgccgtgacaccctctaaactcccagtcgaccatcggagttactgccacggcggtgaacacgtgttcactgcaccaccgttcttcctcacttccgaccgccgtgtgtctcgtccaaaattcgcggccaccgctcgctccacctataaattgagcccccggccagctgcgctaggtcataccgaagctatagcccccactctcgcctccgattagcccccatagcctgagaattgctcatttcccccaaattcgttctccgccacccgaaactcgacctaaccgcgaccagcctttctaggttagctcatcgctctccctctctcgtttaagctttctcgcatgcctacgatgcttgctgaaccaccaatttgaactacgggctccccaaacatcgggaacgcgatcaactgtccgc

SEQ ID NO: 164430 - DNA, 542 bp, Zea Mays
ttcttcgcctaccaatagacaaggagcgtatcagctggagtattcattaaagaagggctagaatggcaagttgtagcatgggaaaggggggcaaaaggaaattcacggccgacaagttgcactgtttttgcactgatgtctcagccaacatacgtggctaaagtttctcctcagcccgttaatacatagcctcgacatcggatgatgctcaaggatcaaataggttgactagagggaggtaaatggaagcatgtagaatttttagcgcttagacaattttattttgaattccaatgttacacactaacatcttcaaaagtttcggtgacatacatgagcctaacaaaagaaacgggtcgcaaaacagacaccaaaagaacgaaacaatccaaattttggccgctaacttagactgttttcagtaatttaaattgcagttttcgaaagcaaaaccgatccgaacgggctctgattgagctgaaattttgcacacaccttaacaattgagtttctaaggtgtccacaaaatttgaacacaaacg

SEQ ID NO: 164431 - DNA, 913 bp, Zea Mays
aaaggaagtaggtttagacccattataagtcagttctcgagctaatatcataggtttagctaacaaatgccgcaagaaatctacaaccctaactgattcgaagcacgcgccgttacggcggattatccgaaccgcggatcggctggcctcagaaccggactgtccactgccctattttaggtctcaacagtaagcataaccaaattcacaggatttttttttgctaacatcctaccttgcatctccatagtctttccgcacggagtttcgacgtgtatttgacttatccatgcccgtataatattaaagctcctgtctattttctcagattttgtgttccggtcggatgtgattgaaaaatcacacgggccgctttcacccacactgcattacacgcacatggtccatgcctctgctgctgtattgattcctcgcgtcatttgaccgcatacactctgatcgattacttatcgcccacatttaccttacgctgctgttctgaatattcaacaagcgattcccattgggcaaaccgtagagagttacgtacaggatgctctcaaaccattttacagcgacctcaagagacaccgctgttatttgacagggtcacaatgcacgttgccgtcttcgagccgcctctttatttacctcggactgtcaaaaaaaaaacctaacgatcccgtgagtgtaatgtagggttgtaggcgcaatttctccaaatacgagtacctaacacctaatcaaaaaaacctaacccctcgcgaagcacgtgatggtgatttgacttcatttttttctgacctgctactagctagacgaagacaccgatcagacagggagtgagatctcgtcctggcccctagttcgttctcccacaaatataatgcaacaaccattgacaaaatcccac

SEQ ID NO: 164432 - DNA, 519 bp, Zea Mays
attacctggaccaagggaaccagcgaaaggaagaagtccagtgaggggattcggtgtctccagcaaagtgaggttcagtctgagtggttaggaagctacactagcctctagggaagctagtcgtggcgctagactaggcagaggtaggctggggtggccgggatacggtggccgaggctttggcaagcttgcgggcggtgccgcgctcggtttcctggcgatcaccggcgtccattcccgacaagggtgtggtgggtgcgggagggcaaggctgacgggctggggcttcttatatgcgagggcgtgggcatgagcgcggggctaggcgtgcggtcgagccgaccagagctcgtggtgtgcacggacgcggtcagagcgagttcctgagtgccagccgaggtcgaacacgtggaggtttgcttctgcccatacccaagcgcctgtttagctaccctaacgtgtgtatcttggcaagtatcccatgtaagttctcttccctgctccaaatcctatcttttc

SEQ ID NO: 164433 - DNA, 700 bp, Zea Mays
gtcgatttccgacattgtggttgcgagttcctcagcttcggctccggcgatatcttcggtatcgacaggcttcgctgcttttgccgccgaagctgagtgcggcatctactcaatcgcttgcatcacatttatcatctgtcgtttcttctgccccccgaccttctcctccgcagtcggagcggtttcctttgattgtaaaaggctagtcagatctaactgtagaggacttagcagtgcaaatggtatggattcagtcattaccttcagaatttccgacatttcagcagcagggggtgaaggaggactcatagtcttctatggcacatcatgtaccttcgtatcagcagaagatatcctatcgagttttcgtttctcgagagtcgaatccttcggctccggaagagtcttctgtttcttcgaagctttctggtcctccttgacagattaggtagcttgcctacctagaatacttacaacactttttcttttaccccctctggccccttcgtcaagcctttcatagtcaggatactcaaagttgagagcatccataacacggttcaacctccgttttggctgggagccgaaggcagcagtcatcaactggtcttccttcttagtatagttccgtagaatctcgttgcacattgtctctatcaattctagccactccgtgcatggctctttaaatgttttctga

SEQ ID NO: 164434 - DNA, 749 bp, Zea Mays
caagaatgtcagcaacaatgtcctcaggcaccacaacactaggtcttttcatcaggattcgcccaacatgaacagctttgtccatcgctttgtcacacattgctttcatgataccatggtcatcctctaaggccttaatgtcgcgacgagcaatgtccaactcttgcgaaacaattttcttcgaagcgcgcaactccttgatgacagaatcttttgaaggcactaacttattaagccgcgacacttcagtctgggaggccctcaactcatctctatgatggtcaagctctgacatggtgaagcgatggctcctctccaaagtagtaagggaactactggtgtcacggtacagtttatccggactgtcacgggaatcaagaagtctttgcatctcctcctataggcaagaggggtactgagcatcgaaataatggcgcgaaacaaaggcatcaggaatagttagaaaaatctagctcgtgggctctcttctccgaatcaagctgagtgttcaaggaagagttcagggtttgggcaccgtccaagaatgcagaaacctggttcaagtcggcttgactctgagcatacctctctttagcatcggagcaccgccaagtcaaggctggaaaggcaaaaggtaaaagagcacagagggtaaaacgaaggaaacaacgagtagtgaagatagctatcaacccactaaccggtgtttgaagcttttagatcatctatttgcttctggagcaggaaag

SEQ ID NO: 164435 - DNA, 1011 bp, Zea Mays
aaagaaaaaaaagacctcgttgcgccatgggccatatcctccccgtgccggcccatttgcttctcatctgcgcagccctgttcctgcaaatagtgccgacacgtgggccccaccattcagcctcacgcatccgccatgcgcgcgccagtcctggtttctctgacgcacgggccttggtcgcaggtccttcactcatactcgcgcggactaccaatctgtgcgcctggcgccactgacgtgtgggaccggtttggctgggtcgtctttccccttttctgcacgctccatgaacggaatccgcgcgttcttcgccgccgggatctccgaccggccattgtggcgctgctccctggcgcataagtagcaggcccctggccataaagcatccagtcgaggcttcccctctccccgttcttttgtgcccatgtcgtgccctccccgctccatcgccgcgcaacaacatctgtgaaccacgggatttccgccggggcgagctgcgcctgcgcggatctcggcgatcgttgccattgtcgctaaccccgctggtgccgtggcctaggtataaatacctggcgcgttgacgtactccctcggtcccttcatccaatccgcaaacaggtgaaagaaattggtcgggggaagactggcgcagccgtggagggattctgtaatccatcgcggtcgcaccctcgaagaccctccaggtgattctctggtatctgctgggtgcgtggcggccttggcattcgagaatggcggcctgcaccgccgggattgccctatcaccatcggaactggtcgtcatccgccgtgcgccgtgaatagctgaatctgctccgcggtcgctggcaagaccctccccaaaggtttgctttctccttcttcatgcgtagctctagtcgaagccaggtttcatggacttgcgcgttggtgtggtggtgctctggcgcgtcgcggccatgatgggtcgggcgccgtcatgcctggtggcctggtggaagaaaacacctc

SEQ ID NO: 164436 - DNA, 609 bp, Zea Mays
gggtctcaactgatacaacacatccgacatcagagctcattgactcttttatatgtgctgagattccagatccgaatactgatccacttgcatactgcttggttgccgaacatatgatgcacggtccatgtggcacactcaatccaaattgtccctgcatgaaaaatggcagatgctcaaaaaactatccaaaagaatttcatgaaaccacctcatttgatagtcaaggatttgttatctacagacgtagaaacaataacagatatgttataaaatcaggaaacaagctcgataacagatgggttgtaccatacaatccaacacttctgaaaatttatcaggcacatataaacattgagtggtgcaacaaaaccatttttgttaaatacctcttcaagtacgtgacaaaaggtccagactgtagtaaagcttacctacaaaaaataagaaatggtgaagaagctccatatgacgaagatgcagaagcaaggaatgaagtcaaagaatatttggacagtcgatatttatgcgacaaagactcatgttggcgtgttttaggttatgaaatccatagacactatccttctgttgaaagaatgccagttcacc

SEQ ID NO: 164437 - DNA, 493 bp, Zea Mays
cttggccaatggatcttggatgtgctactgatgcatacttaatatggatgctccgctgcttgtagaagttgaagaattaagagctggtgaagttggatcccaggtcggttataatgctatttggtatcccaaacctgaatattatgtcttgtatgaattccactgctttggttgaggtcaaagaggcaatgggcttgtactctatccattttgtgaattttgtcaatggcaactagcacgtgagtatagcctccctgagctttcttgaaaggttcgatcatgtccagcccccagcatgcaaatggccatgttacaggaatggtctgcaactgctgtgcaggtaaatgttgttgctttgataagaattggcaagcttcacatctctggactaactcggtagcatcactcttcgctgttggccaatagaaaccagatctgaaagccttcccgaccagagttctggatgctgcatgtactccgcactgcccggcat

SEQ ID NO: 164438 - DNA, 1285 bp, Zea Mays
gcggaggtaagtgcagtgtgatggttttgaagcttcttcctatttcgcggggcttagagatcgccctaagacgagcaatcgaaaacatgcttatgcttaatcgagtagtcgcgagcgtgccgtgccgatttaagtcactaccgacttaaaccgaccgctccgttggtagggtctagtggtcaccctgagttaagtaaacgtgagcatgtcacaccgccttaagccttcgctgactaaagtcgattgctccgttagtagggcatagtggtcaccctgggttaagtaagcgtgagcatgtcacaccgccctaagtcattgctgacttaagccaattgctccgttaatagggcatagtggtcaccctgggttaagtaagcgtgagcatgtcacattgtcacaccgccttaagtcattgccgacttaagtcgattgctccgttaatatggcatagtggtcaccctgggttaagtaagcgtgcagaaaacaattcaagtgcctttgagaatgaagtcattttattgatggtgtatctcccaattacagaatacaatgccgtcccaatagcttttgaaatctagctaggggtaaaacttcctgagatgctctatattccatgagttccctatttccgtgccatccatttgagtaagacgatatgatccaggccgagtgacttctgttactatgaatggtccttcccatagtggcgacaatttatgccgtccttcccccgttagaattcggcggaggacaagatctcccactgcaaaggatcgatgtggtatggccttatcatgatagcgcctcagagtctgttggtatctggctgactgaatcattgtattcaactgttcttcttctagtacatcaacatcctccagcgtagtggctttagcctcagctatgttttcgaagatcaatcttggtgccccaaacttgagatcagcaggtagcactgcctccaaaccataaaccatgaagaagggagtgtttccatgcagagctcggctgggttgagttcttaggctccagaccacatacgacaactctctgatccactttcctgcgaacttttcattcttgtcgaagactttctttctgagtgcttccagtatcattccgttggctctttctacctgcccgttggctcttgggtgtgctactgatgcatatttgatctggatgcttttttgtgcgcaaaaatcaaagaactccgaactagtgaaattggatcccaggtcggttatgatgctgttcggtattccgaacctgaatattatgtcct

SEQ ID NO: 164439 - DNA, 1099 bp, Zea Mays
cttgtactcgttaaaaaaaatctacccgtcaggttacctatatccgctcacaggtatagaatcttactcatacccatacccatgcatgtaattttacctaacaagtaatccaagattgttagtaaagtctcaaattctaatattgccaatcattcaaaatgtcaaacaaacacacaaaaagttctaacttcaaatacaacaaactatatgattacataacttgatggttaaacacacaattgttagagaaggattttcttttagccaatatgggctttattagatcgtaatagtgttgtgatgcgagtatagtttgcgccataggtacatgggtatgggtagtacccatccatacccatactcgtcttcccgaccgatgggtagagttttttgcccattaacatacccatggataaagaaatcttgcggtactcattcttcattgctaactttggcaacaaatatgaacttggcaatatcttgttgtcattgtttagtggttgcttctatagtgtcaagcattagaggtttgcaaagaaaagactctacagtggcgagaagcctgacaatgttagtggcactggagttgaggtaccggtgagcccactaagattatcattatgatgcggatcattgaaggttgcctctccatggtcctaatgtgaagctgagggagtagtgtgcactcaagggtcacacttctaaaagtcctagggacacaagcgttgtggtgcctctaggatgtggcatactcccgaatgagcatgagttgaagtgtggtctacagaaacaacacctcgtgaccccatcgaaccatgtcttcctgtaggagatagtagatgataagaccgagccggattacaatgtcatttgtgttgcgactcatgatcggagttgtgggagtaggtgttgaaggctactttgttgttgagcagatgtgttggtgacaccatagttgcataacattggaaagtgcaccaaatcctagaaaagaacccactgcataacttgaaaaatatcattgtagtacgacactaggatatcataagtatcaaaaaagagaaaaaagtttatggatggagtgaggggcataggctag

SEQ ID NO: 164440 - DNA, 944 bp, Zea Mays
caatttctctatgacttaggctactattcactggattgcgggttgattccattaaaatccgaggactcttaagtaaaacgcccatgccaaaggggtattctttgcactgggccgttcgatcaggaacctagggctatgattagatctcagatgctgtgaaccggaacgcacgagatccacaggatcccagataaagggctaagatttaatgcgtgtgtgatctattctccgccctgcatctgcgatctaatggccatcctttgctcaccctgaaatgatgacattgaccagatctacaacgttgcacaccgatccaatagtcatggttccatctacgaagcagtatgccctggttccaatctggacgctggtttatggatctacggctaccactcatcttctagctcctgacaccgagtcccgatgaccaaccagagcaccgtggcggcgccaaggaccggccacctctaccaactaccatgccaccccaatgccccaaactcaacaaaatcgggtgctaacctacacggaatcgatgatggctaatacgcgggaggaggacataccggcgagcggcgatggcgcagcagagacccccggccacgcaacacggtggatacacggaggagttcacaccctggttgaccaaattctgggctcccgatcgccaaaccttcacagcgagaacccaggtactgtccttggggcgcggcgaggcttctaagctcgatccccacgacgaattaacggattgacctcagcggtgagtcgagttccagtcgaacgatgacgcaacgagcatgctcagtgttagcgacctggaggatgggagtatttcaaccatgggcgccagaaatacaaaacagagaagaagcagtgaagaagacgttactgggccaagtcagaagggcattcagaggagccaaaggacactacgacccaac

SEQ ID NO: 164441 - DNA, 722 bp, Zea Mays
cacgaaggtacaacatccagagttattatgatattgttctttcccaatggccttcgtctggtaggacaactcgtgaatattgcaacagcaatcaacatctggttccaatccctagctccttattcccaaatgaaaatcccaaccttgaccttgatcaatgcatcaggagtaagatgatgaagaaaaaattcaaactttttcaagggttcgaccaacatcttatgtaaggagaatcgtagcccagctttcatgaagcttcgaaaaaccactacctcatctttctcaggaagaggaacgatattctcaccactgattctcactatagatacatcatggaaatatctacccttcatagcctcaacatgacctttcttcatagttgatttaccgaagaccacgtgactcggcctcatcattatcactctcaatatcaaaatcctcgttgtcaccagaatcttcagacaacctagctaaaatctcatcagttatttttcaacattagtcctcttcatagcttcataaaacctagccagtacggggtcttcactcctcttgtctttggccatctcagctttggttgaagccaaaagccgaagctcaaaaacagtcgtggttacaatatcaacaagctaaacaacaaagccaacacaagcttgatagcacgaaaaatatttttatcacaaccctcatacatatatgcaaagcactactgcagactggcc

SEQ ID NO: 164442 - DNA, 426 bp, Zea Mays
atcagcagctaggggtcgcacctcagtctcgtcacgctccctgaagcgaggtggtggaatgggagcgggagggggaacagtggaagctggagtggtggaggtggtgggtatagcggaagtggtggatggctctggagcgataggagctggtgaagtgggaggtggagaagacattgtggcggaaggtgtggagggagcagtggagcgaggccgagatgcgaggcgacgaactctgtaggctatctgatcagaagagatctgcaactgtcctccccgctctgcctgctctgatgccgctgccgctgcaaatgctgcacgagctgctctgtccatacatcgcttcttcctgccctcctgctgctcaagataaattgtctttcccttgactcgcctgaaggggcgaggagggtcctcgtcgtctcctcc

SEQ ID NO: 164443 - DNA, 563 bp, Zea Mays
cgcttgtagaaagctgggaaatgccaaatgagaccaccaccgactctagcaatgatggtctggttcgactggaatataccttcagattcagggagaagtttgatgaacccaacgacgactggctgaagtgtatcgaagctacaagtgatgaattgtttggagcttattccaaggccaaagataatgctctatccgtagccttcggaagacgggggaagaaaagactgaatatggtttttgatgccattggcttcatataccctgactaccactatccgctgcggggacaggggaaaaagaggaaagctgctacttcggccaccccagttgagcctatgccgaagggcaaaaaggtgaaggttcttacccaccggccgcgttacattgaaccggccgtggtgcctgagtttggcgcagtgacctcttctgctaccgaattaaaagaaactatcccgactgcgcagagcaatgaagagccggctgtaatgccgaaggtgcttacagttaagctggttgaaacgaaggttgataaggctgaagagccaaaaattgaagagataatg

SEQ ID NO: 164444 - DNA, 588 bp, Zea Mays
cctcccaggggcaagatctacttgttcattcaagacacactacctcgactgtatcttaattcctatgtgactccacatcatctggggatgccccgtgtgacctgtcgacccggagcaccctaagatctctctcctagggcgagatatagattccaacgaggaggaagatgaccctgcactatcgcggaccgtccgacctagagcgtggaccgtctagtgcgatgcaaggaaggctctgctcctgcgcccaggtcatggatcatccgctccatcgcatagggcaccgccagccgccaggaggtacatcctctagtgattggcgctgcccagattggtgccaacacactttttgatgactccactggtgacttcgtgcgacgccccactgtagtagtagtagcccggcctaagttacctatgtgtgagcatgtcgcactggcttaaggtgttttctacttaagctgattgctccgttagcagggtacaatagtcaccccaagttatgtaaatttgagcatgtcgcaccgacttaagaagtttctgaattaagtcgattgcgccgttagcagggtatagtaatcaccctaa

SEQ ID NO: 164445 - DNA, 309 bp, Zea Mays
caagatgcaactatagatgtcatcctagggatgaactggctaaccaaatatcaaactagtcttagctgtgacaagataacggtgaagttagtgtccctatcaggagaagaagtgttagtggagttggtcttgtctggaccaaggaaaggaagttgtcactgagtcaccgcccatattgaggagattaaaccatcagaagctatcaatgtagtatcagaattcccagatgtgtttcccgaggagttaccaggtatgccacctgaaaggaaagttgaatttgccatagagcttataccaggcactacccca

SEQ ID NO: 164446 - DNA, 432 bp, Zea Mays
cgaccttctcaaggaatttggggacactttagatagggagtttggaagtaccttagaaagcgctcgcgtgtagtgcgacttgtggtaactgtatgcttgtaatgaacttgtgtgatgaataaaataacttggttgaaaaatttgcatatgcatagtagtaattctctccccctcgcagatggcttcggataaaaccacgcctaccgcctccaggactggagcagggtttcccctaggagctgaaggagaagctggtggagaagggagtgagacccacctccccgcacctccggagctgccattagatttagcccaagttctagccaaccaaacccgactcattgaagtcctcactagaagtctggagaatcagcgcccgaatggtggaagaccacaggacaggatgggagactttctgaggctcaagcctcc

SEQ ID NO: 164447 - DNA, 516 bp, Zea Mays
cttatcaaagggctatggatttgattttccatgagttgttaggaaacactgtggaagtttacattgatgatattgtagtcaaatcggctgagtttagttctcatatagttgatttgcgcaaagcctttgataaaatgcgtcggtacggtttgaaaatgaacccacgtaaatgtgcttttggggtatcggctggtaagtttttaggatttatcatccatgaacatggcatagagatagaccctgaccgaattaagtctattcggaatgtgggacctcagacctgtaaggtcgaagtgtagaagtttctcagcaaggtgaattatttacggaggtttatttcaaacctagccaggaagattgatgccttcacccctatccttcggcttaagaatgatgccgaattcgcttggggggcagagcagcaggaagcatttgatctcattaaaaaatacttgtcttcggctcccgtattaaaagcaccacgagcaggagtaccattccgattatacattgcag

SEQ ID NO: 164448 - DNA, 362 bp, Zea Mays
gttgaaccggactttgctggtagcagagaaaccggccggatctcaatgaaccccgcaatttctccggctatggtgctcacgcgaggaagaagatcccggtcgaggcggctgggagatccatgcttagcgcgcgagtctgttacagccgtggagtagaagattctgttgaatccagacccataagcagcgacccaagaggcttaaagcaggttcgtgaggacttctggtggcttgcatgctgacctcattatgatgatagggtgacgcaggctccggcaaggagaataaagaattgataaaaattacatgtgatcgtggactgctacgtggagtgggctgcgcggtaaatggagggctgggcc

SEQ ID NO: 164449 - DNA, 705 bp, Zea Mays
cgcgttacgagccgagttccctagtctctttagtaattagctgaatctcgaggacgtgatttgacctaagtggggtaggtttgtaacaccctgattttcgtcgctaagtaaaatcttgttttatttcgcaatcatcttaatacattaattttacacgcatgatgttagtaaacacgtgactaggcaaactatttacaagtatttcacctcctttctcactagctataaattaatccatctcaagtactaacgtcaacactctactccaatgcaacttttgcacaaggatcccaccttcgtaacattacacttgctagcaaactatctcctcttcccaggagcaacacacgccttgacacagtgattccagaagataagctagctatctgttccttgcctcggaagcctcttaagccagtcgtacctcacaacaactcacagtcaactggtagtagtacctactcaccattactgacaccctgacgacgaggagacacatccatggcaagaagctttcgtgtgggaactggaagctgtcttctacctcccctgactagaaccaatgcacgcacacaccatgatgctggactaggagttgagaccacattgtcaagccaaggagacctgaaacgacacaacaagcagagaaagcagtagcccgacaagcccctgcgcgcgcagtcgaatcgaagaccagccactcac

SEQ ID NO: 164450 - DNA, 369 bp, Zea Mays
tgagttgtctagactataagaactgtcatagatgttagtgaatatactagacaattataaatatggaaccgtcttcacatgatagtctgacaagacgtatatgaaaaatgtagcaaatagtgaaatcaccttgagttgatgatatatacaaatcgctatcattttgtttccatcccgcgacgccttctcaccatacacacccaatgcctccctcgggaacgaccaccgccgcccaataatcatggactccgaaccccaagaatcgccccgccggaggccgtctcacgttgtggtggctcattacagccgacgccggcctgctacgttcattcgtggcgccatcagcagcaaccaccaactcaaataatc

SEQ ID NO: 164451 - DNA, 553 bp, Zea Mays
gcaaaattgttagcccatagtgttgtgttggtcatcaatcaccaaaacacttatagaaatggctcaaggcacattttcctttcaacccgttaatgactcttcttctcttctcgctcccttccacctcctccggttggacacttgtggtggtgctcgtcggggccacgataccggttgggctaacgtggcataggccatggtggctcatcggtcgagcactctctccctttccctatttaatctccatcggctccccactagccctagcctctttctagctaccattgccaccgtcaaagcttccttcgtcgaccgcatagtgtgtctccactacctctctcttcgattggctactcattgtgcttccccttgatcacccctatctttccactgtgctcccaacccttttcctctaatagaccgcaccaccgcaggtgtccctatccaccgctaagcttcccctcgatgacaactaccttccagcctctaacagttttatccattgttgtggtaagcttccctgggtaacgctcgtgccctcctttcctagtcc

SEQ ID NO: 164452 - DNA, 773 bp, Zea Mays
ggaggatgcatgtacttcgtgttgtgtagctgctgccggtaggtgtggctgagggaccataaagttcgcctagcagcatcgctgaccaaagcagcgtaggtggatagcggcgtcagagactcatgagctgacatagtcctgaaccctctatcacctgcatccatcaccctgacatgaatgcgagtgatgtagtagcaagcccgaggaggctcgtacacttgccttgtctcatataggggccagacgtaggttcccaacgcatgcaaaacatcttgtagcaggttagggaagtgccctgtctcgaacattgaagtataatgttcagtgacaggccataaccccacgtagtggtcctcctgttcttcgttggcttcctcgttgatgttttcttcatcttcttcttcttcctcttcatcatcttcatcatcgtcaccagagtcgtccgggtcatcgcctccaggagcaggggcttggactgctggtgctggcggtgctgaagctaacgatctagctacgaaggctagtgattctgccaatggggtgggcgtaggcagaaactcctccaagctatccaccagaatgactccgttctccacccgaatgcgagggagatccacagggatttcctctactaccactgggtagacaggaacttgtcgtggcggaggaatgtagttggtgttgatccgagtggtttgaatggtacgaaccatctacaagagaaattgtcaacttagttgaattttaaagaggtaaggttaataaaataattt

SEQ ID NO: 164453 - DNA, 596 bp, Zea Mays
caaaacacatgaatgaacatgtggaacccgacatccgcagatcaccataggcacaaacaacctaaaccacaacacacccgaacacgaccaccacgtaaacctacaactaaggcggatgcaaaaatgcacccttgaaacaagtaatagtctctctagacatggctaccacctgagccgtagaaggcgaacatcactcaaaaattctatgatttctctccttccgaatgttccacgtgatgaagatagacacgccattctagtcaatcctttagttctttggaaaagagaccgccgcacatttccactaatctacgatgttggggggtaaagagtggagtccacatggggggaagggtcatgttttcatgtgccaacacctggtcccaaacctcccgggcaaaaggccaacgtagacaaaggtgcagtcctgtttcaagagggccagaacacagggtggtcgcgtgatggtgaggccaaccacgagcgctgagattgtctacaattagaattttattttgaagcagaatccaagtgaaggtcttgcatttaggttctgtgcgggctttccaaatgaggtcagccttaaggtgtctgaa

SEQ ID NO: 164454 - DNA, 504 bp, Zea Mays
ggtgggttcattacgcaatagcttaggatctcttatgaaattataccgcggcaaaggggtatcgacacacgctggtcgctggatcgacaatcagcggtgcatattagattgagtcttcattaaaggggtatgtactggtagccatcggatcaagatcaacggtcgatacaaaacaggtgcgcggatcaaatctcgaccgcacgtgattcgatcgacgacccagacccattcaccctcctctgggccagccagtgacgctggtcacccactcaccctgcggcggcgcattgccgtgacccacgaaatcccacatccaaacaacaaaacaccaaaccgacagctgccacgcaaagggaatggcagggaatacctcgtcgagggtttctcaccgcgagtcgtgcaccccgaagctccgtccatgaggtagtgcggcattgcagcggggacgaattccggcgagtaattcacaccaacaccgctacagtctgagcctgccatcgcgat

SEQ ID NO: 164455 - DNA, 745 bp, Zea Mays
cgcggactcctcccagaccacccgcatcgcgggcaatctgggagagaaataggaactcgcgctcatcgccttcctccgggtagatgtcgatgttttcgcttgggaaccgtcacagatgcctgagatccctagggaggtgattgagcatcatctgaagatccaccccgacgccaggccagtgagccagaagcctcagagatagtccgttgagcggcaggacttcatccgtcaggaggtccggaagctgcttgacgccggctttatcgaagaggtccatcacctagtgtggctggccaacccggtcatcgtgccaaaggcgaatgggaagcttcgaatgtgcatcgactacaccagcctgaacaaggcttgtcccaaggacccgtatccacttccacacatagatcaaatcgtggactctacctccgggtgcgacctcttgtccttcttagatgcctacttgggtttccatttgatccggatggctagggaggataggaagcataccgcttttgtaatagtggatgggctctactgctatgttgtaatgccctacggtctgaagaatgccttaccaacatttgtatgggcgatgagtaagaccttctgggacctgattagggacaaggtagagatatatgttgatgacatcatggtcaagactaggagggggtcgactctggtagaagacttgaccctggtctttgacaagctgcgggcgacgcgcacgaagctgaactcggacaag

SEQ ID NO: 164456 - DNA, 437 bp, Zea Mays
ggcaaatctaagggagttggaggtgacaggtccaaccaggggcctaaaaagcgacaaaggttggtgatccaacctttcaatcaaaaccattcttcacctcatccaccctcccaccccttcaaatagccagtattcatccgccctgccactgcccccacctcaacaactcagccgagtgcccctggtgctcgtttccccacactcccgagctcatcaactggctgcttcaattgtgggaagtctgggcatttcatcaaagactgcccatatccgaggcggaacaactccaataatcagcagaacccggggagttcaagccaaggcaagggaaacacgacaaataatgcagcgggcaagaatataaataagactgggcgaatctattatacacaagtggccactacaccggagggagagccagtcatgatgggtacgtt

SEQ ID NO: 164457 - DNA, 317 bp, Zea Mays
caccaaggtgcctacaatagagattacaagcacgacgggagaggggaagttcccaagtccctagaatggattgaggcaagtgccaatatcgaaaactgggtggagaactgagtgttcgtctgtgtgtcctgcttctccgtccccctagaggaactctactgccctatttatacacgaaggggatgttcacagtgaagcctagtgtcattgtattcaaaggagatatgtcttggcaccctgtaagccgacgtgacggcgcactacattgttgacttgtgcccactggtttcctgctgggaaccgatgcagaggtcgag

SEQ ID NO: 164458 - DNA, 810 bp, Zea Mays
gaaccagtatgttatgctgaccgttagatcggagatctacagtggattcccaatgaagtgcgacctaatccaagccgccagatcctgatcggacgatccacggcttcccctctccaaccggtaagcacgatttaatctaagtcgtcgagaggaggatcaacggttaggggaccgtattctccatccagcgtcggaacgcgcagtcgcgcctctcgatgggcagtggggccagcaagcgcccgctcgacgctcctggccctgagacccaccccgaagagtactactcacagcgcacaacataatgaacagaatgagacgactgttacccataattgtatggcgacgatgctcgtccacgacacctagtgatccgcggcgaggttgcacgaccggcgagcatttcccagcactacagcgggcctcctgttaataaaccctcacacaactttgctagggtccagaccaccaccgtgtagcttaaatgaagcatgattctcgccgccgacgagaatctgctacggcggccgatctaccccccgctcccttcctttcggatttatcccactcggacctaggtggcaaatgatggctcccgatggatcggatcggtgggcaccccacgccctgggttttatgggggagggtgaacccaggttggtcgggacggccgcggctggcgcgagagggtagctctggtgggttcagtcgggttgttggggcgcctggtcactgggccccactcaccagcggtggaaccaagaacacggcgccgagcgaggctgatgggattgccccctgcgcagagatgac

SEQ ID NO: 164459 - DNA, 546 bp, Zea Mays
tcaagaccatcctcgccagccaagatttcctcaatttctcgcacctctcaaacaaggccatccaggtggaaagggatcaagaagaagaaaagggtcacctcaagaagaattttcaagttcttcgagctcagcagaagtacaggcaccagagagttcgatctttagggtttcctcccaaaggaccgagcttcagcaagccaatagggtccgctccgtcatgtttcagccagcctagtcaaagttctctccacacctcatatgttgcaagcagccaacctccagccaatgcttgttggcactatggagaccccagtcactacaagagtacttgtcctcagttgaagacatccgtacctacctactccaactcggtgaatggccccaagaatgttttagcacccgcctccaaggcaccctcctccaacagccaactaagcaagacccagtttcacgacagggctcgagtgaatcacgtcgacgctcaagaagctcagcaagcccctggagtagtgcttggtgagttcctagtcgaatttacccccgctg

SEQ ID NO: 164460 - DNA, 754 bp, Zea Mays
cacgattgttaagacttaaaagttatagcgctaatacagccatttttttgtaaaaatatgtgattgtaccgtgtaactgtgcgattgcgtgatggttcacatctacacatcatgaaaatggtaatggacacatgtcaaaaaaaaggaaaaaaaatggtataatttcatgattgttatgaagtgaagcagtcaatacttcaaaatggcaatgcttgtttgttttcccgagattactctttgaatcactcctgtaatgaccatgcagccacaacagagttaatttacttctagtggtgaagaagtaaaatgtggcttagaagcacatgagcttcactaacttgtaacaaaacagtagcagagtagaacaagtatcaccttccagaacttagccaaacttgagttgccccaccaccattgtaacggtaacggtaaatgtattctgcttcttgtttttttagttcttgttctgttagtccaccaattgtaccatacattaaactatcgagattaacttctttgtttcgaggatccattctaacctgccaaggaaaatatgtaccatgttagttacaaatctcaaaagaacaagaaaggaagacgaagatgaagagcactagttttgtccttagtaaagtcaggattgtggagctcgaatcaaaatcttttaagattcagctctagatatttcccagatgttagaaaaagtaaggcagctgaaaggactatctaaatgtcctttgagaacaaattagtt

SEQ ID NO: 164461 - DNA, 452 bp, Zea Mays
aatatcgccctcgagattcaggctaggtttgagaaaaggtaagggtattccctcctcaaagagtccccactctcccaggtagcctcctcttctccttctctgctccactgaactttacatagccttacttctgagtttcaggtttttcggatggctgaatcgagaatcttcactggcttttctcggtactgcagatccttgtgctgatgataggataggggccaacgaatcgcggagctagcttccctttaacttggaatcttttgaccccacgcatcgaggagaccttgaggtagacaaaatctccttcctcgaaactgagttctcttcttctgttgtctgcgtaactcttctgccgactctgagcttcgagtagtcttttgcggatcagggcaactttcacttcggcctccttaatgaaagcaggcccctccagtgtcttttcccctacg

SEQ ID NO: 164462 - DNA, 894 bp, Zea Mays
cgggtgaataagtattggtgccctatgacccgtggggttattggagagaaaaagggaggtctatccgcctgacagtgagagacacctcggtgggcagaagaaggtgcgccgctgccgcaccattgcttctctcgacatcgctccgcccccgatactggatctaggagtgcggcagggattccgagtgcgtgtgcgtcgagaatcatgatggttgggcgctctgggactcggtgattgctcgttggagttcgtttcccctcgtcaagctgttggccaccacggacgactcggaccggcaccctaagtcatggtaatgatagcctctcttgatttcccatacttccctcactgttttgcattccgccgcgtccgcgtaggagctccgaatcgggcaaattgcatgcgcgagggtcgcgctcgccgttgaccaccatggacgccaccgtcatttgctctgttggggaagggaggatttgggtcgtcgattggctagtgaacgattaggatcagtgcggggagtgggaatgcttcgggccgttgatggacgatctagtggccatcatcacgtaccaattcgttttaagtgtagacagatcctggcgcttgtttcctgatcggatggattagatttaaaatgaacttcgacagattatgatcgtagatctccaatccaagggttgtgatcgcataccggtttggggtgtggatagtctaatctgcgtcgtctgtttctaatccgacgacagggaaacatccataccccttcgcggctaaccttttgcgtatgaacccctcaggtttccgtaaatgatctcgcggtcctgcgtgagatacgctgagtctttgaaacttttgcggagtgaaccctgtattttctgtaaatgatgcgctcgg

SEQ ID NO: 164463 - DNA, 866 bp, Zea Mays
gaggcctcattgtctcaattgccttgatcttctctgggtttgcttcgatgccccggtgtgaaaccaggaatcccagcaatttccctgcggagacaccaaagacgcacttgtccgtgttcagctttgtgcgggttgcgcgcagtttgtcaaagaccagggttaagtcttccactagggtcaaccctctcttagtcttgaccacgatgtcatcgacgtatacctctaccctgtccctaatcaggtcaccaaaagtcttactcatcgcccgtacaaatgttggtaaggcgtttttcagaccgtatggcattacaacataacagtatagcccatccatggttacaaaaagcggtatgcttcctatcttgtctagacatctgaatctgatgaaaaccagagtaagcatctaggaaggataaaaggtcgcacccgaagatagaatccacgatttgatctattcgtggaagtggatatgagtccttgggacagaccttattgaggttggtgtagtcgatgcacatccgaagcttcccgtttgccttgggaacgatgactagattggccagccatactgggtgatggacttcttcgatgaagccagcgtccagcagcttccggacctccttacggattaaatcctgccgctcgatggactgtctctgaggcttctgactcaccggtttggcgtcagggtggatcttcagatggtgctcgatcacctccctaaggatcccaggcatctacgacggttcccatgcgaatacgtcggcatttgcctggaggaaggcgatgagcgcgagttcctatttctcctccagatcacccgcaatgtgagtggtctgggaggaatccacgctgagctggatggt

SEQ ID NO: 164464 - DNA, 777 bp, Zea Mays
cagcatactcgtcggctagccgaaaccaatgtaaaccacaccacccgccgtagcaacgccgcacaattgtctccctccattgcgcacaacaaggccacccgccgtagcaacgccgcacaattgtctccctccattgcgcacaacaaggggaggaatgcttgaagggatgaaggaccgcccaactgagaggcgactagtgagggaggacgcccattgaagcttgccgaagaacaaccatctcccttaaggttatagcaccccatagacagcacatccacgcaccataaactaccatccaacgcccttaaaggggaggaagcctctacggagggagagtgagatcatgggtccacctggcataagattgatgtcaccaccaacaggagacgaatgatgaagcagaggtgtcaatggtcatgcaaccaagagccacgaccattaccatcttcaagaccaaagccaacaaagaagaacacacgaaagcaaccattaaacgagcagagacaatagtgcgaaggtaggacacctcccctcgcactgggcgtggcactttcgctgcgaaaatatcacctttgaattgatttcagatgacctcgagaaccgccattaagagcagccacagatgaaaaacataggcattctggcttcgcctccaacaaggtgaatgacacaaaagcaccatcaagctagggttggcagaaagccaagcaaggctttcacctcaaccaacgtggtcgttactacacggccacctgaaccattggacacaagggttga

SEQ ID NO: 164465 - DNA, 771 bp, Zea Mays
actttgtggtcgtgttcctggacgatattctgatttattcaaagaccgaggaagagcatgagcggcatctctgtcttgttctaggtgctcttaggaagaatcagttttatggcaaattgaagaagtgtgccttttggctgttcgaagtggctttcctgggtcatgtgattaatcagcagggcattacggttgatcccaagaatgttgcggctgtggtggagtggaagagaccttctagtgtctctgaaattcgaagtttcttggggcttgccagatattattgacgcttcgtaacaaatttttccagcattgctaagcctttgactagactcttggagaagggtgttctcttcgtttggtccagcgattgcgaggtcagttatcagacattgaagaacaagctggtggacgcccctatcctagctttgcctgagagtggtaagcgtttcacagtttatatggatgcctctcgaattggccttggctatgtattgatgcaggaaggcagagtgattgcttatggctcaaggcagttgaggaagcatgaggggaattatccaactcatgatctcgaattggccgcggtggtctttgctctaaagtcgtggaggcattatatttatggcgagtcttgtgacatttacaccgatcataaaagtctcaagtatattttcactcagaaggagctgaatttaaggcagcgtcggtggctcgaattgattaaagattatgatttgtccattcattatcacccggggaaggcaaatgtgg

SEQ ID NO: 164466 - DNA, 772 bp, Zea Mays
cccttggaaacgacattcaagcgtgccaaactgcttataacacagtatgcacctacataggcaccagggacttagtccaagagcatattgcttatagagtgtggccgctctcaagtgggtgggagatgccgaaggaaactgctgttgggtccagtgaaggtggtttggtctatctgaagtacacattcaagtacaggagccaattcgatgagtcgaatgatgactagctagatgccatcgaagcaaccagcgatgagttgcttggtgcctactcaagggccaaagatgatgccatgacggttgccttcggagggcgagggaagaaaaggttaaacagggtttttgatgttattggttttgtttacccaaactattgctatccctcgtgaaaacagggaaagaagaggaaggctgctgcttcggctatctcttctacgccgaaggtgaaaaaggttaaagttttgacacatcgtcctaggtacattgaaacggccaaagtcctgaagtttgctgaagggccctcttctgccattgagccaagtcaccccgctactgccgaaactagggtggaattggccgaagaaccaaccccgaagacagtagcggagcggccagtgactgccatgagtttattgcaagaagcggaactgccgaaggttcaaaagattgcttcaataactctaaagagaaggagaatggccagtgtactcgatgttgttatggaatctacaaaggtgctgactcttgcttctgcagaagcacctagcgtggg

SEQ ID NO: 164467 - DNA, 734 bp, Zea Mays
ggctataaaagaatgggatgctcccgaatcaaaaagcacagtagctggagtaaattcaacaaggaactcaccgagcactactcctggggcttgctgggcttcttgagcgtcgacatggttgactcgggctctgcactggtactgagtcctgctctgctggctgttggaaggaggtgctttggaggtaggtgccgagggaatattggggccattcactgagttggagtaggtcggtccgggtgcctataactgagggcagttattcttaaagtgactggggtccccgcagtgccaacagacatttgctggcggttggttgcttgcaatagaggatgcctgaagggagctctgactttgctgactgtagcgcgacggagtgggtctagatggtttattgaagcttggacccctgggtgggagtccaaagggtcgagctctctggtgacgttcttgctgttgagctcggaggacttggaatttcctcttgaggtgccctttttcttcctcttttgccctttccacttggatagccttgttggagaggtgagagaagctgaggaagtcttggctggcgaggatggtcttaagctcgggtcttagtcctttcagaaaatgggccatctttctggactcggtgctgacatcctcaggcgcgtaacgggccaactctgtgaacttgtgcacatactcactgactgttctcccgccttgagttaactcccggaattcatcct

SEQ ID NO: 164468 - DNA, 732 bp, Zea Mays
gtttatccggttgaggcaaggaggagaaacggtgatgcagtatctcaacaaattcaaccacctctcttagtatgccattgaccaggtggatactgacttgaagaaaaagaattgttttatgagggggctcaatgacaggcttcagcggaaaatggcaacatgcttggacctcacctacagtaaggctatcagtacagcactggaagtggaagccaaaaatgcgggacatggaaaatcaaagggatttggaggtgaaaggtcaaatcaaggacctgagaagagaaccaggttggtgattcgaccttttaataaaaatcgttcttcgcctcacccaccttcatatccattcaagcaacccgtctttatttgtctcactactgcccctgctcctaccaattagccgagtgcccctggtactcatttccctgcccttcctagttcctccagtggttgcttgaactgtgggaagtctagacatttcatcaaggactgcccatatctgaagcaaaataaatccaactttcagcagccctctaggaactcaaatcaaggaaaggggaacatggccaacacttcaacgggcaagaaattcaagaaaactggacgggtctattatacccagatggctactataccggagggagaaccagtgatgatgggtacgttccttgttgccaatcaccaagcagttatcctcttcgattctagtgcatcccataccttcataagcaa

SEQ ID NO: 164469 - DNA, 524 bp, Zea Mays
ccagccgccgccggagacccgcgcccgcgttcccggccatctagctcgccggagaccgctccaagcctccccgagttccgccccgaggtgagacacccgtccccgtgcccaatttcccttattgcgccctgtgttcgtccaatttcgccttcgccggtgctcggccgcggcggtccaccgtgttcgcgcggtggccggccgatttagcccggtctagttcaccggagtagttccctgtgtcacccctgcctttgctgaggttagccaaggccttagcgcgccttaagtcccctccccatggccggaatcgctcaccgaagtttctctggcccgcccgagaccttctcaccgccgttctcccctctctgcccgtggattcatggcctcttcctcgccattgagttcgtcgtggtgccctcttcccctctgcccaactccggcgaccccagggccaccctagctcgcgcctgcctcaactccggcgacctcaccgccgcggagaggagcggcgccgcccgcagccg

SEQ ID NO: 164470 - DNA, 469 bp, Zea Mays
ctaccaagagcttccatgcaggttcctagctccttcgggagggtttcaccacctcaaataggcatttctccaaaaccctaattcaccgcacgccacatgctcggtgaaatgcccaaaccactcaaaattgctccgattgaacccaaacttttcaggcacctttcacaatacctccagtaacatattcgccaaatttcacaccaatccgatatactagccttcaatttcactcaattccccgtttcgagcgatcaattccgagccgagtgcccaaattccattttcttcgcctaaattcaaaccaagcacacacttcactcatatttacccatataaacctattcgtgaagtaccggctcaattccaaatcatttcatgcctcaattagaatttcaaatctcctatggcactatttctcattcaaacgttgttttcacgtcgtttaacctctcgatcgccatatctctcg

SEQ ID NO: 164471 - DNA, 283 bp, Zea Mays
ttaaaaaacatagaacagagaactagagagtactctgtgcgagcaaaagaacatgttgaacgaaggtagtatgtcgtagtcaaaagattatgtagagcctatggtattgcattttggttgatggaaaatgctgaaacacctttgggcgttttagattttaatttttgatagcattcctttttgaaggcgtaccctccagcgcgctgcatatatttttgatagcattccaatcgcaagagtaccctccaacagaatcgcaatgaacagagacattataggcagc

SEQ ID NO: 164472 - DNA, 446 bp, Zea Mays
tgtgattctgcaccatcctttgtccgcatttttgatgaagacgaagaagaagaagaagttccactgattcgcaagaatagccggtgttacagaggtggtagaggggatagcgatattccttctccagctctgtctgctctttttagccttcaggatttatctataacagattttgaccagacccttgaggatgtcattcccgaggatatgctatcggagccgactgatggtgatatgatggatgtttgctctgacattccagatgttggtttagagatatcccgcgtagcatctcgcgcatcgtcgaccttggaaggcggtcttcggtgtcaagaggctggtccagattgcccgactcccatggaggtgactgaggatccttcagccttagaggtggctgttgcagaaaacccagcccccaagggtggtgctggcggttacccagc

SEQ ID NO: 164473 - DNA, 732 bp, Zea Mays
ctacgtgaacatccatggaagtgtggaaagggagaacccactcggacaccctcgggggctgggtcacagctcgcgctacccatccgagccggatcatctccggcaacaccctcggggctgggtaagcgcttgcgccatccatgggggccgagttctctgcaacagccacctctaaggctgaaggactctcactcacttccgtgggggcagtgcaatccagaccagcctcctgaccctcaagaccgcgctctaaggtcgatgaggcgcgggacgctgcccgggatgaccccaacccggcatcgggcacatcagcacaaacaaccatcgcgccaccatctgccggctctgacaacatatcttctggaaccatgtcttcaagagtttgatcaaagttcgccagagataattcttgcagaccaatgagggcagacaaagcaggagaaggaacaccactactttccccactagctatgtaaggccggctgttcttccgaatcagagggatttcatcctcttcttcatcatcttcatcaacaacacggacagtacacccattggggtcaacttcagcaggatcacacccattgggctcagcagcagcaaattcaggcactggcacttcctcagtgacaggaacagaaggaccgacatcctgatccaagctagacactcgacaaagatgtctcttcttcttctgcccctcggcaagagaagtgggttgatcggctcggc

SEQ ID NO: 164474 - DNA, 688 bp, Zea Mays
tacacagagtgttatggcacagaaatcgagagttatggcgatcgagaggtcaaacgacgcgaaaacagcgtttggacgagaaatagtgacataggaggtttggaatttgaattaaggtatgaaatgatgaggaattgaaccgatacttcacgaataggtttatatgggtaaatatgagtgaagtgtttgcttggtatgaatttaggcaaagaaaatgaaatttagggactcggctcggaattgatcgcttgaaacagggaattgagtgaaattgaagcctggtatatcggattggcgtgaaattgcgcgaatatgttactgaaggtgttgtgaaggtgcttgcaaagtttgggtttaatcggagcaattttgagtggtttgggcatttcaccgagcatgtggcgtgcgatgttctagggttttggagaaatgcctatttgagaaagtgaagccctcccaaagggagatcaagacctgcaggaggatccaagagaggactagggactcattcatacacttgattcatagaactttgacaagaatttgaattggatcaaagaggtggaactcaggctcactgaccagagaaatagagagagagggaagccaatggagggaggagctcaccgagaggaggaggcagaggtgcccacgctggagaaggtcacaggagaacgtcgtcgacgat

SEQ ID NO: 164475 - DNA, 485 bp, Zea Mays
tgcacggggctcttctcttcctctctctttggatcacagcaaggttcgccatgggaactcctccccgcgctcacgatgaacgacgcgtcttctccctcctctccgtggactaaatcactctcagactggatcgcagactggatcacagactgcccctctgctgtacatggtgcgccatacgtccttatttatcctcctccgtacgtcctcgccgagcgatgtagtggagatcgtgagattcggagcaagaataggggaggccatttaattctccacgttcgttgctggcgggaacaagaataggggaggccgtttaattctccacgtccatcgctggcgggtggttatgctccctcacataacatatatacacttgaggcatagtaattacaagatttttggcactcaaaaagtgtccagggttcgactcctccgcacagcacttttttgctggacgattttttctcttgctggacgcgagctac

SEQ ID NO: 164476 - DNA, 548 bp, Zea Mays
ctggtttcttgtattctaacacaaatgtttctgcttacctcctttgttggagtcttatggacactttctatcaattgacactttgctcataatgctgctacttatctcattgtgtgagtttgcactacgtctaaacacttctgttgcctgcttcaactgttgatgatcaagtgatgagcaattaaatgctccaatgctatgattggagttattctcctatgattcccaagtttgaagtctgatgatcctgtctttataccattgtttgccatattctgaacagaatggtaccaaaaaacaatgattgtcactgttctctttgaaaacttcaagcattttttaattgagcgtcatagcactgtgattatcctatttcagtattgttgtattccttaccaagatacataggtagtttttcttgcctgtttccctggtcagatgatgagtatttaactgcaacaatatgatgggtttattctcctgtgattccctcgttttaagtctctgatgaccccaccacatttttctgattttctttgcattctgtt

SEQ ID NO: 164477 - DNA, 465 bp, Zea Mays
cgtcatcggaggctcctactccggtgaagacaactagacggaccccagagggaccccgtgttccccggtctatggagctgaagcacgcctttcgtccggaggcccttccggaccccccacgggtccgagctgcagacaggtatatgctgaagtgaccacagccagagacgagggctcccatgtcaaatacagatgagaaccctgggtcggggcttagccccacagcagataccataccaagaggggctccgcaactctcccccagctgggaaggacccttcaaggtaacgggagtacaccgacccaaggggaaccatctagctacgaccggaggagtaccttaccctgatgccaaatatctctgtaagttctatccatagagcaagactaaggggtcgagtctgtttccttcttttctgtaactagataacacatacgtgtacgacaacccggtgggtctgcccc

SEQ ID NO: 164478 - DNA, 565 bp, Zea Mays
gcagtgacgttgatagcctaggaatcaattgaaccggtcgccgttcttgactccgagagtgatttcgcaaccacacctccccgtctccccttgctaggctccgattccgccccgcggactttgcgaaacgccacggccaatgccgacacactagacgacagtgtagaggatgtaccgcggcggtggcgattttcagcacaccgcacggtgctcacgacgacgtgggtctcgaaaaggatagggccacgattagatgggttaggttcgtcctttatacgtgcgtaaggttccgcgccctcggtcattcactcccagcgcggacccgccgaatcgaacggatctcggtggacccggcgcacgtctgccatgtgtggtgtttctgttgggagggaaaaaactgacgaggttggcccaggtgtcagcgagacgaaatccgcgcgcgtaagagcgatgcgaggctgacaaagcagccctagtcatcagtgtgcgtgactgcgtgaggggcgcccgacgagcgggtgactgacctgccggtcacacctggcagttcacaattgagtcaaac

SEQ ID NO: 164479 - DNA, 485 bp, Zea Mays
attgggatcaatgtcagcaaggccagttgcagtcatttcttcggcagcaggagctaaggtgctggcatcctcgtcaaagctggacactcgccggaggcgtcttcttttcttcttctgctcatcagcagaaggctcgggctgactggttcggctaggacgcctcgggcgagtattgacagatttcgagacatccaaggtcgcatcaacctctggaaggggcaccactgccaatgtgccatcaggagcagcatctgaggaatcctcagctagcagatcgagcatgtcatttatgtctgcatcactagggttcaggggcacttcaaaataaatctgccgttcatcatcaggtatctccccgagcgaagcaactaaggaacggacctcttcagcagagggtcgcactctaagacccaaattgctatctgtcacgggcggattagacacaaaaagagtgaaggcttgggaagaaggtaggttccaagccg

SEQ ID NO: 164480 - DNA, 530 bp, Zea Mays
gccacttgcatttccgagttggcctcaaaatatgctaaggttcgattcattgccgccatcattgtaacgatgggtggattatgcatgctcggtagtttgtcaccataataagttgttgtgaagtttgacacctcctctagaatgtatgcctctgcaatggaagcctcgattttacatttatttctacatttctttcgaatagtctttagacatctctcgattggatagcaccaacgtccctgcatgggcccccccattcgtgcctcataggggagatgaagaatcaaatgctgcattggattgaagaagccgggtggaaatatcttctcaagcttacacagtaacatgggtgccaatcattccaagtctgcaaccacggtccgagataactcttttgcacaaagctgacggaagaaatagctcaactctgaaagcgctagccagacatgctcagggacatagcctcgaaccatcacaggaagaatccgttcaatccatatgtggaagtcatgactcttcatccctaagac

SEQ ID NO: 164481 - DNA, 688 bp, Zea Mays
gcccttctacacgatgccagatgaaaagcgagacgcaggggggaagtattaccgtctggtgcggcacgaaactcacggcacgcggtgcagttcgtccccacggcggcgagcggacgacagcgggcaatcaccggcgcgcagagcttcaatcgcgcccacagaggtcgagggaacacaccgtaggtcgcgtagaagcactcaggaccacaactccgaccgtgccagcgtcgcaatcgcgaaaccacggcggcgggcacctcgcagcgacgactaactctcgacggggctggagcttcttgcgggttgtaaggtagaccagggatggcggcttactccacggtcatataggccggttggttcggtaccgagcgcatgacgaccggggaaatcgcgcgggttgttgagcaggggccgttcggccatggcgacgatcgcgcggagcggggagcagctggtaagcggggcctacacgtcatacacacggagcggaaaggggcgcagagagaacacgcagcgcgcgatgcgaggggctgactgcccggtcccacatggcagtgacagaggaaagcgcgagcgtgcggtggctaagggggctggaaagtggggcccaggcgtaagtgagcgcctgcggtgtaagtgtgggctacgcgctgtggaagcggaagtgggccgaattggtgcagtccgg

SEQ ID NO: 164482 - DNA, 717 bp, Zea Mays
cgggttagtatcctaaatccagaggggatctttagcaaaatactacggccgaaggggtacggaggatctgagccatccgatcatcaatcgagggcttagattaaacgtgcatatgcgctgaaccggtacgcgatcgtgatcgtcggatttgcgatcaacggcatgaagcgttacacgtccagatataatctaactcgtccgatatggatccgacggtcacaaacaattggggcgaattgttttcttaactctaatctcagccgctcatctggcaatctacggcagagcgttgtctccctccccaagcacctggtcacggcggagcataccccgcgcggcgaccccacgccgacgagcagcgcatcaagaaccacagagcccaaatcataaaatcgagtggcgcaaaacgtagaggggcagctagcagagttatccggtggtcacttaccggcaattgaagaggtcgcgagcccgcccacggagaagagtggatccgcggcggcgcttgagctacggcgagcgcttccgacgtcgttggccttcaatcgctcccggaaagaccacggacagtgtccagacgcgcaggcgactttgatcgatccttacccggtccgattccaaggccccagtgaagatgaggacgcggggcaactccggcggccggcctactctgttgcgcggctgagacgagcgaggcagggcatgccaagatttata

SEQ ID NO: 164483 - DNA, 621 bp, Zea Mays
cgcaagacgccgtggacaggaagattcgcccttcgattgtaggtatgaaacctcctccaaggctcgctatcgtccgtattatgtgtagtgcacttcgatttagccctaggacgccggtgcgggcgtagattcttcaccggcggcacccctcgcgtgggtggcgtgccgccgctcgggtcgccgtggatgggggcgatagcccctggccattagatgtagcgggaatggtagagattagatgggctcacccgttcagcttggacgactgctatccgtcggatcgcgatcggatgatggacatcgctttagaattcattaaatccggggcactagtgtttgatccaacggcacaaatcgtgtaccggttcactgagtgagtagtctaatcctaaccgcgagatcaagatcctgcggctgataatagagaataccccttcgcggcgcgcgttttgtaaaagagaccctgggaaatggggaaaacaacccgccgtcctatgcatagtgcgctgagtcttggtactcttctgtgttaaccccctggactttttggaaattgaggcgaggtccagacagtagagaatattcataaaatcaattagaaaacgaattttagtattaaat

SEQ ID NO: 164484 - DNA, 396 bp, Zea Mays
ctctttggattgggatgatcagtttccttgggccctgctgcaaagttcggcctcattcgattcagaccattgcccgcttcttctggggcttaaggatattgtgcatggaaagccacggtttcattttgaagctttttggacaaaattagatggttttctggtagctgttgaggaagcatgggctgctgtccctgctagtcactgtccgttgctcactctctccaagaagctcaaggccaaggttaaagctcttcaaggttggggcgagaaaaaggttggtcatattagatcacagcttggtcttgccaaggagctgctccaccagctcgacatagctcaggaaagtagaagtctttctcatgaagaattttggttgcgtaataatcttaatctaaa

SEQ ID NO: 164485 - DNA, 537 bp, Zea Mays
ggcgcaaccaaccaccagcctcgcccacatataagtcggtgtgtgcatccgtgggcatcgtcacatgccatacgctgggcccggctctattgagattgagggagagagagagagagttgaattctgtcgtggccgtgaaagagggagattgttgccaacatcgctcctcgtctccgccattgtttggagcccacagtgtggacgagggtgttcgcacgaaagcatcgatcgagtacaaggaaccgtcgggcgcatggtcaatcagagtgcccagaattcctcaccggcgtgaatcaccgccaccgaatccgccttgcgccgcggctgggcatctctacacctctatctttggtaagaatcccctccattagtccatgttcgcctcattttcgattagtgatgtggaattgatgtcttgtgcttgggtcgctcgggattcctcaatgacggtagggatttgcggaagttctgccaggaatcgtggaggaaatccctacgtatactatccatggaaattgcccccacttgattcgtggg

SEQ ID NO: 164486 - DNA, 1141 bp, Zea Mays
gcaaaagtcgcctaagggtgcagccaaaaaaaagcacaataagtgtgcaacacaaccgacaaggtgcgaagtcttccacaaagacaccgtccgagcaaaagtcgcctaagggtgcagccggaaaaagcacaataagtgcgcgacaccacccacagggtgcgaagtcttccacaaagacactgtccgagcaaaagtcaccaaagggtgcagccagaaaaagaacaataagtgcgcgacaccacccacagggtgcgaagtcttccataaagacaccgtccgagcaaaagtttcccaagggtgcagccagaaaaaccaaagtacgtaacaacactcgcagcgtgcgatctcccctacataagccaccatccgagcagaagtcgcctaagggtgcagctcgataagtacaacacatgtgtagtcacctatcaagcgcggagtcacctacgaaatgtacacgtccatccacaccaaaatcgcctaaacttgcagcaaactcgcaataggcacaacaaattacatagcgcaatagcaaatgaacaaacaagcgacgggctcaaaggcaccatcgcacagcacaatagtacacactatacaacttttaccccacaaacatggacatcacagttctattgcgaagagggggagggcagcgttttcacagaatatcgcaacagaatagcgaaggaaacaaattgtcacataggctcctcctttgaaataagacatgcctctcgaaaattgaacaacatcaacctcaactcttccccctcaaactggtcctgcaggtccccttctccgatgcaccacccagacgtcgatgaaagtagctcgcgctgagtaccccgatccggtcgtggaccacttcgaagacgggtcctctccatacccattcggtgatctcttcttccacttcacgaagactcatcgatgccttgtttcgacacgtccatcctttttcgtcgcgagtctcctactctcgcatcaatcgaggtcgccagcacctcgtgagggacggatcacagagactccgacgcagccagatccaacgctgcaaaataatctaagttgtcctcaaaagattcgtcaacccacgagaaagggctccccaattccccttcctctgaagaccacgacccaaaac

SEQ ID NO: 164487 - DNA, 455 bp, Zea Mays
gtggaattgagctgatacttcacaaataggtttatatgggtaaatatgagtgaagtgtgcgtttggtttgattttaggcgaagaaaaaggaatttgggcactcagctcagaatcgatcgctagaaacggggaattgtgtgaaattgaagcctggtatatcggattggcgtgaaatttggcgaatatgttactggaggtattgtgaaggtgcctgaaaagtttgggttcaatcggagcaattttggctggtttgggcatttcgccgagcacgtggcgtgcagtgttttagggttttggagatatggccattttgggtggtgaaaccctccctaaggagctaggaacctgcacgagtactcaaggagcataaagggactcaaacatgcacttggatttataggatttgatagaaattggaatttgaatccaaggggtgggatttggttaattgagag

SEQ ID NO: 164488 - DNA, 654 bp, Zea Mays
gataattgagaacaaattcgaaaagaaattatccagctggaaagggaaatacatgtctgtgggtggaagactagttcttattaactctacccttacaagccttgcgatgtttctgacgtgtttttttgagatcccaagaggtgttttggaaaaaatggactattacagatcgtggttttttggcaaggggaggataatgagaagtcactttattttagtagcttcggctatatgttgggcaatctggttgagcaggaatgatgcagtgtttgataatgctccaataaaatcttctttgcaggtggtttttcgggctatgcattggctccgcttctagacttaactacaacttagacaggatgatcaagaactaataatcaaggcatgtcgtagattggaggagttggtgatgcagatttttagacatcatggatggggatctgcatgtagactttgtctttagtctcgtttcgccgcactatgttttgcttttctccgagttctcagatagtgatattcctatctgagtctgtaataattcggctatagtctctttgagacaaaggccgggaactttcaattcccattatctaaaaatgtacatagaaagagtcaactcacaaaaatatagaaatagtcagcaatgcttgttcg

SEQ ID NO: 164489 - DNA, 709 bp, Zea Mays
gagacctttaagtgtgcatttaaattaggttgaacatttaaagcacttttagaattacacttgaagtttgaatggagtttgaaatttggaggtttcaatgaaataaaaagaaaagaattagaaaagaaaaataaaaagtgtccatgcgctgcctgggccgaaatcaccctcctagcccagctccacttcaacccttctggcccaatctgcacacacgccgccctcaccgactgacccgtggggccgcgctgcagtttggccaacacatccagcctctcgctcacgtttggttcactgttggtgggcccgcgtcgtcagttctatcctccctaattgaacgaacctgacgttgaacgaactcgcacgcagaactcagccatcgctcccaacctcggaacttatcaacaggattcttgggtcgttgagcaactgggcatccctgttgcccataaaaccctgaccgagagctccccttcgtattctaccgccactgctaccgaaaacgggagatgggcatcgaccgtgggattggtgtgtgcggggaagaatggggcccgccgcctcggcattgatggccgcaccaacgacagtggggcatcgtagaggtggatgcggcgtggcccagaagttcgaagagtgcccacgtcgtggggttcgccatgggtaaccctggcatcgccgcgagggggaacctaggccgtcgccatag

SEQ ID NO: 164490 - DNA, 369 bp, Zea Mays
ggattatgtagatatttattgaaaatagaagctaatgcataagcagctggcattttcccatttagtaggaagacagtaaagagtttaatcatcaccatcatatctggtacaggtgtttgaggccgaaggcctattataatcgacgaaaacatgctgatgagagctgtttctgaaacagaatgtaaaggaactaactcatctacaggcaaaagacggtctgtcatcaattccattgggagtgagagcattgaagatattgtgctatgtgctttctgaacaataagtgattgttgctcctctgtacatactccaactaaaagcttcatcccagtcattagtgagtcaaggaggccctgaaaaagaaatatt

SEQ ID NO: 164491 - DNA, 1157 bp, Zea Mays
tgagattagacatttgaaaaattcaaattacaaatccgaaattagtttgaatattggaaagctaatatagaaagaaaaaaaaggagaaaggagaaacagaaaaccccacttgggttgtttcttccaccgctcggtccatctctttccttcctcctcaaacgcgcgccagcccatatctgcctatgctcgcacacctgcgcctgaatctctgacgatcgggccccacggacaggcactcaccctcgcgcgcacggtcatggctatggtgcgcgggcccagcgacacttttcattttccccccgcactcggcctgggccaattgggctcatttgcctctgcactaggccccatcggagggccaccagcctggcgctcgtcaaccataaagacgctgtcacttgggccccacttgtcatcttcttcgtccacgcccgcatacttgaacggtctcatgtgaaccgcgcgctgttacaaccgaccacgccagccagcctcccaatcctggctctactccgatataaagcccgaattccccctccctttcgctccctaggccagctaagtctcgtgccgctgtaagcttgcgctggggggtgccgtgtgtgggcgaagctgacgccgccgcaataccgccctgcgacgtgggcggagccctctgcaccgcccatgcttggtgagacccctccccttcatttctccttcgtgcccttgttgtaaagcacctctcggatcagattttgggggcatcatggcatgatgtaatgcagctctagcggtcgccgccgcgaccccagggtgacggccatgtcactcactaggaggaagatgaccctctgaccgtcagatcattgtggtgcggtctggattaaatctgggaggatgtaaacatcttgcggtgttgatgccctaatcgacgactgtgattaaatgagaatcacccttcgcgacatcagatcttggccatttgattgaaatcgggtggccccggttggatctaccagttatttataaagcagaatctaatctaggccatcggctggtgatccagtggccctggaatcttgataccccttcagcgtggcaattttgtagaagagccctcggcttattcaagaataaacccgccgtctggggctgtaggaagagtcttgcggttt

SEQ ID NO: 164492 - DNA, 600 bp, Zea Mays
gtgatctttctccgaccagatagaaatgaccttgtggtgatcaataatatccttgagtgcttcgggcatgcatcggggcttcatacaaaccttgccaagagttccgggggcttcatacaaaccttgccaagagttccggctccccaattcattgcccggctgaggccctggcccttactgcagatgtgctgtcatgtcagattaaggagtttccctgcacttatcttgggctgccactatgtatccatacaccaacaagaatggggtcatgcctcgtattgataaaattgcagatcatctcccgggttggaaggcccccctaatgaataaggctggacaccttgttatggtacggacggttctgactgccaccccaatccatcatttgattgctcttgaccttccaaaatgggtgttaaaagctattgacaaaaggcgtaagggtttcctttggaaagaacaggagcatgccaatgaaagaaattgtctggtgtcatgggcaagggttcagcgtcctttggagtttggtggtctgggcattcacaacctcgaagtacttggctgggccctgagaattcgctggctctgggctcaaaaaac

SEQ ID NO: 164493 - DNA, 580 bp, Zea Mays
gcgggctgtgtttctgcacgcgtcggcttagggacaaccgacatctgaagcggaggggaatgtcatcaacatgccaggggagacgccggaggaggcaaccgacgaggaagacacgtcgatgtccagcaaggagtagcagaccaagaaaggtgaaagcgcgcgcgtccgggtgggttgtgtaaacgagtgggccgagccatgtgttgggtcgcgtcgtgaaggagtacttgagtctggagctataagaactcgatataaaaaatcagaatagagcaatacacaaggctgagacatcgctgccgtctcgccgccttctcctcctcagttctcagttccaatctccaatccttgtctccttcccttcggtggtgctaactgttaagaaaccctaatgaagggttatctgggaaaaatatctattatacccttgagggatcttaagtctctatatatagaaccttttacacccctcataagtgatatacagacagaaagatgctagaggaccaacctacattctgtgtctcgtgtattcttctgtgtgcgtagtttgctgggaagagaacgagcttttataact

SEQ ID NO: 164494 - DNA, 354 bp, Zea Mays
aaacaaacagcatgttgtttcaaccggaaatagggctacaaggagtaacatggggaagaaagttactgaccagggggtgcagacactactgggttcacaaccaagtgttgttgatacacagattgacagtggaaaggacacaagctgggcgctggttccaggatctcctaatgtctctacgctgagtgctgatctgaacatggctgatgttgggattctatctcctgaagttctggctcttgctgctgtgtcggaagctaacaactcagctaaattacttaggagcaaaagaagggtagctacaagtatgaaggactctgttgctcgggccaccaaactgaaagctgcacgcaa

SEQ ID NO: 164495 - DNA, 1485 bp, Zea Mays
cgtcatttcctgcctttaggtcataagtcatctcctacactctcgaaggcttatcgccgctggtccgtctgaccccaaggtcctatcaattctggcatgacttgtagataggtagagctttgtgaggcgacgtccttgggagagccatacatgtggtttgcattggagttcctttgtggtcacgtcttgttcatgaagtctaaccgcatgtggctaggaccgtcctggtttgtagatccttgttatcctttggagagtggagtggttaataagcatgggtgcatttggagtccttcgtactatacttgccttcatttggtatagcctagttaggagcatgcgccgaatagtcataggatcataaatgtgttagtctttcctagaatgctacctttaggacgtggcaccatagagtcttattaggagtgtattaccgacttagctcagagcgattgcggttgggattggcctggtctaggagaaacgaggtgtcggtgtttggatccgaggacctaaccaactagtgaaataatgtcgcgtgccctatacctagatggtgatgcaagttgacacaagtattttatcttggttcggctagaagaggccctacttccagcggagggggaggagacttatattactcgcacctaagtgcttgcagtagggtttacaagctgagcgggagagggaaggatcccaagtccctgaggatgattgaggcaaatgccaataccaagtggaggagaaaactcgtgaagtgttcgcctgcccctcctgaagctgtagggtatcctatttataggcctagaggggagctacttggtagagtgtgcctatgaggagacgtctttatattctatagatggtatggccggtggtatggtcttgtaccttatcgttgacttgttcctgcttggttcctactgagagccgagggttcggtcacatacccgaccccccccccccccgcgagtggttgcccatattgtagtggttaacacagtgctaagcttggtaaaaggcttcttaagggatgtgtcatctccactgtatctgatgacgttgggcgtcctccgtcatagatatcgagggcagaagtgggctcgggcgaggcggaagttcgcccgaggtcgtgaccgagcctgtcctgagattcgaagatgtgtgtcgtagttgaaagagtggcctcccaagggattcgtgggggagcaggtagccgaggctgagctcaggcgaggcagagttttgtcccgaggatgagtcctgcatcgggtgagacagagtttgcgccctagggctggtctacgcacctgtcatattacatgtcccgtcaagggttggtagatggcatgcgcgtacagtggtcgcactcgtaatcatagaatctttgacaagaccgtggtcttgttgtcactgtatgcacgtaggcctgagcggggtaggtacgtgcattgaatgcggctgtcccccagtggtcttcaggag

SEQ ID NO: 164496 - DNA, 506 bp, Zea Mays
aaaagaacttttagcatttgtacaggatgaattgttccacaatctaatgcatgttggcctgtcaatgagccccctgatcttgtcgatattgtgcagcattgtttttactcccttttatcatctgcgccatgaacttaagctgcaaatagaggctttcttctcatgtgttatcctaagattagcacaaagtatatatggagcaagttatcagcagcaagaattgcccttgaggctctaactgatttttgccggcagaaagagtttatagctgagatgtatgcaaatatggactgtgatttacaatgctcaaaatattttaagagttcgcttaccttctgtctaagagtgcatttcctgtgaacagtcctttgtcagctataaatgtgcttgctttggatggtttggttgctgtcattcaggcaatggcaggtttggttgctgtcattcaggcaatggcacaaaggactgataatgcacctcaacatcatgagcaatcagcgccagaa

SEQ ID NO: 164497 - DNA, 367 bp, Zea Mays
ctctgcccagttttggtcattgcctaagggtcaagaaaagcttcaaagtctgatcagtgtattatctggtactccctctgtccagtttcgaacatgcagtcatactccatttttgattgcttgtacagttgacagttcaaagtctgttcagagttccgacttcttcaaagtcttcacagttcagttcaaagcttgattttgattgcttgtacagttatactgtgttattgttacaactatagtgtattgctgtcctgcaatatagtattactgttgtcctgctagacagctatagtgtattgctgtcatgctacagctatattatattacagctatattactgcttgaaatttctgctacgtacttc

SEQ ID NO: 164498 - DNA, 650 bp, Zea Mays
gtcaccactggcctcagagtggttggttgttgattaggtattgtctggttagagtgattagagagtgcagagcatctgtgaggtgcataaacattaacttgagattgcttttttcttctatatttttaacagtgaaatattgaaaaatggttgaagaaagatagatattgtgtttctaacttttttagagacttagaacacttgttggtttactcatttttttgagaactatttgagaaagcaaattgagttataaagggactatatctctactactctataagctaggatggattgcgggcgtccacatgtctacaccgtacccctgcctccgtgattcccgccccgcctgtatcctgtgtgcacgccgcctccttcccgagaatgtcgcgtcccccgcccgtgcccccgtgatgcacccgccgcccaaaatcctcgccccctctccctcttctggaaacctagccgtcgcagccctattgaggtgctagctccggtggaagtagcgccgccactcccctccctcgtgctcccagccggtgcctgccccgcccgccattccctcgcaccgtgaccctgcccccacgacggccatagcaaaaggatcttaagtaggcatttactaggtacgtgtatcctcctcgcatcct

SEQ ID NO: 164499 - DNA, 1048 bp, Zea Mays
tggaatttgaaaagaaagaaaagaaatgtagaaataaaagaaaaagagatcgtacctgggtcgcggaccagctttcggcccacctctgaattactcacgcgcggcccactccccggttgtcagcctccctcgcacgctcatccgtttggctgaccggtggaccctcgccatcagcgctttcttctcaacagagcttccgaacatgccgcgggcaccccacaaccccgcagtcacctcggcgggtggttgcaaccatctgtccgtctttccctcgcgtagctcggactccccagtccttaaggcgtgggcgcggaccctcttcttttcccgtgccaagtgagcgaacagagcagaccacgcgagagagaagagagagagagagttgaagccgccattgtagatccccaccggcattgggtctgggcccctgccgagcctcctgggcgcttcttgagtcgcgcggaagacgtccgagttaccccaagtcagctcggtggtcgggatctccaccaatttctcaccggatccgtttccaccgccgccgtaccacgctccgccgtgaccgggtactgctgcatctacaacgtcggtgagaaccacccaactgcatcgcgttcatctaagaatcgtgttgagcgcatcgaattgaaaaatccgagctccgaggcgcttgagcattgtgctccagcggatctccgccgtatgctgcggcggcgttgccgcctgtgcttgcgggtgaaggggggattggggggcagcgcgcgtgggccgttgatggatggatctgcggccgcgattagaggtaaggaataccccttcgcattttaaatctaaaccgtagatcggataatgagtggatctaggattgttgatgcgtggtcgaattcggaccattggatttggatcgggcgtctgcaaacgcgtaccaattattcccccacgcagatctaatctaggtcgtccagaaaggatccagcggccacgaacggccgatacctcttcgccagaccactttgcagaaagacccttatagaatttagaaaataac

SEQ ID NO: 164500 - DNA, 959 bp, Zea Mays
tggggtgaatgctgcctagacacctccttcattcggaggtatgatgtccagccactagtttattcatatgcagctgcaatcacaattgggctaggggttgttgggcaggaactcgatgggaattgatcctagggttctagaaccatggtactgaacatgagtttccaaacctttgatgggtccaatcccaaattatgcaagcatcgatgtgaaacctattttgagttttactcgatgcatgtggagatgtgggtgagactagccacgatgcatttcaagggattcgttgtatattggttacaatccatggagtctaggattcggactatgatctgggatgagttgtgcatggctctgtttactcgattcggtcgagatcagcataatatcttgatctgacaatttaagcatattcatcatctctgtttgttagtcgagtatatagaacaatttgatcagtttttacgtcggcttctagcacatgagagttatcgaactatgattactgctcaatttcttgatggcttaaaagattatattaagtttgttgtcataatttagcgaccccttgacttggatactacttgctctcttgctctattataggaggatgtggtggccgaccttgggcgacaggtttctagaagggtggacacatgagggtggtccaaatctctaatcaagtcgactggtgcaccgatttctatggtagcgacactaacaaacaagccagttattcagtctaaagaccagtggggtgtagtggatttgggtcaatctaaggacaacaaactctcgagtagacctgatcatgggccacccaacctgaccaactcgactcgacccaccctaaaaaactcggcccgacccggtctgaccaaaccaagcgacgagtacaggtcatattttttgacccgtaataattcacgggccgggtacgggccatgatttttgaccca

SEQ ID NO: 164501 - DNA, 693 bp, Zea Mays
gcgcgtttggggcgacgacacgacgccacgagcgacccgtctcctccaccgccagtcaccagtcagtcgtcgtcttctccgcctctgtcacacggcctccgacggcagcgtaccggcgtccgcgcgagaggggatggcttcgtccacgactgccgacggtcgtgtcgcgactggacggctccgaccgcgacttcgacgaacggcgcgggcacgaccggatctgcgacggagtgcacgagggcggccgggtctgcggggttgcggccggatctgcggggttgcgccgctgtagccaggtgagtgcgccgcctcagcctctccaacatcatggtacaggccggtgcgccgctgtagatcttaggttttccaaaatcgccgttggctacgtcagtgcgccggtgtagatcttctgtccagctcgtcgcgcgtcgctgtgcttcggtgctgtgcccataacgttaggtgaggcctgttcagcggattttaaaatcaaacaaatccgtctcgtcgcctgtgcttttccaacagcgcaggatcgctgttcttctgtccttcgtcgtagcgcccatccctctgctttctactacatatgtggagccccttcgctggtgcctttgtctttccgtcggcctgctacccggcggaagcgcctttctcctctcgactccgtcgccgtcgtccgttcatttcttc

SEQ ID NO: 164502 - DNA, 305 bp, Zea Mays
cgtgatcggtggagtgaatcgatcttggccgttgtccatcgatcggacggttgcgggtgaacgtcggctcaggatgaagatcggtctaatcaggggtgcacactaccgatcttgcggccgagttctaacgataccctttcgccatggtaaactgcaaaagagccctcggattgtaatgaaatcaacccgccgtccatccggcttgattctgagtcttaggtcttttatgcgttagacccctgtcttctctaataattgtggcacagtctagagagatagaaaataagagaaaattaaatagaaaa

SEQ ID NO: 164503 - DNA, 396 bp, Zea Mays
cgccgccgttaagattcgcactcactggtaaccggatagcactcggggtcgcgtaaatatcctcgccgtggatagactccggccattaaacaactccggccaccgtaccatgttcactgcagcggaatccgataacttcgccggtgaccgccgcctctcggccttgtgccgcgtggctctacctttccaccgcatcgtcgtgactctctatggtcgtctaatcgtcgccggtgaggtcaccacgacggtagacacgaatccactgcgccaaggttcttctctatctccggccgccagcgctgctcgaccgaattgatcaccgccgctcttgctccctacaaattgagcccacggttagctgcgctacatcatcacgaaaccaaagccccaatccca

SEQ ID NO: 164504 - DNA, 406 bp, Zea Mays
aatggccttgatctaaaatactaccctcgtcgtttgatcggcagtgctggaggtgtgattatctcgccagttggtgagggcaatcccaggctgagcagcatggtcaacttggtcgtcgtgctcaacacagagttggaccacgcccttgatgagttgggcaaagttcgggcggaggttgcggaattgcttgctgagtgcgcagcacgccactatcttgatggtggttctcccgcccctatcgggattcagcacccttaccgttcaccgccccgtggtcgcttcgactatggtaccctagactgcaggacccggatagatttggatccctagatcgacagagtcggagtctgtaataatgcttagttcagtgtctcagtctagtcagtctagttagagttagtttgct

SEQ ID NO: 164505 - DNA, 576 bp, Zea Mays
cattgcactttgcacatctttattaccttatttcttgtaactcaagtcaaagtatcaagaattttgagaggatactccgtgtaagtcaaatctccctgaacaccgagctcttccattggtaactgtttctcagggacacggagacgcttcttaagttgagacatatggaaaacattatgcacatcagatagattatcaggtagctcgagttgataggccatctctccaacttgcctaaaaactcagaatggtccaatatagcgaggggacaatttgcccttgactttaaacctcctcattccacgaagtggtgacatcttgagatacacatgatcaccatcctcaaactccagtggtcttcttctattatcagcgtagcccttttgcctggtttgagctaccctcaaattctctcaaattatacaaacttgttcttctgcctcttgaataagttcaggtccaaagaactatcttcctctagtctgatccaatatagaggagccttgtatttcctgccatacagagtctcgaacggtgacatcttcagactggcctggtaactattattatatggga

SEQ ID NO: 164506 - DNA, 523 bp, Zea Mays
cggccagattggtcgttgggtcctccaattctcctgtggtcgcctccgagaagcaagtgccgccgcaaccgaatcagttgtgggatccccgctcgggccgatgtgcgctcgggctagaaattcggctgcctccctctcctctccattcctctcgccatgaccgagcccttccccgggcagcagctccctgctcgccgagctgctcttccatggcgcctaggtccggcgactccactgctccctccagccatcttccccctcacggctccctacagaccggaccccaataccctcctttgagccagtcctccaagtgctccgtgtctatggactcgccaccgccaccgggggagcgaggtaatgccgccaccatggtccggcatctccacctccactcggtgtccatggtggggtctgggagaatcgctggtgcgtgtggtttgtcatcgggcatgtgcttggccgcggtggccttcggtgtccagtgaatcgctcgccggagtaccagcatcgccacggtgcc

SEQ ID NO: 164507 - DNA, 786 bp, Zea Mays
cgatgatggaaatctaagctggataaatacagaagcaacggggtgttaagaggattacctgaacctcaggcaatgggcgttcttggatcagggaatcaggcaacctatttccccaaaccaaaccagcaaccaaatatgggggctgggttgggaggtgggacacatatcagaatgtgcagattaggacagaaatccacctatgagaatggcatgatttaaaaataaaaggaattatttcagctaatcaacatcaaccaaacttaatgctaaatatattaattcacaacataatggaagcacaaaaacgcatgggccagaacaaacctatgatgatgcttttcatgagaagcaaatttagagtgcaaactttacaggtttgttgtatcacgagattaaaacatttcccatgattgctgatataccattgagccgatgatggaaaactaagctggataaatacagaagcaacagggtgttaagaggattacctgaacctcaggcaatgggcgttcttggatcagggaatcaggcaacctatttccccaaaccaaaccagcaagcaaatatggggctgggctgggttgggaggcagaatggtagagcggtgttgagtgcatcgaagaagatgcggatagttgaagctggcctgtggcggtgtcattaggtggtggcgcggcggtgagcgcgcctacgagggcgcggatcgctggagcggggctctaccgtcttcctatgagagcaccggggaggatgggggttgtgggcttgtggcatcgaggtcgcact

SEQ ID NO: 164508 - DNA, 440 bp, Zea Mays
gcctgagaaggtaccggtggaagcttaatccggaaaaatgtgtctttggagtgctagccaggaagttgctcgggttcattgtcagccaccgaggaatcgaagctaacccggaaaaaatcgaagctatcatgaggatggaagcaccacgatcacaaaagaaagtgcagaggcttacgggatgcatggcagctttaagcaggttcatatcaaggttaggagaaaaaaggcctaccattctataaattgctcaagaaggtggacaagttccagtggacctcagaggctcaggaagctcttgatgcactgaagaagttcttgactacaccgccagtgctaaagccgccacgccgagccatgccagaccagccggcagaagatctgctgttatacatctcctgcacgactcacgtggtgagcaccacgttagtagtcgagcgggc

SEQ ID NO: 164509 - DNA, 752 bp, Zea Mays
ttcctctgtgacctactgcatgatatcttttactatttgcgaaaagatgtagctgtaaactctctcgtcaacgagctttcccttccctctcctcttcgtggtccacatgatcaagcacatagctgttggattaatctcaagatagacttagatcataggccccaacctgactctattcccacctaatcgaaagcgcaacaacttattgatcgtggcccattcacaccatgtatataaaaagagtacgtcactggcacacgaaccaacgctcgctcatatctccttgtcacccttaaacctaaacaagacccgctaatctaatacatttagtgaagataaggttgcaccctcagcaccgtcgtcatcgcacactggctccaacatcgatcgtcgaagtctccccttcctatgacgagcacctccaattccaaagatgattctctctaaactctctcgtttctatattttggttgaggaaagatcttaccccttataacatcggtatcaaagctagtttttggcacctaaatcataaggctaaaacccaagctctttgggttttaagactcgaccgagccaaattcgcataactgacttggacccggttgagttttacatatacaacaagtaaaaaggagacgaatggatctgaatggatcacgatgtccaagagcggggtgaattgggctgctctaaaaattcttgcttaaaataagttcaaattgcaaacccaacatgacccgagtgcccaa

SEQ ID NO: 164510 - DNA, 478 bp, Zea Mays
gttgtgatgtttagctttaatgctagcgcttgaacttaatcaatggtacgaggtttataatgatttggatatggattcgtggaatcatggaagcttgggcggtatcctaagtgtttcatattaaggaggtttgggcggtatccccagtgcttctccataaggatcagtttgttgattgacaacccgaaaaaatagtgctgtcaagatggtggtatgggacacccttggctaagtaaatagggaagtcttgtgttgggtgctcgttctggtcatcagggatggagacatctgtcatgctcttatattcccactcaaggatctggatatagatgatcgttcacatgctttttctagagggctgagggtataggcttggttatgttgaatgatctctatgtagtggccatttccaacatttgtataatgaggactctagaaaaaagcctcgtagtgaaatcttgtcgactcaccttggaag

SEQ ID NO: 164511 - DNA, 278 bp, Zea Mays
gccccgaagactgcactccaaggtcgacgaggcacgagacgccgctcgggataactctaatcccacatctggaatgtcagagcaaacatccatcataccaccgtccatgggctcggacagcaagtcttcaggaacaacatcctcgagggcctgatcaaaattctctagggataattcttgcagaccgacgagagcagacaaagctggagaagggatgtcactactctccccactgactatgtaacgccgactattcttccgaattaaggggatctcct

SEQ ID NO: 164512 - DNA, 570 bp, Zea Mays
caaaggctgcagcaaggggtgaagtcttgcccccagatgtattttatcaagttttgacaagacctttagccaaaaacaagggcgaagggcaaacaattaacatcataacaactaaaggttggagggacccaatcattttgtacctgcgtggacatttttaccctcatgacaaggcataagcatctagactcaagcaccgtagttgggggcacacaataatcaaagactgtctatacaaaaaggcatagtccaactggtcctcaaatgtatcacccatggtgaaggcaaaagcatcttactcgaagtccacaaaggattgtgtggatgtcacataggtcctagagcccttatatcgaaggtcatgtgctagggtttcttttggccaggaatagtcaaggacacactcttcacaacccaatcatgtgaagtttgtcagaaaatttcaacatgaagggggtccttcgcagctaactaggttaatagccccatatggcccctgcaactgtggggcaccaacattgtcggaaataaattgtttgcataccagcttcaaacaattggcgctgcaac

SEQ ID NO: 164513 - DNA, 421 bp, Zea Mays
ggctgaggataaagcatcatcttcggctctggtatatgccccaggtaattcgtcgctagtagcctcaatacattttaaccagtcgtcattaggttcgtcaaaccggtctctgtatctgaaggtatatttcaaacgaattaatccaccttcactggacccggcaacagtctccttcggtatctcccagttatccacaagtggccataccctataggctatgtgctcttggatcagatctcttgtgccaatgaaagcacaggcattgctgaaagccttttgacatgcttcggcatcattatcaatcgccacggtcggccttcgaaggccgaagcgagaccagatggggcgttggatgatccccttgatgtcctccctttcaatcagattattcttaacatagaaccactcctccatccaggac

SEQ ID NO: 164514 - DNA, 648 bp, Zea Mays
gtgtgctggaagcttcagtagaagcaggagttgatgtcttcacagactccataacaacatctaacacgctagccattctccttttccttagagttaccgcgggtatgtttgatggcttcggcagttccattgtgcacaatggactcgatacctttaacggttctgccgtattctcttgtttcggctcttgagtcagatttgtcttagcttcgactggcatagagtgacctggatccgtgaacggaaccaccttttcacttagctttggcacgtcagccgtctcaatgtgcctaggtcggtgcgtcaaaactttaacctttttcgacctcgacacactagaagttgtcaaggtagcagctttccttttcttcccttgttttcgcatgggataacagtagtctgggaacacaaacccgatagcatcaaacaccctattcaatctctttttgccccgagctccgaaggcagttgtcatagcttcatctttgtcctttgaatatgctccaagcaactcatcgctagtcgcctgtatagcatctagccagtcatcatttagttcatcaaactggctcctgtatcaaaagatatacttcagatagactaaaccattttggctagagccagcgacagcctccttctgcatttccc

SEQ ID NO: 164515 - DNA, 457 bp, Zea Mays
ttcgagcggttctgccatagctagtatcagagcaaataccaccacagagaaggacaatgaaccatgaataccaattttcaaaaatctaaaacttgcatagaaactagtatgactcgtcaggactagaccgctagacctaggacgaaaggccttaagaatagagggagaaataggtggctaagtaagtagaccctgtaggccagtccttagctttttaaaggatgccctaggagcaccccctttatttcggagaggagtcgttatttttagcatgcatgcattataaaatttgaaggattaagaactaaagaagtaaaaatttgagctaacccgcttcctttcaaaccatccaggctcttttattttttccttccaccataatctttacatctgatccccttccgcagataaattcacccccctagtggaggagacacttgtttcagctctgacttcc

SEQ ID NO: 164516 - DNA, 606 bp, Zea Mays
caaatcctaccccccttaacaagaatctcgtcctcgagatttaggaggaacgagggaaaagatgggggaaaatctatgtgaagctcttgttctctttcccatgtagcttcgtcttcccatggtgactccattgcactttgcacatctttatcaccttatttcttgtaactcgtgtcaaagtgtccagaatcttgataggatactccgtgtaagtcaaatccccctgaacactgagctctcccattggtaactgttccgcagggacacggagacacttcttaagttgagagacatggaatacattatgcacatcagatagattatcaggtagctcgagttgatagaccatctctccaactcgcctaaaaactctaaatggtccaataaagcgaggggccaccttgccctttactttgaatctcctcattccatgaagtggtgacaccttgaggtacacataatctccttcctcaaattccagtggtctctttctattatcagcatagttccttcgcctggtctaagctaccctcaaattcttcgtgattatacatacttgttcttctgcctcttgaataagttctggtccaaagaactgacttcctc

SEQ ID NO: 164517 - DNA, 548 bp, Zea Mays
agatctgtaatcaatgcacatcctctttataccatccttcttctccacaaataacactaggctgtccaaggcaaggtacttggtctgatgtagcctttctctaacaattcatcaatctgcttcatgagttccaccaattctggtccggacactcgataggctctattggaaataggggtggtgcctgggataagctctatggaaaattcaactttcctttcaggtggcatgcctggtaactactcagggaacacgtcgagaaattccgacacaattctaatatcctcaatcacgttggtctccttgtcatctaccgacaaatagtgacaggctccttcttctagttcaggcatgtacaactcagttattacttcctttccggatggggacactaacttgactgtcgtcttatcacaactcacagtggcttggtttctgtacaaccaattcatccctaggatgacatctaacccctgagtacccattaccactaggttagcgaggaagtctatcccccttatttcaatccttagattcggacacatctt

SEQ ID NO: 164518 - DNA, 727 bp, Zea Mays
caggtagttagatctgcattagcgtgaaatctctgcatatatttcttatgtcataataagaagatattagcaagaaaatgcagctattttttaattaagaaatacaattatgtacttatttcttccttccgtctagagtttgctcagctcttgcataatcttatcttccacacatttaggtcttgtttggaagcttagtatttttgcagttttgagataatactatgttatttaatgatactgtggtattgaaagcaagatatatattcaaaacaggagaacatgcccactatcaggtttagacagcaactgaacatgcccactatcaggtttagacagcatgaacttattcagttcatataaacagattacctaaacaatatcacaacaggatcaagatatatattcaaaactgtgcccactcaagacagcatgaacttattcagttctagaagcacataactcaagacagcatgaacttattcagttgataaactatcaggtctagacactagacagaacaaaaaaaacgtttccttgccgcagaggaagatctagcatgaacgaagtgccaagcctgtcctccagttccaaagaactgaacctgctgctctgtcggccacccttggagcaacaactagcccaccatgggttcaatcatgtcctccagttccaaagaactatcgcggcgtgaacctttggaacactaacggcgcccgagaccgga

SEQ ID NO: 164519 - DNA, 560 bp, Zea Mays
gtcggacgtaggttcctagcgcatgtagtacatcctagaataggtttgggaagtgtcccgtcttgaacattgaagtgtaatgctcagtgacaggctatatcccaatgaagttctcctcctactcatcattggcttcctcgtagttgttttcctcatcttcttcttcttcttcatcatcatcttcttcaccatcacgagaatcatccggatcatcgcttctaggagcaggggcttgggctactagggttggcgatgttgaagatgatgctctagctgcaaaggcttgtgattttgacaacggtgtcggtgtcgccagaatctcctctgagctgtcctcaagaatcactccattctccacatgaaggtgatgaagatccatagggacttcctctactgccactgggtggacatgaccttccatggcggagggatatagttggtgttcacacgggcgatctgggttgtacacaccatcgacaagagaaaatgtcaacttagttgaattttaaagaggcaagattaataaaataatttgtaagagcaaaataagcatattttga

SEQ ID NO: 164520 - DNA, 1834 bp, Zea Mays
tggggttttgacagtggtggcggcaacacagccgtatcgcgatcaggtacgcggttctttcgtgttccagttccaccagccaaagtctctcttctccattacaacccaggcttttatataattgccatgggctgcccgttacatgggcctaattcatccacacattttctatatactttggattcggccttttagcccgagtgctcctctttgcttcctgaacctcagcgtccgcctcttccatcgcagcatccttcccggtgttcaggtgccctgtgctgctaacatccccttccccttgacagacagcttgtccccaagctggagcccgtgggaactgctgcttgatggcgtgttcatcttcccaggtagacaatgaagccggccagttagaccatcggattaggagttgaggtattaccttgttacctttgcgaagcagcctagactccagcacctctgtgggtattttcagctcctgcagcaggtctggcatggttgcatcggttgtgatacgagtttcttcggctgatttaagttgggacacatgaaagaccggatgaatcgcacttccttctggtaatgccagtttataagccacgggattcacctgttttgtgatcagaaacgatccaaaatagcgaaatgacaatttagtgttcaatctgctccccatcgaactctgacaaattggctgcagtttcaaaaatacacgttgtcccacttgaaacaccctttcagatcttcctttgtcagcttgttttttcatccgatcttgagccctttgaagatgtaacttggcccgttggagcataagttgtcttgttgccagatatgtttgcagatcagcactttgacattgttcaatagttgacagtcctaactgggatggagtgtggccatacaaaacctcaaacggggactgacccagtgcagtgtgaaaacaagtattataccaaaactctgcaagagatagccaattggaccactgtttagggcagccatggacaaagcatcgaagataagcttccacacattggttgacccattcagtttggccatcggattgggggtgatatgcgctactgaggcataattttgtgcccaccaacttaaacaattcctgccacaagttactggtgaatattggatccctgtcagagatgatagacaatggtaggccatggagtttgtagacctgtgataggaacagcttggccacagatagagcagtaaaaggatgggacatggctaggaagtgagcatattttgaaaatttatctactaccaccaatatgcagttgaagcgtcgggatgtaggtaatccagaaataaaatccaagctaataacttgccaagcctgatccggtatgggtaatggcaatagcagaccggggtatctatttctgtcggccttggcctttgtgcaaatctcacaagactgcacgaactccttgatctgtcctttcatgccagcccagtaaaacagcttcttgatgcgatgataggttaccgggaacccagaatgacctcctataggactgtcatgaagggcagtcatcacctttaattgcacttggttactgctacccagccaaatccttcctttatgcttgatcactcctgataccaaagtgaatggctctattgtatcccctgcagcaagcgtactcagaatgctcttagcttcctcattctcctcatagctgttagtcacctcggtgagccaacttggtaccactgtcgaagttgctaacacgttgagttgcagtttggaaccatcagtgcataggtttggccgtctagaaagagcatctgccacacggttttccac

SEQ ID NO: 164521 - DNA, 490 bp, Zea Mays
gttccagatcaaccagaccctcaaaattataagcgaattcagccctttcttgatcatcccttgaactgcttctgaagacgcctcccaccagtccaagtaggatgtaagactaggttgaggggcaaggctgtgtaacccaaactttctaagcagcatataccggaaattccttgtaaacacacatgaaatcatcatgtggttaagagtttcaggttcttggtcacataatgggcagctgctgggatgaatcagccccctccttgccattctgtcagcagtccaacatctgttatgggccactaaccagatgaaaaaacgacattttgatggtgcccaagacctccaaaccctcttgtaatggccgaaaatacatgatccaaggaaaaccccttgtaggctgcttttgccgagtacttaccatcaggagctataccgacggtagattgtacctggcaattacataattaaagtggctgttaggttaacccat

SEQ ID NO: 164522 - DNA, 562 bp, Zea Mays
cgagcgcgtgcgttgctcgtggatgcgtacctgtagcttggtgcgtgtacgaccccctttgacgcgtccagtaaggaggtgggcctccgctttcttggatggttgcaggaggaactggaggtgctttcgtcgatcgtgacgggtctcatgtccttcgcctcgctcatcacctgtgagggagttgtgaatgccttgtcctatgagggatgtaggcacttcgaagtctttgatcggtccgatgaagacttcgactgcgagatcttccaggttgaagatgcggtgctaaagcggtccgctggggcgctttatgataggatgtggggccctcacggccgtgatattgtccgggaaaggtctgaccgggcgatggagcaggtacgaattgttgttttattttattagtttttaagaatatgcgcttatgtttggtgctatttctgtagatggcgaatgatgaggaggtcgaagacttgggaggcctggagagcacgatgccgctggcggagggtgcacgggtggggactgaggagcagccggcgccagtaactggtgttagcgaata

SEQ ID NO: 164523 - DNA, 580 bp, Zea Mays
gtggtgttggatccctttattggtgtagtacaccatggactcaaacactatgaactcaccactattgttcataagcagcacctgaagcttatagacgcactcctccacgatcgcttgacggcatccacaatggccgccttggtgttgagtaggacaacccacatgtagtgaggcacatcatcgacaacgaggatgtagtgctttcttcaggagttcccagtgtcactaggctacataggtcatcgtgcatgagttgtaacttatttttggcattgtagcttaatggtactggaaggggagccattgctgcttcatcaacatgcaaatgtcatagaactgctccacgtactcaacgcgctgcatgccctacaccatctccttactgctaagttgtctctgtgcctcaaaactgaggtgcccaaagtgcttgtgccaccgccatgcatcattgtcatggtgggctacaagacagagagattgtgcacctacacatggaggatgtagatgtgattgcttcctctgttcaccttagtgggaaggcggcgatggtgatcctagatacacaacaccccatggtcga

SEQ ID NO: 164524 - DNA, 294 bp, Zea Mays
tctcaccgaggcacgggggttgagcggctcctgcgatggcagacaacgtgatagaggttttgcgaggggaaaagaggagaaggtggcgagtctggcgtccaagggagatggaatggataaattgccgaactgctcacgaggcgtgggtggttggggatttttggggaagaagagcagggccttcgtcggcgctgggacgactgcgtagcacgcgcgtgcgagcaggtcgcgcgagttgtgcgccatgctgtagggaagagaacgtggggcgcacgggctgctgctgcgtccgca

SEQ ID NO: 164525 - DNA, 433 bp, Zea Mays
gaccacttgaggcacattcaattcattataggaaacacagtaaaacattgtaacgaagacatgaaaatttttcttaccactagagctcgagaatccatttcattggttggttcatcaccaaaatcttcaatgaggacagggtcaataggtgcagaaatagcagattgacctccaccacgactactagtgcctctccccctaactccacagcaacctggaattgcacctcgggcatgagaaataggagccaaaatggatctggtggattgaaatagtgtgcgcgctgatctacaacgaccaagaggaggcaaacctaggtcggatccaccatcacctgactggagaacatcttggtaggaagagagatatggaaaatcggtaccctgggactgggagttcagatcaagagcttcaatgcggctgcgaggtgctg

SEQ ID NO: 164526 - DNA, 447 bp, Zea Mays
ctaaatgttcctaacaagtacaatttcatggtccacgtgttacaaatattcagaaaaatacttttgcaatggtgtcagtgcgggtgatgtttttaagggttgtaaacctctttgttctaatataataatacacagttcccctgcttgttaaaagaatggtacccttgttgcccatccctgttatgatattatccctggatacttcctttcccgctttgtttcaggatgctatgcctatgtatgagtatctttcttttgttgggatagtcttgggaagcggcgccgggctttctcgtgagtagtggggctatggaattgggtgccgcaaaatgcagctttgattctagctgattaaacagtagtctaaccgctggagttgggtggttttgttccaagaaattaactgcttcagtgccctgtcacatagaaaaaaatgaaccttgtgac

SEQ ID NO: 164527 - DNA, 536 bp, Zea Mays
ggtcgtcaggcactcgggtggatgtttagtgatgaacagtgacctgacgaataacgccaggttcagtgcactgtcgccggtgagctcgcgccaagatccgagtttgccggggagattcgtgcttgccgcatagtggataactgtgggggagtaaaagatctagcagggagtggatttggtcgcgggtagaaacttattggctgcacttgatggtcgtgcgacgtggccgagcggccggtgtcgtcgtggtatgccggcgacctcaattgcgccatgccatgactctttcaccacgtagtgataaccgtggcacgcctggaattaccatcttggagcccttgcaccggctggggccacgacgggctcgccagtgaaatatcccaccaccacagtgttggttctggccaaaattggcatgacgcgtagtcgatcccattaaattgagcattgccctcgctccgtctctctattaagccttcattccaccccctaatcagtgttctcgtgcatcgtagcctccagtcttcggatttccc

SEQ ID NO: 164528 - DNA, 861 bp, Zea Mays
taaggctgaaaagccagaaactgaagaaataacgaagatgccagaggttttgagccctccagtaaaggcaacagtaccgaaggtacaaatgagttctgtcgtaactcctaagaggaggagaatggtaaatgtactggatgtgctagaaacaaccgaaaccttgaatcccgcttctatagggaaagttgccgaagcttccaaggcgcaaatcgaagctgatactaagcaggtagaagtcgaagctgcagtaatttaggctaaaaccgatgctgggccttcagtgcctgctgagacgaagctcgccgcaaccgagcaaaagaccgagggaaaatctccagatactggcatagtttttgagaaaagtgtggccaaagaatccaaatcccttgctcccgaagcactctccgaagattttgattatatcattcgacatgctttgggaaaaagattatccaaagaagaaattttgaagccaaacactatgcccgagaactgaagtatccgaagggggccttagtgtttaacggtacggacgaagatgattttcctgtactgcctcccggacaacaaagaattatccgtctgccgggagatggctagaagtatgggttttccgaagctcgaagctggcctttgtgccacgacgaaggatgatctcgcagatagtcttgcatacaacagtctaaaggtacaaaagttgtgaattttgaagcttatggactggaatgaagtctttttattcttatgttaatcccttattctgtcttgcagggcttaatacttagcaacgcgctaagggcgcaaaagagtgctgaagacgagagttgcactatagctctcaacaacctctgatcagaggtt

SEQ ID NO: 164529 - DNA, 617 bp, Zea Mays
ctagctctgcccgcaaggacagcgaacgacgcagacatatgctcgtgttcctagtgattggtgagctcctagttcaatttggtggttcggcaaacgtcacgggtttgtgagatcattcaaacaagggagcggaaggtttgaactgacctcaattgcactggccacgacgagggtgttcttgtggtgggatgagccggtttgggggaagtaaggaattcgtggtctctagtgagcgatttgaagcaatagttggtgtgttggcttcgtgattacatggcgcaacagccccggccatcaatttataggattgttaagcggcggctgatgaatttgggtgagacgcgctgcggtcggaggaggtagaaagttactggcgtagtggattcgtgtcttccgtcgtggcgaactcaccggcgatgagctatcatcgcaagccgagctacggtgacgttgtaaagtgtgttagcatgtggcgcacgacggtaatcagccaacggcggcgaggtcttatctcgatccaccgatgagcaagggggtacggcgggcttagtcgtggccgagctcgagctgatcccccgcccagatcttttctttgccgtagttatccacccgccagc

SEQ ID NO: 164530 - DNA, 704 bp, Zea Mays
aaaaaaataggaaatataaaaaaaagagtataaccctaattgggccaccaggcgccaattcggcccaaccccgaatcacacccgcgcggcccagacatctcctccaccgcgcgctcgcgctctctgccacgcgggccccgttggtcagcctcgtattctttcccccgcaccaacggacttctctgcccctgccacagcggacccacatgtcatccctctccccgagcgccgcactccgcccacctcgcgcaacggatgccgagtcaatcgcgcgcacattggagccgttcgttgcgcgcaggggtgtgctcccgtgagactggagggtggaccacgccgacagctacgttctttcgcagccccaggaccgagctcgtcatcctgtcgcctgccgttgcaaccgcccgcgcggatcgcgcggtgagcctctgttttcctcgcgctagctggaccacctaccgactccgcgcggttagatcctaaatacgaagtcccatgatcccatccttccgcgaccccctctctctcgtaatcgctcgcgccgtccccaaatccatcaccgagtaccacctgggcggaagaactcctctgccgccatcgtatttcgccgtgacctccactggcgggcctcaattggtgctcgcgaaggatttccctggggccgaggacattgtctggaggggtatgctcacgcgtcgttcgac

SEQ ID NO: 164531 - DNA, 535 bp, Zea Mays
tctttctctcgtcgaacctattccagatctcgtgccccttttcgcgagattactgaaccgcatcttcccgcgaacggcatgctactcacgtcggcgatcctcgtctatccccgtctttcccttcggcgtccaactcgtaatcttgggcccacgggccagctctgaccgtcttcgtctaattttatctaaccctgtctcgtgcaactcgccgcgcagctgtctctctcgctcggccaggacaagagccgccgtgaaattgacaaccacctctcgcgccctctcctttctatacataccctctcctttctatacaatcgcacacccctgccatgaaccccttccctctttcttctcacacaggagcagcccacgcgttttcttctctatgcattgtgccgccgtggtctaaggggccgcctcattgtcttcctcgcgtcgtcggaggagcagcctcgtcgtctacctcttccttgcgtgcctactctgctgttcttcatgcgtaggtgacaaatcatctccttctccctcctcttcg

SEQ ID NO: 164532 - DNA, 724 bp, Zea Mays
tctttttcctattttatttaattcctggactgggcgcacaattttataagaatgcaggggctaaaacataattttctgggctcgactgcaatttgttttggcttaggatggatggcgggttggtttctagaaagtgtaagggctcttttgcaagttgacgcggccgaaggggtacgggtgaatgcggaccgcccagattagatcctatggtgcagattagatctaggcgctttataaaccggtacgcaacgtcaaccgtacgatcagagatccacggtccacgaatgcccacgatccaatctactgcgagccacacgattaaaatccgatggctcagacttaaaatgacgaaggggtattctctcttctaatctggaccctccgctccctgatcaacggtccacaatcgcaccagccgaatcgttattgcgcaactaatcacaaccgtcgcagatcgatccaatggccatagacaacccacatccgaccgatacgcccatctaatctacgcccttcatcttggatccgatggctctctagcttcttctcccccccggtgttcttccacggaggagcatctcaaccccgcggtggcacacaaaaccggcgaccagatcgacgcccaagagccccaacagctaccccggatggtgctacgtgtattcgagacaaagaagaaactatggaagcaattcttaccaagcttagcggcgcggaatcctct

SEQ ID NO: 164533 - DNA, 1083 bp, Zea Mays
tggattgaatggttcaacatcttgggtttctgagatgcaagtgtaaatacatgcctctagggatggtggtagttcctggttatgaggctggtagttttcaccatcgggctcggtgatgaggagggacgttttggtggatgattgtgggatgttgtcggcgaaggcaaccttagatttcttagtgttggtgagggccgcctggtcgacttcgtccatgggggaggaattggccccagtgttgactttttaggagccatcatgggattggtctttagagcacaaatggtgggtgccaaatgttggttccgacaggtgggccccaacactcgtgagtaggtgagaagctcgaagtacaacaaaacgttaggtagggaactgttgcgtctcgtcgagcgtgtcctgtccaactacaaggtggggatatttatagggtaactggggtcaataacctaaaatgcatttgtgtcgtgcccctggttaccaactacatcccaagaatatgatgtacaacgggataattacagcgtcgtaacgctcagggtcggacgcaccaaaatgttcacccgattactacactgacaagtgggtccatcgaagcggcccacaaagccttgggcgactctgtggtatctatgcttcccccaggtctttgtcctccaagcgccctcacacctaatggttgggcacctcagcaatgtccatgtgggaggtccgtgaagggagccttcatcctcagggcgtctagctcaatacacgccagcctttgcttggttgacatgacgtggatacttcatttcggctagcccatgtagagatgtctttgtgaggttgtcgtcggccacggtgaatggaggctctactcgtagcatgagctcatcgaagtctctggtcttcgcctagcttggtcgatcaacggagggttgactgaggtatggttcggcctccgtcccaacaagaagctccatctccttggctgcctctacatctagttgaactgtcatgagtcacccacgcttgcccatttggctatagcctttgttgttaacgacttctcgtcctccttgcccaacactctcatgtggc

SEQ ID NO: 164534 - DNA, 1114 bp, Zea Mays
caagagaggatctcctttcttcaattgttctacccactgtgttgaatgttgcttcagacaaaaccgacgaaacaagaataagaagaatatctctagcaaaataagataatattggaaaattgtacttatgttccctccaccattcaagtaatttaccttatcacccttcgaggtgcgatcaggctgcaaatgtgggcaggatacttggaaagttaaaacgtagttcgggtgtcggatatattctaggatacttggaaagcttaaataaagtttgcttcgtcgatgttttaattaaatcaccttatgaaattttgtgccatgcttgtgcgttggttaaaacgtggccaggattgagaaagaaggagttgtgtgagctactacaagaaggagctaagttgttgatgaaagtcgaagttccaagctagagattacggcatcgaataaagatgatgaagagaatgatgaatctagaagcgacaactgatctgctcacaatgctggggttttttttgcagtcagttagctgttgttgggttaagtagctcgtcgtcccccgcgacgagaactgttttcggtctgatatccacggctctgagccagacctgtgtgcctcctggaaaaacctcgttacatccagtaggtttattttgtccccctaggtctacttttgatatgtttctatcacagatgagtgggtgcgctggtacccttttattttgtcgatatgagacaatctttactgttttgttatgcaaataatagaaacggatcctaccgtcgtaaaaaatgaccaaagtccataatggatcgatgaattagttgttgtttttgccatcaaacatgatatacgttaaaaaaactatatggacaaaagaagcaaacatactgctaagtcttttccttaccgaatcgaagccatgtgtgtcttgctgaatgtggattcccttgatgggcagggcattaggaaagagtggggtcaggtgatgtctccagctcagtgtcagggctcactggttcgccaagctcaccaactgccacggacgagtcacatcatcgtgatgagcgatattaggcttgccgggctggctggcgttgcgatgacgatgagcggggc

SEQ ID NO: 164535 - DNA, 508 bp, Zea Mays
ataggcgctggcgcgaggacacgtgatggactgaccgttagcggcggcgagcacgcgcgcgggttgggcaaacgctggcgtgccgaccagggtcgaacacgtgtgcgcgttgtttctgcccgagttctggcgcgtgtagtcactcgtccgggcctgcacttgccttggtcagtgcacaaaacctcttccccttccctcaagctaccgatattgtgtggtggtcaaaggatttggttgtatggatccagagatatggtgcactcaagtaggatctgtctcacagcccgagcccgaggcaaatccctggttttgtcgtgtctaaaacccgaatcccaaatcctgattttctttggggccctcggcttgagtggcttatttagggatttggcaaaatctttttgagccaactttcttactatcttttgtagattattagttgtattacaacttttgtaattggcccaagtcatgacaatgtgattttcttggtctttttgttgagtttctt

SEQ ID NO: 164536 - DNA, 546 bp, Zea Mays
caactcctaagagaaggaggatggtaaatgtgttagatattttagaaacaaccgactccataagtttcgctcccacggggagggttgccgaagctgacaaaacgcaacccaaagctgatactaagcaaatagaagtcgaggctacaataacccaggctggaaccgaggtagagcccacagtgcctactgagatgaagcttgccgccatcgagtagaaggccgaaggaataactccagatattaatataggttttgggaagagtgcggccaaagaggccgaatcccttgcccctgaagcactctccaaaaatcttgattatatcttttgacatgcttcaggaaagagattatccgaagaagaaatttttgaagctaaacactatgcccgagaactgaagtacccgaagggggccttagtgtttaacggcacggatgaagatgatttcttgtactgcctcccggacaacaaagaattatccgtctgccaggagatggccagaagtatgggttttccgaagctcgaagctagcctttgtgccatgacga

SEQ ID NO: 164537 - DNA, 432 bp, Zea Mays
gatcgtttagcacctggttgggttgtggaaccggctcggtaacgccaattcatttgccgccggcgatgcgccgccgcacagcttcgtcaccaccacgctcggtagttgggattggggaagaaaggagacggtcgcccgaccgttggatgcccaacggatggctataataggatagagggatcccacttcattcagttgaatcgcgcccgtcgatcggtggatgaacgccagagattagatcttaggttattttaaatctggcgcgttcatttggatcggacggctctccggacccgataccgcttcgctggccattttgctaaagagaccctggggatttctggaatcaacccgccatccccgtttaactgtttcctgagtctaggttatcttacgcaggggcccctgacattcctggaaagtcaggcccag

SEQ ID NO: 164538 - DNA, 707 bp, Zea Mays
gaattttatcctttggcctcgaagggatgtcaaattggttgatccaccaggacagccgtcgtcacaggcccaaccgtctccgccttctcaaattgctgttcctattgtacatccatcatcacctcctcaaacttcacatgttgctcctcatcctctttctgaccctccttctcctcatcctcatggtggcccaccgtctctgccacatacatcgcccttcagggatccaccttctccacaaccatcaagggatccacgaccatcaaaaaaatctaaagtttctataccaaaattagtgtccccgttcgagaagaaaaagaagagtaaatccactgctggcacagctcgttttttgaaagggattggacggagcctcacgtcagacactgttgatttggccgatctcgaggagtccgcaaaaaggctgaggcaatggccgcaaagataaagaagccaactaaggcagattataaaaacgtgcctaaaaaatacgtgtcgggcagaccactactcacttttgagaaactaatgaaggtcccggctaatattaaaaggttgcatgattggtacatgcgggcatcttcagttggcatcgacaccatcagtgtcaatataccagcccatgcttttattggttcaaatcaaaaatcctttgttacgttcgaggacatgtggttaatgatgaaccttcagagactcgacgtgca

SEQ ID NO: 164539 - DNA, 1392 bp, Zea Mays
ttagaaaaaaaaataaagtccctctattcatggattctagaggctgtagatcttagggaaagcccctgcaaattttttttgaatgacaattgaaaaataccagtttatttttgctcccaaattctatggagtgaaaacttctgccatcttgatttgatgcagggtttctccgggatgaggaaatgcatcgtttttatcattgctccctgtttcaccgtcatacctagtttgataatttgcagtgttgctggtgcccctcacgttcgacaactcatcaacgtgtctgcggtaacttaaccctcttctcgtcatagatgaataatcagtatcagtagcggcgtagaatgctaatagctattgttcatcttgcagatcatcttagcttttgtattgccattttccctagttcccctcctaaaattcagcagcagttgcgcggtgaaggtaccatacaagaactcagcttgtgtaagctatccaactcaatggattactataccatttctctatgacattcatgataaactaataatggagatgtcgttgatgatattagcatacaacaacaccgatatatttaagctatctaattgaattgattattatgtgatttctccatgacattcatgatcatcgctagtattgtttcactagaaagatcaggagaactaacaaatggatagttttacattgaatttagaggaaaacatgataaaatgtgtttatgcattgactgtttctagatcatttcctacaagtggaattgtgcttagaaaaaacttaaactttattatcaaatatctttacctttgtttgcatttgttaatgtggcataacttttgttatttgatttgttatacttacaccaatttctgtcttcacttctagattgtccaagtcgcgtggattctctccattgtaattatggggatcaatatttatttcttctgcaatagcttcataagttggcttgtgcacagtgaactcccaaggatagtcaatgttataattagcacccttgtcttccctttcatggcggcatatattgcagctttaatctacttggctttcagaaaagttaatgctgctggcatattcccttccgtgtcagcttccactgggactgaagtagaagcatggaggcaagatggcaacattgatgatattggtgtacattgatatgtttgaaacacagtatataaatatactctttcattaaaaaaatattttgttcatacaccacacattagggaagacgtcaaaccattattgaaagatgtatatagttatacatatagttttatggttagatttgttgtccctttaggaatgtagtataagcaatttaagttttttttttatctacggtggtatctaatataaggatttatc

SEQ ID NO: 164540 - DNA, 575 bp, Zea Mays
ttgtaatagtgtagatgcccaaccaagaagggatgtggcgacattgcaaaacctcgctcatgaaaatgaacgaatgacatcatgaagcccattggcggcttggggatgacctcatgcctaggaagcttcaaatcctcttagcgaagaagaccttgggcaatgagggcatccaggtggctttgctcgatcctagagcgattctagaatgccatatgttacaaagggaggaagtaatgggaagacaagggcgaatagagggtaggaacattgaagagctcggaaaggcgatgattacgtggagaaagtggcttagcgttaagaaggtgtaagagcaaccaaaccagcgaggctcccaaaccaagaacgactatctctctactacttggtcacctgataaggctcatgtcctagtaagcatcaatgcctaattaaatcattgccaaccattagtacatggaatgaagaatggcacgacatatgcatgccttgaccaagcttcgaggcacggtggccaccaacttcagctcaggtaggaggtgataattaccttgcgcgactggctcgatggcctgacc

SEQ ID NO: 164541 - DNA, 576 bp, Zea Mays
tgaattcaagcttgaattgttgagaatttgatcaagattgctgtgacaaagttgtagctagtttgtcaggctataattttggtacaaagagctagcttagtcaccacacaaaattgggagtaaatcatgctccaaatctctctgtcagttcatctaataggagatcaccatggtacagtaaatgttcaactgcagaagatcccaattccaccccctactcgtcgccggtagcccatcgccgttgatcgattgctcgccgtgattcgtgcgccatggccatcggataagcacggctcagtaagaatctcggcgtccgatccacttgcgctcggattgcggctaagcttgccagaccccccctccggccgtcggtcgaccagataagtctcaccgccgtcgagctgccgccattacccgccacgtgccttagtgctggacttcaccgcggtgactcaccgaatgcatgtccggcgatcaccggagccactgccacggtgaaagccacttttcccctgcactgagctcatctcccctctccggccgccaccgcgccatcatcaattcaagcaccgccgc

SEQ ID NO: 164542 - DNA, 4843 bp, Zea Mays
gccaacggcggtgagtaccgcggcgtgagggtgctcggcggtgctcaccctccgaccaacttggaacacaagtttgtggagcaggtatttctatttttcttttctgttcgtctctctccacgaggttcaccttatacaagtcttaacagaaagccctacggcctgacagtggaccaacattattacaaatacgtaaacgacaatgaaacacgtattacacttatgccgtaactccggtgatggttggcgccggtgttacatcaccccctcctggaatggaagcttggccccaagcgcttgaatcagggaaacgagcttgcatcaccgtccagtcttcccatgtagccgaatcagctggaagtccttgccattgcaccagcacttgtacaatagccgcgccacctttcttgaccagtcggcgttggagaatgcattgaggctgcaggtccctttgagtaagatcaggtatcttgggaaagtcagcatatactggagagtagtcagcagtatagggcttcaattgggaaacatgaaaaacagggtgcaccaagctcccagccggtaactccagtttataagctgccacgccaatcttctgaagtattttataaggaccaaagtatttgaaggccaatttaggaaagggtcgactggccacagaggattgggtgtaaggttgcagtttcagaagtaccatctccccttctgcaaactgccgatcaatacgcttcttatcagcttgaagtttgatacgagtttgtgcagccagcaagttgtgtttcaataattccagatgaagatccctttccttgatcagtgagggaagatcagtagtggaaacatcagccagcacaggaaaagaaggtaatttcggttcatatccatacaatgccttgaatggggagcattgcaaggatgagtgatacgaagagttgtaccacagctcggccagaggcagccatgccttccacttggctggagagttgtagatagtgcaacgcaaatacatctccagacattgattaacgcgttcggtttggccatccgtctgtgggtgatatgctgtactgactaacagctttgtgtccaacagtttgaacagccctttccaaaaggcactagtgaaaatccggtcacgatccgagacaatagaagcaggcacaccatggagtttaaccacatgagtgagcacggctgaagcaacttgattggcagtgaaagggtgacgtagaggaataaaatgggcgtacttagtgagacgatccaccaccaccaaaatgcaattgaagccatcagagcgaggaagaccttcaataaaatcgagagagatgtcttgccacacaccttcaggaataggaagcggctgcaataatccagctggatgagacttttcatgtttggcatgttggcaagtaggacactgcttaacaaaagaatcaacatcctgtttgagccctttccagacaaacattcgtttgattcggtggtaagtcgcatcaataccagagtgacccccaagagcactagtgtgacaagcagcaatgagtttggtcttcaaagcagagttatgaccgatccaaatcagtgtaccaagccggatcacaccatcaaccaaggaataaccatcagcatttggactgtgcacagcaagctgctgcaataaatgttgggctgcagaatccgtagcataggagttaataacctcttgaagccacaagggttgtacagaagaaatggcatgcaccgacatgtggtgattgacgcgggatagagcatctgcagcaatattttcagaacccttcttaaacacaatcttgaaatggagacccaacagtttactcatggctttcttttggagctcggaatgtaagtgttgagcatccagataacacaaactctgatggtctgttcgaatgatgaactcttggcgttgtaaatattgcctccagcgatccactgccataatgagggccaagaattctttgtcatagatagacaaatacttatgtctgtcgcccaaagccttgctcataaaggctactggctggcccttttgcataagaacagcaccaataccgacagcacaagcatcagtctctaacacaaaaacctcattgaaatcaggtaatgccaacactggggtacaagacatagcctgtttaagagccataaaagcctgttgtgccgcagtatcccactgaaattgctgttttctcagaagattagtcaatggtttagccaacaatccgtaattcttgacaaatttgcgatagtagccagtaagacccaaaaacccacgtaactcagtcacattagaaggtggcggccaatcctgcatggctgagattttagctgggtcagtagcaaccccattttctgaaatgatgtgacccaaataatgaagctggtgttgagcgaaggtacacttggagggcttgacaaaaaatttgtggtgtcgaagcacatcgaatacctgctgcagatggtgcacatgcaagtcaagagcggggctatataccaaaatatcgtccaagaaaaccataacaaatttgcggagaaagggttccagaatatgattcatcacacactgaaaggtggctggtgcattcgtgagaccgaagggcattacacggaactgatagtgtccgtgatgtgtcttgaatgctgtcttatgttcatctgctggtaacatacgaatctgatggaacccagcccggaaatcaatactagaaaagtaacgagtaccagcaagttcatccaaaatttcatcaatgatgggcataggaaatgtgttcttaaccgtcaggctgttcaatttcctgtagtcgacacaaaagcgccaactaccatctttcttttgcactaagagcaccggggaggcaaacggacttgtactgggtacaattaagccagctgccaacaattccttgacctgtcgttcaatctcgtctttatgtaacggtgaataccgataaggtcttgagttgacaggtcgagaatctggaaacaaggaaatagcatgatcgtactctcgctgaggtggtaactcaagtgattccccaaaaatgtcctgataatcttgaagcaaccgagccactggctgtggaacatccgtaagtggaaagctagacatagtattaagtatggccactgaccaaatatcattgcccttgctccatttcagaaattgttcagcaggcaactcttgaagatgaagctggggttgagaaacacccttaagagtaaccactacccccatatcctggaaggttagagacttagcattccaatcacaaagcatgggactatgagatttcaaccaatcaaaacccaaaatagcatcataagcactgaggtccaaaactctcatatcatgcgtgaatgtgtgacctgctgtccaccactgcatatgtttcaccacagcatcagaaattagtgtatctccattagcaaccttgactgtcagcggagataaagcagtaataggtaaatgaaggcggttcacaaacgaagaattgacaaaactgtgggagctacccgagtcaatcagaataaggaatacttgattgcccaccaatgcacgaacgcgcatggaatcagcagattcagtaccggctagagcgtgtaaagacaactggcaaagatcttggactaagacatcttccatctccaactgattgagagtttcttcagtcagggtctgatccaagtcattcaccgccagtgcatgcacctgagccttaggccgcttcagacaatgatctgcatgagtagcatcatatttctccccacagaaataacaaagtccattagcccggcgataatccctcaactgtctttccctccacaagccagaggatgaggcagtagacgatttgtcagatttaggagtggaagaatgatatctgggtgtaaaaggtctagctgaatgcactgaggacctctgtaaagactgctgctggagtttggccaagaaactagcccgagcaacagttgcgggagcttgggaatgaaccacccttttaatatcctccttgagacctttcacataatgagaagtaaagaacagatcatccaaatgtgggttatgcatggccacctgatactgtaaagaggcaaaactttgagtataatcctcaacagtaccctcctgtcgaaactcaagtaactcatccaaagctgtgtgatagtcataggtaccaaactgatcaagtactgcactcttaagtctaggccaggctacaaacccatgctgtaatttgaaaacctggtaccacttggcagcatttccctccagatgtaaagagacagatgaagttttcagatcatcactcacattatatatgcgaaagtattcctcacacttgtcaatccagatcttaggatgtagaccatcgaaacgtggaaacgacattttgggaatggaggattgctgttggtatacctgatcatcatggtggtgacgaccctcagggcgcagccggtgatgaggatgacgcggacgcccggtaggcgcagaagcgaaccagttctcttcctctgcatcggatctgttggagactggagaagaaactgcatccatcttcatttgccacatggtgaggcgcgccacagcgtcacccgtagccttgagttgctgggacaagagaatttgatcctgggtactctggttcatcgccttcgctgtgagatcaatctgagccgccatctgctgttgcgaggtgtccatggaacggatctgcgcaaacagcagatcgagactctcctgcatcttgttcaaccggacgtcctccttgtgtgtcgcgtccgccatagcgtcgaggagcagctgggtctgcttcga

SEQ ID NO: 164543 - DNA, 491 bp, Zea Mays
gcacctataaaggcaagatatgtgggaggagatgcgttaggagagaatggagaaacagcagcaagccccattgccaccacctacaccaccacttccaccccgggacaagcaccaggaatttatgagccacaagccgcctaccttcgccagctctccagattctctacacgtcgacgactagttgaagttagtagagaagatgctaaacattgcccaatgctccgaccgggagaaggttctctatgcttctggtcgtctgactggtcctgctgctgattggtgggattcttatgttgctgcccatgacgctactgatactattacttgggtggaattcaccacactgttcagaaactaccacattcctgctgggctgatgaaaattaaaaagaaggaatttttgtgattgacgcaagacaacatgtcattcagcgagtaccatgatagattcattcagctatcaagatatgctcctaatgaggtggctgatg

SEQ ID NO: 164544 - DNA, 779 bp, Zea Mays
gccggagtcaccaccaccgtccttgtagcctgaacgcagacggtgtttgttcttctcaagccagtcctcctcggcgagaaggagtcgtcctgccttatcgacgaggtgttcgacctagtcgtcgaatcgatcctcggccgcacgcagacgccccaccagttcgtccaccgagagctgcttgagatcacagaacatttcaatcgtgacaactacctgggtgaagcgcgccggaaccacccgcaggaacttcttgacgacgcggacatcttccacgacctcgccaagtgctcgaaggttgccgacgaggttggtgattcgcatcccgaaatcttcgaccgattctccgtccttgaacttgatgttctcgaactcttggagcatcttctgggcgttcacctccttcacccgatctgcaccgagccgcatcaacttcactgcctcccacgcctccttcactgtgctgcgcgcgccaagagactgccacatctctttcggcaccgagcgcaggagcgcgctcatggcttgacggtcatgcgccctcttggggttgatacctggactgatcacatcccagatctccagcgcctcaaagttacactgcattaacatcgcccactcggagtaattatcacgagtgaggagtggccacatcagtgaactctccttcacgccgccaccggaacctgatgcttgattcatggtgttcgacggctgtcgtcgagggagaacacgcttcttcttcgccggttctcgaggagggctcaccgatccgtcgtatg

SEQ ID NO: 164545 - DNA, 769 bp, Zea Mays
atctgcccatggcagctgtgacaaacttgtagctggttggtagctctataactttgctacagagcttggtatgagttaccattgaaaattgagagaaaaattcagctccaagattgcttgtgaggcgctctgaatcggttctcaatggtacagtaactgaaatggatgagatcgccagcgcgactgtcctcaccgccgacgactccctccgccgtgattcgtgctgccgacgtcgcgattcgtgcccagggtggatggatagcgtcgcggggtgaaagatcttcgccgtcggtgagctggacgccactccggctagccgcggtacctcttccctttctcaccgcccctcggattagaatctcaccgccattgtgctgtcgccgttgtccgccgcgtgtccaagccttgccatcgcaccgccatgattcactttagctccccgttgctcaccggaatagctgccacagcgttgaacacgtattcactgcgccggtattcttccttatctccggccgcctgcgttgctcggccaaattgcacgccaccgtcaaagctccctataaattgagcccgcggttagctacgctacatcatcacgaaaccagagccccaatcccaccctcaatcattcgccagagctcgtgaatttcgaattctccccaaactggtctccgccaccgcatgatcaagctcgccgtgaccagctcgattcaggttagctcgagtccctctgctgcttgttctagcatccttaggtaccccgcaaacc

SEQ ID NO: 164546 - DNA, 1406 bp, Zea Mays
ggtgagctcacagcctatccataacggccttttcgaatcttcaagttgtgtataaaactgttgtgcttcaatattgggtccctgggccgattcttgaccttcagtcataggtgtgccatcatacagatgtccaagggcatcttgaatcagctggtcgacatcaacatgcctttcatcaatatgtgaatttggttccgaactacttgtgtgttgcactgaattatcaccatgaaaattccattcatcataattctcaagtatcccattgcacaccaaatgcccatacatctcatctcttatctgaatagtagtgtgcacacatgtctgacatgggcaataaatcttgatgccttcagctttatctttaaatgcaaattcaaggaacttctctacaccagctatgtatggatcagaacctttaggataatgtaaaagacgcttgaccaatccaatatccattccaacactgggtaaaaaatgttcatcacgatgacaatgaaatcctcaacgttgtcgtagtagctgttacatatgacggaacaaggtgggaagtgagagggaggaacaagcgggtaccttgctagaacgcttcacatggatagagtaggccttaatgaagtcgtaggggatcacgtcttcgttgcgcgcaccatcgatgtcacgatcctattcctcctctcctctcgctgtccactctatccttcgaaaggtggtggcatgcgcgtggacagcggccagcgggggcgtcggcgtgggtggtggcggcaggtgcttgggcgtggacctacctggggacggcggcccacgagggcgtgcaggtgcttcggcggcggccgtgggaagacctaggggctgcggccagcgaggacgttagcgtgggtggaggtagggaggtgctcgggcatggccgtttggcgcgcagactgagggcggacctggggcggcggtggtcacacgtacatcaatctggagaggcttgcttgtagagatttagcgtttgtcaggattctataacaaaatatgagtgtaacaactaaacgtacacattaataaggttcatttggttagtgagtattactttggtggaaggtgtaggttgtgagttcgatttctcttgaagacatgttttttgcaaataattagagatatgacaaatgttttaataagtgaaacacaatgacaataagataaaataaatattttaataaataaaacgatacaaagtggactaaaagactttgtattgttatcaattccccccactttacacattttttgcgcaatttagcatccccaactacaatgctttagttaaaaataaaaggcacaattgcaaaattgctaaagtaccaaaattaatctacagatacggtttgcaacgcatgtaaacgttacaagcattctag

SEQ ID NO: 164547 - DNA, 747 bp, Zea Mays
ccataagtgcctacaagtaccagagaaccacattgaggcagagacaattcagattcaaaaagatctctagtaccgggaaaagccaataaagattcttgactcagcagtccgaaagactcgcaactcagaagtaagactctgtaaggttcagtggagcagagaagaagaggaagctacctgggaaagtgaggactctctaaggagggaatacccttaccttttctcgagccctgtctgaatctcgagggcgagattcctttaagtggggtaggtttgtaacatcccaattttcaacccgaggtttggaaccctaatccaaccccccttatttttttatctctccctaatctcccctaggtctcctcatcatatgcatacactttgtttgattagaagcacctcacttagattatatttttagcacctaagattatctagttaattaattgttcaaaagaaaaggatataaaaatagaaatagaaattggaaaaaaaggagaaacctttctctccccctggctggtccgattcccagcccacacccgcggccacttccccccttcgcgcgcgcgacttcccctcctcagcccacctccggcccactccgcgcgcgtgacctctcccgctgacaagctgtccccactcgtcagtcgcctccccctcgccatcgctcgcgcccgcgcaccgctgacaggctgaccccgctagtcagccaccccatcccctcgccgcgtacggcttcaccgc

SEQ ID NO: 164548 - DNA, 580 bp, Zea Mays
caaaatttggtgaagagacatcttccgctgccgaagcggaacaagctgctcccgccgcttggagcgttgaggaatcgactatagtgccaaaggtgcctatagttgagcgagtcgaagccgaagatggggcagccaaaaagccaaagtttgaaaaaacaatagtgctgccagaaattatgagcccaccggtagaagcagaattgccgaaggttgcaaaagctcacgccacgactcccaagaggagaagaatggctagcgtactagacgctgtcatggggacgacaaggtcactaactcctacccctatgaagatagctgtcaaagctgtagcggttcgtgctaaaaccgaggctgggccctcagcgcccgcggaagcagaacctgccgcaactgagcagggggcgaagaagagtttctagatgctagcatagctctggagaagaatgtagccgaagaagccaaatcccctgctcccgaagcactgtcagaagatctcgactatattattcaccatgcttcggggaaaaattgtccgaagaagaaatttcagaagccaaacactatgctcgggaactgaaat

SEQ ID NO: 164549 - DNA, 344 bp, Zea Mays
gcatttgagaacaagtccccaacaaatggttaactctgaattcccttcgtccattactgcagacagtaaacaaattggataaggattttgctgcccacttccccacaaaacagctagtatttgatatttttccatagaaagtgggacctctagcacttgagccatgcaccagatccttatctccatcaaaattcacaagcgacaccagcagggagggggtaatctttttcaggttcctagaagcagcacaggttgactcaaacagccatcactgtcccatttacccacctccttgcatagccccttttatctcacactttcacatagcagcagaccaaaccttc

SEQ ID NO: 164550 - DNA, 654 bp, Zea Mays
gcctagtgtttgaccattcacttatttcttgcttcacttttgcaagttcaaaattttcattagcttcggcaagctttttccgaaggtcttcaacttcagctttatgagcttcggattgagcgttaaattttgcttcgtctttcttcactttgtccaccaatgaaagtagaattttatctttctccaaggcttcatttctcagcttgataacttctgaccgaaggttgccgagggctatctggcagttttcatcttcagcattcttctgcgccctcaaagcgttgctaagaattaagccctgcaaaaagatagaatcagcacgagaatacaagacaagataatctatttttaagttcatcacttccgtaccttcagactgttgtacgcaaggctgtctgcgagatcatattttgacatgacggagaggccaactacaagcttcggaaatcccatatttttggccatctcccggcaaacggatatttccttattatctgggagacagtataggaaatcatctttgtccgtgacattgtacacgaaggcccccttcaagtattttagttcccgggcgtagtgtttggcttccacaatttcttcttcatataacttttttcccgaagcatgtcgaataataaaatcaagatcttcgga

SEQ ID NO: 164551 - DNA, 620 bp, Zea Mays
attcttttgtcgaagaaaaagaaagaaaagaaataggggctagtactaacccatgatcaaactcacgccatactaatgaccatgcacacactaatcaataggctaatggctgcatgtgacgggaaaaatctaaaaaaaatcttttcatctctatcgtcaccgctcttcctctctctctccccttgatctttttcaccgtgcgtgctttatctcctgccgtgtgctcctttaaattcccacgcccagcaccctgctcccagccgcgtctctctctctgcctcgtcaccatgtgcacgctcctctcccatggccgccgtggagcttccctgcgcgcgcccagcccccagcacgctggccccagctcggctctgccctctgctcggtcttctgctgcccctgttcatcagcgcgcgctacctcgtgctactggatcgtcagccagcaccttgccggcgtcctcccaacgctcctgcaccagacatcgaatcccggcgcgtcttcaacaccggtatgcgtcgctgtccgtcctcagctcctactctattgccggtggcagcagccatcgtagtgtctggtcgctgtcgaggctccccggccgatctttggtgctcagcctcgcc

SEQ ID NO: 164552 - DNA, 581 bp, Zea Mays
ggcgcggttttggaattacacccacagtgcgatcgtgggcgactttgggtagatttcacgggttcgaccgcaagtgagtttttgctctacctggcctgtttccatatctacagagagcagagagcagagagcagagaggaagatgaagagagaaaaatagagtcgcaacaggaatccaactaagattagtccaataccgacaggaattagcacaagtatgagagcatattctacactacatgcctaactacgtatacttattgcacaacgcaagatgagcaactcaagttgtcgtcctgctgatcctgcatgcttgggcaccaagctgaggaaccgaacaaggcaggctgctgctgttgcctctgcatctgcatctgctcgccagtcagtcagtcagtcagccacgcgcacgctgggctgctggttggccacacctttccggtctagtttccaagagtaccggtaggatacacctagtaacctggaatggaagcctggacgcgaccgcgcgccagggacgatggcttggctagtgatggcggcggccgcaagcggcgactaagatttggtgattagtgttg

SEQ ID NO: 164553 - DNA, 890 bp, Zea Mays
tcgtcacttcctatttcttgactcaacagaccttatttggagtcaatactgttttcttttgtttacatgatttttctatatgcatctaataatgggtgtgcccaatgagtatgtttactgtcttttccaaaaaaaaaaaaacagtattctgagttgaaacaacgacataatgcgcataaccgacatctgatgttgtgtttgtcagaaatgtgcggttccttcgaaatttggcgaggatttggtctggattggccccacgccattaaaaatggtcgctaaacatgtcttgagctttatacatgggaacccatcttctactgcatgctgcacccaattgctactcccttgtgtgccccgtgcggtcgtatgtcgtccccttcgttggtctatagctccatgttgcccccacggcatgcacgttcattgtcccccatcgcggcatgtgagccacccccaccacgtgcacatgtatcgcctccctctgcctggttgagctccaacgcccatgcctaggcatgcagtgtcttctagtgcctagctccccaaatctctaggaactagtgtcgtcttccatagcctgttggtttcagcgtgcataaacaaaacatgattggtcactgggcatatcataccactagtagtttaatctcctagtttgttcctcgatgcaaggtcgagattaacatgttgcttttagtttttaatcacgtgatctataatcgaagaacgtcgtatgtctccttgcgcccccgatcatgtagacatcgtcggccatgcacgccagcagccaacttcgtgccccacccatccttgttgccccgtcatctgctttgcttcaaggcatacaactttctctgtactagaattagaatgcaaatgttgtgaatgtg

SEQ ID NO: 164554 - DNA, 764 bp, Zea Mays
gctagagctaggggacccgacagggctaccaaaaatcttgaacccggtaccagagctggaaccaccgaaggtatccaaagctcctgctataacttccaagagttggaggatggccagtgtgctggacgcagtcttggaatcgacaagggcgtaaacttctgctcttgcgaaggagactgctaaagctactacaattcgtgctgaagtcgaagctgggcctttcgtgcccattgaaacagggcctgctggagcgagacggagtattgaacaagaaccttcggatgtcgctctgctcttggaaaaagaagacacgcccaagtaggttgaatctcctactcccgaagtgtctactgaaaagctagactttatcattcgacatgcttcaggtaaaaaattgtcagaagtggaaattgctgaagctagacactatgcccgggaactaaaatatccgaaaggatccttggtgtataatggcaccgatgaagatgacttcctgtactgtctcccggataataaggaaatatctatttgccgggaaatggcaagaaacataggatttctgaagctcgaagttggcctctctgctatgtcgaaggatgacctcacaaacagcctcgcttacaatagtctgaaggtatagaagttgttgacttatgagcagattatttttgtattttttacccttgtgctgaaccttccccccatcttttttgtagggcttaattctgagcaacactttaagggcacagaaaaatgctaaggat

SEQ ID NO: 164555 - DNA, 1055 bp, Zea Mays
caagccctcttgcttggaccattcggtattgcgcccttcgaagcatgctagtccccaagcaggggccaaaggaaagctttgacgaagagcttattgatcttcccatgtagcgagatcaggcgggaggccagaccattccaccaggacctgctgaaccagctagttgcccttggataatccttgagtctggagtactcggacaggaacgcggagctccggcaaggatggtggaagcgaggaagaagccacccctttgaaacctgcagcaagttttagttgtgatacatgcactacagggtgtatacgacagttatcaggaagttgcaagcggtaggctacagctcccacacgatcagtgaccagatatggtctgaagtacttgatgctcagtttatggtgagagcgcggcatgacaaatgattgagcataaggttggagtttcaagtagaccaaatcccccacatcaaatgaacgtttagatctgcgctgatctgactgcttcttcatgcgggcttgagcgcgcaccaggtgttgatgtacaagctcttgcatcaaggatcgctcttgcaaccaatcagagacctgagctggtattttattgttgacagaaatgcccaaagtgcgaggctggcgaccgtacaatacttcaaagggggaacgaccaaaagcggagtggaggcttgtgttataccagtactcggccaccggtaaccaatccttccattttgtgggacaagcattggggaaacaacggagataggtctctaagcactggttaacccgctcagtttgtccgtctgtctgagggtggtaggaggagctcaacttcaattcaatccatgttaatcgaaacagatgctgccaaaattggctagtgaacaccagatctcgatcagatattatcaccgagggcagctcatgcaacttgtaaatgttggacatgaaggcttgagctacagaccgagctgtgtaagggtgactaagacgaaggaagttgccatactttgtgaatttgtccaccacaaccaaaatgtagtccacatgctgcgaccggg

SEQ ID NO: 164556 - DNA, 1275 bp, Zea Mays
agtctgactatctctttgagataaattcgggcaagggtggctcctccaaaggtagttttcactgggatgaaatgggctaccttggtaagacggtctattattacccagatagagtcattccctttttgcgtccggggtagtccggttacaaaatccatgcctatttcttcccacttccattcaggcactgggaggggttgcaataggcctgcaggcttctggtgctcggccttcgttcgttggcaggtgtcacatcgggccacatactatgctatctccttcttcatccctctccaccagtatatggctttgaggtctaggtacatcttggtagttcctgagtggatggagtaggctgagttgtgagcttcctcgagcaggacttctcgtgcctccccttttggtacacacagacgattcttgaaccaaagggctccttgttcatctgtcctgaggtccggaagttgttctttgcgagctttttccacaagtcttgttgtctcttagtctaggcgttgagctttgcatatggggtcttccagcattggtttgactttgaggctgtcgttgtctcccaaacatgcattcagttgagctgattctttcttccaatcttctaaaaagttggtcccctttatcccgaagggttttcggctgagggcgtctgctaccacattggccttaccggggtgataatgaatctcaaggtcataatctttgatcagttccagccatcttctctgacggaggttgagatctggctgcgtgaagatatacctcagactcttgtgatcggtgaagatgtgacatttgttcccaattaggtagtgcctccatatcttcagggcatgcactatggctgccaactccaaatcatgggtgggataattccactcatgcggcttgagtaggcgtgatgcataagcaatgactttctcattttgcatcagcacgcaccctaagccttgcctcgaggcatcacagaagacgacgaaatcctgatgtatatccggtagtgtcaaaacgggtgcggtcgtgagcttctcctttatgatctggaaactttcttcacacttcggggtccacgcaaacttatggtctttcttgaggagctcggtcataggtcttgctatgctggagaatcccttgataaagcggtggtaatatcatgccattcccagaaagcttcgaacttcactgacgttggatggttgcctccattttgatactgcttctaccttggaaggatctacttctattccttctgcagtcaag

SEQ ID NO: 164557 - DNA, 515 bp, Zea Mays
caacagagcagcgagggcaacaaaaatgtcacataggctcctccttcggaataagacccgccccccttaaaaaagaacaacatcaacctcagctcttccccctcaaacaggtcccgcatgtccccttctccaatgcacgcgctgagtaccccgatccaatcgcggaccaccccgaagacgggacctttccatacccattcgacgacgtcttcttccacttcgtgacgactcaccagtgctctgttttgacacacccattcattgcctttgcaagtcttcaactctcgcatcagtcgaggtcgccaacaccttgcgagggacagatcacaacggagactccgaagcagccaaatccaacgcagcaaaataatctaggtagtccacaaaagattcgtcaacccacgagaaagggctcccaaattccccttcatccgaataccacgacccaaactcagacccctcagacacattgccactaataaacgttgcatttgcatccttcgaaacatcattaa

SEQ ID NO: 164558 - DNA, 429 bp, Zea Mays
caagtggatcgaggcaagggcagtatccataataacgtcgaagactgcacaaaaatttttctggcaaaacattatatgcccattcagagtcccgtctgagctcacagtcgacaatggcaaacagtttgacagccaggacttcagggacttttgtgtctccattggcaccaagctagcctttgcctcagtatatcacccacaatctaacggcgtcgtggagcgcgccaacgacaagattttcactgccatcaagaaaatgcttctcgacgacaagaagggtaaatgggccgacctgctacctgaagcagtctgggcgctgagcacgaccgaataccgagcgactggattcactccctttcgcctgctatacggatcgaaggccatgaccccgcaggaaatcaagcatgggtcaccacggacaagcgcttc

SEQ ID NO: 164559 - DNA, 419 bp, Zea Mays
ccgaccgccgcgcgtcgtcgctcaaattctcggccaccgctcgcggactctataaattgaccgtgcccccagctcagccatgtactcaagcagctgctgcacccacctgcatcccaaatccctcactagcgagcacaaatttcggattctccccaatccggttctagaacaccgtgaactcaatctcgtcgtggccagcactattcaggtccactcataccatcttcttccccgattaagtacactcataggtctacaatgctctccgacccacgtaattgcgctaggagctctctggtcgccgggaacacggttgtctcgccgtgatgttcacggccaccgtggccagagcaagccattgggccatagatggaattaggttaggggaaatgctcgggataggtctgatttgatgtccg

SEQ ID NO: 164560 - DNA, 789 bp, Zea Mays
agcaataggacatacaacataaattattggattgatttgtctcgtcatgataaattacgcatctccgacaagaaatttatttctataagtgagactacttaaattacttagataaaatattagtctcacttttctagctatagagagaattttccttttataagtgactaagtgtttgaattccttacaccttattcttttaagaacatgaaatatctctctatatctagaacatgacaataatagaataattagtgtaaaccatgccatgggaaaaagcaacaattttaaagcatgtagattgtcataatatagaaatgaagaatatgcaatctaccatatgagaagaatttcttcaaagaatggtgacataaatttaaaaacatcttaagtgcttcctttttctatgtgactgcacaagacacataagaaatgataatttaagatacttgcacttaaaagcataagtgttaccatcctttgacagtcctctacgttgtaggtcttgattttccgcacatgatgattcttcaattcctacaacatcaatatcttctccgagatgatatgagttttgaatacaataaattgaagtaaccttgggtcaatcttgaatatgtagatcatttgaagattgatagcttgagttgataagaattgaattaactccctcaagcaccccaaggtttcataccatctccttctcctacaaagcttgtcaagcacattttggtacccatcgcttgatgggtccgttaaggttagtaaacaaagatctaggaacccaag

SEQ ID NO: 164561 - DNA, 479 bp, Zea Mays
ggcgtcgctgaagtgtgaagggccacttcacatcagtagtattaagggcaatccttggtattaagacttcttccccaacatttgatcctgtaagcgctacacagtgcaagatgcgttgaccgagttcagtgacaagaagccttgtgccattacagagacccttattttgattcaggttgcgcaacaacatcacaatggcacccttttttagctcgagtttgtgggtaggaaaattgctcgcatcaattgagtttaagaattcagtagggtagaggacatcaaagtctggtatgtgttccgacgattttgctataacgtcacagctcaggtattgtatggtttctctagggacaagcgagagaacgtatttgttaacgtcatcaactgttgcattatttgggcaaacaatggcacgcgaggaaaggtacgtgggatcttggtaattcaatagaaaatttgggtatacttctgatacaagg

SEQ ID NO: 164562 - DNA, 840 bp, Zea Mays
acaatttcccttagcacctgcttggacaagctggtgctcatggagggggcgatgccagtaacaccaaaggcaagacagatgacccaatacaacatgagtctccacccagcgggaacgcagaaaagaaccaggacaaaaggcccaagagtatgctaaagcccaatgtcaagctggcaggcctagaatgggtgaattgatgtattggcccatgtaataattaagctacttgtactgctcagacgtgggagaaaaggataatagaaaagaagaaaacacttatctgcctacctcctctcgtgctcaccttcttcctccccatgcatcctctccccattccagtagatctaacagctcgtcggcaaggggaagtggtgggggtgcacgaggggctccgcgtgcacccatgggtggccgcagctgggctcgcggcgtcctgtggtgggtgggccacacgcataggcagcgatgccgctctgcgtcggcgtccaggcttcgctggtgacagtttggtacggggaagaggcgctggagacactacgtgcgacggggaagacaatgacaacgtcaatttgagcggaggaggagcggaatggcacggccgcggagctctgtgagctcgttaatggcagtggcggcatgctgttgtaccaggcgccaagaaggaaaagaacagagggctctacttggggagggagaggcttgcgcaagggaggagcaggggctggcgtgcggggctttaaaggccgtagaggtctccaccataggcggacaagggttgtgcctgcagagcttgctttcctttgggacaaagcgacgaacaagtggcgggcgtcactatag

SEQ ID NO: 164563 - DNA, 613 bp, Zea Mays
gattcttcaattttgacataggaaaaacttacttgaaatcccaatatattgatccacttggatcaggaacgccagcattgtttgtacgttgatagtcttcaccccaattgtctttcaatgtggttatactcaacccagtgatcccccctacattcaacagtaaaattcagcacatggagatgaaaacataatcaaaaagtaaaaaaaatgagggtacctacttggagcattatgccttggtgcaatgaagacaccaagataaatgcacagcaaagagaacaggactggtattaagaaagcaggtgcaaccttgttgatgattttgacaccaccaaacacaataaaacacagcagtatagtcacaataacaccatacacttgaagatcatgcaagctgggtgtagatatagttgacgtgccagtagtttctgtaccattcactaatgtattgttgacaactgttacactctctgcgtttcgaaacaggtataagattagtccacacaaaaatcagaaacaggtacaagctagtcctaacaaaaatcagaattagaagttatgtaaagcaattaatatagctttcgtcacttcttttatttagttccatcacaca

SEQ ID NO: 164564 - DNA, 483 bp, Zea Mays
cggcttgacaatatctaattgtctcatcacctctgaaataggagctatttcaattatacctgtagcctcgtcaccagcggtcaacctagcagtagaacgaactctaggtattagtggactgtcgaagcttttttggacaggctctgagtgagaaaaagagcttcagaggcactaaatctttttgcaatagcttggagcagaagcaacaaatgcagtaagaaaccctcaaccactgagccagcttatatagctcgataagcagtgaagacgagcagtctcgttatccgcacccactgctcggtgggccgacatggaacattttttaccacacactcgaggaagatgtttttcggaccttcggcataaaagcctccatatattccacaaaatgagctcgttctaaaaaacaaactagcactgcgaaggagctactgtcacacccgagttttaggtgcaccaaacccgggcgcgaaataattcacc

SEQ ID NO: 164565 - DNA, 948 bp, Zea Mays
tattgagaagaaattggagaaaatttcaaccaaagatgggctgtcaggctggttgaattctgaaattcagactgacagtgcaactacagtgactttggacatgaattaatgcatgattgagcaagaatttgcttagtattgctataacaatgttgtagttggatcttaggactataactttgctaaagagtgtcgatcatgttattacacaaaaatgggagtaaatagctctgcaaatcgggctgtcagttcatctgaatgaggaattccatggtacagtagccgatcggatcagaacaccagctcagctcaccaccgacgaccttcgccacgattcatgctgccgccgtccggattcacgctcgtggctagtggataacctctcgggtaaaagaatctctgccgccggtgagctggaggtcactccggtgactcaccctggcctccctttccgctttgcggctagaacgataggctcgtcggtgaaccaccgcctcccggccttgcgccgcgtggctctgcctttccaccgcgtcgccgtgactccctcccgctgtcttctcaacaccggtgaggttgccacgacggtggacacgaattcaccgcacccgcgttcttcttcacctccggctgccgcgcgtccttctccaaattcccggccaccgttgatgccctctataaattgatggcgcgggcagctgcgctacctcatcgtgaaaccagagcccccactcccaccctcaatcgtcctccagagctcaccaatttcaaacttcccccaatttcggtctccaccaccgtgaaacacacctcgctgcggctagctcagctcaggttagttcataccgattgctacctcgtttgagtgctctcgtgtacctgtgatgctcaccgaccaacccaattgaactaagtcccccttaatcgccgggaacacgatcaaccctt

SEQ ID NO: 164566 - DNA, 829 bp, Zea Mays
ggcaaacgcagataggtgaccgagccaagctccctgttctgcgcatcacagatagtccagctggtcgcacgaacggttcggatcaccgacggacagtctaggcagctctcatggatagtcaggcaacacctagggacaacagcgactgtgtaccttcaagccataatgacctgaaatgggtaagtggaagcaaaatccagcaaaagctcttggacgcgtgattaaactcggtccaacttttttcaattattgtccaaatatgtcaacaaaagggttgggcctcatgaccgtctagcaaaacgacctcgttcacccaccaaagaaggacatgcaaaagcaattgggtcatctcaaaaaataaggtcgaacaagtcagccaaaaatattgtccaaataggtgcacctaggaaggaccagtgaggcgaccagagaggggtgaatgggagccatcaaaattctgtttcgagaatagcacaataactttgatcctgaacttgacccaaaacctctagggactcacaaagcaccagatcactacataattcaagccagtgtcatttgaatacacataaaacatagaagaagatcaacctaactgattgccaaaaatcagaatcaaaaacataaaatagagggagcggtagttccatgcaggggtccggtagtgccgcacactgaaaaagaaacagaattgcttcaaacttcacataaagttacacgagggaaataagatgatacatgaagtaccaacccgaggaactcaacattcaaagtgcagatcagaaatcccattttggttggggttttgatggggttttctagaacgagt

SEQ ID NO: 164567 - DNA, 696 bp, Zea Mays
ttttgggattctttcctcttcgtcattaaattgctaccatctggcgagctctagtcctttggtattgacatgcttgtatctctttaatgctcttgtttcaaacacttgactctgaatttctactgcctacttagacatttcagtttatatgtccttcctatcttttgagaccctttcctcttctgttgttaagtcgctatctttcggcaatatcttgtgttttggtattggtatgctcatctccttgaaaccttacatgctctcatatttttatatgcttacttatatatccaatgccaatttaaaacattttagtttacatgcccttgaccacccttgtttctcgatgatccatgagcattcattttatttcgcacatccttggtgatctcgtaaattcttttgtaattttctttggtaatgaatttttacttcaacccttctgttggaatcatacctatcttacccttgattatttcctccacttcgccacttcgtgagtcttgccttaactctatccttggttatgcttctcacgattgtcatctttacccttgtcgcctctacatcttactttgatgcttatattatacatgtccttttaaaaccttctctcttccttctaaattttatagttgtattttacatattttccctcggtcatatcctcttccttgtcgcttgcgagtttttaac

SEQ ID NO: 164568 - DNA, 932 bp, Zea Mays
ccttcgggattggagcagggtttcccctaagagctgaaagagaagccggtggagaagggagtgagacccacctccccgcacctccagaactacccttagatttagcccaagttctagccaaccaaacccgactcattgaggtcctcactagaagtctggagaatcaacacccaaatggtggaagaccacaagacaggatgggagatttcctgaggctcaagcctcccacattcgctagatctagcaatcccctcgatactgatgattggttgcgcacgattaaaagcaagttggaagccatcggatacccggagaatcagcgtgttcaactggcggctcatcaactttccggaatggccttagcttggtgggataccttcaacgctgccatcagagatgctacctagacagagtttgaaactgctttcccagagcaccatgtgccccaagggatcattcaactcaaggaagacgaattccgggaactaactctagacggaagaacggtcagtgaatacgtgcacaaattcacagagttggcccgctacgcgccggatgacgtcaacacctaagtcaagaagatggcccgctttttgtaggggctcagaccagaactcaagaccatcctagccagccaagatttcctcagcttctcgcacctctccaacaaagccatgcaagtggaaagggcaagggaagaagaaaaaggtcacctcaagaggaaattccatgtcctccgagctcagcagcaaaaccggcaccaaagaactcgatcctttgggtttccacccaagggacaaagcttcattagactagctggacccactccgtcacggttcagtcagtagagttagagctcctttcatgccccctcggttgcaagcaaccaaccaccagcaaatgtgtgttggtactgcagagaccccattcac

SEQ ID NO: 164569 - DNA, 1138 bp, Zea Mays
gcaagaaacatctgttgttgacttgttgttgcttccactcgggacatggatagcgagctggcaaggctgagtacccacgcggcgtgggcctagctaggtggtgttcgaccgacgacaagtacaagcacagtgagaagggccttatgctccaggtttgggatgcgcgaagaagacatcacggtggtgcagcattacccagaggatttcttcatcaccttcgagcaccagcaccaccgtgacgcggtggtggcgtgacacgaattcacctacggcaacattgacattcgagttaggccatggcagctccctgttcatggtgaccgcatcaactttgactaccatgtttgtctctgcctcgaaggcattcttttgcatgcgtggaacgagggcatcgccaagcgggcggtggctatgagctgcgtgctagactacgtcgagtctcaatcactacaaaaggaggacacaaggacgctcaacctctgggcgtgggcgtggaacccttcagacatcccaaaggtaacttggctaaccattgttggcaggaacatcactgtccacaacatgccatcggcgggacaaagtggcttaaccttcagggtcatcgtccaccttgaccttgtggagggttttccgggcaacgaggatcaaggaagtacgcgtgcgttcgactggaggcttggagttgttgatggcgagagtgctccacgcgacatgcacgaccctccacctcgatgtaacgatcatcaccgagacgacgatgacaacgaccgccgtagacgtcgcctacaacgtgaggtcagttggagcatgcgtcttttccgaagcatctcgcgtgctccaaagggctgtgagcgagagcgctcggggtcgcgtcgtgaccatcgacacaacacttccaggaggtacatgtccggcgacgcgcctggaggtgtaaggcatgtccaacaacctcgccaagctgctgctatgccagcggacgcgtcccatgtcggcatcccagggcgtggcgtggagaacgtgggttcccgtccacacactgggcttgcgcaccagctgcgtgagggctccttgatgacacgtgggcgcagccgcatgcgctatctcccccggggcgctggtcggcgtacacgatcaacga

SEQ ID NO: 164570 - DNA, 1107 bp, Zea Mays
gataaaagttcttaagactcagggcacagtggagagggacggcgggtttattttaactttgctcagggttcctttagcaaaattgactcggctgaagggtacgcacggatcctgatcgtccgatcaaaactggacagccacgattaaaattgagccgcggtgaaccggtacgcacacgggaccctcggatcaaagatcgacgtccactatttaatgaaggcgcgatctaatcctacgcgcaagatcacgatccaagggctggaatccaaccaatatgcacggtccaacccacaccgtccaatggccatccaacggtagaccaggcgtcatcttcatccggcaccaggccacgcccgagcaagaacagccgcgacggccccacgccggtgactggttgcaacagcaacccggccacccccgacccgccagacaattctaaaacgtagaaggaagggtcgcgaatccgagggggaagttcttaccagcgctggcggcgcactgagctccgcccacgacgcccaacgattccgcggcggcccgaggtcgacggtgagcgattcctcccgctccagccgccaaactcacccgaggatgagtcgcacacacaccacgtgatcctgctcagctccacggcctccaccagatccccaagtgtcttcaacggtggaggacgccggcggtactctaactcccccgcccacggttcacttggtgacttggtacacgtcgagatggataaaggagctagagcggccgggttatataggggcggggccagtccgagctgagagggtcggttgcgccatccacggcggccgagcggaggtccggtgaagacgccgcgaaaatcggccagggaatcgcgtgttcgccaggatctccacggtcgggacgaatccgacatagcgggcccacccatcagcggttcaggccatgcggaagaaaacgggttttgggccaaaaacgaagttagacggcccatgtagcgttttctttttatcttttatcttcttttctctatttctaggttgaaattgaattcgaatttcgaattcaaactagtgccaaatttattctcttctctaatcatagtgtgaataaaaaaat

SEQ ID NO: 164571 - DNA, 771 bp, Zea Mays
ctgaagccgagatagagagagagacgtgagagatttctagagagtgtacgtgtgcaccggataaaagagagaacgttgagagatgcaactagaatggataggaaggagcgcttgaattatctagacgagagaaatgatgtggagataaggaagagaataaagaatttcagagagacgtttcagagagtggacgtctgcaccaaattgcatgccccaaactgatccaagtttcagttatcagcacctgaatcccacacttcttcgacagaacccccatcttaatccccttaaatctcacgattccaaatgataatagtgaacagaccataacataaattgctctccgaacatccttctacatctttgctgcagaattcctagtccaaaaccccacggatttggtactataaacctccaaaattgagcacaaattcacaaaaactcagtttgcagctaactgaaccagagttcagaccatacccaactgacggaggatgtttaggtgcagtttactctcagatttgtacagcattaagcctatctatccttagaaaacttgctcaccttactttggtctccaagtttggtacagaaactacggtctaaaaccactcacattgatcacaaaactgctctaaactaggaattccacattgaaattcagatttcagagacagaataaaattcagcccaaataacttgacagtccaattttgagtaatttttactccatgttccgagtcagatcaagcctaactcacacaacgaaat

SEQ ID NO: 164572 - DNA, 462 bp, Zea Mays
aagaaactgatccttgatgttcattagatctgaccagaagtgtgaatcacctgatcttctagatatttgagtaagggatttatctcctaggtatttatttttgagtaactgttgccacatcccatcctcattaagtaatttgtagggctatttgctgagtaagcaaatattttttatagctagattagagacgcctaaacctcccaatgcttttggttgacagacaatatgccacctagccaacctatatttccttttactgcttcctccctgccaaaagaatctggatcggatagcatccagcttcttcaagatgcccactggtatctcaaagaacgacatcatgaacgtaggtagactacttaacacagaattaagcaatatcaaccgtccacctgaagataaaaatttggccttccatgtactaagcctcttttcaaaccgatcaataacaccctgcca

SEQ ID NO: 164573 - DNA, 296 bp, Zea Mays
cttcatgtgtgtcacactgttgctatgtttggtggtgcccttctggttgctgattgtgggtcagggctggtgccataggtggtggtggtagtgggacccatgcagcttgagagtggcttgccgaagcaactgatattgtgggctgttggttgcccacatactcgagaatgtatggggaatagcacgaagcgatatgcatgacctgcttcgactgattctgccttgcttcggcttcagctgtctctttctgcttctggatcgtgacttggcacgtccttgttgtatgtcctttgtcc

SEQ ID NO: 164574 - DNA, 328 bp, Zea Mays
ctttgttcattaattatcactagcctaaccaagcatctgtaggagcttactcacaccgtcattcctcatccaaatctatgtgactattgttgtactttttgcaggttgtagtgatagcggtggttggcatgcttcttagtcctccttccctaggtcacccatcccttcacattcttcatacgccatagtggaacgggggccaacatatgcagtcgatgctctttcctccaatagggacaaggattctaacatgtgatccctttgcaagtagtgtcatgtcctaggtgtgatcattaccaaaacaggcaaacaacatcaaactaagatt

SEQ ID NO: 164575 - DNA, 878 bp, Zea Mays
ggcgctcattctgctccttcgcatgatcaccttctttggactttggttgtggggctatggcagaggcaagtcaagtggtcagcggtaatcgcaactgtctagtcagatgatagaataaatcataaaggggtgaggtttagatattagcgtctgaagcgaattaggtttgacgttttatgtatcgattggtcattcaatgaatattttatcttatattctttgtcttttttagactttggttggcatactacaacatagttatggatcatgtattactaaccactatattacacatttgattaattatgctgcacaaaatttagagtatatatatttatacacacaaaatttagactatatatatatatatatattcttgtatgtgttgcagccttgggaggggccatggcccctgccggcccccccttggctccgcccctgcctttgtggtggcctgtccatcatcgggggaagaggctcttccctcaccgcgatctgtgcgacgacgccaccaactctgctctcgtcacgcccttggtgaggttctttccctatcgtaccttggggagtgctccgcattcgttttactagatcgaggggcataaggattgctagtgcaccagggaagcttcctagccatggcgccaccgcgccaggattctagcgccgccgccctgggaacgcttgggtggacgatggttccggaccgtcggatcacggattgggcggtctggatgtagcatgtgggtaccggttcgcctggaccaaaggataatcgttgatcacagatcgtagggttatgtgaggatcacgtttcattaaatccgatccatcagatcgaatccaacggctaaaatcaagagatacctcttcgccgc

SEQ ID NO: 164576 - DNA, 1005 bp, Zea Mays
cggggagtggctgctgttcaccgacggggtgcagggttatgtcgagcggctggagcgcgtcgtgccgctccgcgacggcgtggtgcacacggcgctcgacatcggatgcggggtgtgttgtactcgcatcgcatgaaagcttgccgattcagaaactactcgttggaagtctctctgttcacgtgtcgatgtgtgtccctgacaggtcgcgagctttggggactatctgctcaactatggcgtactgaccatgtccattgctccgagggatagatttgaaccgcaggtgcagctcgccttggagcgtggactgcctgcaatgatcggagcgcttgttgcccacaggctaccgtatccatcgaggtccttcgacatggtgcactgtgcggactgccgtgtcccatggactgctcatggtaggacatgcaagacgtcatgctattcctgattaaacatacttccttcctgatgcatcatctattcatttattatttcactgattactaattgttcaaaataaagtgattttcctattggcaaatgttggagtcggtgaacactgaacagaacaggacaccctcctcatatgtcgatgtcaaaactaaagtacagtttgtttgtttttttagtcgagtgctcttgttctcattcacctatagctgattccagatgggctctacatgctggaaatcgaccgtcttctccaacctggtggctattgggttttctctaagccacccgtcaactggaaatctacatacaacatttcgaatcaagggaccatagacaagcaggacaatcaagtagctatggatgacatgtcgaaaaggcttcgttggacgaaggtgtctgaagagggcacaatttctgtttggagaaagccttcttgtaatctccattgcgaccaagaagcaaatgcaaagcttgctggattgccaccactctgcacaggagaagacccagatagtgcctggcaagtttattactgtccccttgtcactttgc

SEQ ID NO: 164577 - DNA, 797 bp, Zea Mays
gtatgatgtgatatgagctgttggatccgagatcgagcgcccagattagatctagctttttaatgaatcgttatgcgctgaggatcgtcgattacgccttctacggtcaggattttatgagacgaaagggtacgccaaatcagatcgtggccacccaaatctaatctgacgcttaatatttagttcgtcaagatctaatcctagccgttcactgcgacccgacggtgcacgcaccatcccctaactcccgctcgcaggcgatgccggcgtgccaccccacggcggaggccatggccggggtattaaatccagcgagctacgggcctaatcctcgaatcaaagggggtttctacgcgaaggacgacgaaataaactactaggatgcggaactcaccgaagaaactgactcacttgggctgtccacggcgcacgacaaatttgcggtggcggtgacgaactggaggcacctgtatcgcactcccttctagattccaccgcgaatgcaatacgggtgattgggcggaccccctcaactacgctccgagtcttcgccggcgatgttcacacactgcggctgccccctttccttcgtaacgatccgcgcggacgtcacagaggtgccgaggcaatttacgaggtgtagggaaactaacaagaggaggcgaggagagaagccgcgacgatccgacctatatgagcgcgaggtcatgcgctacgtggagcagcggagctccgggtcgtcggggcgcacccgccatagtcggcgaggtggttgaagtgcctactgacggcccggg

SEQ ID NO: 164578 - DNA, 506 bp, Zea Mays
cgggtgtcccggaattatcaacgacacgaatatattctgcctttgaaagcacacaccagtgggaagattgattgggataacaaacacgggccaacatgtgtacggggcagcgctcattccatagggattgaacccatctgtggccaacgcaacacgtacattacgagcctcttcggctttctcacggtgaatggcatcaaagtgtttccatgcttcaccatcggatgcgtgcaccatcttgtcaggattgtatcattttccatttttgtgccatgtcatctgtttcgcggattcctctgtcatgtatagacgctggatcctcggtatgaacggaaggtgccgtaggattgtcaaggggatgtcgagctgcctcttctgtccatcaccagagtctacctccatgaacctagacgatgtacacttgggatagtactttgcctcaacgtattctttcctaaatagcacgcaacccttcggacaagcatgaatctgctcatacgtcatct

SEQ ID NO: 164579 - DNA, 801 bp, Zea Mays
gcaatggctaacctcaaactgcggggatcatctgcaaaagacttgaaactatcatcaaattctttccaagcttctccatcagcaggatgtctcatttcattctcaatcggtaccctcttttccttgtgccatcttgcatactgtgcccgctgctttgagataaagagcctttggaggcgtggaattattggaaagtaacggaggaccttgtgaggcactttatttctgccctccttgttcactttccatcttgtgtacccacaaattgggcaatggtcatcctcttcatgatctttccaaaatagagcacaatcatacttgcacacatgaatagattcataaccaaaaccaagcttccgaagtagagattttagttcattataggacttagggaggccggtcacattcttcaaagatgacgaaagcaactcaaggattgcatcgaacccataatttggtatccgattgtacacttttatatgcagtagtttaataatgaaacttagcctagactcctcggtgcaacctggataaagttcacactttgcctcttccatgatttgctgatataagttgccaccgacaccatggcttgcagcggtgtacagatcttgaatcaaaccttgaactccccgttcactatcatctaaaatgacatctttagcttgtccttcatcatcaagtggagcctggtcatttccatcccatgacatatattcataaccaacagcgagtgtgccatcatcatcttcttgaacatcaatatctccctctccatggtaaacccaccttgtatagcac

SEQ ID NO: 164580 - DNA, 642 bp, Zea Mays
cccccctcagccagccttgtagacccacgctggctctcccgcttgcctatgcagtgagcgcgccctccttgcccgccacatcgcccccctacaccgttgtgtcatccctctccacctacttccctattgttggcgccccacaaatggcccactctctcgccagtgcgttgcctacaccggccctcagtggccctctgtcagctcctagtggccctgtgccggccactaatggcccttcctcctcacccatgagccctgcctcgctcgctgcttccgtggctcttggcttccctggccccgtctttgcactggccgctagcgcaacctccttcctggctccacccagttccatggggatcgttgtgcgtgtcctccttcacaacgtcaaggttgtctggggcaccttcatggcctttgatcgggctatgaaccctgttctccgtgactgcatcaagatcgaccctcaggtgggccgccacgtgcatgggtcgcttgtttttcctagtgttgtccttgcctccctgtcgatcaagaccttgttgtctccctcacctcctagtggctctgtcggagcccctcccttggctctctcctcgcaccccatgccttcgctcctcactctctcccaccgattaggtggtc

SEQ ID NO: 164581 - DNA, 1183 bp, Zea Mays
gcaaaaaccaagtcaaataaggttcttaagtcccttggttcacaaatgtgtggacttgaaagccaaaccctaagctttggactcatttgcaaaaaggacccccaattgagatttctctaagtctgaatttcagtttagttggttcaactttggagccctgtaccttttaaaatatagggattttgcccaaagtgaccacaacaagtttgtagcccaattataggagaacaactttgtttaaggattcaatccatgttcttataagaaatgtggagaaaatctcaacccaagttggactgtcagactgcctgaggtctgaagttcagactgacagtgttttgagatgaactttgagctcgattttgaaggggatccagtgactttttgtgagtacacattatagcaaagatatagatggatgatagcactacaactttgctgcagatcattgggtatgttgccatgaaaatttgtgagcaaatcgagcctaaactatggctgtcaggttgactaaatactgcagcccatggtacagtgaccgttgaggatcagatcgccagccccagaaaagatctcaccggcagtggctttccgccgtgattcacgtcgccggcgtcatgattcgcgccctgggtaagtggataacgtcgtaaggttaaaagatcgtcaccgccgtgacctggaagccactccgggctagccgtagttcatctccccctggctcaccgcccgcggggtaatgtgctcaccgccgccgtgccctcgccgttggccaccgcgtgtcccaaccgcgccatcgcattgccgtgacctcctctaaactccccatagaccaccggagttactgccacggcgataaacacgtgttcaccgcaccgccgttcttcctcacttccgaccgccgcgcgtccttctcaaaattcacggccaccgccttaccctcctataaattgagggcggggatagttgcgccatgtaatcgtcaagctattgcacccactcccatctccactcgctcaccgtagctccgcaattcgggttttcccccaaattgatctccgccaccgtaaaacaccacctccccgtggactgtccgttctggtaaggcaccatccaattcgcgcattgttctagcaccctttcatgctggtgatgctccccgacccctttaatcgaaccaaac

SEQ ID NO: 164582 - DNA, 589 bp, Zea Mays
tgacagttctgtctaacaggattttactcacatatccgactggtaacattgctactagtgagttcgtatgataggtccgactaataaatccacccgactttccatttagttgaggactagtccgaattacttgcctgccacaatgtgcccgacttagtgtgcgtatatacgtccctgttggtagtttctcggcgcacgaaccctaactctgttttttgttcgccgcaatacagtctctgagaccctcgctcatccttgcggttgcgctcaagcttgcctgctcgtgaggtcttgatggcgcccaggaagaagaaataggggatagttacgcccgccattcccccaatcaatcctaatagccaacttcaattatgcggtaactaagcttctgttgtctctgagtctgatcttcaccatcttatcgaagtcagtgttctcccgcccaaggaacagggctcctggcggatctggcaagggatcaccgtcccaacggaggatactcatgagttagttgtttttgttcccttcatgatccgaggattaggtatgtcggtttcccctttcctccacggttttctcgatttttatt

SEQ ID NO: 164583 - DNA, 396 bp, Zea Mays
gttgtccacaggatgatccctttggatagtatggtggactcgaggatggggcactgatggttgtctttgaatttgctcctcctcatcatccacatgataaagaggtacttcatcattaacactttcatgtccaccttctaccacagttggcatcctttgaggttgatgaccttcttcaagacttggatgacttgaggttgatgggtttgcttgggtggaggatttatcacccaccacttttgcgcccacatcgaaaacttcattggtcatccataatgttccttcctcatcatccttttcttgaggtctcacttcacctattgcaaggttctttatggcctcacaaggtggttcttcatttcctgcaacgtcatgagaaacatgcccttgcaagcc

SEQ ID NO: 164584 - DNA, 519 bp, Zea Mays
ataccatttgcaaagttatctgggtgaatttcaagatcaatttagctttatatctcactctttagttgagctcgtgcaaaccagttgaaccggttttgacaccggtggaaccggtttgacccagtttgtttctagtttttgttgaaaatatttcctcttgcctattcaccccctctaggcaactttcaattactgaggtaatcgtgctgcctctccttagcgtccctttggtactcacttttgacttcagctcatgttgcaatttggccagggcacctcatcccagataggtaactcaacaacctcttcgtcatcttctttcttttcttgcgtgaaaagcaagctgtttcaacaccacttgaaaattaagcttcatgtcataaaaagaagtaagttgtttttacctttattgctcctgaagagttggaggtctttggcttagaaactagttgtggtttgatgatattttctgtagcagaaacaacctccatcgatagcctcagtccaataactgctacc

SEQ ID NO: 164585 - DNA, 281 bp, Zea Mays
catggcctaaccacctgccagcacaaccagtcttaggctgagctctaaagaagctaatgctattttcgaggagccacaatttgtcgtttcttcagtctaaaatggttgactgttaatgattttttccttaaaaatagctcctcttacaaaatatatcgaacccagccattaacaatgccctctcccctctccctttttcaggtgatttgtgagtccagtagtagatcaaatgctttgatagaaccaattcaatttattatttagaggactatagcatcgac

SEQ ID NO: 164586 - DNA, 632 bp, Zea Mays
tggtgtgctttgatgtaggttgtcttatctaccacggagcatggtcgttgccttaatcgccgttccagtggatgtgctgctgataagcgcagtggctttgtggaaaagcccctgcatgttgttcaaaggatggcagaggttatgtgaggatctagttggaagggaagggccgttcttagaaactgtctgcgtgccttttgctggtttggccattgtgttatggccacttgcggtgattggggggttacttgcttcatttttcagcagcttcttcttcggttttcgcgcgggactggttgcttatcaggtctgtctgtcctgtctagtgtgtttcctctgatgcaacaagaaggaagctgtgctcatatgcttgtacaatcatgccatgtgtgcaggaggcttctttccaaatgggacttgcatacatgatttcagcagtagcaattttcgatgaatacaccaatgacttgctttacctaagagaaggatcatgccttccaaggtacgtgcatttccattttcatgtgtatggattattatttgttcgatttctcatcagtaaagccacttttgtcggacaggcccaagtatcggagagcagatatcatgagggagtgtgaaactgagcctgc

SEQ ID NO: 164587 - DNA, 763 bp, Zea Mays
cccgaatggaaagttgaatttgccatagagcttatcccaggcaccgcccctaattccaagagagcttatcgagtgtccggaccagagttggtggaactcaagaagcaaattgatgagttgttagagaaaggctacattagaccaagtacatcaccttgggcggccccagtgctatttgtggaaaagaaggatgacactaagaggatgtgcatcgattacagagcttttaatgaagtcactttcaagaataattaccccttgcctcaaattgaagacttatttgattagttgagaggatctagtgtgttctcaaagatagatctgaggtcaggttaccatcggcatagaatccgacctgcagatataccgaagaccgcattcatcactaagtatggactatatgagttcatggttatgtcattcggattgacgaacgcgcctacttacttcatgtatttgatgaacagtgtgttcatggactacctcgacaagtttgtactggtgttcattgatgatattctcgtatattcccagaataagcaagagcatgaggaacatttgaggaaggtatttcagaggctatgagattgccagttgtatgccaagcttagcaagtgcgagttctagatcgagcgaagttctattcttgggccatattataaaccgaggtggactagatgtggatccgaagaaggtagcagcgattctagactggaaagcaccaaaaggtgtccgaggaatgaagagtttcattggaatggtc

SEQ ID NO: 164588 - DNA, 694 bp, Zea Mays
ctttggaacaccatgcagactaagaatacgagcaatgtacaattgggtgtagatagtaaccgaaaaatttgtcttgactggcagaaagtgagcaatctttgtaagccgatcaattataacccaaatagagtcatacccctttgctgtcctgggtagtcccacaataaagtccatactgatgtcttcccattttcatgttgggattggcaaggattgtaatggaccagcatttttcatgtgtatggccttgacacgtctgcaagtgtcacacttagccacatagcgtgcaatttcgattttcatctttgtccaccaataatgttgctttaagtcttgatacatcttagtgcttccggaatgaatagaatagcgactaagatgtgcttcatcaagaatttgctggcggagttcttcgttctttggcactactatgcggtttttaaaccatatcacaccttgatcgtcttccttgaaacacttggctactccagcctttatcttctctcgaatgtgcttcataccaagattttctttttgagcatcaattatcctttgcaaaatgattgactcaagctttagttgatttagagtcccttgttggatgatccccaggtttagtttttccatttcctgacacaaagtattctcggaggtcttcgccataagacagtggcaggaagtcttacgactcaac

SEQ ID NO: 164589 - DNA, 644 bp, Zea Mays
gcggttgtgtccgtaacgcggtgtggcggggaggttgatcggagtgccctgaattgctcaatggagctctcttcctccgctgtgaaaccatgcggggccacatgcatgggtcctagtgtcgtcatctcgggtaagaacctttggcgtccattagttttcacgtccgtgtggggtatcttcatctagatggggattttaggcttgggcgcgtcgataggccgctccggcgaggtctaggcctcaggtctgtgccgccgccgtgtgtggggagcgggaggaggatgatagcgcgtcggtcgtgcgatctgtggctgacggatggaattagatcgtgtccagtggtgatccagtgcgtgcgattgggatcgtgcgactgtgatgagtatgtgtaatgcccccttcgaccagattgaatctgaatcgttggatgcaaatcaggcggccagggctgtgtaccggttcaagatttagtctggtgcgtcagatcctaatcgagcggctcggggtgcgtgcgcgttttgctgccgaccataattgctaaagggcccctgaagatcatgcgaattaaccctcggtccactactgcaaacaagtaattgcacttaagtcctggtttttacagatttgaccctgggaaatttcag

SEQ ID NO: 164590 - DNA, 523 bp, Zea Mays
aaattgctcaagaaggtggacaagttccagtggaccacagaagcacaggaagctcttgatgcactaaagaagttcttgaccacgccaccagtgctaaagcagccacgccgagccatgccagatcatccggcagaagatctggtgttgtacatctcctgcacgactcacatggtgagcactgcgttagtagtcgagcgggcaggggaagggcacgcatatccagtacatcatcccgtctatttcatcagtgaagttctgggaccctctaaaaagaagtatcctcaagttcaaaaactattgtacacagtacttctaactgatcgtaagctccgtcactactttgacgaccacaaagtcatagtagtcaccgggtttccaataggggatattcttcacaacaaagaagccattggaagaatagccaagtgggcctgcaaattgggagctcacgacattgagtttcggcctcgcactgcaataaagactcaagcactagttgacttcgtattagaatggaccgagc

SEQ ID NO: 164591 - DNA, 1923 bp, Zea Mays
tttctcttttactttttattttctaattcctatttccatttttgtatcttttccttttgaacaatttatttagtagataatctaggtgctggaaaataaaatctaagtgaggtgttcatattcaaacaaggtgtatgcatatgatgggaagaatctaagggagttttgggatagaaaataagaaggggggttagattagggtttcaaacctgggttagaaattgggattttacaaacctaccccacttaaaggaatctcgccctcgagattcagacgaggctcgagaaatggtaagtgtattctctcctcagagagtcctcactttcccaggtggcttcctcttctccttctctgctccactgaaccttacagagtctcacttctgagttgcgggtccttcggactgctgagtcgagaatctttactggcatttcccagtactggagatctttttgaatctgaattgtctctgcctcgatgtggttctctggtacttgcaggcatttacggagttgggacacatgaaacacattgtgaatatctgacatggattctggtagctcaaggcggtatgctgtgggtcccactctgctaatgacggggtaggggccaccgaaacgcggtggtagctttcctttcatttggaaccttttgacaccacgcatcggggagaccttgaggtatacgaaatctccttcctcaaatatgagttctcttcgtctgttgtctgcataacttttctgtggactctaagcttctagtaacctcttgcggatcatggcaacattctcttcggcttctttaacaaagtcgggtccttctagtgtcctttcccctacattggaccacattaggggggtctggcactttcttccatacaatgcttcgaacggtgacattttgatattggcctgatggctgttgttgtatgaggattcggcgtacgacaaactggactcccaattcctgtcgaacgttaacacacaggctcttagtatatctttgaggaccctgttgactctttccgtttgaccatctgactgggggtgataagcggtgctgaaatctaacttggtgcccatagcttgctgaaggctcttccaaaatttcgaggtgaactgcgtccctctatctgacactatcttccgaggaataccatggagcctgactatctctttaagatatatccgggcaagggcggctcctccaaaagtggtttttactggaatgaagtgggccaccttggtgagacggtcgattattacccggatggagtcattccctttctgcgtccggggtagtccggttacaaaatccatgcctatttcctcccacttccattcaggcactgggaggggttgcagtaggcctgcaggcttctggtgttcggcctttgttcgctggtaggcgtcacaccgggccacatactgtgctatctccttcttcatccctctccaccagtatctggctttgaggtccaggtacatcttggtggttcctgggtggatggagtaagctgagttgtgggcttcattgagcaggacttcccgtgcctctcccattggtacacatagacagttcttgaaccaaataactccttgttcatctgccctaaggtacggaagttgctccttgcgagctctttccatgagtcttgttgtctccgtgtccaggcgttgagccttgcatatgagatcttctagcattggcttgactcccaggctaccgttgtctcccagacatgcattttagctgagctgattccttcttccaatcttctaaaaagttggtcccctttatcccgaaaggttttcggctgagggcgtccgctaccacgttggccttcccggggtggtaatggatctcgaggtcataatccttgatcaattcaagccatcttctttgacggaggttgaggtctg

SEQ ID NO: 164592 - DNA, 687 bp, Zea Mays
gaaagaaaagataaaactgcgaatgggccgtttctttcctcagctttcggcccattcccaaaattttctcccgcccagccagcactgcatgtcgcgtgggtgctgtggatgacaatctgggcccacgtattagtcttcctgtctccactccgctcccactgccgatcgggacccaccggtcgggcttatctcctaaatcccaacagatcccgtcgcgcggcaaactcggagcggccggcatccggagctttgcgcggtcctcggccatgccgtttcttcagccgggcatgcagcggacttatcttctccgctggaccctcccgacgcagcctctcctccaccgtacactcatcgttctcagcagaatttcgtagtggtggcgagaaatctgggcgagatccgatcccgtcgtccactcgtccattccccctctcggccactgctagctggcccctcgggtggacagtcgcgccgcactcacgaattccttgctccgtgctcctctcaacagactccgccgttaccgcatggtcgccagcacaccacaacggattccgaacttgccgacgggatctggtcttcgaaatccgcgttcctctagctataaagcacggaccgcgacccctcctcctcatcccatccgagacggaagcaccatcgccgcggatcgctcctcctctgggaaac

SEQ ID NO: 164593 - DNA, 511 bp, Zea Mays
gtgagttccgcctcgccgtcagcaactcgtgacacccctcggttcgcccccaacccctctggttcgcccggtccacgctgaccagagacttccccgtgtagccagagtccgccaccgtcaacctgaggcttccccgcatccccgtcgtcgctcaagcgcccctgagtctgcactcgaggtgagcaaccttctccatgcccttatttcgcctgttactgccctagtgttcgcgtaattgctcgtcagagttgatccacgccgccgttaggccaccacgccgtgttctgcgccctctggtgcccccgtgccggcgttgcgcccatgactaagttcgccatgtcaccctgaacgcgcccgagcctttccccaaacccctagagccctgtcgtggccgtcccccttgtctctggcgaaacctcgccgcgaggtcgagcggcgccaccgcacctaagaccggtcaccggtcgttggatctcggacgtccatctgagatctggtggtctaggtttaa

SEQ ID NO: 164594 - DNA, 2246 bp, Zea Mays
tgtgttgtcgagtactaccttctgatctgttaaaacgcttgccgcaacatagcaactatggacctttgcaagtaactgctcccacaaaaggtttgtattgtttctgtctcatgtaacatatttttgtatagtaagtttagcctatcccacaaaaggtttcagacacgagccaagctccagtaacatatatattgatcaccccctttgtgtcgtttacttggactaagttaaaagattagattgggctgctcacctcattctggtggcatgacttgattacttataggtacgatttacaggataagctcagcataatttcagggataagcccctgtaacagactatgcgtttacatactaatctaaactgatatagctataaactaggatgttgttacatatcttgatacacgctaacagccccccgcaatcttaaccggtagccacaaggttgagagtgggtcttagtcgctgcaacatttgtttagtagctggcttggtgaagatatctgcaacttgatctcctgaagcaatatgtagaacatccatatttcctactgcaaccttctctcgaacaaaatggaaatccacttctatatgcttggtacgagcatggaacacaggattagaactcaagtatgtagcacccaaattgtcacaccacaaaacaggcggtcttgactgcataacatgcaattccttcaacaatgattgtatccatgttgcttcagctgcatcatttgctaaagccttgtactcggctgcgagcattccatgagataaggtttggcccaaagaaaatggcatagcctccagttgaacgtcgatcatcaatgcatctcgcccagtctgcatcggtgaagatgcttagtaaactagatcttgatggtcgtaatgacagtccagtattcaaagttccttttacaaaccggagtatgcgcttgacagcctcccagtgtaggattgtgggtttggagaggaactgacatactttgttaactgagaatgacaagtcaggtcgtgtgagagtaaggtattgaagagcccccactgtactccgatagacaaaagcatccttgtctgtaagaggtttcccaattgctctggataatttttcagtggcacaaagaggagtggcaactgacttacagttttccatatgaactcgactaagaatatctctagcatatttctgttgagtgagtgtcatgcccccagaattgtaagtcacttcaataccaagaaagtaatttaactaacctagatccttcataggaaaagagactgagagttgctgcagtaattgccttgttgcttcaggagaggagctggtaatgacgatatcatcaacgtacacaagcatgaacatggtgatgtcgttggccaagtagataaacaaagaagaatcagcaactgaagaagaaaaaccaagctggtaaaggcgctcactaagtcgagagtaccacgccctgggggactgttttagaccgtaaatggacttgtgaagcttacaaacattgtcaggtcgagaggcatcttgaaaacctggaggctgttgcatgtatgctgtgtcatcaagaaaaccatgaaggaaagcattgctgatgtcaatttgcctggtgtgccatccacgagagactgcaagggaaagaacgagacgaacagtagccggtttaacaaccggactaaaagtctcatggcaatcgatgccatactgctgtgtgaatccccgagcaacgagccgagcttttaatttgtcaatggagccatcaagatgttgtttgacacgaaaaacccacttacaactgataatattttgaccatggggtttaggaaccagagtccaagtgttattctgccgaagggctagaaattcatcctgcatagcctgacaccatttgtcatctgccaggactgttttatatgacgagggtgtagtaaagaaagcccgttgacttagattataaaggatagttccatcagcatgaatccgaggcttgtcaatattatgcttgaatcgagttaccatttgtggagctgcaacatcagtaccagatggaatggatacaaaagtttactcttttgccacaactttagggggtgcaggcgcagcagatggtgaagccaagcaatttgttggtgaaatggaatgctgctcagtgtgtggtggtggaacatcgtcagttgcactggagtgttgatcgacagcagcaggtgggtcatctgaacagcgactacctgtagaac

SEQ ID NO: 164595 - DNA, 386 bp, Zea Mays
cagcttctgcagcttcacctcagccgtagcctgcttgtcccgctgtttctccagcaccgtattataagctttcagcttatcatcgagcgctgtgacggcctcctccctttggtctaagcgtacctccttcctggccaaacttttctccttttgggtcacctcttcctctcggtcagacaccttccggatgtcctccttgaagtcctcgtgctcctgctcaaattcggcacgctctgaggcgaattggcaggacaccgccttggtgcactcctccagttgggtgcaccagtcgccaaggcgctggtgctcggtctcgagcgcctcccactctcgccggatagccacctcggtttcccggagagcctggtgagcgcgggacagcacct

SEQ ID NO: 164596 - DNA, 657 bp, Zea Mays
ttgttgcaggattaaaaggtatttccaattaaaaaggaaaaaatacgctgttttgcgctcgccccctggctttttcaactattctctctttcacttatgccctcgggctcctattcacctgggtcgctgatagtgcaaaaaggccctaaggtttctaaggttctcaacccacgctccctcctcccctcgccggaacagttcttagagtacgacgagaaattgtggctcacctgccgcggtaccgtgtcaggggtcgggtcgtggagcttcgggttgatcaggcgaactcaggggcggcggtgatcggccggcagcaagcggagcaagctggtccatgggcgcaagcgggtgtaggtcgtcggtgagcttcaatcctggggcctagtgcaatagagcttcgcgacaacgcttggggagcttggcggggccatggcgaagctgttcctgggctcggattgggcggtggaggctcggagtaaccggtcctcgtgctccggttgacaggcagtgaggcacgggcgatggcggggcctccccggcgtggcagagttcaatcgagcgaggctacaagctttaggagggtgcagggaagcctctggcgagccaggttgggcaagagggtggccgggcgagctagccacagcggctgaggcttgg

SEQ ID NO: 164597 - DNA, 415 bp, Zea Mays
gcccactccagagggagaggagcgcagcgccaactcggacgtcacctcccactctactgaacgccatcctgcatacacgtacgagccatgtccatcgcaatcctgcctcctcctctgccgccacggcagacctagaacattgcaccctagctagggtgcctcactcagggcatcatgatgcttaatcacacatttccttacctccaaggcatctcacacaccccagattctagcaacccaaggtcaggccttatagctaggcaacaggctgcctttacagcagctaggcatgttccgtccactcaccttaggcttgagcttggggcacctgacccgagcaacctgattcgaccgtgcccaaaaaaactgacccaacctaacccaaccaaccaatgggcgagtacgggccatagtt

SEQ ID NO: 164598 - DNA, 652 bp, Zea Mays
ctaggagcgagaggaaggctagggctctttacctgactagataagcacgacgcggaagacttgttgagacctgaagacagcatacagcgaaaatctggcactgtaaactggaagaggaccaaccagtgcccaaaatttccgattacccgcgggaaaaactccatgagattcttgtgcaactcgcgaaccggctcacaagagtagcaacgctctgatctcggcgagattcggtggcgggtgaaactcacggtagctcgcggattcaatgaacaaagcacggaaacaagagctagcactagatacgagttgcgtaaggtgatgcgggggggcctggtcctcattttatagtctgtcctgacgtgggaagcacgcggggaaaggagtccaacggatgaacgccatcggacagtgatcgatctgaactctagcacgaggaagaggaagaagttgatagcgcgggcccggttgtcagtggaagcaaggcacggcccacctgtcggtggtcgagacagaagagggagtgcgcgctttcagcggaaatgggccacgcgatactgggcctcaagctgctgggctacggccgcggacagctggagttgaccacgctcttcactgggctttgcgcggagagaaaagaagagatgggccgcgt

SEQ ID NO: 164599 - DNA, 574 bp, Zea Mays
aaaaatcaccaatgaaatgctagctggactatctggtgattctagcgacagtgagagctttgatgttgagagtgagaacaaagatgccgaagatcggccgtggaggccaagccatgttgttttcgggaaatcgactatcagacaagggcaaattcaagcgatgaaaggcaaatattttcatgatgtgtccatagtgagggccgggggagaatacaccgttccccttcctgaaggtgatgaagtggtggtcttcaggagcttcatgaaagctaggcttcgctatcgactccacaaaatgatggtcgaagttttgaagacattcgacatataccttcgtcagcttacccccgaagctcttatcatagtgggggtttttatatgggccatgaggagtcagggactggagctggatgcgagatgtttctacaacatccatgaactatcttaccagacgaaggagaccataaaagaacaatatcataacaactttggctgctatggcgtcgtgcctcgctctgaggtgaattaccctgtgcatacatttcagaagaagtggccaggttcttggatgaag

SEQ ID NO: 164600 - DNA, 670 bp, Zea Mays
ggagtggttttacgttaaaaatgatttaaagaaaagggaggatatcaaggaagttatccagcgccccatctggtcccacttcggcctccgaaggccgaaggtggatattgatggtgatgttgaggagtgtcagaaggcattcagtactgtgtgctccttcattagcatgagggatttgattcaagagcacatagcctttagggtatggccacttgtggagagctgggctatgccgaaggagatcactgccgaatccagtgaaggtggtctagttcgattgaagtatagcttcagatttagggagaagtttgatgagccagacgatgactggctgaagtgtattgaagctaccagtgatgagctactgggggcatactccaaggccaaagataatgctttgtccgcagcttttgggggtcggggcaagaagagattgaacagggtttttgatgcgattggcttcgtataccctgattaccactacctgctacgagggcaagggaaaaagagaaagactaccgcttcggctaccccagctaagccaaagagcaaaaaggtgaaggttttgacccaccggccgcgttatattgacccggccatagtacctgaatttggcgaagggacctctttagctgccgaagcaagacaaactgctccgattgtgcagagc

SEQ ID NO: 164601 - DNA, 1001 bp, Zea Mays
ggagaacagtcttgcttgcgcagctgatgatgcccttgtgcttagctagccaatccattcctaggattacatcaatcccttgggatggcaagatggttaagtctgccatgaacactaccccacttaagagaattctaacttgggagcacctgagtttgcacaggaggtctgatcccggggttcgggtgaccaaggggtggctaggggtgcagaggggatgtcatgcttttccacaaacttagcggctataaaagaatgggatgctcccgaatcaaaaagcacagaagcgggagtaaattcaacaaggaactcaccgagcactactcccggggcttgctgggcttcttgagcgtcgacgtggttgactcgggctctgccctgatactgagtcctactctgctagctgtttcaaggaagtgccttggaggtaggtgccgatggaatcttggggccattcactgagttggagtaggtcggtccgggtgcctttaactgagggcagttattcttaaagtgactggggtccccgcagtgccaacaggcatttgctggcggttggttgcttgcaacggagggtgcctgaagggagctctgactctgctgactgtagcgcaatggggtgtgtctttattggtttattgaagcttggtcccctgggtggaagcccaaagggtcgagctctctggtgacgttcttgctgttgagctcggagaacttgaaatttcctcttgaggtgccctttttcttcctcttttgccctttccacttggatagccttgttggagaggtgagagaagttgtggaagtcttggctggcgaggatggtcttaagctcgggccttaaccctctcagaaaacgggccatctttccggcctcggtgctgacatcctcaggcgcgtagcgggccagctctgtgaacttgtgcacatactcactgactgtcctcccgccttgagttagctcccggaattcatcctccttgagttgaactatcccctgg

SEQ ID NO: 164602 - DNA, 1145 bp, Zea Mays
atgcaaggctatccgcaagatcgtccttcgtcatggcacaaaggccagcttcaagcttcggaaaacccatacttctggccatctcccggcagacaaataattctttgttgtctgggaggcaatacaagaagtcatcttcatacataccattaaacactagggcccctttcgggtacttcaattctcgggcatagtgtttagcttcaaaaatttcttcctgagataatctttttcccgaagcatgtcgaatgacataatcaagatattcggaaggtgcttcaggagtaagggattcggcttctttggccacatttctctcaaaagctatatcagtatttggaggtacttcttcggccccttgctcggctgtggcaagcttcatctcgacaggaactatgagttcggcctcggttccagcctcaattgttgcagttttaccttttatctgcctagtatcagcttcagcctgcgcctcggcactttcggcaaccttctttatggaagaggggcgtttggagtctattgtttccaaaatgtctaatacatttaccatccttttccttctaggggttatcgcagaacttttttctgccttcaacactgttgcttctgctaaaggacttagaatctcgggcatctttgttgcttcttcagtttttgatttttcagccttatcttcgtaaaccctcatttcaataagcttagtcgaaggcgccttcggcattacagccggctcttcaatcttctgtgtgggaggaacaggttctttcgcttcagtaactgaagaagtttccccgccaaactcaggcactatggccggttcaatgtagcgcggtccgtgggtaaggaccttcaactttttcctcttcggcgcaggctcgcttggagcagccgaagcagcaacctttccagaagttgcaccctttcttttctgcccccgtggcgggtagcgatagtcagggtacacaaatccaatagcatcaaaaaccctatttgatcttttctttttttggctcccgaagaccgcagatagtgcattatcttcggacttggaatatactccatgtaactcatcgctagtattctcaacacacttcagccattcatcatctggtttgacaagctggtctccaaacctgaaggtg

SEQ ID NO: 164603 - DNA, 493 bp, Zea Mays
gggatagtgatattccttctctagctctgtctgctcttgttagccttcaagaattatccataacaaattttgatcaggcccttgaggatgtcattcttgaaggtatgctgttggaaccgactgctggtgatatgatggatgtttgctctgacattccagacatgggattagaggtatcccgggtagtatctcacgcatcatcgaccttggaaagcagtcttcggtgtcaataagttggtccggattgctcgaatcccatggaggtgactgaggatccttcagcctcagaggtggctgttgtagaaaacctagcccccaagggtggtgctggcggttacccagcccccgagggtgtcgccggtaatgatccggctctggtgggtagcgtgagctgcaacccagcccccgagggtgttgccggtagtgatatggctccgatgggtagtgcgagctgcaacccagcacccgagggtgcccgagtgggctctccttc

SEQ ID NO: 164604 - DNA, 610 bp, Zea Mays
gtggctggatcagctatgcaaaaatgtggcacagataatgagcatatggcagctgtcgccgggcacgaagtccatccaataccatgtcctcgatctcacatataaggaagtcaacaacatcaaactctgaatgagagatcagggcaccaagtagccagagctggatatgagtggtggcctctctataacccatccgaggcagtagcgttcgtctcatgagctgatataagtacttggccgctggagtgaaatcttccggtgagcgtcgcgatccatctttgaaaggtggtcagaacagggccgcgacgtgagctgtagatggagcaactccgccgaggaggatcagaagtaccataagacaagctgtgaagatgagtcgatgactcggtgaatccaaagatctgatgaatctggctagcatgaagtgtaacatcctctcgctcaaagcggaacctcatccactggtgattggggtcgatccatactgacgcatagaacactcgaacccactcctcaacatatctgccgctggtagtcagaagagtaaggagtccaggcaaatatgagaggtgcacctcagagtccgcactggctgctagcaggaaagcag

SEQ ID NO: 164605 - DNA, 589 bp, Zea Mays
tcaaggaattgaaggaagaaaaagcagcccttcaagacattctcgagatggaagaaggcgaagaagccaacactcgtgaggcataccggaccctgaaaatggactatgctaggaggctgaagaagctcgcccctgcaaagaagatccgaaagcgtttcaagagccaaggatgccagattgacccgagggaagaagccccgccaacactaccctccttaggaatagggagcttttccgacgtcaagaaagtgtccctggcttgccttgatgaccttatcagggaatttggggacaccttagaaaacgctcatgcgtagtgtaatatgtggtggttgtatgcatgtaatgaactggagtgctgaataaaataacatgtttgaaaaaaatatatggcatatgcataatagtaatcctttctcccttctggcagatggccttggataaaaccacgcctatcgcctcaagaattggagcaaggtctcccctaggtgtcgaaggagaagtcagtggagaagggagtgagacccacctcccgcgcctctggaactgccattagacctagcccatgttctggccaaccaaacccgac

SEQ ID NO: 164606 - DNA, 701 bp, Zea Mays
taagctggaataattcgggtggttctgccacaatagtgtgcatcgtctgcatgagggcgctttgatttgaaacgacctgtaagcttcttccgaagaccaccaagaccactgcaatatatgtgagaaataaccataagtgatttgttgataacaccacaacatagagaaagcaagtgtaactttctgtcaggggccggactgtccgcgctggagggccggactgtccgcgccaggggtccggactgtctgcgccaaactggcggacggtccgcgaccgtccaggggcgattttctagaaccctagtcgccccatccatcaatcgacgattcaacagaaaataaccatccaaacttgttcaaatttttgcacaacattcacaatgagtaacactagcaattccaccaatcatatttgtgaatccactgctcaattctagatcagagagaaaatccgaagaatccccaaatttgaagaaattagataaaatccatgagattttgaaatactgagatgaagacatgattgttgaacttccaacaagcttccggacagtccgtgcgcaagttcgcttcacggtctgctcacaatcgatgagagtctcctttagacatgtggagagtgtgagaggagaaggcaacggatgaaagtgacaatctgactgcctctgcccgacttaactgcctgtcgcggacggtccgcg

SEQ ID NO: 164607 - DNA, 491 bp, Zea Mays
gccatgtaggatgggtgcaagcacgaaacatgtttgaggccaccttctctagcatgcacgaggacatcgtacttgtactgtgaagatgagcaatcgcccactattacagcagcaagctcaccattggctggtaagttgtactgtgtgtcgtgtcgtgtgttacagcctaacaatcgcaacgtcacattttggtcgccttgttcgtctaaacgttctttagcaaagcgaaatgccgcgaccaacttgttatgctcatctagcatgttaagtaataaatgggccacctctggatccgtacgatcatggacgtcagcctcattctcaaacatgcccaacctattttgcacctcgtgttcagtgtcatatatgtaaagttgtgcaaactgtggtcgcaatccatgactgggtagcagcgagccaatgcgatggtgtacgacaccattgattttgaaaacataaggtgttgtaccgttatttatcgatctatcaac

SEQ ID NO: 164608 - DNA, 410 bp, Zea Mays
aaagtgtcatatcagaattcagaattcaaatcttgacgatgtcgtcggtgacagaattttacctataattcaaatcttgaaagccaaagtttcaaatccaaatgttcaaagagtacgggctggagagtgcagatgtcgtcggtgacggagatcccatagtggagagtcatgcgtcgccgccggggtgatggaaaggggattagggttaggggattggggagcgagtaggtgccgacacgccgcactccagtgactagtagagacgaagatcttgctggtcggacgatcgatgacgaagatccgataccggcagtggcgatggtaaggcggtgatggagattggggatggagcagcggcgagtggagagtcaaggattatgggagagaagacgcggacaagcgaatcgagt

SEQ ID NO: 164609 - DNA, 521 bp, Zea Mays
tagggcccaaatgctgaagctttttgccgagtgcatgagctacattaccaaacaatggccagagaagacagtttgcatgaaaattttggttgttataacttcgcgtatcgcaaggatacgaaggctccggtccttagttatcgcaccaagtggccaactggctggaaaagtgagtggttttatatcaaggccgatgagaaggagagagagaagctgaagacactggtcatgagcccactgagtttaagtttcgggatgactagacccttgtgcaacatgaagccagggttaccatgtcagctggctgtagcagaatttagagtggtggctgaacatattagcaccagggatctagtgcaagaatacatggtgaacagggtatctccaacattgagtgaatggagtatgccgaagctgaaaggaacaaagaagaagggtgaacttgttcgattgccctatcgcttcaagtttgagaaacaattcaaagagccctgccaagaatggctagagatgattgagac

SEQ ID NO: 164610 - DNA, 355 bp, Zea Mays
acatgtcttgtgatgcattggataaaacataggatatgagttgcactatacagaaggaagggctagtgagaaagagtacacctacaagcaagggttcactaggaatcacaccagatggggcacaatatagaatatttagagaagtctataacgttttggggttatccacaaggtaccaaacatgtctagtctgccactagataccatgtcggataggatactcatagagattgcacaacaacccatggaaggctataatgcaacgaatgtatccagtgtaacgctggtaaaatcaccagatgcccatactaaaatggtcgacaacaggtagttccaacaactagttgacgtgtac

SEQ ID NO: 164611 - DNA, 360 bp, Zea Mays
tggttcaaatttaaagttttatttcttgtcaacaaactgagaacacatcacatgtcaaactgtcatgctagcgaacagaggttgagctattgagatgaattcacctttttaccaactactatgaatgttcatttaactgttcatataaataaggcatggacatatttgtgctttgtgggcttatattctactgtacactccacttgtcatttctggatttttctgcttgtttgatctaccgttgctgtcagtgtgcatattatttattatttagtagttaatgcctaagtttggcttacttattggtacttctgtatagcaagatatgcacactgttttgtttgctaatgtatctttatg

SEQ ID NO: 164612 - DNA, 961 bp, Zea Mays
gttgggaaagaatgaacccttcgtaacctcctctcgcggtcgcacatgaaacctccccttcgcaacccctacgcaacataacccctcccttgcacgatccataccattttttcccttgctcgcaatttctcttcgcaccttcgcttgctcgcatcggaggttccccaagcgaggcgccattgtagcactgggaggaggaggagcaccatcatcttccttgccaccgctaatggttctccggccatcccttcctcggtgagaaatccctgcctccttccttgatttctccacatttagtcgtaaccggtgtgcagagttcctctgcaatgacctctgctcatagctatggtggccaatttccgcccctctcctcgttggatcataagaaagacgatctaatcaataatcccagggtcagatttcgccataccctaatttctccctccagtttcccttccctttcctctctagtcttctatgggtcttcttccttgtgttcttgtgtcccatggatgtggctgagtgaaaccctataagcacgatctccatgtgcgcacccctccctctctacctcccatgcgcccctactggacggtcgtacaggcccatggcacccacgccccccagctcatcccccttcattacgccccatggccccttattgccacccaacgccatgtccggtgcccctgctccacccgctagcgggccccatgcccccgcctagcccaagcgcggtggccagccagccgtctgatgtcgagccctcggctaagctttcccccacttacaaatggtgcgacccccctaatcccctattggtcgttgtgtatccttgtgacccccgacgcccgatcatgaaatccccgacaagcgcctgacccccgaccaatgcccccctgcgggctagccactgtcatgccttaccccttcacaccaaatcccattcagtctggtccta

SEQ ID NO: 164613 - DNA, 1275 bp, Zea Mays
cacaggggttcttatgcaaactagccatagcgaaggggtatggaactattacaaccgtccgattagtaatcagtgatccagattagatcggaccccattccgaaccggtacacgacgccaatcgtccgatccaagatctacggttaatatattacgcgtgccagcggccctacgatcctagatctacggcggtggacgagccctggcgaagcgttaccttgttttaatccagcccgctcatcagaagatcaacggcgatcgtgtgtcgtcctccccacgccgagaccaggcggtgacgccgacgccgtcgcggtggtgccatggccgcaacacacaggatccccgcacagcagcccaaacctcaacgtggatggtgcaacacgacgagagtgacaaggcgatcgaggcaaggggacccatgacgtagtccgtgccccctgacgcactggccacggtatgaagtggttcttgcggcggaatcccaagtccggcgtgaaattgccgatgtcccaggcatcccagccaccacggaatgcgtcatacgtcatccccgagcccattagagttccgcgcccacaccatggaagccaatcgcgacttcggctagaatagccgcggcggctcccatcctctctctctctttctcggttcttcaactcgcgccggcgatggtgcttccgtcttggatgggatgaggaggaggggtcgcggtccgtgctttatagccagaggaacgcggatttcgaagacccaatcccgccggcacgatcggactttgtttgcggtgtgccggtgatcacgcgatatcggcgggttgttgaagatgatccaacctgacgtgcgggccccaccgacagaggaacatgttgttacgagcgatggccggtaagaggatgagccgtgggtcccaccggcagaagaacaccccaggtcgcacgcagtactgggccgagcggtgcgcgccactggctgacgggcggggcccatatgtcggcgccaatttctggttgggctggcgcgcgctgaggaaagcggaagtgggctagattggggacgggcggcccagttaggttttattcttttccctttttattttccttttcttttatcttttccttctttccaaattcaaacttcgattttatttcaaactttgtggcacctttgtacactgactaattattaagtttgatcatacctactgcaatgaagttattaaattataattttatttattgaataatattcttttctctcctatattttcatggtttg

SEQ ID NO: 164614 - DNA, 273 bp, Zea Mays
gagacatcgagttatagttctagcaaactctctgtatgactgcgcctaaacatttttatttgaaggttatttgatattcattttcagcttgtagtttagaaatggtctttggattccctggtagccaaggttactaaagggtaatagaacatcttgaccaacggatttgtaatatttactctgtttggttatcaatgtttacttgctatttaagttttgtttgatcgtcaactttttctcaatgtttgattgtcaactttttctataccagca

SEQ ID NO: 164615 - DNA, 486 bp, Zea Mays
gattccgccaccgcctcctatgccatattgctcacatgatcatgaggcgggtagttccagtgctgcttctgctgccctactagctattgatcctgctctggtcgcgattcttcagtcacttacgcagcagcaggctcatctggcagcagagcaggcttgacaggcagccatccagcaacagatgtccgaacggatgctctccatgtttcagactatccaggaccgttaggacactcttcagcaacagctctcggtagatagggccgagcaccgggcgtttatgacacatatccttcagcacaccggtgttcagctcccaccagtccagtatgcccctcctccagctcttcacgcagctatcctaccagctctttcggtaggacccccacttccctcgtttggtccttctccttctccgctctagtcggtcactttagacttctcgtcaccagttgtgggaaccgtcagtgctcagccaccaatgcc

SEQ ID NO: 164616 - DNA, 539 bp, Zea Mays
ttcggatactgagactctgagacaaattgtcacaaggaaacatggtacaacagattgtattcacccttaacccacatgcattgagctgaattcggatgtaaattatagtagattaggttgaatactaaagtacccaaacaaaacctacggaggcacagagcaatcgaccaaacagcacaagcataagggcccttttgtttccctttcctgattattatctgagctggattctcaacaaaatactcatacccgagtagcagcatcacggaaaccacatctgaagaaaaaaaacactgttactacagtcataccatctggctgatataatgctgtcgttagtacggccaactcactggaatttggaaccgcagctctgagaagacgcagtgcaaagttcatcaactgccaggaaatgtctaccatcaatcattgcccaaaaaatcaatacggtcaattgagaggtggcagggttagggtttagacaatacacataagactatgggcctatttgtttaagcttttctcctaacaaacttttt

SEQ ID NO: 164617 - DNA, 346 bp, Zea Mays
tgaaacataaatcttgaagattatgtcaccgtaagaagtaggtgttccttacatttagagagaactagaaaaaacggtttacatgcatctggagccttctgaacacgaaacaatttacacgcgcgttggcgcgcgccagttactagttggatttgtggccgtgtccgctagcctccccatgcactgcaaaccacccacactcgcactcgcttagtggaaaacccactcccactgtcgtttcgtcaactcaagcgtcaccaccttctcctctccccgtcgcacttcggcgaggaattaaaaccgcaccaacactcctatatcttccccttggcccctataagaacct

SEQ ID NO: 164618 - DNA, 602 bp, Zea Mays
aatcgcggtttcactacctcttggtaagtatcacgaaccagcctccgattgtaccgtcctttgcattgtgttttcattagatactagtaagaacttggtaagacacggtagtgtgtgtgcctattcacccagagagcgcgtagttgcttattagggataacctttactgtttgttcctattttggtgtttccaatggcacgatccgatgacgagattgaggtagtcattcccacacaattttccaattgtgtcagccgcgaagacttcgatgttatttgcaagcgtatggaggaaaatatggaggaaacagtccacaagtctgtccatgatgcgcttattgcaatggattttggaaaagtgctagatagggtggagagacggataaccgagcttgttgatctggtcgccacgttggagacacgtccactacatcagcagcctcctccaccaccataaccccagcagcatccaccacggcatcagcagcctccaccataggctcaagatgatgccattttcgatgcacgtggcaattttgatgaggcagcttccagagacgcccgcctacgatgttgtcttcgtaggaacagggtaggtatgg

SEQ ID NO: 164619 - DNA, 369 bp, Zea Mays
gggttctcggtgtaaattttctaagacacagagcacagtgttctctggatggcgggttgatttctggtaaacgcaggggctctttaacaaataagccaacgaaggggtatccgggaatccagaccgtcagatctaacatgcgcggcccagattagatcaacttcgtaacgaaccgctacgacctattgtccatcggatccgaacccaacggtcagattttaatggatccagatctaactctatccgttggattcacaatcaatggctcagatcaatcctcccagcgggtatgccagggatctgatcgccgccgtacaccccacatcccacggcacacacggttttcccccaatcctttcttcttccctg

SEQ ID NO: 164620 - DNA, 619 bp, Zea Mays
cggctatgtatgtagtggcgggggtggaccaaaagcccggatgcgttgagtgcagtaggagaagacgactgtgcgagggtgagaattgcggcggagtgaagcaacctataatggcgatgaagaggagcgagggcgcgaggttgctcaggcaagttagctttgggttgatgttcgggaaaggataacaatccttccaagtctctgtgaccaggtataacaaatcatggggtgactgcttcgttctcccggaagcaaagcaaagcaaagcattgctttgcttgagaaggtcaacttggcaccttgcgacagcatgatatttatacctgaagttgcccagtttgaccaaatggctcaaagttccagaacgtacgtgtctaattcaaattgtaaaggtaaaacatatgtgaaaaattgaaggagaattagggagtcgtagaaactagaactctagaagtatgtaggtattgtatacatgcgttatttatctctacccttatataatacaccacttcaaattgtgaatatatctggtgcaaaccaactcctccgtgcaatcatacaaatttctaatctgaaccacatgatgttgatgcaagaaggcgtgcctgggaagtgggag

SEQ ID NO: 164621 - DNA, 1118 bp, Zea Mays
caccatttcaggggccaggatatcacacatgtactagtgtggagggttcgtttggttggctaccatggtatcccaacctttgacactctccaaatgagaaatttggatttttgaaactttaaacgtcatgattcatgcttttgtcattataacgttgacttcgtagaaataggactggaaatatgtgacacttgagtttaacgtcattttctgatttcctatcttttctaatctctctccttgcatttagcacctgaaaggacacttatgcccttctgcacctgcgtgttttgtgtcctattcttatgaagtcatcgttacaaatagtaaaagtgcgaagcacgatgtttgaagtcccgaatatccaaatttatcgtagcaaatgttttcaagatatgtgcacaattagcttttagccaaaacagacatggctgctagccgcttctttcctgagccccttgtccactataatcctccgcgattcatttgattgaggccattgtctcagagcagcatgaaaattcgatatcaacacatgaatcccagggtttcgtggatcagcctccagcatgcgcacagccacctcctttcctcttgcagcatccacgtttgctctgcacgcgttcagcatagcgacactgatagcgctggaaggcttatttcgacttgcggttagaagactagaatacagatcccaagcctcgtcaacacggcctgtacgtccgagcatgtctatcacacatgcgtagtgctccggctgtggatcgatcccgtacttgctcttcatcaaatgtagcatggactgagcttcgtccaccagaccagagtgtccgcaggctgacagaaccgccaggaatgtgattgcgtttggcaggaccgttggcgcagcctcctccattagcttaaacaaatccaaagcatcaacgccatgtccatggcgactataagcgcccatcatacttgaccaggagaccacgtttctggtagccatccggtcgaacactacgcgcgcagccgtcgccctcccacattttgcgtacatgtcaataagcgcattgcatgtgatggtgtccgaatcaaagtcgccacggagagccttgcaatgcacctgcgtaccg

SEQ ID NO: 164622 - DNA, 725 bp, Zea Mays
acccgacaccggcgatctcccgtcatgattcacactcacttgagagattcgtgcctgtggagagtggataactttggacaggttcactgctctatggattgagccgggagggtaaaagatctagtcggcacgcgacactctcttgagtgcttcatgccgcggtgtcatcggcagtcgagctctccctcactgtgcctctatactactggtgtccatgcacttgtgatgtactctcgtgactgtagatagccagctgtgccattgcgccattgtgtgccacgacgatgggccatagtgaaagaaattcgagcgccactgtgagcactttcgttccaaattcgtgaagcatgcgatcagtcactataaattgagtgccctccctattccgccctcttgttacacgctcaatgcaccactcctcacctcaatccatccactgtagcctgagaatttggaatttcccccaaatcggtcgccagcgccgccgtgagacatcttgtcgtggccaaagctctctgaggtaatcgcgatcgagcttgtgggtgttttgggttccattacgtgtggtgatgctcattgacctacccggttgaactctactgtagcaggatccctagaacgtcgtgttgccaccatggaacgccgtcgtggacgctctccccgtcgacccactgctctgttctttcgcctgtcttcctggtcgtcgtccttaagtcctggtgagt

SEQ ID NO: 164623 - DNA, 526 bp, Zea Mays
taggattaagtagggcgaagaatataaaatagcatttcagacacaccttggtcattatgaatatcgagtggtgccatttagtttaactggtgcccctgtcacttttcaggcttttatgaatcaaattttggaacctcttctgagaaagtatgtggtactgtttttgaatgatgtgctagtatatagtggaaacctagaagagcatgtgaagcatttagaacaagtgtttgagttgctgaggaagaatcaactaagcctcaaacaaaccaaatgttcttttgcttaggacaggttgaaattccttggccatgtggtcagttctagaggaatatccaccgatccaaacaagatcaaagttattcaggattggccaacacataagtgtgttaaggatgtacgtagttttctcggaatggccggttactatcgtaactttgtggctggttttggcatcatcagtaaacccgactagtagaaaaaggctcaaagcctgcggggacgatatatttttacaggcggattcagt

SEQ ID NO: 164624 - DNA, 618 bp, Zea Mays
aagccaccacagcggcgacccagcggctcgccgggcaccatcgccggtgtagaccacccggcgccctggaatcccgtgcatcggaacagcctacacaagttttcgcgaagggtacagtgtatgcaatagggagtattttaccagagacgaggaatttccacccacagatgcgttcgcgccgcggcaaattccagctccgacgagcaatgtcggccaccgcgcactgccgtagacccacggtggttcgcgcgcggttcttcccttgccccagcgatcacccggcccctgcttgaagccgcagcgccgccagaatccacgacacccgcgactttctctctctccctctcttcccccctatttctcagctcaccgatgataacgattgccgccctagcctggagttggtcgcacgcgaaggacatagcacatcgcgcctagcttttaaccacggagtcgaggactcccgagtcaaactccgagcaattcgcggcggtagttgaatccagacgctccacggagcccatgaagaccgcggccgactacggagagaaagcagtttcctgcctctggtaacccggggcttcgctggtggccggagacggcttcctgtccccctcc

SEQ ID NO: 164625 - DNA, 404 bp, Zea Mays
gccatggcgccaccgctcggctttggggcgtcgctgccctgtgtccggtgggggaagagatgagagagttgtgttgaaggggataagatggggaacctagatctggaaactgacggatgagagtcgactgtgggcggtattaaatccaaaccgtagtttcttcttccagcggctatggggagaatagggtgtcgcgaaccgtggaccgtggatacgtgatccagtggttgaaatgcaatgatgggccctcgggaactcgatctaattcgggcgctcgattggggatccaacggctctcaaccgtccgtaccccttcggccaagatatcttactaaagagacccttactttttcagtaactaacccccgatccactgtcgctgtgcgctgggtctcgggattctt

SEQ ID NO: 164626 - DNA, 433 bp, Zea Mays
aaataacctcaccacaagatggtatgacccaattgcatagctaatatgaatttaaatttgcacttaagttgagtacaaaatttagaatcaaaggaattaagaataaaagaaaacatgaaatgaaaataaaagaaaaaaaggcagaccagcgtttgggccatttctgctctccaatcagcccagctatcacatacgcggcccacttatccgctcccgtggtaccatcccttggcattcaccgccaggtgggccccactccccagggtcgcctagctccggatcgtggatcggcgcttccgtgacggcggccgactgatgggacccacgtcccagtctctgtattccgctcgcccgcgccgtgccattgtcttgtggggtctccgtgccagggtcagctgtcgcaacactgtggatcttccttcccctccccgca

SEQ ID NO: 164627 - DNA, 1008 bp, Zea Mays
gaaaccgaagacatacaaatcctccgcgaagtccacagcggaacttgcggctcccactcaggacctagggccctcgctgccaaggtgattcatcagggattttactggcccacaataatttgtactgccaatcgagtcacaaggtcatgcgaagcatgccaaaagttctccccttgctgaggcagcccttcgcaagtcaccaagctcatcgcccatacatggccacttcaacgctgggggctagacatcgttggaccactgcctacagctcaagggaacctcaagttcacctttgtcgtcgtcgaatatttcacaaagtggattgaggccagggtagtatccacaataacatcgaagaccgctcaaaaattcttttggcaaaacattgtctgtcgcttcggagtcccgttcgaactcacagtcgacaatggcaaacagttcgacagccaagacttcagggatttctgcttttccatcggcaccaagcctgtctttgcctcggtgtgccacccatagtccaacggtgttgttgagcgtgccaatggcaaaatttttagtgccatcaagaaaaggctttttgacgacaaaaagggcaaatgggccgaccaattacctgaagtggtatgggccctaaacacgacagagtgccgagcaaccgggttcacacccttcctcctactatatggatctaaggccatgatgccgcaagaattaaagcacgggtccccccgaacaaacaaatcagccatccccgatgtcgacgaaccaacttccaaagacctcatcgacggagaccgcgtcttcgccctgcaggccctcgacaaatatcaggttcaaactaaggcctggcgcgacaacactgtcatcccaagagaattcaacgaatgggacctcgtactcgtaagaaccacccggacagagtcacggggcaagctagagccgaagtgggaaggtccattcatagtcaagacgaaggcatcccccagtgcttacaggctggcaacatca

SEQ ID NO: 164628 - DNA, 936 bp, Zea Mays
taagcgcgagcatgtcgcactgtcttaagtcgctaccgacttaagccgattgctccattagcagggcatagtggtcaccccaagttaagtaagcgcgagcatgttgcaccgtcttaagtcgttgccgacttaagccgattgctccgttagcagggcatagtggtcaccccaagttaagtaagcgcgagcatgttgcaccgtcttgagtcgttgccgacttaagccgattgctccgttagcagggcatagtggtcaccccgagttaagtaagcgcgagcatgttgcaccgtcttgagtcgttgccgacttaagccaattgctccgttagcagggcatagtggtcaccccgagttaagtaagcgcgagcatgttgcaccgtcttgagtcattgccgacttaagccaattgctccgttagcagggcatagtggtcaccccgagttaagtaagcgcgagcatgttgcaccgtcttaagtcgttgccgacttaagccgattgctccgttagcagggcatagtggtcaccccgagttaagtaagcgcgagcatgttgcaccgtcttaaatcgttgccgacttaagccgattgctccgttagcagggcatagtggtcaccccgagttaagtaagcgcgagcatgttgcaccgtcttaagtcgttgccgacttaagccgattgctccgttagcagggtatagtggtcaccctgagttaaataagaatgcaggtcgatcatgaacaaactgagtattcctgaagccttttttattgatgacatatttcccattttacagagtacattatcgtcccgatagcttttgaaatacagctaggggtaaaacttcctgaggtgttctatattccaggagttcccaatttctgtgccgtccatttgagtaaggcgatatgatcccgaccgagtgacttctgctactatgaa

SEQ ID NO: 164629 - DNA, 305 bp, Zea Mays
caaggcgacgatgccaggtggtagaagacgtggtggcagcaaaaacagcagctgggtcaggtgacgaagacgaagaagatgtgtcgtgcggaagccgaagggtgtagagggggccggtgctgtcacatcggaggagggggcgccgagttgccgagtccttcacagtaagaccagaagagtgaaactcgacagaacaagaattatcagcagtaaaacgacgaatagagagaagattgtggaccaaagaaggagcgacaagaacatcgggaatgcgaaaagagccgggagggccggtggcacccaca

SEQ ID NO: 164630 - DNA, 1500 bp, Zea Mays
gtgatagagaacacaatgctgcaacagcaagagcattcttctgctccctaagtaatcgcttgtcagcagcatgctgcctccatttcctgaaacaccacaataggaatcaagcttttataagttaccacccaagttctactgatgggagcataaaggaatagaacaagtataaaagaacctcaatattgctttcaggttttcatcagaaattagtttctttgcgggcataacaattggtaaccaatcatcatttgtgctgttactaatactatggtcctcatattcctcatgataggacaaaggggagctaataggcaatccagctccaataaccagacattcatgatctggtggagttccctcatccatatctgcaccgatgccagaaacatgtgccctgaagtcatcttccgctccatacatactggagtaatttaaagacatgctatctgcaagaggatgtgaaataattggttctgccagagcattggcgttttgcgtgttagcttgtgaccacagtatgtctgtttgcatctctaccttctgagggatctcagcaacaccactatcctggtcttcagctataaggtcattaaccaattttgtcttggcttcagcttttggtgaagctacttttggtgtttttgacagtatgtccctcttgccagtacgtggagaaacagcagtaaggacagatgaaaacctgtcttttctaccttcagttggggagagaggctttggatgtgttgaactgaatagtttactggcagctcttggagagaaaggatctgaaaacaatgggctaatctgtctgtcaggagtgattgaaataggcccaggaaatgatggatccaaatccattctgccatcaggaggaatcgcaggagcattctgtggtagaaatagatctcttttgccagcaactggttgaccagtatatggaaagacagtcttttctttgctagttggagcacaatctggcccagaagaaacatcatcaacgaccctctgcgattttttagaatgcacaagctgtgaacagccagatgggaaatcactttcactgttaagaaaaggtccttctttgactaagtacagttcttcatactgcctcaacccaaaaccatggtattctaatagattttcaacatcctcgcccttgaaagagaaaatgaaggcatataaggatttcacaagttcccagttcagaattagtttctgtccaaaggaagaaaacatactaacctccatagcaagccacaccacaacctgcgaaatagggatgccttggccattctgaagaccactgtgcaaggaagcgagtgcttgcctccttagctgggaagagagttcgcttgttaaatttacaaaaaaaaggtgcacttgaaattgaacagcagcctactacatgaaagtacaccgaagtagtgatttagaagtactgaaagacactgctatcacaaaatgatctaatgctaataactaaataatgtgtaacag

SEQ ID NO: 164631 - DNA, 975 bp, Zea Mays
gcataatctgtcttggggtcatcctatctttttgttttactctaccccgtgcatcccttccgcagcgatgaggggaggtgagctgaaccatgctttccttgatggtcgagcaatggcgcctcgtgagctgcaaacaagtaatccgagtgaggccccagctcctttcgcaggatccaagcgtggggtctgctaggggactgtactcatactcctaggcactgactcatatagttgccgacttcattcgaccagactcgatggctcgttgcctctctttgtgataaaccatgagtcagtcattcccaagactcgaacacaaactagtgatgcccttcatgcttcacgcatcagggtccttgccgctagtgtgcccaacacttgcttgcccctcgctctagattttgttgaggtggtcgtgagcccttgtggaccggactttcgggacccggaatttgcggcaattctaccgtgggttttttcaatcccctctgtaaaggaaatagaaggagattgaggtattaccaggttggactctccaagcgctcgcttaggctccttcagtgggatattttggtcggtggcttggccaacttttcttccctttggctctacagggtcctgcgtcaattgcatggacaagggaaaagtataaggtttgttagcatgatcgagttcgcaatttagattttaaaaggcacataaaataaggtgcggagagactcacgatcttccttcttccttggttttgtctatccgacatccccgaacgatcattccagggtcgagttcagaaccggcctagggcgccaagacttcgccatgaatcgagccaaccaagcaacttgatgttcccagtgtggaccgatgccttcccctttttgtggcccgactcaatgtcccatggcttgaggcagcgttcgccagctagttgccgcacaaaagaggggggatggttcttgcgatcggttggaggca

SEQ ID NO: 164632 - DNA, 1757 bp, Zea Mays
gcggcagcacaagggggagggggttagggggagggcggctagggttaaggggaggttagtgagccggatcgagattcacggcccaactcgctcacacgacagctcccgaccctagcgcataagtctaaccaaaaatatccactgtcctactggtgaatgcttcccaaaaattccaaacccccaaagcgcatcacccgagagaaaaaacaaagaaagaataacctccacttctcttctttgcaaaccgggtatcacactctacctcccttaaaaagaattcgacctcgaattctaacgcttctatcagcacgacaaaagaaaaaattaatgaatcaacaacacttacccacaacaaaaagttcgggatttttctgccgcatcagctcctcaagttcccacgtagcctcgtgctcatactgattagtccataagaccttgacatacttaattgatctcttcctcaaaacacgctccgaggattccaagatacgcaccggacgacactccagagtcagatcctgttgcacagcaattggttccatttcgatctgatgatctaggtcccgcaagaacttcctcaacatagagacatgaaatactgggtgtaccccagccatggaatccggcaattgcaggcgataagccaaattgcccacccgggccaagatagtgaacggtccaatgtatctcgggctaagctttccggagataccgaatcgaacaactcctttagtaggtgataccctgagaaggacttggtcacccactgcaaattccaaattccgcctcctcacattagcataactcttctaacggctctgagcggccaaaatattctgacgaatttcccgaaccttctcagaagtttgctaaacccaatcaggaccaaccagggatctctctcctaaagtctcccagcacagaggggagatacaccgcctaccatataaagcctcaaatggtgccatcttgatgctagcctagtagctgttgttataagcaaactctgccaatgcaagatgatcctcccagctacccttccatgacagaacacaagcacgcaacatatcttccaaggtttggatcgttcactctaactgaccatccgtctgagggtggaaagcgacactaagtgaaagcttgatacccaatgcactgtgaagactctcctagaatttggatacaaatttggagtcttgatcagaaacaatggacataggcaccccgtgaagcctgattacttccttcatatacaagggaaccaattctgaagttgaatttgtggtcttcatgggaataaaatgcacagacttagttaagcgatccactaccacccatatagcatccctgccccgaggagaatgaggtaagcccaccacaaaatccatggtgatatgctcccacttccactccagaatttccaatggcttcagtaaacctgcaggcctcttatgctcggccttcacatgctgacatacttcacaggcgaccacatacttagaaacgtcaatcttcaaccgcttccattagaagtgttgcttcaaatccctatacattttggtttcgccagggtgaacggtgtaaggagttttatgagcttctctcaagatatccatcttcacctccgatttctgaagcacacaaagacggcccctgaaatgaaccaaatcattctcatcaatggtgaactcccggggtttaccatcaccaaccctctttcgagcttcctgcaatagacgatcctgctactgagccgc

SEQ ID NO: 164633 - DNA, 749 bp, Zea Mays
cccgggcggcgcaatcggttctgtctcgggtctctcatctctctatgaggtcggcctctccttttatagaccaaggagggggcggttatagatagcatcttctagaagttagcataacataagataaaagaaatgattcacactcaataaaatcttgtagtgtgttggtgtctttccccgcatgggccttctatcatatctctgagattgtcgggggtgggcgtgatccgtgccggtgatgaaagtccgagtgtcaccattacttgttttgtccgtgtctccccctacgtcgaccttccgccttttgtggcctcactgctggtttctctttaatctcggttaagggacataggacttgtagggacttaggcctaggatcggtagattatgagtgggggagaccgatactattcacgccgcatcccaccactaggcgtagttaatgaggcgtacctagagttgacggtgtggctaatctgacggacacgcaagatccactcgaatggggtttcgaccgattcgtttgaaccctttcacctgcctctgtctcatctaacctcttggcttgatgcaaggggtattagccctcgagcctttggaggaaagtaggtgttccatcggaggcttttcttagctcatggcctaaaggtggtcagggcgttttggtttcccatgcgcgttggatttaggcaactctcgcctagagtcggattaagtctttgcttaggtggcataagctttcacaactt

SEQ ID NO: 164634 - DNA, 866 bp, Zea Mays
aattttctatttttattggtctctgaacttggcgcattattatcagaaactccaggggctatagcgcaaaagaatccaagactcagtggtgcacctgagtgggctgcgggtttattctgaataaatctaggggcccttatgtaaaaagggtcggtcgaaggggtaccggagcatctgagccgtccgatcaaaatctgaaggtccagattagatagccatcacaccaaaccggtaggcgctcacaaccctaggatcacgatccgacggtggtggttttaaagaggtaagaagggttctggaccgcccgatcccatccaacgactcacgatcgatcccgaagagagtatcatctgcgcgatcacgatcgtcgacaatcaatctaacggttcagattaggtgcacgaagggatgcgtccagatcggatcctaaccatcggatagagatctaacggttagaacaccatcttctatcctgacgtagccccgagcagcgcgttcccagggacggcggcgcggtgctccggcgagcagcccatccccgcctcggtgaccgattcgtgacacgacgagctgctacactaagcggagaatatggcgaacagaggggaggcaatttcacctttagattgttgtgagtctcggtcccgccatggtacggtgcggcaccgcggcaacaccccccctccgatgaacgattcccatcaagagcgctacctaggtcaagtatgcaggacggctacacaacctagcgatgagggcggagattcggaggtgattttaccggaggatggcagcgcaggggctccgctccacgtgatggcgcctctctaccatggttcttggacttcgacgagcacacacttgac

SEQ ID NO: 164635 - DNA, 616 bp, Zea Mays
gttagaacttatagtctgtataagtaatttttttagtaaggtgacgactatgaaaattacttagtagtttttggactgtgattgctcttagctcctcgcgctctaccaaaagccacctgccatcaacgtctcccgaaatcgccattaggaggctacactatactacactacactacactacaggaacaagtacgcttacggcctcatgtacgccgtcaaccctactgtatcacttgttcagcaacatgtttgtcaggccatggcttccgcctcgatctccaagctggctgttagctcagatctttgcaaccgcttgaatgtccacatcagcatggagggtgagggatggatgggctgctcatgcgggctgtagggatgctatgctatgctatagtatcgggtatcgcgcagcctggcgtgccgatggagcccaagcctgctcgatttaggcaggcaactggagactggagtgcaagccaccggcgtccgtatgatatggcgccggccggtttttcgcgtcgacggcgtgccagtccggcatcaagaaaccgcgggcgggacgcatcgcatgttttgcttcggcctgcggattgtgattggcaacggccagtgggca

SEQ ID NO: 164636 - DNA, 287 bp, Zea Mays
gtttgtaacaagctcaacaaatgagaataagaggggagaggaaaaccaaacccgagggcacaagcacaaacctcacaccaaaggagctccttcaatcgatttgatttgagagctagattgggtgagagggaaagagggagtgcctttgtctcaagttatgtgatcagtaagtgtgtgggcgactagcagctatgaggagagagatgtgaggggtatttatagactctcctaaaaaagagtcgttggtgtcgatttttctgtgaaggaccagttgaaccgctgccctg

SEQ ID NO: 164637 - DNA, 1158 bp, Zea Mays
gtgttattaccttaatacaatcaaaatacacactgtaggtcattgaatttgaatgacatatttcttgcccttcaagtttttttttcattttttgtgaacttggtctactaaacaacaattcatttttctgaaataccgttgcattcaatttggactttaaatagttggtagactgtacggcaagatgaagttttaagttaatgcccacttctggaaaatcattggagggaccactgttcaaatgattttttctgccatggtaaaaccgaatttcattaccacatcaacgaaattacaacgttcatcagttttagaattccgttgcactgtaactacttcccatctccatgtttctgatcaccaagggatcaaccagcatggaccaaaaaccaactaacaaactgatctaacagagttaaccaacaaaagaggaccaacccagctaaggcaaataaaacgatctctgttataggccaagagcctgacaagcagcacataggctggaaagggactattactgagaacaactatcctgcatgaggtatgagcagctgatcatcgtggttgcctttctttgcagcctgtttgtggaagaagaacaccattgccttcagactttctgctccttgcatcaactgcttctccatctccgatttctgcaaacgtgccaaataatcaaggaaggaacagatcatacaaataatgtccgtaggggatttgattctcttgtctctgaaacaaacaacatttgcatcaatgcttctttatgtcatgcttgccaatcaggtcaccatacacgttcgcctttttctaattgttagagtgctgtttacgactttgtgtatacctctattgtaatgggccttggcccaccacacagctatatatattcactcccaaccctgattagggttagggttttcactccaacttggtactagaggtgggttttccaattttctcattccctccctcccacctccaatcgccgccaccctcccctgcccccagccgccgtgcacctcaccttctcctccgcccgacgtcctcccttacctcctctcccggttgaccgccgcctggccctctctcgtccaccgggagctcctccctgttgccggatcgggctgcccgtgccgccccttccgcaggcttcac

SEQ ID NO: 164638 - DNA, 448 bp, Zea Mays
gtttttgggtacttcgttggtttcatggtcttctcgaaaacagtctagtgtttccctgtctaccacagaggccgagtatgttgctgccactagctgttgttcgcagtagctttggatgatggctaccttacatgattttggcttggattttcatcatgtgcctatgctttgtgatagcacgagtgccataagtgttgccaagaatcatgtgctacattcgaggaccaagcacactgatgttcgctttcacttttttcgtggtcattacgagaaaggcgacatcgaattgcgctacattgataccactcgccagcttgctgaatttttgaccaaaccccttgatcaaaaattttttgttcatttgtgagggggattgggtgtttgtttcccttttttattagagggctcccttttggtcttttcttcttattttctgctttcattttct

SEQ ID NO: 164639 - DNA, 627 bp, Zea Mays
tgttcaaagtttatgatttccaggtttctcctattcacctccccctctaggcgactttcacccactccgtccccagcacttcatgcctttgctgctggagcttcttcatcagcaccacctgtgccagtcgcccaagcccctgctcctagtgctgatgaccctgatggttcttgtgatgatgaaggcaatgaataaaatgaagataataaccaagacaataatggtaacaacaataatgaagccagaccaggatggaggatttgatggaatgtgacctatcactgagcattacacctcgatattcaagatgggccacttccaaaatttattgcagaatgtgctacatgagctgggaatctacgtccgtcctctttatgacacacagtgggtttctacgcccccctcgggcttgctattatatcacctgtatgcatatcagagtgatggatcaaggagatagaggattctggactctctcggcacatatgtctttgacatcgttgtcacctacgctgcttcggtcagcaatgctgctcggagagctttgtggtccctcaaccaatcttatcgtctattgctacatgacacggcgtataggcaccttcctctatgtcctcttggtgagac

SEQ ID NO: 164640 - DNA, 913 bp, Zea Mays
tgaaaggccagagggggttcggccaaacatcttccatgatatgacggtgaacgtcgcgtgacttggcatgtgctctcccgtcgggggctcggcctgctgcttcttgtttgagaacatgtcgaagctattgtagccattactactcctctatgagtttggtgtgtagctcgcggagttgctcgatgtgtgcgatctgactccctgtgggggtctaaactgcaccctgctcccttggctctctggcgtgtggggatggtgtcaacgcgttggcctcccgaggcatgccaagttggtttccttcatcatgctcctcgtgccccgtgtggaagcactcctgagtcaggtcgtaaccctcatcatcgaagctgtagtcgttggagccatcggaggggaagtggttgcatgtggacaagaaatatcgcatggccctaggaccacggagcctagagaagcctaggcctagacccagatcattttctgcctcgaagtctatgtaccccaagatttctgggaggtccacatacatgctggtgtaggtgcttgtcgtataggggtagcttggaagatcgaagctcatttgaaagaagatgggattgaatactgatggtcccccagtcaaatggtggagctcacacctcctgacccgtaggaggaggagccggtgaagctggcgtctcccaacctgcaggaggggagctggtggtgtcggtgttggagcgacgtatgttgatgctttgggcatgaagctaacgcatgatatgtccctcgtaagggagtctacgtcgtcggccttcctgggagcattgactaggcatggagcgttgttccgtctctgtctccttcggcgaggaggacagcggcggagttctagacgtccctccacaagccaggtgagcaggagtggcctcgctcc

SEQ ID NO: 164641 - DNA, 761 bp, Zea Mays
gagatgctgattccgcttttgattgatctgtcataactctcttcaatttttgcaggtagcgtgtcatagcttctgacggtttcttgacattatcggtggcgattcgctgatgaattttctttgaagtagttggcccttcaatattgatgtcaacctttgcttcctttctgatgtccgcatcgacattctgaggaacaattttgtctacgtccccctcgtcgagttcctttgcaagaggtgatatgattgtttcaacggtttttgtggaggtcggtgctatattttcctgcaccatggggtatggaatgatcgaactatctttctgttgcattggtgttgaattcggcggtggtgacttatgacacgattaacggcttaagatcggctcatcacccaacttaatgtcgcgtcgatgccaaaggaccaactcgttcatttcctcctgcaaagttatgatcccctcaactggaaagtctatctcccaatcttcacaaccactgtctgtgatctctagaacttggaccacaacatagtgtggcgagacaggattatcatggtagttaacaagtcctggttttaccaaaccagtagcagcctgtttagtttttgtcctagatctattcattggaatatgaagacaacaaggcttgtcctcaacaatatcgtctacagcgtacttggtgcccgatacgaagtcttgcacagatcctacgctgctagggactagaggtggactcatgtggcctgacttgagttcacat

SEQ ID NO: 164642 - DNA, 753 bp, Zea Mays
gcatgcatgtgatgagcacacacgattttcatccccctgactccaacccattcacatcgaagggcctcaacccgccaacccagaagaaggacagctcgctttgctcaatggtcgtcagcgattcatcattcgtttgcagctcacaaacaagaacttggccattaaaaaaaaagcgaccaccttctcccccattctttggcaccctagtagtagtaccccacaggccaaccacagcgatagcacctacagtagtaggtagcagctcgtttcgtgcatcttcttgcagatgaagcaaggagtttgttactacgacgggatggaaccggccacccacaggccagagccaaaacagggaaatggaaaacaaaccggcagtgtgtctgtctccggccagctagagatgcaataggaccgatccccaatttcacacagagaatttctctattagtgcacgtagacggataatttagtctccacggggatcgaaacggtgaacactttgttcccgtcgggttcgcggggacccgttcgccgcatagtcgcatacccatcccacgaagttttcttcatctaaattagtccatgttaaaattatactaaaatttagagcatagtctattataaaataacaagctatactttaaagaagactttccttgtatttttaaatcttgtttgttaaatttgtatcgacacaatataaccagttttaatttaactctataaatattgtatttagtaagggaattttac

SEQ ID NO: 164643 - DNA, 1002 bp, Zea Mays
gcctagcgaagggggctcttgtctttccgctgtgggctgtggcttcctcccctcgagcttatctgcatagcaaaggtgctttgcaatcagatgggaagttagtaggaaatgtgatcgaggtcagggtttggcttcacccaatagataccatgctggagatagctgtggtcaatgtagtcaaggtagttgatgttgaggtggctgtatatgaagctgctgacacaaagaggtgccatgatgatgacaaagatgtgtcggggtagtcgtcatgaaaggggatgatgctgaggtcgatgtagttagggctatcgaggacgtagacaaatgcagtgacacaatcaagagagggttgatgtagtcaagctgcgagggacgaatcatgcgacatggttgccaggcttgggaatgcattgtggatgaagcacacactagtgttgccaatatttgacgtacgaggtagagggccccaaccatgcatcagcgtttgagggaacattagaggtcttggcgatggttgctgtgcgctgaacgatggggtagaaggtgctgatgcaactcacggatgtcgaagtagacaaagtagttggggaagagacgatgacattaaagacgtggttgtgctggacgaataagaagccatacgaagtcggacgtgtctaaccgaaagattagtccaaacggatgtgtctgcccaatggcagcagttcggacgcaaggtatggtggtgatggtagcactcgatgttcgtgatggaggactcaaatagcttgacaaagattgggtattgatacgtgctgcgtaaggggcacaacatggttgtcgttgcaaatgagacaacgatgtagatgtagcgacaaatgccatgtggatagaggcatgcctgtgagggcatgtcttcgtcgatgatgactataggcagtggtgctgtggcctgagatagtgatacaataatatccctattgctcagagagatccacgtagtacttgatggtagacgtcatg

SEQ ID NO: 164644 - DNA, 737 bp, Zea Mays
accgggtagtgcgcaacagatacaccatactgggtgtatggctacgcatgccaacgagtgacgcaggctagaccgcacgacgcacgactgctccatacgattgacctgtgggaccccccgcacctaccacgaggatgtcagcagaagatcacctaaagggacccgtactacaagcgtacgagatagtacgccatgatgggagtattgctacgcacggccctacggatagcaccagaggaaccacgctacccaagggccaccgaccgagctccccccagcataatacaagtccccattgtaaagtccagcccttgaacaataaaagggaaggaccacctcttttctaaacacacgagcacaccagttgtaacacaccctcagcaatactacgattagcacaacactagactagggcgcaagtctgaaccagtataaatcctctgtctcaatcctcatgttcgagtcccagcgactcaccattcggagtgagtccatacaaactttccctccagacacaaaacttactgctcctggtttccgaaaccacgacagttggcaagccaggtatggggaacttttagcatgccaatagacattcatcacttcgatggcccacacatcgacattcgccagtggcgaaacctttgcgccggggagccacatcatgttcaacacccttgacttcctcgccaccgccaccggcgatctatgcctcaccaccttcgacgtacctgtcg

SEQ ID NO: 164645 - DNA, 346 bp, Zea Mays
gtaaaattgcctagacacagatcggctggctccaggactgcgggttgaatccgcagaaacggaggggctcttttgaaagaagtgcacggcaaaggggtaccgttgattcagagccgtccgatcctagatccagggaccagattagaaccccgactcggtacgcgcctgatttaatctctaccgcttgttttcaatccgaaggcccgagttctattactatgggatcccatctccatcgcccaactacaatcgaacggtcagcatccatcttcttcctccagccacacccaccgatcgcggcgcccagacaacggtggcaattcgccggcgagcacacacaccgacg

SEQ ID NO: 164646 - DNA, 294 bp, Zea Mays
aggatggtgaggaatctgctatggctagatttttgggcgggttaaatagggaaattcaggacatccttgcttataaagattatgctaacgtaacccaattgtttcatcttgcttgcaaagctgaaagggaagtgcagggacgacgtgctagtgcaaggtctaatgtttctgcaggaaaatctacaccatggtagcagcgcacaactacgtccatgaccggccgtacaccagcaccaactccctcgccgagtcgaccagcaccaccgccttcctccggcgacaaaccacgtgcat

SEQ ID NO: 164647 - DNA, 767 bp, Zea Mays
tttctgtacgattcctttgaaattactacgtttacatttgtcgctggaaagtttgtatggtcgatgacgcgatacccaatcctgggaaggagaggacccgcacatgttggttttgtgccattcatttttgagacattatctttgacgctgaacatttgaattggtagcttgtgcttcctgtgctaactttacacattatattaatgttgctgctagtgaggtaagcatcattaaagtcatctgcttgataaaaccactgtacttaatagcttcatgtgttgtatacatttgcttcttggttgatgtcctttgctcttgaattagcattctttagaatctagtcatctttctttttacaagacatttcattttaatttcatcaatatccgtaccaactttttatcttatttactaggactttaaagcacgagatttgtacgtcgtgcatcacacgcgaagcgcttcctcctcttcattgttgttgtcgtatattaacatccaagtccccatctctttccccatcttcgccttcatctcccaaattcttccacaccacagagtcatgcgttgcgtgcgaagtgcctagatctattttctcctctaggtgtcgtctaataaccagataaccaacaatgtaaccaacatgagcgcttcttcctcctctttgttgttgtcgtcgtatattaacctccaactccctagctccttttgcatctctatctcccttacccatgttcatttgcaccaccatagaggacatcgacctt

SEQ ID NO: 164648 - DNA, 456 bp, Zea Mays
cgtcctgtctccgtgattaacaatcattgattcttgcttcgttttagctttaatctgttctattattgcgcatccataaaatcctctgtcaacaataataggttcaatcaagtagctaggccaaatttcagcaaaaaatatcaaccggttccgttccgccaagacagaagggaaacaacgcttaactcatcatgcatggcatctctagttctctactgtgaagtaaaggcccagtaacgctccaatctctagttccagaaggcatcaaacagtacaagaccatgcatacaattaatggaagaacgaagctaaaaaacactctaccgtggagaaggacatcccacatttgtgtggtgccaaatccagccccatccacaatttgttcccgtaattctaccaaagctagcagcacataatttcatcaaggcaacatcaagtccagctttagcatccgtc

SEQ ID NO: 164649 - DNA, 568 bp, Zea Mays
atggccatgaacttggctagccccggtcttccgatgatggtgttgtaggtgcagttgaaccgagccacctcaaagcacaaaatctcaatgaggtatttatcaggcatgtcgaaggtcatgggcaagtaaatatggcacagggggtactacccctcggtcgagatgatgctgaagaagggactgtttgactcatggaggtcggtgacagggaccccaagtgcttgaagggtcttggggaatgtaaagttgatgctactgccccatccatcagcacctttctaactcggctctcttagatcactaggttgatgagtagagggtaaattactggatgatcaaagctaagccactagtctacccaactgaaggtgatggaggttttcgaccacccgtatgacgcaagcgagctagttgtggccaccaggacttatcgagtgaatagcttctgttgtctcttgttttgttgtgagccatggcctcagaagatgatgttgaccttcctgtcaacgttagggaaaggtggagcattgcctccttgtcactaaggtagcggatcttggcctcgtcg

SEQ ID NO: 164650 - DNA, 297 bp, Zea Mays
ggctgggtttgggtgacgagttgcaggagggtttgggagaggaggaagttggcagaactaggtcgcagccagaaggtgtgccaggtagtctgctctcagcttatgagatggtaaaaaagaacggtcaggttactccagaggtggcggtttgtgctgctgttccggcagtgtatacaggttcatccgtgtcatatcgtagcaagaggagggctgcaacttcagcgggagacagtttggagagggcttccaggttgaaggcgtctcacaacctcgactccgattcatggaaggtaatga

SEQ ID NO: 164651 - DNA, 984 bp, Zea Mays
cctttactgaaggtcctcaaactaagaaatcttaattgttttgtgtttgttttaggaataacaaattgaccttcatcgcagtaacctttgcaggttaaagaaaaaaaagaaactttggctttaatgcttagttgaagcactgaaagtggcctagagggggtgggtgaataggctacacttgcaattctcaacaaaaaaatcgaattttttgtgagaaaagcagttcaacagggggccagttcaactgggtttgaggctagttcaaccaagattcacttattcaactgcgaacttaattgaaactgcttagatctactaataatacacacaattgaagatttgaattaaaaccaactaagcagatcaaagatctgatatgatgagagacaaaatcatacccacaaaagcacatgagacacaatatttttaccaaggttcagtcacaccaccaaggtgccctactcctcgttgaggtgcccacaaagggccagatctttctcaaccctattcctcgttgccggccacacatgtcaaggcgatctcttcctcaatttgcccacaaagattcgatgatacaaaacgttcttgggaccgtccacaactttagagactcctaaggcaagattacaagcacacaataaacaacacgttccaagaataaagagatcgcaaggaggaacaatttgcaccaactataaaaagcgacagagaccaaagaactcatgtcaaaatcgcactttagatcaagaacttatctcacaccaaagaatcttcccaccgatctgaggggggaggacttggggcgtgagatcagagttgtaatgcttggaaatgaaggagagcagtcgtcacagggtttaggctcgagagccttagtgtttagaagaggggagaaaggtatatatagccgccacgaaaaatatgtagctatttttgggcgactgcgcaatttatggttgaaccagccctgatcctggttgaacc

SEQ ID NO: 164652 - DNA, 672 bp, Zea Mays
tactcgataggattttccccccactgttttcgctaaaagaaacatgagtgggtttcaacctacccgaggagcaggtaaaattcttgcctagattgaagccaaacactcactgatattaatgccaaactctttagaatatggatcttcatggtaagagttatgattcaccatttgtgggcacaaaaaaggttgtcatttgcataagcataatgaagtcacaaaggaaaggagaacccaaatagaactaaaacatatcacctgaataatgtcacactatcaatcatgtgggcgctagcatgtctcctctaaaagagctcttatctgactctggtttaatctctttacctatgtcccttcactattttgcaggcctaagcaaactcagatttttaagcgcgcattagaaacataggttctgctatcaaaggttagacatggataagtcatagtgtggagctttgctagaaaagagcaagggtaacagttatatccactaaggttacctccattggaaggtaaccaagttttagtgtatgccatagcccacaagaccaaaagtaccatcgaactttgatataaatagcatcatcagtcaacttgaaaccaaaaaaggaaaaggaactgtagttagcttccagttctaatttatactgagatggtggtgagacaagt

SEQ ID NO: 164653 - DNA, 311 bp, Zea Mays
gatagacgatacattaccaacttgtggaggtgagggcgcggaaggagacttttagggaggaacaggaacagccacgaccacgatgagtccttggcagtgcatgccgtcgactgcaacactactacacgtccatcaggtaacagatgcaacaaggcgtctgccgcccatcaggttcagtcacctaaatgctccaaatccaagaccacgtccaggtgtgtgatccatcaactattttttcaaacaaagatgcagagaattagcctgtcctgtccaactgttggtaaaaatgtttgttactatccacatctctg

SEQ ID NO: 164654 - DNA, 745 bp, Zea Mays
ccatcacgtggaaagagaccgcaacgcagcagcatgcgagttatcgaaactaggatctagacgggcccaagtcccacctagagtcttcgtctaggaagtgccacgcccaagtattccctaagatcatgcggaagagtgcaacaccctgagccaacaagaatcggaccctaatgactgaagagagcctatcatcaggtacataaggaatgaagaagaaccagatgataaggctacagcagaacgcatcgcgagacagtcggcccactacaccctcatagggggcgcactgtatagaaggggtgcgacaggagtcctcatgaagtgcatttcctcggttactaggaaacagcaattagatgagatccacatcggacagtgtggaatacacatagcatccagaactctggttgggaaagttttcaggtctggtttctattagccaacagcaaagagtgatgtagccgagttagtccagagatgtgaagcttgccaattcttgtcaaagcaacaacatttaccagcacagctgctgcaaaccatacctataacatggccatttgcatgctgggattggacatgattggacccttcaagaaagctcagggaggctatactcatgtgctggtcgccatcgacaaattcacgaaatggatagagtacaaacctattgcttctttaacttcagccaaggtagtggggttcatacaagacataacattcagatcaagtatgcatcagtagcaca

SEQ ID NO: 164655 - DNA, 645 bp, Zea Mays
ttggacttctggctgtttgaggcagatgactctcagctggacatcaccctgctctgtgcttcaattcttttgctgattagactagcagttcagtagctacattttggacttcctctcatctcagccgatctcctccttttgtcgtggtacattcattgcgtatattttgtggatatgacttcttcagaaaatctttgaaaattctcggcgacacacccaatgggtgtgcccaaggggtgtcttggtacgtagagtgtttaccacactgtcctggagtagtaacttgatgtgaccgcggggtgtaaccatattgcctgagcagttgaccttggtccaaatggtgtcgtgttacgcgaagcggcgcctgttgcctgactcattttcaggcggcttgaattacttattgaattcttgcgactgttcggcgagcgtggtaggaagtggacggtcacccccagcctctataaatagcctgcttgccccgttgttctcttcactcatccttcgatcttttgctttcttcttcttcttcgctctctccttcaccaaccaaccatgggtagaggcaggaggggtcgcggttggcctcgccgtgctgatggcaagcacaagcgtgcttcgagtcctccctcggaggacttcggg

SEQ ID NO: 164656 - DNA, 485 bp, Zea Mays
cacacctatctcaaccatgtctctagttatggtaacaccaatacccattatccttgatgataacaccaacttgaccgatataacaggttacataacttatccaaccaatctagaagcaaaacaacaagacagactttgcttaaacttatttaactcataaccacatattaacctattttgtttacctaagaatctgccttaacaacatgtcccaaattcggataacaacttcaagaacgaagatcaaagatgatcgacctcatcaaatcaaggaaggataagattcaagccagatcttcaaaggaatcaagatccacaatcttggatggagtatttccataccctaccctttcttgcccaaacctatctatgctttaaaggcatcttctatcctacataatcaagtgcacatacatatatacacccatgctttcctaaccaccagctccaccaagctacatatatatatatatatattattacta

SEQ ID NO: 164657 - DNA, 531 bp, Zea Mays
gagagcttttggggttcttcaatctaggttcgccattgttcgaggaccagctcgcatttgggacacagagacactaggaatgatcatgagggcttgtgtgatcatgcacaacatgattgttgaagatgaaggagtcgtggaccctgatgagcgattcgaggacggtggtgaaaatgtgcgacctggtcacgggcaggctactcgtacacttgatcaatttattgaagcacacaaaaagataagagacaaggaaacacatgtgcagttgaaagaagacctcatcgaacacctttggaaccatcatcctgatttgtatacatagttattttatttaattgtttggacgacctatatgtttgttctcaagtgtaatgaacagttttttctcttccaacttgtaattttggttcacaggatttcggttccggtgaattaaaaaataaagtaaagtttagtagtgctatgcgccagcgccaattcgaagcaacaggtacaggagcaggaaactagaatacgctcagtaggtcacag

SEQ ID NO: 164658 - DNA, 307 bp, Zea Mays
agaagagcgactgaatacggtgattcaatcagcacgatatcagcaaactctgaggcgctaccatgataaggccatacgacatcgatccttcacagtgggagatctcgtcctccgccgaattctaacgggggaggggcggcataaattatcacctctatgggaaggaccattcctagtagcagaagtcactcggtcgggatcatatcgcctcactcagatggacgacacggaaattgggaactcatggaatatagaacacctcaggaagttttacccctagctacatcccaaaagctctcggaacgat

SEQ ID NO: 164659 - DNA, 536 bp, Zea Mays
gagaggaaggaactcttcggcgccggcggggaggccgcgcccgtcgacggcgatgcgttcagggcgtacaggcagaaggtggccaacctcaccggagtcacccgcaagttcatagggaacctcgtgagggctttcgagaccgacctgtcggaggtggtggcggtcattccggccaactagctagagatactagactgtattccggttaccatccatgttcgtgtttcttgcattgatcggaagaagaagaaccttgcatattgattgatctgaacaacatcgcaccagcctgccgattactttactagtatttataaaacttcataaatataaaattatctttactacattcatttattttgagactgattaaacaatgctcgtggacggagtttcctcagcgtatactccatgctgccaggcttccactggtgccagtgtcaggtctcgcctgcacgtggcggatccaacgtgcccgcgtgtcacgctagggcagagccagtgtggtgcggccccatgcctctgcgtctcactgg

SEQ ID NO: 164660 - DNA, 746 bp, Zea Mays
gtgagaatgaagatgtcgaagatcggtcgtggagaccgagccatgttgttttgggaagtcgactgtcaagcaagggcaagtcgaagcgatgaagggcaaatattttcatgatgtttctttagtgaggattggggggagcaccattccccttcccgaagctaatgaggtagtgatttttaagagcttcatgaaagctgggcttcgctttccactccacaagatgttgattgaggttctaaagacattcgagatataccttcatcaacttacccccgaagctcttatcaaagtgggggttttatatgggccatgaggagtcagggactggagctggatgctaggtgcttctgcaatattcacgagctatcttaccagacgaaggcaaccgggaaagagcaatatcataacaacttcggttgttacagcttcttgccccgctctaaggcaaattaccgtgtgcctacatttcggaagtagtggtcgggctcctagatgaagcaatggttttacgtatagaatgatctggatcaaagggaggatgtgagaggcatcattcaacgtcctatatggtcgtgcttcggcatgaggaggccatcaatcacaattgggaatgaagtgcaagcatgcctaatggctttcaataccgtatgcacctacatcggtaccagagatttagtttaagaacacatcgctttcaaagtatggactcttgcaaatgaatgggaaatgccgaaggaagttgccgc

SEQ ID NO: 164661 - DNA, 478 bp, Zea Mays
ctcgaagaggtgctagcgagttttgtaaaaaaagggaagaggtgatacttgctggtttattttttgaaaggttccatttttttccaagagtgtcgtatgatctgagtgccttcagttaaagaaggaaacactcgtctcaagtgttgctttgttgcaaggttcatttttttgttccaaaactgctgcatcgtctggagtgttttgagatgaagaatgaagtgatcctcttcgatgagcaatttttttgttctttcaatttgcaaaaatgctatcatcattatgtcgttcctaccgcattttccacatatctttcgtaagcggatattgttttcaatagttttgtgattaccaggccatggattacagtggactaaatgcaaatgacataggcttgtatagatcaagaaccatgctaacagtgatgaagaaagatgaatgaagactaatgatggtgaacttatttattagctcatagaaa

SEQ ID NO: 164662 - DNA, 616 bp, Zea Mays
gctctgtcagtcgttctgaaggttaatcgcgatggtacagtgccctgaacaagatcgctggtgcagcgcacgttaccgccggcgaccgtgcgcccagatccacgtcgccgttgtgattcgtgctcaccggtgaccagataacgctcctaggtaaaagatcttcgcttggggataaccccggtggctggccgccgtacccccttgccttgcggccggcgcagataagctcaccggcattggctgcctgccgatcatatgccacgtgtattgagacttcaccacgtcgcagtaggctgctttacattgcagactcatcgccggcgaacctgccacggtgaaggacacacagctattgcgccagtactcttccctacctccgaccgctagcacgccatgaccaaattgagagccaccgctttgagatactataaattgagcacacctctagctccgttaaggcatcacgaagccaaagcatccgctactgcctccgattagccaccagagagctccaatttccttttctccccaaatcagttttccgcgcccgtaagcacctcatcgtggccagacgcctgcaggtcagttccagcatccttgcataatgttctagcct

SEQ ID NO: 164663 - DNA, 813 bp, Zea Mays
gcacacttggtcagattgactttccactggtctcgttgcagcagtcgcagaacagtggtaaggtgttgcaggtgctcctcccaagaatgactgtaaatcagaatgtcgtcaaagaaaacaagagcacatttgcgcagtactggggagagagtgtcatttatggcttctaaaaatgtgttgggtgcaccagtgagtccaaatgccatcaccagaaattcaaagtgacccatgtgtgtttgaaatgtcgtcttatgttcctcacctgggcagagttgaatctgatggtaccctgctttcaagtctagtttgctgaaccactaagcatgtgataatttgttcattaattggtcaaatactggaactagatacttgctcttgactgtgatggcgttcaagtaacggttatccacacagaatctaggtcatgtcctttttcttaaccagcaaaactggcgaagtaaatgggttggagctcttctgaattacgccctgagacaacatctgttagacctgcttttcgatttcatctttgagagccagggggtagcgataaggtctgactgtaaatggattagcgccagggatcagaggtatggcatgatcacactgacggctcagtggtaacccgacagggtcagcaaacacctcggcaaactgagacacaatcgactgtattcttggtgctagattgtgcatttcggtctgtttagcactcgcatccgattggtctggcagtaggtgtagttccaccaatgctccggaaggaaatgtagatactaccccttgtaaacaaatggaagtatcctaataaag

SEQ ID NO: 164664 - DNA, 688 bp, Zea Mays
gtcggatggttgaatgacaggttgggcaggtcaagcgtcttatgcagccctacagcctacatgtgaggacgcgaggccaggttacgttttcaagaaatccaaatccaagtacgttgacccactcctcttctcgcttttgttatactataattaaatgatgttatctgttcgatagaaatacatccgtcgaactgtagctagttggtgcccaaagttcatataaattctgcatttctttatttatcccacaagagctatgcggacaatagaagaagaccactggaatttgaggaaggatgtgtacctcaaggtgtcaccacttcgtggaatgaggagattcaaagtcaagggaaaattgtcccctcgctatattggaccattctgagtttttaggcaagttggagagatggcctaccaactcgagctacctgctagtctatcggatgtgcataatgtgttccacgtatctcaacttaagaagtgtctccgtgtccctgaggaatagttaccaatggaggagctcagtgttcagggtgatttgacttacacggagtatccgatcaagattcttgacacattgactcgagttacaagaaatgaggtgataaatatgtgtaaagtgcaatggagtcaccatggcaaagatgaagcaacatgggaaagagaagaagagcttcgcatagatttt

SEQ ID NO: 164665 - DNA, 296 bp, Zea Mays
tttgccgaacttgttgcttttgttggatgacttcgcacccttaggtgactttgcacactttttgtgccgattcgactgcacccttaggcgacttctgccgaagttgtttacttgtcgcacgcgatggctgacttgattacttgtcattgaagtgactgccttgttgtcgaaacgagaaggctagctttatggccttttttgacgtgttcgggccatgctttttatggggggatttccctgtttatcttattacatggcaccgcctcgttaaaaacctcgccccctgtgaggaaaag

SEQ ID NO: 164666 - DNA, 602 bp, Zea Mays
gatcgacttgcgcctgttggctgttgtcggctctctgcctccgtcgcagctagcataccatgcagatgcagtacccggccggatcgagctggtgtgctacagtgctaaccgttacctgtgggatggtcagcgccaaactgatcaccatgattcataactgacgatttcgcacggccctacgtgctagcactgcagtacgcagacgaattttgggtttagcacatcgtccaaatcctttgctgaaagccttaacgaagacttgaaaggctgccaagccatgtacaggctggggcgggaccgggaccttgaaagcgcttttcactcgtacgtcgcttaggtgcttagccttgtccatgaacaattataataaccttttggagcctgacagaaagaggccagactgccagccatcatcatctgatggctcatcgcccctcgcccttttcgctaatggactgggggcactcactcgtctgcccgactccttttccactttcacccccggccccgagaagcagagcacgaggtcacagtctggagtggacatcacacggcttgccttgcttgccctcggccgtcggcatcatcgccgggatgcaacc

SEQ ID NO: 164667 - DNA, 1036 bp, Zea Mays
gtcatcagagaaaggaatacagctttgtctgaagtagcgcagcttagggcaacacaggtcaacctgatgcagcagctgaacaatgttgaagcttggaatactaatctacacgaagaggttcactagttgcatgcccagctcaatcctgtcaacccgccagaactgggggaagcagatgtcgtcgcagccgacaatggaggtgcagtctctggggccagcagtgtgcaggagtggttgttagttgtcgctataggataggctaacccttttggatagtgttcctaggagtaggaacaagacttatggtgcaaggccgatgtaatgatggcttctgacgcgtgtgtgcgtgtgggggaaaacactctttgcttgtatgtgcatttatatattatgaagtatgtgatgatgatgttgcgcatgttgggatgtgattcttgccttacgatttttcacatgaagtttccttctatgagattgtatggcatgatttccttatttcacatgtgttacgacataactcaccgcctacccataatgaaaatgtgtagatggtgactactcgccacattacccggggccactggagcttctggcagtggtaaccaggagggtgaccaagaagcaccacttcctccacctccgccatacacacccgagcagttcttcgcacaacttcttggagctcagaggaacatggagaacttgcagcagaagatggaggcaaaacttcacaacattgctaacaacacccgccatgggcaaccacaagaagcacatggagttaatcaatatagtagcttcaaggatttcatggataccaggtcgccgatattcaaggaagcagcaaaacctttggaggcacatgaatggatcaacactatggaatagatgtttcgtctgttgagactttcagacgacctcaaggcagaatatgcagtgcaccagttgcagggacctgcagggatgtggtggtctcatttccgcgccgcttaccctaaaaatggatcaacactatggaatagatgtttcgtctgtt

SEQ ID NO: 164668 - DNA, 349 bp, Zea Mays
ccgcctcccggccttgcgccgcgtgtctaaccctttctaccgcatcaccacaacctgctctcgctctccgttgatcaccggagcgattgccacggcgttggacaccaagccattgcgccagtgacctctccctcctccgaccgccgtgcgtcgtcgcccaaattcgcggccaccgctcgtgggctctataaattgactgcgccctcaactccgtcatgtaatcaagcagcttctgcacctacctgtaccccaaaccctccaccagcgagctctaattccggatttcccccaatttgggtttccgccaccgtgaaacgaacttcaccgcggctagccctttcccggtcag

SEQ ID NO: 164669 - DNA, 890 bp, Zea Mays
acgaacggaagctggaacatggtgtttgcatggaaagactatggcagctaccggacgggaggggcctcggttcctatttgtagcccagagacggtgggctagcgtccggctgctgtgctatggaggccgatggtgaatgcacggatcgacaggactcctcgtggccgcactcttcggcgccggtgagagcaggaccacaggttcgtcttccacctcgggtgttgagcgacgttgctgccggtcgcatcctcggcgccgccagtggaggacggggcggccaacgagaacggtttggaaggagaggtgcctgcgatttggttttatagcccccagcgaagcctggcatcgggttgtttgttggcgtgcacaacggcaacagactccgcgtttctcgcccaggtagatgcgatgtggtttggggatgaagatgacagggtgtattgatcgataagaggggtccgcatgccatagacacagcgtaaaagagagaaaagaaaaaaaagttgggctagaaagcatatgggctgtacgtgtcgaggcttcaccttttctaattatttttttattatttctctattttccgttttcttctcttttctgttttagttttcaaatttcataattcatttttttgattcagttttgaatacaagaattcacacccaaaggtcaagcatgatgcataatttaattattcctttatttatttttatccatttagataaatgctttaatgatggaatatacacttaagatagatgatcctctttagttatatttacttaggccatgttaatatataatctttctcataaattattttagttcaattatttttaaggatggttgtgattatatggtttataaaaggaataataattagtttgaaa

SEQ ID NO: 164670 - DNA, 822 bp, Zea Mays
agaacagccaccaaccgttgttgtagaattttgtcattacccaaccagatacgacccttgtaacaaatcagaccattattgagagtgaaacttggaacagcctaaggatccaaagctaatctggccatcagggattgagcagccggatcatgcctatagctcttttgcacatcagtgagccattgtggaacgacctccgacacagcattaaattctggagaaatccgacgagataaagcatctgctacccggttggaatgacctggtcggtagataatcttatattggagtcccaagagtttagtggacaccttatgctgccatggagtatgcaggcgttgctcattgagctaggatagactctggtgatcagtgagtatgataaactcgccatgctgcaaatattgagccactactgaatcgcgataaggatagccatgaattccttctcgtaagctaaaaagtctgtgggatttagggccaagtgctttactcaagaaggataatggatgccctttctgcataagcacggcgccaattccaaaagagctagcgtctgtttcaatagtgaactaagaggaaaaatcaggtagggcaagaaccggagccgatgctagagcttctttcagggtgtggaatgttgtggaatgatcgtccatccaaacgaatacaactcccttcttgagcaacccatgtagggggtgacaaatgatcccaaagtgatgtatgaatttcctatagtatccggtgaggcccaaaaagctccataactccttaacatttgatgggattggccagtcggctatggcttggattttggca

SEQ ID NO: 164671 - DNA, 396 bp, Zea Mays
ctctacaattctgaatttcgtagcatgctgttttcagttgaaaggatcccgctttgtttcgagctgtgatgggctctgttcctcttaaatggaagctggctgatgttggccgtggtgggcatgtggttatacgaaagttgaaaattgaagtcctctgatgaaatccattctctaaaatttgttccctgattatacgaaagttcgtcaaaatcatgttcatttttaactcatgccttcccatgtgcctttagtttcatcattaacagcaccattgtagttcaagcagttttccttgggcgccttttctatgacaggagaatatttttttgcaagttcaaaagaacaaaaaagaagatatttcttgatgtggttgtgtactgactgtgtaatgctcta

SEQ ID NO: 164672 - DNA, 616 bp, Zea Mays
gatgtatagtgaacatgttctgttaaggaagacagccttgttattaacaaaaatccggagctaatgtgggaggaaggtggtcggttcaggtgactgatggaggtgcgccatggtacagtaactaaattggggatcagatcgccacggcagaaaaatctcaccaccggcgacctctttgcgccaaaattcgcgtcgtctccgtccgggttcgtgcgcagtagggaatggataacgtcggggagggacaacccatacgtggcgccaccgccctagcccagccggagtcttcaccggcggccaccgtgacctgtgaattttgccgcggtgtcgcccatgcttccatctccctcactgtatctctttccgacgtggtaggcatgcgcttgcgctgctatccgtggtcgggggtcatctgttgggccgccgtgcctataaattgagcaaggagccacgacgaggtgttttcatctccaccagtgaagctcagaagaagtccaaattcgtgttgcctctgccccctcttcccaaattgattgtgcaggataaaactagagtcccttgcggtcgtataggccgaagctccatcctcaatttcacccgagcacaccacgacgcc

SEQ ID NO: 164673 - DNA, 1116 bp, Zea Mays
aatacagagagcgtatgacagaccacttcaacaaacacacgcaggaggagagagaccagcgctgcaaaatacgtgtggggtgggcgcattatattgcatgcgtccactgctaggtacttagctgctgccacaacctaacaaaccaagctggtgcgcatacactgaggagcacaccactgcacaatctcacaatgcaggcaggcaggaattctccatgttatgcccaccaagctaaggaattgggtcaatatgcagcaggcaccaaaaccacgatccatgtacgcattctgacaatgaaggacagtcgctccttggattgtcaacacagcacagagcaacaccaaagctggaaatcgatcgcaatcgaccaaggacaatagtgcccacgattcaaggagacatacatgagcaagttgccgatatctagacaccgccttttcccgatatcgatccttagacgatcctcctagccatatatatgcctgccttgtgctgttgtacaccaggacacacatgtacgtatgctgatcagcctgcaactggcaacaaagggaaacggacctaccactatagcacagtaccactagaatagatcatgactagccgttagttccttattgacatctagatttggaatgaccatcatgcaaaggaagctcacaccaaatgatgatcacgattaaacgcataagaagccccttgacaagactctgtcccggccggccggcgcactacctcctatgataagctcccgtaatcaatcagaggtgacatctcccaggacttttagtgggggaggaagaattgacatgatacccccctttgaacagtgcagcctacagcagggaccaaagcccccactagctagagaagcagtcttttgtttcgggcgactgttggacacaagtttgctgctatagacccacaacgactaacgctgttttcagttaggcaattggttgttggtaacaccactggagtgtccttcagaccaatcactgcactccatgcccattttgtggccacaaccagctcccatgaatccgatccctacaggagcccactcacgagtcgtctatcacgttgacctatagagtatagcctcatgcccccccg

SEQ ID NO: 164674 - DNA, 287 bp, Zea Mays
gatctgcagctggtcttcaacagcctgaggcggtaccggtggaagctcaatccagaaaaatgtgtctttggagtaccagcagggaagttgctcggattcattgtcaaccacagaggaattgaagctaacccggagaaaatcgaggctaccatgagaatggaagcaccacgatcacagaagaaagtgcaaaggcttactggatgcatggcagctttaagcaggttcatatcaaggctaggagaaaaaggcttaccattctacaaattgctcaagaaggtggacaagtt

SEQ ID NO: 164675 - DNA, 438 bp, Zea Mays
ggttatcgagggtgtggaggtatccagccatgtagacaatggtggggtcatcttcgacagggtctctacctgacagggcctgaagtcttttcctccaggtgggggtattcttgttgctgggtggaaagtagcaaaggggggtttcaaagatcactttgctgtagttctggcatagttgtcggagggcggttcgggcaacattctggcaagtatctgggaagcggcattcggtaaaagtgacttggaaagaaggatggtttggatagtttcggctttctcccaggtagactgccatagagcattttccattccgttctcgagatactccttccagacgtattctggcttcttgcggattcccatgcgaagcgcacaacttcgcaacaggtgcgggaacccttccacctctaagcagtaggatgtcctaatggccagaga

SEQ ID NO: 164676 - DNA, 595 bp, Zea Mays
ggcaatctagtttaattgaatgggtcggggagcatcagtggcaagtaagagtgctgaaacaagagagcagagggtatgatcaaacctgaaacgagctagccacggtgaagactctttcacggtggtggaaacccgatttgggggaaatgagcaattcgtggatttaggtgagtaattggaggcacgagcgggtggattggatgctggaatacctaacggagctgagggtgtgctcaatttatagggctcttgagcggtggccggtgaatttgaactcgcgcggtggcggccggagaggaggaggtgcactggcgcacgcgattggtggccattaccgtggcaacctcaccggcgatcactggataggataacatgagtcacggcggcgtggttaaagtgctgaggcatgtggcacaagaccacgaggtgtctaactccggcgagggtaaatccggagcgactggggctaagcttacacggtggccggagtgaacagtggccggagttcatccactgggtgatatttcgcactcccacagcgttatccaacgacgccgagcacgaatcacggcgaccggcgcaaatccggacgtgc

SEQ ID NO: 164677 - DNA, 1486 bp, Zea Mays
ccagtccccttcgcgctgcctgcccccttcgatctcctgctctctttccccttctctctctatctactgttcttgcttgagctgcgatcctcttcctgaggcgcgggcgttggatgtgatacgtggttggctccgcgccatctcctccggtggcgatgagctccaagtccacctgctgctgcttatgaggtatggtgcttgcgagacttgtccatggttgcttgcttcgttttgcttagagatgctctcgccggggcagccagttgggctggtatccaagcaacctaggattggtagaattcgagcagtttctaccagtttccaagctatgtgattaaatcattaaagtgccttttcaaaattatcttctccatgtagagatagagatgtattttcagttcatgagttgtacagttcctactgaagggagacctacaacgtgctgaaattctgtgttcaagaccatgttttttttattttattatatcaactataataaatttgaaattactttcatggaagtgatttagtggagtaatctagcatgagggttagttccagtggaaattcatcaggagtgtatcttgttgggatcaagtctgtatttcctttcggtgagcgtttttttccggtccatcatctataacaacctacgatcttgtttcagatcttgctgaatgaattttgtggtttttgagccatcctggtaaaccttggcatggccagtggagagacaaacgcagggaacacccagaggtgtgcttatctcatctttaccttgaaacacactgtttgttttttctagttctagttactactggaaggctcttcagtgtttttttaaaaaactacccactgatgtgctaactgcgagacttcaagatttttgtttacagaaatcttttgctatttaagtagctgtcagaaatcttgggagcactactatatagacattttaatataaattgtgagtgctggtagccttatcttgtctttctgtttagggggaatacccttccaaatggtgacatctatgttggcaactttgctggtttagttcctcatggatttggaaagtatatgtggacagatggaactctttattatggcgagtgggatacaagcaagatgagtggtagaggagcaattcagtggccttcaggtgcttcatatgatggagatctttgtggaggtttcattgacggaacaggcagtttcaaaggagttgatggatctgtatataaaggttcttggaggatgaatagaaagcatggaatgggcacaatggtttacgccaacgatgatacttacgaaggtttatggaatgagggcttgccagatggatttggtaaatatacatgggttgatggcaacatctacattggactttggaaatctggtaaaatgaatggcagaggagtgatgcaatggacaaatggcgatactcttgactgtaattggcttaatggactggctcatggaaagt

SEQ ID NO: 164678 - DNA, 538 bp, Zea Mays
gcgattgtgccatttagacacggttggtttgtcaacagcatttgcctgcttgagtgaagaatcggcaggaaggggatacaatccacgacgacatggccccctaagaatcgttctcctcgtatcctgatccttgatgagcaaaaaatcaggatgaaactcaataaatgcagagttatctttggtaagatgatgaagggagactagatttttagcagctttagggacatgaaggacattgtttagatgtaagctacgtgattgagttggaacagtagtatgaccaacgtgtttaattttcatacctgaaccagagacggtgtggatctgatcattcccatgatacttctccctcatcgtcagtttgtttagttaacttgtgacatgatctgttgctcccgtgtcggtgtaccagttggtgtcgacattgtaggcgttcatggcgatggcagcattaacgtggcgctcttctgggacgtagttttcatcgaaccgatgccagcaccgggacgccctgtggcctgacttgaagcagatctca

SEQ ID NO: 164679 - DNA, 466 bp, Zea Mays
tggcattccctctactcctctagagattcccttggtcacccgaaccccagggtccgacctcctatgccagctaaaatgctcccaagtcagaatccttttaagtggggtagtattcctggcagacttaaccgtcttgccatccaaaggaattgatgtaatcctagggatggattggctaactagacacaaaggcattatcagttgcgcagacaagacagtcctcctcaccgaccagcagggaaagtcagtctcttgccaggcgcaaccacccgccagtgacccaatgatgttcaacctagcaacggaaagtatatcagtagtagaagaattcatggacgtgtttctggaagaattgccaggaatgccaccagaaagagaagtggagttctacatagatctaattcctggaacagcacccatcgcaaatagaccataccgcatggctccaaccgagttagcagaactg

SEQ ID NO: 164680 - DNA, 940 bp, Zea Mays
ccgcttcggccttcgaaggccaaaggttgagattgacaaagccgtcgaagcatgccaaaaggctttcggtactgtctgcttttttattggtacaagagatttaatccaggagcatatagccttcagagtgtggccacttgtagagaactgggaaatgccgaaggagactgtcaccaagtctggcgaaggtgagctagttcgactgaaatacaccctcagatacggagataaatttgatgaaccgaatgatgactagctgaaatgtatcgaagctacaagtgatgaactgcttgggtcgtattccaaagtggaagataatgccttatccacatccttcgggggccggggaaaaaagagaataaacagagtttttgatgccatcggttttgtttaccccaactactgctacccactgcgaggacggggaaagaagaggaaggctgctgcttcagccaaaattgctgcttcggccaaaattgatgccatcagttttgtttaccccgactactgctacccgcccccgatgagcctgcgctgaagagcaaaaaactgaaagtccttacccaccggccacggtatattgaaccggctgtggtgcctgaatttggcggagagacttcttcaactgctaaaccaaaggagcccatttctcctacacagaaggctgaagatccggctgtaatgctgaaggtaccctcagccgagctagctgagtcgaagactgataaggctaaagagccaaaaatcgaaggaacaaaaatgttagaagttttaagcccttcggcagaagtaacagtaccgaaggcataaaaaggtcttgcggcaactcccaaaagaagaaggatggcaaatgtactagatgtgctagaatcagtaaaggcttcaagctctactccttcagggaaaattgtcgaggcttcaaaaatgcaaaccgaagctg

SEQ ID NO: 164681 - DNA, 576 bp, Zea Mays
tttctccttatcaccttgccgacactctccaaagtttttttcaactttatctccacatagattctctggatggatacgtacgcacctcgctgtcgtctcctccacgttcttgatctctagaaaattcccacagcaccagcgctcagcctttgttcttatcttctccgtgtcactcgctcctgctgctcccaactctctcgccgcgtcactctctctctcccgctggacttcgctccttggccgtctcgacgaagccaggtctggccatcaccttcctggccgcgcgcgttcttcttctactcggagcaccgtcgactgtctcggttctgcatcaccgggacaccttcctctgcttcctccctcgccggccgaactccttcgcccgctgccatagtgccctgcccctgcgatggccgtgcgtatccttctgttccacatcgctgcgccatccttcacctcgcccggttgtgctttgttgcgccgtcgggtgctcctggtcctgcgccgtcaacctgccatgcgagctagctccacctcgcctgctcgtgtttctctctgtcgtgcgctattgctgcg

SEQ ID NO: 164682 - DNA, 448 bp, Zea Mays
cttcttccccttggcaggtgtagttggatgactgacctagcgaagacgtttcaggcgagtaccctcaggctttcaggtgtccatagtttcttcaagctctaggatagttgcaacagccattgtttcagcagggaccgagtcagaagaatccccagccaacatgtccagcatagcactcatctctgcatcacctggactcataggcatctcaaagtgaacttgcctctcatcattgagaagatcaccaagtgaaacaaccaggacctcaatatcttcgagagagggtcgcactctaagacccaaaccactatcaccagtaggaggattggacacaaaatcgaaaaaggacttagaaggtggcagattccaagcagaatatgcaacaggagcaccaatatttgatactttgcccctcaagatcatctctagttggctcaccaaatccaca

SEQ ID NO: 164683 - DNA, 406 bp, Zea Mays
cgaagagcaaaccattgcacgtttcatggctgggttacaccgcagcattaagcgcattgttgagtttcagccgtaccaatgtcttgttgatttggtacatcaagccaccaaagctgaacgccagctacaacaagatgctaagagcagcaaggccttgtcatatggtgcacgaaccatgactggaggaagcaaatcgatctcaaggtttactgctgcatccttagcgtcaaaagtttcaactggagacttgcgatcccacaatcaaagcaattatagtggaaagaacgttgctgctccaatcatggattctaaatcagcagcatccacttctacatcagtgggctctacagccaagagtagtggtattcagtgcttcaaatgtggaggtcatggtcatgtcattaag

SEQ ID NO: 164684 - DNA, 626 bp, Zea Mays
ctctcttgcccttcttgcctctggccatggtcgtgcagaaggaggggaagtgaagaagaaggagatggcaagtgataaagaatgagtggagaaacagctggggcgggcgggctatttaaagaggccgggaggcaaccgtccacttcctaccccgctcatcgaacagtcacaagaattcaataagtaattcaaatcgtctggaaatgagtcagacgtctggcaccgtttcgcgtaacacgacactggatggaatcaagtcaacggctcatgcaaagtattacacctctccgtcatgtcaacttactacttcaggacaacgcgatagacaccttttactcggcatacaccctttgggcacacccattgggtgtaccgcccggattcttcaagattttctgaagcagtgatactagcaacatatacgcaatgaatataccacgacaaaggggaagatcggcttaaattcgaggaagtctaaatgcggttaccaaagcacaagtccaatcagcagaggcattaaagtacgtggctgagtggtgtccagcctagggctccctgttttgacttgctatcaccaatcaaattgattccagaccaaacaagatgcggacagacgtcatcaccgg

SEQ ID NO: 164685 - DNA, 453 bp, Zea Mays
ggatcaaactggtgaaagacagttatttggacctgaaattatacaagaggctgaggagcaagtccagcaaataagggagaatttgagaactgcacagtcaaggcagaaaagctatgctgatacccggagaagactgctcgagtttaaggagggagattatgtctatttgaaggtgtcaccactccagggcatgagaagatttaaagtcaaagggaagttgtccccttgcttcattggacccttcttgatcttaaagcgagtgggagaagttgcataccaattggagttacctgatcatcttgtggatgttcatgatgtcttctatgtgtcacaactgaagaagtgtctcagggtaccggaagagcagctactactagaggaccttagtgttcaagaggatctaacttatgctgagtattccatcaagattcttgatacactgactcgggtcac

SEQ ID NO: 164686 - DNA, 479 bp, Zea Mays
ggactatgccggggccctcttcgaccggatgtggggcccacacggtcgggaggcggttagggagcggtctgaccgggcgagggatcaggtaaagtttgtcttttgtttcgtgtcgttgaatgtgggtatacgtgggttcgctgaattggtgtgctgtgttgtagatggcgcgtgccgaggacgtggaggacttcggacatctaaacagcgcgcagcccgaggcggaggtcaacccggtggtggccgaggctgaggttgacccgacaccgcccccggaaaccgatgaaggctcccttgctgcccctgcgcctactatgtctggtggaggctcgtcgccggccactgtgccgatggtggaggatcccccaaaggcggcgacggagctggcagcagaggatcccatggcggcggctgggtcttcgcaggtggcttagtgggtgtggggtagttagagaattttgtctatgttactgaacctt

SEQ ID NO: 164687 - DNA, 746 bp, Zea Mays
caagtttgaatttagaaaaaagggaattaaaaaaataaagcaaaatgtgaaaatagaaatgaaaatataaaagaaaaaggaggactcatgcgcatgggccgattgtccctcatttggcccatttaccatttccggatacccggcccaggtgtcacagcgccattccacttctcactgccgggcggggcccttgcgtcagatccgtcgccgcgtcgagtttctgtttcggcgacgcttgcaggtgggcccggtttgaccgcttcctcaaccacaccgtcgagttcgcggcggagccgggaacgtaggccggccgttgcgcctaactaacctggccgtgcgcttgctttggtgcgggttggtacataatctgtgggcataaaacctccccaaccgcgatcctcttcgccttctgttgcaaacactcgtgtagacgcaggtccgccataggccgagatttagagctagcgccgccgactgacgtgtgaggcttgggtttggcgccggaggtggtggagtgttccgttggtgcgcggtgtgactgtgcgaggcaccggtgcatcagtgttgccgcgggctgggcggaatttctcatcgacgttgtctgccgccgtgtgaccgctgccccgacgtgagcggcgccctgggcacttcgtgttgaggtaacaaacctgtaaaccaattcgctttatcctaagttttcccttgccgtgagaatcatagcgatttgagtccgaattgcgtagtcg

SEQ ID NO: 164688 - DNA, 559 bp, Zea Mays
gaactggaaccagatgatattatataggggacaaataaaccattataagcggtttccatggatgttgggtacaaacctgtagagtgtggtaaagtgggatgagtgacaaccaggttattgacaaagtattagaggtttatgccattcaaaataatggtgagtccttcactctactgcacatgtgttaaggtagtacgtgatcaaaagtggtcaacagatctgaataggttgaataacgaaaagaaaaagagctcaaaggataacccagctcaagttgtcaatatggaagtagaccgataaaagcgacgtatgggacataagagagtaaaaaatgagtgtaatgacaaagggaggcagctgatactttgtctgattttagtgcaaaacctgagtacattgaagtaagcacgaaaaataggacagacagagagaatatgactgaaattcagcaaacttcggtgataagaagattgaagcagctcatgaataaactaagtgcaaaacgctagaaactgacacccaactattgcttgcatctatcgattggattactgcagat

SEQ ID NO: 164689 - DNA, 817 bp, Zea Mays
aaactgggtacgccctatccttcaaagactggatattcttgaagatgaaattagcgaccatagcctcagcagtcagacctctgtctttcaacaagcagacctcgacaagcagtacttttgcctccgttatctctgaaggggtcggagattcgacctagcttggagtgcgtacatctggctgccttactgatcgagggggtagggacttgcagtggttctccacaatgaaccactcgaggcgccaccccttgatgctatccttgagggggatgtcgaggtactctattttcctcccgcgacgcagctccagacttgtgccgccaacgagctagtgttgtcccccagccatcccgagccgacaatgatatagatacttccagaggccgaaatgggggagagtactaagataggcctcacacagatgtacaaagatggaaacttgcaagatagaattagggttcaagtgggtcaagttcagatagtaaaaatcaaggaggccgcggaagaagggagaaacaggaagagcaaggccgcggataagaaaaggaacatagacgacggactcatgggtgtcctctatcggaacagtgaccccgcgacaaatttgcgaagagcagagctctttcggaagtaaaaccccaacatcgacaagctgaagaagatctgattttgaaataacagacatgtggttacctacgaatgacaactgctgttggggtcgataggcaggatgattgccacaacggagctctgcctcttccgtttcggtgccatcgcaatctcaccggcggaacgaacaagagcggaatctcaggga

SEQ ID NO: 164690 - DNA, 673 bp, Zea Mays
agcaagttgagagtgatatgatttgtttctatattaacctgggctcagtctataagagaccgggggtagtttgtactagggattatcaaaagaagaaaatctcctagtcctaggaggttgcctggggcgcactagaggaactctccagcgtccggaacgccaccaggaatcctcctcccccttctcactcctatttcctgcgttcttgtccacaacctcctgctgagcccccaacgaaagcagggagtctgcatcatttagtatcagagacagccagcgtcatgacttccgagtccggcactggacagaatcctaatgggcgtggactcgctgactccctacgccaaatccttgaccaccaaacccaaatgctagcccaaatcaccaccatcaacacatgcctcgaatctcatgatcgtcgccttgcccgcgtggaaattccacccacggaggaagaatcttcaggggttccaaaatcccccaacgatggcggccgcttcaaggaggggctgcgcggcggcggaggcggcggtggggatggccccttccgtcgggaggatatctcacatcggcccaggcccaattttccgtcctatgacggcgaatcggaccccctggcgtggctgacaaaatgtgatatctacttccacggcatgaggacactgcacgagga

SEQ ID NO: 164691 - DNA, 703 bp, Zea Mays
gttgaaaacttctttgctaccaataggttgcctcacattttgccattcagaaatgtggtacttctgacccttataaggtgcaaggtagccctttctatttggataacctgaatcgacaagatagtatttacctgcacaaacatgaaatacataagttcaatacggaagccagtaattaatagcatatgtcataaaaattagatatataattgtataccttctggtggctgggggaacctgtccccataagttatcaaagtatcttgtagtactctagtgtcatgtacggatccaggccatcctgtgacaacaaatgtgaacctcatatcgaagtcacaaacgaccattacattctgcgatgtgtaaccgtgtcgtccaatatatttggcttgctctgaggccgggactgccgctggaaagtgactaccatcaattgctcctatgcagtccttgaagtgtggccaaaatctcgcctctcgcaaatgcggatgaatctcggtgaaatatgggtctttgggcttaatgatgtcagatgacatcttaaacagtgcatcaaggacttcactatacttgcgactaattgtttccaaggagtgaccaaacttattccgtatttgcctaaatgactgtggacccccacatgcccacaagaaaatgccaagtgcttccatagtactgacaccccggcttggaatcagaccat

SEQ ID NO: 164692 - DNA, 679 bp, Zea Mays
cctgggagagtcttcacagtgcattgggtaccaagctctctcttagtgtcgcttttcaccctcagactgatggtcactcagagtgaacgatccaaaccttggaagatatgttgcgtgcttgtgttctgtcatggaagggtagctgggaggatcatcttgcattggtagagtttgcttataacaacagctaccaggctagcatcaagatggcaccatttgaggctttatatggcaggcggtgtatctcccctctgtgctgggagactttgggagagaggtccctagttggtcctaattgggttcagcagacttctgagaaggttcgggaaattcgttagaatattttggccgctcagagccgttagaagagttatgctgacatgaggaagcaggacttgggttttgcagtgggtgaccaagtccttctcagggtatcacctactaaaggagttgtttggttcggtgtctcagaaaaacttagcccgagatacattagaccgttcactatcttgccccgagtgggtagcctggcgtattgcttgcaattgccggattccatggcaggggtacagccaatgtttcatgtctctatgttgaggaagttcttgcgggatccagaccatcagattgagatggaaccaattgctgtgcagcaggatctgactttggagtgtcgttc

SEQ ID NO: 164693 - DNA, 727 bp, Zea Mays
attttgaaataatcgactcaaaggttcctggtcctgcctatgggttcgttgcatggcctgattttttgtactgttgttgggtggtgtagcccccgagctttgagtggattttagaagtaatccattcaaaggtcttcatctttatgcttttgaaatcatttttagaataaccaggcgatgccatctgtccgtgccttgttaggtctagaataaatttgatcggtgacatgttggacatctggctagttgagacagagggccttcagctggacaccactctgccctatactttaatgcttctgttgattggacttgcgcttcagtaaccacatttgggcttcctcccgtttcagccgatctcctctttttgtcgcggtacattcattacgtatattttgtgggtatcacctcttcagaaaatcatgaaaattccgtgcgatacacccgggctgttcgcgctgggcgaatccggatgagaaggcctggtgttgtggtgcctaaggacattgttgccgtcgttctcgctgcacctgttgtcgtgagcaaaccttcttcctctgctactctagctggcgaggcttcctgcaaaaatgctcctgcacagtgattcattcggatgagaaaatacttttttattgagttagtattctttagtgaggcagtgtatcatggatttcatgtgcatgtaactacgttactcttgaattgattgttctgttagcagggc

SEQ ID NO: 164694 - DNA, 527 bp, Zea Mays
tgacaatgccaagtggtggtagaagcagtagcggcgagggcatagggtgtggaaacatgagatgtgggaggggataggaaagcaaatagaatatagagagctaaagctatcacatcggacaaccatgacacaagtggtaatatgccatatggtgagccactagggacgaactccatagaaaattggttgtctgtggtgaagcgataaatcgagagaagattttgtacgacgttaggggcaacatggacgtggttgaggtacaaaggaccaagaagaacagtgttgcctactgaggtgacatggagactggtagagtggactcattattgacaatgttgaaagaaggaaaggtgggattacagggatggggtaaggagcggtgtggtacgaggtggtggagtcaacaacccaatcagtgggagtagctagaggaggcaccctatagtaacatcgggaggggtgctggggcgtccaatgacaagcatgttgatggcgagcatgggtggtggagatggcagggcctcaag

SEQ ID NO: 164695 - DNA, 747 bp, Zea Mays
aataaatatatccagaattaatacccctaatttcacaaatataagttgtagtgttgagccatagaggtttgaattcaaatttaaacttggaaatagagaataaaatagaaaagaacaaaagcctacttgggccgtgtctcctgctttttcagcccatttggtaaatacatcacacagcccacgctccatcccaccgcgcgcacagccgccctggctggcgggacacgcgcgctagccgtttgtctcctcttgcgcatcactgggtgctcgggcccactggccaggagatccttccacgcgcacggactccgtccaccaccccgtcaaccaactccgcgcatggcggccgcatcacgagatcctctccatgcacgaccacccgcccataaaagctttcccgagacccgttctccccctgctactctctcacgcgtgcgccgagccaaaccctccaccatcccgccgccggagagacccggtcctgggtgagggtgtttccgccgcacgctctgattgccgcgccaccgcagtgaacctcgccattactaccttgctaccctcggagagttgcccggggtaatcggagtgaagctaccaacgtttcttgggctctagagcgcggttgacggagtcaccgggaaccaatttctcgccgctgggacgtgggcaccatcgtaccgccctacctcgcggccagctcccaaatcgtcgcgattcaccggtaagccgcttccagacagttccttg

SEQ ID NO: 164696 - DNA, 436 bp, Zea Mays
attcccaacgttaaaggaatggaatatgctgaagctcaaaggagaaaagaaaaagaatgaacttgttcgactgtcctatcagttcaagtttaagaaacatttcaaagagcccagtcaagagtggttagagatgattgaagccatgtgcaatgaaatctcgagcaattatacgaagaaagaagatcaactgatgacggcagccttcgacacccgaccgaaatgacggctgaaccgagtaatggacgctctgaaatttgaatacccagactatgaacggttaagcaaaggtgccgaagggccaaaacgaaaaagagatgtcagtgttatgcaaagaccagctgccagaatgataaaagaagatgaaaatttagcaaaaaagaaaaaaatccagccctgagccgaaggtggccgtttcgaagaaaagaaaagctacagc

SEQ ID NO: 164697 - DNA, 451 bp, Zea Mays
aatcgggacatcatcgctgtttttgctacgacaattcttaggaatcaaaggggaaacttcttcttcatcttcttcatcctcatcaaacacacgtccaccgactctggtgccaccacaaatctcaatatcatcctcaaggttgccgctcgccgggccaccaacaaggactggggcagtagagttagcccccagctctaggccagatgaacaccgaagtcttccctttcttttcttcccctcagtagacacgactgggtggcccgatcgacacaatcatttacaacgagcacctccaggactgcaagctccttcatcctcactaaagacacaaccagttgcagtgctcaccaattcagtacgggcagactcagacgactcgctcgctagcatattaagaacaacgttcacttcagcctcatcggcaatcgtttgcatctagagatgggtttgt

SEQ ID NO: 164698 - DNA, 489 bp, Zea Mays
aaatacacatctacacatataattacataaaacaaaaagggaaaaaactaacatattcccacccctacccctgcggccggctcggcccagcggttgtgcgggcacgcgcgtagagcccgggcacccagctattgctcggcatcgtggcctcactcgtaatcccctccttaatctgcttctcctgcttgaattggccatggcgcacgccagcaaccgatcgccaagtcgcccatatttgaagctctggcacctgctctcccctccctcgatctcgtaaaatgccgcattcttgcaactgcacagcagccgccccacgccgagctcgccgtcatgcaaggagtctgtgttgcgctcgccattgttcctgcccaagccactaacgtcgtcgtcgtctgacgtcgcgtcaccaaggtaaggcacgttctctccttctctatcgcgtagcgtcgcagcctcgtcagccatggataccgctgcaagcttctctgc

SEQ ID NO: 164699 - DNA, 601 bp, Zea Mays
cagagtcctgaatcccctgtcacctgcatccattaccctgacatggatgcgagtgatgtaatagcaagcccggggaggctcgctcacttgcctcgtctcgtacagggggcggacgtaggctcctagctcgtgcagcactgcttgcagcaggttggggaagtgccccatctcgaacattgatgtgtaatgttcgacaacaggaccaatccccatgaagttgtcctgctgggcgtagtcagcttcctggttgacgtgctcatcctctccatcgtcgtcgtcgtcatcctcgtcatcgccgtctccggagtcgtcggggtcgtcgcctccaggtgcaggtgcttgaaaggctggtgccgacgatgctgacgtcgatgacccagctgcgaaggccagggactcggccaacggggtgggggtcggcagctgctcctccgagctgtcctccaggttgattacattctccactcggatgggagggagattcgctggagcttcctcgactaccactgggtagaccgggacttaccggggctgaggggcgtagctggtgttgacgcgggtagtttggagagtgcgaaccatctacaagagaagtgtcaac

SEQ ID NO: 164700 - DNA, 791 bp, Zea Mays
gcggcatcgctggcgtgcacgaatcccagccctgaagctcgattcccacatccaccaggaatacataatgtaggtgccgcggggaaaccgagaggcacacatccacgacggattacgtcgataggagtcttgcccacgtagagcagcggcacaacggcggtgccaaggccacggtgagaaattcccggccaatggtagcgacaaaacccaccgcgggaggcgccagacgaggttaagatgagggcgattctcacagaggggctcataccgatgattggagccacgaggaggtctgaccacggcgagacgcaccaccgcggcggcagcctcgccctgccgagccgttattgtcaccgtagccccgattccacccggttggcgccacgatcgacttcctggggactcggagaagcgcccagactggtccccgtcgacgccggtggtccaatcccccggttgcgggttccaggcgtgattccggcaagcgcatagaagaaacgcccatgtgatcaacggtggctgcgcgtggaggggatgtgaagggaaggtaagggggaaggtggcttatatgctccaagaatcggaatctggttgggagttgcacagaagccgcgacatccatggcggaaatctagcgttgtttgttaggatggggaaggagcatctggcaaggtgggcccacacaccggtgacagtgcccaagtgcgcggacgcaagggagataggtggtccacatgcaggcgacaccaggaggggaagatgggctggcacgaggtagtttgaagctaggc

SEQ ID NO: 164701 - DNA, 524 bp, Zea Mays
ggggccatctgcgtcgcctgagcagcctgcgccgcctggaaccggcggacttgctcctccagtgcccgctctttcccctccaatcacttctctttctcctctacctcgagctcaaactcgaccagcaacttgttccgcctttcccacatctcctccttgaaggtgaggtccttctcctgccaagcgagatcggtcgctcgtttctccagggaggcatccttcgccttgaggctttcctcggcgcgagcaacgttgttagccttgtcgtcaagttcctgctgcagcttctgcagcttcgcctcagccgcagcctgctcgtcctgttgtttctccagcatcatattgtaggctttcagctttttatggaacgccgtgataacctcctccctttggtccaagtgctccttcttctcgaccagccctatctcctcctgggtcacctcctgctctcggtcagacacctttcggaggtcctccttcaagccctcgcgctcccgctcaagctcggtccgctctgaggcgaa

SEQ ID NO: 164702 - DNA, 556 bp, Zea Mays
ttgtggcacacgtcaaggtgttggctcgtccaacacctcgggaagacttccacctcgcgcgagcaaggctctagcctcaataaacgcagcaaggaatcacgacatcatcccacgcaaggacgctgacgcaccccataagcaggcctttagcccataccccggcgctgttacaacaactacggtatgggcagcctctcccctgggggctcgggcatacagacaacacctcggcttctgtctcggctctcagcaagaaagcaacagacacaagtcaacaatacagtgcaccatcacgtcggcttgctgggcgccaagacatctctcctttgaatacgacaccaggcttcactgcggacatccccttcgtgtataaatagggcagtagagtccctccagggggacggacaagcaggacaaacagacgaacactcagttctccactccgccttcgatattggcacttacctcaatcagttatagagacttggggacttcctctctcccgccgtgcttgtaatccctagtgcaggcacttcggtgcgagtaatatatgtct

SEQ ID NO: 164703 - DNA, 713 bp, Zea Mays
cgaacttgtcgaggtaatccatgaacacgctgttcatcaggtacatgaagtaggctggcgcattcgtcaaaccgaatgacatgaccgtgaactcatacagtccatacttggtgataaatgttgtcttcggtatatctgaaggtcggattctgagctgatggtagcctaacctcagatctatctttgagaacacactggctcctctcaactgatcgaaaaaatcttcaattctgggcaggaggtacttgttgttggtagtaacctcattcaaggatctatagtcaatgcacatcctctttgttccatcctttttctccacaaatagcactggggctgcgcaaggcaaggtactcggtctgatgtagcctttctctaacaactcatcaatctacttcttgagttccaccaactctggtccggacactcgataggctctcttcgatataggggcggtgcctggaataagctctatggcaaattcaaccttcctttcaggtggcatacctggtaactcctcgggaaacacatctgggaaatctgatactacactgatagcctctgatggtttaatctcctcaatatgagcggtgacttggtgacaactccctttccttgatccacacaagaccaattccactaacacttcttctcctgatagggacactaacttcattgttctcttgtcacaactaagactggcttgatacttggtt

SEQ ID NO: 164704 - DNA, 415 bp, Zea Mays
taacaagtcccagaagtagacttgcgctccaataggcaacccacaaaatcagcatcagagtaaccgcacaaagaccgaacggacgatgaggagtaccataaaccaagctcaggagtgaaacgtaggtacctcataatccgcttcaaagcctttctatgagatgtgtgtggggaagcctggaaatgagcgcacagacacactgtgaagtgtatgtccagcctcatcatagtcaagtacaggagagagccaatcatgctcctgtactccttctggtccacgggttcaccatcctcatcagtatcaagcgtcgtcgaggtggacatgggcatagaaagaggcttgccctcgcccatgtcgaacttctttaggatgtcttttgtatacttgccttgatgcacaaaggtctcgtcttggg

SEQ ID NO: 164705 - DNA, 770 bp, Zea Mays
cacacaaagaattagagcctcttgcctcgctttgcaatcaagagcatgggagagagatagagaagaacaatcaaagctaaaatgatcacaagaccttgcaacactcaaatgtgctagacattatgtctctcaaacacaaatcgatcgaatgcgacacgggaattgctttgaatgtgtggagatgttgcacttaacgtttggaaggttgggaggattcttgtgtcttcaatgtgctggttggggtatttatagccccgaaccactcaaatagccattggagaaaaactggcaaaactacatagtcgggtggtgcaccagaccatgaacagtgttgatccgatgcgccaaccgcccgtgaacagtggcctggcaggtatctgttctgattctacatgttactgttggatatctatcaggtggttcagtgcgtcgccggtgctcagcccaattttctcgagagtgagcagttcactataattcacacccgatcgggtctgtgcaccgtacagagaacaataaatgtctagtgcgccatttggtgcaaagctgaaatttgtgaagtttttgtcctctgataggacggtcaggtgtgtcactagattggtccggtgagcccccgttgtgccagacgggagattagatttcccccttttcttcaagtcttcttcaagtatttttggctttctttaagggtgttcctttgccttagataaacttttgtagtgacaacccaactagtctaagtcatggtttttgaaatttttgctctc

SEQ ID NO: 164706 - DNA, 346 bp, Zea Mays
ccctgacgaaacaacctaagaactggatgtgctactgaatgtgtatagactagaataatactgtactcaactccaaaccactccctctccccaaaaccgatctgcactgaattgcatgtcttggtgcatccagacaaccaaccaaattacaatactgatcggcactgatctgcactgaattgcactgatgttgaagtaccatttcacattggacaagcttatttaacatgttgcgccgagccaaaccagaaatgtgcctcttctctaaccatccccacccaaactacatcaacctagaaacaaaaaccgatccacgccatccggtttgacccaaaccaattccagc

SEQ ID NO: 164707 - DNA, 614 bp, Zea Mays
aaaactgaaacgacatgactcataaaccagacacaactaacataatactcaacataagcctctgttgtcggaccagcaacatctaattggactttttaacatctatctcgaatgcatggcgcagccaagcgttccttccttctgcggtcttgagtgaagcaaatatatctctatatttttttctcaatgaacagatgagtggcaaacaaatggaggtcgctgccttctggtgtgctgttagtggtccttgaaccatcatcgatcacttgttgcaactgcgcactaacctcaacacgcacagggtcggtctcagtagaggtgacggacttgttagtggtccttgaacgcgactcaaaagcctccacaaggcatttcatgtactcttccctcgaatcttttttcctctttggtttaggagaatcatgacgcaccttacgcttcccagtcgcatttgagcaagggtcaggtgtgctgttttcacccccacctaaagtggcttccaaatgattgtcagatgatgaattagcatcctcgacgcctggaacaagggttctttcatttgtgcagacaatgggtccaaacataatctttagctcgtcctcattctctagggg

SEQ ID NO: 164708 - DNA, 752 bp, Zea Mays
gtgaaacaacgatgctcagcccgtggacccgtgcttcgtactctgctgcattattggatgctggaaacaaaagctggagtgtatacgtgagtttctctccttcaggagcaataaagagaatccctgcactcgctccttgcagcttcagcgagccatcaaagtacattctccatacttcagcaacttctgggctttttgggacctggtgctcagtccattcttatatgaattcaaccagtgcctgagtctttatcgccgtgcggggtcggaactctatgtcgtgagctccaagctcgcatgcccacttggctatccttctaatagcttctttgttgtgaagaatatcacctatcggaaatcctgtgactactatgactttgtggtcgtcaaagtagtgccggaggttgcgagcggttagaagtaccgcgtacaataacttttggacttgaggataccttatctttgaggacccgaggacttcgctgatgaaataaactagatgctgcaccgggtatcgtgcccctcctctgcccgtttgactactaacgcggtgctcaccacatgagtcgtgcatgagatatacaggagcagatcttctgccggctgaccaggcgtagctcaacatggtggcttgagtactggcggggtggtcaagaacttcttcagtgcctctagagccttctgtgcttctgtggtccactgaaacttgtccaccttcttgagtaatttatagaatagcattcctttctcgc

SEQ ID NO: 164709 - DNA, 1108 bp, Zea Mays
ttgtatgcagtttgtgataaagtatcgaagttatatgataactcttcctcaataaatcgattgtcgtggattgagcccgttgaattagttttttgtggcaagttgtattcttttatattggagccacatttgttgaaaagcacagataatttgtcaattaaatgatctcgcaattctattgttggcatttgataggaaggaagattcaatgtttttctcattctatattgaatatcatctgttagttgtttccatactttctcgaaaaatgcatactcatctccaacctcacaataaagaagcatggtgacaaatagatgtcgcaactgctcagaagtggcccatctggcagcttcgtcaaaggcattgtaccactcattgtcatcgttaagaagacctcgtgctctacatgcttccttaaatgtgggatgtaatatgttgttatatcttctcaaatcctcgtagcttgtagcacctttaacgatcataagaagcattcgtaaatagtatctttctcctgtagatggatgtacataatatatacgacctattttcccttcctttgcatgtcttggtttccagcttcttgttttgtcttcccatcgccatttagttggaaattcaatatatgttagatcccgtgctgattcacatgttgaattaacataaaaccactcggtgagcattgtctttcgaacaaaaccttcagacaatattcgtgatatgttgcttgctgcattatgttatgtaattttcatttggtaaatgcacaggcattcgttctactgcaggataatgtctatggatgtcatatccaagcacacgccaacaggaatccttgtcgcatagatagcgagtgtccaaatattctttcacttcatttctcgcattagtttcttcatcataaggggtatcctcaccatttcttattctttgtaaataaactttgttgtagtctggtccttttgttacgtatttgaagaggtatttgacaaaaacagttttgttgcaccattcaacattgatatgagcttgataagtctttaatagagtgtcattatatggaactacccacctattatccaacttgtgaccccctttaatgacg

SEQ ID NO: 164710 - DNA, 1106 bp, Zea Mays
aacaattcaccccctaatcttgttggactcagaccactcccagttttgttctcagctccacgaacttgattatgcccaacgacttggtcagtatatcggcaagttgatcatcaatccccacatgatctacacttaccataccttgttcgatgcaatctcgaatgtaatggtaacgagtatcaatgtgcttgcttctatcgtgaaacaccggattcttgctcagttctattgctgattgattgtcaataaataaactgaacttctgcatattttcctttaatatatctgctagtagcatactcagccacactccttgacatacacccagagcagcagctacatattctgcctcgcaagacgatagagcaactactctttgcttctgcgacgaccaggttattggattcagacccagaaagaacaagatacctgaggtactctttctatgcacaagatcacctgaacaatcactgtcggtgtaccccagcagtgacagaccaactccaccacctctcttatatttgactccaacattgactgttccaacaacatacctgataatccttttcactgcaccctagtgatctttgtttggagcttccataaatctactaacaaggccaatcgagaatgtcaaatctggtcttgtgttcactaaatacctcagactaccaataatgcttctgtatctagtctgttcaaaatcagttcctttttgagcagttgtcagttttactcgctgttccataggtgtatctgtaggattgcaccctgtcattcgacattgatccacaatctttgctgcataggaactctgacagatagttatttcattcttcgactgtctgacctccatacctaggtagtagctgagcaagcccatatcactcatactgaaagtatgcatcatttgatgtttgaagtgtgtgatgtcagacactgatggtccacaaatgatgagatcatcaacataaactcctaccaccagcaaagaaaactctgaccccttcctatagacagcatgttccaccttgcacttctcaaacccgagggaaataagctctgaatcaagtcgagcattccaagcccttggtgcttgtttcaaa

SEQ ID NO: 164711 - DNA, 550 bp, Zea Mays
cccccggcgaggtggcgacggcggctagggttgctgggggcgtccgagtcgcccaacgcgggggcgacatggaccgcgtggctgattcctcacaatatatacttgcaatgatgtttccttcaacctcggtctcaatgatttggcatacagagttaactggttttgtagcacattctcttcggcgctgaattcaaacaggtttacaggcacaatatcctcttcacttggtttactctcaaatctcttctggctggacctggttgataatcggctcactggacctatcctggtctcaacagcaatgataccagggcttgaccaacttacccacaagaagcacttgtaagtgatgtcaatcctattttgtgcttttggtcaattaggcgatattttaaacgattcaaaatgtctattgtctgttactctattactaatatcttgtttgtaatactatgtagtgttcattttttttttttgagaatggagaatggacatggacaatggatatggacagtgcatcacttatcaagtaacaaactagcaatatccg

SEQ ID NO: 164712 - DNA, 604 bp, Zea Mays
ctgggcacgtggcatcatttcactagttggttaggacctctagtccaaacactgacagttggcgggccagtaggggtctatcatgtgcaacacctccaggtcccatcaagactctagatggcaagctttcatcacccgttcaggctcggaacaatgatcaggtttaggagcctagagttcatgtcactcggcatcgagtacaacatggtgctcctcccacctgtccctctagagcgtccaagcacacgtcgccgtccttctcgtcgtaggaggcagagatggaacaaccacaatcgtgccactcatggcaccccgtgacctggtgaagctcctaggctgaccgatgacgtaaactccctttcgagggacctggccaacatcagcgtcacgcccaaagcaccagcagctgcacctacatgccacacatcaactctcctggtaccacctcctctggaatgggaagtgccaactccccacgccatcgagaaggctatacaagccacaccggatctcccactctcgggtcaggagaggtcggccactccttggcaggacatgtcaggggctagaggagaaccgtccgtgttcaacccaatcccctttc

SEQ ID NO: 164713 - DNA, 612 bp, Zea Mays
gcgccacggaaactgatcctacatcacataatctgatactggtgtttagtaccacataggaaaattgatcctacatcacataaactaatcctggtgtttaataccacataggaaaactggtcctacatcacataaactgatcttggtgtttagtaccacataggaagggttgtttatacttgcgagcattatatttagttacaaaagggtaggatcgataacaaaaggtggtgcaatgcatacaatggttgaatctcagttagtttcgtgtggttgcatatatcattcctcgtcttttggtctgtggaatctttgattatgaatgatccttgtttgaacctattaaatgaaaggtaggattttaataatcttgtcaatcattatgtagtgaagtacaattatgcagtgtgtaaaaatatatgcacgtgcagttaacatgcttgatggatatgaggaacctatgtagaagcttacctctttggaggagattgaagaggaagctttctctttatctttatcagtgggagtttcctgcaagcgttaaatagcaatgggtgagcggtacatacatgtatttaaaaggtcactaaaatcacatgatgttggttgttg

SEQ ID NO: 164714 - DNA, 292 bp, Zea Mays
cacagctctctcctgctcgtagggcaccgacaactccatctgaacacctccatggcatgtcggcgacgccgcggtggctccattgctataccgccccagcacatgagtacacgctcacgctcacacatctagtccctcaccaccacctgtcaccacaaccaacaattaggggcggatttaggcgttgggccatggcccggggcctagtccatgtaactaaaataggcacaacatctttattaggccttttctctaatttgctggcagctggcgccctcccgctctcccatag

SEQ ID NO: 164715 - DNA, 526 bp, Zea Mays
caagaaggtaaacttgatgtatcaagaaggtctacaaactataagataataagaagttggtctttatactaactgaaaaaagctctagatgttgatttatacagttctgatgagtgatgacttcattacataaaaaatctctacgtgttgatttatgcaattctgatgacttcattacaaaagcatgctatgtttgagaaataatgttggaaaaatatgtattaggaagctttctgccacgaagtaaccaacctcctgaaggaaatcaaggacacctttcctctgcgggcaccggaagccacacctctcgaagaactcaagcacgtactctcggggcccctggtagacgatctgcccctcggacagcagcatgacatcgtcgaagaggtcgaagacctccggcgcgggctggagcagcgaggccaggacggtggcctcgcccaggtggacgatctgctggatgcacttgacaatctggaaggtggtggagctgtcgaggcccgtggagatctcgtccatgaatagc

SEQ ID NO: 164716 - DNA, 521 bp, Zea Mays
aaagaactcgtgaaggaatacacgatgaagcagcttgcaattaatttttgaaactggaggtctgagatgaatacaaaatttgcaaagaaaggcctagacccgacaaaaaaatataaaatctcagaaggtcagtgggcagtatttctagagcagaggagcagccctgaattcatatctctaagcgaggcaaattcagaactatctaagaagaacaagtaccaccaccacttaggcacaggtggttacaagtgtcaagtttctaaatggagacaagaagacgccaagaagaaggccgcagggttgccgactctttccgagcaacttggtgaaaggacgacaaattggatctgtgctagaaaacctagggaaactgaggctggtgtatcttttgatgatccaaatgtcgaagaagttgtgaaaaacatatatgaaatggcagctaagcagagccaaggatcatttaagccacaaagggagagagacatcctaacggctggtctcggtatccctgagcatccagg

SEQ ID NO: 164717 - DNA, 455 bp, Zea Mays
gtccgtgtctaggagatcgcgagtaaggcggcgcataaccagggatgtagttccgatcttagtggaaaagagatacctggcgtgcgggccccacaagtctgtgaccagcgcagcagccacaagggaacaccgcactgcgttggagcgagcgagcagggaggctggccgggcgggcccgcgtgacaggcgcggaatcgagaggtgggccggccagggaagaattgggcccagatgcggttttgttccgatttctgttttctttttatgattcctatttcaaattcaaccatgattcatctttgaatttcaagcaaaactctaatgtggacagaaatcctatcttcatatttattattattactgttactattattatttttattatttatcttcctcctcaccctttaattcaaaaaggaataaaggattatcataattacctttctcaaattctt

SEQ ID NO: 164718 - DNA, 307 bp, Zea Mays
ttagcatttgcaatttcattttcagtttggctttgttcagttcgtgtccgtggtcgagtcgtgttgctggtttagggtgtatcttcgtcgtagatcaactgccctcgctagccgctatcgcatccaccattatccagatcacaagtcgatccacccattaatcgacttgccctcgctagccgccaccgttccagccctagatagattgcagatacgtcgctatcccgtccaccatttcccaaatcacaagttgatccaccccattaatcgctgtgattgcagatagggaatttttgccctaaccgcc

SEQ ID NO: 164719 - DNA, 626 bp, Zea Mays
cacagctattgtaatacatcacaagtacatagaaccccatcagtaaagcaccagcacatttccgaaaattccccgagactacgacgacaaggcatcgatccgccatacaataaaaatcatgacgaagccgatagatactatccactaaccgtttgaaaaactaaacttatttctcgcttgccactacatcactcctcaatcacacgaccatcatgagcatccttcacacgattatataatagcgacctaagtgtcgtgttacacaatgcatacatctttcctcgttgcgagtataaccatattacggcatatacccgcacacctcaatcaaatatcttacgccaccaccactataatacaccacagcacaaacgcacctacgtgtccccatgttacgcacaaggcatcaacaacatagtgactctaacaggattaatcatactcctcattcgcctcgactatcccaatcatcgatcacatgcataaaacaatacacttttcacgtagacacctatcgatgcattccccaacacataatccgcattttaaaaatttgtcctcacagcaaaccacacatcaaatacattattaccgaaacttaaaaacatccgagccctctttctaac

SEQ ID NO: 164720 - DNA, 892 bp, Zea Mays
tagttcacatgttttaagatttgcaaaagaaaccatgagtttgggcttatttgcaaaaaggccaccctagtgctccaatggttaagtctgaaaacagttggacagggttgactttagaactctgtagatctagaaattcaaagaatttgcctagggtcaacatagcaaagttgtagagccatcataggagaacaagtttgattaagtaactgagcactagtgctgaatagaaattggagaaaaatgagcccaaagttgggctgtcagtcagcctaaagtcttaagattgattaatagtgtgcaagatcaacattgggtccatggggagctcgggttaatggatgttcggcaaaaacccctatgacaaagttcaagctggattgataagctacaactttgatgcagagtactgggttagtcaccacacaaaatttagagaaaattcgccccaaacgagctctgtcagaccatctaatgaagcctctgatggtacagtggcaaaaaaatctatagattctatcaatctcacggccggtgacccttcaccgtgattggtgctgatcgccatgattcgtgcttcaggtctgtggattgagctcgccggtgaaaagatgacgctgcggataggtccgggacattgtggccgcgctatccctctgtcatttgcaccgacgacgtggccttacggccgtcaccggaatctgtgttgttcaccgcgattgcgccatgccttaggcccttaaccacgtcgcaatagctcgggtcatctgtatctggtgatagccggagagccgccacggtagatgccaccaatcacttgcaccagtgatctcctctttctccggccgccaccgtgcaagaccaaattcactggccaccgcttagcgccctt

SEQ ID NO: 164721 - DNA, 472 bp, Zea Mays
cttttaactgctctgctgtcttctctagtttcggctcttcagtcgggtttttcctaacttcgactggcatagggtgacctggttctgtcataggagcaaccccttcacttagcttcggcacatcagccgtctcaatatgcctgggtcggtgtgtcaaaactttaacttttttttaccttgacgcactagaagttgccgagatagcagctttcctcttcttcccttgctttcgcgagggataacaataatctgggtacacaaacccgataacatcaaataccctattcgatctctttttgccccgagctccgaaggcagttgtcatagcttcatctttggcctttgaatatgctccaagcagctcatcgctagtcgcctctatgacatctagctagtcatcattcgattcatcaaactggcccctgtaccgaaaggtgtacttcaggtacaccaaaccattttggttggagcc

SEQ ID NO: 164722 - DNA, 455 bp, Zea Mays
attaattaatttggcacgacttatgagctaaaacgaacgttttgagtcgttgggtgatttgagccttggagtgtcacgagatctggtgagccccttgtcccataatagctctttacgaaactttgtaattattaatttgagatatactaatgttaaattacctagtgtcaagcaccttctctagacagggctaggagaggcccatgggatgtaggatctcgagagcggtgatccagatagatggatcctgcggtagctttctatatcaggattcttgaatgcgtcttgacggccatcggcaagctttcctggacactgacaaggtcaaggacccaacatgttagagccaagtgagagttgtctcaaacgatgccgcctctatctctaaggttgcatgttgtcactatttgtgtccctacgcatgcggagctagcatactagcatcacgtcgtttc

SEQ ID NO: 164723 - DNA, 654 bp, Zea Mays
agccttatcgagaaaaaggtgatgttggaggacatggagtccttcaaggaaaataacacttggtgcctcaatgacctcctacccggtcgtaacccaattcaggtgaaataggtgttcaacatcaagaaggacgagcatgagatagtggccaagtataagacaaggatcgtggtaacgagctatgcatagtggcaaggcattgactacgatgaggtcttcatgctggtggccaagctagactcggtgtgtctactaatcgccttcatggtacatgagtgtgggagggcatcaaatcaacatcaaaatccacattcttgaatggtgagctataggagaagatctacattgagcaactagcgagattcatcatcataagcaaggagcacaagctgttgaaggcgttgtatgggctgcatcaagcaccaagttgctagaacacgaagttggatgacacatttgtgtcaattgatttttagaggagccctttggagcacaccacctacgtcagacaacacgatgatgcacaactagtagttggggctatgttcatgacctcatcatcaccagctcaaattttgatgacatcaagtcagtcaagaaggagatggtagccgagttcaacatgagcaaccatggcctacttcactactatct

SEQ ID NO: 164724 - DNA, 608 bp, Zea Mays
aaagagcctgttttagggtagccatgggagaccctgcccccagattagtgagtggtccaaattagatttacccaaggtatgtcttctctgccatagaatttgtgaatgtatttaagcaagagggtcgtgttctgaatcttcaaattgagaacacccaagccccctctatttctaggacagcacactttgtcctaggcaaccagagggtttcaagtgcgcattttaactgctgctgacagtcccttctgattgtttaactgctgccgacagtcccttctgatacaatcgataccgttaatgaccattaccggtatcttaagtgtgcacattgtaaagatgggcatcgctgagaaagtagagttgaccagagtaagtcttcctgctatagataaccaagaactgatggtactgagccttctttcaactttggtgatgagagggagatagttttgactttcggcctcatgaggcccattggcaaacccaaatatgtgaacgggaaggtgccaacttgtgacatccaaacattgccgccagctgagtggttttggtgacatcaaggttgatcgccgacaagggaaggggaagggggaggtgatggttgccga

SEQ ID NO: 164725 - DNA, 420 bp, Zea Mays
acaagtatccatcaccaccatcgccttctcatggtgaggcacaaccaccacgtggccacaggaaacttccaccaccatctagatcgatgtattcaaccatagcaccctcaccggcaaattacaatgttgtctcaccatctgagcaaggtcccaagatcaaagatcatggcgccccggggaatgcacctatgtcgtcgggtcaagaaggagcatcgccgccatggtatttttgatgcgaagatcaagataaatgcttgccaattgcagttctactctccacaagagatcaaaagcccaaaagctactttagagggagttccttttttcttatcacacttatcacgtcgaagcataatattattgaataatttatgtaatccatttggaccaagcatgttgtcaatgaaatcttatgtcaaa

SEQ ID NO: 164726 - DNA, 430 bp, Zea Mays
gtgatctcctcggaagagacgttggaacagtggaactccgggtggacagccagtccgccctggcgttggccaagaaccccgtgttccatgaacggagcaaacacatccgggtgaggtaccacttcattcgtgactgtttgacagaagggagcatcatggtgcgctacatcaacaccaaggatcaatttgcggacctgctaaccaagctccttgggaggatcaagttccttgagcttttttccaggtccggaatggctcaactttcccacaaggcgacgcacaagacttagggggagaacaatggaataagtcatgtggtcttcgtgtggaggacagcatctctaattttgtggtgtggaggacagtccgcacagcatctttgttgtaggacagcagcagcaacagtcttttgactgcaaggacagcgtgc

SEQ ID NO: 164727 - DNA, 937 bp, Zea Mays
ctgcggggtagggaccgggcgacagaactgggtggatacctaggcgaagaagtgtgtaagggtggtgaatgtgtcagacttcaaccgaagaggaaaagtccaaagaaaatgggaaaatcatccaaaatcaccaaatagtatttataaccagagagactgagtacaggggaggtccagtgatcacaatgaaccaagtcaaaagtctacacaacccgagaagaagaggtaatgaatgggagacgagtatgtcagcctaaatgacaagcacaatagaggccctcaaaatgtcccctactacatgaagaatctaaactgttggtaagcttggtcatgacgttaggtcctgggtggccaagacgacaatgccaagtagtgaaggtggtggtggagactaggatgggaggaggggacgtgtcggtggaggaaggccggagcgtgtagaggggcccagcgctgtcacatcaggcgagaagggtcttggtgtctagatccttcatagaaaaaccagaaggatcaacctcaatgaaacaagaattgtcggtggtgaaccgacagactgaaaggagattatggttgatatgagaggctacgagaacttagttgagatagaacggtctagggagaggcacctactgaggtgaccgacagattgaactgtttccaacgacgatcgaggtggggtgagaggaatgaggtaggtgggagaaagagagcatgcctgcagtgggggtggtgtggtaggaggcaccggagtcgatgacctagtcaggtgagggtggagacaacaccatggtgctataggcggcggcaagggaggctgggtccaagattctagcgagtggggactaaggagtcgtggtggtggtacccggaggcgggagctgaggcggggccttggtcatcggggcacgccgtatggaggtatgccataggcgag

SEQ ID NO: 164728 - DNA, 765 bp, Zea Mays
gcgggagcaggcgatcacaggggtggggccaatttgaccggcgggggcctatggcggccggtccgcggcgcggtggtgggtgtccacggcggtgaggtcgccggtgcggttgccgggtgcaatagaagggggaaaggggtgccttgtgaccgtgagagtgtggcggagcttcgggcactggttaattggactgatgatcactaggaagggggaaatagggctcaccggagcgacgggggaagcacggcggcgctagcttgattcgctcgtggggaggcggaggagttggccggagctggtgtggtgaggacagggctcgggcggttccttttataggcgcccgggggagggagagggatggaggggacagcgagcgccgacgagctcgccatgatggctggaatggagctaacgatgattgggacggctcgggcaagcgaggggagaggggacggctcgggcacagtggcggggtggttgctgaggccggtgcaagccttaatggcgaggcgacggggcgagaggcgctcggcggcgaacgcgccggtgaggcatgggcgagaacgacggagctgacaggcgggcccgagctgccagggagagggagcggcgcgagagggagggaggcgagtcgctgactggtggggccgagctgtcagcggaggcgcgggcgcgcgggcgcgtggagctgggccgcctgggccggggagaggggggagaggagtgcgggcgcacggcacgggttgggccggattcggcccagcc

SEQ ID NO: 164729 - DNA, 350 bp, Zea Mays
tgagcaatctataaatatgcaagtactcacaacttaagataccaaatacttgacttatggagatacccaagtcctgattgcttcatttcctgctcatctccccttttccaccttgagactatacaagatcactcaagaaacaattagtctcaaaagacacaagttatgtgtgctccccctaaagttgtgcatcaaatatttgaatgacttgcactttgcacattctagcttcctcagaactagaggggatcacaatatatcttggtcaaggcatactttatcaattttatcacaaagagataccaattgaatagttgacttaatacaataatgcatgcctcaaggagtat

SEQ ID NO: 164730 - DNA, 607 bp, Zea Mays
ggattgagaggtaggagacctgtgtgaaccctggagctagacattgaacgagccaacaaaaggttggtcacctcggccagggttcgcccgcggactgaacaaatgcgcccacagcttccagtgaggctccatgccgaggtatgcctagcatgatgaagcacactatgtggaggaccgtgttcgagtggaggttttgcagctccaacccatagtacaagagtagtccccgcatgaagggatgcaaaggatgcccgaagttgtgctcgtaaaaggaggctagcaccacgacctctccatcacgaggcgccgaaacaccgccttcctcctccagatgccagccagagaccaactcaggaggaagaaacccctttctctctaggtcatcaaggcgctctcgggtggtggagcacaagggaaaggcgtccatggaggcaagaaggaggggcacagaaaggaagttaacgtgagaaacgcttacggatctttgaaggaaggaggcaacaaccgatcggtcgagaaagcacggtaagcgaaactgactccaagcgccttcgtgtcctatttatacgcagaaataagtacgcgaagcgacgcctgaaggggaggc

SEQ ID NO: 164731 - DNA, 419 bp, Zea Mays
agagcctatagggcgaagacgcggtctccgtcgatgaggtctttcgaagtaggctcgtctacgtcggggacggctgacgtgaccatccgtggtgacccatgttttatttcttgtgggtcatggcctccgatccatacagaaggcggaaaggggtgaacccagtcgccctgcactcagttgtgttcagcgcccagaccgcttcaggtaacaggtcggcccacttgcctttcttgtcgtcgaggagcattttcttgacggttgtgaaaattttaccatttgcgcgttccacgactccattggattgcgggtggtacattgaggcgaaggcaagcttggtgccaatggagaagcagaaatccttgaaatcttggctgtcaaattgcttgccattgtcaactgtgagctcggacgggactccg

SEQ ID NO: 164732 - DNA, 490 bp, Zea Mays
ctctcatatgctacttctgggcgcgcttggttgccttcctaatgcatgtagctgcattcgcacgtcctcaaagcaccacttgtttggtagcttatacactggggtacatgctagcatgattcttaaggacccatttgtctccgtcggattggatcgtttctgaccttgttccgggtgaaataagttggcccggattgaaatttgatcgggatggctgaaagcgttcgtttggaccagaacccggaagcaaattgggcccggtttagactttctcttccttccaaggctcgatacaaaccctggcatcgtcccctctggatccaatcatgaccggtgcaaggcgagacgttggcgacataggaacaggaggcgaagaggcgacagtgcatagccccaatggtgaccctccccgtcgccttctcaccagtaagggccctctcttccttcccctctcctatccccgtgtgttcttgaacctgtgaaggagatt

SEQ ID NO: 164733 - DNA, 595 bp, Zea Mays
gtacaaaatatgggtcattggatacaagatctacggcgtaggtttcaaataagcacgatctaatctccttcgctcgatctagagtcagcggccaggatttacgcggaagggtacgcgacttctaatccgggtcgtctagacgccatccaacgaccacggtgccaccagccaccccctcctccaaccctgccgatagcaggcggcggtgccataacttcccacgacggagcatcagcggagcatggctattcgatgccccggtgccttattcaaaaattagctagttgctatacatagtagggagagtggtgggttccagggaagtgatcacattacgaatcggctcgcgatgacgccgagccacagtgaggcgcggatctatggcgtgagaaacaacgacaagcaatcgtcgacgccccgacaccctaatccgagcacaattcggcgcgaattgaaccaaagaaggtatctaagagaaggagggccttatcggagtattggacagcgcaggagccggtcatcgacgaagggcgtcacactttatcactcccaactccggtcgtagctggtgattcgtagggtttgccgatggaac

SEQ ID NO: 164734 - DNA, 709 bp, Zea Mays
gcgtgagcatgttgcaccgtcttaagtctttgccgacttaagccgattgctccgttagcagggcatagtggtcaccccaagttaagtaagagtgctagtcaatcatgaacaaattgagtatctttgaagccttctttattgatgacacatctcccgttttacagagtacattgtcgtcccgatagctttcgaaattcagctaggggtaaaacttcctaaggtgttctatattccaggagttcccaatttctgtgtcgtccatctgagttagacgatatgatcccggccgagtgacttctgctactatgaatggtccttcccataagggcgataacttgtgctgtccctcccccgttagaattcgacggaggacgaggtctcctactgagaaggatcgttgtcgcacggccttgtcgtgatagcgtctcagagtctactggtaccgtgctgattgaattactgcgttcagccgttcttcttcgagtacatcaatgtcctccagcctagtagcttcagcttctgctatgctttcgaagaccaacctcggcgccccgaacttgagatcggcgggtaatactgcctctgatccatagaccatgaagaagggagtgtttccatgtagagctcggctaggttgagttcttaggctccaaacgacgtagggcaattcccttatccacttccctgcgaacttctcattcttttcgaa

SEQ ID NO: 164735 - DNA, 2281 bp, Zea Mays
gaaacctccattgctggctccccatcctcttcctgcttcatggtttcacctgctgccttctccttcctcgattgccgcagctgctatgggaataccatctttctacaaatgggtcgtcagcaagtacccaagcatcatctcccctgtgaaggacgaaccagaggagtgccctgatggcatcatctacgacaacctctacctcgacatgaattgcatcatccattgctgcttccacccacaggaccagctaacgcatgcagacatagatgtatccacacacctcaatccatgcgaatctggacggtataaatgtatgtgttgactgactgacacaccgttgcaggtgcgccctccgacgacggccaatgaggtgttcgagtccatgttcgagtacatggaccgcttgttccgcatcgtcaggccaacaagtctgctgtacttggcagtaggttcgtgcatagattgttacacatcaaactgaactgaattccgtgtttggtttgaggaacaaattctcacctctcactttttttatttggtttgtgaaatggaatgaaatgagttgatccatcatcatttcatttcttatatactaataattagtaactaataatatgaggaatgagtttattctattaccgcggtgtacattaacaaccagcaacaagtgttaaggatgatgtttgttaccttcagttatttgagcaacttagttacacatgcatgcacttccctatctgttccatctgcagacggcgttgctccttttgccaaaatgaaccgaatacgaaggggacgtttccactccgccatggaaagacttgctgtaatgacaaatatcagattctctcgtcaatgaaataattgcatatgatttttttctacattgacagtgtgatgtctgaaacagccgaaaaatgcgtccatgcttcgatttgcaggaggaaccaccgcgagagatttccgaagtttctgaccccaatgtcatcagcccaggtactgagttcatggagaaggtatcagaagccctcgagtactacatccgtgccagatttaacagtgacccctggtggagagacatcatggtttgctcctgtgctttactaaatgcaatttatgttcttctctctctctctcttcttaaagggaagttcatgttcatttcagcttcaaccattagacatacatgctgaatctaactgcagggtctataaagtattgacaaacattgacttgctgaatctaccaggtggatgttgctgacaagtttaacatatctgttctgaaggtaatactctctgatgcgagtgttcctggagaaggagagcacaagatcatgtctttcatccgtgcgcaatgcagcatggaaggctatgatcccaacactcgacactgcttgtttgggcatgtagggaacatatatatatatatattaatcggttttcttgatgatctcatcatttctaataatgttgtgtatcactgatccagttttcatcatgcctagctatctgtactggggattaactgtgaagaatcattgcaggatgcggatctgataatgcttgctttggcatctcacgaagtctacttctctattctgcgtgaggtctgttaatccctcgtcaatgttaatgtcatgcttaaacatattgcatcacatgcttgataatggtatgcaccgctcctctgtctatactactaacttggccaggatttgtgtaaagttttacctgtcagagtaactccagcactttataatggtatgcaccgctcctctgtttaacttcaacaggatgtgctctaccaaaatcaggaagaaacggaagggaatccgaagaaatcatttctggtcctgctcacctcccaactccagataatgccactcatttcctcattttgatacactaacagtgccatcttaatttccagtttttgaacatgtgggttctgagagagtacttggagattgaattcaagatactggacccagtctgcgagactgatattgagaggctaatagatgacttcatctttatttgtttccttatgggaaacgatttcatcccacatattccgtcacttaagacgcaagaggtaacctttagactattgtaatagcgtagtagaaagttaactttgttatcactacatatgcctttttgctttgttcattactctgaaaataaaagcatagatgtttctctcatctattccatctaacagggtgcggttgatcttctcatcgaagtgtacaaaacaaccttcaacaaaatgggag

SEQ ID NO: 164736 - DNA, 706 bp, Zea Mays
gtggcctcctctgtggtttgtcgcggtctcgggattccgcgtgggagatccttggacgaaatagaccaccgagctcgccggaattcctcgtcgtcgccataaacccgtgccccgccgtggccgggcgttcctgtgacccaatagctggtaaggagctttccttcgagtctgttatcatctccactttgcgtagctttcatttaatcggagttcaggctttgggattgtggggctgtgtcgcgtcggccatggcgccgccgctcggctttgggacgccgccgccctgtgtccggtgggggaagagatgagagaggtgtgttgaaggggataagatggggaccctggatctagaaactgatggatgagagtcgattgtgggcggtattaaatccaaatcatagtttcttcatccagcggctatggggagaatagggtgtcgcgaagcgtggaccgtggatacgtgatccagtggttgaaatgcaatgatgggccattgggaactcgatctaatccgggcgctcgattggggatccaacggctctcaaccacccgtaccccttcagccaagatatcttactaaagagacccttacttttgcagtaactaaccccgatccactgttgctgtgcgctgggtctcgggattcttacgtggtggccccttccttctctagtatttggcgcccagtccaggaattaaagaaaac

SEQ ID NO: 164737 - DNA, 838 bp, Zea Mays
taatattctgtgggttgaactatgtttagttcaaattactctgtgaatggttaatcgaggagtgattataattgttgcgcttactttacatatcatctcctgtatgcctcgataaccatgactgtaggaaggtcttcatcaaaactctgatctattatgtgtgttatatcttcaggttgaaatatcctgcacacacatagggggagcctttcttacattctgagttttaattgggatttatctatctctcggacagaacttcaaatcaagataagtcctacgaaactcatctccaaaatccttcttatacctaaggtatgagggagatttggaaaaataaaacttctcttaaatatattatgtagtgttgtcatcaattaccaaaaggggggaggttgtgaatcatctaggccccttagtgatgttttggtaattaatgacaactgcttgtggactaacggttcttggagaaataagaatgcagggttggacgacatagaacaggaaatcttggagattcataagcattggttgtggatcaagtgaaggcaaaggtataacataggttttgttttttgccagtcttgaggagtttagagaagatacttgaccgaattagtaggttagatagccgtactattaagaggggtcaatgaccttgatctgtgtaaaacttagtgcctcatagagcatctagtggttgcatttgcatgaggactaacagcgcttcaaatttcatgagttaaaaatcctttcaaaagcttgtttgaaaagtgcaaagtcttggatgcgcgaaccgtccgggtcttgagggcggaccgtccgcgatccaccagtg

SEQ ID NO: 164738 - DNA, 1207 bp, Zea Mays
ttccaaggtttggatagttcgctccgactgaccatcagtttgagggtgaaaagcaacactaagagagagcttggtacccaatgcactgtgaagactctcccagaatttggatacaaatttggagtctcgatctgaaacaatggacttaggcaccccgaaagcctgattacttctttcatatacaagggaaccaactctgaagttgaatttgtggtcttcatgggaataaagtgcgcagacttagtcaagcgatccactaccacccatatagcatccctgccccgaggagaacgaggtaagccaaccacaaaatccatggtgatatgctcccacttccactccgaaatttccaatggtttcaataaacctacaagcctcttatgctcggccttcacgcgctgacatacttcacaggcgacgacatacttaggaacgtcaaccttcatcctcttccaccagaagttttgcttcaaatctctgtacattttggtttcaccagggtgaacggtgtaaggtgttttacgagcttctctcaagatatccatcttcacctctgatttctaaggcacacaaagacgacccctgaaacgaaccaaatcattctcatcaatggtgaactcatggggtttaccatcgccgaccctctttcgagcttcctgcaacaaatgatcctgctgctgagccacacgcactctctccagaaggaaggattgaatgagatctgagccttctctctagcagtgccgacatagcacaaagtgacccccatacggtctagatgtgcgatcaaaggcaaggccacttttggaacaccggacctgctaagggcatcaaccaccacattttccttccccgggtgacaatgaatggatagatcataatcctttattaactcaagccaccgacgctgcctcaaattcagctccttctgagtgaaatatacttgagactcttatgatcggtgtagatgtcgcaagattctccataaagataatgcctccacgattttagggcaaagaccaccgcggccaattcgaggtcatgagttggataattcccctcatgcttcctcaactgccttgagccataagcaatcactctgccttcctgcatcaacacacaaccaagaccattacgagaagcatccgtataaactgtgaaacacttaccactctcaagcaaggctaagataggggcattcaccaac

SEQ ID NO: 164739 - DNA, 747 bp, Zea Mays
tggagcttgaagattgtgcatgacgcgcaataccctatactacgtatgcacaaccagacggtctgaccggggtggtcggacagtccgcgacgggaccggatggcaggcgtaatatgactccggactgtccggtgtaaggtgtcggacggtccattggagggtcggacggtccgtgatcgtgcgcggaatgtccggccgtgaccaaagccgatctagctaccgtgcagtgaggatggcagtagcatttgccccaaatatgagttcatcggcataccaaaatatcgctgggactgagaagccccatttgttgtcgatgtggttgaagtagttattttagtgcccaattcatgcaacaaaaattcaggtgtatgagttttttctaatacatgtgtcatattctctatatcctctattatacttttaatccgattaccaaaagaaattttaatggattgaatatcagctaatgacgtggtgttacttacagtggggaggtgctgcagcaaggctgactaggaatcacactttattgccctctccttgacgaccttctgatggcaatctatcctaaagtgagagagataccacttctccgtcaccttgcatatctgagccttttgtcgctggaactcctcatccagtctcttcatgtagtcttctaacttttcatcatcagcggccgataagttagtcagccttgtgttgatgtccggggaaacgttgttgtgatcggccattgtggccgat

SEQ ID NO: 164740 - DNA, 798 bp, Zea Mays
gcccaaagttgggctgtcagactacttaaagtctgaaatcagactaacagtggactgacatgaacttcaagcccaatttcaagcatgatccattggctttttgtggcaacaccatatagcaatgttgtagatagtatattgctctacaattttgctatagagtgttgatcaagttgccatatgaatctgggagaaaatggagctccaagatgctctgtcaggttgactgaatggctatcgccatggtacagtacctggctgggttccgaccgtcagcgcccagaagatctcacggccgatgtgcctcgccgtgattcgtgtcaccggcgccaggattcacactcgtggtggatggataacgtcgcgaggtaaagggtcctcgccgtcggtgagctggaggtcactccggtgactcaccgccgcacccttctgctttgcggctggagcagattggctcaccggtgaaccgccgcctctcggacttgtgccgcgtggctctgcctttccaccgcgttgtcgtgactctctatggccgtccaatcgtcgccggtgaggccgccacgacgatagacatgagttcatgtgcaccagtaactccccgcccttccgaccgccgcggatccccgttgaaattcccggccaccgccgttgagccctataaattgaagcccccgccagccctgcaaggtcatcacccaccccgccaccgagaatcgctagcaatcgtgcatcagtgagcttgaatttcggtttcccccaattcgggtttccgcctccgcgaaaccaacctcaccgcgg

SEQ ID NO: 164741 - DNA, 828 bp, Zea Mays
agctggtctcctccttctcggtcacggcttccacggagctcggagcatctgcgccaatcgtggagttcgttgcgggcgccttgggccgtttctccgtgactataaagtagaagaccttggactggttcctcctatccctcgtcgcccagccttattgccgttgaaccgagggtaggtcgagtcacgtcggtctcgcagccgcctctgcgattcgtcgtggttttcgtcgctcggatctctgcgggtgtccgcgtgggtctaccagaagctaggtaagcggctcgggtcttcggcgggttgcgatttgggccgaggaaatccgccaattgctcgccggagggagtgcttcaccaccgcgtcgtacttgctcgtggttggactcctccatcgcgctggtcatccgtggatgactcggcctgcgcttcttgcggcggtaaggttatggccttggaattcgccgtcattcctatgctgcgtagattcgggtcgcgctccaaacggtagattagtgctccgccgattgccgctcgtcgggcctgaccaaggctcgaccgtcgcgcgggctcagggaagaagaaggtgtcggcgccgtctgatccgatgcgaacggctgtgattagaacttggagatacccctttacatgattgatatgattcgttggatctggatcgaatgggcttcgttcgatccgcgctatttaaaacggtggccatcgaatctagatccgaggatcagcgttgcgtacccgtttgattcgatggggatctaatctcgtccgtccagactcgatcgggtggcccgtgttggtcgataccccttcgcgggac

SEQ ID NO: 164742 - DNA, 716 bp, Zea Mays
cgcctggcgagtcgcctcagacgaaaggaaagactgtgcggccactggggttttcttcctatcgacgcgggtttgcctgagttgattgcgcgaagacggttttagaaaccggaaacgtgggagacgtggctgggctgacatgggaaacggtgtaacggcgccgtcagtggaaatccaacttcatatgcataccttttatagaatttatatgcatcatcaacatccttgaaagtcatccctaccgttggcactatagttggatcaatgtttttttcctgcaaattcattgacattgttgtttgtaccatggaatatgttcataacaatctaatcaatcaagaatcaaatacaacaattggacttacatgtgaatgcagtatttgaggcgtatccatctccctggagctaatattggacataggaggtcgaaccctttgttcttcttcccctatgctcatctcgtcgatcacaggacccagtagagcaggaggtggtgtgaccagtgagttaccattaactactccctctgtctctggatcaagacgaacaccatctcctaccatcaccggcgactctccagagccggccatctccacctccaaatagttatgcaggctttgtggtgttttttcggatgaaaggaaatcacagatactatacaagtaaccgcatccacgtttacagggtctccccattatttccgaaaccgtcccgat

SEQ ID NO: 164743 - DNA, 415 bp, Zea Mays
caacttggtgtagttattaataaagttagttatttagttgggcaatccctttatttccactttcctctttatctgagaagctgtgtttgagagtcagtgaagatgaccaattgttcagtgctatgaagatttccatatatcttttcttatgctgaaagactgtagagtcagatctgatgtgtgtgtgctttctacagatgtttgagaacaggtgcagaggtggaaggcgtgttcaacaggagcagcaggcaccccaggaggaggtagctcagcagcagttgccagccccactcccgatgactattgagcagatgttcctgatgcaaacccaagcagtccaagtgattggtcagactttagcagcaatgcagcaggtgcagcagcaacccccacctcaaccccaagtgcaagttca

SEQ ID NO: 164744 - DNA, 579 bp, Zea Mays
catatacataatgcttataaagctaactagacaaactagagtatctagcctaacaatgtccatctcatcttaaacgattctaccctacactaatagatccatcttatctcgaaaagattctatcctatcctaatagatctaaccaatctcagaagattctatcttactcttggagactcatcttgtcctaatcagcatacttacccccaccaatttgcttatctcataaaagtgtaacaagcatgatctattctaaaaaaataaattaagtagatcttatctagtctatgtcacccatatccatcttaaccatactccggtaactttgatgatatacactgacctcgaatcaatgagctcaagaccggagaagaaaggatcaacctcgtcaagaaaggagagaggtcaaacccaaccttcagttgcattgccactcaacacggagttctttctcactataacctttcttaccccaggctattcttgccctaacttatccatctcttatatcctacataataagtggctggagacctatgctctcctaataaacccctattgactataaaaaaatgaaac

SEQ ID NO: 164745 - DNA, 511 bp, Zea Mays
ctcgttcaagcttcgggaatctgatactctttgatagagtgttgacaatctttgctccaacacgatcagggatgcaccctagaatttcttcgttaacaccaccaaagagcacagatccaggctggtagccaccagcaatagcgaactttttcagttcagagatatcttcttcggagagttcctggccacccaagtgtcataggtccaattctttactcttcgaagaagctccttccaattctttcacctttaagggtgtaaccctaccagcggtcacttcatccatttccctctcaggaaccacatcagctataatcctgtcaatctccggcattgtggttccaagagggcctccgctattttcagctttagcggccatttcatcagcatcggcatcggcgggggcagcaattttttctatcgcgatcgggggtggggtttcttctgaccaccctcatttcctctggtcgctgaagcagtcttcttcttgacttccgcacctttttcaacc

SEQ ID NO: 164746 - DNA, 493 bp, Zea Mays
ttggttattatcagattccattaaaggaggaggatcaaatcaagagtgcatttctcaactgcatagaaacatcgaggcacttgtcgttaggggcataatggtcaaagttgagattcgtgcatccgacggtcatgatcgcttcacaagaatggttcacactgatggaagcttcctgatcatggcatgtgccaccccaaactccatcccaagttttgaggtccaaaccaggcaaaccatcaggtggcgggtttgagacccaaactgtcaaacccaactagagaagtgtatccactatacctccaccataatctcgacatgtgttacaatttgtcctcaacttatcgatcaccaaatcatctcacactctcttgacttagtcaaccatcattttgacttgggaaacattgtccatatagctccacatgtacacttgctcattggcattgctaagtgttagccatccatggtccacccctggcgcctcagtccctcg

SEQ ID NO: 164747 - DNA, 718 bp, Zea Mays
gtttggagatctctcgctgattcgtctgccgttgcattctcctcgggtgcggcggttgtgtgtgccgccgccgcgctatctgtatctttccggtgccgaatcataggtagcctttatgtttccaccatggctccctccctccgtccgctgggatgttgggaagcataatgctagaatattactccaccaatcgcacacacaacatgccaatgtcaaagatgctatctgcctatccctatcctaccgtagcaatggcaatccttaaaaccggaagcacatcgatgtttacgacgaaaccgcagaacatcgacaggttttctttgttccatcgtcagcgcaacacgtctatacgggagagatggaaggaggggaagaggtggagaaagagggcaacatgtcgcagttggctggcgttcagtttcttctctcgaacgaaggaaaggtgagaggaatcatagtgtgtgtgtgtttttgtttctgctgtgctacttctcataaggaaatgatttcttgtttgtgaaaaaaaaaacaggaagtacctctatcatccatcgaagagaggacggcctgcatctgcctcttcttctcggctcactggtgcaggccatgcaggagcttcaccccgactctactccaggcctacacggcgctccggagcgccggcaagagcgtcgagataatcttcgtgtcgctggaccgcgacgaggccagcttccgg

SEQ ID NO: 164748 - DNA, 626 bp, Zea Mays
gggaggcgaggtaagacacccaccaagaccgtgctgctccctttagcagacgggggccatacagaaccttctcacaatcgttgcactgagcagtgtgcaaatcaagctccacagtacgcagccaactttcagcgtccataggatctacagaatgggcaaagacagggggatggcccctcatgaactccgcccgcttgtctctgggtacctatggcatctgaacttgcacctgaggttgaggtgggggttgctgctgctgcacctgctgcattgctactaaagtctgaccaattgcttggactgcttgggtttgtatcaggaacacttgctcaatggtcatcggggatggcggtggcaactgctgctgagctgcctcctcctgagatgcctgctgctcctactaagcacaccatccacctctgcgtctgttctcagacatctgtagaaaacacacacatcttagatctgactccatagtcttttagcataagaaaagatatatggaaatattcatagcactgaacaattgatcatcttcactgactctcaacacagccaacacaacttctcagataaagagggaagtggaaataattgggttgcccaactgaataactgactttatt

SEQ ID NO: 164749 - DNA, 369 bp, Zea Mays
gcatcccccacccaccagatgttagaaaggttttgttagccagatattcttgcaccaaatctcgagtactaatgtgctctgccatgactctgaattccacttcggctaattggcatggggagccgagctgtatgttacacaatggccttgtcatgccgaatcttaatttcaaaggactcattatcatgctcataagtttttcccttttcttctcatcagcttttacataaaaccattcatttgtccaaccggtaggccacttggtgtgatagccgatccctgaagcctttgtgtctttccggtatgcgaaattgtagcatccgaagtttttatgcaagccatctatccttgctttaggttgatagtgaa

SEQ ID NO: 164750 - DNA, 667 bp, Zea Mays
cacctggacgatgccgcggtggaagactcaaactcgatggttgcaggacgcgtgggctgctggacgcctgagacgctgacgtctgacgagtgactagtgacgaagtccaaaaacccggcaccggaagtcgaacgcctaggcctggcgggcgacagctggcgccctacagcgttccgcgttcgccgttcggcgatcgcccctgatcgcgtgtgcggcgtcttcgtgtctagcggtctggccaatcacgttattcacttttctgttggctcttgggcttccgtggggcgtgggcaagcaggcaccggcgttcagcagccttatccctattccctactatccattagatcctctatatctacagtggtaccagatttcacaatacatctaatttttttaccggtctcttgaaaaaaccaatgttactttctgtattcttcttagccatttccaagaacaggtgcattgtggagtttttgttgcctctctctctcccaactagcaccgcttctcgatctcgaagtgggcacaagatagcgatgcaacacaaacaccacatgcagtgcggtgacttctgcactgtccagaacaagccctgcgatcgcgtcgtgctgctggccgtgtctctcatcgccgtgcttcgcgcgttgttgtctgtgtttgctaccgg

SEQ ID NO: 164751 - DNA, 491 bp, Zea Mays
agagaagaggttggccaagagggaggaggccttgaaccagagggaggaggtcgtcacagagctccgggccaagctgagtgccatgaacgaaatcctagaagagcagcggatccagcagaccgtggctatggagaggatccaaaaatgggagcgggagctggaggacaaggccagcaacattgccctggccgaggagaacctcaaggagaaggatacttccctggataggcgggaggcggatctcgcctggcgggagaaggatctcgccttcagggaggaaatgtttgaaaggtgggataagttgttggccgagcatgagctcgaggcggaggagaaggagaaaaagctggaagagcggatccggcagttctaggcggcgcaggcggcaccgggcccccaagcggtggaggcgacgaagaaagcacttgaagacctccaggcggagcatcgcgccggggtccagcgcatcgccgcatgggccggcgaggcga

SEQ ID NO: 164752 - DNA, 622 bp, Zea Mays
caacaatcaagtgaagcacaactcaagagaaggccaaggcgggcacaatactgctcagttagtgaacagagaacactgaacaaccaaaatatcagagcaattaccgtctgaagaggtcctcatctcaatctctgaattctaaacagatgagtggttgcctactcgcctgttcagccactgaatagacaacagacgaggacgggagcgcgttggaggggatcctctgcagattacagtcgtcgtgtgatggagggagcgcagctactgctcgagcaaagggccaccaaagcacaacagggcgacatgagagggggagcggcgacgatgggtaagggactacgacgctagagaaggggtggctgagctggggaagagcgcacgctcagcgtaccgtattggtataagcagaggcatagggcaaaacatcgtttgtgttgggtacatggtgggccgacccacataatagaggccgaattagtggcccaaaacaggcataactagtcaaccataacccctagtcggacgagtaatcgcgattagtcggcgactaggatgactaatcgctatctagtcgctctagtcgagtcggagaccctaatcgagctcggactagcgataaggc

SEQ ID NO: 164753 - DNA, 437 bp, Zea Mays
atagatgcaatcaacactacgatttcacaacatcgaatttggatgcagccatacatccgcatcaatgtcttaaaacgacactcttttatgaaggggtaatatgaactaagcacaacctttaccaacttcaacaattcattttaatttaatggtgaaacatccacaccagatgaatgtataagaagatcaaacacctcacctcacagcaccacgaaacaagtagttctattgaaacaaaactcctaatcttcctaaaccttgttcttgccataatgaaaagataatcatgtaatctaacattctttgcaccccaccgaaagggagaaaatctatagaactaatggagcaataaaaccgacaagaagccaataacattctgcgcggcacagttcatcgaagaaatgccaaaaactctacatagagcactgacagcccaa

SEQ ID NO: 164754 - DNA, 425 bp, Zea Mays
cttcagcgctccgagcggcgggagcagcttgttttgcttcggcagtgaaggaggtcccttcaccaaattcgggcactacgaccgattcaatatatcgtggtcggtgggtcagaaccttcattttcttgcccttcggcacagcagtggtggccgaagcgacagttattctcttttttccttgccttcgcaatgggtagcaataatcagggtatatgaagccaattgcatcaaacaccctgttcaatcttttcttgccccgaccaccgaaggccgaggataaagtatcatcttcgcttctgctatatgtcccaagtagctcgtcgctaatagcctcaatacttttcagccaatcgtcgtttggctcgtcaaaccggtccctgaatctaaaggtatactttagtcaaactaatccaccttcggcggac

SEQ ID NO: 164755 - DNA, 541 bp, Zea Mays
gggtggtccggagctatgtatctgcttagcctggtcccgcaccctaagcctacacgctccaccactctgcgacgggtgccctagtatttggagctgtagtccagggggttcggacacacggattggctccccaatctaaaacctacaggtcatgttgcatgaatcaaaggatagaagataccagctggcgggtcctatgggtgcactactaaaactccctagctaaggttgtgtgcaggtccaggtcccagttgagactacctcctgggggccaggtcaccaaatttctcttaagtatgttggcacctagcctcgacacatcgagcctgcatcccaagggggctaggtcaccaaatttctcttaggtacattggcatccagcctcgacacgtcgagcctgcatcccaggggggccaagtaccagggagaagttggtaacgatgcacacagtagagacaaatggcatacagataagtgctaacactgcttgataaatagtacacaaaagtatcttacaaaatcaaaaaatattacaagccgc

SEQ ID NO: 164756 - DNA, 687 bp, Zea Mays
aaaaacacaacatacctaagtacccccttaagaagatgttacacattagttcaccgggaggtgacatgaaggccacacactcatgcccccatgttagtctcaagattcaaggaatagattttttagtcaacccagtggtcctaggatccaacggtattgatgtgattcttggatgcgactggttgaaaagttgtgatggagtgatacaatgtgccaacggaacaattatgttgacaagtcctcaaggtgaaagaatccaagttagcatagacaagtcaaccgatgaaaaagggaaaatagtgatcaatcacttggaagaaaagcccttcgaaaatatcaaggtagtgtgtgaatacccagacgtacttccggaggaattaccaggtatgccacctgaccgtgatatagagttttctattgaattattacccggaaccgcacctatctcgaaaagaccttatagaatggatgtcaaggatttagtagaactgaagaaacaaatagaagaattactagaaaaaggtttcatttgcccaagctcatccccttggggagccccagttctatttgtgaacaagaaggatggttcgaggagaatgtgtgttgattatagaagtttgaatgaagtaaccatcaagaataaatacccattacctcggattgaagatttatttgatcagatgaagg

SEQ ID NO: 164757 - DNA, 353 bp, Zea Mays
gtggattggacacaaaaagggtgaaatctttgggaggaggaaggttccaagccgagtatgcaacgggagcaccaacatttgaaactttacccctgaggatcatctcaagtcggcttaccaagtcaacagaaggaattctcctatcggtaacccgggttgagtcggctagcccttgatacagatatgccggataggccctgtcttttagcggctgaatgttcttgaaaacaaaatctgttaccacagcttcagcagtcagacctctctctttcagtaatccgacttcagtaagcaacatgcctgcctcggccacttcctgattcgtgggagactcagtccaactcggagtacga

SEQ ID NO: 164758 - DNA, 325 bp, Zea Mays
cggtgccaagcagaggtggcgctgagctccccatggcggagagctcgccggcgtggggtactccgatcctccggagctccaaaatcgaatctaacaggttctacacggaggtgggatcccaacaaatgatctagggtttacataccgattgtgaagatgatgatgttctccggccacggcgcgggaggtccgacgacggcggatgaactccgatgcaaatttcattgctaccccaccccttgtaccgcacggagaggacacagacaccatccttgtgcaaccgcgaatgtcccaggccgaacatcgcgggctcgtccacgttgta

SEQ ID NO: 164759 - DNA, 575 bp, Zea Mays
gaatttgcaaaatgaacaatttaggaaggagggacataagtcgacacaaccactttcagggggatatgatcagaggtaggatggggagagaggaaagcgagtatcgggaaaggcctgatcccaggccaagtttaagaatgacctatcaaggcattccaaagtgggggatgatctcatgttcgaccaagtaatcttcctgtcgagaagggggagctcaagaaggctaaggtccctgatcaagtaattgaaagcttctgttgtggacaagcaaaaattcccacagtttttctcaccgacaaacgtgatcatgttaaaatcaccacaggtaagccatgggatatcatcgaggaagtcgagggcgcacatgtgagataggaaatcaggacgtggggagttagagggagcataaatgtttgtaacagaaaagcggccctcatctgacaaggaaacgaagctggtggtcaaggagtaggtagaggaggaggaagaaagacatcaaaagtgggaggaggaccaagccaaaatgagtcctccagaagcacccatagagggaaccacaacgtactcgtccatgc

SEQ ID NO: 164760 - DNA, 700 bp, Zea Mays
tggacgtccgtttgagggatttaagcgtggctcgttcaacctagaagtggctaacgctgaggtgcagcgtctacaatcacgactagctgttcttagtgacccaggggaaggtagtctatcttggtctggcctttgggctctcagtcttttttggactactgaccacctaggggtttattgtaggtcctaggcctgaagcgctgggttttcctatgcgtagatcgggctacaagatttgttcgtgcgcgagggaggaattagaggttgcgcctccttgatgtcctggagtgcgtttgtgaggatgtggagttcaggattcatcagggcgcagcgacgacttctgccattgcgcaattacactctagtggccgccttcatgatattgttggcctacctgccggaacaacatcaatagacttggatctcctacaagcgactttgatgtcgcggcgaacgctatgcttggggtgttgtcagtggaggaaataatctgtgatctcccatagctttgttttgtggcccaatttttcttgcaacgcatatggtccttgggtccctcagaccctagtttgtcctaggatcattctcggtccgaggggtgctattcgtgtgactttctcccattcaccataccagtgtgaggcgagtcctgagcctctgctagaagtagagatccgtctggtgaggtcatcccatcatt

SEQ ID NO: 164761 - DNA, 416 bp, Zea Mays
aggagttatacaaaccgttggggttgctctgtatgtcgtttggaggctcaatgtctcatggatttgcaaaggaatcaagcgaagaagcttgaggtgctccaatggagtgagataggaagagggagctgttggttgtagttgggaagagaatggtcaggatgactgttggggacgaagaaaggggaaagaaatacccctttctgccaatggtcagacgacaatactttaggtggcgtttggtttggatattataatggtactcgattacggaccgtattgtattccattgcttcgtgtttgtttcgaccctctagtgatccggtcacggcgtaattagatatcgttgtatacaaagtcgataccgctctgaacccctcgcaatcggatattcctaccctaccggctggcaaccaaac

SEQ ID NO: 164762 - DNA, 772 bp, Zea Mays
ccgggggtgcagtggtgagcagcgaggttatgctgccgaaacttcgtccaagcacatcatgggggtcataataccacactttgtcggtcatccttgggtgggtataggacttatacgtttcctatatatgcaggtcatgatatgtagaaatgtgaaattctcatgcacagttcttactcgtgcatatctgcaataatggatgatagtcgtgattggatgtgtcgtagtttcagaaaccgagggacaatagaatttgtgtttgagcacggactcactctaaatggtgaattgatgatacttaagcaggggtttgagacagagagttatactagtttagtcttgcgccctagtccagtgtagtattaatcgtagtattgcttgagaactatgttacaactggtgtgtgtgtgtgtgaagatggacgggatcccacccttttatagctcaagggtaggaacttatagtggggacttgtattctactaagtggaatgttgcccttgggtggcgtagtccttctaacgtcattcgtagagtcgtgcgcagatgtactctcggtatggtgctccgcttcatccgcctagtatacgagttcatgtagcaagtctaatgctgtcatagtggctcttggcgagtcccacaggtagaattatggtgtgcttcgaggtcgtgcatggtgcaacttcgtcttttgtcatgaaacttgcatcactttcctatgtgaataggtgtacacccagtatggtgtatcctctcatcctttttggtatgtg

SEQ ID NO: 164763 - DNA, 485 bp, Zea Mays
cgttgatcgattgaggaactgcttagattagaagtcggataccgattcatctgggttaagagggaccgtagattgctgatcgtggggctgtgggtggtttggatttcattaaatttggtccgtcgaatcttaaccggagggtggtcagtgcacgacgcagttgtgtgggcgcgatctattctcggccttcggatctgatccaacggtcgggatccaacaatacccctttgcgatggatatttgcttaagtgcccctagggaattactgaattaacccgccgtccactgctattgtaaattaattacatccatgccctgattttcatatattggaccctgtagtttctagcatttgcgtccgcagtccaaataaaataccagggttaataataagccgagaaaatgaatatttagtataaaaacaattccaaaacctagattaattcatagaaaatccattttaactcctttttggtccattccag

SEQ ID NO: 164764 - DNA, 871 bp, Zea Mays
caacatcctggggctcaaaagaagaaacaaaagctgagtgggcaaaatgagacatttgttgatacctggagcgagttctcactcaccactcatctgttgaggagggtgattgcgctgaacatgccatggagccatcctcgaagaggtggcctccccatcaacaacaacctcaactcctccagtctcagcaggagctggtttgagtgaaccccaagtagaggaagtagtgggatcgggtccgtcagctgaagtagtggaagtaggctcgactagggcagctagcggagtcggatcaagatcacccgagtcggtgttgtcatgctcctcctccacaaatatggtctgtcccatctggtctggacttgcaggcccaaagacaggggatggacaaggtgcagtctcatcgaatgtaacctcacaagtctccataatgcagtcagtctccaggtttaagaacacaataagcacgagtatataatgcataacccaggaaaaccccatcagatgaccgagactcaaatttgtccaagtttctgtgttttggaacaaagcatctgcatccaaaaccattaaatgactaaccttggttggttgtccaaaccccatctcataagaagtcttgttcaagaaagctcgaagaaagatgcgtttcaacacatgacaagcagtgtggatcgctttagcccaaaaacgcctaggagttatatgctcatcgaacatcgtcctagccacctcaacaagggtctaattcttgtgttcaataatgacattctgctgaggcacatatggagaagaaaattgatgctcaactcccaaagaagcacaaaaggtctcaaaatgagtattttttaattctgtgatgatgtgtaac

SEQ ID NO: 164765 - DNA, 717 bp, Zea Mays
caacaacacatgtatatagagaatcatctaaatataaatgtaggaaactggtaatgtataagtacttcacaaactaataaaattaccatcatctcctgcatgcagtgctttacacaattgagtttcagaaacgaggactacctcactcacacatcatattttggatatcgaattctccatcgcaagctacatccactttcatagactcttttatcagtgccgaaattccagatccaacgaccgatcctcttggatattgtttagtggcagaacatatgatgcatggtccatgtggagcattgaacccaaattctccatgtatgaaaaataatagatgctcaaagaggtatccaaaagaattccatgaagaaactaacttggacaaacaaggatttgctacatatagacgaagaaacaatggacgctacgtcatgaaaggcggttataaattggataataggtgggtagtgccatataatgagattctgttgaagacttatcaagctcacatcaatattgaatggtgcaataaaactatctttgtaaaataccttttcaagtatgtaacgaaaggtccagattatagcaaagtatatttgcagagaataagaaatggcgaagacacaccttacgacgaagaaactaatacaagaaacgaggtcaaagaatatttggatactcgctatctatgtgataaggattcctgttggcgtgtgc

SEQ ID NO: 164766 - DNA, 869 bp, Zea Mays
gtgggacccacctggcggacgctcttccacctggaacgcttctgcgtggggccggttggtcggactcgtcgtccccgcgaggttcgcgggcgagctcaacggaatccgagaaatttgtgcacctggcggctcgattcatgtataaaacgagggtgtagccggcgggggaccaaaggcttcaaaaccctagccgcccggaggttctctggtcgcagataccggccgcagtggagagaagcggagagagagagggagaaaagtaccaccaccacaattcaccaacacagttggcgttcggggctagatttcaggccctaggtgctcatcggtgctggtagggctgatgctcggaattatcccagtcggtgtgggggagcgcgatcgccagattgttcatgcccgattatcatccgccacgaaagccgcgcctcgacgaaattggacaatttggtggcaaaatctctggtatggcgacccctgtccagttcgcttttgctccctccgtgcgtagcggttatctgtagggtaagaaactcaccggggcggcgttggagcgtactccgacgtcaccaccatcacgcggagagctctgctcgccgtggctcgccgtcgggaggatgatgacagcgggtggccgttggattaaaatgaacggttgtgatcaattgctacgtcgcgattcagctggatcgtttgggaccatggatcataggatagagggacgagattagaccggggatgtaacccttcagtcattggatctgggccgtcgatcttgcatcggacggatcaagtttcttaccggttcgtagtggccggaattctaatctgggcccttgggtctggatcggtcggctcttgtgacccga

SEQ ID NO: 164767 - DNA, 1295 bp, Zea Mays
atggacttaggcaccccatgaatcctgattacttccctcatatacaagggaaccaactctgaagctgaatttgtggtcttcatgggaataaagtgcgccgacttagttaagcgatccactacgacccatatagcatccctgcctcgaggagaacaaggtaagccaaccacaaaatccatggtgatatgctcccactttcactctggaatttctaatggcttcaataaacctacaggcctcttatgtttggccttcacgtgctgacatacttcataggcgaccacatacttagaaacatcaaccttcatcctcttccaccagaagttttatttcaaatctctgtacactttggtttcgccagggtgaacggtgtaaggcgttttatgagcttctctcaagatatccaccttcacctctgatttctgaggcacacaaagacggcccctgaaacgaaccaaatcattctcatcaatggtgaattcacggggtttaccatcgctgaccctccttcgagcttccggcaacaaacgatcctgctgctgagccacatgcactcactctaaaagggaggattgaatgagcatctgagtctcctctctagcggtgtcgacatagcataaagcgacccccatacggtctagatctgcacttttggaacaccggacctgctaagggcatctgccaccacatttgccttccccgggtgataatgaatggatagatcataatcctttatcatctcaagccaccgacactgcctcaaattcatctctttctgagtgaaaatatacttgagactcttatgatcggtgtaaatgtcgcaagattcaccataaagataatgcctccacgattttagggcaaagacaaccacggccaattcgaggtcacgagtcggataattcccttcatgcttcctcaactgccttgagccataagtaatcactctgccttcctacatcaacacatagccaagaccaatacgagaagcatccgtataaactgtgaaacgcttaccactctcaggcaaggctaagataggggcgttcaccaacttgttcttcaatgcatgataactaacctagcaattgttggaccagacgaaaagaacacccttctccaagagtctagacaaaggcttagtaatgctggaaaaatttggcacgaaacgccgataatatccagtaagtcccaagaaacatcggatttctgagacactagagggtctcttccattccaccacagaagcaacattcttggggtcaaccgcaatgccatactgactaatcacatga

SEQ ID NO: 164768 - DNA, 319 bp, Zea Mays
ctcaggaacacagagacacctcttaagttgagacacatggaatgcattatgcacatcagatagattatcaggtagctcgagttgataggccatctctccaacttgcctaaaaactctgaatggtccaataaagtgaggaggcaatttgcccttaactttgaatctcctcattccacgaagtggtgacaccttgaggtacacatgatttctttcctcaaattccagtggtcttcttctattatcagcatagctcctttgcctggtctgagctaccctcgaattctcgcgaattatatggacttgttcttctgcctcttga

SEQ ID NO: 164769 - DNA, 564 bp, Zea Mays
ggctgttaacttcctgtacactgtgttctgcttcggattcaaaattgagagggtcagtctggttgggaacatgggtagaaacctgtggacatggaatgggtggtacaaactgggtttgaccgaatgacgtttgtgctggaggacccccatgattcatcataccaaaaaatgggttccatggactacgaaaggtatatgtagatgggtcattagctccctgggaccaggtaggattactcatatgggatgtaggaatagtaaatgtagaaggatgggttgggtctaaaccttggccctgccacatctgaggatcccacatgggtgggggaaagactggttacctgaattggggctggcaccagtaggtcgaaaaggtgtgtttgtgttgttgtcagccattctggaatgaaatacaggaatacattaatttggacaacacataacaaacttgtactataaagtataaactttaatgcattgcacataaggttcatacaaaaggaacacaatgatgaagcattccacataaaggttcatacgaaagcaacataaggattaagcatt

SEQ ID NO: 164770 - DNA, 545 bp, Zea Mays
gagagggagaatagatgtccaaccacggtgcgtggtgggtggagaagttgatccttgcgcggtcggagacttagagcactggagacgtctgtgggggaccatggatccgggagagcggagagaaatgaggcgagggtgaggcaggggccgcatggcgggtggccgctatatctagatatcgggccgccgcagtgctacccgctagaatgggtcgtgccaagcactgtgggatgaaaattgtggcccagtccgacacggtgatcgggccatgctacctcgggcacatttctagttgggcgtgcggtccaaattcatgtcgtgctctgggccgctcagtgggcccagtcgatatggacgtctatattcgagaggggagggcaaggtagggcaaggcagggaccctccaacttgtgccctagaggccgaggcgaaggacctggccggtcgggcagctcgtgtttccattatacaatacaacattgaaacaacggccaaccgactgatccagccttcgccttggatcatagcctcgtactctggcttaa

SEQ ID NO: 164771 - DNA, 299 bp, Zea Mays
gggggttagggtacggtagtaggaaccaagagggggatgaggttttgaacttggtgttagcttatgacctgttgattgcaaatacctactttaggaagagggaatcacatctagtgacctttcacaatggtcaacactcgagccagatcgactttatccttgcaaggagggaggataaacgtgcttgcttaggttgtaagatgatacttggggagtgtgttatccctttacacaagcttgtagtggcggactttcgttttcgggtacatgtccatcgggacaaacatgtcaagattgcg

SEQ ID NO: 164772 - DNA, 301 bp, Zea Mays
ggatagagcaatctgggttgcgacgaaccgaatcgggaaggagacgaatctgctgtgcggaggactcctagcatccgacggggaggtcctcaccctgcgcgacggcgcgacggtgcacgtgaataatgcggacgtcacagggagggtgctggcaatggacgaccacggagtcgccgaaggcaaaggggaggacggggtgccgctcacctcgtcggcgacgagccgagaggaggcactagcgaggaccgcccgcgtcgcggggcgccgcgagagcttcgaggggagatcgatttccccccag

SEQ ID NO: 164773 - DNA, 594 bp, Zea Mays
gttttgtttcggaaggattatgcaaaaatagatgaatgcctagtgtgtggagaatctagatggaaagattgtgaaggtaaaaataagagtcctcaaaaggtattgcgacattttactttgattcctaggttgaaaaggatgttttcctcgaaaaaaatatctgaggaggcacaatggcataagttgaagaggaaagttgtggaaaatgagctcaaccatccagcagatggtaaggcatggaaggactttgataagcagcatgatttgtttgcagaagatcctaggaatattaggcttggtcttgcaacagatggtttcaatccatttgggaaaatgagctcctcttatagtatgtggcctgtttttgttatcccttacaattttcctccatgggtatgtgttgagcaatcaaacttcatgatgtgtctactcatccctggcaaagaatgcccaggaaaggattttgatgtctttttagagccattaattgatgagttgcaggatctttggttgggtgtcaatactattgatgcaagagctagaaaacagtttattctacatgcggcgttgctatggtgcatacatgattatcca

SEQ ID NO: 164774 - DNA, 272 bp, Zea Mays
gtccaaattaatttcttttatcttccgttgcagattctttatcccgggcacctagtgatacacatatctatgtatacgtacaagcagtatcaacactattatatctttgtttccttccttactgctttcccgtcggttgttcaattgtttccggaacaaccacatacgccttgtacaagctcacacagattcatccacctaccaccttcaatccgaattgccgtgctcacggttacgaaccacatgatctttatcgttcgaaacaccgtaga

SEQ ID NO: 164775 - DNA, 320 bp, Zea Mays
ggtggatgtatgctaacttcattaggaatctttgtaccaacaaaagactcgaattcatcctgctttgaagtggcaccggaaggaatcatggttagcagaggtgcttccaaattcgataaaccagaatttatgtaatctattccttcgtttgagtgcttggacttctggataagatcttcaaacttgttgcgtgcatctgaaattttctttctcattgctacctcttgtggatcattaggtgtatcttctagtaggttaccttcatcatcaaagcgtacagccctgccaaaagaaaaaggatagattagagaccaacacaa

SEQ ID NO: 164776 - DNA, 333 bp, Zea Mays
gcagaaaggggaagttagagctcagaatgcagaggcgtgcagcgacgagatataaatggggttttcccgggttggacaccgtttccaaaaagtgctaagtcatcactcaggaaagacaagatttcttggcataactcggcagttacctctaaagcgccgacgtggtccagcgtaactcggttgttacctctaaagcggcggcgtggcccagcataactcggttgttacctctaaaacgccgacgtggcccagcataactcggctgttacctctaaaacaccgacatagcctagagtaactcggctgttacctctaaaacgccagcgtagccca

SEQ ID NO: 164777 - DNA, 655 bp, Zea Mays
ggtatgggtgctgaaacaagagggcagggagcatgaacggacctggaatacgctgaccacggtgagccagcaccgctcagtgttcttgggtgatttgggggaaatcccaaattggggagttctagtggatgattcgaggcacgggttgcttcactggttgcacaactacttagcagagcaggcggggtcggcaatttataggctcccacagtggtggccggtgaatttgagggagacgcacgacgaccgaagatgaaaggggttagtggcgctcgggatcagtggcatttatcgtggcaacctcaccggcaatgaccagacgtgctagagcgagtcactacgacgaagtactgcgtctaggcacgtgtcatccgagtggcagacggctaactccggtgaacttatccacagcggccgtggcatgctcgtgtacggtggccggagtagaatagtggccggagtttatctcccgcgcgatatttcttacctaggagcgcttatctgagttcggtcgggtgtgaatcgcgacgccgacgcggatctgagcgcaagatcaccggcggcgaggtctctaagctggcgatccaatccggtcattgtaccatcgcgaagttcattcagtcggcctgacagaccattttgtagagcccggatc

SEQ ID NO: 164778 - DNA, 651 bp, Zea Mays
ctgaagaagcagcaaagatgcccgagattctaagtccttcagcagaagcaacagtgctgaaggcagaaaaaagttctgcaatgacccctagaaggaaaaggatggtaaatgttttagacattttggaaacaacggactccaaacgcccctctcccataaagaagtttgccgaaattgcagaggcgcaggctgaagctgatactaggcagataaagggcaaaactgtagcaattgaggctgggaccgaagccgaacccatagtgcctgctgagacaaagcttgccacagccgagcaaggggccgaagaaatacctccaaatactgatatagcttttgagaggaatatgggcaaagaagccgaaacccctgctcccgaagcaccttccggagatcctgattatatcattcgtcatgcttcgggaaaaagattatctgaagaagaaatttttgaagccaaacactatgcccaagaactgaagtatccgaaaggggccctagtgtttaatggtacagacgaagacgacttcttgtattgcctgccagacaacaaagaattatccgtctgtcgggagatggccagaagtatgggctttccgaagctcgaagttggcctctgtgccatgacaaaggacgatcttgcggatagccttg

SEQ ID NO: 164779 - DNA, 566 bp, Zea Mays
cagcgccctctggtgctcctgcgccggcgtggtgccctcggctgagtccgctatatcaccctgaacacgcctgaaccacccccaagcctctggagccctgccgtggctagcctcctcgtctccggcgagctcccgccgcaagaccgagcggtgtcaccgcacccaagtccgcccccctgccgttagatctcggccgtccacctgagatcgggcggcttagacttaacccgagtggatttgatcgtagccctccgatccagatccaactgtctctcccctctccccctcacccgcgtctctgaccctgggcacggccggtcagcccgtcctagctcgttggcgccctggccccgcttgttagccacgcccgcgcgcccgcgtgagctaatctgggccgttgatgtctgatccgatggctgaggttaccccgtacccctttgcgtggttgttttgcttaagaaaccccctagttttaggaaatcaacatgcagtcctctattttagcgcataggtccctggtttctttagaatagcccccaggacttttatttaatcacagatttagc

SEQ ID NO: 164780 - DNA, 859 bp, Zea Mays
tggcccttaacgggaaggaggtcaccaccacaactctgtgtgcctaaaaatagtggcgcaatttcctggacacaacaagtatagcatagataagcttgtgcgtctcaaggtacctggcttttgcctcatggaggacctcgctgacgtagtagaccggcttctggatggttcggacccctgcattcagtcccgagtcctcaaactcctggccttctgtcaacatcgtggtggtcagaccaccaccttctcctaggggaactttatgactcccctagggatgttgtgtcgtactttcgacgaccagcaccatgctcaccgcctctgtagccgctgcaatgtactagtataatggctctcctggctctggagctaccagtattgatagggacacatggtgctgcttcaactcttgaaaggcttgttctgtctctttggtccaagagaatgggtcggacttccgcaatagcttgaagaagggtagtgccctctcaaccagtcttgagatgaagcgactaagggcggccagtgaccccgtaagcttctggacgtctttgattcaggccggaggcctcattgtctctattgctttgatcttctctgggtttgcttcaatgccccggtgtgaaaccaggaatcctagcaacttccctgcagagacaccaaagacgcacttgtccgggttcagcttcatgcgtgttgcctgcagcttgtcaaagactagggttaagtcttccactagggtcgaccctcccttagtcttgactacgatgtcatcgacgtatacctctaccctgtccctaatcaagtcaccaaaagtattactcatcgcccgtacaaatgttggcaaggcgtttttcag

SEQ ID NO: 164781 - DNA, 915 bp, Zea Mays
agagtcgtaacaccttccatgcacattatattgggggttcttattcccctctgaccgatcttgagctcatctcctggcctccgttgctgcgcgctagctcttttcgccagtcgttgcagacagttgggcgtcttgttgctccactgccactggcgatcgattccaaagcgcacgacgtgcgtgcgtacgcagacacgattcatcatcagcagaggaaaaaggaagagtccgcgcgcggaactctcgttcgttgggtgttttgtgctccgcagcgcaccttcgaatttctgtcgagctaagctagcttagctacgtttctaggcacaccaattaatcgccgctttattcttggatcgggtgacgcctgtttgaattgaatcaccgcatttttcttttcgggcggtcaaaaaggtaaggaactggacgttggctgtgtttgggatatgagcaaggaggcggcttgctgcttcagaaagatcgatcacggtatcagtctgggacagtctagtgacagcggcagggcagggagtggtggcttcaagtaaacaagatacctccagcatgcagacgaccatccatgttctacatttagggtagtaatggagcttttgccgatcacgtcaaggcgaaagttgttcccacgaccagattccgtagtctgcgctctgcatttttggttctgcctcttccaccaatttcatcttagcaaaggaggaaggtatgcttgaatgaaccacgaatgaatttctttcactcgacaggcactgttctaactgtttcggaatgctgctgcggcaatctatagagataaaatactatagtaacagtagaaacaggcagtagaaacaggcacggattagagccaagggaacatgctgagcaagtcagctacggatcgtttccacgaaatgcaga

SEQ ID NO: 164782 - DNA, 516 bp, Zea Mays
cggttactgacatgtcgcgtcggttgtaattagttcaagcttgaagcagctgatgaagaagggaagggataagctaggcctaggccggccgcgcgccaaaacaaaacaaataactgtacttgagctccctgtccctcccatacagatacaggtttgctgcaagctaagtacaggccggatcgatggaagccatatgcagttgcgtgtgtgttcctgattgcttggtcatttctaggtcacactgcatggcttatatatctctatctaatcacgttgaaaattcgcccaacaacgtacgtatagtactgccgtctccattacgaaaccgaaggacctactgccattatatatgatcatgttgatgttgaaagaagaagatgaggtttgagatcatcaggcaggtcaaacgcaaacagctgatcgagctctggacggacggacgacgaccacggattaattcaggcgctcaccatccatcgatataaatatacctaaatatatatcatgatggcagga

SEQ ID NO: 164783 - DNA, 744 bp, Zea Mays
tggcaggcaggcccccgtgtcatctacccactgcgcacgcgcctcctctccttgtgtcgcctgctggcgggcccgcattgtaagtcacgagcacgcgtccgctcctagcgcaccatctcccttcgcagacacttgctcgtgggacccgcgcgtcataccccgttttgcgcgcacgttgcatccccgctcttacgctgcgtttgggggcccacctgtcaccagcatccacgtggtcacggcaacagaactcgcgcgatccgcggcgagctcctcccacggctcggtcgtcgccatcgctcacggaatccgctctctggagactataaagcttgcggccaccctattctccctccccctcgcccttgtgcaccccggtagccacgcagccatgccgccattgctgagaggagagaaaacagagagagagcgaggcgggatcatttcgtcgctgacgatttccacttccgtcgctgtggttgaactcggtatcgatcggagaagctttagagggtctctatagtggtggccgaagaatcggattggaagaaggatttggggcggcaccggaattccacgctggagctcggtgtctgctgctgctcgtggttggcctcggctacttcttgattcccggtaagaaaaccctagatcagttcgaggtcgcctctgaatcgtttaggattaaatgtactggagtttggtgcctcgttgggccgctttgcgtgcgccgatgatggcgccgcc

SEQ ID NO: 164784 - DNA, 796 bp, Zea Mays
aaagcgcaataaaactaagattaaactccttagttaaatccgcaacaaaacgatgcttcttagggtctccaaaaccatcacaattccaaaacacccctttcattttaacttttgtttttgcacgataacttcttctttctttttttcgatctaactttcttcctatgtgtatcactacctggatccaatggattttgacaatccgccttgttgtcaactccgttatccattaagtcatccatgatacccccacaaagattattaagagtaagtatgtctaattcctcatctgactcctcatccactatgttataaacagtcccttctaccacgctatcccgacccacctgactcaccatacctttatcatagctattaagaacctggattgacttagctaaatgggattcctctacacctagagagataccgatcgcgtcaagattcgaaacaaccaagttcaaaggaatttgcaaaactttattacatgaaatagaggagggagatgggctgttacctccattacgttcagccttcagccttttagcacgggccaaggagttttcatccatgatgctcgtcctccgcttgcgaccagctgcgacagattgtgaagcttctggaatagcagccagctgcttcaatttctcacagctatcatcaggcgattgcatcaactctggactatccattggcacatgatcagcaataacagccccagcctgatcggtgacaacagcaaccaccacagattgcttagccttcccgacagcatcactcatcaaaagcttctcat

SEQ ID NO: 164785 - DNA, 1042 bp, Zea Mays
cgggggctgctgttgagcaccttggaacggggtgcccaaagaaagcctaagaagactcttcaaaatgggcccaagtcccggccgagcaaccttgcgaggcagagcgggcaaccaagtccctacgaagcaaccttgcgaggcagaacgggctaccaagtccctactgagcaaccatgcgaggtgaagcgtgtgaccaaaaccttgccgaacaaccttacgaggagaagtgagcgaccaagtccctgtcgagcaaccttgcaaggtggggcaggtgtccaagtccctgcctagtagcctcacgaggcggagctgacgaccaggtccctgccgagcaaccttgccaaggggcgagcgaccagctttcgcgctagtctgactagcgtaagggacggccgacctggtgatgcgagcccccatcagcgagacaagatgggtcatcaccaaactatgctcgggcctaggatacagcgtcaaaaggtcatcgatggacgtcaaacgacacctcaccacatactatctcaggcaaacccccacaagcgagtggggccagtcaatcccagtcgaagtgatctcagcatcagagtatctacagtgaccggcatataggaaaagatgtaacggataccacatatcgatgtatgcctacacatgccagtagataactcagatccgtggggacgggtgaagctgcactatgcacggtcgcaccatgggcctaacctgcggggtccgccacgcaccactacaaaagatgtaagcggaggactcgctatagggacccgtacaaaaaacaagcaaaacgatacgttgcgccaggagtaggactacgcatgaccttacaggctgcatcgggggcactacgtcaaaccaaggggcagatggccctcatacctatagagaacagaccacctctgtaagatcctatccttgagatataaaagggcagggcaccctctttcttcggacacacaagcacacaagttgtaacactctcaaagcaatattacgatcattactacactggagtagggtgcaaacccga

SEQ ID NO: 164786 - DNA, 782 bp, Zea Mays
atgtagtctcgagcagtccgtagatgaaggcttggcgccgagctagacgggtagtgggaggcgaagaacattccgcgccgtataacggggactcgaacggcggactcgggtcgtcgctgccggatccttggtgctcggtcgcggcgaagtggactcgagagagaaaagagagaagggagagaaccggtgatgaagaagacgcccgacatcacttgatcatgccttggacggtaaggattaaagggatagggatgaagaaaccgggaccgtaggatggtgagtggagggggtagatttatctcgcgtactcgccgttcatcactaatcgcacggctttgattagaagcaggaaataccccttcatcccaaccgttatccaccatagaccggcaatctgacgactaaaacgaaatagtggggatcgtgcgctatgagccgtcgatctcagatccgacgatgactcgggaatcaggatttatacccatcgccggtctaatctggacgctcggggttggatcggacggtccaaacatcactgtacctcttcggccaggcactttttcataagagaccctctgtttatttgaaaacaacccgccatcctcggtaatagtaatctgtgtcttagggaaaactctggtttagcccctgacctttctgaaaaatgaggcctagcccagaggagattaaaacagagaaataattataagaattcattttttaatacaaaaacaaatctagaaacttgtaaaatgcatagaaaatccatttttagtccaaat

SEQ ID NO: 164787 - DNA, 599 bp, Zea Mays
tttgaaatctacagatccaattttaactcaaatatcaaatttgaaaatttgggaaggaaaacaaaatagaaataaaaaaagaaaataataattgggaggttgggccgacttctcccatgcgcctcggcccacctcactttttcccccttgcgcagcccacttaacacacgcacgcctccccttctctgcggctgacaggcggagctcgcaacccagcctcaacgctcctgacccccagcgcgcagtgacttcgcggtgggtcccttgtgccagcagtgttcctgttcttcttcaatcacgcgtgaacaccgccgcatcccagggaggaatcagtctagctcaaacggccctagccagatcctgtgtccacgcgcgtaagctagcaccgactcgcgagtctggtcctgcatgcgcgcatctggccgcgtaggcactgacggtggaccccactgcctggtcgtccgcttccccgagctcgtaacagacttcgccgaactcttgggagatccacgattcccgtatttgccgctaaccaaatgatagccaacttccccccatagcgctaggtatgagaaccttgggcgccatgcccctctgac

SEQ ID NO: 164788 - DNA, 797 bp, Zea Mays
gccgtgtttcattctctgttagctcgttttcgtggttgtacaagtcatctcctgcccaccttttatcaaactactgcttcaagggctggtcacacgtcgataacaagatgcttatatatttgggaaagccatagcagaacaagacaatataaggcatgcatctacatatttgggaaagcacgaaaatgtcatttgaccaaaattctgtccggaccacaataaagcgatgtaattgaacagaatatactcgtgttctggtaggataatgtacaccgaatattagagtccgacaatagaaaggttatctttgcccctagaagtgttatgcaattttgtcaaggcttgttacttctttcttcctaaccatcctaggcctaacgcatcacctttggcaattagccaactactaacaccaccataaaacaacatgatggttaggccatctcccagtatttatcttcttcattttcacatagtaggaacaaacaaacacattggaattaggacatgggtccaagttccaaaccaaactatcagacatatttccctgctatctttttgctcccattacctacaccctattttctcagcctaggccaacacaacttgatgtgcctactagagtgctggagccacaagcatcgtatcccataatgtggagtggagcattgatgttaggacttctaaagcattttgagaaggtacaatttccaaatttggagtatttttattttattgtttagtcaaaaggagcactttatctatcggtcccgcggtgagagttcgccggagacgga

SEQ ID NO: 164789 - DNA, 493 bp, Zea Mays
ggggcgacgcttcttcctccagcattcggcttcaaggatgttcatcagccttgcggaggtggagagcgagttgagctgcggctccatctttcacgtgagcttcaccagtgcctcatggtacaccaccatgaactggtctagctccaactccgtcgggtgggaagcgagccgagctgcggctccatctctttggctttgatggcttcggtgccgcctccaatggtgaccgctggcccggccgctgaagacgccacccagggggtcgtacaagatgtcgcggagatggcggccgcgtgcttccagcgtgaccctactgatgtcgagtaggtcatacctgtagacataaggctagggtcccgcttgaaggcggatgtaataactttgtttttgtaaggtacttttgagtactacttatcgagcactattagcgcttatctgtgtattatttgtccctgttgtgtgtggcgttgccgactcttccctggtacctggc

SEQ ID NO: 164790 - DNA, 322 bp, Zea Mays
atatcacgcgacactgtacaaaacagcgcgcgcgaacagcgcgaaagacgcgcgaaccagcacgcgactacaagcacatcacgcacgaacagcgtgcagacagtgcaacgacgtgtgacaacgcgtgcgaaccgcacgcgtgacacgcgcgaacgacgggcgacaacacgagaataacgcacgaactacatgacaacgacgagcgccacacacctgaaaggcgcgcgacatgcaaaacatcacgcgtgaacgaaccacggcgacgcgcaaacatcgcatgaatggcacgcgacgacgcaacaagtgggagattgactttccg

SEQ ID NO: 164791 - DNA, 832 bp, Zea Mays
ttggaatataagattgcttactggtaagttaagagagttaattgagacaacgactaggagacttataaatatcttataagatcagaaggcggaggtggacgatatcgacttcaagctttggtacacaaggacagttgtaaatagaaatggagtagttttgattgataagatcctcaagaatggtgtgtcggttgtgataatgcaaggagataagattattctagttcagcttgtcatgggtgatttggtcttgaacgtaattagtgtatatgcccccccaagtagttcacgacgagaatgctgagagacttattctagaaagacttagatggcatgattagagatgcacctattagtgagaagttttcataatagaagaactggacctgcggggggtggtaagacagtctccaagtgttacattaagaatatcttctcatgcaggtcgagataacccctaaactcttgccctacctgtcggtgttaagtaccagcaacacactacggaggtgggcgcatagtgcttttctaaggtaggtgacgaggatcacaactcgatggcacgtgtagaacacgtcggagacacaagaaattgctcggacgctcgatggtacgtcctgtggtttccgtctgtgtgcggttgacttctctctggagtacaggggatgtctagtggaagaagatgagttctatgagtgtccatctcatttttgtagggtcccttcagcataattgccgactgaattggggttacagagaaactaccatgagtccacgatctccatgttccgcttgttctgtctctcgttgcgctgggctacggtcaaacgag

SEQ ID NO: 164792 - DNA, 694 bp, Zea Mays
ttaaaaatggacgcgccagatcttaagcccacacccgcctgaaatggtacgcaacctaagccctcggatctcaatccaatggctaccacgcaatcggctgaaatcattaactatgctttggtctccatcgcccgatcagaatctgatggccacaagtcctccaagtgaaggggtaaccccatcaaatcagggccgttcatcaacgatttggcagccagggtctttcttcttcccccatctggtgccgagccagcgacgcaccgcggccgacggcaaaatctccaccgacgagtggtacccagccaccatggtgatcctatcttaatgccaaaaggtgctatactatgcacatgatgttgtgaactcggttacagggtactcaccaggcacgaacataatcctcatgcgatagtcacagcgatgttctctctctctgcgctctttcttcgataatggccgagatgatcgatggccaaggggtgcaagccggtcacgaatttatacaccaatacagagccgggcggggaaaggagaatttgttgggatttatttaacagaaaaccaagatctccggctctgctacactggtttctcccgcggagtctgctcgatccggtagggtgaagcatctggagaccaggccccaagagcacagctcggtggagccaaccatggatggccgcgacagcttggg

SEQ ID NO: 164793 - DNA, 570 bp, Zea Mays
agatatttattatgggcaaggggtacttgttcttgattgtgacctcattcagagctcgataatcgatacacatcctcttagtgccatctttcttctccacgaataggacaggggcggcctaaggcgaggtgcttggcctgatataacctttctctgacagctcatcaatctgcttcttgagttcaaccaactctggtccagataccctataagctcttttagaaatgggggcggttccaggaagaagctctatggcaaactcaactttccgctcaggtggcatacctggtatgtcttccgggaacacatctggaaattctgacacaaccttgataatttcgagtgaatctggctccttgctatcaatagccatatgatgacaacctcctttccttggctcaggtgagactaactcagctaccacttcttctcctagtggggacaccaacttaattgtcctcttatcgcagctgataattgcttggtacttatctagccaattcatccctaggatgacatgtattcactgagtacccattactatgagattagtgggaaatgctatccccc

SEQ ID NO: 164794 - DNA, 502 bp, Zea Mays
gtttgggcaggccagggatgttgggagaacccaacgaacactttggcggagctctggccgtgagaacgggaccaggggtgggtagatgatggagggggtcctgggcgagtcggagggtgctccgttgagcaatccctgccgtagtgggggataatcaggtgcaccgaggctgccatgagcttcggtgagggggtaggggcattctaggccaggatttgggcacgaggaaaggttgtagtggctaggcgccgtggagacatggcgtctcgacgagcagcagctccggcgatcccaaatccaatacgcgcgagatggaattaaggtaaaagaagggtgaggtggggttccttactcatgggcggtgcttggggaagctcgtcacggcgttgggaggctttggttggctagacgacgagggaacatgacagcggcgatctccggtctgcacagggagttagatgcggacggggtagtgaaagggaaatgtgcccttgggccattt

SEQ ID NO: 164795 - DNA, 492 bp, Zea Mays
ttgacacaaagagaatgtgattgagaatgagattgaaacacaagaacacaaaaattggttgcaacaaaactcaaacgaatgatccacatgacactagtcacttctctagctcaaatctactaaaagtggcacttgggaggagttggatcacttggagttgttgcaagcaatgaatgtgagtttggtgtagctcttatatatcttgaatgccggttcgggtctttatagctccaactaccccttgtagccattggaaagaaatggagaaaactacacttttctgcgtggcaccggacctcctacaaagtcaatctggtgcgtcatcggacctcttccagactgttgtagcaggttaccattctaacttgtcaggggcaccggacctctgccacgctagcacgaccattgaaacctgacatgtagtcgttgaactcacaaggttcggtgcatcaccgaactagaccgatgcactagctcccatttagctccaaa

SEQ ID NO: 164796 - DNA, 776 bp, Zea Mays
tttgccaccttttgtttttattgtgtacagacaatgcaggtattatttatctagctattatgttatattagttgcaccccatacattatgtgtgctaatttgatggctcatggcccatttattacatttttttcataccattttacatacactttttcagaaactcaatgttagatgcaaccctcaggatattattataaccattaagatattgaatgagaggcaacgacaagccgttgctagaaaaggtttttccaatattcttgacatgacccttgatgcactgggtagccgatcttatcttctttggttgatggataagttggaccacaaggatatgacacttcgccccggtcaaggcaaggaactaaagattacgaaagaaattgtccaccttatccttggcctaccgaatgctggcggtggtaagccactaggcatcgatgaagcagtggcgggcaataacttgagggctgaacttggcttgcctaaggatgagttcgttgttgcatctcttcaggaccgtctgagaaaaggagacgacgatgacatctctatcatatgcttctttttgatattattcaatagattgttgttccccacttccagctggggcatatctaaccatgaggttttacttacggaagaaatggatcgtttccatgagacagactggtgccacttaatttttaacgacatctgcgaagctgctcaaaagtggcatacaagaagcactactaacgtgtccacgacgatatatggatgctcaattgtca

SEQ ID NO: 164797 - DNA, 412 bp, Zea Mays
atatgaccccggccgagtgacttctgctactatgaatggtccttcccatagaggtgataatttatgccgcccctcccccgttagaattcggcggaggacgagatttcccactgcgaaggatcgatgttgtatggccttatcatgatagcgcctcagagtttgctgatatcgtgctgattgaatcaccgtattcagtcgctcttcttcgagtacatcaacgtcttccagcctagtagcttcagcttctgctatgttttcaaagattaacctcggtgccccgaacttgagatcagcaagtagcactgcctccgaaccataaaccataaagaagggggtatttccatgcagagctcggctaggttgagttctcaggctccaaaccacatatggcagctctctgatccacttttct

SEQ ID NO: 164798 - DNA, 1063 bp, Zea Mays
gtcgaattctttagggtacaacttggcgtaggtgatcaccttttgcttagttaggatgtcgaactggtccttcatgaaatccgccagttgttcttgtgtgtcggtggtgctcgtccctctaaacatcgggcctagttgctaagcgccaacccattgtaatatcttgcttgccactcaagaagctcttgctcgttagctttgcccttattcagggtgtgtgttgttcgctgaaggagcgctccccctcccagagtggcctgtagcgttgcctacacacaaagccctccagaatgtatgtcgaaggatgatcgtagacggaggggaccttatgtggcatcttagggcgatagacaagaaactctgcctcagtgccatcgagggcactaatttgcatcgactccattggtcgagcgtagaactgtttctcgccctgatgatacccaaaagtgggccctggagcggtgtagttcccggttagaatcgatctagccactcatgcaacgactccctcctaggagttgatcaggatctttgactaccgcaccatggcatggtggatgttgtaggtcattccctagcgacattgaaagatcgaccttctctagcagtgtctccggtttcctgatgagtcggacaccaccagagcatgtccaggtgaagcaagtgaggagtttgtcagttcagtctttgagggcctgattgtaacacttgtatctcgaaactaaagtcctcaagctacgacagtcctatcttggttgccaggtagtgcttgttgccatcgttggggaggacttctttttctcatgtgagtcatgatggtggtgaagaggtgatacaaggttgtggttgaatcgatgttgatgagccgatgcaaatcgtccaatgtggaggttgacttcgttggtcccaccagacgtgctagaagtttgtcctcacaggaaacttgttaggggttgtccgggagacgacacacaaggagatgagaggtgtgctactactgcggtcgtccctcctgatcacgactctgaatgagggtgttctaggcatgccgcctagcttgacc

SEQ ID NO: 164799 - DNA, 873 bp, Zea Mays
cgtgaaccgaatgggtggcggactgatgatcgtgttcccggtgattggtgagcccgcagtccaaattggtggttcggcaagcatcgtagacatgtgagaaagcttaaacgagggagagggagggttggactgaccgggaagggagctggccgcgatgaggtcgatttcgggtggcggaaacccgaattgggggaactctaaaattagagctcgctggtgatcggctgggggcaatattaggtggcttggtgcgtgatgatgttgtgaagctagccgcgggctcaatttataggaggagcgagcggtggtgatcaatttggccgagccgtgctggcggccggagatgaagaagaacacgatgctgtgaattcgtgtccaccgtcgtggcaatctccccggcgacgatgggacagcaatagggagtcacggcgacgcggtggaaaggctcggacacgcggcacaaggccggacggcggctgtcgccggcgttcctatccaattccgccgcggtgacgcttgtacggtggccggaatattttactggccgaagttatccacggcgaggatatttacgcgactccgagtgctatccggttaccagtgagtgcgaatctcaacggcggcgacgatcccggcgcaaagtcatcggcggcgaggggcgcggttgatatgatccatttcaggtcactgtaccatggcaactactcattcagtgcacctgacagccaagttctagggcagttttcctcccaaattcctatggcaacatctccgagtatctgcataaaagttgtagtgctacataccagctacaaatcgactatagtgactgagctcatttgataactagatcatggttgaattcaaccccaa

SEQ ID NO: 164800 - DNA, 485 bp, Zea Mays
ggccaacggtgacaacatgccatgtgctcgtgaactggtgaatgtggtttggcccattcaaggacgccagtttgtttctactataaggttttggctctatagcactatgacataatcattgcgatggattggctctcgtctaataatcctatgattgtgcattaggctgataagtggttgacactttccaaggacgaagtctttgtcaagttgtatggtgtcaagacttctaatcgtggggcttttgttcaactttgcaacattgttgacttaactgatgaagataggttggttgccaggatcttcccctggagttgagcatctcattgacaagtattctatggtgtttgcacttcctcatgggctgccacctacacgagattgtgaccatcaaatttcactaattttgggggctcgaccggtgcaaatgtgaccatatcgatacactcttgtcccccaaaatgaaatagaatctcaagtgtctg

SEQ ID NO: 164801 - DNA, 1025 bp, Zea Mays
caaaaacttgatgtttggttcttacaaaagacggaatctatatacaagtattacattctcaagtatacaaagatttagtcttcttttagcactttttcagtagcttcatttaacagtctgtcgacagcttcgtcaacagcttcattagcgattcttattatatctaacgcttcctgcatggtcgggtcaacttcggggtcatatggctctggtggaggagaaagttcagctacattataaaaactgtttgttaattccgaggctgaaaacaaacttcgaagctaaacctcagtaaaggtacctataagccttgcgcgctcggtaacttcttcagcccgctgggcttcttcttgagcgtcgtgagattctttttcattttttctaatcgcttcatcagccatatcacaactgcccttcatccacacatcggagtaaaatctcccgcctagcgcagaagcttcagccgaagggtctttggtgtcatccgtcgagaaaacaaatcacggctgagctgcagtcttagcatgtttgcaaccggctttctctaagatcaccgcaaccccctgtgcgccagcgaatgcgccgaagtctccttggtcacttaaaattttgtcaaaggcttagaattctccgttgatccactgttcaactccatcagggtcaccacgaatgaatttttgctcagacgaaaatgccccaactctaccaaagctgtctttcaatttcttagcacatttcaaagatatttcataacacttttcttttgaagcacgaagctcatcgcagttattttgagctctagacctttcaaccttgcaaatttcatgcttcgctgtttcaacttcaaatttttcattagcttcagcagctttctttttcagttcctccacttcggccttatgtgcttcagcttgcacaacaagactatcctcgctagatttcagtttctccactaaggaaagtaatatcttgtccttctcaagtgcttcgtttctcaaggatatgatttctgtacgaaggttccc

SEQ ID NO: 164802 - DNA, 824 bp, Zea Mays
catatttagaactaagtagggtgaggtggtattacaaatctgagtgcataatataacgttggaaagtttaaaaaatatggccatatatttagtttcttgtgtttgttgcctttcaaatgtgtattcttgtctgtcgccatatattatgtaaaaaagaaagaatatcaaattcaagttgaccaaacttacgtagaacagtatgtaaatgatttgcagtctttcatagtttagggtttagggtttagcagtctttcatagtttttaaactgttacagatggaatttacaggtcctccaaatcaacaggcaacgattcgaaaaaaagtagatgactgtgggttaaacagtaagaaacaaaaaatcaattgtattgtatgtaggtggggaaggagttgaaaaatagcaactaatgattggtaaaacctaaatatttgtggtgtacctgtcgtagatagaacttttaaggtttccaaaccagctgttgatgatgttgaaaagctggtggtaaatacaacttgcaagatttccaaaactagctgttgataatcctgaaaagtaggtgaccatttagtatataataagaaacaaaaaacatagactcagtgatctaggttgaggagtgaaaattctaaaggagatggtagttgtaactgtttttgaggtaccatgacctaaaaagtcggaaagtattcttatattcagaactaagtagggaaaggcggtattacaaatcccagtgcataatataacagtggaaaattttaaaacaaggccatatatttaggttattatgttttgatgcctttcaaatgtgtattattgtct

SEQ ID NO: 164803 - DNA, 1306 bp, Zea Mays
ctaaaggagattaattgattctctttttccctttagaaagttcaattaataagatcatattagttgaataacaaaatgaataaatacagaaatgtgcacctcataatgaaattcttgtatttatattcaaatttgtgaatcaattttgagtttaaagaattagaattcaaaaataaaaggggaatagaaaacaaaagggatggaaaagataaagggagataaaagaaaaatagaagaaaacattagtgggtctcgttctcatttcagcccaactggacaacccccgctcagccaacacctcagcccatagaaccaaccgcgctcactaggatgcatgtgggtcaccaacatgcgggccccgcgggcaggcactcacccttgcgcacacggtaccctgactggtggggcctcacggtcagttaactaggcggacaacatgtcttctgttgctcttccgtcacgcttatgtgtggggcccactgtccagaatcgtcatctccaaccaacgcggcgggctcctgtacagtaaaacggactccgtaacaaactcaagcgaatcccgcggtctccgcctgagctctgcgcgcgcgtttcggagggccagggcgatgctgggctatataagtgcagggcgccgcaatatccccacctgcattccgccgctagtgctggagagagaaggtagaaagtgaccaggggaggaggaattgccgccgccatgggtacaagctcatgcggtcggtcggggcgcgcagacagatttgtgggcttcatcgggtccccaggaatgtactcatggcttcgggaggaaggattggacctgggtgtgccctgaaatgctcatcgtcgtgagactgtcgccgccggtagctccacgctgtgggcagctccactgccccgccatgtacggtaagaccagtgatctcaagttcaccatagcctcttcttcgggtagagacttctgggataaagtatcgcgctccaggaggctggtctggtggggctcatcggtcgccgccgtgggagtttggcgccgccgcctgtgctgactgggggaggaagaagggccctcactgtcgatccggttgcggacgactggatctgtgcgttggataccgcttcgggtgggagaaacgactgccgttgatcctagatcgtatggccgattggggcactcggggtatgaccgtggattgaaatccaatggccccaagtgcataccggttcatttaaatgataggactgatctgggacgtccagatcagatcgggtggctgggacatgttcttaccccttcggccagaac

SEQ ID NO: 164804 - DNA, 1036 bp, Zea Mays
aaagtactcatggatgggtgtagcgggctcaacattctctactctgccgtgttcggatgaatcaatcttcctgtaaccttcaagacaccgaaaaacttcaggactgagacttcgaccttcgagatagttgggttccaaggaacctatcacaccatccttggaaggccatgctatgcaaagttcattatcgtccccaactatacatacatgaagctcaaaatatcgagcctagcaggaaccatcatcgtgggcactatgatgcaacacacatacgagtgcgaagtcgaatgatgtgacttggccgagggagccgccactgcctagagactatcagaggtgctctgaaccatcaacgagcaggcgcccaatgcaaagaggatgagcacgaccttcaaactgtcagatgatgtgaaggaagtgcccttggaccccgagcaagcaaccgggcggacggtacgcatcggatccaagctccctcccaaataggaaagcatgctcgttaacttcctccgcgaggagaaggacatatttgcgtggaaaccctctgacatgaggggcatcatgagggaagtcgctgagcactctctatggatcaatcccatctccaaacctgtaaagcagcgactgtgccattttgacaaagagaaacgaagagccatcagggaggagatcggtaaacttctcgcagccacatccgagagatacaccatccagagcggttagccaacttggtgccagttcaaaagaagagcaggaaatggaggatgtgtgtcgattacatcaacctcaacaaggcatgcccgaagaatccgtttcccctcccatgctttgaccaggtggttgactccaccttcggttggtaggtgttgagcttccttgacacttactcgggctatcactaaattgcgatgaaggaacctgaccaacccgccacctcattcatcacccccttcggctcctattgttacctaacaatgttgtatcagtgatgcatgatcaaatgcttccgcgacctcgtcggaagggtcgtagaggc

SEQ ID NO: 164805 - DNA, 854 bp, Zea Mays
gcgatggatgactgacaaagcacaaattactgatggatgatgtggcatatgggtgggcgcgtgaagctcacgggggagtagtaagtccacgaagtcaaataaagtgtgcacgccttgcagaccccattaatggcacgcgtggcttgttagtgtattgcggaccagaaatgatttggtgggctggctagttcgcttggtgggacatttggttggtcggttgggtctagatgaagctttacctagaccagccccgccccacccctcgccccgtcctgcgcgccacctcacctcgacctgactgagtcccgtgcgcccacagacccacccactttgggtttccatagaagggatttcctcaattatggctggtatcttaacttcgggcacaacctgaaaagatgaaaatagtaagaaattaacaaagtaagtatataagtggtatgatatatttcaaaaaccctctataccggaatttctcttaagcttgaggtgtcgacccagactctatttcggaaccttgctccacttcgtggttactttccttttcctcttcttcgaatcttgaatcattttagtatagtcaggatagaagaagcccatagcatcaaaaacgcagtttagtcggcgtctttttcgtgttgcaaaagcccgatgaagagcttcgacctctagtttactatagttaccaagtatttcattgcattttgcctcaacataatctaaccatccatcactaggctccccaaactcatcttcgaacttatatttgtagcgaagtctgattagcccaggttccgcgtccgaagcatgtttttagacatctcccatttagcccctagtggccatgttttaaa

SEQ ID NO: 164806 - DNA, 1018 bp, Zea Mays
gacacaagtgattatcctagttcgggcaacacaaggccctacttccaacagataggatgaggcttatattactcgtatcgtggtgccaagcacagcaggagaaggaaagtccccaagtccctagagatgattgaggcaaatgccaatatctaagacagagtggaggagtgagcgttcgtctacgtgtgttgatccatcgtccatggagggaccactgccctatttataaaccaagcggagcgtccgcagtgaagctgagtcttgtattcgaaggagagatgccctggcgtctgacatgacggcgaactgtgtagtagatttgtgcctgctgacttcccgtagagagccgaggccgagaccgagggatcgtctgtacgcccgagctccagagggagaggccgcccataccgtagtggttgtaacagcgtcggggtatgggccaaaggctacttacggggtgcgtcatcgtcctggcgcgtgatgatgtcgagattccctgctacactcatcgagatcaaagcccctggttgatgcggaagtcttcccgaggcgttggccgagctgtccctcgacgtgcgctacagtcgggcggagtggctgtctgcgagattcgcgacgtagttggtggctgaggccgagaccgagggatcgtccgtacgcccgagctcccgaaggagaggtcgcccataccgtagtggttgtaacagcgctggggtatgggccaaaggctacttacggggtgcgtcatcgtcctagcgcgtgatgacgtcgagattccctgctacactcatcgagatcagagcccctggtgatgcggaagtcttcccgaggcgttggccgagctgtccctcgacgtgcgctacagtcgggcggagtggctgtctgcgagattcgcgacgtagttggtggctgaggcagagctcgagcgagccagagaattcgctcgagagctgagcttgtcgtcgggcgaggaggagaaattgcccgaaggctggacccggggtcgggcgaggcggag

SEQ ID NO: 164807 - DNA, 782 bp, Zea Mays
gcagaaatgccctcaaaattctatttcttccccacgagtacccctggccacggcgtgcttgccgccgagcaccatgcgacttgttccagccatgattggcggtggctgtctaaaatggctacggaatggacattcccaacctaaggcgatccgagaacaaccttcaatttcgactggcacaccaagaaagtgttctatccacgctcatggaggaagcagggacgtcgagctcacgttcccagtcaatcatatcctaattgaccaattggctgctacgatgagcaccaagggtactcagagttactaaaacaatgcttgaatcaggcagtgccttaccagagcgggctagccacggtggagctgttcttcgcggtggcggcgacaaatttgggggaagtttgaaattccagagctcgggtgaacgattaagggtgggagcgggtgctaaggcttcacgataacatagcgcagttgctccggccttcaatttatagtcggctaaggcggtggcgcgcaatttggtcggacagtgtgggtggccggagaggagaggcgagctgagtgcgtggaaaaagtgactttcaccgtggcagttgctccggtgatcatcggacatgcatccagtgagtcaccgcgatgaagtccagcgcttaggcacgtggcgcgcaatggcggcagctcgacggcggtgagatttatccggtcgaccgacaaatctagggaggaagtacgacggtcttagccgcagctcaatccgggcgccagatttttacctggtcgag

SEQ ID NO: 164808 - DNA, 769 bp, Zea Mays
aaggtggtttggtccggtatggatccaactttagcaacttgggaagacgtcgttgctctatgctccagatttcccgatgcgccggcttgggggcaagcggtcatccaaggaggggggaatgtggacatctcggacggacagactgaagaagctgaaggtgggagcgatgatgagcaggtatggggcaacaacaagcaagcgcgcgatgggagcgttcaggcaagcaagccaaaatgtgaaagaaagcgtaacgaaaatatcatggaccaacttgggccgtataataggagccttagcaataatgctgctatataaaagggacttctgaaatctggtgaagatatggaaaaaccgaaagctgattccatcaaacaactcttgtctcttctgctctacgtctagttctccttcctcaatccacattctctctatcagctacgctaacacacgcaagatatgcccagtcatcttcgggcaccaagcaaacagccacacgttgttgcaactcccaatttagtgcaaacgctggaggaacaaattagcgaagcctaacctgaaacttgtgcttgcaaaacacctgccatccgacattgcgttcagcagcttcacactggcttccaagattcacttcccacactggctgcttccaaagattcatttgcaggttctagtggactggaccagtggcatcttcaggctcaggaggagcatccggctactacctaccagctcctgctcaaacaagaacagctgccgcccagtgccaaat

SEQ ID NO: 164809 - DNA, 725 bp, Zea Mays
tccgtctcgcctaatccctaacccacacgggtctaggagatgggagacactatctcacagttccatctcgccctaccctaacccttaagggtctaagaaaagcaactcatcctcatctatcttatacatctgaccctaacccctgatcaccaaggggctcagggttgggaaacctcgccccaaaacttcgcctcgcccagaccaggtgtcagacacttcatccgaccatgtgtgtctaaggttcatgggatcataccgcctcagccactacgaacgttgatatgtatgagtcaagttctgacacggtcgtgtgatccgaactatggtatgagggttggtgtgtcatgatgtaggtgtcacttgtcacgacatggcgtctgaaacaagttcaaccaccatatcatagagaactcaataatggacactagataaatttctgtgggtcaagacggtgcatacgacaacctttgggatagcaatggtgtcgctatagtaccctgatggaataaataagaggacatccatggagtccttcggccagcgagaacctagaggacaagaaaatacatgatagtaccttacccctactcattctgtctgaccgttggaacttatgtaatggttccttctcctgtatcggcctataaaggggagggaaggaccatgaagcaggacataggcaatcgcttacactcgtagccagcatgagtcaacacaacacactt

SEQ ID NO: 164810 - DNA, 571 bp, Zea Mays
ctactcgttgcggacacgcaggcgaacaagggcaagggatccataccgtgaatcgtgcgcgtaggtgtgcagtccacggcgaagcgcggtccgcgacggcggtgataacaacagtgaaaaatctccgccgttccgcagcttctcacgcccgattacgcccttgcgcacaatcaacacttgctttaggaccccagggatcgcttcgcgggcgttgggagacgacgatggtgacgaacgactacggcgggtctcacggctcgaagtgggtcctggtggtggcgccccaggtatgctcaacagaggccgagaggggttttatatgcgtggtccgagtctcctcctgtccgcccatagcgccggtccgatagggaggtagttgcgccctccagggaggtgcggtgagctaacgccgcgagagacggggagaagaggaacagtggttccggtcccacccgccaggttcgcgcgcgcgctcatccattagaccgtgcggctgccaggtaggtccgagatggcagtgtaacggtgcggatgcgggtttcaactgtcaaacggaccccgcacatcagcg

SEQ ID NO: 164811 - DNA, 889 bp, Zea Mays
cgagcttagaagccccgtcgagtcctgaggatagtatctgggtgctcgctgtggaggtttggcgaccgggggtcaagtgtgtgctcgctggggtccaagaaccatggcggagaggcgccatcacgtggaacggggattgctcatcagagcgattgaatcctgcccgcgatccacctcatgccgcgggctgggtaccgtccgactcaacgaacacgccggagcatcgcttcaccgaaccgcgcccacagaatcttcgtcgagcttcgtcgcaaggtcagaacaccctacacatggatgtaatgtattttctacacgaactcttcgtggatctcggtcgtgcgtcctaggcaagctcatcacctaactccagtggtggcggaaccgtggccgggctccccctcggtgtttacccggcggtcctcgcttgcgcgaccgtgcggttcatcggaggccatacggatgcctgtgtgacgcgcagtcgtcctagacctgagcgataggaggaagatgatctttggcgcgttggatgggttatacacggcggggattagatgtgggttgtccaccgctggatctttggcgaacgggtcggattggaggttgtcgtgggcagattctggcccttgatcggtaatccaagggttcgcgtagaattacaggttctgacgtctatggatctaatccataccgcccaccattgatcgaacgaccatgattggcccataccccttcgacctaggcattttgcgtaaaagaccccgtgaaatatctgaatcaacccgccgtccactgtagggtttggctgagtctgtggattacttatgttttcgcccctgcacttctgtttatttagcgcacagtccagacacctattaaaaccaggaaattc

SEQ ID NO: 164812 - DNA, 520 bp, Zea Mays
taaatggacggcacagaaattgggaactcctagaatatagaacaccccaggaagttttatccttagtcgtatttcaaaagctattgggacgacgatgtactctataaaacaggaaacatgtcatcaataaaaaaggcttcaaagatactcagtttgttcgggattgacttgcattcttacttaactcggggtgaccactatgccctgctaacggagcaatcggcttaagtcgacaacgacttaaggcggtgcaacatgctcgcgcctacttaacttggggtgaccactatgccctgccaacggagcaatcggcttaagtcggcaacgacttaaggcggtgcaacatgctcgcgcttacttaactcggggtgaccactatgccctgccaacggagcaatcggcttaagtcgacaacgacttaaggcggtgcaacatgctcgcgcctacttaactcggagtgaccactatgccctgccaacggagcaatcgacttaagtcggcaatgacttaaggcggtgca

SEQ ID NO: 164813 - DNA, 888 bp, Zea Mays
cggatgtcagatagggaggtccgtggtcactatgagggggtccaaaaggtacacatggaggtccaagactcggaaatgggggtttggacgacatacgtaggggtctgggtcccaccttaggggtccagacccatggtagtggtccctaagactttcacccttagggcacgtggcagcaccagacctatccccgagcgagaagtaggtcctgaggctagaggtcctatcagactggtccagtcctatgagcctggtggctcagttcgttactatgtggttagagttaactacaagggtatatgtcttaacgcagcaggagtgggtagcctagttatagggcactgacagtggcccctaggcccacctcgagagagactatgaacccataggtggggtcaccactgtgatcccgtttcaaacaatctgactatgacctggcgctcagtagtggcatacctgtggtcatgctagttgttagatctcctactgtcatgctagccataagatctcctattctcacgcttgttggtggccttgaactcaaggtgcactatgtacttcacttgatctccggtcgggtcgatgaggaccacatcggctctggacccctatttgcaggtgaactcgtcgaagaagagagtctagtggggatcagtgaagactagtgctctgacctctagctacgagggacccgcattaggatttggaccccaggtgcactcagggaaggagtccactcagcaatgaagttagctaggacctagcttttgaaagcatggcatgtttggaagtctagctggaacttagccaactccactgtccactccgcgatattgcccatggcattggagtagtcgaggatttctctcaatgggtaagagctcacca

SEQ ID NO: 164814 - DNA, 437 bp, Zea Mays
gggcgagattttctgtggcgtcttggggcgtgaacgggagagtcctccttaaaatgggattcccccgagtgcgatagtcattcttttcacttgcagctccctttcgccaccgagctctccgcgctcttctgccgccgtagatgccatggccttgctagaccctcccgagtgcttccagtccgaggtggcactcaacttggtgcgcaacctgctcggatggggtgcgctagcgctcgccggaaggatccgtgtcggtgcctctcccctcggcgatctcgccgccagggagttcgtcctcttcgtctccaacttcccctgtgggttggtgctgccgatctcgtccttcttcgtgctgctgctggaggagctcggcctccaacctcagcacttcacgccctgcttcatcctccaagcagccgtcttcgcctacctctgcg

SEQ ID NO: 164815 - DNA, 346 bp, Zea Mays
tatatttcttcctctcgtcgaacatattccagatctcgtgccccttttcgcgagattactgaaccgcgtcttcccgcgaacgacatgctgctcgcgtcggcgatcctcgtctatcctcgtctttcccttcggcgtcgacctcgtcatcttgggcccacgggccagctctgaccgtcttcgtctaattttatctaaccctgtctaccacccatctaactctgtctaaccttgtctcatgcaactcaccgcgcagctgtctctctcactcggccaggacaagagccgccgtgaaattgacaaccacctctcgcgccctctcctttttatacataccctctcctttcta

SEQ ID NO: 164816 - DNA, 483 bp, Zea Mays
ttcaaacatgagaaataaaagcagctcggttgcatcagatatgtaaggaatagactcagcttgtatgctcaaagtcaaaggccagtattctggttagtctcaaaggtcacatgtagcttctcaatctcaaaaggaatgcacaggcaatctacccagtccaacaactcaaaagtaaatattggagtgggagaaaaccctaatcctgggttggacatgtattaatagagaggttaagtgggccaaagcccattacaataggggcaaacagggaaaccctaacaatatacgggaaaccctaacagttactctctaacagtaaataccctactactataggtacaggccccaaatgaacacgtgaggtgaggatgggaaaccatgaaatatgttacgctctaaagtaaaggtaattttgaaacacatggcccttcatatatgaccctaaattaatttggctgattcagtcactcaagtagctctcag

SEQ ID NO: 164817 - DNA, 1204 bp, Zea Mays
aaaaagaaaaaaagaggaaactcgcttgggcctcctcctcctccactcagcccaacttgtgaattcccttcacccatcggcccatcagtccccccgtgttgcttgtgctgtgcctggcgctgacgccgggcccccaccgaccagtcacacggattacgccaactcttctccctcggcgccgacgggtgagaccaccccgtcaactgcgctcacccgtgcgtatctccctctgttgctgactggtgggccccctcggcagtcagttcttcttcccatcgagcgcaactcaaacagaatcctaaccaaatctgattccacgccgcgtgtgtcgggatctgccaccaaccccgtcgttatctggtccatagccatggctatataggcgagaactgaggatcaatcgctggcaagaaaagagatagagagagttggatccgtcgtccaaactccggctaaccagcatctggccctcgggataggtccacgcgtattctgggccttgccaagctctgggatggtcgtggggtggcgcgcgcgctcgccgtcgagtaggcctccctgtggagccacatctcgccatgggggaagttatccactgctccaccgtcggtaaaaatactcctagaactattcttggtcatgtccgcttcgcgttgtgctactccgattggagttcgggcatcggggttctggtttcgcgtgcgccggtgagctgtcggggcagatctgttcttgcaccgacatgtcttgcggtcgggagctagaagatgtgtggagtccatcgatctggtgatcaacggtagctattgggggggggggggggggtgaagtagctcggccactaaccgtagatctcgacaggaatggttgcaattagattatgaataccgtttcgtgcgatgtgatccatgccattgatctttgatctagcgattacgagtgcataacaattcagtattgggtttggaccggtggattgcgatccgagtgttgccgtggtgtcctgactctgatctagtctgggacgtttaatttagattctacggcttagctcgatctgtacctcttcgtcgtggcaaaattcataaagattccctagagttttaggaaattaacccgccatcctttctagttcgaagacaactgataccaagtacaaattttagcgcattaaccccctgggttatggataattggtacccgc

SEQ ID NO: 164818 - DNA, 639 bp, Zea Mays
cggcggggttctgactaatttgggggacatggggaattgggaggttctagtggacgatcagaggtgagagctggtgctttggatgcgtaataacctagcgaagctcactggggtagcaatttatagactccattggcggtggcgtccaatttgaagaaagcacgctcgcggccggagagagggactgagtttttgcggcgttctaccgtggcattcactggctgaggagctacgacggtcactggtgaactattacgactggcaatgacgtggtgaaagggtcatggcgtggcgcgatcatgatgaacgacgtacacctcgacgacggctgctcggcctcgtcgccggcaagtggatgaggcgacagagcggccacagtgctccaacttcatccacgacgagatcttttcaccagaagtcgttatcagcgtgttactgggcgtgaatcgcatcgctggcgcgaatccgagcgcgcgggtcaccggcggcgaggtgggatgaatctgaagatcttttcgtgcactgtaccatggccatcttcttcagtcgttctgacagcgcgatttgaggagccttattctccatttccatgtgacaacttactaatcggtttgtaacaaagttactgacctataatcc

SEQ ID NO: 164819 - DNA, 416 bp, Zea Mays
caaaccatgatcaaggccatgtttctttccatagatccagtcctgaatcttcgttgcatttctgctgctcatcctagcagatcttgttttcctacctctcctttgaccgaatctggtaatcattttccttgcgaatcacgttgtggctttatcatccaaatctctagatccttcatcgattttgccccattatctggttatctgctataaccgttctcaagtatcgaatgttgatcttgcctaaatctctcatttctggtcattctcatgcccccttctccgaggatcatgacgcttgttttatcaacttatctctaaacgacatatccatgtggattaatggatgttgttgttatctttggatctctcatgtctctaaaagcttatcaatctcgatctcatggttggttcctcct

SEQ ID NO: 164820 - DNA, 430 bp, Zea Mays
ggcgaacgggaagcttcgaatgtgcatcgactacaccagcctgaataaggcttgtcccaaggacccgtatccacttccacgcatagactaaatcgtggactctacctccgggtgcgacctcttgtccttcttagatgcctactcgggtttccatcagatccggatggctagggaggataggaagcataccgcttttgtaatagtggacgagctctactgctatgttgtaatgccctacggtctgaagaacgccttgccaacatttgtacgagcgatgagtaagaccttcggggacctgattagggacaaggttgagatatatgtcgatgacatcgtggtcaagactaggagggggtcgactttagtaaaagacctgaccctggtctttgacaaactgcgggtgacgcgcacgaagctgaacccggacaag

SEQ ID NO: 164821 - DNA, 441 bp, Zea Mays
tcgactgcgagggtgacccgtgaaggggaggagactgaagccactgagacagctccgatctccgaagtcatgagacaatcgggattagttgtgacagagggagccattgaagaaggtgcacctgctgcccaagctgaacaagttgatgttgaggaagaaaacgctgatgaaggagaagaggattatagcattctgatcccgtcaaaacttagccacttggattttgaaaaatctactatgtctgaagccgacatgcccatgatgataaagttgggttactttggagaagctgaaaagaagcttattcgttttgccggagaagaaaccactccaaagccgaaagatgacgaagtggtggttttcaagagctttttcagagcaggattgcggtttcccttgaacgagatgattggggaagttttggataattttgagattttt

SEQ ID NO: 164822 - DNA, 1391 bp, Zea Mays
gagtaagacaaagtagctccgtctgtgggtcggcgacgtcgcagaggcaccaacgaaggagacgacaacatgggagatggaggtcctaatagcgtgggcgtggaagtccctgtgacgaccgacgacgacgacgatgatgaacgataacatgcgataacgatgtggccacgacgacgagcaacagtggcgcgatagcagcaaatgcggaggagcaagcacaaaggatggcgagcagtagcaaggctggcatttggtggcactaagcaaggaaaatcggcgagggagggtgttggcacgaaacccataaccatacactcataagcgaggaagaaaatagcacgacaaaagaataggatgtaagcttaattgtattgccaagcaagtcatgtgggctataggaacgaggtatatatagggttagccgggggttggtgaaatatgtattgtattacccccatctaccaactatatttgcactatgcactgtacaactaggtaattacaggatttatgacataatttcctaatacattagatttaataccctctagagtcacttgcaagtgggcccgcagagggcgggcgctgtttacacggagattgctctaggcgaagtctacttgccatcgacatcacgggccgcctttcggccatgttttgtattcgagcttccaccaactatgagccccctttataggtcaactttcctggttgactttgctgccaattagagaggtcgtgttttcgtgccttcgatattatctctcagccttcacctttcttttgtagctttgatcgtaaggacttgtgatcgaagggggcgttctatcttcattccaacatgagccccgaggggttggttcaacttgttgagtcaaactcgaagtcttgtagggatgacaggtgaacactgccctccatcacaagttgaacttgttgctttttgtgtttgtgaccattggttgctgacatagccaactgatgtagggtgtctcgtcttttgatggtaagcagcttcatgtttttcgaagtgcctctcggtcgttgtatataagggtagggcggtgcgtggttattccttttctgcgcactgcttcgttcctctactctaccgctttttctcgcgccacatttctctctctgtcttgttagtgacgattgctctagcgtggatttagcaaactgctcgccgccaacgccgatacatgacaccgctctcttcttcctcatcattaagtattgtgccccctgctaggatatcgccggcggcgggtggttccggtgtacatcgcgccattggcttggaaaccttggaatttggtcgatctatggtttcctcaaaccatgtgcgtgagtttgaacggttgggttattttggagtgggaaccagg

SEQ ID NO: 164823 - DNA, 352 bp, Zea Mays
gaagctcaaagaaacttggaactgaaagaatctttgaaaaatcttcaaaataagtgcttggagttctgcactcgatgcattcatcagttaaggcaagtgttccattttgttggagccagtagtgaagagtttattctttcagctgaagacctgcctggtgccttcgagcacattgaaggtgaaattaatgatcttgacgaagttatagctgggcatagcgacttttgtgccctggcagcttctcgggcacagctgttgcttttttgaagtctggttgtgaacacgacaagattgttaatagacccaacttcagcctgtcaccagcagacctagataatgttcccaatctggc

SEQ ID NO: 164824 - DNA, 428 bp, Zea Mays
tcgtggggaggtcaccggatcacggcaaccaactgctatgagggagggtgaggaagagaggttaggtgaagaagataggtattaaatagcttctgatgcacctattaaatagcaatgattttgctgccgatgcagctaagttttgtgtctgatcagagcttctaatgcagagcttccgatgcagctaagttttgtgtctaccaaaatgtttgaatcaattccatttcattatgtttgtcatatgggcatctcatatctgtatggatatgatgagtattacaccaatttgaattgtgtgatgcgtactctactaattgtaaaagttcaatagaaaacagatgaacatggcaggttatttgttgtcttttttttctaatcatggatattttcttccattctgttcagccaaccttggttttagaaaacat

SEQ ID NO: 164825 - DNA, 355 bp, Zea Mays
catgggtatatatgtacaaccaccaaatgtgtaaaacaatgtctttaaagcatggatatgcttgggtaggacatagtagggtaaggaaggactccataatgcatagtggatcttgattcctttggaagtatggcttgattcttattattcctcaacgagtttgatctccttcttctcgagtcttgatgtcttcatccgggtttgggacaagaggttaagatagatctataggcaactgatggatagagggtttagtaggtagctatatgctagatggaattagttatgtaacctgttttgtaggtcaagttgttgggtgtggccgaattgatctaagtcaccaatttaggcttat

SEQ ID NO: 164826 - DNA, 387 bp, Zea Mays
ggtagctgggaggatcatctcgccttgactgagttcgcttataacaacagctatcaggctagcatcaagatggcaccatatgaggccttgtatggcaggcggtgtatctcccttttgtgctaggagactttgggagagagatctttggtcggtcctaattgggttcaacagacatctgagaatgttcgggagattcatcagaatattttggccacttagagccgtcagaagagttatgctgatgtgaggaggcgggacttggaatttgcagtgggtgatcaagttcttctcagggtatcacctactagaggagtcattcggttcggtgtctccaggaagcttagcccgagatacattggaccgttctctatcttggcccgggttggc

SEQ ID NO: 164827 - DNA, 1036 bp, Zea Mays
aaaagtatggtcgcgtaggcccagaacatcacgtcgtaggctccgagcgagagagagaagagggaggagagaaatcgagctctaaccgtcgaattgagctgggcgggactcgctggacttcaccgcggcacccggggcgcatagcagaagacattcccgggcggctgagcgacctgggaggacgaacttcttgttgcggttgtctctccgctgtgcgatcgatgcgtgacgtgggcagctccaccaacgtcccaaccttgggtaagtaatcctctggttgactccctttaccccctggaatcaataggaccccgcggtagggtgtgtgcatcgcgtgtctgccggcaattgctcgccggagcacttcggccaggccaaaaccgtcgtgcgccatggccaggttactccggtgctcctagagtgtaagtatccctaccatctgattcgccatgggtaaggcagcgtgtgggggctatcggagtggggtatcgcgtacctaggcggccggggccttcttctccggcgtgcctgtgcggtgcataggggcggcgccgccggtcagagtttggtgacggggaacgggatcgcggtggccgttgatcaagggatgaacgacacggattagatctcgcataacctttcggctaggaaaggtctgggccgtagatcatcaatcggagggcccatgctaaatctgttatgtggatgatttcgggccattgatctttgatcctagggcagtgaacgcatatcggattataaccttccccgatctaatcgtggctcttgatgcgggatcgggcggccagaattgatctataccccttcgcgactgcagtttaacatatgagccccagcctttacgtaaatagaacccgccgtccatgggcgatgttcactgagtcttagaaaatttacgtgttagcccctcggcttctctgaatttgacgtgccgaccagttagcgaataaaatcagggaaattcattttaaaatcatttttaatacgaaaataatggtagaaacttgtataaatc

SEQ ID NO: 164828 - DNA, 747 bp, Zea Mays
ctctgcacgacgatgtgcatcaccacaacagaaacacaccagccctagcccgggcttagggacagcccgaaacctttgagtacttcctcccgaagtacccgattcagaggatttgccacggtaggggtggtggcgctggtgctgagacttgcccctcttgtgggctggacctctagtgttacccctcctcccgtcctggccacgaggctgatcaacacccgaagacttctgtgactccatggtgtactggtgttgcatctccacacccaatgcctgctccactatagtacggaaatccaccaacggaaaggctcctagagcatgcctgatagaaggtttcaggccctgacagaactggctcgccttctccaactcattgtaagccacataaggaacaaagcagaccatcttgttgaagcccacttcataccctgtggtagacttcttctcttgcttgtaggactgcagatcaatcttcattttctccaggaaggtgacctggtagaacctcctctcaaactgcctgatgaaaacatcctaggacaggactcctggtgaagaggagtgagctgcctgcacgcctctccacaaaatctgagcctctcccttcagcagctgtgtgccaaagcgaacacgatccccatacacaatctcgaagacattcatcttatcctccacgtaagttagccaatctaccgcctcgaccggagtgccactgccatcaaaagtgtccaacttcaagcccat

SEQ ID NO: 164829 - DNA, 605 bp, Zea Mays
cgcaagtattccggtgactcaggcgaatctttatgtggacggcgggttattctggaattaccgaggggctcatatgctaaaaggtctaggtgaaggggtatggttctttctgagttgttggattagaaaccaagggctaggattagatctcaaataaaacgaatcggtatgcaactatggccattggatctgggatctatggtccatattcagcataactgcactctattcttgttcgcccgatcgcaaatccatgatccagaacccatcatgcgaaagggaatatggtgtcataatctcgtcgctccatcgcctatctgacggcctacctttcttcttccccctgactctaactgggcggcggcggcgtgctcccacagcgacgagcacaccgatgcaacaaccatttccatcccactgccccaatattcgatctggtaacttatacacgctgctaggggcattataaaacaggtagaactctcacctgggcaagcagagtgacagcagcgcccagggcggcagtgccattaccggccaaccccgcctgcaccggagtcacgggctcggcgagcaggtcgtcagacacgacggctggtcgtcgg

SEQ ID NO: 164830 - DNA, 676 bp, Zea Mays
atatataaatatatgatgccacacaacacaatcaaataaaatatataatcaaacaaaattatttacggaggttgcgcgtaatgtgacttcaggggcttgaacaatccaccataatccacacgaatacaagctcaagtgtatccggcgttaatgcgtgtgcagccatcagggctaggacaacacaacaagccttcataacaaacgcaacagacgcagttgtgactcgatagtcggggtacaagacaagtccacgcaacgtgcgcaataggcgcaattgtggctcgcggcagacagataatgcctacagggcatgcgaaaaatacgcgactcagcgatggcggtctgactcaacgggagcgatccaattaatggagagcgcgacatagcaatcacatgacgcagccaagttcgaacggcacaaatactgcgtcgtgttgccagggcgcagtcaatattcagctaatgccataactcagccgattaccaacgcagcctgatcggcgtgtctgagtacgcattatacaatttaatcgctcgacttgagtccaaaacactcaacacatcataaatatttagagcgtataaaaatgctcaacatagtcttcacatgcatttttctactaattatttactgcgagaaataattgattaagaaagaaactgtaatataaaacaa

SEQ ID NO: 164831 - DNA, 628 bp, Zea Mays
caagtagctgatcactcaggagtgagtaagaaggtctagagtcgatgtcgaaaactgaagcctcttctatgttggtctacctctcccttttataactcaaaggagtagagggaatacatgtctcttgggtagtgaaccctattgtcggtgattggtaccaatggcgcactatgggacgtaccacgcagtgcttttaggaggacgacgatgtagatgtagctcggttcgtgcagggcacgacggaacacaatgagttatacaggttagggctaccgcgaggcttaataacctatgtcatgtgtggttctagagattgtattgctctgagtacgaggttttacatgtcattgcgagaggtgagagatgaaggtccctttgtgatctagcaacgtctaacctttttgtatgggtactccatccgccttatatagccggcagaggagatatccttgtacagatcagaatacttatgcgaatctatccactacttcctccaattgtgtcgagtccttcggtattaagttggcctcgtcctcaatgcccgcgcccatctgcatgcatggaccgagtcttgcgacatttagttggcctccctgaatcggcgcacgagaacttaagtcggcttcag

SEQ ID NO: 164832 - DNA, 401 bp, Zea Mays
ggaaagcaagaactagggcacggaaagcagaggcggttgaaagcgcagtacatatgggatattctcgggtcacataccgtttccaaaaagcgcccagtcatcacccggcggttacttctaaaacaccggcgtgccatgtcatcacccggcggttacttctaaaacatcggcgtgccatgtcatcacccggtggttacttctaaagcaccggtgtgccacatcatcactcggctattatctacaaagtggccgacgcagcccgttctaactcggctgttatttctaaaacgccgacgttaccatcattcactcggcagttatctctaaaacgccgacgtcgtcttcagtcactcggcagttatctctaaaatgccgacgtcgtcttcagtcactcggcattt

SEQ ID NO: 164833 - DNA, 941 bp, Zea Mays
tcgagtttcaccagtatcaacagagtacaagacatgagatcaaaactaagaacaacgtcaagttccttgggtcacggcaaaaggggatatcggtgacgtgctcaccagattgaggagcaaagattctcaaggcaacttcagaccaaacacccagacatgaccaggcggttaggagcgtagggtatggacagtgaaaccctgctcggttttagataagaaacacaaacagggagagatggtttactgcactggtggtcacagttatagtaaaacaaggagcactcgaccggacttgcatttatcggggcaccaacatgtttccgccgagttttgcatgagctagcacgcggcctcaacccctatgtccatgcaagaccagtctacagtgaggcaaagggtaaaggtttactggtgtttggacagggaagcacacctacagctgagtcacaagtttctaccggcttccttggactccacctggcttcagatgcagtgcgtccatttttcctaggcagcatagttccttttctttcagcgaccccatctccaaaccatcggctcttcttatccactacaacctagaacacgtaggtagggaaaatggaagaaaagaaaaactcttcagatatatacaaacccaatctaacctgtccactgcatataaattaagttcagcacacccctatctaaccaagcgacttgggataaccttttctccaaatttaaaatagagactgggatatccttcttcagaagaaatgtcttcctacaatggatctttaatgtgatacccggtttgcaaagaagagaagttgggggttgttctttttgttttttccctcatcggttgttgttttggggatttggaattttgtggaaaacattcacaaccagggcagtagaatttatttggtttgacggttgcgttgcggtcgggagct

SEQ ID NO: 164834 - DNA, 562 bp, Zea Mays
tgagtatgaagataaaaacacatggtttattcaacacccgatgcaccatagactgtaaagtgtaatccaataaaagctgaatgggagggtgaggagataaatagtcacattttgaaaataattctagcacaaatcaggctaccagcataacagggaaacaaaccacataagcggacattatggcatctaaaaccatgcagtcacttcaaacaacgcaaaaacaaaaacagcatacgctcaaatcaattatcaggagctaacagatcttgttgcatagtaaacgacacaaagaacataaaccgtaatttatatattcgcaacacgaacgattggtctatccatgtttgtgtttattgcgagtcatacaacgtcgacattgaatagcagtcagaaaaactgaaccctctttacatatcggataatcagatgaaaaaaatggtgttgcactacaaaaactgtggcacattaccactgcataataagaagagctggtactgtggtgcttaatatccatgatacaaggatacaaaataaaaaaaagaatatgacattgaaatcactt

SEQ ID NO: 164835 - DNA, 724 bp, Zea Mays
gccatagaaaatttagaaataatctaccctaaacatcctctgtcaggcactctaaagatgactctcatggtacagtagcctgatcggatcaggttcagtgaacttcaccgccgatgaccgtcgcgccatgattcacgtcgatcgctgggattcgtgcgctatggattgtggataactgtgggcgggtaaagatttggtgcctggatcaacttgagtctggccgcggctaagctcagcgtaccccttgctcatcgatcgatcgggataagacctcgccgccgttggccgattgccgccgtgcaccacgtgctaaagcactttaccatgtcacagtggcttggcttgcgatatttgctcatcgccagtgagttcaccacgatggaagacacgaatccactgcgctagtaactttctgttttctccgactgccgcacgtctctcccaaattcaccggccaccgctcttgccttctataaattgagcacatcgcctggttcgtattataatcacgcaccaagccaccaagtatttcctccaatcgtatacccgagagctctaattttggattccccccaaactgagtttccgccaccgcagagacaccttcaccgcggccagcttgatccaggttcattcaagcgctctagtcgattgttctagcgtccttaggtcctcctcaagctccttgacccctctgattgaactagaccgccatggatcaccg

SEQ ID NO: 164836 - DNA, 947 bp, Zea Mays
gatgatgggcgcaaggccgctgccctggtgacggtcatcgtcctcaggagtgtcatctcgttgcgtttcattgggctcgagggtgatatgatggtcaaagtgatcctccacgtagcgcttctcttcgctgttgcgctcgtgaggggcgcatgctgcttggcactaacctcgctggctttgtcctctccatcgccaacgacattggcggttctagaggtataaaacagctcatatgttgccttattgactgatgcgtgattcaactcaattttatctcaattctcatcaggtttgtttgcattatttctgcagctatgatggtatacttgtcaattctattgaggcaagaccagtattctcaaggtattatcagatacctagaattgtatgaccatagtttgttctgtttgaaattgatagaatactttctcaaagtcagatgtttgatttggaccatgtgtctgtggcttcctacagtcttctgcatgagcctttcaaatccatacctatcatttggactatgcatgaatattctcctgtacatcatgctaaagaatataatgtgagtggaatgattcagctcataaaatcttggaaagatgtattcaacaggataaatgttatagttttcccaaactatatattactggtatttacttttgatctgattgttatttcaacaatcattgagtcgttgtcatatggatgaagaacctctgacagaaaattataattaaatatttccctgcaggtgatgtatgctgcatttgattctggtaactatttcgtgattccaggccccctcagaagcatttcaggttgatagctttattgctaaaagttaccatgaagatgtgaagattagcctgcatgtaaagatcagagtaaaaggactgtgattgaaaactctataatctacttactcttaagatttaattgtaaatata

SEQ ID NO: 164837 - DNA, 730 bp, Zea Mays
gggaggagggagccatggagagggtagggggcggctaccaatggggaggagagcaagagagggagggggcggctgcaatcaattggggagaaggagagggggcggctagggttggggaggagaggggggctcccatccaccggatcgagatcaatggcccaaactcgctctcccttttgagctcccgaccccagcggaaaaaatgtcaaaatatctactgttttctgaggaatggctcctgaaactccaaactctaatgccacagaacaagaaagaaaagagaaaaagaagtttaacttcttttcagaaaattggggtatcacactctaccctccttaaaaagaattcgtcctcgaattcgaccactccaacaaaatatccaaggtacgccatataacagcaccatgcaaaacatgggtccattattggtcttaattaacacaagaaattctacatcgactaattgtctaaggaaactacaccacctgacatcaagcatgaaccaacatgtaatgaagctcaaaccaagtcatagatgcaatcaacactacgatttcacaacatcgaatttggatgcagccatacatcagcatcaatgtcttaaaacgacactcttttatgaaggggtaatacgcactaagcacaacctttaccaactttaacaattcattttaattcaatggtgaaacatccacaccagatgaatgtataagaagatcaaacacctcac

SEQ ID NO: 164838 - DNA, 1236 bp, Zea Mays
ctcggaggccagctaggacgaggcgacgagcgagcgactggtgacttggcgactccggtgacgcgcgcctgtagatcctccgctctacaaccattcggtatttctgtacattggttattgccatttgcttcaagacatggcaagcagcagcaggagtgaagaaatcgaagtggttgatgctgaagcaaatttagagcagcagcaagatgacaagcaacaagatggagctgtcgagccagagaacttgacagaaggagcaagtgcacaacaacacggaaacaaacgaacaagatctgtggcaaattcatctacagatcaatcgcaaccaaactctcgcaagtccaaggtatggaaagacttcacgattatttcacgagaaggtgaatctgaagtggctgagtgcaagcactgtaagaaaaaatttgctgctaacactcagaatggaacatcttctatgctgaggcatgttaaaacaaaacatcccactactagagctgaaatgggcaattatttcttaaaaactgaaaaggatgatgatgggtcagttgcacttaaaaattataaggtggatttgcctgctgttagaactggaataactatgtttctgcttggaggtgcacatccatttacagtagtggaagaacacgacttcaaaaatatgcttagtttagcttgtcctcagtacaagcatgttggccgtcacactataaaaagggatgtcatggatatgtttcaaaaagaaagaaaagaagtcattgatgccctcactaatagtcctggcagagttagtttcacttctgataattggaaatctgattgccaaaaattcaattacatttgcatcactggccattacatagatgataagtggaaattgcataagagaatcatatggttcaagaaattgaatccgccacttgatggagtgtcaattgctgatgaagtgcatatgtgttttcgtgaatggaaggtggacagtaaaattatgtgcatgactctagataatgcttcatacaatgataggatgattgctaccttgagttctcgtttgatgtcaaaaggtgttcttccattatggggtacatttttccaagttcgttgttgtgcacatatcttaaatttggtagtccaggctggtttgaaattgattgacatgtctattgacaagttgagggatggcattcagtatattaaagcttcatataatagaatgcatgccttttatgagaatgcagt

SEQ ID NO: 164839 - DNA, 339 bp, Zea Mays
gtttagttagaatagtgtgttgtcgaacgcgtgtgtcgaagtgcattgtagtaaagatttcgttaagctgaacgaaagtgtctcaagtgcatgccgtgatatggttgtatttgagatagtaaaatataagtgttgagcgatatgatgttcgatcgatatagttaaaaatgatttggactgtagagaggtggtgacatgccgcagtagtcatcgcttcctctgtggttaagtcgaggtcatgtgtgatgacgctatttacgtggtgaatgcgtttgttaaatgaatgtggtaattttagtgcactaaatgatttggataaaatttgtaagtctacttgtg

SEQ ID NO: 164840 - DNA, 432 bp, Zea Mays
cccggtatttcctcttcgttccagactgggaaccacgcccggtccctgcggggtggaaaatatcccacgcgaaggagctgaggcatcacaaatgaagggcacgaggcggcggtggcggcgacggctctccggcgttgctctaccctgcgtccgtgttcttataggtctgcttcttcctccctaggctattgaatctcgcaatacgctgggtggtccttgcagcacagttggagctttccgttcgcactgttagctccgtccgatgaggtcgctctgttggcctccaacgagggagctttctattcccttgcagagcagcaggtgaggtcactccgtcctattcattgtcgtgtgatctgattgcctctcctctcctggctgcctgggcgagatggctagatggcgaaatctttgtcctcttctcaccatgtt

SEQ ID NO: 164841 - DNA, 664 bp, Zea Mays
acacagagaaatatggcacagaaaacaagagatgagacgatcgagaggtcaaacgacgtgaaaacggcgtttgaacgataaaaagtgccataggaggtttggaattcgaattgaggcacgaaatgacgtggaattgagccgacacttcacgaataggtttatatgggtgaatatgagtgaagtgtgtgtttggtttgaatttaggcgaagaaaatgagatttgggcactcagctcggaaacgatcgctcgaaacggggaattgggtgaaattaaagcctggaatatcggatgggcgtgaaatttggcgaatatgttactggagatgttttgaaggtgcctgaaaaatttgagttcaattggagcatttttggctagtttgggcatttcaccgaacacgtggagggcggagttttagggtttcggggaaatggctatttgaggtgggaaaaccctcccgaaggagctaggaacctgcaaggatactcaaggctcacagaggaacacatatgaccacttggtttcactggatttcacaggaaattggaattgactcacaaggggtggaagagggggcatcactaggctgaatcagagagaagagagaggggtgaaggcaaagctgctcaccagagggagaagggacgagtgcaggcacaggatcgc

SEQ ID NO: 164842 - DNA, 434 bp, Zea Mays
cgctgaccgagcgggcccagcgctagaggggaaacagacggctgcaagggtccaagggggtccgagccgttcgatcaggatcggacggggggaaatcagactgggaaagatgagcggctgcaggtggcacagataggcaggccagggcgttaggcacgcgtgcacgaagcagtatcccgcggtccgggacgtgcgatcaagatcagacaggggaaatcagataggggaaacagacatacgcgaagtagtgccactcctctccgcggcgatgaggtcgccagagttgaggcaggcgcaagctagggtggctccgaggttgccggagttgggtagaggggaagagggcgccacagcgaactcagtggcggggaagaggcaatgaatccacaggcagataggggagaacggcggtgagagagtctcgggcgggccgg

SEQ ID NO: 164843 - DNA, 309 bp, Zea Mays
tgtggacctgatttgggctggccccgaagaactggagttcacggtgttcttcagctgatttgggggaaatcccaaattcgagttctctgctgggggtttcggggtgcaggtgggtgcagtggatgcttgagtacatggcggagctgagggcgcggtcaatttatagagtccgtgcgcggtgatcgcaaatttgggcgctgacacgcggtggtcggaggtgaagaagaaccaggcgcgcgtgagtgcgtgtccacggtcgtggcgagctcaccggcgatgatgggactgttatagggagtcacggtggcg

SEQ ID NO: 164844 - DNA, 581 bp, Zea Mays
tcttgatcgtgacctcatttagagctcgataatcgatacatatccttttggtgtcatctttcttttccacaaataggacaggggcggcccaaggcgaggtgcttggccggatgtaacctttctctgacagttcatcaatctgcttcttaagctcaaccaactctggtccagatattctgtaagctctcttaaagatgggggcggttccaggaagaagctctatggcaaattcaactttccgctctggtggcatacctggtaagtcctttgggaacacatctggaaactcagacacaaccctgatactctcaattgggtttgcttcactgctatcgacagccatctgataacaacttcctttcttcggctcaggcgggactaactcggtcaccactttctctcctagtggggacaccaacttgattgtcctcttatcacaactgataactgcatgatacttatctagccaattcatccctaggatgacatctattccctgagtacccattactatgagattagcgggaaacgctatcccccttatttccacacttacattcaaacaaatgctatcggctcga

SEQ ID NO: 164845 - DNA, 451 bp, Zea Mays
tccttgtcccacctcatgcaatcccccatctcaatccaatctcagtcttaacgaattttgcaacatttcattcaccatagcactagcattggacggatggacattgagaaggctaatcaccagtctaatctagacacaaaagtagcaattaagacaacatattgtgaccaagagatgtgctcagctcagacaattactgatatttctctagagctcatgcaaaaatagtcttccatggaggcatataagtaatggtagtccaagcagttgtatagaagccaaaaatgtcaccaaacattagcatcatgttataaacaatattcatcgaatatatattttatagtgttagaaaaaataattagacttggtcaaatccaccaaactatgttgtaagtgttagaaattaattggacttagtcaattttaattttaattcaaataaatctgaagg

SEQ ID NO: 164846 - DNA, 1114 bp, Zea Mays
cggatgacaaaaatgcagcaaaatgcatcgcaaggcagtcatctcactatactctcattagggaagcactgtacagaaggggcacgacaggagtcctcatgaagtgcattctttcggctactgggaagcaactgctagatgaaatccacgctgggcaatgcgggatacacgcagcatccaggactctggttggaaaggtcttcaggtctggtttctactggccaacagcaaagagtgacgcagccgagttagtccagaggtgttaagcttgccaatacttatcaaaacagcagcatttaccagcgcagcaattgcaaaccatactcgtaacatggccatttgcgtgctcgggactggacatgattggacccttcaagaaagctcaaggaggatacactcatgtactggttgctattgataaattcactaaatggatagagtacaaacctattgcttctctgacttcggctaaggcagtagaattcatacaagacataatattcaggttcagaataccgaataacatcataactgacctgggatccattttcactagttcagagttctttgattctgcgaacaaagaagcatccagatcaaatatgcttcagtagcacacccaagggccaacggtcaggtggaaagagctaatggaatgatattagaagcacttaggtagaaagtattcgataagaatgagaagttcgcaggaaagtggatcagagagttgtcgtatgtgatctaaagcctaagaactcaacctagccgagctttgcatggaaacactcccttctttatggtctatggttcggaggcagtgctacctactgatctcaggtttggggcaccaagactgatcttcgaaaacatagctgaagctgaggccactagactggaggatgttgatatactagaagaagaacgattgaatacagtgattcagtcggccaggtaccagcaaactctgaggcgctatcatgataaggtcatacggcatcgatccttcgcagtgggagatcttgtcctttgccgaattctaacgggggaaggacggcacaaattgttgccactatgggaaggaccactcatagtagcagaagtcactcggcctgga

SEQ ID NO: 164847 - DNA, 757 bp, Zea Mays
atggaaattaccgtggattctgctcaccattatgtaagtgtgagaatttcactgatattgaattactgactgatgcaagcacacattttttgtttgtataacagtagcaatgtagcttgtaaacagtaccaatgaattagaactcacagatcagcacattatcaatgccaactgccatggcaatatactgtcacaacgcttttgcagaaacaggtaacatgcacagactgtaataaaataagaaaagcgaggaatgttacacaagtgacttgactagctccctaaagctaaaattatagaatggtaactgccttaggagtgtcaccagcatgacagagcacaagctccaagcatttcgaggaataaaaaaaaagcacttcaaacctgttgagttacctggtgtctgtcaagccattcgatgtaagacttggtccttttacgctacaaccatcttcctccagagatcctaactttttttagttgtagctaactagctatcgttgcagcaagatcagtttgtttggatgtgcctaccgatcaggtcaataattcaatgcacggtaaaaatgtgcatatgtcataaaacacaaaatgagattcacagtacaaaactagctgtctaattatttcatgacgggcaatgcagaaatgataggttttccaggtggagacatgaatgaccacaattgcttgattgtcagtgatttgctactccttgctccaaaacttacgaacagatcagacagagcaaccacat

SEQ ID NO: 164848 - DNA, 494 bp, Zea Mays
gttttactcaaaatggatcaagcagtactcagatatacgcacaaatgacgctgccatatgtttcaaaccaggtaataaaatgcaaaaaaacatgaacaacacctactaaattatatatgggaatttaattgatccttgatgattatgcagggtggatacattgatctgatgatggaacagatacgtaactcgtaaggagaatcagtgagtgaagtaggcaatgaaatgcaaagtggcctatgcacacaaaatgaaaccatgaacaaaaacctactagtggccccatgtgagacatacacacagatgattcttgaggaggactcaacgcttgcaaatgcagacatatccaaggtaagtgtgggggtgtgtgggaaaaaataatagtaatatacatttcataacataaacaatgatgttaacaatgatgtttatagcggcaacaggatgtgttaacaggatatgtttcaaaccaggtaataaaatgcaaaaaaaac

SEQ ID NO: 164849 - DNA, 517 bp, Zea Mays
gtcgagaggtcctttcggcggtcccgggggtcccgaaggctgctccacatcagcggtggaggagcaccactgtctccttcggggcatccgactgccccgaaaatatggcagggggcggtgtattaccggtcatcaccgctcctgtcatcgccaacatgcggctgcaccatgttcagattgacggaggggtcggcctcaacgtcatcagtcatgctacattcaagtagctgcagatcccagggtctcggctgggaccctctcgcccattctctagagtgggcccacaaccggtgtatccccttgggagcatcgcactcctggttacattcgttaccgaggagaacttctgcacggagaacgtcgtgttcgacgtcgcggaggttaacctccccttcaacgccatcatcggcaggccggccctgtactggttcatggccattgcccattacaggtatttggtcctcaagatgccgtcttcggccggggtcctcatcgtgcagggcgaacgcgccgctgc

SEQ ID NO: 164850 - DNA, 771 bp, Zea Mays
ggaaggaggggctcggggcgagccttttataggcgcgcgagggaaggggaagcggtggagcttcttggctccggcgagcttcacagtgcggccattaatgccgcacagcgccgccgaggggacgctacggcggggtggtaccggcgaggacgctggtcaaggggggaggacggagcggtgccaaacttccctgtgcggcggggtggcagaggggaggacggaggcgatggccggaggtgacttcggtgaagagacggcggaaggacgacgaagcaactgaccagcggggccgttctgtcagagggagtgagcgcgcgagagagagagcggctgacgggtggggacgccttgccagcgagagaggggcggggctggcgcgcgcgcggaggcaggccgaagatgggccgaaagcggaggagcgcgggcgcgtgggagagggagagatcgcgggcttgggccgggtttcggtatcagcagggggaggagaaggcttttctctttttctttttactttctaatttctatttcccattttgcccctttttcttttgaacaaaatattttgtggatactctaagtgtttagaaaatagaatctaagtgaggtgctttgtgatcaaacaaaatgtatgcatatgatgaaaaaaaactagtggaggtcttggaattagaggatggagggaggggaaaagggtagattagggtttcaaacctttgggatgttacaaacctagcccacttaaaggaatctcgccctcgagattcagacggg

SEQ ID NO: 164851 - DNA, 741 bp, Zea Mays
atctcaggaaatccaccacctcaaattgcagttgttcagtgcgaaagttgggggtccctgaatgtgacgggcagagtgatctacccaagggggttggcctggtggttagggatgacgccatggaacaacgtcgagctagggcgcaacgctgagtgcaagatgcccaaacaatcgaaggtcccgatgtacatgatgttgagaccgcttcccacgtccatcaacaccttggtgaggcgctttgatcccacgatcggtttgacaatgaggggttaggtcctgagatgtaggatcatgtcagggtggttgtggcggttgaagactgtcgggattctgaccaccagaggtatcgtgggacgacgggctccacggcgaacacctctcgttgagctgccttgcggtggagtctgtcaccttatgcttctcccccactaaagatcatgagacatcccgtgatttcggggatatcttccatgggggtttcttgttctactggctttgtcggctcttcctgcttcgccttattggctgacggcttggagatgaagcggttttggagttcgcactcccagagtttgtggcagacaaggaagtcgtgattttgacatggtgaatccgtcaacttctagaaatggtcattgttgttctttgttggtggcctgggcggcggatccactgcagcaacttctccgtccttgatgcgcgtggggtgatagttcctgcggcgtctttcggggtgttcct

SEQ ID NO: 164852 - DNA, 614 bp, Zea Mays
gatctcggtcgtgtgacctctgtgatgatgaacgacccttcccacggtggtgatagtttgtgtcgtccctcccccgtcagcactcggtggaggaccaagtcttccactgcgaaggatcgatgtcgcaccgctttgtcgtggtagagcctcagggtctgctggtatctggccgactgaattaccacatttagtcgttcctcctccagtacattgatgtcctctagcctggttgcttttgcttcggctatgctttcgaatgttaatctgggcgttccaaagatcagatctactggtagtactgcctccgatccataaaccatgaagaatggggtgtttccgtgtaaagctcagctcggctgggttcgcaggctccagactaaatatggttgttccctgatccatttccctacaagattctcgcttttgtcaaacaccttccttctgagtgtgtcgagtatcatcccgttggctctttccatctgcccattagctcttgagtgtgccactgatgcatacttgatctggatgctcctctgctcgcagaagtcaaagaattctgaactggtgaagttagatcccaggtccgtaatgatgctattaagtattccaaacct

SEQ ID NO: 164853 - DNA, 827 bp, Zea Mays
aaaccctaatcccacctacctcgtgatatgaaagtctgtaacaatgcccttgacttgcatggtggtctgttagcccgatcggacactggactctggagcacgccttaacagctcgtcctaatcaattggacagcgctcccaggccccatctcgagcacagtacagctggtagtagactgcgtgaccaccaccggcgtgtccccgtcatcacatgcatgcatgctcgcatccgtcgcctaaacgacccttgtattactggaccatatatatgcacacacgccacacgcatcttttcattaatttcactgtgcacgcatggtggtatggatacatgctgcatagtactcctactactggagtagtggtatttgtttgatacataaattacaggacaggaggagggtgtgtgttgtactctcctggatcggagtcggagtgctacgtggcagcaccagacaggcagggagacagttaagtactccaaatttttaatttaattaattagcctgacatgccagctcttttccactgacatactgccttgttatttcgggcggtcggtttctcttccacgccacgcgtgcccaattcactggttctctcgtgcatgcatgtctgactatatactaattggatggatcctaatctatatcgatctcccagacatttttacgtcctctgttaaagcagcgaaaatcaagtcggtatattcttatgagtaggaaaggcattattgcagtggacggacggacaacgcacctctttcttgccggttgttgccgccgcgggcttgttgctaccgccggagccatcatctttgcgcgagc

SEQ ID NO: 164854 - DNA, 566 bp, Zea Mays
gggatatctatcccccacactgctagtctcttgtgatgaggaatccatgactaaagaaactccaaccaaccgagaactccacatacgaaggaacgcaagacgacaagcccgcctcgatgctcaagagtgtgcaaagctgctcgcacgcgtaatcatgaacttgccgagcaagtaaacgcgcccacgagggccacttcttgctcctcacaaccaacttctagtatttgcttgggtcatgcaaaccccgagtcaagccagtgatgtgcttgctcaagtcaccaacaacctcccccactcaccaaagggagaattctatcgacaactcctcaccttggcaacaaatcacctcctacccatggttcccactgaacactatgcacatcactacatcatccaccaccataatgcacgaaacaacatcgaggcttcacgtggacgatggcaccacaaagaggctgaggcaccgagaggaatatgatcaagatcatgtcatcccgcatccaagaggtgccactcaaacccattccattgcggcctcgatgcacaacatagcgcatcaccactcg

SEQ ID NO: 164855 - DNA, 499 bp, Zea Mays
gtgccacctatgattcccgttggaatcataccatcaggatttgaggtccaaacccgacaaaaccagcaaattatagcactgagtggttttgaggctaaaccaacgaaactttcacatgtagtgtacgacgtatgcgtcccctatgtcgtggacacgtgtttcgtcaatccgtgacctcgtcggcaacacgattcgcttctccacgtcctcgcgcccatcaatgtccacagtttagtctaggcgttcgggattacccgtagtttcggttcggttaattcaggatttttctaattcagggtttaagaaatgatatccaaagttgtacccaaaatatcgggtacccaataatttgggtttgggatatttcgggttcgagattcgagttacccatattacccaaatatcattccaccagcaccatgatagccaactaataagtattatttcagcatcaacataacaaccaataatcaagaaatattcatttccagcagcagca

SEQ ID NO: 164856 - DNA, 528 bp, Zea Mays
ataaacaagaatgaacaagctagtgatagggagttgcaaatcaatgggaagacaagagcacgatgatttttcttttgaggtttggtggtttgctaatcactcaatacccattgagacaagtccaaggttgccactgatcctcatgctactggtgaccctcaagtcacactctctcacatggagtgcttacacccgagatctagcacttgatccaattggaccacttggcgctcttcacacttcgctctactagtgttgctcttcatgtctcccatggggtgagcatggtacccctcacaaagacttctctaaggccacacacaacttcacatgggctttcataaagccacaacccccaagctatctaaaaggtggcaacctccaagagtaacaaccaccactgacttgcaactcaatgatttagtgccatttgatgcaatatctcaacacaacacactaggaatcccactcaaacacttggatatgttctccagcaaacatgtatgtgagtagaagcccaggactaag

SEQ ID NO: 164857 - DNA, 900 bp, Zea Mays
tcaatacttacatacatgacattcatcaattaacaatattcacaacaattaatatttgcaataattactatttgtgtaacacatcacattaaccatcaaattcgttaactaataacatcaaaccacacagtttatatttgcaacataaaattaaaaattgcaactacaatgtataaagtcatatgaagactaataacactatcaattaacaaatttaaactaactttaatcacataaaagttaacttccatcggccacaaaaaaccgatgaaaataaaatgtcttaatatacatattatacctcgtcttgcgtggaccagatggtggcacagaccgtgatcattggaggcggtgggccagcgcggtggtggaggcgtggtggctacagtggtggacgacggcggtgaacgacggcggtggtggacgacgacggtggggcggcggcggaaggcgtgggggaggccgcacagtggaagcggacaaggtgggaacggcgtggggaggcgacggtggaggcgggcaacgttgggtggtggcggtggaggcaggcggcgtggggaggcggcagtggaggcacgcgcagggagacctcgacgacgcacgacagcggtggtgcgcgcggtggaggccggaacggcagtaggcaaccccaacgacgacggcggcgacggcgggcatcttaggcaggaaatttgaaatgagccccgtgcgggtcaggctgctgtcatattcaattaattcccgtcggccgaggtacaggaccgacgggagttaagtaattctcgtcggccaggcaacaaggccgatgggcgttaagtaatcgtcatcggcctaggtatagggccgacgggagttattttatttccgtcggctagggttcaggctgatgggaattaaact

SEQ ID NO: 164858 - DNA, 659 bp, Zea Mays
cgatgccaaggacttaggcgttgcaaccagtgggggaaggacgaggtgaggcaaagcagctgttgcaggacgcgcggtgggcacgaaggcaagcgtccaagtgtggcacgggagggaatcgagggaaccatgagggaggtcgaatgagctcgacggtagatctcaccagctccccacggtgattcgggcggcccatatagggagcaggaaagtccgagcggagggtaagcggaagatcacgagtttgttaagatttccagggtgcttgttatggggcggtcggtggcccccgacttgttgtgcaacagccgatcccggtttggatggaaggtaggggatgagcctaacggtgagggcccataggtaagtgacccagagcgaggggataagcccgacctgcggggtccacatgctagtggcaaccaggcgcgcgagtgacgactctgagtgggccagtgcgggagtggaagagaagagtaattgggccgactagggaattaggcccaaacgtgttttcctttcccttttatctttttcttttctgtttaccattttcttttctctatttcattttattttcaagtttcaatttcagaattctgattttaaatttgtgcacccaatatgcaacactccaaaatatccggcatgaaaatgca

SEQ ID NO: 164859 - DNA, 928 bp, Zea Mays
tggaaacgactggaaattctcagttgactagtcgtcgacttggtctggcaagtcgaccgacttgtgtcccggttcggtccaagcagcccaaaggcccattatacaacataaaccctacctacacctctggccgcatccaacccctcctctacacgccgctcacctctagccgcctccaacccctctggccgccgcccgcccctcctctgcacgccctcacagcaagctctggtgagtcctgctccccctctcctgcccacacagcaacctgcgccacccctctgcacgccctcacaacaaactgtgccaccctcacaacaagctctagggagatggaagatgcatctgcagatcgaccataatgggagtcaggaagccagcagccatacgatccagctaaacatcctaagagaaaggcaaaatcgaaggatccagcatggaactattgttattggccggatttgaacaaaaaagatgtggtgaagtgcatcctttgtggcaaaattgttcatgcgggtgttagaaggttgaagcagcaccttgttggtgttcatggtgatgttgataagtgcccgaagacaacatcggcaatcagcaaagagatgagtgattatttaaagaagaatgctagacagaagccgattgagttggatgatgataaagagggtgataaagacgatgaagttgaggtatttggagaaggggaaagtagagcatcccattcagttgttcagcccagttccggaacaacccaaaagtgaaggctgttagctgaagcaagccaaaacaattaacgcgcgttgaagtcttctaagtcaattgcatccatgcttcgcaaagcacatgaagatgtggttcctgagaggcattgcaagggcaacactcaaattacattgcaacgaaagagcaaggaggcgaaggaaagaac

SEQ ID NO: 164860 - DNA, 568 bp, Zea Mays
aaaacgctgatgaaggatgggctggtgcttcttcggaaggataactgagttatagaaatcaacataaagaagagtccagaagcgattactatcaatcctgacatcacgaacacggaatgtaggattttggaagcgcatatcctgaagaagggcagaccctccgctggcagtgaaatcaatgacctattcattggtggaacgacgggcctgcgctctgtgaagcactaacccttggataatgggtgcattggcaggagggagatcaacatcatcatcttttccttcctcatcatcgctggtagcctcccaggcttgtggattcgtcgcgagacgagaccgaccagagggattccgggccattcgtccgcgagctccatgagtccctgaggcctcaccacctggcaggacattgccagatccgcgcccgcgcttggatctggaccgaggaggagtgtcttcatgaatctctggagcgtcgtcatctgagtcggactcaacaacagatggatttctacgacgcaccatccttaagattaaacaaagaagaacatatgatgagagagatatt

SEQ ID NO: 164861 - DNA, 926 bp, Zea Mays
ccggccgaaggggtatcgttgtatcgtagccgcacggtctgatctgggcggccaggattagattaggttgacactctaaccggtacgcaacgcacgccgtaggatcaaacatcgacgacacagacttcattgaggcgagatatgatcacgaccccccatctaacaccaatggtcccgagccatcctttcccagatccaatcccagccgtaaactccaagatctatggtcgtgcacttctctctctcactcgatcctgaccacggcggcgatgcaagtcctcgcggcggggcacgccggcgagagaacgaaaacgcgcctggtgaccctaaaccccacgccgattactccaaattggaccagagaaaatagctagcctgggggtgcattcaatcggaggtccgaggcgacggaggcggccaacactggcgccgtgtagcatcccaaaaatcctaacccaggtttgaaaccctaatctacccctttcccctcccttcatcctttaattccaatacctccactagttttctttcatcatatgcatgcattttgtttgatcacaaagcacctcacttagattctattttctaaacacttagagtattcacaaaatatttttgttcaaagaaaaaggggcaaaatgggaaatagaaattagaaagtaaaaagaaaaagggaaaagctctctcctccccctgctggaccgaatcccggcccaagcccgcgacctctcccttcccacgcgcccgcattcggaccaacttcggcctgcttccgcgcgcgcgacagccgctccacaccccgccctccctctcgctgacaagacgtccccacccgtcagccacccgctctctcgcacgctcgctccctctgaccaagcggccccacgagtcagttgcttcgtcatccgtccgtcgtcccctcgccg

SEQ ID NO: 164862 - DNA, 486 bp, Zea Mays
cacaacacaaaagttaacaataataataacaaaataacaaaaatatttgttaccttgaagttagcatagagcaggcttccggcgatgtggtgtcgatgataacgacacaagtccgcttccagcttcggcaggccaatgcttttggaaagggttctaacaattttggcttcgttgcggttccgaaggcatcttaatttcccttcgttgaccccaccaaaaagcatagcccccgatttgtatccgcaggatatggcatattttctcaactcctctttttcggtgtccgttaattcttgtccgagcaaatcttgaaagataaaatcttcttcttctgaaatttcatcaatttgctccttccccttctccgttgccgtattcactgtagccacagtagcttcttcttcagccattttcagcagtatgttgtcaataacctcaagtgtggtttccaggtccggctcttcggtggctctggcttcggccccg

SEQ ID NO: 164863 - DNA, 772 bp, Zea Mays
ttctatcagatcaagttggctaatggcctcattaaatttcaacatcaggctaaggtctcccctagcgatattcctgttttcgggcctatgagtaagattaaagtccccaacaatcagccaaagcttttcagagggcatatttatattggagaaccaattgagaaattcaattttcccatgcggagaacagggcatgtaagtatttgtgataatccaggattcattcgacgtattagtggaaaattcaaccgaaagagcataatcattctggtagataacattgcccaccaattttgagctattccaaacagtaatgaaaccacccgaatttcccaccgaggggacaaaagcaaacgagtcaaaagaattagggcaaaactttctgaggtcagccctatcaaaaaattccttcttggtttcctgcaagcagataatatcacatctggtttcccgaatcgtacaatgaataccattccctttgaccacaaaattgatcccacgaacattaaagcttaaaaccgaccattcagaataaataactgcattgtgactattcatcgggggcataatcaggtttgtcaacgaaagaaagcccgaacccaattactgggtgggcaaacaagtatctattagaaccggatacagagaaataaccaggaaccataaagtttgacaccgcaacaacaagacaaatacaccggggcagaaatagccaaaaggcccggcgaaacaaagtcctacaaaatctccccacccggagcaacaccatcac

SEQ ID NO: 164864 - DNA, 1741 bp, Zea Mays
aaataagaagattgaggaaacaatgaataccagatttctccatgacaatctgcatatccagtaggacacacagtgcaaatcctttagaaggtgaccacagattgttattatcaaaataacgaaatataacttccagaactcgtcgcactgttgttgcttccctggatattctagcaaggttatgtagacaaatccctgaccaaaaatttggacttgttgattcttctctgtgacaaaatgatttagaagagaaaatatattagataaatctgatacagtataaaactttacaagtattccatatgcctgaactttatttacattgtcaaacttaattcaccgtgaacagttctaataactttccatgaaggaacccttgtcaaaatggtaacagcaggaggttcatgaccttcagctttgagcacttcatccacccactgaattcgtctatcctcaatagcggcatcattatcagcatttgcatatgggctctcataattttccagaactgcagaaacaacctgtgaaatcattgaacagcagtggctaagaatagaggagcagtggtaactataatgacacaacattctacacttccaggcttcctgctctatgatgccagaagggattgatattacaagttaataaccaaagggaatggccaaatgcttcagcttgcgtgatttggacaaaatttacagggctacgaaccacaaaggatatgtccaagctaggccaccataaggtatcctatctagaactctagatctatttacaacatgaaatactggaaattactatgggttactgaattattcagaatcaccaaacataaaggctttggttgggctaacaagtgtttacttcacttcttaccaaaatcaactaagcagcttaaagggggaggcaaaataacacacttacattatcaagctctgcagacatatgggaatgctcacccataaaccaaatctgcaagcacacaaatcaacattaggcattacaattctgggaaaacagaaaaaatgcaaatgtagcagcacgaaaaatgaaatgatattttttgtttaactttgttggaacattattgacctttttataagaggaaggggggttgagatccaaaggatttagttcaagtttgacaaaaagaatcctcctctttcaagcaggtccacgatcactgcttgatagaagggattgaattgattaccttgaatagatggtgcatgagaaagaaagaatattttaaaaatatcacattatactatgaatttctcctatcaatgaaaatacaaatgcaggacaagctaatcttgaaccaaacagctgcacaccaaggccacatggcataacaagagaaacaaataccatagatgaaagagcttgtagcccagctgcatgaagaatgcatatcttctccttttcacccatctcttgggccagatgacatagtttaggaatctggttttctaaattgaacatgtaagtactgtcaacctacaatgagaagttaatattccacgagtcaaaacagtctaaaaagagaccattaaaacatggtgcatccattttgcaaattgatgctacaagaatgtttaaatacctgattatttataaagtcaaaaagtgtttgacatgccaatttccgcaagtcatcctgtctattttgctccaataatgtctctacaattgttagcaagctgttggcaaaaagtggcctgcaaagcaatggtttcac

SEQ ID NO: 164865 - DNA, 367 bp, Zea Mays
ggagacaggaagagcaagcccacgaataagaaaaggaatgtaaacgatagattcatgggtatcctctgtcggaacggtgacgtcacggcaaatccaccaaggatagagctcttttggaagcaaaaccccaacttcaacgagatggaggccggattcagaaatgatagacatatggttaccagcaaatggaagctggctgttggggtcgatgggcgggatgattgcagcaacggtgctctacctcttctgctttggcgccatcgcaatctttctggcggaacgagcaagatcgaaatctgagggaagcagaggagtggttcgaagggaaaaagttaagttagggctcaaaaatcaaaaaaatcacgtc

SEQ ID NO: 164866 - DNA, 516 bp, Zea Mays
gtgcattaaccgaagtctctcataaaaaagacactccatgcaaagtcgcccacgggcgtagccagatcaacacaggcatacgaatacggccaacaaaccacattaccatacaaattacagttacatacacacggcgagggcgtcacatattacatcggctcaaccttcgggatgatacccatctccctgtaattgaacaacattatcctcaattcctcaccctcaaaaagattctgaagatccccctcgcctatactcgccccaatcggcgaggacaacaattctctcttaccaacccggtctactcgaagacggccatgctccatcccctaacgacggtgcctaccacttcgcgaaaattcacccacactatgttttcccaccacccttcgccgcctacacccagtactcgcacttggaagatccccggaaccctccacacgcggcgaagtctccaccgcagccacatccaacacaacaaaataatccaagccttcatccgaggactcctccgtc

SEQ ID NO: 164867 - DNA, 799 bp, Zea Mays
tgttgttaacgtcggttagaccgagcattgactggtactagtcgtttccttcctttggatcacatgtggacgcttctatttaaaaggaggattggataagttgggtactagggcactcgataggggctgtgggttgccgtcaagactctgttgaccatggcaaaccatgtaagcttgcattgtgggtgctcacaatggccctggtgaacttcattgagcagtcgaggtcggtttagcacacgtttggataagggaacggatgggttagttctaatagctggttacacacctccttgtactaggtagagcatccacacgtggctagaggcatcattcgacggtggtggggcacggcgaggtcaggagctccatggtctagggtgtcgaagtcagtagagtttcctccctagtaagttgtagatgccccaaacaccggcgaagctcatggcatctgtggtgaggacaaaggtactctggtggggggaggatcatacttggaagtctcgacgatggcggtattggcactggtgtgagggctcggggtctaagaaggttgtagagctcttggtgaagtaagcatggggtgccatgggtcaacttttagagggccatgccattgatgatggggaggggtgatgacaagggtagcacggctagggccattgttttatgctagtgaaatcgcttgagtttatggcacgggcatccgacgaggaaaatgggggagcaacgaccaaggtgaagacatgaggtctctactgctagatgacgggcgcgagagtggtgtcctagtcagggg

SEQ ID NO: 164868 - DNA, 1594 bp, Zea Mays
cacctgcagaaaatcacctccagattctctttctaagtctgatatcatctttattgccctctcccccatctcaacttctccatacttactgaaacaacctaacagtatcctccatacagttacattaacctccataggcaacccttctattatttgctcagcctcacacaaacgtccagccctacctagcatgtctatgatgtacccaaaatgcttgatctctggatctatattgtactcataaaccatgcttttgaaaaatgctaacccttgctgtaccagacccccatgactgcagacattgatgacactcaagaaggtgattctgttgggcttaatccctgctcttctcatctctgcaaacaactcaagtgcctcaactgacagcccatgcattgcaaaaccagaaattattgatgtccatgacaccaaatttcttctatccagcatttcatcaaacacctttagcgagttttgcacagagccaatcttagcatacaagtctatgagtgaattcccaacccggacatctgacatgatacccttcttctcacaatagccattcagcatctcacccataacgatccctccaagattagatatcgcaggaataactgctaaaacaattatctcactcgggctaatgcctcctgccatcatgtggcggagaagagtaagagcctctgcataaagacaagcatgtgtatatccatcaatcagcccagtccatgagacaacatttctgcagggcatctgatcaaacagaagcctcgcatactcaacctcatcccatccagcaaagccagtgatcatcacattccacgaaactacattcttcactggcatttcatcgaacaccttgcgtgcttccaccaagcacctggacatgacatacacattgataagggcgatgtgcacataggcatggaactcgaaccccttctggacaacgagcgcatggagctgtgcaccagctcgatgccaccccagacccgcacaagccttgagcacgaacttgaagacaaatgtgtcatcagccaggtgctggcgcgcgtgcttgaagaggtgcagagcttccaggggaaaggaccgtgggagtaggccttgaggaaggcgcgccacgacgcgggactttggtcgaacacctggcgggcaataaattggctgtggatttggaggagatggctcctcctgtcttggtgtctcagaaggagagcaattaggtcacggaggcgagggttactgacgggatggaatggtgggcttcgttgccgcaagaggtggaagggatggagccatgtcatggaggtagtggtccacaaaatttctctaagcaagcatcagatgctagaaatcagtaaagcatggtgaatttggcgacgcagaaaagggcgcgcacaccttaggagccgtcctagatggcggcgtcgatgacctcgctgttgcgggaactggtgctgtactgctgtagctgagggcctggtgtcggagaccggacgatgaacgtcgggggcagagacgggacactggtgcccagaggccggatgcggaggtggcagacgccggtggcgggctgaggccggaagccggtggc

SEQ ID NO: 164869 - DNA, 410 bp, Zea Mays
ggaagggtaaatgggccgaccagctgcccgaagtagtctgggcactcaacacaactgaatgtcgggcaactggattcactccatttcgactactatatggatcagaggccatgaccccgcaggaaataaagcacgggtcccctcgaacaagcgcatctgctgtccccgacgtcgacgaacccacgtccaaagacctcatcgacggagaccgcgtcttcgccctgcaggccctcaacaaataccaagctcaaacgaaggcctggcgcaaccacgcagtcctcccaagagaatttaacgaaggagacctcgtactagtccgaaccacccggacagagtcacgaggcaagctggagccaaagtgggaaggtccattcatcgtcaagtcgaaggcgtcccccatcgcatacagg

SEQ ID NO: 164870 - DNA, 420 bp, Zea Mays
caacccgtggactggcaccatctacatgtggcctgggtcgtccgcggctgcctcagtccctcgccccaccacccctcagcaggtcctctttgccgctccgcctccggcagcaccctcggctcctcctcagccgtagcaggggctccttccccttccggggcctccgacccagcccgtgtgggggccctggacaaatgggtgggacacgcagtctctcgccaactccttctccacgatgacactagccccacccacctcggtctctgactgggtggctgacttcggtgcctcctaccacaccaccacggatgcaggtattatgtcctccacctctcctccccacccttcccttccttcttccatcatggttggaaatggctctacccttcccgtcacctcagtaggtgacgcggtccttcc

SEQ ID NO: 164871 - DNA, 622 bp, Zea Mays
cttcgctgtggaggtggtataggtacatataccatgcatccaaattttcttaggtcagagatttttggggtgactccttgcacaagttgcattggtgagtgaatgttgtatgctgatggacggaaattgataagtgctgctgcgtgcaggatggcatggccccaacatgtgttgggtaggttacaactctgcaagagtggtcgagcaattagctttattcttttaatcaaagcttcggctagtccattttgcgcatgaacatgaggcatagagtgctcaactgcaattcccgaagcggtacaataatcatcaaatgccttagaggtaaattctccagcattatccattctaatggactttattcgatggtcagggaaagtactttaatccggatgatctgcaagatcaactttgcaaatgcatggttttgagttgatagtaagcatacatgtgaccacttcgaggatgcatcgattaagaccataaaatatcgaaaaggtcccaaaagtggttgaattggaccacaaatgtccccttggattcgttccaagaagccaggaatttcattctttactttcaagggggatggtctcacaattaattttcccatggcacatccctg

SEQ ID NO: 164872 - DNA, 432 bp, Zea Mays
ttctgagttcgtgttctaggttgagtttgtttgctggtttaaatttgttttggttcagtttgattctgtccatccgcttctatcctacaaaaccgaccctatctacaaaacagatcatatctctaaaaccgaccctatccacaaaacagatcctatctctaaaaccgaccctatccacaaaacagatcctatctctaaaaccgaccctatccacaaaatagatcctatctctacaaccgaccctatccacaaaatatatcctatctctaaaaccgaccctatccacaaaaccgaaccccccactcttccaacacctcgccagaaaccctgattcggagtccaaacttaaaatagtcgtaactttcgcctcggaactcgaatcgggcacattttttcaaattgcacagaattaaattttgcatccgattcttt

SEQ ID NO: 164873 - DNA, 479 bp, Zea Mays
ttttggttacacgtgtatatcgaaatatctaaaatcatacacgaatcgccaattcgcatcaaaacaatagttcataaattaattcaacacatactgtacaaaaataaaattcatgttttgagttgtcttccaccttgtgatttcgttcatgcgcagggatgaacggacgacggcgaatgacgaacgggcgtcaaggcgaaggctcggtacgatgggtgcgggcacgtctccggcgaggcacgacagcgagcggtggtgctgcagcgcgtgtgggcaggggttcttgacgtcggacggggctccgatgaggtgttgcgcggacaatccggcgacgaacttcacgacgacgaacagcgagggtccgaggaagagagaaccgagaggaggaagcgagcttggggtaggaagaaagaagagctcggctgtggtttttatagaggggaagggagggagagcaagagacgaccgggggtgcttca

SEQ ID NO: 164874 - DNA, 959 bp, Zea Mays
gttgctgagagctattgtgcaaccttcgtcttcggtgttcttttgtgccctcaaggcattgctaagaattagtccctgcaagaaaaaagaaagaattaagcatgacaatgacatacttcattttcaactttaaaagttaacaacttttgtacctttatactattgtatgcaaggctgtcagcaagatcatccttcgacatgaccgaaaggccttcctcaagtttcggaaatcccatactcttggctatctcccggcaaacggatatttctttgttatccgggagacagtacaggaaatcgtcttcgtctgtgccattaaacaccaaggccccctcgggatgtttcagtttccgggcgtaatgtttggcttccaagatttcttctttggataatctctttctcgaagcatgtcgaataatgtaattaatatcttcagacggagcttcagaagcaggagcttcagttttttctgttgcgatctcctttgctgctttgccggtacccaaagtctgttgctcggttttatcctcaggcgtggcaggctttcgtctcaatgggcactgaaagcctagctttggctccagcctggactttgatagcttcggcagctttcttggtaggcgcagggctcaaggcctttgtggtctctaggacagcatctagcacgctggccatcctccttttttgggagttgtggcaggagccttttgcactttcggcaattccgcccctactggtgggcttagaatttctggcatttttaatgtattttccacttttggctcttcggtcgtatcatccttagcttcggctagcccgactgtaggcaccttcggcactataattcagacactatgactggttcaatatatcgaggccggtgggtcagaacctttattttcttgcccttcggcacaacagtagagaccgaagcggcagtttttctcttcttcctttgc

SEQ ID NO: 164875 - DNA, 696 bp, Zea Mays
gagattcgtgattatataggggatatatttagtaatgtgacgagtagtttagaaaatgctagtttgcgtggaggatgtgttattaagacgtgagtgtaggagttcatattagtggtcgcgccacgttgattgaagtgtctcgagtgcacgccacaatatggttgcatgcgagacgaggttatgcgcacgatgagtttagtaaaaatccatcggtgtcactggtgttaagttgaggattatttgcgtgtggaaagtaataatatgtttaatacttagaactcttagtcgatagtagaaattgttttggtttatatagagaggtggtgacataccaaagtagtcatcgcttcctctatatcttgagtcgggtcaatacgcgttatgtgttcatgatttgggaagtaagcgcatgatggtttcgagttagagattagtggtttacgattcatataaattggtcgatgtacgaaaatactttgtgaatctgtgtgtttataaaaatgttgtagtatatgtttgtgtctcgggttgcgacgataataggcaagcccgacgtgtatgttatttagcggctatgtcgttgctctagttagccaaatttttagatggtttggttaagtgcgtaatcgcaataaattgcttgttgtagtctaaatgtgtatggttatgttcacgagtaaaaatttgtagtgttca

SEQ ID NO: 164876 - DNA, 1142 bp, Zea Mays
aaattttgtttgaattctcagggctaacacgcccttgtaattcaccaaacagtatcattctggcccacactcttttcctcccggggagggtgaggtttttaatgaggcggagccatgtaatatgaccgcaaaaatcccccgcaaaaactaagacacaatatgtcgaaaaagaccgcatcgacggtcttcggcattcgaccacaccgaagtcaccgcgaggggcagcgctgactaccctcgcgtgcgacactccgcgcaaaagtcgcctaagggtacagccggaatagcacaacaagtgcgcaaaattgaagtctttcccaaaagactctccgcacaaaaaccgcctaagggtgcagccggactagcacaataagtgcgcaaaatcgaagtcttttccaaaaagactctccgtgcaaaagtcgcctaagggtgcagccggactagcacaataagtacgcaaaatcgaagtctttttcaaaagactctccgtgcaaaagtcacctaagggtgcagtcggactctccgtgcaaaagtcgcctaagggtgcagccggaatagcacaacaagtacgcaaaaccgaagtctttttcaaaagaccctctgtgccaaagtcgcctaagggtgcagccggaattaaaggtgcgcacattcgaagtcgttcctaaaagactctccgtgcagaagtcgcctatgggcacggttgtatcaacgaaggcgcacaaccttatcatacaaattatggttacatacacacagcgagggcatcacatattacattggctcaaccttcggattgatacccatttccctgtagttgaatagcattatcctcatctcctcaccctcaaaaagatttcgcagctccccttcacccacactagccccagctggcgaggacaacaattcccgtttaccagtcccgtccacgcgaagacgaccactctccatctcaccacaatgacgcctgccacttcgcgacaattcactcactctctgtttcgccactgcccttcgccacctacgcccagtactcgcacccggaagatcctcagcacccaccacacgcggcgaagtctccgccacagccacgtccaacgccgcaaaataatccaagatttgtcagtagcaatcgaactcctaga

SEQ ID NO: 164877 - DNA, 505 bp, Zea Mays
gtgaccgtggtgttggacctgggcgtttcgggaggagaacctgagaagagagagaatttggcgccgccaggcctcgcggtgatcgcgtggaagtgggggattcagtcgtgggcgcggaggagctcgctgtgccctgccggaccttactggtggggttcgccgggcatcgaccgtgcatgggagcagcgcgagctctctggtgttgctgggaatgcgattcgccgtcgggtgtcatgggagctggagcttgccgctcgtccgcaacgcgttgatgtgcagcatgggtggccggagtagaccaatttctcgccgaagctatggatggtcgcggctccgccttgagtcgtggccaggaggaattactctgcgaatcccggtgagaaccatctccactgctaacccatgttcctaatttcatgtagcatcatttgattaggaaatggagcattcgggtgtgcgggctatcacccgaccatggcgccgccgctgtgcctgttcaccgctg

SEQ ID NO: 164878 - DNA, 448 bp, Zea Mays
gcgacaagccgatctccggcgaactcgtactggccggaatacacaacgactagtcctttcctttgtttgacaccaaattctaccccgggtgactctaattccccaaccaatttcactaatccggaccggagtacgcttgaccatgatgacgacaaaaatcgagaagaaatgatggtgtccagggcaatccggtacgatctagttcaatcaatcaggcctacaagcaataggagactctagagatgctagaacattcaacagaggggcatgaatcaacctgaggtaggctgaccacggtgagagtctttcacggcagcggaaaaccgatttgggggaagaatgaaattctccggttatagtggctaatcgagggcgggagtgggtgctctgactttgcgataacatggcgcagcagaccgggccatcaatttataggggcattaagcgg

SEQ ID NO: 164879 - DNA, 387 bp, Zea Mays
ctcggccgttgatcgagcaagtgacggtcccgattagatcgagatgctaattcgaggaggctgatctcggacgagtgaggatgagttgagggattttaaatctggaccatcagtcgggtaatggtcggcatggattaggcaaagcttaccccttcgcgtgatctaatctaagttgtacaactcggatcggacgactgagaacattctataccccttcgctgatccacctatgcaaaagaatccctagaaaatctatgaatcaacttgcggtccgttggcagggagttctgagtcttagaatatcttgcgtagaaacccctctccttttctgtaattgacgcgcagtccagagaacatataaagtggataaataaatatggaaatggg

SEQ ID NO: 164880 - DNA, 759 bp, Zea Mays
gttggcatcatttacttcatttccattggggttcatcatctggttagagagtaaaagagatagtgagacaagattacataagaggcttgtacgatatgaagatagagggcgaacacaactttttgatttccaagataagattagtcaaggaacaaggatggtttctagcttcctcataattcaagagtatacaggtgttatattccttaacaaagatcttttgaactttatagatttcagagcatgatatccaaatcatctttctgatccaacagtagttccttgagcacaatttgagagagacttgagcgggattttagggcaactagagtatcacattgtttgcatatagcagatgacaccatactttattttctttataaagaggcaaaacacaataggtgcgagatattctccaaatttattcatatatcacttagcacgattacaaatcttgaaaggggcaacaacttgacattttttttgtgagacatactccttctaactaaatgatatattattcttccttgatagatgtaccaatctgagctggaggtcgattgtcttcaactactattctttctcctgacggggtttccaaacacatggttctctcagtatgttggattactgctttagttctttgtaaccaattctttccaagaatcacatcctttcccattgattctatcactaggagatcagctggaaaatctataccattgattttaatacttacttttggacatatgtagttta

SEQ ID NO: 164881 - DNA, 383 bp, Zea Mays
aaacttgtttggcgagcctcactggccttatgaggcactcaccgaaaaagtctcaaagatgtcctccccttttccgggcaatcacttgtggacgcatcacttccttctgattggatgtctggcgctctagcaaagacttcgccactccattcccaaatttctacaatcatgctcgggttaaagatacaagtgtgcacaacccctgggacacctcttggttgtggctttggatgagtcacattccctccaaaaccttatatccggtgtttccctcaacaatgggtctgatgctcatcgttgcttcgccgctgatgccgatgggcagcttcggtacaagatcatctactcccggctctcgacatatgaccgctctgacagccgag

SEQ ID NO: 164882 - DNA, 544 bp, Zea Mays
gaagaacaacttattattatctctttgttaacaagacatcaaactgacaaactggttgataaaatgactgcattctaccaacgaagagatgagatgagaccaaagataatatgtattgttttttagtgtatgtattaatattctttttccatggttttcagacctatgtatatgtttgtgtttgcagtcataagcacaagcagcacctctttgatctgcttataacatcactatcacagtcacaagcaacacctctttgagatcttaagattcattttctatttgatccgcttataacatgcttcttgggggcttgcagtttcagtgtggagttcaaagtgtttttctgatgtttgagtaacaaaactctgctgttggtagcttttgagctgtccacaaaaccatgaatcactatcttaatattgttgtttacttattccttctgattccctttttcttggttatgcattgctaaccgtaacgagacctccactacatggtcttagacaatagggtattttgggtgccattgcttccatgttat

SEQ ID NO: 164883 - DNA, 762 bp, Zea Mays
cagcgccccagcagatgccccgatccgtgaccaacgagtgctacgcaatgagaaggacaaggcgacatggcaacgacgacgtaccggcgataaaagcggtggaaggacaacaaccacggcgcggggcagcatcacgacggctttgatattccagcgagcaattcgcccgccccttccgaatgccgcccacacctatgccgccaagacctccgccgagcttcacgaaagcccctcgagccacaaattgcggccgacccaattccgtgagcgccgttcaccggtggcggacgggcgaacacccaattccgatgagatttgcccggcagcagctggccgcgcacacccgcccagacaatacctcggataacctcctcgcaccaccacgaagcatcacgtccacaccacaggtagagaaacggtagcgaggggattccaggcgcgacggcgcacattctctcacttcgctctccttcatcgtcgacggtggtgcagggctttcttgttgcgcaggcagatcaaagggggtgaggcgatagtcgaagggttcacgggatcggcttatatgctcgaaatcggagatccgggcggagtaagacgcggcatgcgcggagtagaaatcgcgttcagttgaggaagaagatcgagctgcccaagcgggcccacccgtcattcaatgggaggttgagggcgcgcggagctgagtgagtcggccgctcgggcccacatgctagcggtacagagattccaggcgcgccgccgccc

SEQ ID NO: 164884 - DNA, 449 bp, Zea Mays
cggcatactagtcaccgagatctccgcgggcgagggctgaccgtggctcctgcggtaactacccaaccgggtgctgctggggataagatggagggggaacaccgcatctgcacctctcctcttccttctctactgcctagcgacgagagagcgaccgagagagtagtgggaagaaagtgctgacacaatgggggagttcaattcggccgtggatgtcgtcgtggtgctgtctagggccatcaccagacatggggaggtgaggccgaggccgtgctgctcgtgattgttggccagcttcaccacaatttctcgctgacgatttctgtcaaccacagatccgcccaacgccatagacaacgctgcttagtcgttggcccccagtaaggaacccttaatccgaaccaccatgttctatttcccgtaaaagggcttattacgtttggattgag

SEQ ID NO: 164885 - DNA, 380 bp, Zea Mays
tatgcagatgttaccactatcaccatggttttctacttttcattatcaaaactgaaatgacaactcacaaattaaggctcaaacacctactcggtggcttgaatgaccatgcgttacaatgtgtcttgcccgtttgtgtgttggaatccagctggtctgcgcaggtgaatgttagtactcacgctgactctcacgaatggtaatatgtgggtggtggaattcgcgtggcgacgattatcagagtacgagctcgacctgccgatcgccgtcgctgccagagggttcttctccttacacaagtctaccctcacatactcgccctctcccctatatggctctggatcgctattacatcatgggcctatacaagccactgtgga

SEQ ID NO: 164886 - DNA, 981 bp, Zea Mays
acagagtagagcaaagcaacgtagagcagagcagctagctagcgtctctctcatcactagtagtactatcgtacaaccagcccagcagcagcagactctcatcattattgtaccactaccagcccagcagcagcactgcctaccggctacgctgctgctgcattcccgcatgcttgagcaagttgtagctgtagggagggggaatcacatcacaggagagctaaggtggagcgccgagacgagaggatacgcaacatctccatttcatctgcgctgatttaattagtatgtgcgcggttgtaataataattaattaattcagaaattgaggggtagacctgctggatgctacctcacgctttgggcgctggactacaaaaccaggagtagtagacacaccatccgaggaagcctgcaatggccacacatgctacgactgcgatggcggctatggcaccagatctgagcccgccgggagttggcggtggaggttgggacacacccttcttatccagctatcgggagcatggatctcttggagtatgcatgtagtataataataataatatgatggaatggagtaagtagtgattaattaaggaatgtccgagacttaccattgcagtctgtagggcgagggatgatggcattccactgcagcacattacttgagtctttacccccgcatgagacgtaagaagtaggcaggtcaaaggtagtgttccttgaaaccatgtacacacataggcagacaaagatcgttttccagttcatgaattggacagatgtcgatggaatagaggagggcgtcgtagcatgaggcagtagggttttgtggtgccgtctcatggcaggagagcagcgccaccctggtgaagtcaagctcgcaactcagcgaggagcaagcaggtgatggcggcaacagcagcagtaacatgatggtgacgagcagcgaaacagatggtgaggccatcggcagct

SEQ ID NO: 164887 - DNA, 689 bp, Zea Mays
gtggaaataagggggatagtgtttcccgctaaccttatagtaatgggtactcagggaatagatgtcatcctagggatgaattggctagataagtatcaggcagttatcagttgtgataagaggacaatcaagttgatgtccccacttggagaggaagtggtgaccgagttagtcccgcctaaaccgaagaaaggaagttgttatcagatggctgtcgataatagtgaagcagacccaactgagagtatcaaagttgtgtctgagttcccagatgtgtttccaaaggacctaccaggtatgccaccagagcggaaagttgaatttgctatagagcttcttcctggaaccgcccccatctttaagagagcttacagaatatccggaccagaattggttgaacttaagaagcagatcgacgagttgtcagagaaaggttacattcggccaagcccctcgccttgggccgcccctgtcttgttcgtggagaagaaagatggcaccaaaaggatgtgtatcgattatcgagctctgaatgaggtcacgatcaagaacaagtaccctttgcccagaatagaagatctgttcgaccagttgagaggagccagtgtgttctccaagattgatctgaggtcgggttatcatcagctcaaaattcgaccttcagacatttcgaagacggcattcattac

SEQ ID NO: 164888 - DNA, 278 bp, Zea Mays
gcagccggactagcacaacaagtgcgcaaaatcgaagtcttcttcaaaagactatctgtgcaaaagtcgcctaagggtgcagccggactagcacaacaagtgcgcaaaatcgaagtcttcttcaaaagactatccgtgcaaaagtcacctaagggtgcagccggactagcacaacaagtgcacaaaatcgaagtcttcttcaaaagaccatccgtgcaaaagtcgcctaagggtgcagccggactagcacaacgagtgcaaaaaatcgaaggcgcatt

SEQ ID NO: 164889 - DNA, 1079 bp, Zea Mays
ctccagttctgtccttgccagatttcactgtcccgttctttatagaaaccgatgccagtgccgtaggagtcggggcagtccttatgcagcatggtcaccccctcgcctttctcagcaaggcgctgggtccaaaatctcatggcttgtcaacttatgaaaaggagtacctcattgttatcctgacagtccaacaatggcggtgttatctttagcatcatgaatttgtcattcttaccgaccacaaaagcttgacccaattgaacgagcaacgtcttcataccccttggcaacataaggttttcaccaaattgcttgggttacagtataaaatccaataccgacctgggactgagaattgtgtggtcgatgcattgtcccgccgtgcaacagctgactgtcaggctatattagtatttgtacctcagtggttgatggacgttcaagccagttacactctagattcagatgctcagtccttgttggcgaagctttctcttgaccccaatgttgttcctcattatacacttcaaaatgggctaggtgggcagtgacgaccaactaaaacatagaatattgtcggctctgcattgttctcaagtgggtggtcactctggcattgtggtcacgtattgtcgggtcaagcaactgttcgcatggagtaaactcaaacatagtgtgcaggactttgtcaaaaattgccaaatctgtttacaagcaaagacgtagcgatcagcatatccgcgcaaacttcagcccttgtcgattcccacaacagtttagcgcactatttctttagattttgtggaaggcctacctcgttcgggatcggcggattgcattctcgtggtggtagaaaaatttaccaattttgcccactttattccactatcacacccatacacaactgcttctgttgcccagctgtttctgtcccaagtgtattgtctccatgggtttccacttgctattatatcagatcgagacccaatattcactagccagtgttggcagcagctcttcaaactcacaggtgcagaattacgtatgagttcttcgtatcacccccaatcggacggcca

SEQ ID NO: 164890 - DNA, 1711 bp, Zea Mays
agtttgcaaagatcacactaaagtttccccaagcaacaccatgaagtcgactctagagagtctatcgatttaagatcaatagcgatttgaagattacataaaacaacgacaagcctaagaatgcgaggaggcaaaggaaaaatatctagtacacttaaaggtgcaccgacatcaaaggatcatccagcaaggaaagtacgagatgacatctcttgtacctgctacacgtgctcctaatgtaagtaaacccatgaacatctaatcacttagtcattatatagatgagcagcgggatcaattaaaacaatacatggggggtatgaaagagtcctttagaaaattgacatatgcatatgaaaaatccaccgtttctaattttccattgcacgagattgatgctaaggatgtcacacataatttatcagctacaaatgggcatttacaaacccagccattttatggtatatgccaatgaactcatacaccagacaaccacaacctcctccatcaatttggaataaacctaatgtcctgcccatggccagaccgtctgggcctgagctcggactatccacgcctctggtcgatggccccgtcctttacggtggacaacccaaaatcatgccaggacccctatactctttgcaaggcttaactaacacgctcagaccgtctggttacacaagcaccattcgaatatcccgaaccatctacatttcataccagtccatccgaatttaacaccggacagtctgtgttccacaccggaccatccagagatgagtacacagaataggatgcggattattacccacaattctttcacccgccacaacaacacttacccctctctacggctcatcagggttgtagtatggctctaccctcatatgggaatgaacactttttggcctccaggagagcgaaaagaattaatacacaatatggagcgactagggtagtatgagcatgccacaaaatgacatagctcatcatccatgggcaagaggtcggcatatgaagcccggccacccacaccttcaggcccaagggctaccacccgtcactattgatacaatgagagaggaaatagcttaagcagttcgagataaaacttggagttagcatgagcaacatttctagcacaattaggagaattgaccgatagagaagcttttcacattcacttgttttcattatccctaaccggtactgcatttgcatgctatgccgccttgccacctaactctatctattcatggggagatctagagcataaatttcatggacattttttctctagagaatatgagttagagtaagtcgatttagcagcactgtgacaagggcgcgatgagccatttaatgattttattcagaggtttagggacactagaaaccgatgcttctagatccatatagcatataagcaatttgcaagattagcttttaatgggacacaatcatatctaaaagaaaatttaaagggcatccaattttttacattaactaattgcatcaacaagctttagcttgtgaaagccgaagcaaagatacacctaaagcagctcgtcataatgttcatatagtagagtgtgaccaaagtaggtctaatgacgagccacatgaagtgtatgttgttgtgctagtttggccaaacatggccaaaccatcggtctgctcctctttacatccgattcaaaagaatatg

SEQ ID NO: 164891 - DNA, 794 bp, Zea Mays
cagcaacggcgctctgcctcttccgcttgggagccattgcaatctctcgggcggaacgagcgggctcaaaaattcaagaaagcagagaagcggctgaggaaaaagtgaagttagggctcggaaatcaaaaaagcacgtcggcgtgagaataaatgggtttcttgggtcgggcattatctctaaagtgccagatcaccactcggaaaagtagaagcctagtcgtcactcggacattacctctaaaacaccagcactgtcaagcacatagacaaattttcaagcgcgcacatgaaaaccaacacaacagtgattatttggagcaactacgtccttgaactgtactggagggggtaacacaaactcgaagccggctcattatgagtcaacttcttctaccctggctactacattacattaccttactacttacactaaactacactactaactaaacactacattattctactgctgctacttctactactactatctatactaatatttaaaccagtggcattacgccactagccttgccgacgctgtcgtcgccactaccgccgtcgcccttgccattgttgctgctaccaccaccgtcgtccttgccgctgtcgctgccgtcaccgtcgccgctgccactgtcgcccttgccgtcgtcgctgccatcacctttgtcgctgtcgtcgctgctaccgtcgccaccatcaccctcgccactgtcattgccgctgttgtcgcctttgtcgtcaccgtcgccgccgctccattcctcggaggagttgaaggagtttgcc

SEQ ID NO: 164892 - DNA, 970 bp, Zea Mays
caggaatctactgagagtggtgccagcggttcactcccagctactgccaggacagcgccagccgcttcccatgccccaaccgggggtccggcggcagcgtcagacggcatcacagtggtggaggaggtcccagctaggggattcgcgtccactctcgatactgggggtgacacaggaggcgtgtccagctccaacccctcgcttgctccagaggagatggaggtggtgtttaggcggcgacttcggtcgggtgtcgagcaagaagcagcgccagtccccctccccgcatgttgtctcatgcccaccaggtccttagtgaaactgaggcagcaatcttgcgggagtgagaggcgcttgaagctgagcaccagcgcctcagcgactggcgcacccaactggaggagcgcgccaagatggtgtcctgacagttcacctccgagcggtcccagctcgagcgggaccgcaaggagtacaagagagacctccagagggtgtgtgccagggagctggaggtgacctagagggagaagaaagtgtctcggagggaggaagccgttacctagagggaggccctcacgacagagtaccaggccaagctgagtgctctggaccagactctggaagcccagcgggcccagcaggtgaaggccgtggaaaggctccagaaatggcagcaagagctcgagggcaaggccagcgacgtcgccctcgccgaggaaaaccttaaggagaaggagctgtccttggacatgcgggagatggacctcaccaggcgagagacaaatctcgccttcaaggaagaaatgctcacccggcgaggcgagttgctggccgagcacaagctcgaagcagaggaaaaagagaggaagatggaggagcagatccgccagttcaatgcggcgcaggcggcgccgggcccccaggcattggaggccaccagaaaggccctcgaggacctccaagaagaaca

SEQ ID NO: 164893 - DNA, 705 bp, Zea Mays
caactatccaacaagcgggaagcagatctaaaagtacttagtcatgaaagggattgtatcttcataacaaataacattggatttattatcctagcacataggatacaactacgaaaattacgtatagacaactacacctgctactgaatagctacacatgtgctatcctaaaagttgcattaatcacctatttggacagtgcagagtggcttttacacagcaaatgcacatgtttaaccaaaaattagcaatggtatgtgttttccactactacaaccctgaattcgcatggacaaaaacctgttagactcataggacaggaaatccaaccacaaaaataacagtaaacagctacacacaatgcaaacgatggggaggagagcgcatgatcgacaaatggcgagtctcaagggctatgcaaatatggctagcaatggggaggagatggtgagctggatacgatggcgagtttgatggggaggagatggcgagccggatacgatggcgagtttgaaggcgagactgttgcaagctaatatctggaggttttccatttctttaccgagcacagtctgtttagccagtctgttggtgatgctcttatatgggtactcattcatctattctttgccttcgcaataaggatttccattgagctgcgcttctatatttcacaattgttgacatgaatattttgcttatctc

SEQ ID NO: 164894 - DNA, 360 bp, Zea Mays
gcccctctagtttcctctaactatttctttcaacggtgcccctgcagaactattcccctgagtcactgacttcgtaaaaacccccctgacttttctttctttcaacctgggctccttcccccttctaacagtaaccacagagaggaaaaagggtggcgctgcttatcggcggcgagggtggtccggtgaagggctgggtgaggtccgggaggtcctggcgtcacatcgtggtgcggatcatcgacggtgatggccgggatagggttgatcacgtacgcagccggtcgggctcgtcggcggcgtgtgctccggcgtgctcacggcgatagggctcaatcaaatggcacagagggcttcacg

SEQ ID NO: 164895 - DNA, 601 bp, Zea Mays
atcgtaacatatctataccatattcatatacacaatggtatcccaaataaactgacttcattaatttttttattgcagtccctactgaacatcgaggaacgggaacagcacaacagaaatccacagccgtttgatgaaactatcctacacacatttctcgacaatttattgcccgagacagacaaattggataaatgcaaatcggtaacaaccgttttacaatttgcaaacatgatttacgttaaatggtgcatttcacatcttaatgcataaccatatatgttattgttaatcttcatgttttttacacgatcagatcatgattcccatgctaagtaaggggcactggacattgtattttgtcaatacagtcaaacggtacattcacattttagattctaatccctacaggccaaaacttgatggtactacttggaaggattaccattttgccaaaatggacttaggtggtaggaagttaccatggtctaaggttataatgagtaggctaaacaaagccctgcaacatgtccgccctaggtcatgctttccaaaatttggcaactttgcaattgaccatggaagcaggcgccaatgattg

SEQ ID NO: 164896 - DNA, 401 bp, Zea Mays
cgagggcagaatcaagctagggcgaggcggaggtccgcccaaggtcgcgactgaacctgtcttaagattcgatgacgtgtgccacagtttgaaggagtggccttctgcgggtttcgctggggagcaggtagccgggctcgggcgaggcggagttggtcccgagggcgagccctgcgtcaggcgagacggagtttgcgcccgaggtctagtctgcgcccctgtcgtattatatgtcccatgagggtttggcagacggcgtgcatgtacagtggtcgcacgcataatcatgtttggtgaatctttgacaacatcacggtcttattgctactgtacgcatgcagccctacgtggggtaggtacgcgcattgaatgcggttgtcccccagcggccttttggcgag

SEQ ID NO: 164897 - DNA, 1256 bp, Zea Mays
ctagcactacttgatgtttagtcaccagtctacaccttccaaacccaagacaatgaggtctatgtttcagataaagaaaatacccatcatcactggagctccctctggtaggtcagcgagtgtagtgaagttgagccttccctacctgacttatatcatctgcttcttgcctttgttcttattcgaaacttgtccttgcttctgcctgttctgagggcattcctttgcatagtgattagggcttccataggtaaaacatttgtttccattcccctggctattttgctggggaacattctagttggtaccttggggtgcgaaatttgggaaacggttactgccttgctgctgaggcggtcaaatcacccaacgaccttgttgttgagcttgcgggggtcctctattctaggtgttgaacacaatcttgtaccttcgagcatgagcctgcgatggtgttgcaagagtctttctcttcttttagtctgatgtgctatgatacaatcctcttgagatatagcaaggttcaccaaatcattgtaagtctctgctctgacagtgtccagtcattcctttagcttagtgctgagcccatgttagaaacaatccctcttcttcacgtccgtgttagcatgatacccaacatattggcacatgttgttgaaagcgtgtgcatattgatggacaatacgatttccatgcattaaatccaagaattcatttaatttcctttccagcaatccttccggtatgtgatgaccccagaatgctatcttaaactcctcccaagttaccacatgatcggcgagcaatattgcgtggtagttgtcccaccataacctgactgacttgtggagttgttgtgctgtgaacctcgccttatttgcatctgcgcaagctgctatcaaaagagtaaatttggactcaatgacacggatctagacatccgcgtccaaaggctcttctatcttgctgaaaagcagtggctagatgcttaagaaatcctgatagctagccacttgctgttggttcttgtggttattattctcactttgctgctgctgttgcagctgttgttgtatcagttgaagaagaagctctatttgatgtgccatgatggcctacatagtgggaggtggcggtgggggctgctagtcttgaacgctacgatttcttcctgccatctgaaatttggattccttccattagtcatattatccatggcttgtaatgaaactcaaggtaaatgcagatatcac

SEQ ID NO: 164898 - DNA, 392 bp, Zea Mays
caaaaagtttaaccattgaatccactcaggagggtttttctattgacatttccagacgtacaagatctagcagctcagctcaccaagatgacaacccacataatcagaagtagaatgagccacaaccaacaccagtccatcgttttcgcagaaaggctttagcttgtcgtgtaaaaacaaaacctcctgctccatccacactgtccgacgacgatttcatggatgctcctgcgttgaagcgccaattcagatcaacatcaccttcccctatagaaaaacagtgcaaagaagatagaggttccttctccacaagttccgagtgtgaaaagcagtccaaagtttgatatagatgccaagtctaatatcattacaaaaaaagttctcctaaacag

SEQ ID NO: 164899 - DNA, 601 bp, Zea Mays
gcggcggggacccttgggtatctcggcatcgaggattctcggtgctcccgtcgtgtggcgagccctcccatcatgctcgccggcctcgccctcgtctctgcgatggtaagacacatcgccctagccgcagatgcgagctcctcggatgactgtatcggcagtgtgtggtagtggtcgctatgcgagctcgcgatggacagtaaggcgtcgtcgcggcaagcgcgcgccattggctcggtaggggtggcagaggtagacgaggtactgtggtcgttagatggccatcgtggggcttcaatcgtgcgaaggtaataccgattcggtgagtgacggttgaccgttgatctacgatcgaacagttgggtgctttgagtgggattcggaagttagtaaccgttagatcaacatcctggggctctggttgcagaccgatctattgcggcgatgatctaatcagagtcgttcgtttgtaatcatacgactctcggcgttggataccccttcgttgggacagtttacttaagagtcctcgggcgttctggattttgaacccgccgtccattgcgctgtgcactgagtctgggtgaatttgcgagtgagt

SEQ ID NO: 164900 - DNA, 682 bp, Zea Mays
ttttagatctagcagacaactcattatcaacttaatagaattccataagattatagctttaacacctaaaaacctagaaacatgggtagctgaggcgaacagggagcagggtgccgcagccacggtgctgaggaagaagcgtcgggaggctgagcgtgatagagggagagggcacgcaggcacaacacccatggcgaggaggaatacggtcgagtacagaggggcgcgctgggaagtagaggctggcaaaggacaccacgacatggggaatatgcgaccagtgcagagaaatggaggagacgtgtgaaaaatatcctagagcaagagcggttggagtcttggagaccttcaagggagccaacatgtggatttccaggggtcatgcacatgctagaaagcaggaggtggcatggatcaggaatacgagaccattccaggaaatgtacgctcaagagatgaagatggctaatgctccacgggaaagaaataaagaacgaggagatgaggacggctgaaaaatctgagaagatatttttctttttttttctaacacaagaatacacttacgagaaaatatctggttcgagtgttgttcggctgtttttttaatgtagcagctaaaatattgtagatatgtctcatacaaacaccaccagcagcaacccaaatagttagttttaag

SEQ ID NO: 164901 - DNA, 1353 bp, Zea Mays
atgtggacccggcgtgtcatcttcttcttctctccagcgaaacaaacgaaattccgtggcaattccaaacagaaatcacgacccccttggccgattcgcggaactcctccttggatttgggtcgatccgatcccgtgtccgcgctggctccctaaccgattctcaacaaccaaaatccccagttgacagagtccctcgcgaaaccttgatctgggccgctataaatggtgaccgcgacctcccctgctacttcatcacgcaaggcacccagccaaatccaccgcaagggagcaaagagatcgagctgagtgctgccgctaccaagggccgaggtactcaggatccctcgctgtgcacccagttctgccgcggtggtcgccggcgtgctcgtctcgggggcggcgctggtgccgtcgtactcagagcctcggaaaggaagacgacctggggtgcgtcggggtgggtcctgcagccggggtgccgccgctgtgaattccgcccgccgctgggcatccgcgcacgacccgcgtcgtgcccctgccactctgctcttccctccgcttctccagctgtgcctcaacgcccggccatggcgccctggtggccacagcgggcccctaattcacccaccgcaaacaccagctcgcgcagtggggagtgaagcttccaccgctgccatccaaccctgccagaaggtcgccccagcccgtggaagatcttgggcagcgcaatcgctcaatccgcgcagtcctcctctcgcttcaagtacgacaggatattcggcgaggaagtgtcgcacctccgtctggtgtgcggtggtatggagaagaagacaagccatggctattagtttgggcatggacggcttggatgaaatctggaccataccggtttggggctttgatttcaaccgttgaccgcgtgatgtgcggctcaggtaacataccggttcaagggttgatcctagcccttggatcgagatctcacgcgttagaataaatcgcgacactttaaactcggagccatcggatctatatcgggcggctctgggcgcgtaccggttcgatgtcgtcctaatgtgatctgtgccctccatatctaatcgggcggccagtagttatccataccccttcagccaagagattatgcaaaagatcccctcttttttcctagattcaacccgcagtccactcgggtgttcccctgagtctagggaattcttacccgagaccccctgcacttcccagaaatctgcgaccagtccagataattaataaaaccaggaaaatcatttagaaaatagtttttagtacatatttaaatgcagaaacttgtttaatttgtagaaaatgc

SEQ ID NO: 164902 - DNA, 374 bp, Zea Mays
gtgaatcatctaggcccctttggtaatgttttggtaattaatgacaacttcttgtggtctaataattcctggagaaataagaatgcaggttgaaccacagtgaactgagaagtcttgaagacttatgagcattggttgtggatcaggtgaaggcaaaggtataacataggttttgtttttgccggtcaccaggtgtgtagagaagaaagtgaccggattggtaggctagatagccgtactattaagaggggttaatgactttgttctgtgtaagacttagtgcctcatagagcatctagtggttgcatttgcatgaggactagcagcgcttccgtttcggagagttaaaatcttttcaaaagcgagtttggaaa

SEQ ID NO: 164903 - DNA, 833 bp, Zea Mays
acataattcaatcagttgcgggtaatctggtttaccatttcgctagtgctggatagacaccaatatatgccgtagtaactgatgcaattagctaagctgcaacatcaaaagttgacagcgaatgaagggccttccatgatggaaggcctcaaaagaaattacacagtatcatgattatatatctaaaaaagctagtatgaagtaggtcacgagagagggagtcgcctcgccgctggggatggatgtgggaggaggatgaagaggggaaggaggcagcggtacctacgagagcagtcacagccgctagcgccgaagtgggtcgtgggagaaggagtcgccccatcactggtgtctatgatgatgccgccgcgggcacggggatggatatgggaggaggatgaagaggggaaggaggtggtggtacatacgggggtagccgtagccattggcgctaaattgggtcatgggagagggagccgtctcactgcgggtgtccgtgaggacaccgataggtgctaagggcaggaagaagaggggaaagaggaagtacctatgggagcagccacggtcgtcggcatcgaagtgggtcacaagagagggagccgctccgccgctggtgtttgcgaggatgagcgcgactacttgctgtcaaggcagcaccgcaactatgaagcaggatgtggatttggcgctcgcactcctcttttggctccgtcaaggatcggttcttctcaacgccagtaacttctccatcggtggcgtcctcgtgggacgtgtatttggccatggggatctgggcgccggggagagatggcggttgggccccccgcgag

SEQ ID NO: 164904 - DNA, 522 bp, Zea Mays
ccaaccctggcagtagtggctctgtgaaggtcaaaatagccttgaatcctcagccaggggctatacctcggtcttgtcatgctccctaatgcggggtggagaaactggtggagtagcagagggagcgggagtggtggaagtatgtgtggtggaggttgcgggtgtatcaagggtagtggtaggcactggatagtggaggctggagtcatagtggtgaatggagtggtagtggtggctggaaccgagaagatattcatctaacacagtaagcaatttgatatgagccaatatgcatctatcctccgttctcttctctctcacctgctgctgctaccactgctcgagtagctctatccaatctgcacttcttctctgcctccctactgctcaaggtagactgccttgcccttgtcctattgataagggtgaggagggtcctgatcatcacctctccctctcggagtcacattctttgtccgaaccatactgactcagctgaaaccctaactgtaacaccctgaa

SEQ ID NO: 164905 - DNA, 910 bp, Zea Mays
gtcctctttggggcacccacgtaagggtatagctccccttagtcctcgcaatgactaagttctcactatgggctgattctttgcctctctagcgcgatgaatcgttcaaaactgtgtacaactctgagatgggtcaccaacaagtcctcagatgtgatcgccccgctctaatcgccaattagccatctaggtgatgccgatcaccaagggtaacaagctgaatttcacttgaccatgacgaatctaatgtgagtggtgtgtgctataggtggctctctcatgcactattgatgttctaaccgcgagattatgattttgccaatcatcaccaagggtcttgcaagctctcataatgaatgatatgtagttaggtaggcaagacaatttaatgtggatattgaaaggggtataaataggaaacaaccaaaatatagtcattactgttctatctagttacgggtgcaccagaccatggtccggtgagcaccagacccctttctcacagcagctaacgactagtttgctagaactagttgttattgtagagaggtccatgtgcaccggactgaggtctgtggcccctttgctggatgggctacagaaacatctctagaaactaggttcgatgcacaccggaccatggtctgatgcactcagagtgcatttttctaaggttttttattttgtttttccatccaaattttcgtgggctctcaagagttacctagcactagttttgtatatgagtgaaccaccacactacacttagacatgcctaggtcaagttacttatccacaacccctctttatagtacgactaaaagaaaataaaggccctttaactaaactaagtgcctaggaactccttcgacacttaaactactacaccatgacctttctagcattattc

SEQ ID NO: 164906 - DNA, 595 bp, Zea Mays
atatttaagtattagtttcttcacgcgtccgcccagccagcgcctcggcgaattttcttcggccagagtcagtggctcgcacgctctcgcccacggtgcaggattaatccaaaaataaaactgagcatccgaaaacggaaaccacacagagcttggtgcgttacccactgcggcatgactgcttttgtgttactgaaggaatagataacctctatctctactatattaaaacaccagtttcaatgatcgtctcgcatcatctttttataaataaccccttatgtttcttcaaaatcaatcagcgataccatatcatatcccatccatatcctatttgttcgcacagcagcattctcgcaactgtcgctctagcaacaaacctcattcatttcacaacaacctccgcccacttcttacgacgttgcaccgcaccagcaaggagtattagtcgctcgcctccggataaggatgctcactagatgataaaagttgcatcgagtccaaccaactctaaacctcctcgtcgcaaaaagggaccgagagctcgtctcctagctcactcgtctcccgctccgatgcgagctttgctccgctc

SEQ ID NO: 164907 - DNA, 754 bp, Zea Mays
gatggaaggcccttgggtcattaggacatcctactgctcggaggaggaaggatttgctcaccttctacggagttgtggactgcgcatggggatccgcaagaagcccgaatatgtctagaaggaataccgcgaaaatggaatagagaagtgctctgtggcagtctacgtgggagaaagccgaagctacccaaaccacccccccttccaagtcaccttcatcgggcaccgcttcccagacacttgccaaagtgttgcccgaaaggcccttaaacatctatgccaaaactatagcagagagatctttgaaacccccccttcgttatttcccacccagcaacaaaaatacccccacctggaggaaaagatttcaagctctgtcagggagagaccccaccaaggatgaccccaccattgtctacatggccggatacctccacaccctcgatacccactacgatgatctctcctcccactgcacccacctaaactcccaggtggaaagcctagagcagcaagtcaaagagcttaagaaggagaaagcatctctccaggagtgtctcgacatagaggaaggcgaggaggccaacacccttgaagcctatcgaaccttaaagatggactatgataagaagcttaagaagctcgcccccacaaagaaaatccggaagaaaaccacgagccaaggatgccagacggagaggaagaagaaagctcccccagcaccagctcccgccaggatagagaatttgtccga

SEQ ID NO: 164908 - DNA, 875 bp, Zea Mays
aacccccaacctccccccaagctaatcccctcgcaaagcagacaacaactaattaattaggacttatgtataagcgtacaagcgagacttttaatccattagatcatgatctaattgtagacataatcataatttaaaaggtattttctatgaatctaaacgagctgatagtgaaatggtttaagtgttaaatgtgatacatgattgtatcataatttaacggatcaaaaacctcgctggcacgcttgcacataagacctgattgcacaattgttgaccacaaagcaagcgttaaccaaccaatgaattaactatcagtgtactccagcactagcattactgcaagcaaaggacaaaggtgctgcccatggtttaagcccaaaagcaactatggacatgggcaagcaaggcagacttcgccatttgcttgcctgcccactgttcttgcacaatttcagcaacaccctttgctatccaccttttcacactcgcacctcctcctcctctctctctcgtgcttgctgttgctgtgctgtgcagctggttggatttcttctaggtcacccgcgagaaatacagaatactaccagtttaccaacacccacaggatctcctactccttcctctccctcttttccgcaaagctgaagaaagaaacccaagcagcacgcactatttatcccgagccccctgtattttggttggtactactatagtatccctctcttcttctccggcggatcggatctgctgcttatctatctgtctgtctgtctgtctgttcatcgtcacaagaataataacaacccttcgcctgcctcctgcccgcgtatgtgttgcttgctaccctgacctggcgccctggcctaggagaa

SEQ ID NO: 164909 - DNA, 939 bp, Zea Mays
cttcttcctcctcgtcgtccacattagcaacacaggcagcacacccattgggatcagcaacagatggagcacccacattgggatcagcaacagattgggtacacccattggggtcagcgtcagtaaatccagtcataggcacttcttcagcagcaggaaccgaggtaccaacgtcccgatccaaactagatactcgtcggaggcgtctctttttctttttctgctcatcagcagaaggatcaggttgactggctcggcaagggcgcctcaagcgagtactggcaggcttctgagtatccaaagttgtatcagcctctgggaggggcgccactaccaatgccccagcaggagcagcatcagaagagtcctcagccagtaaatcaagcatagcgcctatctctgcatcactagggttcaggggcacctcaaaatggacctgtcgttcatcatcaggaatctccccgagcgaggctaccaaggcactaacttcttcagcagaaggccacactctaaggcccaaactaccatcagtgacaggaggattcgacacaaaaagagtgaaggctttgggaggaggcaagttccaggctgagaatgctactggggcaccaacatttgacactttgcctctaaggatcatctcaagtcagttcaccaagtccatagagggaattcttctgttagtaacccgagttgagtcggctaggcctcgatacagataagctaggtatgccctgtctttcaacggctgaatattgttgaagacaaaatcagcaaccacagcttcagcagtcagacccctctccttcagcaatccaacttcagccagcaaagcacctgcctcagctacctcctgatctgtgggggactcggtccagcttgggatgcgaacatccatctgtcttcccgaccgaggggggagagagtttccataattct

SEQ ID NO: 164910 - DNA, 359 bp, Zea Mays
ctggacctcgatcgctctcaatgctcaccaactactaaccacaagtcagaacatgtctgcgagcacattgatccgagggcgcccttaggcctaggaaaccttgaaggtgacacctagagatggtgcgaatgtcggataacagagggtgctacgatgacaaaagcacgaagacattgccgatgatcgagatatatctaacccgagcagacccccgggagggctcgaagactaacaagcccccttcctagctacgaccggatgcgtcctagacctctccacaaggcctcctcacagtcagagcagaggcccaacaatgaagactcctagagtgaaggcgtacaagacaggccaaagaggac

SEQ ID NO: 164911 - DNA, 565 bp, Zea Mays
gtactgtcgaagaagaagcccgtagtcgagtgtaccatggaggtatcgagggataaacttgataattgtcaagtgcaactcccacaaatcatgcaagtggagtcgtacctactggagcacataggcaatgccaggcttggtgaagctaggatactgaagggcaccgacaaggctctagtaggcagtagggtcagtaacccagagatcatcaccaaaggccttcaccaatgtgtccactagagttgcacatggcttacaataccacatgtcagtgcatgttggagcgaggacaaacctacccctcgaccaccctcatttgtccactaatcaactgcctaagtgcctgacaggtgaaggtgagcgtcggagatagcgcccttgcaacgaccacagcggtcgaaggcctcttcccctcggcattaacaatggtggggcctttgaatcatgaggggccgactcattgtggtcaaggagctgcgaaggatacaagggtccttccctaagcgaagactacaaaagagcgaagaaccgaaggtggcgtctagaacccaaccatggtgggcca

SEQ ID NO: 164912 - DNA, 919 bp, Zea Mays
gggcaacggctagggttcccgagcagcagacatgaaatcggggctaccttgatcattttccctaacttaattgcgcttatgatcaactacggagctctggccacggtggccgtgagtatcgcggctatactgccgtgttcccggcgaccagaggacctctagcttaattaaatgggttgtcgagcatcacagagctatgaaaaggcttaaacaagagagagaagaagatgagctgaccggagtacggctggccgcggtgaggttgagtttcgggtgacggagaatggatttgggggaaatcttaaattcgagctctcggaggcacggttgctaacgattgctggtgatgatgttacgcagctaggggagggctcaatttataggcggcttcaccggtggcgcacaatttggtcgagcaacgcggcggccggaggtggagaggattactggcgcgcgtgaatggctgtcccatgccgtggcaagctctccggtgttgattagacaacagtgggggtttacggcgatgcagtggaaaggttgagccacgcggcgcacggccgggaagcggcggtcgccggtgagcttatctgttccagtcgtagggtagagggggaagcacgggagggtcaccggagtggagcccagctcacggtggtgaagatctttactgggcgatgcttacctgctggccacggcgcacgaatcacggcgagcggcaatcgaaagcgacgggccaccggcgacgggcaggggggggggaaccgtgatctgtttcagtttgggtactgtaccatggcaagacctcatcagaacacctaactgagcaacttcagagccatttttctcaaaattttgcattacaacttggtcatctctctgcaccaaagttgtagagctatagttaatcttcaactttgcc

SEQ ID NO: 164913 - DNA, 487 bp, Zea Mays
agaccatgtgtacgtcatttccctcatcaaaatgccaacactgggccatggcggctaccgctgagggtgattgatgtgcacaatggggccaagatgggaggttggcatgatgctagtaggaattttccaagcttgatgatcaaggatgggccgacaagatcacacatatctggcaattctggacatgtagagggatatggggtgcgaagggagaaggtaactctcgctgagttgggtgaggtagtgctgaacaacaatgttcagacgctgcaaggggaggtaataaaggaaaagaaaaatggtgttttcgctgccgaactaagggtcatattatagctaagtgtaacactactctcttttatgatatttgcgagggaactgatcatgtacctgcctcatgtccagtcagaaagaagtcaaagccaatggcttactcggtgggatatgctatggatggcctaggtttctatcatattcctcatactcc

SEQ ID NO: 164914 - DNA, 657 bp, Zea Mays
agtccggacgcttttatagagcgagaggggagaggagagggcgagtcggggagagaaacggtcggccttcaatgccatcaatggcggcgaccattaacggcgccattaggtagaacatgggggagggagagagagagagggtctggcgtgggtcgggctcggggcacgagcgcggcgcgacgcggacgagccggtggcggcgtgggatgtaacaccccaggtgttacccaaggcccaagcccaatgagcacacttttggcctcttaccctatatgctaaatttaggaagtgaaggcactaaaagcttagaagcatggttaagccaagtattgatcatcacaagaaaggaaccctagccttcatacaattttcacccataaacgaggttctaaaactctaattcccctcttaaaccattaaaccctaaccatcagattaaagggaaagagtgggcaaatggccaaatcacaaaagggaacctttaccaaagatgaagtatattagtaaatctacaaaatgtattaagaggggtattacaaaaagacccaacaaaagccccaaaacaattcaccaagtagggagcacactagagccattcaaaattctctaagtccccaaaaccaaccctagcccaaagatcaaatgtgttcacccttg

SEQ ID NO: 164915 - DNA, 463 bp, Zea Mays
cgctagtgccataaggagtgatggtgacaacgaattggggctaggcgcggtggaatcgaagggcggagagggaggatgcagtgcctcatgctgtgcaattgggagggggcggcaccggcctaaccatccccgatctatgttgctgcctcgcccatctcctattcatgtccattattccttgatcctccaaatcttttaatgcattttcagaggcacacattgttgtttgactgttgcttctcgactgattccatgggtgaggatgagtatcaggattactcgagtggcattgtcgcgcaattgaccaattgtaggattttttttccggacacatcacttatggcatccaatttttggtctggggacaaaagaagccggatatcagatatttcatctgagtatgacatgacagtaatggactacccacaacagtatgaaggatgtccgctgcttcagctcgaga

SEQ ID NO: 164916 - DNA, 1099 bp, Zea Mays
gaagatgacaactttatttatataaagtggcgtcattgcctaaacagaatcagttcattatgaactgatcctagcaaaaggctaacaccccctacacctactacatctactaattaagccggtggcgcctcgccaccgacattgctatcgctgttgccgccaccgtcgttgctgccctcgttgttgctgtcgtcaccgccaccgttgctacacttgcccttgtcgtagtcgccttccttgccaccaccgctattgttgcccctgctactgctgtcatcatcgccgcccttgcccttgccaccatcgacgtccttgtcgtcgtcgctgccgatcgtgtcggtcgcattgccttcgtcatcgttgtcctcgtcctcctccatggattccttcttcctcctcctcggaatcctccgagtcattgaggccagcacgctcgatgccccaaaggtatgcacgctccctcaccgagagccccatggagtcgtctatgcaagcagacgactgggagacaggggacggcggaggagtctagtcctcaaaaagctctaaattaccaaaggcctcggatgggggagtcagaggacgtttcctctactcgcccttgggtctcctccttcccttacctcccttctttcccgtcatcagggttcttggaggaagaaaggaagaagtgaaaaaggaaaaagcaaagacaagtaaagaagttgtcagcgcacggtggtctattcaaagaagcaaaggggtgcctcttagtgttcgggtcgtacaacgaatagtgtccatccctcaagagccgcttgggtttccctagaagactgcacgcctctatcaccctttggttaacatgacatcagtgagtagtaaattaatcgcgcatacgcattattacgccccatcaactcaaacaactattcttcggacaagacagtatccagatccattgggcgcacacattggattcctgtaaaacacggtctgcaagatatcaaacgatagccgtacaaaacgacatactagaagatcggcaggtgtactctggtcaaagtctgaaacaactagacctctatcgattgagttcagtcggctactttaaccagac

SEQ ID NO: 164917 - DNA, 277 bp, Zea Mays
aataaaagaaaaaggaaaggatccatatacatttgtatttgtgctttaaattacgacactgaatgcctgttcgcacagtggccgtggattttttagttctacctacagtattttgtaggaggcaaatcacagctgcagctttaatctgcggtgaacaccccttcaattccatgattatagagcccgcattttttcattcatgtatgaagtgcttttgatgaacagatgtgtccccattttcttttttgtttaatctattggtgaaacaagggactat

SEQ ID NO: 164918 - DNA, 653 bp, Zea Mays
gcacaatgcagggaagagttaatgtgatgaaaaatagcagcaacaaaagaaagtgaagggaaaacaaaaaatcgatctgtgcttagttttatgtcacacacaattcatggttagcaagacattcaatcaactattggtggcacatgtttgaagtttgaacgctattcatctgtcctaaaagtgtagaagcttttaaagcttggctttatgatttttcttgtgcttattttatttttaggttcttacttcttataggctgcttttgtagagccaagtttagactgatccttgttatggtggtagaaagtatttgtatcaaagtcacgacatggaattttatcagcattacaaaatcacaaatgattgtgaacttggcatgatgtgcttatttaggattccaaacatttgaaaatccactccactatggtggacagtttgcatctgatttccatttgtccatggtggcaatagataaactgtgagctactacctcgcggtctcaattccctgctaccccattgttaagccttgcttggtactgcacaatcacttaatctttttgtgtgctaccaaagaaaaacatcctacgaccttacatgcttacgagacaaccacgtcaaaggctcaaactctccttcgttcatcgactgctg

SEQ ID NO: 164919 - DNA, 469 bp, Zea Mays
cccgacgaactccgttgtacacctcgcccactaaggagtggacacggatcactcagagaagggaagtgaatgttccatacaggggaaggaaaacacaacgagcaatcctcccaacacctcctcccttaaaggaggatgagaagaaacacaccaccgtacctgctcctttctaccccgacgttctcttcattcatgggagattggagtcatcacccatctctgatgatgaacccactgtgctgggggaagaacctccgtagcgcgatgctcagcgatggagaaacaagcaccgaaacgtgcaacgacatcacgaagccagagaatgggacccaactcaacccgtctcttgggacgaagccttagagatgggggaaacccccgacgaaagaacacgtcgagaacgacgcaactcccaccgccatgatcgccgtcaggctcaagaacgagagcgggaactaactgaacatga

SEQ ID NO: 164920 - DNA, 428 bp, Zea Mays
caggttctttggcttcagtagccgaagaggtctcaccgccaaattcgggcactatggccggttcaatgtagcgcggtcggtgagtaagaaccttcacttttctcctcttcgacgtgggctcactcagagcagctgaagtaacatccttcccagaagttgcactctttctcttctgcccccttggcgggtagcggtagttaggatacataaatccgatagcatcaaaaactctatttagcctcttctttttttggctccggaaggccgcagatagtgcgttatctttagacttggagtaggctccaagtacttcatcgctggtgttttcaacacacttcagccagtcatcgtctggttcgataaattggtctccaaacctgaaggtatattttaatcgaaccaaaccaccttcgttagggttgctaatg

SEQ ID NO: 164921 - DNA, 452 bp, Zea Mays
gttcattttttatggataaatttaagagacgattcgtaacacactactaaaacaggaccttacacacatattatacattaattgtttttagaaaacagtaaatatatagtacagatattttagcttgcgtcacggagggtcggccgaagcgagccaaccctaacagtttccacaaattatgccggccatatgtcttgatagccatacagcacccatcaatcgaggatggatgtggcatatatagccaaccggcccttttaatttgccacggtgccatcccactggtatttgaaagtacccgctcgcgctgttcatcgccgcctccccgatgtgggactaatccatgctgctttcaattccagctcccagacccagagacgggacttggtgtggctgcgcgagctctgctagccttctgggcctcatactctgtgcagaaaaatggaaggtct

SEQ ID NO: 164922 - DNA, 274 bp, Zea Mays
cggagcaaaccatcggtgacaagggcctccaaatccttcacagtaacggtggagaaaggccacgagtcgcgcggcggaatgacggtcgccttgtcagccatcgccgagcaggagcggtggaggcggaggggatgaggtgcgcggttttttcttctctgtctactctcttaggttgcgaaaacaaaagcagaaggcaagcgcagatggcagggtaaagaaccaccgccggcccctcttccgggtatataaaggcccgggcgagatccacccaaaa

SEQ ID NO: 164923 - DNA, 742 bp, Zea Mays
aggagaccgattggggttatgaggaaccgtatgttagcgatggagccatttggattcgacatcgggtcgtggacacccatatatccatatctaaaacaagccgcaggatctggatccactaccgctccagattttgctcgacacacgtttccttcccttccccttggtcgtttgggtgggtgcaagtgcaatgcagacccgagtctcccgatgtcacccgcaccgcaggtgtccccttgtccccttccgaacgtcgtgtagctccgcctcaccaggaacgagacatatggcaggaggagaggcatccaagggatggaatccgaacagaacgaccgggcgatagcgaccggggctttatcatagtggccaatggagcattttttttttctccccgtagataatcatcgtaatgatagtagtggtaattgcgatggaaggagcccgtgctgatgagcgcggtagggcagggtggattttgtcctgtcaccggtggcagccagcgtgtgtcgacgaccaccaaacagaccagacccatggcatcacgagagtaaacgggcgttgaatccacttgcacacgcttgacatttggagcaccaatggtttcttagtgctttacaccacggtgacaacacggactctcagctgagtgaaaagaactgtatcagtggcaggttctgtctgcataaccatccatgtgaaaaccgacaggagcgatgggaataaactcaagctaatcccagtg

SEQ ID NO: 164924 - DNA, 636 bp, Zea Mays
cgggggctagcctctttagcctcctagcatagtccatcttcagggtccgatatgcctcacgagtgttggcttcctctccttctgccatctcgagactttcttgaagagctgcattttcttccttcaattccttgatttgctgctctaggctctccacccgggggtttaggtgggtgtagtgggagaaaaggtcatcaaagtggttgtcaagggtgtggagatatccagccatgtagattatggtagggtcatcttcattatgctctctccctgacagggcctggagtcttctcctccacgcagggttatttttgttgttgggtgtaaagtagcggaggggtgtctcggagactagttggagttttggcatagttggcggatggctttttgggcagcattctggcaggtgtctgggaagcggtggccaatagaggtgatttaaaagggagggtgatttgggtagcttcgactttctctcatgtagactaccatggagcacttctcgactccattcttgcggtattctgtccagacatacttcggcttcttgtggatccccatgcgaagcgcacaactttgaagaaggtgaggatatccttccacctctgagcaataggatgtcttaaggacaaaggt

SEQ ID NO: 164925 - DNA, 667 bp, Zea Mays
ttttttcatgagatatatacccccttagttgattgattctctctttgttccccatacctctaatgttccagctaagaaacctcatttatgatttttgaaggttttgacggtctccctttcctcttacctttttgggttacaggtaccacaggtccatcctgggccccctcccattcacaattcctatcagagtttgtaattgcctccatggcatattcctgaatctcctcttccgtctgaggagcattcctattgttaatcttttctacgtgtgctttatagttggcttctgcaatagctgccctcaacttctcctcctctttaaaagcatctatttgatcatcatagttatctaactctatactgatgtctttcaaaaccgaggctaaagtttcattatgctcctgattcaaaatagtaaatgtgttagaggatgagataccttgagtgatgtctttctctagagctctcatcgtggctttctccaagattggaattccatccctaggaatcctcgagctggctctggtagctcccatagggcctttcgttgtcgttttcttcctacctcttttgttgacaaccacatcccacttacttccttcctcttcatcagcaggtatttcaccgccacaatctaccatacggatttgttgttcctcatccc

SEQ ID NO: 164926 - DNA, 339 bp, Zea Mays
cggaggagggacgacacaaattgtcaccactatgggaagggccatttgtggtagcagaagtcactcggtcaggatcatatcggcttactcaaatggatggcacggaagtagggaattcatggaatatagagcacctcaggaagttttacccttagcaagatttcaaaagctatcggggtagcattgtattttgtaatcggaaaatacatcatcaataagaagatttcattctcaagggcactcgaactgtttattatcaatcaacacgcttactcaacttagggtgaccactatatccctactaacggagcagtcggcttaagtcggcagtgacttaag

SEQ ID NO: 164927 - DNA, 927 bp, Zea Mays
ttggattactgcatttagtcgttcttcctcgagtatatcgatgtcctccatcctagtagcttcggcttctgctatgctttcgaagatcaacctcgacgctccgaacttgagatcggcgggtaacactgcctccgacccatagaccatgaagaaaggagtgtttccatgcagagctcggctaggttgggttcttaggctccaaatgacgtagggcaattcccttatccattttcctgcgaacttttcattcttatcgaagtcctttttcctgagtgcctccagtatcatcccgttggctcgttcaacctgcccgttggctcttgggtgtgctatcgaagcgtacttgatctgaatgcttttttgctcgcagaaatcgaagaactctgaacttgtgaagttggatcctaggtcagttatgatgctgtttggtatcccgaatctgaatattatgtcttgtatgaattccacagccttagctgaggttaaagaagcaatgggtttgaactctattcatttggtgaatttgtcgattgctaccagtacatgagtgtatcctccttgagctttcttgaaaggtccaatcatatccagtcccaagcatgcgaagggccaagtcactggtatggtatgcagttgctgtgccagtaggtgttgttgctttgacaagtactggcaagcttcgcacctctgaactaactcggctgcgtcattcttcgctgttggccaatagaatcctgacctgaagaccttcccgactagtgtcttggacgctgcgtgtattccacattgcccggcatggacctcatccagaattcgcttcccagtagatgagagaatgcatttcatgaagacgcctgatgcaccccttctgtataatgtctccccaatgagcgtgtagtgagtcgactgtctggcaatacgctcgac

SEQ ID NO: 164928 - DNA, 314 bp, Zea Mays
gacgtccagcgccatatcattgatgatgccagggcagggctgccccggccttcagtggggccggccagaacctagctgcagcggcgatgttacttcgaacaatgccggagccatccaccaccgaggggcgacgtatccagggtgaactcaaggacctccttgaaactgccgctgtccgacgagccaagagctctgcctcccgaaggcgaggaggccccttggagcatcacgcagcgtcctcccgacgcatgtgcgaggcctcggtccacaccgagcacacaggagataggacacctgcagcccgggatcgcctc

SEQ ID NO: 164929 - DNA, 851 bp, Zea Mays
ctactggtatctggccgactgaatgaacacattcagtcgttcttcctctagtatgtcgatgtcctctagcctggttgcttctgcctcagttatgcttttgattgttaatctgggtgctccaaagatcaggtatgctggtaataccgcctccgacccataaaccatgaagaatggggtgtttccgtgcaaagctcggctcggctgggtttgcaggctctagaccacatatggtagttccctgatccattttcctgcgagcttctcgctcttgtcaaacacctttttccttagtgcatcgagtatcatcccaatggctctttccgcctgcccattagctcttgggtgtgccattgatgcatccttgatctggatgctcctctgctcgcagaagtcaaagaactctgagctagtgaagttagatcccaggtctgtaatgatgctgttaggtattccaaaccggaaaattatttcttgactaaactccactgcctttgttgaggtcaaagaggcgatgggtttgtattctatccactttgtgaatttgtcaatggcaaccagtatgtgcgtatatccccgttgagccttcttgaagggcccaatcatgtctagcccccagcatgcaaacaaccaggttacaggaatagtttgcaattgtttgcgctggtagatgctgctgttttgataagaattggcatgtctcgcacttctggactaactctgctgcaccattcttcgttgttggccagtagaacctagaccttaaagctttccctatcagagtctgtgatgctgcatgcacgccacattgcctagcatggatctcgtccaatagctgcttcccagcagccgag

SEQ ID NO: 164930 - DNA, 698 bp, Zea Mays
tttagcaccagcaacacactatgagatgtatcacgtagtgattttgtggttggcgagatcgacgattagctcaatggttcatgtaaagcataacagaacacaaggatctatacaggttcatgccacagagatgcgtaaaatcctacgtcatgtgtgatgatgagatagaattactcctgatttcgaggttacagaatacctaagaactatgctctagctatgcctatctgaggatccaatcattttgtagggatccataacccgcattatatatctcgacgaggttagggttacatgggaccaaacatattactattgatacgtctatatctgtggcaccgactctgactagcatgcaaacatgtgattctgttgacttatcttctctgcctgtgcggaagttagttacaaaatagtcacaccattgtctttgagctccgcattgttatcctctagtttgaacttactggttagtctacaaggcctgctcatctgacctgttgaggtcatttggaggcctgtaaactgaatctggcccatggatacctaggggatatctatccccacaaccccgtgttgagtgtagtatccattctagcgtcgtcgtgtcacccctatcgccctcacacatccactctgccagcacactcttcgcgacctcatttttccggagacaaggtctagccacaggaatgttg

SEQ ID NO: 164931 - DNA, 492 bp, Zea Mays
gtaaaggctcatttgtgtggttatatgtgtgggtatgtttgggtatgtgtggttttgctgaatgaatgtgctattgctgcagatggcgcatgacgaagaggttgaggaccttggcgatctagacggcacgctgcccgacagcatgctgcccgaggcctcgggggtggagttggcgccgccgtccgatgcgggcaagggccccttagcgacccccgcaccgactggagctagcgaggaccccgcgccagcccctgcgccgacgggtgaggacgcctcaaaggcggtgggcgaaccagctgccgaagaccccgcggcgacggccgggccttcgcaggtggcggaataggggttagggattttaagtgtaaacttttgtctgtgtgatactgaacctcggttgctgcgcaggttccgacgtttgggcctgcccaagcaaccgctggtgacaatactgattttgtggcggcctcaaccgtagtgcctgccgatgaa

SEQ ID NO: 164932 - DNA, 676 bp, Zea Mays
ctgtactgtacctcaattacacagcaaatagcatgatggatgcctcgcccaccctggcttcccttcctctcagagaacctccttcccatgttacagatggatgggcaatgcagagccatggtagctgcaatgcaacacacacacaatcatgcaagatgcggccaccaactgcaagtgcatgcgactcggttaccgccgctttgctagcccacatgcaggctcacatggcctccatgctccatccatggtggttggccgcgctcgcttctccaccgcctttgttaattctccaagggacagggtggggctaagatgggagccatgtgaagtccccctcccccctcctatgctttgcagcagtttctgaaattctcttgtaagggtggattattaggctctgccattaattaattctcttgggaagggtggattgctaagccaaatggcaccggatgcggtgcagttttcatactcgctcaactccagcatcttgtacaggtcgctcctctctctctctccctcgcactcgctcgacagcacgccacgtcgccacccctggcgggtagggatggcaacggggaattccccgtcgggttttagctccccaaacccgtccccgcgacaaaaaaatttccccatggggatccccacgaacgcttgcgggggacatttcttc

SEQ ID NO: 164933 - DNA, 449 bp, Zea Mays
caactggattgttggtctgctgctacggaaacatgcctttcagccttattaaaaaaagaaaatcctttatttgtccggggttaaaacgctgggtggatttagtagggacatgagtgtgtggaatggcttatcgggtgtgcttagtttagtttaaatcatgggtttaaggtgtagagattacttgctaagtttacaatgggacctgaaggagcatgcctagtcttttttctcgtgttatatgcttacgagaagaccagttaaggatgtgtgcgctcatgacatctctttgcatgcaaaaatatttcatttttctcttgttgtgaaagcaatgaaatttgaactttccatcaacttcatgagctaattatcccgtggaccacccaatgacaaggtcatagaagaagctgtgcttgaggaagctttgaaggattttagttccatactatctt

SEQ ID NO: 164934 - DNA, 930 bp, Zea Mays
acttaaagttggttctaacaattaatttatttcgtgacggatggagtaatatgaaattatggattaaataaagtcgtacatagttgtcgattggtctcaacatatctaagactaataaaattgtttttttcccaaaaaaaaatgcaggtgatgtatggcaatggtaccgcagtggttcagctcgaacatcgaaagaaaagttggcccaactacactctgaaggccctgttgttcgcttgcgccatgttgttttccgcatacatgaatctttcttcactaacatcaatcaccatcaagatactgtttgtggttgatattattgtcttcttcatcatcaatggagtactctacataaatccgcctgattggggcaatgccttggtctgcatctcatgcctcctcctacaagtggcattgtgccttctgactgtcccattcaacggatgctacgccttcgccatcttcctcgtggtgtgcctgatccttgttgtcactctccttcaaccaaagtttcagcattcagtaaagaagtatgtgctgcccaccttcaccaccaatgatggcaatacacaaggcgacatcggcgatcaagagaatcattacttgaaccatttattcgacatatcaaacggcattgccacttgtggtggcctggtaaccgggatcatgggatacgactcctacatggtacggccggtcaccgcagctggctggcttcatcttcttctccactgtacttctcggactctatctgatgatggtcatagcaatgagagctgtgtccccactccatgccgcctgcctcgccatcgtgctgaaggttctcctcctgctcactatcgttaccgcctcaatctcatttgttcaccactcagtgaccactccaaaagttgcaaactagactccaatcacagaaagaaccttgtcatg

SEQ ID NO: 164935 - DNA, 662 bp, Zea Mays
ccgcaccatggccacacctcaccgtggaggaagcttggcgcaacgaaactcgtggtaaacatcccatcccttgcttgtacttcataccccatcgtgttgcaccaattcgaatggaagatagcttacaagaaccccctgaattgctcaccggaagctaagctccgccgcggtgtcgcgttgggtcgggggcaggtcatgccaatgtatcatccgcgatgggactgccttcatcatgtccgttgtggattggggttgcccgtgcaatggaaatccttagttctagggcgcccgtgcgtggttccgggagactccggtgaactcgccaccgtaggtggtggtggcggcgccgcgctctgcggattgagctggtgatttggggtgagccgttggattgtagatttgcgttgctgattgttcctcagcaaacattgggatagccgctaatctaggtcgtttaatttcgaatgaagggataagattagatcacccttcataatatctgggccacccgaacttgatccgatggtcgttgccgcttaccgattcggcttgatgcgcgactaatctagagcgtcccgggtggatcggacggttgacctacttccgtagacctgggctgtggcagctttatgtatgagcccccgagttatattgaaatcaac

SEQ ID NO: 164936 - DNA, 777 bp, Zea Mays
atctttacaatgttcttgccaccccacaagtcattcaaaatcttctatctatttgtcaattcagcatcgacaactcttattctattgagtttgatccttttggcttgtcgatgaaggatctcactaactagaggcctctcgctcactgtgatagctctaggcctttgtataccctacgactatctatgtcccctccttcgcatccttcttccacttcaccatcgtcctcgccacaaccacacgctctgactacatccactacatccaatattagtatcgttgactcggtcatcctatcctcgccgtattgtccaagctgtgtagtagctcaatcatttcttgtactcggagcgcttctgagcatctttgtcatgcctgttagctaggtccatgtttgccttcctttctctagctcctctcaagccgtgcataattttgatcgcatacactgtgacttgtggacctctcatgtcaccagtgttttgggttataaatattatctgatggttcttgatggacttttcctttgcgttgaagtctgatacttttgtgactcttctcaactccgtttgggtttctactccgtttggtcacactattaaaactgaccagtgtgacggtggccccgagtttgataacttctttcagtccttctcctcccatggtgttcagctccggatgtcttgctcctatacttcttagaatggcaagcctgagcgcataattcacactactaacaacatcatgcgctctttgctcttccaagccttcgtccct

SEQ ID NO: 164937 - DNA, 558 bp, Zea Mays
tgttttttgtagtatcctttaattataaacaattatagtttcatctagttataataaacttaggtactgtaaaaacatgaactcacattatgaagcttgtggaggacaaatgaaccccttagtaggccccacccccctccagggtcctaatatccctcctccaaacaaattcaccattcccaacttaagatcttatatctcgtagcctagatatgttctctatggttgtggtcagcagaccgtgcatatagctaaacaaaactttgttttgcataacatatagcactatttacggaatggaatttgaaatagaagatgagataaggtcgttgaacatcataatgagtcgctcgacaccccagcgccaccgaaaatagagatcacgatagtcttaagtggaagctaagaaggacgagttgccaaaccaagagtcaaaatctagaggtgtcaaaagaaaagctcaagcaaaccaacaggatggggcaggaagcgtcgatctctagagtaaggacccaagaggaagctttcaagcggccactggaaggaagggcctgtaaa

SEQ ID NO: 164938 - DNA, 746 bp, Zea Mays
gtgccctcccttttatagtccaaggggggcacatacaaggatactgagccccgacatgtgggcccagggacaaaacgagtgcagtacttggagccatttatccagtgcaatctcctcgtgctctgatctctatgatctcggtagcattggcttgcagcaaaagtttccctggcaacgtacaaatcatgatggccacggcgcgtgcgtggtggtatgggcgtacgcccgctgtctgattggacaggcatgccgcctgtagggtggcctagttgttgcctgccagaggagcagagagagggtgcattaaatgtcgagccgtcacctcgcctgccagcggagtggacggggcgcattaaatgttgtgatggcacattgcttttcaggctgcggggatccttccgtattaaatattgagatagcgtagcgtgtgatgcgcgatgcggctcgcggcacgtagtccttacgtcgggcttggccctactggcttacgtcacgggcagaaggccacgtggcagcatcgggtctctgcttgggcaggaagctgagtcgtacatgatggggtccaggcatgtgctagcgccggacccctgcctggcctttgatcagggcttaagcatttttcgtcctggtgcacccggaccccatcgtgcgcggcccggaccccttgcgaaggggactggttcccaccttaggggcctagtacgcacacgtggaggtctcggacctcccctgggagtcctgcccgc

SEQ ID NO: 164939 - DNA, 749 bp, Zea Mays
aacttgttgcctccacaaaggggcaagtaggggaggcaccatcgccaacatctgagaccaccgccaaccatcagcagaggagcggcagcaagtgccaccacgagtccgtcacccagaaggtgtatgcggcagagcctttcggctcgttggacccctcgtggttgaaaatcccaatcgcgttcgaccgacgcgatcacctaggcagggtcctgcatcccggaacctagtcccttgtcgtcgaggcaatcgtcggcccgaagcgtctctccaaagtcctcatggatggggtgagcggtctcaacatcatgtatgttgatactttcgatgccttggggattgcacgccccgcgctacgccccaacaccgcgccgattcacgacatcatgcccgggcacgacactcgcccgctcgggcggatcattccatctgttacgttctgagacccctctaatttccgcaccgagcagatgcagttcgaggtgatgaacttccctggagccgacttgcaggctggatcggacgctcctaaggctggttccgatacattcaaatccgcaacgttttcgcttgtcgacgacgctcctaagggtcccaatcgacgacgctgacccctccaagcacgttcgaattggggcaacactccccgacaaacaagaaagcacccttgtcgatttccttcgggctaatcgcgacgttttcgcttgtaagcccgcggatatgccggggatccctagggaggtcgccgaaca

SEQ ID NO: 164940 - DNA, 684 bp, Zea Mays
cgacgagcgattgccggcggcaaaacaactatcgttgaataattctaggcgcgaacgaaagagaaggaacatggtagactcaagacgggactcacgacgatcggagcgatgaatttgaccttccacgcttccccggcggcaatcctctccgatggccgcccctctcggttttcccacggtgttggtgctcgggcgttggtgtgcgcaaaaggggcgcggggcactgcactttatggctcgcggtatgagccgcatactagggcagcgacggttgaaacggccacccgagaactcaggcaatggggggaagaaggcgagatctgcgcgcagctcgcaacaagttgaggaagagacgatgctaacgattacgggtcccacacggcggtgactgaaagcacaggagcacacacggttcggtttcgaggggatcacagggagtcttctgccaaggaggacccaccagtcggcgacggtgagacacccctcaggcccacatgctagtgaaccgcgcgcgggtgttacagcgactgacaagggatcccatccgtcagcgagtaccggggtgagcgcgagcacgtgaggatgaaaggcgggcccagatggcagcgctggcggtagagtgggctgtctgggcgcacggtataaaggtaaggtgggccgaatttgggagagtgagcccagttg

SEQ ID NO: 164941 - DNA, 637 bp, Zea Mays
ccagaatttggcggtgagacctcttcggcgattgaagccaaaggacctgctcttacgcagaggattgaagagccggctgcaatgccgaaggctgacaaaattgaagaaccgagaaccgaagggacgaaaacatcagaagttctaagcccttcggcaggagtggaggcgccgaagacacaaaaagatctagcagcaacccccaagagaaaaaggatggctagtgtattagatgtgctggagacgataaaaacttcaagctctactccaggaaaaatttgttaaagcttcgaaaatacagattgaaaccaagacaaagctgaccgaagccgaagctatattgagccaggccaacgccgaagctgggccttcagagcccgccaaggagaaatccttggaaaccggagaaaaacagcgaaagaagaagctgtagaacagattctgcctgaaaaagctgccactcctactcccgaagcgccttccgaagctcttgattatattattcgacacgcttcaggaaaaagattatctgaagaagaaatttttgaagctaaacactacgcccgagaactgaagtacccaaaaggggccttagtgttcaatggcacagatgaagatgacttcttgtattgccttccgg

SEQ ID NO: 164942 - DNA, 700 bp, Zea Mays
tgggtctctatatatatgtaacaatctcctatgcaatacaacaagggatttcccacattcttatatggtatcagctaggtctttcttccctccaccccacatccgccagccccgaggtcctttccctacagtttcagcgttattgtccccgagaggctcatccttccctccagtggcagccactcatcccacgctagccttcttccccacgaccggccttgatctgccccatctgtccacaccatcgctgctcctcatggtgatgccctactctcccttcgacgcggccgcgtggctctcccatctaccctgcgcatttggcggccgaccctgacccttcctctccctaactgacggcgtggctgcccctctccaacaacccagtgttgtggcccctcgtctcctactcccctgcatgtgtccgtgcatcgttgccaggcatcctctcctctagtcgtgcctccgccggctgtcctccacctcccgctaccacctgcagcactaggagcgtcacccctgggagcactgcaatcgtggaagcttcaccctccctgcctcggtcatcaccgcctcctctccttggccgaccagacgactctcctccttgggcgccgccatcttcccatcaccctaggcaccgcgaccacgaccatgcccctccgtggtcaggctccctatcccttgtcgtcgcacggccaac

SEQ ID NO: 164943 - DNA, 366 bp, Zea Mays
cccatgtccaccgaagatgacttgacttctccgtcgacgtgcgggaacgctccacctcctccccctcctgctgttgaggttgtcgaggttctccgggtccttctcgtggtgggggaggtggcagaggttggaagggtcggccgttcccaacggagtgcttgaagtctctacagttcaggagggtgtggcgcatgtccttgtggtacgggcactaggcgtcgaggatgtcgtccaatgtacgttcgcctccgtgaggtgctcctcgggcgcgagaggcgggtggtccggcggcatggacttcttcgcgaggcctcttctcccaacgcttgtcgggttgttggttcgtgtcgcgtcgtggtgccgctg

SEQ ID NO: 164944 - DNA, 980 bp, Zea Mays
ggctgacatgcgggaccagctcgccaggctgactccgctgcgcgccgacagtgggccccttagggtagactcacatgccttgtggcaccgactcgcgcgtgcctctacgcactgaccagtggggtccctgcgtcagctcttccttctcccccgcaacgaactgcgcagaaatcgccgccattactgggaacgtgaacgacctccccctctctccaagccgggaccccgtgggataaaggagcgctcccgtgacccattcttgccctgccctcttctcgcgcgagctcattttccccagaaatgcaccgccaccgccgacagtgctgcgttcgcggaaagggtgagatctgccaccatagacccagccctgtatcaccgattggtggccagtggggtgtcgggatcgttcattggagtgtggggattgttggtgtgaagtattacgctcagtcgtccgcccaaacgcccgggattcctcgccatcgctgcatctccgccgtgcgtcgcaggtggcttcgttcggtcctcaattccggtgagtaaacctcataccacttacgcccgtccgctgcgatggtgtagcacccgacagaatcaagaatagtgcactaaatcactgggtccatgactccggcgatggcactcgccgcgggttagtgtgcgccgccgtggcccctccgtcggagttgagggaagggtcctgcaccgttggatcattgatggacgatgtagattagattctgcgtacccttttgccaggttcgatctggtccgttgatctggatcgggcggtagatcgacgaccagcgatggatctggatctcataaaaccgtaaccgtcgatctcagatcctgcgatcctggatacgtatcggttcgcgagaataataatttaatctggtgcgcacatcttggatcggacggtctcgtttagatcttaccccttcggccctgaaaacttgcatgagtccctgtgtttt

SEQ ID NO: 164945 - DNA, 701 bp, Zea Mays
catgaacatggtatagagatagaccctaaccgaattaaatccattcggaatgtgggacctccgacctgtaagcttgaagtgcagaagttcctcggcaagataaattatttacggaggtttatttctaacttagccgggaaaatgatgccttcactcctatcctttggcttacaatgatgttgaatttacctgggggcagaacatcaggaagcatttgatctcatcagaaagtatttgtcttcggctctcgtgttaaaagcgccacaggtaggagtatcgttcagattatacattgcagctgaagataaggttattggagttgttctgacgcaagaggccggaggaaaggagcatgtgataacctacctaagtcggaggctggtggatgccgaaacgaggtacacttttatcgagaagttatgcttatgcatgttttatgcatacaccaagtgtagatgttatttactatctagtcattgcaccattgccggtcaaaccgatgtgatcaaatacatgttgtaaaacccgattatgagtagtagaattggtaaatgggcttatgcactcatagaatatgtcttggcctatgaaccattgaaatctatgaaaggccaggtcgtaacatattttattgtagaacatcggattgatgatactcataaactagacatatcatacctcactgttactccctggacttt

SEQ ID NO: 164946 - DNA, 651 bp, Zea Mays
tgaggtcaagtttgatgcgccatatcttcgaatcccctcggttttgacccaaatgtcctgtataaggattgaagactgttaaatcaagaacaaaccttattaaggaattttgcccggttattcacaagaatcatgagagctagttggtggaagggggacggttcaggcgactgacgaagatgtgccatggtacagtgccccgatggatcagaccgctagctaagctcgccgtcgatgatcaccgtccggattcgtgcatggtatagaaggataacgccgggaaaagggtgaatcgtacgtggcgccatctcctgtgctcggccggagtaattcaccggcggccatcgcgtcaatcctttccgccgcggtgtcctcggcaccgtgattcttcctcactgtaccaattctctacgtgcttggcatgcgcttgtgatggtattcgagccgtgaggtgatcgccggacctccgcggctataaatagcccatggttcgtggcgaggctcggtcatcacacacataccagtgaaccaaatcaagtcaaattcgcactgccctctccacctttgcccaaattgattgtgcacagtgaaagcacagcctcttacggtcctttagccccgatcccatctcccaatttcgctcagagccgc

SEQ ID NO: 164947 - DNA, 532 bp, Zea Mays
gcgacaaacaaatcaggtgctcaaggtggcggataagtggttcctctcgcacttcagggtagattgccaccagaaggccgtccaagagagggagataaacgccgagtacatgtcagccgtgctgcaacagctccccacgataggtgatgccaggttagctgatgatattccatttattaaaatttcttttgataattggattaaatttatcatggaggatatagaaaggatggcgcatgcattaggaaaaactcacatgcctaattttttatcacataaattaggcgtcaaaataattaagccaaacacatcggcaacaaatgggtttccccagccatattctggtatgccgatggactcatatccaggacgacgtcaccaccatcttcgctaaatggtgagtcaactatgagcacggtcggaccgtctgtacacaatcgcggaccgtccggccctccatcacaccgtccggcaccctacgccggacagtccggagttacacagagcccaccacaagggtcacaggtgttgt

SEQ ID NO: 164948 - DNA, 423 bp, Zea Mays
tgatgatgctcaggctgctggtggtgtgcttgacgaggatgaagaggaagaagaagagattccaccgatccgcaagaacaaccatcactatagaggcagcgacgggggcagcaaaattccctcccaagccttgtcagccctcgtcagccttcaagggctatcaatatcagactttgatcaagcactagaagaggtcgtccccgaagatattctatcagagcctcctgaggctgacattccaaccatatgttcagaggtcccagatggtggtcttatgctgcatgattctgctgggcaagaggtaacccgggtggtatcttgtgccttgtcgaccttagaaggcagtcttccttgcaaaagcgttgatccgagtccttcagctcctaaggacatggctgagggatcttcagccctagaggtggc

SEQ ID NO: 164949 - DNA, 771 bp, Zea Mays
atcacaagtgccctgcttgcggggtttttctgttggaattggatggcaaagataccaggacaactaatgcactggcagaggaactgggcatatcacttcatgctctcactgggattgacatcgccgacacactgaaattgaaagtctatcaatggtgtggccctcattgctcttgtggattcgggatccacccatacattcatccgcgatgctattgtgccaagactgggactgcatgtgactccaacagctgaactgcctgtcaaggttgcaaatggtgagaaggtgttgagtggggacgtctgttctcagaccccattcactgtcggcgaagagacctttaccacaacctgctacactcttcccctggatggctttgatgtggtgctcggggtggaatggttgcattctttgggtcctttcatctgcaactttgagaagttgatgatgtctttttggcgccacggacacatggtgcgtggacaacttgttcgataccttgctgctatcctttgaagacctcttcgtcgagccccagggacttcctccacctcgccgccatgatcatcgcatccgtcttctgccagggacagtaccagtggcggtacgaccgtaccgctaccctcagttgctcaaagatgagattgaatgacagtgtgaccagatgatgtcccaaggtatcatccgggagtgtacttcggcgttctcatcaccagtgctgcttgtgaagaaatcagacaacacatggcgcttctgcattgactaccgtga

SEQ ID NO: 164950 - DNA, 382 bp, Zea Mays
agagttcttcctcggttgtcaccgtggtggcctcgtccgtagcaaggagagctcacgtcggagtagatctgctaccctcggccacgggtcatcacaactggtatcaaagcctttggagtcggcgttgggaagaggaggcgccacggctccaccagcgaaaccgtcggtacaaactcgtttcctgcttgaggcgatggatgagagagatcggttggtgcaggaaaattgggatcgcatgttcgagtcaatggaggcgatgactggaagactgaaggaagttgagcgggtgcaacaacaattattgatgcagtctgagttggcggctgtggttgctgaacaagctgcaactgagaggaatgatttgcaccgcaaattggaagag

SEQ ID NO: 164951 - DNA, 866 bp, Zea Mays
caccactacaacagataatatggtttcaggtgtacctgctcttcagtggaaccattagcatatgcatctgggattttttcaggaggaagaatagcctatatgcaaaagggacaaaaacttcaataattaaatatgtgaaacttcaataactcaatatgtagacaaacaaactacttgcacagaagaaaaatagtaaatgtcttcaaaattacctgcaactgaatcatgaaaaatgtatacatcttcacatactgcacgttataaaaatcaccaaactgaagtgctgcaacctgcaaggtagctacatatatcagagagaattcaaaacagaacttctccaattggtcccaaacagaagcgtcaggtttgtgtaaaatatcataatatggtgtcaggttaatgtaacatatcataatatggagctcccaaacattgtataaaataaattattctcccatttgtccactgaaattacaagctatggctaaactagacacaaaaaatcctaggtgtcccttacctctgttaggcattgaagtgtaagattctgataagcagccatagggaagaacttcagtaatgtctccagctaaataaaaaataagaagaaaaaaggtaaggctcagcattttttgtaggcacggttggcattcagtcactcacaaagttcagccatcaacataccaacggtgactcaaaaatgaatccaattgggatccatgataagaaagcatggagtgtcgccaatgtagcacggatgagctgtggcctttgcgttgcagataagacatacaagcatagctcatgaatgagccggaattcactgaacaaagaaaataacatataagttaaaacagaagtatcct

SEQ ID NO: 164952 - DNA, 770 bp, Zea Mays
cgacttttgtaaacaagaccctggagaccgatccaagaaatgaaatgatcggtctattgaaggaatattcggattgctttgcttggaattacactgagatgtcgggattaagccaagagatcgtagagcatcggctgcccattaagtccgatttcagacttttcaagcagagagctagaacatttcatccagatcttctcccacgaatccaggatgaaatccactagctgctagaagctaattttattagaccttgcagatacacagagtgggtctccaatattgtgccggtggagaagaaggagtcaggtaagcttagagtatgcattgattttcgcaatttaaatagagcaactcctaaagatgagtatcccatgcccatagccgacacattaatcaataatgcatcagggaatagaattattagctttcttgatggtaatgccagatataatcagattttcatggccgaagaagatgcgtctaaaacaacctttatatgtccaagcttcattggtttatttgagtgggttgtcatgacatttggtctgaaaaatgctgctgctacttatcagagggctatgaatttgatctttcacgagctgttgggaaacactgtggaattctagattgctgatattgtagtaaaatctgttgagtttagttctcatttagctgatttgcgcaaaacctttgataagatgcgtcggtatggtttgaaaatgaacccacgtaaatgtgcttttggagtgtcggctggtaagttttta

SEQ ID NO: 164953 - DNA, 605 bp, Zea Mays
ggagatatgccctagcttgtgagatatgcgggcgccaagtcagtctgtcggcactgttctccagtgacaaaaccaatgtcaaaccatgtcaaacgacctcggtttgaattcaaatttttcagggaggtgccttgggtgatttgggtactttttgctatttggtccaagtggttttggcgccagcacaaaggtgaacacctttgatctttgggctagggtggttttgggacttagcaaatttttgaaaggctcaagtgtgttcccctcttggagaattgttttgaggtttttgttgggcctttttgcaatacttctcttaacaaagtttgtaggtttactaatactcttcaccttagtaaaggtccctttttgtgttttgatcatttgcccactctttcccctttaatcccatggttaggatttaagggcttaagaaggatttagggttttagaatcctgtttgtgggtgaacattgtatgaaggatagggctctctttcttgtcaaggttaatgcctatcttaaccatgcatctaaaactttgagttccttcacttcccattttagcatatagtttaagtaggacacaattgtgcttgctctggg

SEQ ID NO: 164954 - DNA, 790 bp, Zea Mays
tagactgctaaaaccaaggtcttaagtttaataatttaacattacatacagactgcgggttgatttcatagtaatccgagggtttatttgtaacagagatcagtgaaggggtatcgtactatcgcagcgatccgattagcctcggacggtcacgattagatcgccacattggaatattcctacgccatcacagccacatgcgatagaatcaacgactctgatttaatgtgtgggagagaatacagaaatgatcgatccggccctccgtttcaagatctaacggcccagagtcaagcatgaagcggtacgtggcttctaatctgcactgttaattcacatccgacggtcacctgcattcttcctcccagctaactcccaggcagccgcgcgcctgctcctgcggcggcgccatggccggcctatctgcccagcgcacaccgcgcggtgatgggcacgccggagtaaatgtgccaagctcgcccgtgcccctcccacttagagattaacaggtgctacacgtaaaggatggcatggcaaatagctcgatgaaggcttactgtgtattacgacgtcgaaccgtcagatccgtgcggtgtggttctcggcgtttggcgaagtccgacgagcccttccttggtgcaacgtcgcatcccacgcgtggtgatcacccagaaccctttgaacactcccaaacgaatccctccaactaatccccgtactctgagcgctgatgaaggttcgcgtccatggcggcggctgggcgtggtccgaggagaaaagggagtggcgg

SEQ ID NO: 164955 - DNA, 786 bp, Zea Mays
gacatagaccgcctccttggcatggtgcacactggctcggtcaggcccaggcctcgatcgtcctggcgttggcacgaagcatctgccccggagcgcacgccctcggtgaggactgccccgcctggagatctgcgaacgaagctcaaccgcagacacgcagaaggagatgtgcgggtccctccagagggaccaggagacctgagggatgaactcaaccgcagacgtgcgggcagagaagcatgtatctctttggagaagacgcgtgagcgctgcgacaatctcgggcaagattccatggcggtcgcgccgtaggccctaggggatgctcgattccagacaagcatcccgttggctagagtgggctatgctgccctagtggaccacctccgtgcggtgacatggccgcccaagtttcagccacatctgccgaaaaaatacgatggtacgacaaacccgtcagaattcctgcaggtttatgtcaccgccattacggcagcaggtggagacaccgccatattggcaacctacttccatgtggccctgtctggaccagcccggacttggctcatgaaccaagccccaggatccatctgctcctaggaagagctctgtgcgtggttcgtggcgaacttcgccagcgcttaccagcggcacggagtagaggcacacctccatgcagtgaggcaggagcccggggagaccctctgagcgttcatttcccgcttcaccaaggtacgtgggacaatcccccgtatctcggatgcttccatcatcactgctttcctc

SEQ ID NO: 164956 - DNA, 489 bp, Zea Mays
tgaagcgcgtgggcgctgccgcgcgtgtatactagtggaagaagacgatgtcgtggccacaagatctgaaatggacgaccctgattagatccgaggataacccttcgtcatattaaatccaaaccaccagtctgggatctagcggatctggttgggtctgggagatgggggcattttggccgttggatctagatccaaggctctgtgttatgcaccgaatcgatgtaatgagcttctaatctggtgcgtgggtgatggatcggatggtcctggtcgaagtgtacccctttggcactgcaacttttctaaagagcccctgctctatatagtaatcaacccgcagttcttatctagtgaagaaacatcacggtttggaccagaaatttacagattagaccttgaccgtttgcaaaattgtgtccctagtccaaaactaatagaatattcataatttaaatcagaaaaatgattttctttgtataaataaat

SEQ ID NO: 164957 - DNA, 836 bp, Zea Mays
gaagtccagaagctgttgcacgctagatttattgaagaggttcatcccccagtgtggctggccaacccagtcgtcgtgcccgaaggccaacgggaagcttcggatgtgcatcgactacaccagcctgaataaggcatgccctaaggacccgtatccactgccgcgtatagatcagattgtggactctacttcggggtgcgacctcttatccttcttggacgcttactctagtttccaccaaatccggatggctaaggaggataggaagcataccgctcttgtaacagtagatggactatactgttatgttgtaatgccctacggtctgaggaatgccttgccaacctttgtacgggcaatgagcaagaccttcggggacctgatccgggataaggtgtaaatttacgtcgatgacatcgtggtcatgactagggaagggtcggctatagcggaagacctggccctggttttcggcaagctgcgggcaacccgcaccaagctgaacccggagaaatgcatcttcggtgtctcagcaaggaagttgctggggttcctggtttcataccgaggcattgaagctaacccggagaaaatcaaggctattgaggtaatgaggcctcccactcatgttaaggacatccaaaagtttactgggtcgctggcagcccttagccgcttcatttcgaggttggctgagagggcgctgcctttcttcaagctcctgcggaaatcaggcccatttgcctggtccgaagaggcagaacaagccttcagggaactgaagcagcacttagcttccctgccgatcctggttgctctagagccaggagaactgc

SEQ ID NO: 164958 - DNA, 517 bp, Zea Mays
ctccattagagctgacaatcattcccaaaacacttgtgcaacaccttcaagccattaagagagattcgaacgccccatttgtgtagaggtagtcattttagagagtgttctcttgtgatatgtgttcttggtgttgtgttgctgtgtttcttgttgatgtgtgggtgatactctattgtaaaggctagcaagagtctccaagtttgtggagtgccttggagagactctgtatcttattttacaggatctaagggctcatgcttgaacgatgggatcgcttgagaaggtcaagatataacccgtcctttaggatacctcaattgggatgtaggttctttggaaccaaaccacggtaaaaaaattgtgtgtcttcgtatgttgtttacttttttgcagtgatttgttcgtctctcccccttctaagttctcttattttagttctcattctaagtcacttaagttgctctccaaattaattccacatctataagagcaagaagtgcaagagaactcttgt

SEQ ID NO: 164959 - DNA, 789 bp, Zea Mays
acggtgtcgcgaaaatttctggtggacacagggggtcacagtggggctatacaaccgtaaaggaccactgatttactgcaaacaaccaatttggagagaggaggaagagacactgcgaattttggtttttattcaagctaactgaagaatcgtgagcaccccgctgtggctccttgcttaatttataggcacggcagtctggtgcttgatccacggccacgaggtgcgccgttagcgcacgacaaccacgtaaggaagaggcacagtgagatagagtggtggcgcgagtgacacggcgacaattaccacgccacgacgatcaccggcgagaagtctccggcaaggcgccgactaggctcgcggaaccgtgaatcagttcgtcattatcttgccgcggtcgatcctatctccaatccatatgatcccatccaaatctacagtaccactgatatttcgtgagccatggatcttcaccgttccactgaaccgatctcctttctttccccctttctcttgattcttattaagaacaagttaacctctattaataagagttattcaccagataatggtcttcatctttactataggatttatggatcaaaactgcctggattctaagatacagtgctcgcaatctggccatatttcactgtgaccatttcgttttggaattcagtttacagtgacattataatcagtgtgactaagttctgacagaacaactttgcatcactggttcttcaatttctgttcaacaacctagaaagatgactgtaccaaaattac

SEQ ID NO: 164960 - DNA, 343 bp, Zea Mays
gtttcgggttatgggttttttgcccagtcctagatgttaatctccccctgctaatgcacccattatccaggggttagtgcttcacagagcgtaggcccatcgttccgccaacaaacaagtcattgatttcactgccagcggagggtctgcccttcttcaggatatacgcttccaaaatcctacattccgtgttcgtgatgtcaggattgatggtaatcgcttctggactctccttcatgttgatttctataattcagttatccttccaaagaatcaccagcccatcctccatcagcgttttattaactaggatggatgcgaagccattggtgatcctaagatg

SEQ ID NO: 164961 - DNA, 740 bp, Zea Mays
gtcgggctgggacttcaacgccaaattgaagtccgctgtgggccaaatgtctgtgcacgccatctttggatttcttgttgatagtaggggagcgccgctgtttcttccctaacccatggacagaccttcatcgccttatcgccggtaagtagcccttgtccatgtttgttgtcatcgccccgtcgtgtacccctggtcagatcggagtttcgggctgtggatcacggaaggatgtgttctcggccatggcttctccgtaacagagctggccgccaccgtagttgcttcggtcgggcgattgtaggagatgaggatgaggggatagaatggccgtctggtgtataatcggcggataagatcaaatcccgcattcctattcgctacggggaatttcagccgttgatcttgcaacctacggtggatattagacggaggcatacccattcgttccttagatccgcgttgttgatttggttggttgcggctcggattagatcgcgggcttattaaaatccggggcattggatcgagattgagcggttctgcgaggtctgcgggattcataatgcactagatctaatccgaatcatcgggcgttgatccaacggcttagatggcctcgtacccccttcgcggatacaatttgccaaagagtccctagaatactactgaataaacccatcgtcctcaactggggcgcctctgtgtctcaatttttttagttaagccccagaattctt

SEQ ID NO: 164962 - DNA, 947 bp, Zea Mays
aggaattggaggtcgtccccatcggtgaggtcgctgttggattccgatacaactgcaaagtcccatccatctgcatcccagtgcaaaggtgcctgtttttcatatgccgctataggatcccactctggggttggttcacggctagaagaatcggagacaaaagaagcaaaggaatcactcggtgatgtcgacatgggtaaagctaagcgccatagttttttctgagttgcgatgaatggaaatgtggccgatgaccatttaaatacattcaaatcgagaactgagttgacgtttactcgaacttcgaggagcaaagaggagtcaaaagtcgtcgcttcgtgttcggcgattgccgtttcaattctacagggacagggacagttgaaaagacacaactgttcaacatgaaacggtctccacacggggctgagttaaggctacagggacagttgaaaagacacaactgttcaacatgaaacggtctccacaggtggctgagttaaggtgccgctagtggaaagaagatttccactggcggttcgtaagacaaccgccagtgctatgtttttcactgacggtttcttaagcaagtcgactgtgaaatttgtattataaatacccccacccccgacaggaatagctagctcgcagccaacttccattggaggcgattttggagttccaaattatataaaatacaagggtcgaggttttgatcttcattttttggaggaaggttgctaagaaaggttggttttatgtttcattgtcaatttttgttcatattatttatcattttagccaaattttgtatctatgcttttataccatgtgagagagaagtgtgtagccattcgtacgttcggcttatgttagaagaggacataagtgcacatgaaagctttgtgcacatggtgcacaaattaaatcaccactatccatctcag

SEQ ID NO: 164963 - DNA, 362 bp, Zea Mays
ctcgcaatccctggcgaaagagcgtgaatttacaacccagacgatagtcgtatctcgttccatgatttcctgctacaagcgattaacctctgctgacagctcagcaatgcggcggctttctcgcgcacgctccctatttccatggcgtagttctgacatgagtcgttccaccctggcctctagatcccctactggatcattccttccgctactgctcccctcatgtcgaggagccaactggtgccagggcacaccacgaggtctggttgcctttctttcggtggtcttggtacgcgtcatacctccataagaggggaagattcatttagtatagtttaaacattatgcatgcataacctaat

SEQ ID NO: 164964 - DNA, 601 bp, Zea Mays
caaaggccaagcatcacgctaatggcgcagagtacgttacgatcgctgttgtctgacagtcgaacaaaaccacctacggatacaaccaagcacgtgtcttcggcacccacacattgccgcagcaggcgaagtccccatctcatttcacaacaaacaatatcatagtttacatacacacagcaaaaggccaccagccacattgcacaaataaatacctatcttatcttgttaccctccctctttatcgcaagccaggggagggcagcgttttcactcactaccgcaatacaagagcgagggcagcataaacgctatattggctcagccttcgggataaggcctgcctcacgaaaattaaacaacatcaccctcaactcctcaccctaaatagactccgcagatcctcctccccaatacacgtcccggacgacgaagacatcaaatctcgttggccatcctgatctagccgaaggcgggtttgttccatccccatccgacgatgcctattactctgcgacataccaccaacattatgcttcgccaccacccttcgccggtggtactccctagtcctcgcctcagctggggaatcggatgctcc

SEQ ID NO: 164965 - DNA, 844 bp, Zea Mays
tcccacttcaaattgtagatgcttcctccacttatcatgatagctcttctgtagggcctgggcagcttccaagttcttcttaatgactctgactttattctcggcgtcaagtactaggtcaggtccaaatatttccctctctctagcttgtgaccaatttagcggtgttctacaccttctcccatataaggcctcgaaaggtgccatctttaggctggactggtagctattgttataagagaactccgccaacgagaggcacttatcccaattcttcccatagtgcaacacacatgcccttaacatgtcttccaaaatctaatttaccctttctgtctgaccatctgtctgaggatggtacgctgagcttcttattacatgggttccaagtgactcttgcaactgctcccagaaacgtgctacgaacggtgctcctctgtctgacacgatagtccttggtattccatgcaaacgcactatctggtcaatatagatttctgcatacttctccgccctgtgggtggtatgtactaacaagaaatgagctgtcttggttaacctatccacaatgacccaaatagaatcgtggtgtcgggatgtgttgggtaaacccacaataaaattcatgctgaggtcctcccatttccaagatggtatgggaaggggctataaggtacctgctaccttcaaatgactagccttaattctttggcaagtatcacatttagatacatacttagcaatttccctcttcattctggtccaccaatacaaggatctgagatcatgatacatcttgttactgccggggtgcatgaaaaatttggaaagatgagcttcatcc

SEQ ID NO: 164966 - DNA, 523 bp, Zea Mays
cccctcgccgccaggaatatccccccagggccgtggaaacggaactcgcggacggggccggggacgtgcgcaatcgccgcgccgattttactgcctgtttcacggtgaagactgcgcccatcaaaccagagactgcccagagacgaaggccaccagagacaggatggcacgggcgcaaccagccgacaaccctagggttgtcgcgcacacatattagcagccccctccaccatacatccacgccctcgctccgcatccaccgcaccacgcataccaacaccaccaggaagtacaaattgtacctccctcacccccacctccacatcagcaacaacaaaacatccaccacccccatgccccaaaacaagaggacttcgccgatcagccgtatcgcggagtcattcatatgatcactggggggtcaagcaccgacttcgacacgaagcggcagaagcgggaccactaccgcagcatcaacctcatcgccatcatcggtccggtcgtgcagacgaagtggtcccat

SEQ ID NO: 164967 - DNA, 495 bp, Zea Mays
aagcactggagggaagaaggtaggtagtctcgcgagtccatggtgtaagcggtcgtgctagtcggatgcccaggccgagtccacagagtacaagaagaagaagaagctctagcgttcgtctgacctacagtcagtaactgcctaggccgagccgaaccccgatgatggcgtggtggatgttggtttggaggatggtgtggaaggtggaagtggggtgaaagcgactaggtatgtggaggaggaggaagatgatgatgaggacggagaggtacttccgttggtttggcacgaacgacgctccaaggctcgaagtaatacttcgagtcttgctgcttgagcaaagatggtggaaatgcagggtttgtctatgtcggttgttgatgatatacttgaagaggtcgttcctgatgagctgctgcttgagttaactgaaatcaacaatattgatgtccgcatagattgccaagatgaggtacctttcgctagtttgctggt

SEQ ID NO: 164968 - DNA, 685 bp, Zea Mays
aaggctgttgaactagtcttccagctatcgtacctcctgacagtatgctaccatcttggggtcgtgacattccgactccttcattacttgtcctacgacaagctgagagtcccctcggacggccaaatattggatgccaagatgtacgacaatacgttggtcgttcatgagggcctcatactcaaccacattgttagaagcttgaaaacagagacacacaatgtatcgcagttgttctctcgatggcggcataaaacaaggccaccgccagctccctcctttgtcaatgacccatcaaaatgcatgatcaaacatttcttggtggtcagtgctggttccatttgggtctcggttcactctacgatgaagtcgtcaaggacttgtgatttgatcgctgtccacagagtgtaggagatcccatatcccatcaactcgagatcccatttggcgatcctcccaaaaatttctggatagcaagtcacctcacccaggggaaacgatgtcaccaaagtgacaggatgcaatttgaaatactgcctaagcatctgtttagtgattaagacagtgtacaatggtttttgtacctgggggtagcgagttcttgcgccggtgaggacttcacttatgaagtagacggggcgctgaagcggtcacgcaccttctccctcccgcctttcgatgacga

SEQ ID NO: 164969 - DNA, 567 bp, Zea Mays
ttgcaatatacatattccctaaccctaatgggatacatgggttgggctcgaggcccataacatatagacacacacacacatacaatctaacccctagtggaaactctagccatgacagattgagactggaccaaaactctgagaacaccgaggaggatggaagacccttagtgaagatgtctgcaaactgcgagctcacgaacgaattgaagatcgatgtcaacatgcttcgtgtgctgttgctggaccaagttgatggagaggtagacgacgttgacattgttgtagtagatatgtgtactcttggtgagaggaatatggagctcctaaaggagctagcggagccagttcacttcagccacgccgttggcaacgacactgtacttagccttagcgtgggaataggaggccacatgttggcacttgaaggaccaggagatgaggttgttcccaaggaaaacgatgtagccaaaggtggaccgttgggtctttgggcagcctgcccagtcagcatcggaggagcagacgatcaacacaagggtggggtgtcgaaggagaagttcaaag

SEQ ID NO: 164970 - DNA, 744 bp, Zea Mays
attattcaagcactatagagcttgatatagttgttatggccacttggcgatatataaatatataatgccacacaacatagtcaaataaaatatacagccaaataaaattgtttaagaaggttgcgtataatgtggcttcaggggtttgaacaacccaccacaatccatacgagtacaaactctagcgtctggtgtcaacgcgtgtgcggccttcaggggtacgacaacacaacaagccttcgtaataagcgcaacagacacaattatggttcgatagtcggggtacacgataagtccacgcaacgtgcgcaacaggcgcaattgtggctcaatgatcacggcagacagacagtgcctacagggcatgcgaaaaatacgcgactcagtgatggtggttcgactcaacgggagctgtccgaataaacgagagtgctacatagcaatcacatgacgcagccaaatacgtacgacacaaatattgtatcgtgttgccagggcgcagtcaatatttagctaatgccataactcagccgattaccaacgcagcctgatcggcgtgtctgagtacccattatacaatttaatcgctcgacgtgagtccgaaagatcaaagcgacacaaatatttagagcaattttattatgcatagtacaacccttcacatgtatttcaaataattttctgctatttactacaggaaataaagcagaaaaataatactgaaattaatacactaacataaac

SEQ ID NO: 164971 - DNA, 409 bp, Zea Mays
gaattttagttcggcctaccatcctcaaactgatgggtagaccaagagaaccaaccaagtactggaggatatgttaagagcttgtgctcttaaacatggtggtagttgggataagagcttaccgtaggcagagttctcttacaataatagctaccagaccagtttgaagatgtcaccgtttgaggctctatatggcagaaaatgcaggactccactttattgggatcaaactggtgaacgatagttctttgggcctgaaattatacaagaggcagaagaacaagtataaatgataagggagaatttgaggactgctcaatcaaggcaggaaagctatgcggatgcccagagagggctactagagtttaaggagggtgatcacgtatatctgaaggtgtcaccaatccgg

SEQ ID NO: 164972 - DNA, 492 bp, Zea Mays
cttggatcccgagcgtgccgatgggcgaatgatatgcattggggccaagctctctctcaaataggaaagcacgtcattgacttcctccatgcggagaaggacatcttcgcgtagaaacccttcaacatgaggggcatcctaagggaagttgacgagaactctctgtgggtcaagcccgggtccaaactcgtaaagcagtggccatgacgttttgatgtaggaaacacagtgtcgtcagggaagaggtcagcaagctccttgcgaccgggttcattagagagatacaccccttgagtggttagccaatccagtattagttcacaagaagagcgggaaatgaaggatgtgcgtcaattacaccagcctagagaaggcatgcccaaaagatctgtttcccctcctgcatatcgaccaggtggtcaattccacctcggggtgcgagctactaagcttcctcgatgcctactcattctatcactagatcgcgatgaa

SEQ ID NO: 164973 - DNA, 793 bp, Zea Mays
aaatttagagaaatttggtactctggtcccttgcagatatggcacgacatcaaataggtgattataaggtttccgatacatctgcctcgtccttgagacactaacactgagcttgtctctgaacaacccggctacctcatccctatttttttctaccacatctggtgaccatccattaagtttgggggtgaaaacctcaggttatcggacattattgtgtcggttttcctcccacggattttcaaaatgcgtgttaggtgtcttattaatgccaccccctcttgtcctatatctctcgggctctgtagtggccgaagaatattcgtccctatgcataggatgtggcatggtatggttataatgtgctgcaggtggagtagcgtagtgctactgcgatgggtgtaaaaacggtgcatattgtgcagccactggttctgtgtacgtgtacccagacggtccgacgtaagaggtcagaaggtctgcaactgggttgtctgaggttatacccagacggtatggctatgtatggcgttacctgagtggtctgtgtgcaggcctatgtagggtcggatggtctaacaaaatatgttgaacagtccgcggtgtagccgggtgggcgatacgagatgaccctcagacgatccaactattttcagagccagtagtgtgtcacgcgacagtggatgtggtggtgctacgaacgtattcattagccaggtgcattatggaaaattaggttaatgcgatggaataggggcattatgtttttcattcaaacgtcctatcctttaac

SEQ ID NO: 164974 - DNA, 1041 bp, Zea Mays
cacgagtgtatggggtcacctgtacatgtgtccaacggtcccaacattcggtgcccaccatatgtgctatgaaaaccaacacccctggtggttcccaaaaaggcgaccaccagagccaggccctccctcgatgaagccacaaaagtagtcctcgtcgaaaagaaaggcaaagcagccctcgcagatgacaccttacccgccacagttgaaaacgagacggaggcaaccaacaacaagccccctcagccgaagaccaacccacaccacaggaaagtgtccatacatgtagctctgaagacctcccttatgacgacccaccaccaggatttgcgccctcggcacatctcctagccctagaagatggagatatcttgcaagagggagaagacctaggaatcttagccgaagaccagctcaagctacgggcccttcgcataaaaaacagcaaccttcagaagtagagagatccttgcatccaaaagacaaggaaccaatatgcaggccagagtgaggcaactgatcatggacgaggaggaaaaatcaagggcactagagcaggaaatcaccgacatgtaacgcgaagacccccctcaccagcaagcaattggagcagctaatcatgtttatcaccacaggctagcccacatgcaaattgctttccaaggataaagtaccttgacgagcaaagccccctatcagcacaactctaggcctccccatggccgcaaaactattgagcaggcacctacccaaagtacaataacaatacagatccaacccagtacataatgagctaccaagttgccatggcatcttcatggggagaggattccaccttggcaaagtcattcatcattggtctcgaaggcccaatcctcacgtggtacacaaggctaccaccgctatcggtcgactcatggaaaaccctctgtgacaaattcctgctcaatttccaaggatacatgaccaagagagattagcacagtcgccaccccctccgctaccacaacaaaaccacaaacctttccagcaaccccctcc

SEQ ID NO: 164975 - DNA, 588 bp, Zea Mays
aacagaactcgagaactcttaattgactgctatgaaattaaaatcttgggaattacggtgcgaaattggagctcaccttcgcgacctcacagtcgtgtggtgtagctgtggtcgacgaccaacaagttcatgaacaggattggttcagggtggtttgggataatgtactacgggaagctgggtgatggaaaggagattgttatgaaggtgtctagcaacaatttgtaccatgggaagaagtagttctcaaacaaggtgaccttgctctctaggatacaccacaagaacctagtgacgtcgcaccgccaagagagcttcccgttccggctggtgggagcactcgtgggcgcaacaatgcaaggtgtcgcgtcggaggcttcccttctcgcacttgtgcgtcacccgagcgtggccacatcttctccggcgcacctctcggcttatggcgtcatgcgcgtgcgcttagggcatcatgaataggaatgtgagggatcccgagcggggaggacgacgcggggtcagaggaagagtggatgggggtcgcgtaccttgcggggatgggcaggcgtgcaggggagacaccgtctg

SEQ ID NO: 164976 - DNA, 302 bp, Zea Mays
gtggtccgttggattgggatggacggctaagattagaagatgcggataccccttcacgttttgagtcccagccgttgacgcgagatcggacgggtccgtgctgatctcggtaaaataaaatccagaccgttgatgttgatcggaggggcgcggttgagagccggttcagggtctgatctcaaccgcgggtgtgtgatcggacggctgatcctcgccgataccccttcggtcatgctaaatttctaaagagaccctgccttatttcaaaatcaacccgcgatcctttcttaggtgtagctgag

SEQ ID NO: 164977 - DNA, 944 bp, Zea Mays
aaaagaaaaagataaaccgtgaatagtgatgggctcaattcagcctaattggcccaaaacccacgcggaaaccggcgcgcccgtgcccgcgttaacagatttgtgttgaggcccctaggcatttgaataaccagtaaagagcctgtggcactattcacatgtttcgctgacagttgcacaaaggcccatgttcttttgtttcttcacggctccaggtccccgacagtaccgcgtcgagcacctggccggagtcacgatttcccgacgacgacaacccctacttgaggtaataagcactcagacatcgtgcgcaagtctacccgagcatatgccctcacccaattggactggtctgatcctaattgattcttcatggccatggcggcgctagagctctggtaagcgtgttccgagcaacaaaatgcggtagcatttaaattgaagctagggctagtttcactgagtaacaagatgtcgggtacatgcgtgaattcggaagtgttctatggcggcgaggtgatgttctcgatgccctgccgcggtagtgttcaatcggttgagccgatgagcttcgttaacattcaagaatgctaaaacatggcacagagaggtaagaatggacctgggaacggctaatcacggcagggtgtcttacggcggtgtgagtgacccgatttggggaatccggtgactggggttacggtgcacgagagagactaactgagggtggtatgagcgtgtaacagagagtcggagcgagcgtagtgctcaatttaaaggagccgactacgtgcttcgccaatttgagacgaaggcaatcacggcggcggtgagatattgcattggacgagttcgtcgtggcacccaccggtacaatggctcaagggcagtaactccttgctagctacgtggtgaaacagccagggcatggcgcaaccgtgaag

SEQ ID NO: 164978 - DNA, 556 bp, Zea Mays
caagtagcaagagaaagcccatctctgagatggattgctacaactacggtgagcttggacatcttcctcatcgatgcaccaagcctaagaagaaaaagttcaatggtaagaaggatgattcaagtgaagatgataagaagggaaaatgccttcaagaaaagatatggcaagaaaagacagttttcacaagacaaagggtggaaaagcctacattgttggtgattgacttaccaacatcgactctatgagtggcttataatcatttgatagtgatgatgaagatgagaaggtggtcacgctttctatgatattctcttctccacaattatcacctccatcatcctctacacacttaagtcaagtagtttaagctcgtttcatgcactttcgttgcccacatgtctatgtcctcaccacttcttgagcctttggttttgaccgttaggttttggtccttcattacaaatggggagtggtagtgtgagtatgtgagttgggggagcatgggattagggagggatagggtgagtatgatgagtttgagatatatttggtt

SEQ ID NO: 164979 - DNA, 567 bp, Zea Mays
ggaagcaaagcaatgtgcttcgtttctcgattccgacatctgagcagtagagaggtgcactagaagggaaggcaaatgctgtcgcgtgaaatactctagcgtcagaaaaacggttccgagggcggaggaaacggaatacgacaaaaatgaaagaaaaatggaggataacccatggtgggtgtctggatcaaagaccaccatttagcgcgtgtttgttagctgattacccgagaaaaggttcgctccatccagccagaccctccgtgtcatggctgtttgttctatggttcgctcacgacgaatacgcacccgcctacggagcacgccaattcggggtttactaaaccaaacagaaaaaagaagcctgattgtgatttcgcgttgtacacggcagagaacacagcaaacgcctgctgttttctcacctgccagaatatctctgcaaagtcggggagaagagaagctacagcagcatgcatccaaaccccaaaccgctgtacagtttcgctttggctttgagtcgttgctgctgctgtgaggttcagaatctgctcaattcgatgcgat

SEQ ID NO: 164980 - DNA, 613 bp, Zea Mays
ctgttgtggtggactaactagagcgtgagattgttggtgtaacatgtcgcttatcttgtggtgcacaggtgtgaagtccggtgatggtggtcgacggcaaatgtgaaggtcatgcatgtttttactattcaaggtgtcgcctaggtatcgcggctggccaatctatataaggtgctccatgcaccgatagttggtcatggacgtggttatgggttttagtcaagtaggcatatgggtcgatccacctctagcctcaagccctcattcttctctcttcttccttcagttttttgccttacctgtagtagttagtgtggttgtcgtaacgtacagaaaaaatttaaattcggaaccactaaccttgtcttgagagggtggaatcattggttgcttttccccttgcatgcatgtgtcttgttgctactttacccctttgttcgtaggtccttatggtgttgtccagcagtagctcaaccaccaccgaggcgtatacaatggtcgccaccgtcattctagggggaggactcttacttcaaggaatgagatggtgctgacccatgtcacttatgaatggtgttgtctttcactagttcaagatatataggttgatact

SEQ ID NO: 164981 - DNA, 578 bp, Zea Mays
gtcgtggtctctacttcgtttagcactaggttgattcaggattgggcgtcggacggtacgagcagagcccccgccggcgaacctccgccttgggcactcgggtgccgccgtggccggcccgtcgggggagaagaagatgatgcgtggggccgttggatatccatcatgcggtcgggattagatgcaggcgtgtgaggttttgagccatggatttgcggatcaggggccaggatcacccctgcataccccttttcgcttgtgagatcgtgaccattgatcgcgtattcgacggcttagattagatctaggggaaagttggccctcaaccgtcgatcgtgcagggaatggcctggatcaaatctggcgtatcccttcatgtcattaaatccgaaccgtgattcccatatctgacggcctcgatgcggtgccggttcgaagttaatctggacctaatccgcaccgttcatttgcaatcgtgcgacccagataccgccataccccttcgttgggtagatttgcgtctgaacccccgcagaatcacaaaaccaacccgccgtcctcactcactatttattgag

SEQ ID NO: 164982 - DNA, 721 bp, Zea Mays
tatatcttcacattttttgctctatagcgggagttttccatgaaggatcttggctctcgtcaccacttcctcgacatcaccgttgaacgttcactagtgcacctaaacgctagatgtcatcatgcatgcgatcatgaccaactgtaacttgtgcatgactccagtcaacctcaagacgaagcttgctatagactttgggcctcttctaatggatgattcctagttctagagcattgcatgtgctctacagtatctaacgttcactcggttggacatcgcctacgtcgtgcaatagatatatctgcacatgcacgacctcgtagtctacaccgacaccgattgtgctagttcatcgctctacgttaggttatgcggtgttcctaagggacaacctagtatcctgatcagctaagcgctagattgtcttctcctaatccagtgctgaggcagagtatcacgttgttgccaacggtgtggctgagatgacttggttgtgttagctgctccataagctccacagtccaccttctcgttgcattgttgtctactgcgacaacatcagtgttgtgtatctcttcaccaaccccattcaatatcaacacaccaaacatatagagatcgatctccattttgtctcagagaaggtcgtcatcggtcatgtctgtgaactccatgtcccgacgacatcctagttaatcgtcatcttcacgtagggcttctc

SEQ ID NO: 164983 - DNA, 611 bp, Zea Mays
tgaagttccaggagagctggatggggccccgaccgtggtaggacttgcccgggtagcacggccactgctcgtccgtcgcgtcgcagtagttgctcgccggcttgatctcctccttgtagcacaggccccacgcgtactggccgtccggcgccgtcgcccacccgcctgtggtctcgtgagagatttgcgcgaggaaggccgcgacctcgcgtttgcgggtgctgaggtcgccagtggcggcgaacgtggggaacgtcctggcggcctggatgaaggaggcataggtgtagaagcccttggcggggcaggcgtcgtcgtccttgtgcaggaacagggagccgtacagctgctcgctgacgagggccgccacagggacaacaggggcaggggcaggcctcctccactgcccagggccgccgtacctcgcctctgctacgccgatgacaaggaaagcgaccacggaagcagcagtccacaaggcgcaagaatacgccgccattgtcgatgatgatggttgtgattgcgatcaagtcacggccgggtgcctgccacaagtgatctgtgcgtcgggttccccttggattacggaattaatgggtgctgtgtgtgct

SEQ ID NO: 164984 - DNA, 2236 bp, Zea Mays
ctccaaagcatcattgaaactaacaccaaaagttgaagagaacaaaaaggatccatacctttcagaaacataatatatacaatatactatagtaaaagaacacaagtgagaaaagaaaaataccttgcgttagctgattattaggtgcattcctcagcaaaaatgaaacagattctgccataaattctctaacatagtccttcgggaaatatctcaacgctgctgtgatccttcaacaatgataatgagttggcatttggcaatcagttagatagctgaatttggatatcaaattatcaacaaatgcaactgattttatattggataacaacaaatgcaactggtttagctaatcatggggcaaaggccattaaacaaggtttgagccaatagcatacataggcctcatttttaaagatgaaaactcacctaagaatttggacagtatctttcactagatacttttgcaagtacatcattatatacgaccaggatgtgaagacctgaaatacaacagatcatttgacttctacagttctacttaaccccaagcaagacttgtgaatcacaaaaagcagaccaacctgctccaagatttcagggtcgcgatcacctccgtcgttaagaagagataaaagtgcactagcatgtcttcctaaaaaactgtaatcagtaaaaaaaaaagtcaagcataacgaggataagggactctgaaatctttcattctgtatgaaaatgaggtctcagtcaactcttgcagcaaaacaatagagattacaatcctcttaggttgatttaatttaattcattgggggaaaatggaccaaggtaatcatctttgagataacaaaaacaaaaacaaaacaagcaaatcataacgatcagggcctacacaacactataatgctacagaccaacaaccatgctgaggagcgcttattgaattggagctccgaaactcacggcaaaaaatcttctagaatatccctggagaaagctgcaatcaacctgcatttcaaaaagaaatcagttagataagcaatagttgctaaatcatcacaaaccaaacatgagttattgaatattaaacataaagtaggattccactagtgacatagtggaactgaaattctgatgctacaatgtactatagcccattactcaacagtacatttaattcaaaaccaaggattgcaataggcaaaatagaactgagtacatataatagaacaaatagaaaatagggcatgtgtgcaacacatcaataaactgaggctcttcaactccccgtgcctccatacacaaaaaacaattgtcgagagcaacacactatgggatcgcctagtattaaggttgcttaaaagttgtatgctgatccagtagccattccaacaaagatataacaaaacatctagaatcaagtacacacataggtaggttcgtttacagcccaacagaacaatctcctgcacagcaagttttgtcagatgatcagatatgaagaatgacaaacttgagtttgtttccaatttttattgttattatattgtacaaattgtttttgaaaattgttacacaaaccccaaacttgagtgatcatgcatcattcgcatatgtaggtcagacaaataaggaaaggaatgacagcatataacacataccatacaaagaagagttgaagtcatcacatttgaactaagtgcataaatctgtgatatacttacatgagtattggctccagggacaatcttgcactcatgtttaccctttgtagaagtgcggaaaagagcttgtcccggtgcaagacaatttgaggaagtgtttgtaccaatggtatcatctcctcataaaatgagatgaagtcttctgcagtattaagctcctggattaacataagaaaggaacaaaagaaataagtgtcaaataattgcatataactatagctaatctatttgcaatagaaagaactgagttcccacatggcctagataagataacaaaacttctagatgtgcccatgctgggcacaatcccggcctccgccgttgtacttggtctacttcaaaccctaacttccatcaatatggcactatccaaagcgagacctgctagtgcatttttcaacaccagaaaactagcaacgatttaactcaaaactccttccagatatgcccccacacagcccacttcatgcatttgctgaaactgctcagcttatatcacgcgcttaactcca

SEQ ID NO: 164985 - DNA, 584 bp, Zea Mays
cgacgaccagaaataggtacgtggaggacaaatgcgtctaaagcattaggtcgactagtaaaggccggtccaacctttgatcaattgttatccaaatatgtaaaaaagaaggtcgaccctagcaatcagccaacaaaatgaacccattcacctccccatgaaagacaggtgggatatattgagtcacctaagaacaatgaccaattaatatccaatgtacctacatggacacctccaccaccatatccacctgtgtcgtatcaatatgcatacctaccaccaccctatgtcccaaatcaaatgtggggcgtgccaccatatccatatgggatgccacaatacctcgcttggggggcacccccaaacttctatatttgataggttagcaccactagtgcaagatcgattgagttcacctcaatctggtcaccaggcgcaggtccagcaaggatgtcggactaattagccacaatggccgactaatctagcagggggcatggagagaaaatatccacgagcgcacctactaatgccaaaacaacaataaatggagatatcatcaagataggaataacatatgtcgt

SEQ ID NO: 164986 - DNA, 777 bp, Zea Mays
acgctctgttgtttgcgcgtggagccgagcgatttccggtcaagggcagagagttgtcgcctcgtcaatgtggtagtgtcacaaggccgagttccgaggcaaatccctgccaagatcatgtcaaacgaccgagtcttgctcccaaatttttccagtgtgtgttccaggtagtttggagctatttttgtattttgacttatttgattcaagtttttaaaaacagagagcgcagaagatatttggaaaggggctgaaattcagatttttaaatttctgaattttcccatagggcattagttcatgggctgatttggggcttttgaaaaattcaaatgaccaatcttccttactacatcttgtaggttatttggtgcactaaaactttgttaattggttcatatcaaaattttgcatgtttcccaagtcttttctcaaattttctctatgtgcttaaatggcccatttggaaggtgttagggtttttgatgtttttctcccatgaggtgtatgatatgtttagagtgtggtttatgagataaaagagacttaacttagattttagttccttaagtatattgtctcttgcttaattaaagtcacatatgatattggtcacaagttggggcactggggcaaaccctaggtaacactagggtgttacagccttcctgccttaaaggaatctcgtcccaagattcgggtaggagtcctccggggtgaagcgaaggttaaggcttgcttgaattttggtggtttatttattaaggttcttcttag

SEQ ID NO: 164987 - DNA, 687 bp, Zea Mays
cctttgctgagtcgctcataatcagagtattcaaaatttagagcgtccattacccggttcaaccttcgctttggtcgggtgtcgaaggctactgtcattaatggatcttttttagtgtagttccccaaaatttcattacacattgtttcaatcatttccagccattcttggcaaggctccttgaactgtttctcagacttaaaacgataaggcaatcgaacaagttcaaacttcttctttgttccctttagcttcggcatgctccaatcacttaacgtcggagatgtcctattggccaggtattctcgcaccaggtccctggtgctgatttgttcaaccaccaccctgaattctactgtgactagctggcatgttaaccctggctgcatgttgcacaaaggtctggtcattccgaagcttaaagccagcggacacatgaccatcgtcatcagtttccccctcttcttctcatcggccttgatataaaacctttcactcttccagccggttggccatttggtgcggtagctaagaactggagccttcgtatccttgcgatacgcgaaattatagcaaccaaaattttcatgcggatcgtctgctctggccttcgtttggtagtgcagctcatgcactcgacagaatgcttcggcatttgggtccgtaccttggcttcgaagggcccag

SEQ ID NO: 164988 - DNA, 428 bp, Zea Mays
tcttcttgccccaaccccgaaagttgcggacagagcattgtcttcggccttggagtatgccccaactagctcatcgctagtagcttcaatacacttcagccagtcatcgtttggctcatcaaacttctccctaaatctgaaggtatacttcaatcggaccagaccaccctcactggagtcggcggtggtttccttcggcatatcccagctctccacaagtggccataccctgaaggctatgtgctcttgaattaaatctctcatgccaataaaggagcacacagtgctaaaggccttctgacactcttcaacaccgctatcaatattcaccttcggccttcggaggccaaagcgggaccagatggggcactggataacttccttgatatcttctctcttctttaaatcattcttaacgtaaaaccact

SEQ ID NO: 164989 - DNA, 389 bp, Zea Mays
ctgagcttgtgaagttggatcccaagtcagttatgatattgtttggtattccgaatctgaatattatgtcttgtatgaattccacggccttggctgaggttaaggaagcaatgggtttgaattctatccatttggtgaacttgtcgattgctaccagtacatgagtgtatcctccttgagctttcttaaaaggtccaatcatatctagtccccagcatgcgaagggccaagttactggtatggtctgcaattgctgtgctggtaaatggtgttgctttgacaagtactggcaagcttcgcacctctgaactaactcggctgcatcgtttttcgctgttggccaatagaatcctgacctgaagaccttcccgactagtgtcttggatgct

SEQ ID NO: 164990 - DNA, 1053 bp, Zea Mays
cctttgcctcatagaggacctcgctgacgtagtagaccggcttctggatggttcggacccctgtagtcggtcccgatccctcaggttcctggccttcttgtgccgtccttttgacgaccaccaccatgctcaccgcttctacagccacagcgatgtataaatacaacggctccccaggttctagagctaccagtattggtagggacaccaggtgctgcttcaactcttgaaaggcttgttccgcctcttcggtccaagagaatgggccggacttccgaaatagcttgaagaagagcagcgccctctcagccagcgttgaaatgaagcggctaagggtggctaatgaccctgtaagcttctggacatcctgatacgggccggaggcctcatcgcctcaatcgctttgatcttctccaggtttgcttcaatgccccggtgcgaaaccaggaaccccagcaacattcctgcgtagacaccaaagacgcacttgtccaggtttagcttcgtgcgtgttgcccacagcttgtcgaagaccagggttaagacttccactagggtcgaccctctcttagtcttgaccatgatgtcatcgaagtatacctcgaccttgtctctaatcaggtccccaaaagtcttactcatcgcccacacaaatgtcggcaaggcgtttttcagaccgtaaggcattatgacatagcagtaaagcccatctactgttacaaaagcattatgcttcctatcttccctagacatctggatttgatggaacccagagtaagcatctaagaaggacaagagttcgcactcggaggtagaatccacgacttgatctatacgtggaagtggatacgggtccttgggacaagctttattaaggctggtgtagtcgatgcacatccgaagcttcccgtttgcctttagaatgatgactggattggccagccacactgggtgatgagcctcttcaatgaagccggtgtccagtagcttccggacctcctttcggatgaagtcctgccgctcatcggactgtctccgaggcttctgactcac

SEQ ID NO: 164991 - DNA, 457 bp, Zea Mays
ttaatttcaatgcacgctaatacagagctggattgatgtaaatgaataaggctcccacagggagtacatgcttgtaagttatatgaagattttttagtacaacgggttgtaccggttcccactctgcaggcgatcctaggtcttcctgtaaccgtcaactagtggccgaagctttctttcttccgttcactcgttccttcccagctttacttgccttggtgcgcaaaacggtggacgctacgcatatctccctccaatctcattcccaccacgtcgttttcgtcggcatcgagcccatcgacgcgatcttttgtccttcttttcgttgctaatttatccaggatcctttccctttccctcgtgggcgcagacggtagagcgatgaggaatctgacggtccctgagaaagcacctttgggaggagatagagtagtctctctctctcacttttttttcc

SEQ ID NO: 164992 - DNA, 580 bp, Zea Mays
ttgattctttcttccaatcttctagaaagttggttcctttaatcccgaaaggttttcggctgagggcgtctgctaccacgttggctttcctagggtggtagtggatttcgaggtcataatccttgatcaattcaagccatcttctttgacggaggttgaggtccggttgcgtgaagatgtacttcagactcttgtgatcagtgaagatgtggcatttgttcccgatcagataatgcctccatatctttagggcgtgcacgatggctgccaattccaagtcatgggtagggtagttctgctcgtgtggcttgagtaggcgggatgcataggcaataactatctcattttgcatcaagacacaccctaagccttgccttgaagcatcacagaagatgacgaaatcctggtgtatatctggcagtgtcaaaactggcgcagttgtaagcttttccttgatgatctggaaactttcctcacatttgggagtccacacaaacttattgtcctttttgagaagttcggtcataggttttcctatgctggagaaccccttgataaagcggcggtaataccctgccat

SEQ ID NO: 164993 - DNA, 433 bp, Zea Mays
aagagtagaaaagtgggtcgacagggagggtgtcatggtggcgttctacggagcagaggagtgttccagtgatggggctctggcaatcttcaattggtcggctccgagagcaatagaaggttgaagacaagctaaaacagaacgcaatttggtaggtactaacccaacgagccctggccacggaggagtccttcatggtagcgcgaagaacagggaggaatggatttgtggattgtgtaagctcttctggtgaaattgagttgattgctcaagtgcttgtgtgcgtgatgtggtgaagaagcagggtccaagctcaatttataggccgatggctagagatggatgagatttacggcggtgtaaccgcgcgggtagagccacggcgatggtatggtggtcgccgactaaccgcgcagcgccacctcaacgtttt

SEQ ID NO: 164994 - DNA, 872 bp, Zea Mays
aacattgctctgatagctttttgagtcttgctaaggataaaacttcctgaggtgctctatattccatgagttccccactcccatgccatccatttgagtaagctgatatgatcctggccgagtgacctccaacaccatgaatggcccttcccatagcggcgaaaatttatgtcgtccttctcccgttagaatttggcgaaggaccaagtctcccactatgaaggatcgatgtcgtatagcttatcatgatagcgcctcagggtctgctggtatctagctgactgaattactgtattcaatcgctcttcttccagtatgtcaatatcttctagcctggtagcttctgcttcaaatatgctttcgaagaccaaccttggtgccccaaacctgaggtcggcaggtagcactgcctccgaaccatagaccatgaagaagatggtgtttccatgcagagctcgactgggttgagttcttaggctccaaaccacataaggtaactctctgatccacttccctgcgaacttttcattcttgtcgaagactttcttcttgagtgcttccagtatcatttcattagccctttccacctgaccattggctcttgggtgtgctaccgatgcatatttgatctggatgcttcgttgttcgcagaaatcaaagaattcaaagctagtgaaattggatcctaggtcggttatgatgctattcggtatcccaaacctgaatattatatcttttatgaattacactgccttggctgaagttagagaagcaatgggtttgtattctatccatttgttgaatttatcaatggcgaccaacacgtgagtatagcctccctgagctttcttgaagggtccaatcatgtccag

SEQ ID NO: 164995 - DNA, 737 bp, Zea Mays
cgatcgatcactgatcaattgtgtaatcccgtgagtgcagctccaaacaccttgcgcatccctaccctaccaatgggtttgcgcgttattaccagataaatttctggagcttcagtatccagaaaccagaattaaacacactagtacgcggcaaatgcagtgggcaaattttaatgctccatgggggttagctcatctgcgcctagtttgattcgcgtgctgatgtcagaccaaatcacatcagaataatgcatagaatccaaaatcctaatgccctcgcgcaagacaaagactgacctgaccccccattttgtagaagcactagcaaataagcaaaggatatcccaggcgaggtgagcaggggggggggggggggggcacagatttgattgactcggcattccgaccgtcggctcggctggtcgttatgtcagcgaagcgagggaaggaaggaaagcgcgccgcgaacacaggtcccgccggttaagcttggctcccgacatcgcctcctcagatactgaaaccatccctggttcgcatcgcatctggatggaccgcactgatgtgttcctgttcaccgacggagaagaattcgcccgccgtgctttgctttgcttgtgattgcgatggctttgtttgctcgccgacacttttgtgtacgtacgtggaaaataagatgggtgctatttatgctcctgaatttcacaccgcatgtttctgccgacgacagaaacggc

SEQ ID NO: 164996 - DNA, 729 bp, Zea Mays
tgcgtgtgcatccttcagctccaaatgtaccctggagaggtccagagtagcactgtccaggtcggtgttaagacctgccaccacaccaacaagggtgttgaggcgatcttctccagccccatctggaacaatgctggtctggctttctcaacaaagacatagaggaagatgcatgtacttcatgtcatgcagctgttgccggtaagtgtggctgagagaccatagagctcgcctagcaacattgctgaccaaagcaacgtaggtggatagcagcgtcagagactcatgagctgatacagtcctgaaccctctatcccctacatccatcacccctgatatgaatgtgagtgatgtagtagcaagccgaagggggctcggaaactcaccttgtctcatacaagggtcagacgtaggttcccaacgcatgcagaacgtcctgcagcaggttagggaagtgccctgtctcgaacattgaggtataatgttcggtgaaagggcatatcacctcgaagttgtcctgttgttcatcgttggcttcctcgttgacgttctcctcttcttattcttcttcgtcgtcgtcttcatcatcgtcaccagagtcatctggatcatcgcctccaggagcaggtgctttgacttttggtgttggcggtgctgaatatgacgctccagctgcgaagaccagtgattctgccaacggggtgggcgtcggcagaaactccactgagc

SEQ ID NO: 164997 - DNA, 376 bp, Zea Mays
ggaatatcgactaagatgagcctcatccaaaatttgctggcggacttcatcgtccttaggcacaactatgcggttattaaaccatactatgccttgatcatcctttctgaaacaattcgctttgtcagcttctattttctcatgaatatgtctcatacccttatcacttctttgtgcatcaataatcttttgcagaagaaatgactcaagcttctattggttcaaggttccatgttgaatcattcccaggtttaatttcttcatttcttgacataatgtggtgtttggagtccttactgtaagacaatggcaggaagccttgcgacttagtgcatctgccaccacgttggccttgcctgggtgataatgaatttct

SEQ ID NO: 164998 - DNA, 549 bp, Zea Mays
cagggatggatcggcctcagggttgtatggctctggaggaggagacagttcagctacaccaaaatataagcttttgtcaggcacgaagttaacatacttacgaagctaaaatatgacaaacgtacctatacgtctttcacgttcagcagcctcttcggcttttcttgcttcttttgaggcaagatgagcttcttcttcatttcgcctaatggcttcgtctgccatctctcgaccgccattcatccacacttcggaataaaatttcccactgagggtgatagcttcggctgacggctccttgatgtcaatcgctgaaactgagaagtctggctgaattacagccttgtcatgttcacatctagtttttttcagtagagatatagcccccaagcccctacacatgcacaaaaatctcccctgtcatttaggacttcatcaaatgccctgaatccacttgattacacccttgggatcaccacgaatgaaattttgcttagccgagatgcaccaacactagcaaaaacatttttcaacttatttgaacattgc

SEQ ID NO: 164999 - DNA, 401 bp, Zea Mays
aagtcattatgcatgtacactatgtcatttggtactatatatatatctagaatctcgaaagttaattgagaggagcagagttggctcatgttacgttggcttctttctctagtggaggataagaaaacaacccatttgctgaagttttctagagtcaaacatataaatgcttttgtatgctcttccaacctactaccgcacacagttttccttagcgtctctatatgctaatgtttatttcaccttagttgctgctgagctatctatacatatatagtatgatggaaaacgctaatctgtagataatccttaactagagtactatatatggaaataataaaacgaataacatatgatagtggaggagcacaacttgatgttgacatgacctctttttttta

SEQ ID NO: 165000 - DNA, 456 bp, Zea Mays
tttctatatgttatatgttagctagttagaatgatgtgaaatgttttgggtattgcgtaagtgttactttgtgccaggtcatgtcttggatgggtcatactctgtacttgttgatagttgaggatcaatttgtttctggttttccactacccccttctgctattaaagaaaaactttggacactggcaatcttgtaaaatgcaatgtgggccactattgcacaacaacgacaacaagagactttagttgagttggttaggtagcttgagtaggtcctgaatttgactatatgtgggagtgaattttcagactagggttaaaaaatctcttcgtatgtctaggtctaaggtctggctttagttatagtcattctcacatagggctatcgtgccgctgtgtatgggtggggtaggggttcaaaggttttctcaacatatatgagaagttattattaat

SEQ ID NO: 165001 - DNA, 411 bp, Zea Mays
aagctgtatggtggggttcggaaaagcctggattggtgatggggagtggaaagggtgtctgatggatgggtataggcatggtagatgtgggtggcagcaaggctgaggttggcggtggaaggttggttgaggtggatgggagtggagcggctgtggtggtgattggcgatgatggtatgggtggcgcggcggggtttgacaagggaggtatcccgccataatctggcatgccatatgggatggaagtaggtctggtggacgctgggggcggtggtggtattggcggcctactgatcatttgagtgatggcggtggtgagatcggcaagggccttcgtcatggtgtcgatcttttgctctagcgctgcgttggcggaattggtcgcggcagcagatgcgacatcgctggtgt

SEQ ID NO: 165002 - DNA, 705 bp, Zea Mays
aaaagccccaaccagaggtagaggggcaccaggaggagggagctccctatcaggttctatgacagacagccagacctccttgggaatatcacaagggtccaagcaccaagcccaaagatcaaaggatctcgtgtgctccctgcgcctcgagcgttcctggacatagtgaatagcacagctctttcccaaagccctagcagccacctcatctccccagcagtgaaccggaattccctccactctgaccttcactttgaactcaaagttggtcttcctggcgtagaactcctctgactagtccccaaagtggaacacccgaccatgataggagaccgacctcctatctagcgcccattgcttggttcttgactcagagaagatgataaaaaattgctctggaaagtgtttgacaagttgatactgaccatggtgaagatcaaaagcctctctcagcatatcccctactgacagcacatccacctcatgactgtttccatcaaaagagcaaaccaccgccttactgattaactcatctctacgacgacggatcgacccggtcgccgagatagcacagactgctcttgcaggccgcgcccgagggtctctggggttgcgcgcttccatgacctggcctccctggacagcttggagataagatttctttggctggacagatgaagtgtggagtgcagactgccgctcctg

SEQ ID NO: 165003 - DNA, 519 bp, Zea Mays
ttgcttgaggcacagctgctcctcgccaccaaggctggagtgtcggttgttcaggccgttggcaatgcaggacccgatgcaaacacagtcgtctctttcagtccatggatattaagcgttgctgcttcaatgacagaccgcacgtatagaaaatcaatcgtaattggcaatgggaaagtgttctcttgcggcgtcctttcaggtaattcatgcaaacttatcttggctctgttgatcaataaactgcagcattttatcaatttgttagcacaatgccctcagtatttccttatggtggatggggtctggggaatgtaatttctagacaaccttacccttgcatgactgtacctgatcttggatagtgcctgtgttgccagcaccaacaccaggtgaaacaatgtacccactagcatgggctgatgatgtggtcaatgagaactcgaccgatgggtctgtcaattgccaagatccaagggtgttcatcagacctcttgtccagggaaaggtgatcatctg

SEQ ID NO: 165004 - DNA, 732 bp, Zea Mays
cttgagttcgcgcgtgcgacgggagagttcgacggggtccggccgggtggagaaaagcaggggctcgactacgaacggcagatggcgattgtgtggctccggcaacgaactgcgggctctggtgaacggcggacagcgtggtcggcgaacagcgacacgacggcgaatagagggacaacggcctggccttgcacgagcagggagatagagggcgagcggcgagctgggaaaggtagcaagacgagaaacgctgttgtgggcgcggttcttataggcaagcaagggaggcgagaaacacagcagactttaaggtacttgaaggccatcaatggagaaacgtccgtggagtgttaggcgggcgcgtataatgaagaaacgttcatggagtaataggcgagcgcttaatggagacatacgagcggtcgcgcgggagaagaaacggccgaacacaggcatgcagacggagacaacaggtggcatagtatttgtgtcgggcttcaaatgatggcggcataacctggcaattgagtgtaccagagaaattggagagaaggtgaatgggctggatgggacccacatgtaaagaatagagagaggaggtcacgtacgtaagtgagatggctggttttcaaagcttgagaattggaatggtgggacccactagtcataggtagaaaggaggggagggaggggaatgtgtatgtgacggtggtaactggaccgatcggctag

SEQ ID NO: 165005 - DNA, 1408 bp, Zea Mays
ccgggccgcgctcctcctagccgcaaccgccgccttctcgcgcctccgcgatcccgacacagccgtctacgtttcggcctccccgccgcagccgccacgccaggccttttcctcctccgccgccgccgagggcctccgctccggcacctgcctcttctccccgtatctgctcccatatccgttccaaggtccgttttcgccaccccctccctcgcctatctacatcggtacaccctagaccatcggatagactgtctttttgctgcgtggcggagtcgggagtggttgcctgtccaactgtccaaggtggtttgggttcgaggtttttggaatgccactcgattgggcttgcgtttgctctctgctagacatccatctgactatctgcgtacggcgttatgcgcattggcgggtctcgttacttcaattcagtagagggacctgtggttggactcaagttttcagccgtactttgaactactatagtcaatggaccaatgtatgtcgagacgaacacaagttgtaatgtgcaaaggcatgccataaaaagttgcaggtgttggatcatccagataggtggctgtttttaaatatcatagcatcagcctgcttgcaaggtctttgtttgagtccggggaataatcctttttcacaatatgataaactttgatttttacctatgtgcatcatagttacagttgacagattagcaccttcaaggtgtccttagtaactctgatgagactgatgcatttttgttttacctgaatctgcagttgccttgtttgttgttatcttcgcctgggtaagatagagctctgtatcaaagatcttactgtgtccaaatgtgtttgtagggttcccagtactgaataccttcacgtctgcatcggtttcacctgctaacaatggcgaccaaggttctgacggaagctctggtgatccaagatgctgcccagcgtgtctaggcaggaattcgattgccaaggcggcatctgcagttggtcctgctgttgtaaacatttcttctatgcatggtgagaacatatccgtctatttgaaaactgtcaaattcctcaccagtgttgtggctatgtgcagtgaacttctcgaattaccttttgtagatatgcatggatgggtaaacgagcagagcattggatctggaactataatagatccagatgggactatattgacatgtgcgcatgttgttgcagattttcaaagcacaaaagcaattgtgaggagaaaggttgctaacttggcactacacaacccttacatgttaactgtgtaaacacactatccagtgtcaaccacttatcattggtcatgtgtacaaatgtgaagcatgcatttggattgcttacttgaacaacaatttgtgtcaatttggtagctcatt

SEQ ID NO: 165006 - DNA, 720 bp, Zea Mays
ctccctgagggataatgatatcattaaattatcccaccaaatcgtcagaaggaaggtcttcaagacccgataactgataactgaactgctcttctgcattgatcacaacgtttgcattgtttgtgttggccactggctcagggggttgtgcctgctgaactggccaagggtcccaaccttcatcatcattgatggcaacatcttcctcaacattgttcccttccatgggaggaatgttgagatcgatctgaaaattggctactggttgaccctttccaaaaaaactcaactggaagttggtgcccatcatgtgggtagggtggcacgggatcctcatcttgaggttgagcaccaagcataaattgttgcacgatgtcacattggacagtccatgaaactccttggaaaccttcagccaccgagaacacgatgaactgtggcacttcctgtaaagatgtcactcgtgcccggaccaacagcctagttgcattattttggtcagggtcccacatgagaaccatcctaaaggctccgaccgcattttgaatgtgttcatgagtccagaagtccagaggaaaaccaagaagtagaagccaacattcatggttaaaggttagggcacactgattccagccctcattgtgtcgaatgacagtaaaagagaatcccagggcttgctgaggacctaatgccactaagttgtctctgtcaaacgtgaac

SEQ ID NO: 165007 - DNA, 918 bp, Zea Mays
cacggcttcaaaaacttgtccagatactttaactgggacaaatacagggatggacaacttgactacttcttgtccatgacttagctgaatagtcctttgatccgcattgatgatagccttattctcggctaaccaattcatgcctaaaatcacatccacatcttgtccctttataactatcatgttggtagggaactcatgtccagccaatcttacgggtacgtggaagactacttccttagtaaagatttgacccccatgtgattgaataacaaatccctcccttgattcaatactatgtatgcaatgcttctcaacaaaagtcttggtcataaaagtatgtgatgcaccagaatcaaaaaggatgatggtgggatggttggcaacaaaaaacgtatccatcatcactgattctccgtccagggtggtcgccacttgagtgtagtaaactcgcccagttttccttggatttttgctcgccggagtgtttgccacatttcccttgccttgagacggttcccagtagtctgttgagaatttgatttattctgctttagatagggatagtccttgatgaagtgtccagacttcccacaattaaagcagctattagaagaactgggtagggcggggaaacgagcaccaggggcactcggctgattttctgagcagggggagtggggcggataaaaactggttgcttgaaaggaaatgcgggtggacgagcagaagagccatttgggttgaaaggacaaatcaccaacctcgaccgctttttagacccttgagatgatccttcacccctatatctctttgtttttccctgtcccgaattcttggattccatcgaaagcgttgtgctcacggccctgctataagtgaggtctaggcaagtggacatctttcgttggagtcgat

SEQ ID NO: 165008 - DNA, 483 bp, Zea Mays
gtgcatcgactacaccagcctgaacaaggcatgtcccaaggacccatatccacttccacgcatagatcaaatcgtggactctacctccgggtgcgacctattgtcttttctagatgcctactcaggtttccatcagatccgaatggctaggtaggataggaagcataccacttttgtaacagtggatgggctctactgctatgttgtaatgccctatggtctgaagaacgccttgccaacatttgtacgggcgatgagtaagaccttcgaggacctgatcagggacaaggttgagatatatgtcgatgacatcatggtcaagactaggagggggtcgactctaatagaagacctgaccctagtctttgacaagctgtgggcgacgcgcacaaagctgaacccgaacaaatgcgtctttggtgtctccgctgggaagctgctgggatttctggtttcacaccggaggattgaagcaaacccgga

SEQ ID NO: 165009 - DNA, 504 bp, Zea Mays
tgaccccctcctagtcttgacaacgatgtcatcgacatatatctctactttgtccctgatcaggtccccaaaggtcttactcatcgctcgtacaaatgttggcaaggcgttcttcagaccgtagggcattacaacatagcagtagagcccatccactattagaaaagcggtatgcttcctatcatccctagccatccggatctaatggaaacccgagtaggcatctaagaaggacaagatgtcgcatttgggggtagagtccacgatttgatctatgcgtggaagtggatacgggtccttaggacaggccttattcaggctagtgtagtcgatgcacattcgaagcttcccattcgccttggggacgatgactgggttggccagccacacgaggtgatggacctcttcgataaagctgacgtcaagcagcttccggacctcctgacagatgaagtccttccgctcaacggactgtcttcgaggcttctggctcaccggcctggc

SEQ ID NO: 165010 - DNA, 669 bp, Zea Mays
gtgagaacccttcctcctctagctcgtcacactcttttatgtgcctagcctgccgatggtgagcactctcaacactccgccttgttcctatccttgcatagcacatctcaggttggggaatagtggtcagagggccggattcgccgttcgtcggcgagcagagagccatgaagagagagaaagggggatggtagggcgcggggaggaagaagacggccatggtccgttgggtgagagatagacggtgtctgggccgttggattcacatggggtggcggtgatctggttggtgcgtatcatttccgggcgcccatccgagccgttgattgagtgacgggtggtagagattagatcccgggggtgtcagcaccgcatccgtagatctgggatcggccggtccacaatgcataccggttcgcagttatgccgatctaatcaggaacgttcatccgcgatccatcggccgaagctaaaccataccgtttcgacccccactttgcagaagaacccctgggtttattgagattcaacccgcagtccatgtagcagtaatctgagtctcgggaaatcttataagttagcccctgacctctctggtttttatgcgcccagtccagaactcatttaaaatgaataaatgaattagtaaatgcaattttaatacaaaac

SEQ ID NO: 165011 - DNA, 518 bp, Zea Mays
ccagaatctagggctcttcaggccacatgggttgaactgggctagatgagacaggctcttggatctgtagagctctacgtttgttgtgggtgaccaagtaggcctcaatcaacttttggatgtactcgtccttggcttgcttcagagcttccacagcaatgacttcatgagtttccaaggcagttatacgggcttgagctatggtgagatccacatggagctgatggttgctcctctctgcatcttttgctcgggcaatcatctgacgttggtgctgagccaagagatcataccgtgcatctagggtaagcaggtatgttgtgaggtacatgactgtagggtcgtcctccagctgctgttgtcctttcaaggcatgcatcctggccatccaaacggggcggtctctctgaaagggcggaaaatatctgagtggagtgccgaccacttcctcttcatagatctgacataaagtccttaatgccttgcgggcgacaacttggtaggtgtgtctgaatctg

SEQ ID NO: 165012 - DNA, 310 bp, Zea Mays
caaaaagggacatgggtacaactcatacaaggtgaaccctagcatagagcataaggggtggagatcccccaagttcatagagggaactaccctatatgatgccttggggaggattcattcctcaaatgacaagtcaactcaagtgaaggtaaacttgagtcacacaaaggataagataaaggatgttgtctccacaaatggagaaaagtttagagctcccatttctcactcttacctctgtgattatatgttgacctgggattcaggaaaactagttgtgaaatatgtgggtgcctacacaaagagaaag

SEQ ID NO: 165013 - DNA, 917 bp, Zea Mays
gtggattgaaccggcttcaccgtacccacttgcaccggcgacgtgtctgcgcgaccgccgtcgtcgtgctgccgtttacctcggtcacgactcgccttaagctattctaccacgttgtcgcggtttggggaggataaccaagtgacgcccgtaacattttgcccagtgaatgccacgttatgcgaactccggtgactcaccttgcttcggccgccagcgtgtcttccccaaattgggcacaaccgctgttgatcactataaattgatgccacgccttgctccgttagctcgttacgaagctagagcaccatgtctcgccttcgattagccactacaaaccccgaatttggaatttcccccaaatcggcttagaacactgctgcgtgatcccatgccgtggaccaccgtctccaggtttgctctcaccctcctcaccgtcgtttcagcacccatgcacgctaggaatgcttgtcggctcgaccaattgagctagaccgcgcttaatcaccgggaacgcctcgatttgtcctcggtgttcgctgtcatcgtgggcagaaaaactctggaccagattcgtgcaattgatggagggattagggtcgccaggggtgggattaggtgttaactaagttagggcaccgatcgttgcgcttcctggccggtacaagttcgctggagggcgcgctcaccgtcggggacctggggctgtgaagaaacagaagtgcgaggggtttagtgcaaacgtcagtgagacaggtgaatagtgcatagggattcttaaccagttattcgaatcgctgagggcctctgcgcaaaatcaccaacgcgggcgcgggcgggggcatgtttctcctgttgatgggccgatttgggctggtttcaggccaacactattccttcttttcccttttcgtttt

SEQ ID NO: 165014 - DNA, 431 bp, Zea Mays
cagggagctccgccccacacgagccggtactactctcttcccacgtctcgcattccacctggcattgtgtagaagtagtttgatcgggtttttgggcgtcggggtcgggatttggacgtctccggcgagtgctccgccgttgggggagacgacgtcgttgttggtatgactggtggggggatagaacatggtccgtcgatctagcagacaatggctgagatcagaagcgacgcataccccttcgtggcttgacctaaaccatcaatctgtgcacgtgtggctaggattagatggcacttaccctttcaatctattttaatctgtaccattgatcatcgatcgggcggtgctgggtaactcacgcttcaggccgtagatctaggatccaacgggtatgattgtgtaccggttcagtgttatgatgatctaat

SEQ ID NO: 165015 - DNA, 346 bp, Zea Mays
caagattgttatgctttatcagagatgtttttaatgctttaacttatgaacttaagaatgggttagtctgttccaagtataatctgctggagcataacaatcctttggcacctctagcttgtgcttgagaatcttgtatgatttcatctcttgttaccgttagtgctataattggcgtttgatatctattaagtatctgcatgtatgctggtttatcactttaggcagggcgtgtgctatgaccttatgttttcctattatgcatgctgataaccttttcaaacttgtcccatggtatatgtacaatcatttagatttgttgagtggcaatatagcaatattttca

SEQ ID NO: 165016 - DNA, 603 bp, Zea Mays
attaagaactcatgagtaccaaatattacaagcatagtccaacaaatgttacattaatattttggcaatatttttacaatatctattcttcttctctcaaaactttgtctgcagcttcggtcagcagttgagtaacgactttgtccataacggtttcagccatgctaataatctctgatgattcttttgcctctgcttcggccagtggctcgaagggctccgggggaggagatagttcggctgtggtaaaaaacgtaaataagttcgaagtcacaaaaataaaaaataaagttaaaagctattaagcaatacctatccgtctttcgagttctgcagcttttttagatggcttcgttgcttccctagcatcgtgagtatctttttcgctcttctttattatttcgtgagccatccctcggccgttattttcccatatgtcagtgaagaattttccaccaactaagcttgctttggccgaggggtccttcgtatcatcaatagataaaatagcttcggcttgggctagggctttcacatgatcgcaacctgatttctccaagatagccgcaattccccttgcgcctgagaaggcgcagacgtccc

SEQ ID NO: 165017 - DNA, 314 bp, Zea Mays
gacctggcatcacctattgtaaggagctgttgcagcacggctgacatgtactcggcgtttatctccctctcttggacggtcttctggtggcaatctaccctgaagtgcgagaggaaccatttatccgccaccttgagcatctgatctttttgtcgttggacctcctcgtctattttcttcatgtcatcttttaatcttttatgctcagcggccgataaattagtcagccttgtgctgctgtttggagaagccctgttgagatctttagaatcggccatataagcctgattttgtagatcttcaacctcgttccc

SEQ ID NO: 165018 - DNA, 533 bp, Zea Mays
tgcagcagctagcccagagctgcgagcggcagggttggttttgccacccactcctgacagagacagaaagaggaaaggtggctgcatgcatgcatccttgctggtacgagcagtgatagcggtagaattaagagagagaaagggagaggacatgccaaggtagaggtatcaacgggtaattcttgggacaccccgtacccatctatatgaagttatatccatccccatatatatactcatcatggatataagaattgtccatacctatcctcattcgggtatcaggtcccaataaatccacatcctcaacaagaaatacatgatcaagttatattttatatgacattaacaaccataatacaaccaacaataatatatcacgaataaatctgacatttaataagaaaaaacattgtttagccattcagaacaagcaaaaacaaagtttagataggtgcttaaaggggttattggaagaggcagagttagatgttgggcttattgacttttgggttgcacacctaattttactg

SEQ ID NO: 165019 - DNA, 921 bp, Zea Mays
taatttctcctgtatccttgaaagttaaagtaacatctcattattcgtttagccaataatgctatctattgttgtgatgtatctgctctcaccctatgaagttgtttttgctacattaccaatcctatcttcaaataagtttgtccaatgcctgcatgccataaattctactctggccattaaggcccgtcttcccaaagattttcccccaaatcctgccttttgtgtgaagttgaactgattcttatattgtacagttcctgtgaaattcttgggttcctaataggtcccttgggtatgcattgtttcaccttgcctagatgggctacatatttagattccttttgtgttgtcattgatgtgtctagctaaaatcatttgattcatataataaggccgctaggaatccccatcccctcacctctacaatgccgcaacgatgcctgccttggaagaatttggggatgagtagcccacgtcgcaatattccagatagcgaaccaatgagggcaaaagagaggaaaaataggttctgcaaggtcgtgccaccagagtctcaaaattttcgtccgcagcatgttcatgaggtgtgttttgactttctgatttttggtgttgggatttgggactggtatataatcatcaagtgtgcatgatctatacatagctcatttacaatgttgtttacttgtggatttattgggttcagccgttaggaattcgtagactcaactcaaaaaagcatttgagttggtgtttttaggtcctactacttcgcatcgagagtttgagtttatttttaaaaaagtacctgtatgggggaatctatttgttcctagcgttatgtggacttaaatcaattgaactttccagtccttatttagcttgtcatcaagatttaatcctacttcatttatggtt

SEQ ID NO: 165020 - DNA, 585 bp, Zea Mays
caaaagtttatcccttctttagtttgcttgatcaacctattagttttctaaaatctaggttaatgaaaccaaccttagtaaaaatcatggctcatgttgtagggaaaccctagctccacagtaccaccacgctccttcatttctagccaccttaacaccattgttgcttcctacacctgcttgagtccattaagcatccccttcgtttctcagcctcagtcctccacctctcttcttcagacttgataaagccacaatcgtgcacaaatgccaagctacagtactagagaggagtaaccctatggagtatatagttcatgaaggctttaaagaagaagggagccccagtcaccccttaaatagctaagggacagggttacaaagaacacaaagaaagaggctagagggttcttacttcttacacgtgaactaatcatctggagggtcccttggattggcatcatgttgttcaatcatcattaatgttgccatcctaccatgtttgtggaggagatcatgagagcaattaactctaagagaccatgtctgcatcatagcagatagaatatggttgttacaatggtc

SEQ ID NO: 165021 - DNA, 417 bp, Zea Mays
gctaaattggtctgaacctgatgaaaggtacatcttcaggcctgatatggtgaaagagactactgaagaaagagttcaaaggatgattcataatttgaagaaagctcaagctcgtcaaaagagttatgcagacaaacggcgaatgcccttatacttccttgtgggagactatgtctacctaaaagtttcaccaatgaagggggtatcacgtttcggggttaaaggaaagcttgcacctcggtacattggtcctttccctatactcgagcaatgtggatcagtggcataccgactccaattacccgaaactttgtctgctgtacataatgtgttccacgtgtcccaattgaagaaatgtcttcgggttcccgatcgaaccattgaagtgacagatgttgtccttgaaccggacttgac

SEQ ID NO: 165022 - DNA, 492 bp, Zea Mays
cagaggacacacctgctgccgaagcaaaacaagctgacgttgaagaagatgaatctgaggatgagtacggtgcagtgccatctaaacccagtcatttagagtttggaaagtctactattactgaaggtgatatggctaagttactgaagttaggctattttagtgaagacaaaagggagctgattcgcttcgggggagaagaagttaccccaaagccagaaaaagatgaggtggtggttttaggagcttcttcaaagcagggttaagatttcccctgcatgggatgattgcagatgttttagagaaatttgggattcaccttcatcagttaactcctaacgccattgttaggcttagtgtttacatctgggcactccaaagccaggaggcagagccacttgccgaaggtttttgtcgggcacacgagcttcattaccagacaaaagctagagaagatgggctgcatgataattttggctgctacaattttgc

SEQ ID NO: 165023 - DNA, 913 bp, Zea Mays
aataattcatgatcgacttcggtttacgcctaattccacccttggagctccactgggaatcactaatttgatcggaacgccattctagagcttggttcacacacaccgtggaacatgagtctttcccgtcatgttcccgacgacacagtacgacaacacacaaattggaggcacggtaagccttagcaacgtaccaaggctcaagaaaggcagctaagtaggtgggtggaaggccaggacagttgatcgacggaggaggtgttcacggcggcgcggagagtggatatggggggaattccaaattagagcgcgatgatgtacgataggagctggctgggggtgcgatggatgcgtacaaagaggcggagcagagggcatcgtcaatttataggtcccgattgaactgggcacgaattttgggattaagatcacggttatccgggtaggatatttcaccgtggcatgctctccgtggcatgcaagggggaactggtctgcagacgatgatcggcggcttgccatgactcttaccacgcagaggagtggttattacgtgtcatggccggaaaaacgacgagctccggtgatgccagcgcgattgaccgcggcgggacatgacggccggtccggccagcgacccgattcaccccacactggatattttcaccccgcctcgacgttatctactcttcccgctgcaagaatctcctaggcgggcgtgaattgtggcggcggatcaccggcctcgagctcacggcaccggagatctttatggtcactataccatgccgatcttcatcagacactctgacagcacgatttggagagctttgttctctatttttcatggaacaactcggtcacttatctgcaacaatattgtcgtccaaagaaccaactacaagtttgttat

SEQ ID NO: 165024 - DNA, 605 bp, Zea Mays
cacactatgcatggattacccaaaaacgtgaacataatccctaatcagtacatggacaagcgttgaaagaaagcatgaccaaataatagggctataacacattaccttggctgaagtggatcttggatcctcagacgaataatccgagttgatggggaaatctgaagaacataaacgtaagtacgtcgatggtaatccgttttgatgtactgaaaaacttgacatggtgtgaatctactagtaagcacttattgaaatgtattattgggtcggctgctaacaaacataaacacctttcaatggtttcccctaaaccgtaaccaacaatcgttcaatagcatatgtgcatcacgttgctacgagtcaatacagggggcataaacatcttaaccaaggacgtagatgcaacctaaaccctaatcaagacatggggatgcaacggatccggaaaagcacaataggagtagggatgggggagacgaagatggtacctgcgtagacgccgagatgggaaagggggggaggagtccacaggttgacgacagcagagggagttcacgacggatttgcggctccgcggtcaaaaccctagcgctgtgaagggt

SEQ ID NO: 165025 - DNA, 870 bp, Zea Mays
gaaaggttaggaggtaagatgcctgttttagagtgaaaggattgagatgcctattgttgggtacctaggaacgaggtacctgaaataaggcctataaccctctgaccgaccaaactaccccgccaagcaagtccgcgaggcgaggcaaccgaccaggcccctcccgagcaagtccatgaggtgaggcgaccgaccaggtcccctccgagcaagtccgcgagacggggcgaccgattaggtccctgccgaataagtccgcaaggcagggtaatcgatcaggtccctaccaagcaagtccatgaggcggaaacccaagtccagtgccacgagtccacatcgaccgatacaagacgcgtcaccctaggccacagccagacgtgtagacaacaggacgatggcgcaccgaggggcagctatcgacatgaccgcacctcttcaagtacgaccccgagcacaccccactccctcgaggggccgatcgaccctgttcatggaggacctcatcatcagagcttctagaatgacccgaatatcagatagtgcgcaatagatacgccataccgggtgtatgactacacacgccaatgagtgacgcaggctcgtgacgacgggcaagaccgctcgtcgcacaactgctccatattactgacctgcaggccccccacgcactactacgagggtgtcagcgggagactcgctatagggacccatatgacgagaggacgagacagtacaccatgatgaaagtacggctgcacacgaccctacggacgacgtcagaagaacaacgacacccaagggccaccagccgatcttcctcatgtagaatacaagtccctactgtaaagtccaaatcttgagctataaaag

SEQ ID NO: 165026 - DNA, 397 bp, Zea Mays
ccaccgtgaggcaacagctgagcacggcggggcacaagctcgcgacggcggcgttcatgccggcgagttccaaatcgaagtcccccagcgctatttcttatgcggtttagggcatcgcgaggagcagagggaggcaaagctaggggtggaattataccggagtagtaggccgcgaaggcacccgcccactgtacgccgagctcccaggttcacgacgaacggaggtgatccggtgtaaaattcgttggcgccggacgcacccaacccgacgtcgatgccgcggaagctatcaccgaacctaagcgaagctctgaaagtcgcaagtcgcggcatttttcgcgcaaaattcgcgcgctacgcggttgttagtaatcgaaccctagacctcaccctcgcg

SEQ ID NO: 165027 - DNA, 336 bp, Zea Mays
gggcttttagcactgtttgtgcctttattggcacaagggatttgattcaagagcatatatccttcagggtatggccacttgtggaaagctgggatatgccaaaggagaccaccgacgattctagtgatggtggtctggtccgactgaagtataccttcagatttagggagaagtttgatgagccagacgacgactggctgaagtgtatcgaagctactagtgatgagctacttggagcttactccaaggctaaagataatgctttgtccgcagccttcgagggccgggggaagaaaagactgaacaaggtctttgatgcaattggcttcaaatacc

SEQ ID NO: 165028 - DNA, 1452 bp, Zea Mays
tacgtgtagtttagttcgtgtataattaaaaggtatctttacgggtgaataattaaatattatacaaagaaaaatttacttgtcgttctcaaattattacagccgacgttgttcaaagataaatagcaggagcaggtaggaggaggaagagaggtaagacttgggaaggaagaaagttttgtgtatcttcttacatgcctcacccggcagccattccctcatacataagcctcccagcgcccactagttaacccattccggcccatagacgacgacattgtcgtacctaagccttgacgagcgacgcagcccaattgcttctgttctttgtccggtacacggttgttcctttactgcactgctggcactcttctgcctgggagactggactgggaagatgggagaagagaggaatgagaaagaaacacggcagggtatttatagcggcagcgtaggtgcaagggcagagctaagcacgcggcttggaagctgcttcgtaatttctttttgtttactctctgctctttcatgtattttttattatatacagagtatatcatttatatggcttggttttgggttttggaattttatgggggattgagtatagtgcttgctgggattgttgggatttttggtgtatgaaaccctgtcacgtattgctcctggtcaattcgtgtagaaatacaatgtgtcttttatggaaggaggaattaaataatttacggagtaaaatttacgtgtagtttagttcatgtataattaaaaggtatctttacgagtgaataattaaatattatagaaaggaaaaattacttgtcgttctcaaattattacaaccgaagttgttcagagaggaatagcaggagcaggtaggaggaggaagagaggtagacttgggaaggaagaaacttctgcgtatcttcttacatgcctcactcggcagccattccctcatacataagcctcccgacgcccactagttaacgcattccacccatagacgacgacattgtccttcctgggccttgacgaacgatgcaacccaattgctcctattccttgtccggtacacggttgttcctttactgcactgctgacactcttcagcttgggagactggactcataagatgggagaagagaggaacgagaaagaaacgcggcagggtatttatagcggcagtgtaggtggaagggcagagctgagcacgtggcttggaagctgcttcgcaatttctttttgtttactctctgctctttcatgtattttgtattatgtacggagtatatcatttatatggcttggttttgggttttgaaattttatgggggattgagtatagtgcttgctgggattgttgggatttttggtgtatgaaatcctgtcatgtagtgctcctggtctactcgtgtagaattacaaggtatcttttatggaatgaggaattaa

SEQ ID NO: 165029 - DNA, 487 bp, Zea Mays
ttacctgtcagatattcgaaatcggcgaatagtttttttcctagcccatattagacaataaggagcaaaacttaacaccctaagccccatgcctaacgctccaaatttataattgttggccgccccttcgaaccttgttgcttcatgtgatgtgtcccatgctgccttccaagtcccacaagttgcaacacgactggccggcggccaacccttccaggctctagtgcccatagcctcagcacatgcattgcagatagcccctttctgcgtccatggtcacccctttgtacaagtgccccaaacctgcactagtcactcctgagtcctcagtccacactgttgcggccccctttgtgcttcttgtccgacaccggtgagcctcccctgccacttccccagcagtccctgctcccctctccttctagtctagcgaccctttcatgttgatatgttgagaatattacttgttaaaatacatgtgtattca

SEQ ID NO: 165030 - DNA, 883 bp, Zea Mays
ttaccaaagatgaagtgtattagtaaatctacaaaatgtattaaggaagatattataaaaaggcccaacaaaaaccccaaatcagttcactaagtggaaagcacactagagccttcaaaatttctctaagtcccaaaaccaaccctagcctaaagatcagatgtgttcacctttgtgctggtgccaaaaccacttgatccaaataacaaaaagtggccaaattacccaaggcacacccctgaaaattttgaacccaaaccagggtcgtttgacacggtttggcatcctttttgtcgctagtgaacagtgcaaacagacaagacttggcgccaccatatcttctaagctaggctagatcttcccttggaacttataggaactagctagccctaggtgccaggaagaaatcttgcacaagacatttggcgagattgacacgtttgtgacctctgcaggcacaaaaacttaggcagatgaacacgaccacgtgttcgacatgccctggcaacgccagagcatgccctcggcgctcgacccgcgcacgcagccccacaccgtgtcaccccgcgcccacacccgcgccgtagctataaaacccacaccggtctcaaccgtacactcccgcacgtcctaaccccgttcgagccccagttcgttggcgtttgcccagagaacggcgtgctagcggccgtgcaagccacgaccaccgtagaccggccaagctagccatcctccaacccgtccgacccttgggatagcttctccggaccttagtgaagctccctgagccatggattgaacatcacctcaacaaagacaccggatcgacgtcgccggacttcaaccggcaccgtcgcacgtagaccgagccccacggtaagcc

SEQ ID NO: 165031 - DNA, 561 bp, Zea Mays
gttgcctggtcatggtggttcgttagtggaagaataagaaggacgcaaaacaagagcaagagcgagtgaaggaaacggtcataggcaggcagtctatttaaagaggacaaggggcgacccttcgtctcccgcccgtccaacaaacagtcgtgatgacttcaatagccgaataagtttccaagaaagggagcagatcactgacacccattagtgtaacacggcaccagaagggaagtaatggcaactgctcaggcgcatcattacccacccgtcgcgctaggttactattttgggacaagacagcgtacacacccattgggcgcacccattgggtgggcaaaccagtttttttcaagattttctgaagcaacgtgatccgcaaaatatatgcaggaattacaaaacaacaaactcaagatcggtcaaacagaagatagccggacctctatcagccagaaccaagtcagcggttgcattaaagccctaggcagagtgtcatccagctagacctctatcggtttggacccagtcggctagatttcagtcagcggatacctcggc

SEQ ID NO: 165032 - DNA, 794 bp, Zea Mays
agcgtctgactccgtgtcactgggtcattatttaacgaccgcatggacaaagacagacgatgtttgccgatcgaacgcagagtagcatgagtgcctgcggcgcgtttggttgctttccaagagcctgctcgctggctcgctacagctgggcatatatcaagaagtaatgaacgtagcgttaagaaaccagcgttgggtcctaagactcatgtggcttatctagccaaaattctaattttacaatataaagagagaactcatctaagaacagaatagatgagtgagaatacaaattgctcttatatctttgtgttttctaggttgtgattctatttttagttaaggagactttgaactatactcgataaaaacttttaaacaccttatcagcatctttgctcttgcaatctaggagttcatgtagcagtgaaaaggtaagttcactcaacagaaagaagtttctgtattttttagccccccactttgttcgggcatgaacacaggtatatgcatggaaaacaaaaaataacatccctttaatagatttaatcgccggcttaaagtcgaatgagatgcaaaacaactagaaaagaaagaaaatgcatcatcggtctgttatcggattgtgacttcttctaggtccatggaccaaagcaaatggcgatgtagcatgcaaagaatattgagatagaaaggaatagggaaaacaacgagcacacgcatgggtcctgacgccgttgttgctacctcacaggcgagcacgccgtctgttgagcaacaatttgagcgcgcgg

SEQ ID NO: 165033 - DNA, 1050 bp, Zea Mays
tggatgtacatgtataaaagattttcgagccagtttgaatgcattatattaaaaaagaaagtaggggcaagaggacatggggcatccaaggggtcatgatgatgcaccgtacacgtacgtacgccgcctccacaacaattgagacggtccaataacacaagggatgatgcacggtctcgtgtaagatccgcaagaccgcaaacaagaaaacctgttgatcggagaagggagaaaaaaaagaaagaggagacgacgacccatcgcatgcagtctgcagacgccgcccgctgtctcatctcatcagccagcactcgtgtagtcgtgtgctgcacatgcacgggccggaacggggatggcatgtggatgatgggtgagaaatgaggggggaggcttgcttgcaagtcaacaaccgaggcttcgttcccctggcagtttgtttaatcgacgctcccgtgagaagccccgccaattgagcagaagggctggagaaaacacagacgacctcgaccggttcagagaggcggcagcacagcacggcgcgctactacgtaccgccaaacgagggtttccgtgccagccacggatccaccggcggacacaaacaaataccacgcacgagcctggatcttggattgcacaagatcagccatttattaataaaaattggcccgcccaagcaaatctctgcggctaggtaagcaatagtactatatataatataataatgtcatggcccatgcagaattgcagacgcatgcgtcatggatcgtaccgggacggacagcaaagagggaagggggaaaaaccacggagatggctagctagtagcctgaattgaactccagctttagttagccatgtcgaccgtgacgtgaactgcaagcgggcgatgagatagaagtactagtacgcgaagagagcggagaggggaaggccgtgcgtgcgcacccaaggccccgaacacgcaggtcgtccccaactggcgttccgcttggcatggcatggcattcactgcgcggactgcgggctctgggcggtggccgctctgca

SEQ ID NO: 165034 - DNA, 511 bp, Zea Mays
gtcttcttgaggattcggtgaatgtgggggacagatatcccccgggtccactagaaggctagaaggcctcgcgaaagaatctgggcccattacttcgcaaggccatcccttcatgggccaggggaggaatcaccggcaaaatggatcgacacaagattgggccgactcaagcccagacggctcattgggtttaatcattatccgcaacattgatctgattctcccgcgcagcgccctcagacgtcgaaactaaacgaggataagtcggcaggataatagggagataagtttagtcggttcactattacttaggagcacatagttatcgtacccgcatgtaacaccccacggtcgagtatataaggcctaggggtaccccatcaaagaacaagtcactcattttagaaatctactcaattctctaccatccttcatactagagaactcccctgtaatccaccacataaagagccacaccaggaaaaaggctgttacgcctctctaagctgcc

SEQ ID NO: 165035 - DNA, 507 bp, Zea Mays
gcactgtgatgttcgtcgaagccatgacagaatgagtttgagtagtacctcctagctgcgggatgtcgtggttctgaaagtattcctctcaatgcctcaactattcatcatgctgtcatgtgcacgatgtctcgatgttgtttcgtgcatcacaacgaccattgatgtagcgacgtgcgtcatcctcagtaggagccatcaacaggagatgatttagggttttagggttttgagcaagcatgtcatcagcttgactcgaggtatgcatgacccaatcaaagttcgatagcgggttgcgagggacgggcggtggtccgtgaggatgtccatgcctaggcttggccggctctcgatcgccctcgcgagcggcctcacgtcacgcgtatgctcctaagtgttgcggtgggtttgccatcgggcactcctctgtaggtggagtgccatgttgtccgaggtttctctagtcttggattcttcatcatgggagacctgttgaattgggtctga

SEQ ID NO: 165036 - DNA, 539 bp, Zea Mays
atatcatcagtataagaatgtccattgaaccaccactccaaagatttcaccatctgttcactctccataacctccccatttgccactttcaccttaactaggtgacactccgtcatctgtaatcccagtcgctctaccaaggccttactgacaaaagtagttcctgagtcgatcaatatcaatagagtttgattgcccaccatggcccacagcctcatacattcatgactagtggaaccactgatagcatgtaaggacatataaaatctctcttggtttgtctccttctgaatctgacccaacatctcctcagtcagattcatctccaactcctcagaggttaaggcattcagctgctattgcaccttcttagaatagtgggcctaatgatcgggctcaaatttctcgcacatgtgaagcatagcccattttgtcgcctatattccttcactagtctctccttggacatttcaggcacaacactaactcctcgattctcaaccttagatcccagcccgcgaaatttgctaggtccatcc

SEQ ID NO: 165037 - DNA, 1695 bp, Zea Mays
atagtttttaagtgtgggttgtattccaccccccccccccctccgggggttgggtaatccatcggggattcctttttctttcttaataaaatggcgtgcatctctcctgcgtggttcgagaggaaaataacaaaacacacttgcacaaaaccatacaagaacaattgaaacaaatataactaaaaactgtttttcacaagaataaataaaaccaagttcaatttagcaaaacattaatgtagattgaagcaatacaacctaacaagaagtcagaatagttagattagactgctagaaagctaactagatagatccttaatgcctaacaagaaaaagaaaactgcaggcagacaatttagaccagtgcaagttttagagagagaaaaagagcagtgcaagtaaaattaacgaagattgttagcatttgtggcacataaaagcttgacagttgacacagatatggaatgaaagatctaccttgaacagtgtgatatcaggagaggtttcatatttatgggatgaacgagttgcatcatccttgtcaggatctcccgtcagcacccactcatcaggagcagagacaaaaggaagtctttcttgcgcctcagaaggatatacaggtgtccgctcctcctgtaaaccaggcattgcttcccaagaggatctatcacctccagagcctgaactctttcttttccgaaggatatcttttgggggtgttttagtgccactatcacgggggacccatgagaatgctttgcgtgcttctctctgaaagttaccaaaactttgcacaaaatttgttttagctggagttgtagcctttttttgttttgcccttgatgcagagatattcgatcgacgttccctaggagctgagctaacgttaattgagattgcttttttagcatacgcaataattaacttatcatccctcaaggaagaaaattctttcaaaatctgcagccacaaaataagaaaccttccattagcacagcagcataaacaagtgaaaacagacaagtaaaacagctgttaatggctcagtgcagaaataagataaatgtttttcaagatttaatagagatgagggcaaacacaataagaatagtcaagttggtataccaaagaagcagactggagttgtttcatcatcaacagtacttctacgatcaactgagggtgttcgtgcagagaagaacaacgctgttgtgatggcaatggcaataaggaaagaacacggagacctaatgcccacaaattaagccgtgcaatctcagcatctgatagattcccaactgtacgcttgaggaagaaatgcacctgaaacagaattcaccagtgtcatctcaggacatgttttagtgcatttacaaatgtgaccaggtctggcaacatacaagaagctgctttgaacgcaggtcaggtaataaattcatagcaccaatggctacaggaagagcatcattggaatcccttaaagttgacagaaatcttgaagctgcagctgggcctccgccattaagtggatcagtgattagcagtttgacaagctgacggccttgcaactccctccgcaaatcaattgataaagaggcactttcagcaacctccaaagcagcggaaacagctcctttggcagcaagacggagtgccaagccctctgggtcatcttcacaatcagcttccacctaa

SEQ ID NO: 165038 - DNA, 917 bp, Zea Mays
tcttctttggcagagactgaattcaagacctaaagagggtttcccctcaactaatttcactaatggcgctctaatacgctgtgtccacggtgacaacgggcaccacgaacaaccaagcgcgttcccggcgatctaagggatcctagctcaattgagttggtcggggagtatcaggggcacactagaacgctaaaacgggagagcaaaggatatgagcggacctgagacgcgttggccatggctaggtcaaaccgagcggtgttcttgagtgatttagggaaaataagaaattggagctctctggtgaataattggaggcacgacttggtggcttggtgcgtgattaccctacggacccgacggtgcgctcaatttatagagtctgtgagtggtggccggtgaattagacgaagacgcgcggcggtcgaagaaacaggaagttactagcgcgcgtgattggtgtcctattaccgtggcaagctccccggtgatgaacggacggctaatgcgagtcacggcgatgcggtggatgtgccaaggcacgtggagcaaggccatgaagcggctgtctctggcgaactcatccgaatccaccgtggctggctcgggtacggtggtcggagtaatctagtggccggagcatatccacgatgtgatatttactgacccccggcgctatccaactgatctgagcgcgaatcacggcagtgaaagcactaatccgcgcgtagctcgtcggcggcgagggcactgagctggcgatctgatcagcgcactgtaccatctagaacttcttcagtcagcttgacagtcgatgtttagggcagattttctcccaattttccatggcaacacaaccaatgctctgcagcaaagttgtagccctacaaaccatctttacttttgctacagtatcc

SEQ ID NO: 165039 - DNA, 639 bp, Zea Mays
gcggtgggagacctggtggtaagtctttgggaaagacatcagcgtactcctgcaaaaggttagcaaccgcagggggaatagccaaagatggtgcatcatcaagtgaaatgaggacactagagcatacaagtgcatagcatggcaaatgagcaccgtgtagatcatcaaaatcagcacgtgtagcaagtaaacaggagcattcaacttgatttcagaaggaacagagggtgatggatcaagttgtttagcagttgtagcagctcgggaaagatcatctttaacaatttgttcaggtgtcattggacgtataattattttctgacccttaaacatgaaagaataatgattcgaacgaccatgatgcaaggtatcagtatcatattgccaaggtcgaccaagtaacaaagagcatgcttccatgggaataacatcacaatcaacaaaatcagaataagcaccatggagaaaggaacacgcacggaacgtgtgatttttattttaccaccatcattaagccattgaatgtgatatgggtttggatgcttacgtgtgggtaacgacaacttttcgaccagcatggtactcgccaaattgttgcaactaccgctgtcgataatgatgcgaattgaccgctcctgc

SEQ ID NO: 165040 - DNA, 505 bp, Zea Mays
gtgagttgttacactggaaacgcctaatcgtgcttctcacagcaaggaagttctcatggatgctccatgatttaataaaggcgctttgaaaaggcgagataatctcattcattctcggagccaaccgaagagcaagtgttttggtaataatttgaataaaagaatgaattaggcttatcggcctaaagtccccaactgtttccgccccatcttttttaggaattaggatgatgttggctgaaattattagatgaaggttgcaacaatgaaggttgtagaaagcattcatcgctgccatgaaatcatattttatagtggcttttccgtgctctttaataatagcatagccaaggatatgcatctttagtctgcttcagagacttgactcgaagtccgacaaccgcctatttttcttgtgctaggtctagcctaaggagaacttccatggccatatgcatgaacagcctagaattaggaacaagtctggagctccaacccctgagcg

SEQ ID NO: 165041 - DNA, 1365 bp, Zea Mays
ctcaaatcaaacaagacagtacgacacaaagcaatattaagggactgatttattagggcacgtgcgtgcatcatggtgccctatttgcttacaactgctacatgtacgagtggcttttcccttgcctgcagactttgtctccttgctttttttaattcttttgcatctcccctttgacttcacatcattaggtgggtgtatgactacttcatttggaatctttgtaccaatgaaagactcaatttcatcatgtttggtactgataacaaaaggaaccatgactctgatagctgcttgcagatttaacaaactggaagttaaaatgtccattccttcattggattgctttgccatttggataagatcttcaaacatgttgcgcgcttctgaaaattttttttgtgttgccacttcattgggatttgaaggtacgtcttctagtatgttaccttcatcatcaaagaaaatagccctacatgaagaaaagatttaaacatcacttgaaacttacgtgtcccaattgcatagtggaatatagaagacaaaccttttacaccgtttctgccatcttgtcataatataatagtctggtaattcaatttgtctctctgctctaagaacttgtatgatgtgacagcacaggatgccgtgagactcaaataatttacatgagcacctaccaatcaaacttaacttgttgaaatgaaccaaccgttcctttccaaataggctactaatggtaaaaactttgtactcctcaccatctgttataccttgaataaaacaatgatctctggaggctattatttgttcctgaactttagtaaaaatttcatgtgtatatgtcatactacactgcttctccatgggccatggtgtcatcaatttagaaatactgtgtaagcttttgtaatcccccatcactaacatgcatcaatctgaatgcaagggatgtgccaatactagctttatggcaattgtacaaagtactcttcgccctctctgtaacatgacggttggatcgaagaaaatgtcggtggagcggcgatacaagaccatgattatgctgctcaaccattgaagaaatcgtgtacttcttgttggtaccaaggttcacatagatgtgtgccacacacccacaccttgtttccatcacgttatgtctcttctttctcttttttccagattgatcaatatcttttttgtccttatgtactctatacccttctcttgcacaataaaaatatttgcctttaatttcatcattaaccttcttatgttgtccaatacgaactgagaacccaccatcatgtgcataacctttgtaaaatttttctacatctgcgatgctgtcaaatgccatcc

SEQ ID NO: 165042 - DNA, 762 bp, Zea Mays
ctgaattttatccaactacctgtcgcgtcctttctgctgaaattacacaagcagctcaggttcgcggaagcggaatcggagtccgcacgacgtcgatcatggcttcaccatgccttgcttctacttctgattctcgttgcttttgctgctgttgctggattgctgcagggagtaggaagaggaggaggaggagcctcagcaccagcggcatcacctgcggatgccatccaaatggacgcgcaggtctcgactcactgcggggtgccatacacagcttcactactcgccttcgatcccgtccagcgcctcctcgctgttgcaactctgtgagccccattccaaaccccgccttcacattagtacatcacaaccaaccctaaaccactgccacacaattcattcagttgtaaactagagctttgctaatttatgttctccatccctccaaatcagttaattgcgttataacaaaacaaagaaactactttgcataagcatggaaacaggttatttagttgttgtatgtctcaaagacctagctcttattgtgtaattgttgatagctgttcttcactacaaactgcagggatgctaggataaaaatatttggaggtgataacattgaaggcctccttatatcatcgaagagtgtgccgtacaagtttttgcaggtttggctcttaactatttctcttgtccaccaaagataaagttatacatagttacctcgccttgttcaaactagctatgttctttgttgcc

SEQ ID NO: 165043 - DNA, 554 bp, Zea Mays
gaattgcaatcaacttttgaggcccaaacatgagaaaacatacacctagtggttttgaagcccaaaccactaaatcccttgtgagtagtgtattcgatatgctccctccatgatctcgtcgtgtgtcaccactagtccttaacaatacgatcaccaagttgtctagcatcttcgcttgacttcatcaatatgttctacccccatattttcttgcacttgtcgatgttcttagatgtcagtcaccatggacattgcttcgaattctctaatccctcagtccaagcttcgacgtccatccttcactacttctagtccattagcacgggccctgcttgacctccatcttcgcaccgatccttttgagctccacatcttcgcatcacaagtcaagatcatagacatattgtaccacacaatggttaatctacaaactcaatcaaatccaaccatctcctttacaaccactcgtcacacttgaacaccatggacgtatatcaaccacgtgctcacatgactatcaaccgtgcaccaagaagtccatgctcacaaccatt

SEQ ID NO: 165044 - DNA, 622 bp, Zea Mays
ttagaaaaaggataatgacttttttgtaaaatggatgacaggtgaactgcatacctttttttggctagtcaccaaccgctcacgctctcttcgagcccagcgtcccgacaaatcgcctcacgccatcgccacgggccacgacgagccctaggtgaagcggaagcgggagccgtagtgtggcacggagttgcatcaggtaccaccatggcgctccattgcagtggtgcagcgacggcgaggtttgggaagtggcaagacttgagagtaggtgcgggaccgacatcacgcaatggcgacggcgttgtagattttgggggttggttgcttcgcttcttcggattgcggcgctgcacgcgtgtgaatcatctaggccccttagtgatgttttggtaattaatgacgactgtttgtggactaacggttcttggagaaataagaatgcagggttggaccatatagaacagaaaatcttggagattgataagcttggttgtggatcaagtgaaggcaaaggtgtaacataggttttgtttttaccggtctccaggagtttagagaagatacttgaccggattagtaggctagatagtcgtactattaagaggggtcaatgactttgatc

SEQ ID NO: 165045 - DNA, 663 bp, Zea Mays
aagttgagaaaagaagagattgaacagagtttttgacgctattggcttcatctaccccgactaccgctacccgctgcgggggcaagggaagaagaggaacgttgctgctctggccgccttggctgaacctgtgccgaaggctgcgggaaaaaagatgaaggtagttacccaccggccacgttatattgaaccggtcgtggtgtctgagtttggcggggaggcctcttcagctgctgaatcaagagaaactgctcctccgatgcagagggctgaagaactggctataacgccgaaggcaccttcggttgagttagttgaaacgaaggttgacaaagataaggctgaaaggtcaacaactgaagaggtaacaaagatgtcagggactttaagtccttcaacagaagcaacagcgttgagggcacaaaatagttttgccataactcctaggagaaggaggatggtaaatgtattagatgtactggaaacaaccgactccataagtctcgctcccaaagggaaggttgccgaagctgacaaaacgcaacccaaagctgatactaagcaaatagatgtcgaagctacaacaaccgaggctgaaatcgaggcggggccctcagtgcctgctgagacgaagcctgtggaatttgaagaaaaagcaacaga

SEQ ID NO: 165046 - DNA, 733 bp, Zea Mays
caaatttctggagcagggagtgtgggttcgacgctctacactattttttgcatggtgtggtagctgtgcgggcggaaggtgaagctgtttacaagtcttcacaacactccggaagagtaacactactcacttgctcaagatcttgctagctctacctcccagcatcacttctcctctctctcttttggcttataactatgtcaagcactaaatatatcacataatataatagagaggggcaaagaatgattctacagttgtttgctaccatggggtatcacttgtgtactggttgaggtcggtgggggcctgttttccagcccaaaggcctcctgtagcggttgcaaataaattggaagtgttttgtccgtgggtgcaccagacctccaacgatcacctgcctcagtgcgatctgattggttgtttccttctctaaaaggactaggcattggttcaccggaccagtccagtagcatgtcttgtgtgccataggacccggtcctataggggtactattgatggtttggtgcataagaccgagtattgtagacgatccgatgtgctttatccaaaaacctaagaccaaccagtttgatgttggtgtcacagtagcagggccggtgcacacaggaccagtgctttagcaggtccggtgcacacgagaccagtcctataaaaggtatggtaccgagacagtaggttcaaagttctttttcaaccattcttctctaat

SEQ ID NO: 165047 - DNA, 527 bp, Zea Mays
agggcatagtggtcaccccgagttaagtatgcgtgagcatgtcgcaccgccttaagtcattgccgacttaagccgattgctccgttagtagggcatagtggtcaccccgagttaagtaagcgtgccaattgacagtgaacaatctgagtgccttcgaaacctttttattgatgatatttttctcaatttacagaatacatcatcgtcccaatagcttctgagatgcagctaggggtaaaacttcctgagatgttctatgttccatgagttcccaatttctgttccgtccatctgagtgaggcgatatgatcccgaccgagtgacttctgttactgtgaatggtccttcccatagaggtgacaatttatgccgtccttcccctattagaattcggcggaggacgagatctcccattgcaaaggatcgatgccgtatggccttatcatgatagcgcctcagagtttgctggtatcatgctaattgaatcaccgtattcagtcgctcttcttcgagtacgtcaacgtctt

SEQ ID NO: 165048 - DNA, 544 bp, Zea Mays
cgtgccggtgcggtggggaagctgtgagagcactgagtgcgtgaagaacttgacacttactattgaaaatttgtgcttaagttccgtcgatttctcgaagaacccggggtggcgacgcgtaccatgctagggcttgttagaatcggtagcaggagccaagtgttcggagttcttgagggcgctaaacctctgccagctcgtgttcttggtcgtagcgtcgcctgaagtatgccgtggccggggaagactctgcgtcgattgccagaggtcgtcattggaacagccgagggacgggcttgtcccggcggcaaggaacacaagctcgcacaacctgtacagtcgtcgtcttcctcggtgcatgcaacgcggaagctcacctgctgcccaccgacgcgggagccaactttccttctcagcatgcataccgctgaacgatgtgcaagctgctggaagcacatccaatttgcgcgatgggcacgtctcgcaaacaacaccgatgtgcatccgcgcccgcggtattgttggagacagacttcagtgtcca

SEQ ID NO: 165049 - DNA, 1882 bp, Zea Mays
aattttaagtgaggtgcttctaatcacacaaagtttatgcatatgatgagaaaatctagggaggtttgggatagataataggaaggggggttagattagggtttcaaacctgggttgaaaattgggatgttacaaacctaccccacttaaaggaatctcgccctcgagattcagacggggctcgagaagaggtaagggtattccctcctcagagagtcctcactttcccaggtagcttcctcttctccttctctgctccactgaaccttacagaatcttacttctgagttgtgggtctttcggactgctgagtcaagaatctttactggcttttcccggtactggagatctttttgaatctgaattgtctctgcctcgaggtggttctctggtacttgtaggcatttacggagctgggacacatgaaacacattgtgaatatctgacatggattctggtagttcaaggcggtatgctgcgggtcccactctgctaatgatgggatagggaccgacgaaacgcggtgctaactttctttcatttggaatcttctgacaccacacatcggggagaccttgaggtatacgaaatctccttcctcaaatctgagttccctccgtctgttgtctgcataacttttctggcgactctgagcttcaagtaacctcttgcggatcagggcaaccttctcttcggcctctttaacaaagttgggtccctccagtgtccttttccctacattggaccacattagggggggtctagcactttcgtccatacaatgcttcgaatggtgacatcttgatactggcctgatggctgttgttatatgagaattcggcatacggcaaactggactcccaattcctgtcgaacgtcaacacacaggctcttagtaaatcttcgaggaccttgttgaccctttccgtttgaccatctaactggggatgataagaagtgctgaaatctaacttggtgcccatagcttgctgaaggctcttccaaaattttgaggtgaactgcgtccctctatctaacactatcttccgaggaataccatggagcctgactatctctttaagatatatccgggcaagggtggctcctccaaaagtggtttttacgggaatgaagtgggccaccttggtgagacggtctattattacccagatagagtcattccctttttgcgtccggggcaatccggttacaaaatccatgcctatttcctcccacttccattcaggcactgggaggggttgcagtaggcctgcaggcttctggtgttcggcctttgttcgctggcaggtgtcacaccgggccacatactgtgctatctcctttttcatccctctccaccagtatctggctttgaggtctaggtacatcttggtggttcctgggtggatggagtaggctgagttgtgggcttcattgagcaggacttcccatgcctctcctattggtacaacacagacggttcttgaaccaaagaactccttgtttatctgccctaaggtccagaagttgctccttgcgagctctttccataagtcttgctgtctccgcgtccaggcgttgagccttgcatatgaggtcttctagcattggcttgacttccaggctaccattgtctcccagacatgcatttagctgagtcgattccttcttccaatttctaaaaagttggtcccctttatcccgaaaggttttcggctgagggcgtctgctaccacgttggccttcccggggtggtaatggatctcgaggtcataatctttgattagttcaagccatcttctttgacggaggttgaggtctggctgagtgaagatatacttcagactcttgtgatcagtgaagatgtggcatttgttcccaa

SEQ ID NO: 165050 - DNA, 611 bp, Zea Mays
tccgtttcctaccgagcccagattggaatgacggcggcactaatcacggcggggagtcaccggcggtgagatttttctggcgctggcaatctgatcctcaacagtcactgtaccatgggctgcaccattcagtcaacctgacagccatagtttaggctcgattttctcacaattctatatggtaacatactccatgctctgcagcaaaattgtagagctataaaccagcaataattcgactatagggattgaactcatttgagcactagatcaaggttgaattcacactcaaagctggctctgttacactgaatatctgaatttcagaatggaaccagcctgacagccaagctttaggcttaattatttccaaattcttcttaacaactatgcttatgctcttaagcaaagttgttcttctatgttaggtctataactttgatgtggtagcctagggcaaaaaccctatattttgaaagttacaagactcaaaagttgagcccacaaatctgaaattcagacttagagtaaattctcaattggggtcctttttgcaaatcattccaaaacttagggtttggcttgtaaacctttccaaatgtgaaccatgg

SEQ ID NO: 165051 - DNA, 690 bp, Zea Mays
gaaatttgtgttctcgacgctacaagttgggctatcaggagctctaaatcgcagttccgatggtacagtgtcccgagcagttcgccagctctgtccctcactgccgatgagccatgcgcggattcgtgctttcgccgccgtgattcgtgctcggatcggttggatagcgcttggggttgagtaaatatcatcgtcgtggatatactccgaccatcgtaccgagctagtcaccgatgcttcagatgtgtttgctggagacagccgcttcacggccttgtgctacgtgcctgggcacatttaccacatcgccgtgactcgcttaagccatccgatcatcgccggggagcccgccacagtattctccacgaatccactacgccagtgacctcccattcctccgaccgccgcgcgtctcaatccaaatacaccggccaccgctcttgcctgctataaattgagcccgtcgtgagctccgcagggtaatcacacatctaagccgccaagtcttgtcttcaattgtccactaacgcccgtgaattgcttagtttccccaatccgtgtttccgccaccacgaaagagacctcaccgtggtcagcttgctctaggttagttcaagctccctggacgtttgttctagtctccttaagaccccctattgatgttcgacccctttgattgaactagaccac

SEQ ID NO: 165052 - DNA, 337 bp, Zea Mays
gcggtcgcaaaagttggcctgatggttgatgcagtgccaggggagatgacgaagccactaggttgtgtcttgccccagtacgatagggaggtacgctatcatcacatcctccgatgcctcgtcggcgtaggccaccgtcgagtagaattatagccaaccaccagggtctagtttggcctcgcacttgtcgatgttggagaccttgaagttaggcggccactggactgccccgtagctgtcgagtaaagactgagatacagatcacccctgggctttgagacagtcatcatgagcgtgggcatggtggtggtcccatggtggcgatgggcgacgtgga

SEQ ID NO: 165053 - DNA, 797 bp, Zea Mays
ggaggctgccgctggctccagccaaaatggtttggtgtatctgaagtatacctttcgatacaggagccagtttgatgaactgaattatgactggctagatgccatagaggtgactagtgatgagctgcttagagcatattcaaaggccaaagatgaagccatgacaactgccttcggagcttggggcaaaaagagtttgaatagggtatttgatgttatcgggtttgtgtacccagattattgttatccctcgcgaaagcaagggaagaagaggaaagctgctatctcggcaacttctagtgcgtcgaggtcaaaaaaaggttaaagttttgacacacctacccaagcgcattgagatggccaatgggtcgaagctaagtgaaggggttgctcctctcacaaaacaaggtcaccctatgtcagtcgaagctaggacaaaatcagctgaagagccgaaactagagaaggcgacagagaagttaaaagcactaagtccaccatgcacaacggaaccgtcgaagccatcaagcatccccacagcaactccaaggaaaagaagaatggccagcgtgctagatgttgttatggagtctgtgaaaatgtcaactcctgcttctgccgaagcgcctaggatggaggctaaagtttcaaagaaatttggcgaggccagaatggcgcagactatttctgaagctggaccctcagaagttcctgtcgaagctagaccttcggaaagcgcaccgataatcctggagaaagagggtgcttctgagaaatccaagtctcctgctcctgaa

SEQ ID NO: 165054 - DNA, 780 bp, Zea Mays
acctatacaaaatccaccaaccataggtggtaacctagaatgctaaagggctatttcaaaggtgactagacaaaacgaccaggcctaaactcctcctgagttaaggccacagacttttcaggcctgcagccccagctaagcaccacaacttggcataccccctgatgtcttgagtaaccctagagatgtccagggaagtcctgtcaaagacacaggtgtttctgtgtttccacaaccaccaggccactaggatcactgctgaattgaaacctttcttttgtgcctttagtgctgtcatttctgacctatgccaccaggctagaaaaccagattccacagttgctggagtgaggtgctgcagcccaataagagaggatacagaaccaaacttccctagcaaaaacacattgcaccagaatgtgttgcattgtttcttcttcctgatcacagagaaggcattttgtgggatgatccagtaaagccgtcaactgatttcaattgacactagacaaccttttcttctgccttatgatgagaatgtgctattaaatttgtgtatccaaaagctcgtagtgttactttttctgcattaagcaaatatattttgatgctttgaattcattgcaggttttaattctacacatgggttttctgtttcaattttggaactctaggcagtgctataactatgagcagaaaggatggagattctgtgacgagttttcttaaaacagtccccaatttttcttgcacatcttttgagcactgtgtcagtttttt

SEQ ID NO: 165055 - DNA, 414 bp, Zea Mays
aacgtgagatgcaacccccaagatgtattagtaagcatccagatattaaatgacagacagcgccaagcaattgcacggaggggattttccagtattcttgatatgagacttgacgcactcggcagcagatcacatttagcttggctgatggaaaagctcgaccataatgacatgacaattcgagccagcccagggaaggagctgaaaattacaaaggatacggtgcaccttattttggggttaccaaatgctggtggaggaacagcattgggcatcgatgaagttgttgctgccaacaatttaagggctgaacttgggttatcgaaagaagattttggggttgcagctcttcaagatcgtctgaagaaagggtctgacgatgatttaagcatcagatcctttttccttatacta

SEQ ID NO: 165056 - DNA, 803 bp, Zea Mays
ggcaaggggaggtctcaatacctttaaagattttcttgttttgcatcttccactactcccacatagcaataataatgatttccaagaagaatgtttccctagaatttttatatgcatgaaccagtctttcttgaatggtgagcatgaggttccactggatgttaagaaccctccaacatcatttcacaaaaccacactagaagaaaagatgatcaatgtcctcatcaatctcatcttgacaaaggacacatttattttattggtcatgtaactgatttctttgtagcagcgtgaacttagtattgagcctatcaacaagcaacaaccgaaagaagaactttgttctcatagtacgtacatttgctcttctagatcatagtgaacattataaaagcctcggtgttcacatgtttgtgtttgtaatacttgtgaactaggaactttctagcacttccattctagacctaagaatccttttcattcagagagtatgacgtatctttcagtaacacctgcatgttctgtaactcttgatgtgcttgatatgactaaggtaagaagaaaaatggtggaaagataaggagcttctctaacctccttaattgagttccaaagatctaaagcaaagggaaatcctggggatttgatcttcatagtcaccatagcctaattatcctcccaaaaaggcttgaagcaccatcaccaattacacttctagacatagatctataattgctattgaatgtaaaaacatcgttccaccaataagaaccaacctccccacaagaatgaggaaccctccc

SEQ ID NO: 165057 - DNA, 841 bp, Zea Mays
ctaattttacaagacaaaccgggtcaacgtttttttgatagcgtggatgttttaaatatctggtcgtgcctcttcaagacaaataatgaagtgtgccggtgctggtagtctgagcgtcattattacttcttttgtccacctctgctcgtgtcgccccttgtcctttgtagcctaactttcagctttccttcatcgttttgtgtgctttataaggcatcgggggcttagggctaggacccgtaggagtgggggtgaggcctaggacctgtcggtcatgagtgggaggtggaccgactctttcccatgtcgtggttcgatcgatgccaggcacaattaatgtgtcatgcacggtactgatggcgagaacattccttcggtcagacgcagaatccactcgagtggctccctagcgatttgtctaatccccttgctaggcttcgcctcttccgaccctaggcgtggtgcacaagggtcatctggggatggattcacctagtcaggcatgtccttatcttctctttgactcgtggccccttgagacatggggatctgatccccgacataatggttaaagcatgcatccgcaattgcaacgacccggattcaattcttagtctcgtgccctccttttttctctaaaggaatggttcgtttcaaatcttaggataaattttctatgggagatgactttgtccttcttgttcctcatccaaaacaccactacaggcatgtttggaagcgaggagaatataagggatagcaagggattttagcccctccaatcccctcacattccatgtcttctcgtttcctgaaccaaaccctaccttcgccactccaa

SEQ ID NO: 165058 - DNA, 953 bp, Zea Mays
ataagtcttaattttggaaattaagttaaaatgtacacaaattataattaaatggataaaaagtcatataatataggactcgaggcttatggtgctaaatatactatctcaaccaaacagacatattcctttcaaaccaacgaatcttctgctctgtggaaagctatgttgcaatgtcgacccactcccttcgcctttcccattgccagatcgcttgaggtgctaaatcccactgcatagatgtctagacaaagatcgaatgcttcttgagaagggaagtaaggggcttggccaaaagatcgaacttgcgcacaaatttgcgatagtaccccgcgagaccgagaaaccctctcaattccttgcatgaggtcggcacatgccatgaagaaatagcagcaaccttggtggggtccgtggctactccagcactgcttattacatgtcccagataagctatctacttgcgaccaatagtgcatttagacaatctgacctgccaactatctcgagcaagcaactacaacaccaactccaagtgtgacaaatgtgcttcccaagttggactataaactagtatatcatcgaagaacactaaagcacatttatgaaacaaggaggccaaggtacggttcatagcactctgaaatgtagttggtgctctggtcaatccaaagacataacccggaactcgaactgaccatggtgggtagagaaggtcgtcttgtgttgatcctagggtgccattctaatctgatggaagccagcgcttaagtcaagtgtagaaaaccatgcaaccccatgcaactcatccaaaaactcgtcaatgatcgggataggaaaacgagtcttgacggtgagagcatttaaatgacggtagtcgacacaaaaacgtagttgttgtccttctttttcaccagaatagctgacgatgagaaatcactccgactatgttg

SEQ ID NO: 165059 - DNA, 751 bp, Zea Mays
ggcaacatgaggatctgcctccaccaggcaagcaaggagacagccgaactcaccatcggcaacctcgagcgagtgggtagaggccaaacactcctggaggttcgaggaggtttgtgatgagaagctcaggatcccaccctgaccaaaatccatcccaaagtctttcatttgccccattgagatcacttggctgcacaaggaataagatgaggtaaagcgccgtctcgagaatctagaagcaaaaggaagaagggctcgtacctcgagtctgtcatcttttgccggagaggacgcgacaatgggggcactcttccaatgggtgctggcctcagtccatagggagaaacgaagaagtcacccctcagcaaagaaagtaaggcaatacatggcaaagtcgcccaagggagggaccatttatagaaaagcacaaggcgtgataaaatgggtcacataccaagtgttgcgtatggaaatgggtgatgtttcggcaccaaatacgcaaaaccgcggaagtacacactaggataaaaggcagcgcccgacccgaggaaagccttcaaggggaaatattctcctctcgggggcttgggggctactgtccgggatatgatcctcggtccctagggcccatctctcagcgagcaaactagggaaaaggactctgacaactaggaaccgctggttagttggaggaaatatgtaatgtataccatagacaaacccacccccgaacgatccctgtggcactgag

SEQ ID NO: 165060 - DNA, 542 bp, Zea Mays
acgacgattggctgaagtgtgttgaaaataccagtgatgaactacttgggacctactccaagtctgaagataacgcactgtctgcggcctttgggagccgaaaaaagaagaggctaaatagagtttttgatgctattggatttatgtatcctgactaccgctacccgccacggggtcagaagagaaagagtggaacttctgggaaggatgctgcttcagccgcctcaagcgagcccgcgccgaagaagagaaaggtgaaggttcttactcaccgaccgcgctacattgaaccggccacagtgcctgactttggcggtgagacctcttcggctactgaagccgaaggactagtccttacgcagaggattgaagagccgactacaatgccgaaggttgacaaaattgaagaaccaaaacccgaagagacaaaaacatcagaaattctaagcccttcggtaggagtggaggcgccgaagatacaaaaagatctggcagcaaccccaaagagaaaaaggatggctagtgtgttagatgtgctggag

SEQ ID NO: 165061 - DNA, 411 bp, Zea Mays
gagccgttcagattccctccaccttagtaacgcatgagtaatcagcgggagtcatgatgactgcagtccatgcagcattgataggcagtgacccttttcttggaaacacacgagtaatggtgagtcattgtccttgctatggtaacgtgtgagtaacagcacggaccacgcagcgtggactgggcacgccgcctgtcactggaatgggcagacgcacgtcttatccgtaatgaatgcaaagacgtgcgtagcccagaggcttcatgccaggttctgcccgttggcttacgccgcgcgcagtaggccacgtggcagcatcgggtctctgccttggcggggagcaggagtgtatgtgataaggtccggatcccaccagatcaggtctggacatgtgtcggcaccggacccccg

SEQ ID NO: 165062 - DNA, 615 bp, Zea Mays
agcggcgagtgctgttcgatctggtggtagcacctgtctgtggtcagattcgtaatggctgccattttgccctggccacacaaggaactcgcctgccattttgcgcccccggccacacaggcgcatgtgagtgctgcgttggcaccgcgcaagtggggcgcaccagtattgccgtcgccgaaaacgaaccgcacaacacaacccaacacggcaacacgcccctccccgaattcacagttcgcttgattggttaccagcttgcacaaagtcaggctcccgcgagcctgaacgataggatacacatacactcgttctgtgcgtaccaactaatacaacaaatagtctcaaaatgtattgtttttatatccgctcagatctcacgtgcaagcaaccaaacaaaatcttagatagaatcaacgcacgcggtgatctagaatgtgatgatacggccaaccaatgagacggagtctgaaggagaagcactttcatcatcttcctccgtcgcctgcagctctacgggggttgcagtgcagggcatctcccgccatcgaaggaagcaaagggttctggttgcatcgcagtatgatcttcgattgcttggtaggtggagatcgt

SEQ ID NO: 165063 - DNA, 725 bp, Zea Mays
ctgatactgacaatgaaccttgtttttgcctatatccaatgcaacaggtacatcgaaatacttgacatcgacaacattttcggatatcaaatggaagaatcaagagaagttctactggaagcctggacatccacaatgcacatcatcattagtttcctcagcgagatgcagaggcaactgaaccgacatgactttggctccttcgacagaatcaaggaggaatatttcctggcaatcgcgagggtaactgccatgaagctgctcagctcagctagttctatcggctttcaggtgagcccaccaaccgacaagccatgcgagaacagttacggcggcgctgctagacgtggtctatccaaaatggtagatgtggtgatggtgtaccaggcactggatcacggtttgccagcaatcttatcactgctgtcgggggaaactaaggagctcgtcgttgcagaggctgaagggcttatcaagagactgtcggaagcgttcgccaaatcatcagatgagctgaacaaaactgtcaggtcgcagctcttgttcatcgccgacaccggtgtccatcgtttcacgaagcgcatcgtggatcatgtacggttcctggttcagcacaggagggcggtctatccgatgctactagcggacggccgtcgtcgtctagaaccgtttggtgaactggtgacgcggctggtcttgtctctggagttcacgttgagcgtgaa

SEQ ID NO: 165064 - DNA, 629 bp, Zea Mays
gtgctgtgctcgccttgccagcccaagcagcgatgcgctgagctccggcgcgttgctctgcccagaggtcatcaagtgtcttcctcaacacctccactgcctaggggtccggggccgactgtgttgcctgtgccgcctggaactggcggacctacccctctagcgcccgcaccttcccttccaaacgcttcactttctcctcgacctcgagctcaacctcatccagcagcttgttccgccttgcccacatctcctccctgaaggcgaggtcctcctcctgccaagcgaggtcagttgttcatttcgccagggaggcttccctcgtcttgaggtttccctcaacacgagcgatgtcactggccttgtcggagagctcctgctgcagcttcttcagcttcgcctcaaccgtagcttgcttgtcccgctgtttctccagcactgcattacaagctttcaacctatcatggagtgttgtgacggcctcctctttttggtctaggtgcttttattcctggccaagcttctttccctttgggtcacctcctcctctcggtcagacaccttccggatgtcctccttgaagtcctcacgctcctgctcaagctcagctcgctccgaggcgaattagc

SEQ ID NO: 165065 - DNA, 703 bp, Zea Mays
cccaattggctgtgcccctttgccttcgtgctcctctgttccacgaccgcgctgccgcacacgccatggcttcgctcaatcatcctggtcgctttcaggctgaggaggagctcaatctggtgtgtggcatgcttgggtggagcgcgctagggctcgccggaaggatccgtgccggcgctgtcccccttggcgatctcgccgcctaggagtttgtgttgttcacctcatacatttcttgcgggttggcgctgccgatttcgcccttcttcttgctactgctggaggagttcgggcttcagcttcaacacctcacgccccactccatcctccaggcagcgatcttcgtccacctctgcgagatgtttgtaggtgtggccccctgcacttccctcttccgctatttcttcgtgctggtcaagtctgggaagactagggaccacatcggtgcctactactttcagacgaggccagatccggccatagtctacatccccacctttggtggtgcgaggtgggaaaactggcgcaacgactgggtgattgccagcaccgaggccaacgaccaccacatcctgccgagcaatgggccagcactcgtccgcaagcaatggaggaccaagccatccctctcgctagagttcctgcccgtattggacaggatcaaggtcttggccatgggcggcctgacatcaatgcacgtggt

SEQ ID NO: 165066 - DNA, 836 bp, Zea Mays
cacgaagtccacggcggaacctgcgggtcacactcaggacccagggccctcacagccaaggtgattcgtcagggattctattggcccgcgataatatgcacggccaaccgagtcaccaggtcatgtgaagcatgctaaaaattctgccctcgctcaggcgccacttcacaatttaccaagctcatcgcacatacctggccacttcagcgatgggggctggacatcatcgagccactgcctacagcgcaagggaaccttaatttcaccttcgtcaccgtcgaatattttacctggatcgaaggcagagcagtctccacgataatagcaaagaccgcgcaaaaattcttctggcaaaacatcgtctactggttcagagtcccatccaagctaacagtcatggcaaacagtttgacaaccaggatttctgggaattctgcacttccatcggcaccaaggcagtgttcgcctccgactaccacccacaatccaatggtgtcgtcgaacgcgccaacgacaagatcttcagcgctatcaagaaaaggctccttaacgacaaaaagggcaaatgggcggaccaattacctaaagtcatatgggtgctgaacacgacagaatgccaagcaaccgggttcacacctttccgcctgatgtacggatcagaggcaatgacaccgcaagaattaaagcacggatcccccaaacaaaccaattagtcatccccaacgtcgacgaatcaacctccaaagatctcattgacggagaccgtgtcctcgccttgcaggccctaaacaagtatcaagcccagactaaggcatggcatgacaacaatgttgtcc

SEQ ID NO: 165067 - DNA, 654 bp, Zea Mays
ctgggccggcttatccctttttggcccaccaggaaaaaccctcagccgcgcctcctgcttttcagcccagttcttcacccacgcacaccatgccttgtttcacttgcgtgtgggggccactggtcaggccacacccgctgacaccgcttggctgaattggcccgctgcccggtcttccttcacggcgcgcttggattgaacggctggcggatgggcccgcctcgtcagcgccctcgcgcacggaccatgctcggtgccactgacaccgggaccccactggtcagctacctcttgcgcactcagctctacctcacgcacgcgcgcgcttggctggtcgctctcgcgcccgctctctgacttcttgggcccactcgtcaggaccactcccttctcccccgctcggtcgcaaacagaagccgcaggccgccgcgctcctctcggcgcgcatggcgggtgtgccgcgagctgcagaatccgttgacgccatgccctggattccaggccctgttccgcgggccggatgccctattccaccgcgcggacgggcccctggttcctccccatggcgagcttctctaccgcgtccctcgccgcgtgcggctcatcttcttccgctcttcttccccgaaatccgcgccgagctcaactacctcg

SEQ ID NO: 165068 - DNA, 464 bp, Zea Mays
tggcgacatcagcgttttagattgtaacatccgagttctactgagccacgtcggcgttatagaagtaacagccgagtggtgcttagcgacttcggcattttagaggtaacaaccgagtcgtttcgagccacgtcggtgttttagaaataacgaccgagtgacgactggcgaagtcagcgttttttgaggtaacagccgagtcgtatcagaccacgtcggtgttttagaaataacgactgagtgatgactaagcacttttggaaacggtgtccgacccgggaaaaccccatttgtatcacgtcgccgcacgcctctgcattctaagccctagcctcacttttgcctccgaatttcctctgttttcctttgatttcacttccgctcagcccgccaacgagattgcgatggcgcccaagcggaagagtcagaattctgctgcagcgatcattcctcctatcgatttc

SEQ ID NO: 165069 - DNA, 651 bp, Zea Mays
cacacacacacaccggcacaccacgtcaccaccacagctgccagccatacgctgtacgcttacagcttccgggcccgaatttcaggcaggcccataactgtgaacgttgttaccgaatcgtctaccaccgttgttaggcttggcccagttgcgggtcctttcaagcaacaagtcttgcccatcggctcagctcatgatccgacggccaccgtttcgcacatcttttagggttccctctcacggccgccgttaaatggccaggcgctgcccggtgccttcttcgatggtcgcacactcacgtgaagctaagccgcctggcggcgggcgggtggcgttccccggcctactgctttgataccgaatcgggctacgctttttctcccctttgatttctttgctcgtctgtcgttgttggtcgccttttctttcttgcatctcgtttcttaatcttgggagcagtgatgagatcatttttgctgtatgatcttcgagacgtgattatcgatctctatattgctacgttcttgctgagctcctgccacaatgcgcacatatcccatttttagttctacttggattcaggctttagtctgtttttggcgtgttactgttaccgaaacactctggattcagaaacggggatctgcctgc

SEQ ID NO: 165070 - DNA, 1074 bp, Zea Mays
ctctacctgacacgaactggtacgaaacataagccatcggattgaggatcaacgctctagatattaaagcaccgaactcgccactcaaccctccatgttctgatctaccgtcgtgattcccccatccgaaacggtacacaagcgatttaatcgtgaccctccgccaaagctctaatggacgcgatttgatgtcaccaaactttataccgtgatatgatctgtgacaccccagtatcacctagggtttcttcgttaagctaacccaaaccattatcacatgtgaaccaaatgaagggatgaacatcaaacaaaaaaattaataacaaaggttgaagtaagtctttttatcttaagaaattctccttaatcatgtcatgaacctcaaggtaagaagaactctcaaaccctaattaatcttaagtggaccatttaagcacataaagggcatttgggaaaagacttgggagaaaaatacaaattttggtaaaaaaaacaaataacaaagttttagtacactaaataaccaacaaaatatagtcagaaagttttgccatttgaatttttcaaaatccctaaatcagtccctgaactaatgcacttaggaaaaattcagaaattcagaaatctgaatttcagccccattccaaagatcgatcgcgttctctgtttttcaaaacttaaatcaaacaagtccaaatagcaaagtggtgccaaatttcctggaacacaccatgacaaagtttggaaacctctctccatcgtttgacacgatattgacatggatttacctcgggacttgaccttgtgacactgccaccttagcgacgcgacaactctctgtacacagccccaaaccgctcgacttccacacataaacgacaaagctctgtcgcgagagaaaatcttgtgcagtgatcatgcccaaatacgcgaagatctccaacctatgagcgtttaaactcgggcagaagcaaagagccacgtgctcgacgccgtgtcaggccagccgagcgcggactggccgtggcagcgtgtgccccgcgcgtctgcacctcgccctcgcctataaatgcc

SEQ ID NO: 165071 - DNA, 295 bp, Zea Mays
ggaccatcccctcgtggcatcaatttggatttgctctgagagaagaaaacgcctctttgcacaagtgaatccaaaccacgtcctccggtgcaaataacactttcttcctatgcttgttcatacttgcagccttgcgcactgctttgagcttaattgcttcattggtcttctcatgtatctttttttatataagcagcacgcttggaggcttccatattggttctttcattcgttggagctggccaatccttgattgctttcaccttggattcatccacttctattccctttcctg

SEQ ID NO: 165072 - DNA, 537 bp, Zea Mays
ccgtactgtcaatggcaactgagccagtatccaagccagaaattttaggaaataaaacattcttgtagatgagtcaaggcagatcgtcccaagtagtagtcgaaagagattcacggctggtggaatggaaggcaaggcacttttattattgtctttcaaacaattagctgccagaccagacaaggaaatgcagcataccaactaagctcttgtgaagttgtgatcaaccccctactacatttccctatccaaggtctaatgctaagtaaaccatccgccatgcattgtccctacctagtgaacattcctttatgatgacctttgctgcgtcatgattacagcaagaatttgataggtaacattgcacgcgcacgccgttgatggattgtccggttgttatggagtccttttaccttggaaatccagctgctttctgtagtggtaagcaagctgttgtttccagaagctgggcagatagtgcggagttcacatcagctgaactaattccgtcctactgcatgcccccctccatgcgag

SEQ ID NO: 165073 - DNA, 443 bp, Zea Mays
ggcctatctgtttaggactctaccttatctctcctatttcaataagattgttggggatatgatccccggtccctagggtccatctgtcagggagcacgctaagggaaagcctctggtcactgggacccattggccagacagaggacatggataacgtctaccctggaggcacccgcctcccatacaaaccccacggcaccgagcctgggtcgggtgtggcagaacctaacaaggggaccgggcgtgtcgaatggaaaccactcgagtggatcctacttccggaccaggactgacctatcatatatgatcggcagcattaactacgctagacaccaagtcgcagtagaggcaccaatccacctcccactcataacttacaaaccccttgggccacaaagtactcatgacctacgaacctctcatgctacgatgcatttaaggcc

SEQ ID NO: 165074 - DNA, 406 bp, Zea Mays
atatttgttctgaaaatcggtgcgtccgatgattatttttaattcattgctcgcgcgaatacgaaattcggaaagcccgacccactctgatgaattctatcgtgactaaatttatctgaactcgatgactaagttttcagtgtaacataatttaacccccttttgtcatccgtgacatcgcgtctatggattttaattgaattgttctctagtcgagtgttcgagtagcgaacggaattcgtctaaattcaactaaatcaaacatcgactaaaatatcgaatccaatctcgtctagtttaatctgtctacatctcgctcctgtgacgatgctaacatcgtctccgggaattctgattgcgatgccgcattcggctcgcacagtttaagatttatttatttctaaag

SEQ ID NO: 165075 - DNA, 287 bp, Zea Mays
gcaaactgtgttatacgcagctcggcatgcttctacgtcattcccaacagcaggagacgaccttctgatgttgaagcgagaccaaatagggcgttgaatgatcccctttatatcttctctttcaactaagtcgttcttcacataaaaccactcttgcatccaggctcctggccacctcttccgaaatgtcgagactggagagctcacatcagagcgaggtacgaagccgtaacaaccaaaattattatgatattgctctttgccagtagccttcgtctcataggaca

SEQ ID NO: 165076 - DNA, 761 bp, Zea Mays
ccttgctagccaagacttcctcagcttctctcacctctcaaacaaggccatctaggtggaaagagctcgagaaaaggaaagaggtcacctcaagagaaagtttcagattctccgagctcaacaagaagacaggcaccagagggttcgatcttttgggtttcctcccaaggggtcaaatctcagcaagccagcaggatcttctctgtcgcgtttcaaccatcttggtcagagttccttccacactcagtccgtcgcaagcagccaacctccaaccaatgcttgttggcactgtggtgaccccggtcacttcaagaataattgtccacaactgaagccgaccgcacctgcctactccaacttagtgaatggccccaagaatgttacaacacccacctccaaggcaccctccaccaacagtcagttaagcaggtcgcagttccacagcacggcttgagtgaaccacgtcgatgcccaggaagctcagcaaacccctagagtagtactaggtgagttcctagtcgaatttgcccctgccgcagtacttttttattctggagcatctcattctttcattgccactagttttgtggaaaggcatggcattcccactacaccattagaagaacctctgatcatccgaaccatagggtcagaccttctgtgccacctcaggtgctcccaagtcagaattcttttaagtggtgtagtattcctggcagacttagtcgtactaccatcccacggaattgatgaaatcctag

SEQ ID NO: 165077 - DNA, 868 bp, Zea Mays
acgcgacccggactcgctccgtggcggggtcgtagaagcgatacgccttcgctcctgcttcatagccgatgaagaccaccttccgcccacggtcctccagcttggtcgggtgcgggcgcaggtgtttgatgaaggcgacgcacccgaacactcttaggaagtgcacgggtggtttcttcctgtaccacgcttggaacagtgtgaggccgtcgagtgtggctgttggtgaccgattgagcaggtacactgcggtgtgcactgcctctccccagaagaagtcgggcatgcttcgagcgcgcaggatggagcgcgccgtgttcaccaccatctggtttctcctctctacgacgccattctgttgaggagaatgcggtgcagagtgttgacaaaggattcccttgccggcacagtactcaccgaattggactgaggtgaactctcctccgttgtcagtgcgaaggaccttcagcttcttgcctgtttcccgctcgaccttcgcctgaaaactcatgatggccgctggtgcatctgacttggaacgcatcaaggtgagccacatatacctgctcatgtcatcgaccaatagcaggaaataggcgttcccggccggcgtcggtggagtgatcggcccgcagagatctccatggaccagctcgagctgatcctttgcccggaacttggcagcctgcgggaatggtgcccttttttgcttggcgagaacgcagtcctcgcaaacttgctcgatgtggtcgatctccggcagccccttcaccatctcgcctcggctgagtttgcgcagtgaacggaagttcaagtgcccgaacctctcgtgccatctccaggcaatgtcgccaacacgcgcagtgag

SEQ ID NO: 165078 - DNA, 569 bp, Zea Mays
ggcctggtttatctgagatacacttatcgctacagaagtcagtttgacgagccgaatgatgattggcttgaagccgttgaggcgaccagtgataagatgcaaggaacttacacgaaggaccttacacgaaggtagaggacgaagccatgaccactgccttcggcgctcgcgacaaaaggaggctgaacagagtttttgatgtgattggatttatttatcccgagtactgttttcccgctcgaaaacaagggtcaaaaagaaaaatggcagtccccttccaccgtgctgaagccgaagagagctaaggttttggctcgtaggctgaagctacactctttagagaagacaattgcagtgcttgctacagagaagatggagattgtttaatatgctaaagctaccctcttggcttccgagataatacatgttgtgcctgtcgaagctactatcggtctggttaaagaaacagaagtaaagagctcaaagacagaggatcattcgaatctgcagagtcccccaaccacaatagggttgccgaagttaacaactgctgcagcaataactcccag

SEQ ID NO: 165079 - DNA, 498 bp, Zea Mays
gcaatcgctcataagccttttgcacagcaacaaatttctcccttccttcagggttcttgtctggatgatattttattgctagctttcggtattggcgcttaagcttctcctcatcaatgttttcaattttgtttccggaattagccaaacttaagtcagatgactgcttgatgctaccgttctcaccaagcacaagatcatcaagagaaatctcgagtatcttacagacttcttcttcagataaatccattggacgacgagttaactcttcacgccacatcaccaacaatgactgcaaaaactccacatgttctacaatgggccagttaggaaacctaatctcatcacataggttgcggaggtagtaacgatggcaccacatctcatctttcagattcgggtaagtcacaggtggcataggagcataatcatacaatgaatggcaatgctgtgccaatttctgaggaaattcaccgagatgctgcagaacctgccaaa

SEQ ID NO: 165080 - DNA, 708 bp, Zea Mays
gtgtatgacgcgtggggcccaccactcatccaccctcgcttgaccagcccagcttacctgggacgcgctgaccgacgggtcgtgcgcctccaatttctcgtcgtcgacgtgcttccgccgcagtaccgctcgcgccgtggtcacagaattcgaggccaatgcgactggtaagaatcctctctaccatctcgttaccacgttttctagtctcgtcaccggttgtaagtgagtttcgtgcgcactggcgggatttggccgtcggccgaacatggcgccgccgcggtggccgacttctaccgcggtctgagttccagaaagggggagagggggaaatcacgtgcgcggcgtgtgtgggccgttgatgcgttgcacaacggccaagattagaggatcacgcaccttttcgcgcgatcgattagggccgtggatctaaaatccgatgatcacgagtcgatttcggttaagagaatctgagccgtagatataggatccatcggctgtcattgtgtaccggctcagttaatggcagatttaatttgtgacgtccacttctgatccgacggctgattacggcccataccccttcgccgagccaaaactgcaaaatagccctcggttttctctcaaataaacccgcagtccattgcgcctgtagcctgagtcttgggtatctttgtattttagcccctatggttctggtaattagcg

SEQ ID NO: 165081 - DNA, 1001 bp, Zea Mays
aaaaatcctccgcgaagtccacaacggaacttgtggctcccactcaggacctagggccctcgctgccaaggtgattcaacagggattctactggcccacaataatttgtactgccaatcgagtcacaaggtcatgcgaagcatgccaaaaattctcccctcgctcgggcagcccctcgcaattcaccaaacttatcacccacacatggccatttcagcgctgggggctggacatcgtcggtccactgcctacagctcaagggaacctcaagtttgccttcgtcgccgtcgaatatttcacaaagtggattgaggccagggcagtatccaccataacatcgaagaccgcacaaaaattcttctagcaaaacattgtttgccgcttcggagtctcgtccgaactcacagtcgacaatggcaaacaattcgatagccaagacttcagggatttctgttcttccatcggcaccaagcctgtcttcgcctcggtgtaccacccacaatccaacgacatcgttgagcgtgctaatggcaagatttttatcgctatcaagaaaagacttctcgacgataaaaagggcaaatgggtcgaccaactaccggaagtggtatgggccctaaacactacagaatgccgggcaaccgggttcacacctttccacctattgtatggatccgaggccatgacgccgcaggagataaagcatggatcgcccaggacaaacacatcagcaatccccgatgtcgacgaaccaacttccaaagatctcatcgacggagaccgcgtcctcgccctgcaggctctcgacagatatcatgcccaaaccaaggcctggcgtgacaacgcaatcgtcccaagggaattcaataaaggagaccttgtactcatccggaccacccagacagaatcatggggcaagctggagccgaaatgggaaggtccattcattgtcaagacgaaggcatcccccagcgcgtacaggctggtaacaccttccgacg

SEQ ID NO: 165082 - DNA, 606 bp, Zea Mays
aatatggaacgtccgattaggccacaacggcccggattaaattatcctatcacacgaaccggtacgtgattcaggtcgatggatctaggatcaaaggtcaggattttaaacggtcgcgattcgatcggagacgtccatggtcagatcatcggccatcaccaatcctaccctgaaatggtatatacgtctgatctcgaccgtagattagtatctaacggccctgcgcccttcttcctcccaccagagaacatccccggcggcagactacgcaccgcggcggcgccatgaccttggcacagcgcccgcgatcccaggtggccaagcacagatccgaatagcccaacgcatgacagggaccaaggcaaatttagcatacggactcataccgaaggtagtggtgacggtggtgctgtcgacgacgcgatgcggagccgcggcggaacaagtgtggaagcgggccacggcggggtcctggacgacgaagtgcggcgacttccccaccagtggcggcccccaattcctcctccacggcgagcagcgacccagcggcgagcaccgaatctcaaccagggcaagcgatcacgccgaccacaacttgcgccccgg

SEQ ID NO: 165083 - DNA, 716 bp, Zea Mays
gccaaaggccataacggacaagggtgtaagagaaaagatgaaggcatagaagagcaagtggtacaagtacaacaaggaatggagttaagtcaaggcttgcacacggtaaagaagaggatgttgtcaagggtgagataagtaaaacaccgctctcaaattgggataagagattggagattttagatagtagacatagtgtaatcaccagggttagatcgagagatgaggaagctaaaggcaacaacaaatggaaacacaaagaaggatggggttaaaaactcgcaagcggcaaagaaaaggatacaactaagtgaaaaataggtaaagttcaacgctcagattgagatggaagacatgagattttaaatgacaagtataagataaacatcaatgaaagatatagaggtgtcaagggtaaagatgataataacgaagagcatagcaaaggatagagttaaggcaagactcgcgaagttatgaagtggagaaaataatcaagggtacgataggcaaggttccaataggagggtttaggtaaaaattcattaccgaaggaagttatatggaaacaacaagatcaccaaggatgtgcgaaatgaaatggtcgctcatggaccatcaagaagcaagggtgatcaagggaatattaactgaaaggttttgaatagtcattgggatatgaaggtaagcatatataagaatattagtatgcaaga

SEQ ID NO: 165084 - DNA, 515 bp, Zea Mays
gcgggatgtggagaagaagccaagcccgagcgcaatttataggccaacaaccggaattggatgaggaccgcggtctttagacggtgcaggtgagctcgccgcgcggcggaacccgatgatggcacggtggccgccgtttaaccggagcccgccaccgcagagagttactgccacgtaactgaggatatttaccgcggcctccagtccatcccgaccgccgtgacatccttatcaccggcggggtccaggtccttatccaccacgcgatattttctgaagacggtgaacagtgcaccagattcagtaaaaggcttgtctgacagaccaagttggagcttgattttctcccaaattcctgtggtaacacaagtcaatctttgcagcaaacttgtagagcattataccaactacaaccttgctatggcaaccataggtagatttccactggatcatgctcagaatttagcttgaagtcgatgttagtccactgctagtctgaaaattcagaccataac

SEQ ID NO: 165085 - DNA, 387 bp, Zea Mays
ttcgcggcgtggtgctctggtgggccattgccgtcgctcatgggcgcgccgctgcgagcgtggtgtgcgcggccgagcttggctgctggaggatgaagatgatcgcgccatcgtcgatcgtatgttgaacggttcggatttggtctagccatcggatgtggttgggtgaatctgagccatcggttgcgtgtcgggcggctgtgatcgtgctctagtctatatgaagggaccggggaccgttcgatccacagcggacggtagatattagaagataacgtttcgatacatcgccaacctaatctgggccgtgcgacgtggatccaacgactctgggtgcttcataccccttcgcgcatgtcaagttgcaaaagaacccctggaaccttt

SEQ ID NO: 165086 - DNA, 448 bp, Zea Mays
aaagagaatcttaatcagaaagtggagaagtataagtgctttcaccaagacagtaaggggatactatggtttgaagacagattggtggttcctaaaaatagagacctcaagaagaaaatcttggatgaggcccatctttccaaattctccatgcacccgggaagcaccaagatgtaccttaatctgaagcccctatattggtggaccaggatgaaaagggagatagcccaatatgtatcagaatgtgacacatgtcagaggataaaggcaagccacttaaaatcagctggtgccttgcaacccctatcgataccttcatggaaatgggatgacatcagcatggatttcattgtgggtctacccaacacctctcgacatcatgattcaatctggatcattgtggaccgattaacaaaagtggcacattttcttccagtgcacaccaccg

SEQ ID NO: 165087 - DNA, 337 bp, Zea Mays
aatgagggttcaatagggatttctgaaattcagaattctgagtttcagcccttgagccaaagaccgagcgtgttcaccttgatccctagctcaaatcctaatgcccccattgacaaaaatgtgcctaactaacccctctacctcatatcagaagatggcatcgggacgcgtgatctggacacgtcaaacccaggatcttctctctgtgcgcgacagtgagacaaacccgatttctcccctctctatctcttgatccagtcagcaaaacctgcaagcctcgacacacaaacgacaaaggaatgttagggaaagagatctctcaacaggatcatggcca

SEQ ID NO: 165088 - DNA, 295 bp, Zea Mays
ccctctagctgtgccacgtgtggccccgttgatcccgcatgcacctctacccatgccgcacgtgacctcattgacctcgcctgtgcctctacccacgccacgtgtgaccctatcgaccttgtccgtgccatgtgcagccccattgacaagcgcgaccccgtcgcctgcccccgtctagtgtgctttgctgaccccacccttgtctaccaccatcatgggtaggtcgctccctcagttcccaccaacccgcctactcatcccagtaccgagcccctggtgtaccacccggtcgcca
